United States Patent Application Publication US 2014/0004565 A1 - sequence listing, part 79

SEQ ID NO: 1935953 - RNA, 19 nt, Artificial Sequence
  Description of Artificial Sequence: Synthetic oligonucleotide
caaacgagcacugcuccag

SEQ ID NO: 1935954 - RNA, 19 nt, Artificial Sequence
  Description of Artificial Sequence: Synthetic oligonucleotide
aguccaguuguugacagaa

SEQ ID NO: 1935955 - RNA, 19 nt, Artificial Sequence
  Description of Artificial Sequence: Synthetic oligonucleotide
gugccugagaggaaacugg

SEQ ID NO: 1935956 - RNA, 19 nt, Artificial Sequence
  Description of Artificial Sequence: Synthetic oligonucleotide
cucagagugaucuaucagu

SEQ ID NO: 1935957 - RNA, 19 nt, Artificial Sequence
  Description of Artificial Sequence: Synthetic oligonucleotide
aagauccauuaaccaccuc

SEQ ID NO: 1935958 - RNA, 19 nt, Artificial Sequence
  Description of Artificial Sequence: Synthetic oligonucleotide
uaagggcuuccaugauugg

SEQ ID NO: 1935959 - RNA, 19 nt, Artificial Sequence
  Description of Artificial Sequence: Synthetic oligonucleotide
ugcacagucuccgaccacu

SEQ ID NO: 1935960 - RNA, 19 nt, Artificial Sequence
  Description of Artificial Sequence: Synthetic oligonucleotide
caaaugcagaguaaaugaa

SEQ ID NO: 1935961 - RNA, 19 nt, Artificial Sequence
  Description of Artificial Sequence: Synthetic oligonucleotide
cuccacguccguuugccag

SEQ ID NO: 1935962 - RNA, 19 nt, Artificial Sequence
  Description of Artificial Sequence: Synthetic oligonucleotide
uugaaccugaagauccauu

SEQ ID NO: 1935963 - RNA, 19 nt, Artificial Sequence
  Description of Artificial Sequence: Synthetic oligonucleotide
ugcagacuuuauagcaggu

SEQ ID NO: 1935964 - RNA, 19 nt, Artificial Sequence
  Description of Artificial Sequence: Synthetic oligonucleotide
guuugccagugacaggggc

SEQ ID NO: 1935965 - RNA, 19 nt, Artificial Sequence
  Description of Artificial Sequence: Synthetic oligonucleotide
auggcuccaaccaaaguga

SEQ ID NO: 1935966 - RNA, 19 nt, Artificial Sequence
  Description of Artificial Sequence: Synthetic oligonucleotide
gcugaccguacacuggugg

SEQ ID NO: 1935967 - RNA, 19 nt, Artificial Sequence
  Description of Artificial Sequence: Synthetic oligonucleotide
uaaccaccucaaaucuuca

SEQ ID NO: 1935968 - RNA, 19 nt, Artificial Sequence
  Description of Artificial Sequence: Synthetic oligonucleotide
uacugauggcuccaaccaa

SEQ ID NO: 1935969 - RNA, 19 nt, Artificial Sequence
  Description of Artificial Sequence: Synthetic oligonucleotide
ucuccgaccacuggugggc

SEQ ID NO: 1935970 - RNA, 19 nt, Artificial Sequence
  Description of Artificial Sequence: Synthetic oligonucleotide
gauccauuaaccaccucaa

SEQ ID NO: 1935971 - RNA, 19 nt, Artificial Sequence
  Description of Artificial Sequence: Synthetic oligonucleotide
aucaccgccacuggcaucu

SEQ ID NO: 1935972 - RNA, 19 nt, Artificial Sequence
  Description of Artificial Sequence: Synthetic oligonucleotide
accuguuaagggaaacauc

SEQ ID NO: 1935973 - RNA, 19 nt, Artificial Sequence
  Description of Artificial Sequence: Synthetic oligonucleotide
aaccaccucaaaucuucaa

SEQ ID NO: 1935974 - RNA, 19 nt, Artificial Sequence
  Description of Artificial Sequence: Synthetic oligonucleotide
aucuucccggccucacucg

SEQ ID NO: 1935975 - RNA, 19 nt, Artificial Sequence
  Description of Artificial Sequence: Synthetic oligonucleotide
agacuccacguccguuugc

SEQ ID NO: 1935976 - RNA, 19 nt, Artificial Sequence
  Description of Artificial Sequence: Synthetic oligonucleotide
ucacccuguucagugaacu

SEQ ID NO: 1935977 - RNA, 19 nt, Artificial Sequence
  Description of Artificial Sequence: Synthetic oligonucleotide
aaagcccaagcuggccuuc

SEQ ID NO: 1935978 - RNA, 19 nt, Artificial Sequence
  Description of Artificial Sequence: Synthetic oligonucleotide
ucuucccggccucacucgc

SEQ ID NO: 1935979 - RNA, 19 nt, Artificial Sequence
  Description of Artificial Sequence: Synthetic oligonucleotide
uacacuggugguguggcaa

SEQ ID NO: 1935980 - RNA, 19 nt, Artificial Sequence
  Description of Artificial Sequence: Synthetic oligonucleotide
gacuccacguccguuugcc

SEQ ID NO: 1935981 - RNA, 19 nt, Artificial Sequence
  Description of Artificial Sequence: Synthetic oligonucleotide
gaaccugaagauccauuaa

SEQ ID NO: 1935982 - RNA, 19 nt, Artificial Sequence
  Description of Artificial Sequence: Synthetic oligonucleotide
cauuaaccaccucaaaucu

SEQ ID NO: 1935983 - RNA, 19 nt, Artificial Sequence
  Description of Artificial Sequence: Synthetic oligonucleotide
ucccggggaaaucucucug

SEQ ID NO: 1935984 - RNA, 19 nt, Artificial Sequence
  Description of Artificial Sequence: Synthetic oligonucleotide
ucguugcaucucuaagggc

SEQ ID NO: 1935985 - RNA, 19 nt, Artificial Sequence
  Description of Artificial Sequence: Synthetic oligonucleotide
cucucucugcuacucgaag

SEQ ID NO: 1935986 - RNA, 19 nt, Artificial Sequence
  Description of Artificial Sequence: Synthetic oligonucleotide
cuugcauuauucaugucau

SEQ ID NO: 1935987 - RNA, 19 nt, Artificial Sequence
  Description of Artificial Sequence: Synthetic oligonucleotide
ugaccguacacugguggug

SEQ ID NO: 1935988 - RNA, 19 nt, Artificial Sequence
  Description of Artificial Sequence: Synthetic oligonucleotide
cuggugguguggcaacucc

SEQ ID NO: 1935989 - RNA, 19 nt, Artificial Sequence
  Description of Artificial Sequence: Synthetic oligonucleotide
acuggacauacaaugcgcu

SEQ ID NO: 1935990 - RNA, 19 nt, Artificial Sequence
  Description of Artificial Sequence: Synthetic oligonucleotide
auacaaugcgcuucaucuu

SEQ ID NO: 1935991 - RNA, 19 nt, Artificial Sequence
  Description of Artificial Sequence: Synthetic oligonucleotide
uuaauacugauggcuccaa

SEQ ID NO: 1935992 - RNA, 19 nt, Artificial Sequence
  Description of Artificial Sequence: Synthetic oligonucleotide
uacacaggguggugugugc

SEQ ID NO: 1935993 - RNA, 19 nt, Artificial Sequence
  Description of Artificial Sequence: Synthetic oligonucleotide
guggcaacuccuccaggag

SEQ ID NO: 1935994 - RNA, 19 nt, Artificial Sequence
  Description of Artificial Sequence: Synthetic oligonucleotide
cugggugcauuuuaucaca

SEQ ID NO: 1935995 - RNA, 19 nt, Artificial Sequence
  Description of Artificial Sequence: Synthetic oligonucleotide
aacuggggcaggcucugau

SEQ ID NO: 1935996 - RNA, 19 nt, Artificial Sequence
  Description of Artificial Sequence: Synthetic oligonucleotide
caucuucccggccucacuc

SEQ ID NO: 1935997 - RNA, 19 nt, Artificial Sequence
  Description of Artificial Sequence: Synthetic oligonucleotide
ucucugcuacucgaagcag

SEQ ID NO: 1935998 - RNA, 19 nt, Artificial Sequence
  Description of Artificial Sequence: Synthetic oligonucleotide
gucuccgaccacugguggg

SEQ ID NO: 1935999 - RNA, 19 nt, Artificial Sequence
  Description of Artificial Sequence: Synthetic oligonucleotide
agacuuuauagcagguggu

SEQ ID NO: 1936000 - RNA, 19 nt, Artificial Sequence
  Description of Artificial Sequence: Synthetic oligonucleotide
ucucucugccagauucgcu

SEQ ID NO: 1936001 - RNA, 19 nt, Artificial Sequence
  Description of Artificial Sequence: Synthetic oligonucleotide
ggugguauccucuuccaaa

SEQ ID NO: 1936002 - RNA, 19 nt, Artificial Sequence
  Description of Artificial Sequence: Synthetic oligonucleotide
gguggugugugccacagaa

SEQ ID NO: 1936003 - RNA, 19 nt, Artificial Sequence
  Description of Artificial Sequence: Synthetic oligonucleotide
caguuguugacagaaacua

SEQ ID NO: 1936004 - RNA, 19 nt, Artificial Sequence
  Description of Artificial Sequence: Synthetic oligonucleotide
uuugaaccugaagauccau

SEQ ID NO: 1936005 - RNA, 19 nt, Artificial Sequence
  Description of Artificial Sequence: Synthetic oligonucleotide
uccugguucucgcacugau

SEQ ID NO: 1936006 - RNA, 19 nt, Artificial Sequence
  Description of Artificial Sequence: Synthetic oligonucleotide
uagaugcauuaauacugau

SEQ ID NO: 1936007 - RNA, 19 nt, Artificial Sequence
  Description of Artificial Sequence: Synthetic oligonucleotide
uucucgcacugauccagca

SEQ ID NO: 1936008 - RNA, 19 nt, Artificial Sequence
  Description of Artificial Sequence: Synthetic oligonucleotide
agguggaucuugaacucag

SEQ ID NO: 1936009 - RNA, 19 nt, Artificial Sequence
  Description of Artificial Sequence: Synthetic oligonucleotide
uauagaucccggggaaauc

SEQ ID NO: 1936010 - RNA, 19 nt, Artificial Sequence
  Description of Artificial Sequence: Synthetic oligonucleotide
agcuagaagcugaccguac

SEQ ID NO: 1936011 - RNA, 19 nt, Artificial Sequence
  Description of Artificial Sequence: Synthetic oligonucleotide
agaaugucuuguguucaga

SEQ ID NO: 1936012 - RNA, 19 nt, Artificial Sequence
  Description of Artificial Sequence: Synthetic oligonucleotide
uguggcagagucggcuugc

SEQ ID NO: 1936013 - RNA, 19 nt, Artificial Sequence
  Description of Artificial Sequence: Synthetic oligonucleotide
cagucuccgaccacuggug

SEQ ID NO: 1936014 - RNA, 19 nt, Artificial Sequence
  Description of Artificial Sequence: Synthetic oligonucleotide
ccauucuuguggcagaguc

SEQ ID NO: 1936015 - RNA, 19 nt, Artificial Sequence
  Description of Artificial Sequence: Synthetic oligonucleotide
gagugaucuaucaguuuuc

SEQ ID NO: 1936016 - RNA, 19 nt, Artificial Sequence
  Description of Artificial Sequence: Synthetic oligonucleotide
gaacucagagugaucuauc

SEQ ID NO: 1936017 - RNA, 19 nt, Artificial Sequence
  Description of Artificial Sequence: Synthetic oligonucleotide
auggugguauagaucccgg

SEQ ID NO: 1936018 - RNA, 19 nt, Artificial Sequence
  Description of Artificial Sequence: Synthetic oligonucleotide
gguucucgcacugauccag

SEQ ID NO: 1936019 - RNA, 19 nt, Artificial Sequence
  Description of Artificial Sequence: Synthetic oligonucleotide
caugcaaacgagcacugcu

SEQ ID NO: 1936020 - RNA, 19 nt, Artificial Sequence
  Description of Artificial Sequence: Synthetic oligonucleotide
acucgaagcagaaugucuu

SEQ ID NO: 1936021 - RNA, 19 nt, Artificial Sequence
  Description of Artificial Sequence: Synthetic oligonucleotide
ccaaccaaagugauccaug

SEQ ID NO: 1936022 - RNA, 19 nt, Artificial Sequence
  Description of Artificial Sequence: Synthetic oligonucleotide
gaucuugaacucagaguga

SEQ ID NO: 1936023 - RNA, 19 nt, Artificial Sequence
  Description of Artificial Sequence: Synthetic oligonucleotide
aaggcgcgucuccucguug

SEQ ID NO: 1936024 - RNA, 19 nt, Artificial Sequence
  Description of Artificial Sequence: Synthetic oligonucleotide
cuguuaagggaaacaucca

SEQ ID NO: 1936025 - RNA, 19 nt, Artificial Sequence
  Description of Artificial Sequence: Synthetic oligonucleotide
gcauuaauacugauggcuc

SEQ ID NO: 1936026 - RNA, 19 nt, Artificial Sequence
  Description of Artificial Sequence: Synthetic oligonucleotide
gacuuuauagcagguggua

SEQ ID NO: 1936027 - RNA, 19 nt, Artificial Sequence
  Description of Artificial Sequence: Synthetic oligonucleotide
uagaucccggggaaaucuc

SEQ ID NO: 1936028 - RNA, 19 nt, Artificial Sequence
  Description of Artificial Sequence: Synthetic oligonucleotide
ggcauugauggugguauag

SEQ ID NO: 1936029 - RNA, 19 nt, Artificial Sequence
  Description of Artificial Sequence: Synthetic oligonucleotide
ucuacacaggguggugugu

SEQ ID NO: 1936030 - RNA, 19 nt, Artificial Sequence
  Description of Artificial Sequence: Synthetic oligonucleotide
cucacucgccgccaccgcc

SEQ ID NO: 1936031 - RNA, 19 nt, Artificial Sequence
  Description of Artificial Sequence: Synthetic oligonucleotide
cuguccuacugaccaaauc

SEQ ID NO: 1936032 - RNA, 19 nt, Artificial Sequence
  Description of Artificial Sequence: Synthetic oligonucleotide
uuauagcaggugguauccu

SEQ ID NO: 1936033 - RNA, 19 nt, Artificial Sequence
  Description of Artificial Sequence: Synthetic oligonucleotide
aucccggggaaaucucucu

SEQ ID NO: 1936034 - RNA, 19 nt, Artificial Sequence
  Description of Artificial Sequence: Synthetic oligonucleotide
ggacauacaaugcgcuuca

SEQ ID NO: 1936035 - RNA, 19 nt, Artificial Sequence
  Description of Artificial Sequence: Synthetic oligonucleotide
ugcucacccuguucaguga

SEQ ID NO: 1936036 - RNA, 19 nt, Artificial Sequence
  Description of Artificial Sequence: Synthetic oligonucleotide
augaaccagggcuguuuga

SEQ ID NO: 1936037 - RNA, 19 nt, Artificial Sequence
  Description of Artificial Sequence: Synthetic oligonucleotide
gguauaagcuugagagacc

SEQ ID NO: 1936038 - RNA, 19 nt, Artificial Sequence
  Description of Artificial Sequence: Synthetic oligonucleotide
gaaagccacguagucgguc

SEQ ID NO: 1936039 - RNA, 19 nt, Artificial Sequence
  Description of Artificial Sequence: Synthetic oligonucleotide
gugcauuuuaucacaccca

SEQ ID NO: 1936040 - RNA, 19 nt, Artificial Sequence
  Description of Artificial Sequence: Synthetic oligonucleotide
gguaucuugcauuauucau

SEQ ID NO: 1936041 - RNA, 19 nt, Artificial Sequence
  Description of Artificial Sequence: Synthetic oligonucleotide
ccugaagauccauuaacca

SEQ ID NO: 1936042 - RNA, 19 nt, Artificial Sequence
  Description of Artificial Sequence: Synthetic oligonucleotide
cagauucgcuguccuacug

SEQ ID NO: 1936043 - RNA, 19 nt, Artificial Sequence
  Description of Artificial Sequence: Synthetic oligonucleotide
auccauuaaccaccucaaa

SEQ ID NO: 1936044 - RNA, 19 nt, Artificial Sequence
  Description of Artificial Sequence: Synthetic oligonucleotide
agccacguagucggucagc

SEQ ID NO: 1936045 - RNA, 19 nt, Artificial Sequence
  Description of Artificial Sequence: Synthetic oligonucleotide
aggacaugcagcagugccu

SEQ ID NO: 1936046 - RNA, 19 nt, Artificial Sequence
  Description of Artificial Sequence: Synthetic oligonucleotide
auggagguauaagcuugag

SEQ ID NO: 1936047 - RNA, 19 nt, Artificial Sequence
  Description of Artificial Sequence: Synthetic oligonucleotide
acguagucggucagccugg

SEQ ID NO: 1936048 - RNA, 19 nt, Artificial Sequence
  Description of Artificial Sequence: Synthetic oligonucleotide
gaccaaagcccaagcuggc

SEQ ID NO: 1936049 - RNA, 19 nt, Artificial Sequence
  Description of Artificial Sequence: Synthetic oligonucleotide
ggcugcacagucuccgacc

SEQ ID NO: 1936050 - RNA, 19 nt, Artificial Sequence
  Description of Artificial Sequence: Synthetic oligonucleotide
ggacaugcagcagugccug

SEQ ID NO: 1936051 - RNA, 19 nt, Artificial Sequence
  Description of Artificial Sequence: Synthetic oligonucleotide
aauacaccuuucacagcuu

SEQ ID NO: 1936052 - RNA, 19 nt, Artificial Sequence
  Description of Artificial Sequence: Synthetic oligonucleotide
acaccuuucacagcuucuu

SEQ ID NO: 1936053 - RNA, 19 nt, Artificial Sequence
  Description of Artificial Sequence: Synthetic oligonucleotide
guuugaaccugaagaucca

SEQ ID NO: 1936054 - RNA, 19 nt, Artificial Sequence
  Description of Artificial Sequence: Synthetic oligonucleotide
uugcauuauucaugucauu

SEQ ID NO: 1936055 - RNA, 19 nt, Artificial Sequence
  Description of Artificial Sequence: Synthetic oligonucleotide
gcgaaggcgcgucuccucg

SEQ ID NO: 1936056 - RNA, 19 nt, Artificial Sequence
  Description of Artificial Sequence: Synthetic oligonucleotide
gaagauccauuaaccaccu

SEQ ID NO: 1936057 - RNA, 19 nt, Artificial Sequence
  Description of Artificial Sequence: Synthetic oligonucleotide
agcccaagcuggccuucgg

SEQ ID NO: 1936058 - RNA, 19 nt, Artificial Sequence
  Description of Artificial Sequence: Synthetic oligonucleotide
cuucccggccucacucgcc

SEQ ID NO: 1936059 - RNA, 19 nt, Artificial Sequence
  Description of Artificial Sequence: Synthetic oligonucleotide
gaucccggggaaaucucuc

SEQ ID NO: 1936060 - RNA, 19 nt, Artificial Sequence
  Description of Artificial Sequence: Synthetic oligonucleotide
gccagauucgcuguccuac

SEQ ID NO: 1936061 - RNA, 19 nt, Artificial Sequence
  Description of Artificial Sequence: Synthetic oligonucleotide
aggugguauccucuuccaa

SEQ ID NO: 1936062 - RNA, 19 nt, Artificial Sequence
  Description of Artificial Sequence: Synthetic oligonucleotide
gcuagaagcugaccguaca

SEQ ID NO: 1936063 - RNA, 19 nt, Artificial Sequence
  Description of Artificial Sequence: Synthetic oligonucleotide
accagggcgaaggcgcguc

SEQ ID NO: 1936064 - RNA, 19 nt, Artificial Sequence
  Description of Artificial Sequence: Synthetic oligonucleotide
gaguccaguuguugacaga

SEQ ID NO: 1936065 - RNA, 19 nt, Artificial Sequence
  Description of Artificial Sequence: Synthetic oligonucleotide
cugcucguuggggauuggg

SEQ ID NO: 1936066 - RNA, 19 nt, Artificial Sequence
  Description of Artificial Sequence: Synthetic oligonucleotide
guaaaugaaccagggcugu

SEQ ID NO: 1936067 - RNA, 19 nt, Artificial Sequence
  Description of Artificial Sequence: Synthetic oligonucleotide
cacccuguucagugaacuc

SEQ ID NO: 1936068 - RNA, 19 nt, Artificial Sequence
  Description of Artificial Sequence: Synthetic oligonucleotide
uaaaugaaccagggcuguu

SEQ ID NO: 1936069 - RNA, 19 nt, Artificial Sequence
  Description of Artificial Sequence: Synthetic oligonucleotide
agaucccggggaaaucucu

SEQ ID NO: 1936070 - RNA, 19 nt, Artificial Sequence
  Description of Artificial Sequence: Synthetic oligonucleotide
ccaauacaccuuucacagc

SEQ ID NO: 1936071 - RNA, 19 nt, Artificial Sequence
  Description of Artificial Sequence: Synthetic oligonucleotide
gucuuguguucagagucca

SEQ ID NO: 1936072 - RNA, 19 nt, Artificial Sequence
  Description of Artificial Sequence: Synthetic oligonucleotide
aucacacccaaaggacacu

SEQ ID NO: 1936073 - RNA, 19 nt, Artificial Sequence
  Description of Artificial Sequence: Synthetic oligonucleotide
ugccauccuuguuccaaua

SEQ ID NO: 1936074 - RNA, 19 nt, Artificial Sequence
  Description of Artificial Sequence: Synthetic oligonucleotide
agucggcuugccauccuug

SEQ ID NO: 1936075 - RNA, 19 nt, Artificial Sequence
  Description of Artificial Sequence: Synthetic oligonucleotide
caggugguauccucuucca

SEQ ID NO: 1936076 - RNA, 19 nt, Artificial Sequence
  Description of Artificial Sequence: Synthetic oligonucleotide
ccaaagguaucuugcauua

SEQ ID NO: 1936077 - RNA, 19 nt, Artificial Sequence
  Description of Artificial Sequence: Synthetic oligonucleotide
guauagaucccggggaaau

SEQ ID NO: 1936078 - RNA, 19 nt, Artificial Sequence
  Description of Artificial Sequence: Synthetic oligonucleotide
agagucggcuugccauccu

SEQ ID NO: 1936079 - RNA, 19 nt, Artificial Sequence
  Description of Artificial Sequence: Synthetic oligonucleotide
gcuuccaugauuggcugca

SEQ ID NO: 1936080 - RNA, 19 nt, Artificial Sequence
  Description of Artificial Sequence: Synthetic oligonucleotide
accguacacugguggugug

SEQ ID NO: 1936081 - RNA, 19 nt, Artificial Sequence
  Description of Artificial Sequence: Synthetic oligonucleotide
cccgaggcuggcuuccugg

SEQ ID NO: 1936082 - RNA, 19 nt, Artificial Sequence
  Description of Artificial Sequence: Synthetic oligonucleotide
gcccaagcuggccuucggg

SEQ ID NO: 1936083 - RNA, 19 nt, Artificial Sequence
  Description of Artificial Sequence: Synthetic oligonucleotide
ggcaagcugcugcucguug

SEQ ID NO: 1936084 - RNA, 19 nt, Artificial Sequence
  Description of Artificial Sequence: Synthetic oligonucleotide
uggggcaggcucugauaaa

SEQ ID NO: 1936085 - RNA, 19 nt, Artificial Sequence
  Description of Artificial Sequence: Synthetic oligonucleotide
cccggggaaaucucucugc

SEQ ID NO: 1936086 - RNA, 19 nt, Artificial Sequence
  Description of Artificial Sequence: Synthetic oligonucleotide
ugccagauucgcuguccua

SEQ ID NO: 1936087 - RNA, 19 nt, Artificial Sequence
  Description of Artificial Sequence: Synthetic oligonucleotide
gaccguacacugguggugu

SEQ ID NO: 1936088 - RNA, 19 nt, Artificial Sequence
  Description of Artificial Sequence: Synthetic oligonucleotide
ggcuuccaugauuggcugc

SEQ ID NO: 1936089 - RNA, 19 nt, Artificial Sequence
  Description of Artificial Sequence: Synthetic oligonucleotide
cagaauuugcagacuuuau

SEQ ID NO: 1936090 - RNA, 19 nt, Artificial Sequence
  Description of Artificial Sequence: Synthetic oligonucleotide
caagacuccacguccguuu

SEQ ID NO: 1936091 - RNA, 19 nt, Artificial Sequence
  Description of Artificial Sequence: Synthetic oligonucleotide
acaagacuccacguccguu

SEQ ID NO: 1936092 - RNA, 19 nt, Artificial Sequence
  Description of Artificial Sequence: Synthetic oligonucleotide
guggugugugccacagaac

SEQ ID NO: 1936093 - RNA, 19 nt, Artificial Sequence
  Description of Artificial Sequence: Synthetic oligonucleotide
ggugguguggcaacuccuc

SEQ ID NO: 1936094 - RNA, 19 nt, Artificial Sequence
  Description of Artificial Sequence: Synthetic oligonucleotide
ggcucugauaaaggaauaa

SEQ ID NO: 1936095 - RNA, 19 nt, Artificial Sequence
  Description of Artificial Sequence: Synthetic oligonucleotide
ggcagagucggcuugccau

SEQ ID NO: 1936096 - RNA, 19 nt, Artificial Sequence
  Description of Artificial Sequence: Synthetic oligonucleotide
guacacuggugguguggca

SEQ ID NO: 1936097 - RNA, 19 nt, Artificial Sequence
  Description of Artificial Sequence: Synthetic oligonucleotide
gcagagucggcuugccauc

SEQ ID NO: 1936098 - RNA, 19 nt, Artificial Sequence
  Description of Artificial Sequence: Synthetic oligonucleotide
cagggcuguuugaaccuga

SEQ ID NO: 1936099 - RNA, 19 nt, Artificial Sequence
  Description of Artificial Sequence: Synthetic oligonucleotide
cucaaaucuucaagggcuu

SEQ ID NO: 1936100 - RNA, 19 nt, Artificial Sequence
  Description of Artificial Sequence: Synthetic oligonucleotide
cugaccguacacugguggu

SEQ ID NO: 1936101 - RNA, 19 nt, Artificial Sequence
  Description of Artificial Sequence: Synthetic oligonucleotide
cuccaaccaaagugaucca

SEQ ID NO: 1936102 - RNA, 19 nt, Artificial Sequence
  Description of Artificial Sequence: Synthetic oligonucleotide
gggcugaagguggaucuug

SEQ ID NO: 1936103 - RNA, 19 nt, Artificial Sequence
  Description of Artificial Sequence: Synthetic oligonucleotide
caucugcaauuauggaggu

SEQ ID NO: 1936104 - RNA, 19 nt, Artificial Sequence
  Description of Artificial Sequence: Synthetic oligonucleotide
cuugagagaccagggcgaa

SEQ ID NO: 1936105 - RNA, 19 nt, Artificial Sequence
  Description of Artificial Sequence: Synthetic oligonucleotide
gaaaucucucugccagauu

SEQ ID NO: 1936106 - RNA, 19 nt, Artificial Sequence
  Description of Artificial Sequence: Synthetic oligonucleotide
cugcaauuauggagguaua

SEQ ID NO: 1936107 - RNA, 19 nt, Artificial Sequence
  Description of Artificial Sequence: Synthetic oligonucleotide
ccaguuguugacagaaacu

SEQ ID NO: 1936108 - RNA, 19 nt, Artificial Sequence
  Description of Artificial Sequence: Synthetic oligonucleotide
cacuggcaucuucccggcc

SEQ ID NO: 1936109 - RNA, 19 nt, Artificial Sequence
  Description of Artificial Sequence: Synthetic oligonucleotide
cguacacuggugguguggc

SEQ ID NO: 1936110 - RNA, 19 nt, Artificial Sequence
  Description of Artificial Sequence: Synthetic oligonucleotide
guagucggucagccuggca

SEQ ID NO: 1936111 - RNA, 19 nt, Artificial Sequence
  Description of Artificial Sequence: Synthetic oligonucleotide
gugccacagaacucucucu

SEQ ID NO: 1936112 - RNA, 19 nt, Artificial Sequence
  Description of Artificial Sequence: Synthetic oligonucleotide
gguauagaucccggggaaa

SEQ ID NO: 1936113 - RNA, 19 nt, Artificial Sequence
  Description of Artificial Sequence: Synthetic oligonucleotide
gcuacucgaagcagaaugu

SEQ ID NO: 1936114 - RNA, 19 nt, Artificial Sequence
  Description of Artificial Sequence: Synthetic oligonucleotide
uccgaccacuggugggcau

SEQ ID NO: 1936115 - RNA, 19 nt, Artificial Sequence
  Description of Artificial Sequence: Synthetic oligonucleotide
cccgccagaccaaagccca

SEQ ID NO: 1936116 - RNA, 19 nt, Artificial Sequence
  Description of Artificial Sequence: Synthetic oligonucleotide
aggcucugauaaaggaaua

SEQ ID NO: 1936117 - RNA, 19 nt, Artificial Sequence
  Description of Artificial Sequence: Synthetic oligonucleotide
ccguacacugguggugugg

SEQ ID NO: 1936118 - RNA, 19 nt, Artificial Sequence
  Description of Artificial Sequence: Synthetic oligonucleotide
agcugaccguacacuggug

SEQ ID NO: 1936119 - RNA, 19 nt, Artificial Sequence
  Description of Artificial Sequence: Synthetic oligonucleotide
ggaaaucucucugccagau

SEQ ID NO: 1936120 - RNA, 19 nt, Artificial Sequence
  Description of Artificial Sequence: Synthetic oligonucleotide
cuuguggcagagucggcuu

SEQ ID NO: 1936121 - RNA, 19 nt, Artificial Sequence
  Description of Artificial Sequence: Synthetic oligonucleotide
gcucacccuguucagugaa

SEQ ID NO: 1936122 - RNA, 19 nt, Artificial Sequence
  Description of Artificial Sequence: Synthetic oligonucleotide
agggcuguuugaaccugaa

SEQ ID NO: 1936123 - RNA, 19 nt, Artificial Sequence
  Description of Artificial Sequence: Synthetic oligonucleotide
cuggacauacaaugcgcuu

SEQ ID NO: 1936124 - RNA, 19 nt, Artificial Sequence
  Description of Artificial Sequence: Synthetic oligonucleotide
ccaugcaaacgagcacugc

SEQ ID NO: 1936125 - RNA, 19 nt, Artificial Sequence
  Description of Artificial Sequence: Synthetic oligonucleotide
cugaaacugaaggcgccgu

SEQ ID NO: 1936126 - RNA, 19 nt, Artificial Sequence
  Description of Artificial Sequence: Synthetic oligonucleotide
gugggcauugaugguggua

SEQ ID NO: 1936127 - RNA, 19 nt, Artificial Sequence
  Description of Artificial Sequence: Synthetic oligonucleotide
gccugagaggaaacuggac

SEQ ID NO: 1936128 - RNA, 19 nt, Artificial Sequence
  Description of Artificial Sequence: Synthetic oligonucleotide
cguuugccagugacagggg

SEQ ID NO: 1936129 - RNA, 19 nt, Artificial Sequence
  Description of Artificial Sequence: Synthetic oligonucleotide
cagagugaucuaucaguuu

SEQ ID NO: 1936130 - RNA, 19 nt, Artificial Sequence
  Description of Artificial Sequence: Synthetic oligonucleotide
ggcgaaggcgcgucuccuc

SEQ ID NO: 1936131 - RNA, 19 nt, Artificial Sequence
  Description of Artificial Sequence: Synthetic oligonucleotide
cacacccaaaggacacugu

SEQ ID NO: 1936132 - RNA, 19 nt, Artificial Sequence
  Description of Artificial Sequence: Synthetic oligonucleotide
gagucggcuugccauccuu

SEQ ID NO: 1936133 - RNA, 19 nt, Artificial Sequence
  Description of Artificial Sequence: Synthetic oligonucleotide
gaaggcgcgucuccucguu

SEQ ID NO: 1936134 - RNA, 19 nt, Artificial Sequence
  Description of Artificial Sequence: Synthetic oligonucleotide
gcucccgaggcuggcuucc

SEQ ID NO: 1936135 - RNA, 19 nt, Artificial Sequence
  Description of Artificial Sequence: Synthetic oligonucleotide
ccagaccaaagcccaagcu

SEQ ID NO: 1936136 - RNA, 19 nt, Artificial Sequence
  Description of Artificial Sequence: Synthetic oligonucleotide
ccaccgccccgccagacca

SEQ ID NO: 1936137 - RNA, 19 nt, Artificial Sequence
  Description of Artificial Sequence: Synthetic oligonucleotide
ggcgcgucuccucguugca

SEQ ID NO: 1936138 - RNA, 19 nt, Artificial Sequence
  Description of Artificial Sequence: Synthetic oligonucleotide
aggcgccguccgccaucac

SEQ ID NO: 1936139 - RNA, 19 nt, Artificial Sequence
  Description of Artificial Sequence: Synthetic oligonucleotide
cguccguuugccagugaca

SEQ ID NO: 1936140 - RNA, 19 nt, Artificial Sequence
  Description of Artificial Sequence: Synthetic oligonucleotide
accgccccgccagaccaaa

SEQ ID NO: 1936141 - RNA, 19 nt, Artificial Sequence
  Description of Artificial Sequence: Synthetic oligonucleotide
cagcagugccugagaggaa

SEQ ID NO: 1936142 - RNA, 19 nt, Artificial Sequence
  Description of Artificial Sequence: Synthetic oligonucleotide
ccagauucgcuguccuacu

SEQ ID NO: 1936143 - RNA, 19 nt, Artificial Sequence
  Description of Artificial Sequence: Synthetic oligonucleotide
gcuuccugggaagaaccau

SEQ ID NO: 1936144 - RNA, 19 nt, Artificial Sequence
  Description of Artificial Sequence: Synthetic oligonucleotide
cacguccguuugccaguga

SEQ ID NO: 1936145 - RNA, 19 nt, Artificial Sequence
  Description of Artificial Sequence: Synthetic oligonucleotide
ggguggugugugccacaga

SEQ ID NO: 1936146 - RNA, 19 nt, Artificial Sequence
  Description of Artificial Sequence: Synthetic oligonucleotide
ccaugauuggcugcacagu

SEQ ID NO: 1936147 - RNA, 19 nt, Artificial Sequence
  Description of Artificial Sequence: Synthetic oligonucleotide
gccagugacaggggcugaa

SEQ ID NO: 1936148 - RNA, 19 nt, Artificial Sequence
  Description of Artificial Sequence: Synthetic oligonucleotide
gaccagggcgaaggcgcgu

SEQ ID NO: 1936149 - RNA, 19 nt, Artificial Sequence
  Description of Artificial Sequence: Synthetic oligonucleotide
ggugggcauugaugguggu

SEQ ID NO: 1936150 - RNA, 19 nt, Artificial Sequence
  Description of Artificial Sequence: Synthetic oligonucleotide
cguagucggucagccuggc

SEQ ID NO: 1936151 - RNA, 19 nt, Artificial Sequence
  Description of Artificial Sequence: Synthetic oligonucleotide
ggaaagccacguagucggu

SEQ ID NO: 1936152 - RNA, 19 nt, Artificial Sequence
  Description of Artificial Sequence: Synthetic oligonucleotide
caccgccccgccagaccaa

SEQ ID NO: 1936153 - RNA, 19 nt, Artificial Sequence
  Description of Artificial Sequence: Synthetic oligonucleotide
gcuguccuacugaccaaau

SEQ ID NO: 1936154 - RNA, 19 nt, Artificial Sequence
  Description of Artificial Sequence: Synthetic oligonucleotide
ccgccccgccagaccaaag

SEQ ID NO: 1936155 - RNA, 19 nt, Artificial Sequence
  Description of Artificial Sequence: Synthetic oligonucleotide
cguccgccaucaccgccac

SEQ ID NO: 1936156 - RNA, 19 nt, Artificial Sequence
  Description of Artificial Sequence: Synthetic oligonucleotide
cgccguccgccaucaccgc

SEQ ID NO: 1936157 - RNA, 19 nt, Artificial Sequence
  Description of Artificial Sequence: Synthetic oligonucleotide
ccacguagucggucagccu

SEQ ID NO: 1936158 - RNA, 19 nt, Artificial Sequence
  Description of Artificial Sequence: Synthetic oligonucleotide
ccgccagaccaaagcccaa

SEQ ID NO: 1936159 - RNA, 19 nt, Artificial Sequence
  Description of Artificial Sequence: Synthetic oligonucleotide
guccgccaucaccgccacu

SEQ ID NO: 1936160 - RNA, 19 nt, Artificial Sequence
  Description of Artificial Sequence: Synthetic oligonucleotide
ccggccucacucgccgcca

SEQ ID NO: 1936161 - RNA, 19 nt, Artificial Sequence
  Description of Artificial Sequence: Synthetic oligonucleotide
cgaaggcgcgucuccucgu

SEQ ID NO: 1936162 - RNA, 19 nt, Artificial Sequence
  Description of Artificial Sequence: Synthetic oligonucleotide
gcgcgucuccucguugcau

SEQ ID NO: 1936163 - RNA, 19 nt, Artificial Sequence
  Description of Artificial Sequence: Synthetic oligonucleotide
ccgaccacuggugggcauu

SEQ ID NO: 1936164 - RNA, 19 nt, Artificial Sequence
  Description of Artificial Sequence: Synthetic oligonucleotide
ccgccaccgccccgccaga

SEQ ID NO: 1936165 - RNA, 19 nt, Artificial Sequence
  Description of Artificial Sequence: Synthetic oligonucleotide
aauguacucagcuucagcc

SEQ ID NO: 1936166 - RNA, 19 nt, Artificial Sequence
  Description of Artificial Sequence: Synthetic oligonucleotide
uuuuaacucaguaauaagg

SEQ ID NO: 1936167 - RNA, 19 nt, Artificial Sequence
  Description of Artificial Sequence: Synthetic oligonucleotide
aauggcuugagccaaaagg

SEQ ID NO: 1936168 - RNA, 19 nt, Artificial Sequence
  Description of Artificial Sequence: Synthetic oligonucleotide
uuggaaaucaaacucaggg

SEQ ID NO: 1936169 - RNA, 19 nt, Artificial Sequence
  Description of Artificial Sequence: Synthetic oligonucleotide
aguaguuugcaguugaggc

SEQ ID NO: 1936170 - RNA, 19 nt, Artificial Sequence
  Description of Artificial Sequence: Synthetic oligonucleotide
uauauuaacaugcuaacac

SEQ ID NO: 1936171 - RNA, 19 nt, Artificial Sequence
  Description of Artificial Sequence: Synthetic oligonucleotide
uaacucaguaauaaggacg

SEQ ID NO: 1936172 - RNA, 19 nt, Artificial Sequence
  Description of Artificial Sequence: Synthetic oligonucleotide
aaugaccagauauauuaac

SEQ ID NO: 1936173 - RNA, 19 nt, Artificial Sequence
  Description of Artificial Sequence: Synthetic oligonucleotide
aguguuggaaaucaaacuc

SEQ ID NO: 1936174 - RNA, 19 nt, Artificial Sequence
  Description of Artificial Sequence: Synthetic oligonucleotide
ucuucuaccauuuugcucu

SEQ ID NO: 1936175 - RNA, 19 nt, Artificial Sequence
  Description of Artificial Sequence: Synthetic oligonucleotide
augcuuaucacugacaggc

SEQ ID NO: 1936176 - RNA, 19 nt, Artificial Sequence
  Description of Artificial Sequence: Synthetic oligonucleotide
uuuaacucaguaauaagga

SEQ ID NO: 1936177 - RNA, 19 nt, Artificial Sequence
  Description of Artificial Sequence: Synthetic oligonucleotide
uuuacuuauuuuaacucag

SEQ ID NO: 1936178 - RNA, 19 nt, Artificial Sequence
  Description of Artificial Sequence: Synthetic oligonucleotide
auaugaaacugucacaguc

SEQ ID NO: 1936179 - RNA, 19 nt, Artificial Sequence
  Description of Artificial Sequence: Synthetic oligonucleotide
aacugaacaaacaccagcc

SEQ ID NO: 1936180 - RNA, 19 nt, Artificial Sequence
  Description of Artificial Sequence: Synthetic oligonucleotide
cuugauaugaaacugucac

SEQ ID NO: 1936181 - RNA, 19 nt, Artificial Sequence
  Description of Artificial Sequence: Synthetic oligonucleotide
uuuggagucagaaucucgg

SEQ ID NO: 1936182 - RNA, 19 nt, Artificial Sequence
  Description of Artificial Sequence: Synthetic oligonucleotide
uguaaauccagcuucgcug

SEQ ID NO: 1936183 - RNA, 19 nt, Artificial Sequence
  Description of Artificial Sequence: Synthetic oligonucleotide
aagaaugcuuaucacugac

SEQ ID NO: 1936184 - RNA, 19 nt, Artificial Sequence
  Description of Artificial Sequence: Synthetic oligonucleotide
uggauucaaacacaaacag

SEQ ID NO: 1936185 - RNA, 19 nt, Artificial Sequence
  Description of Artificial Sequence: Synthetic oligonucleotide
ugauaugaaacugucacag

SEQ ID NO: 1936186 - RNA, 19 nt, Artificial Sequence
  Description of Artificial Sequence: Synthetic oligonucleotide
ucaguaauaaggacggaag

SEQ ID NO: 1936187 - RNA, 19 nt, Artificial Sequence
  Description of Artificial Sequence: Synthetic oligonucleotide
aacacugaguagucaauac

SEQ ID NO: 1936188 - RNA, 19 nt, Artificial Sequence
  Description of Artificial Sequence: Synthetic oligonucleotide
auaggaauacucuaggcug

SEQ ID NO: 1936189 - RNA, 19 nt, Artificial Sequence
  Description of Artificial Sequence: Synthetic oligonucleotide
gaaugcuuaucacugacag

SEQ ID NO: 1936190 - RNA, 19 nt, Artificial Sequence
  Description of Artificial Sequence: Synthetic oligonucleotide
aacucaguaauaaggacgg

SEQ ID NO: 1936191 - RNA, 19 nt, Artificial Sequence
  Description of Artificial Sequence: Synthetic oligonucleotide
aguugaggcucuuuguugc

SEQ ID NO: 1936192 - RNA, 19 nt, Artificial Sequence
  Description of Artificial Sequence: Synthetic oligonucleotide
gauauauuaacaugcuaac

SEQ ID NO: 1936193 - RNA, 19 nt, Artificial Sequence
  Description of Artificial Sequence: Synthetic oligonucleotide
uguaacuccuucuggaucc

SEQ ID NO: 1936194 - RNA, 19 nt, Artificial Sequence
  Description of Artificial Sequence: Synthetic oligonucleotide
uuaacaugcuaacacuaag

SEQ ID NO: 1936195 - RNA, 19 nt, Artificial Sequence
  Description of Artificial Sequence: Synthetic oligonucleotide
aaucucggcauuucugugg

SEQ ID NO: 1936196 - RNA, 19 nt, Artificial Sequence
  Description of Artificial Sequence: Synthetic oligonucleotide
ucaauucuguuccugagga

SEQ ID NO: 1936197 - RNA, 19 nt, Artificial Sequence
  Description of Artificial Sequence: Synthetic oligonucleotide
uucugcaauggcuugagcc

SEQ ID NO: 1936198 - RNA, 19 nt, Artificial Sequence
  Description of Artificial Sequence: Synthetic oligonucleotide
acuagaauguuugccaggc

SEQ ID NO: 1936199 - RNA, 19 nt, Artificial Sequence
  Description of Artificial Sequence: Synthetic oligonucleotide
uucgcuguaauguacucag

SEQ ID NO: 1936200 - RNA, 19 nt, Artificial Sequence
  Description of Artificial Sequence: Synthetic oligonucleotide
uguuggaaaucaaacucag

SEQ ID NO: 1936201 - RNA, 19 nt, Artificial Sequence
  Description of Artificial Sequence: Synthetic oligonucleotide
aaugcuuaucacugacagg

SEQ ID NO: 1936202 - RNA, 19 nt, Artificial Sequence
  Description of Artificial Sequence: Synthetic oligonucleotide
cucuuuguugccaucagcc

SEQ ID NO: 1936203 - RNA, 19 nt, Artificial Sequence
  Description of Artificial Sequence: Synthetic oligonucleotide
acacaaacagguuuaaaga

SEQ ID NO: 1936204 - RNA, 19 nt, Artificial Sequence
  Description of Artificial Sequence: Synthetic oligonucleotide
acuaagcauggauucaaac

SEQ ID NO: 1936205 - RNA, 19 nt, Artificial Sequence
  Description of Artificial Sequence: Synthetic oligonucleotide
caaacagguuuaaagaaug

SEQ ID NO: 1936206 - RNA, 19 nt, Artificial Sequence
  Description of Artificial Sequence: Synthetic oligonucleotide
ucaucuaaggccuguaacu

SEQ ID NO: 1936207 - RNA, 19 nt, Artificial Sequence
  Description of Artificial Sequence: Synthetic oligonucleotide
auauuaacaugcuaacacu

SEQ ID NO: 1936208 - RNA, 19 nt, Artificial Sequence
  Description of Artificial Sequence: Synthetic oligonucleotide
ggaaaucaaacucagggcc

SEQ ID NO: 1936209 - RNA, 19 nt, Artificial Sequence
  Description of Artificial Sequence: Synthetic oligonucleotide
aauacucuaggcuggccug

SEQ ID NO: 1936210 - RNA, 19 nt, Artificial Sequence
  Description of Artificial Sequence: Synthetic oligonucleotide
auauguuaacugaacaaac

SEQ ID NO: 1936211 - RNA, 19 nt, Artificial Sequence
  Description of Artificial Sequence: Synthetic oligonucleotide
ugaacaaacaccagccccu

SEQ ID NO: 1936212 - RNA, 19 nt, Artificial Sequence
  Description of Artificial Sequence: Synthetic oligonucleotide
uaggaauacucuaggcugg

SEQ ID NO: 1936213 - RNA, 19 nt, Artificial Sequence
  Description of Artificial Sequence: Synthetic oligonucleotide
uuugucucgguuuugcgcu

SEQ ID NO: 1936214 - RNA, 19 nt, Artificial Sequence
  Description of Artificial Sequence: Synthetic oligonucleotide
acagagauauguuaacuga

SEQ ID NO: 1936215 - RNA, 19 nt, Artificial Sequence
  Description of Artificial Sequence: Synthetic oligonucleotide
aaacagguuuaaagaaugc

SEQ ID NO: 1936216 - RNA, 19 nt, Artificial Sequence
  Description of Artificial Sequence: Synthetic oligonucleotide
acaccaugucaucuaaggc

SEQ ID NO: 1936217 - RNA, 19 nt, Artificial Sequence
  Description of Artificial Sequence: Synthetic oligonucleotide
uuuguaguguuggaaauca

SEQ ID NO: 1936218 - RNA, 19 nt, Artificial Sequence
  Description of Artificial Sequence: Synthetic oligonucleotide
auguacucagcuucagccc

SEQ ID NO: 1936219 - RNA, 19 nt, Artificial Sequence
  Description of Artificial Sequence: Synthetic oligonucleotide
aaaaguucuuggcuccuug

SEQ ID NO: 1936220 - RNA, 19 nt, Artificial Sequence
  Description of Artificial Sequence: Synthetic oligonucleotide
uguaauguacucagcuuca

SEQ ID NO: 1936221 - RNA, 19 nt, Artificial Sequence
  Description of Artificial Sequence: Synthetic oligonucleotide
ugucaaaccgcuuccgugc

SEQ ID NO: 1936222 - RNA, 19 nt, Artificial Sequence
  Description of Artificial Sequence: Synthetic oligonucleotide
aaguaguuugcaguugagg

SEQ ID NO: 1936223 - RNA, 19 nt, Artificial Sequence
  Description of Artificial Sequence: Synthetic oligonucleotide
uuugcaaucuggcuuugga

SEQ ID NO: 1936224 - RNA, 19 nt, Artificial Sequence
  Description of Artificial Sequence: Synthetic oligonucleotide
uuaacucaguaauaaggac

SEQ ID NO: 1936225 - RNA, 19 nt, Artificial Sequence
  Description of Artificial Sequence: Synthetic oligonucleotide
agauauguuaacugaacaa

SEQ ID NO: 1936226 - RNA, 19 nt, Artificial Sequence
  Description of Artificial Sequence: Synthetic oligonucleotide
ugaguagucaauacucccu

SEQ ID NO: 1936227 - RNA, 19 nt, Artificial Sequence
  Description of Artificial Sequence: Synthetic oligonucleotide
ucugcaauggcuugagcca

SEQ ID NO: 1936228 - RNA, 19 nt, Artificial Sequence
  Description of Artificial Sequence: Synthetic oligonucleotide
aauaaggacggaaggaaca

SEQ ID NO: 1936229 - RNA, 19 nt, Artificial Sequence
  Description of Artificial Sequence: Synthetic oligonucleotide
acaggcuguaauuuaccac

SEQ ID NO: 1936230 - RNA, 19 nt, Artificial Sequence
  Description of Artificial Sequence: Synthetic oligonucleotide
uuuugcgcuguaaauccag

SEQ ID NO: 1936231 - RNA, 19 nt, Artificial Sequence
  Description of Artificial Sequence: Synthetic oligonucleotide
cugaacaaacaccagcccc

SEQ ID NO: 1936232 - RNA, 19 nt, Artificial Sequence
  Description of Artificial Sequence: Synthetic oligonucleotide
gaccagauauauuaacaug

SEQ ID NO: 1936233 - RNA, 19 nt, Artificial Sequence
  Description of Artificial Sequence: Synthetic oligonucleotide
cuuuacuuauuuuaacuca

SEQ ID NO: 1936234 - RNA, 19 nt, Artificial Sequence
  Description of Artificial Sequence: Synthetic oligonucleotide
aaacugucacagucuguac

SEQ ID NO: 1936235 - RNA, 19 nt, Artificial Sequence
  Description of Artificial Sequence: Synthetic oligonucleotide
gauauguuaacugaacaaa

SEQ ID NO: 1936236 - RNA, 19 nt, Artificial Sequence
  Description of Artificial Sequence: Synthetic oligonucleotide
ucguucuguuggaugaugg

SEQ ID NO: 1936237 - RNA, 19 nt, Artificial Sequence
  Description of Artificial Sequence: Synthetic oligonucleotide
cuaagcauggauucaaaca

SEQ ID NO: 1936238 - RNA, 19 nt, Artificial Sequence
  Description of Artificial Sequence: Synthetic oligonucleotide
aucucggcauuucuguggc

SEQ ID NO: 1936239 - RNA, 19 nt, Artificial Sequence
  Description of Artificial Sequence: Synthetic oligonucleotide
agagauauguuaacugaac

SEQ ID NO: 1936240 - RNA, 19 nt, Artificial Sequence
  Description of Artificial Sequence: Synthetic oligonucleotide
agaaucucggcauuucugu

SEQ ID NO: 1936241 - RNA, 19 nt, Artificial Sequence
  Description of Artificial Sequence: Synthetic oligonucleotide
gagauauguuaacugaaca

SEQ ID NO: 1936242 - RNA, 19 nt, Artificial Sequence
  Description of Artificial Sequence: Synthetic oligonucleotide
caguaauaaggacggaagg

SEQ ID NO: 1936243 - RNA, 19 nt, Artificial Sequence
  Description of Artificial Sequence: Synthetic oligonucleotide
auacacucuccccagcagg

SEQ ID NO: 1936244 - RNA, 19 nt, Artificial Sequence
  Description of Artificial Sequence: Synthetic oligonucleotide
ugaccagauauauuaacau

SEQ ID NO: 1936245 - RNA, 19 nt, Artificial Sequence
  Description of Artificial Sequence: Synthetic oligonucleotide
uuuguugccaucagccaac

SEQ ID NO: 1936246 - RNA, 19 nt, Artificial Sequence
  Description of Artificial Sequence: Synthetic oligonucleotide
ucuaaggccuguaacuccu

SEQ ID NO: 1936247 - RNA, 19 nt, Artificial Sequence
  Description of Artificial Sequence: Synthetic oligonucleotide
uguacucagcuucagcccu

SEQ ID NO: 1936248 - RNA, 19 nt, Artificial Sequence
  Description of Artificial Sequence: Synthetic oligonucleotide
accacagagauauguuaac

SEQ ID NO: 1936249 - RNA, 19 nt, Artificial Sequence
  Description of Artificial Sequence: Synthetic oligonucleotide
uacucccuugauaugaaac

SEQ ID NO: 1936250 - RNA, 19 nt, Artificial Sequence
  Description of Artificial Sequence: Synthetic oligonucleotide
cacugaguagucaauacuc

SEQ ID NO: 1936251 - RNA, 19 nt, Artificial Sequence
  Description of Artificial Sequence: Synthetic oligonucleotide
uucuggauccucuugaguu

SEQ ID NO: 1936252 - RNA, 19 nt, Artificial Sequence
  Description of Artificial Sequence: Synthetic oligonucleotide
uugauaugaaacugucaca

SEQ ID NO: 1936253 - RNA, 19 nt, Artificial Sequence
  Description of Artificial Sequence: Synthetic oligonucleotide
uaauguacucagcuucagc

SEQ ID NO: 1936254 - RNA, 19 nt, Artificial Sequence
  Description of Artificial Sequence: Synthetic oligonucleotide
aguaauaaggacggaagga

SEQ ID NO: 1936255 - RNA, 19 nt, Artificial Sequence
  Description of Artificial Sequence: Synthetic oligonucleotide
uacuagaauguuugccagg

SEQ ID NO: 1936256 - RNA, 19 nt, Artificial Sequence
  Description of Artificial Sequence: Synthetic oligonucleotide
cugaaaaguucuuggcucc

SEQ ID NO: 1936257 - RNA, 19 nt, Artificial Sequence
  Description of Artificial Sequence: Synthetic oligonucleotide
ucuguacuugggaaugacc

SEQ ID NO: 1936258 - RNA, 19 nt, Artificial Sequence
  Description of Artificial Sequence: Synthetic oligonucleotide
auucuguuccugaggaucc

SEQ ID NO: 1936259 - RNA, 19 nt, Artificial Sequence
  Description of Artificial Sequence: Synthetic oligonucleotide
cugaguagucaauacuccc

SEQ ID NO: 1936260 - RNA, 19 nt, Artificial Sequence
  Description of Artificial Sequence: Synthetic oligonucleotide
uuuaccacagagauauguu

SEQ ID NO: 1936261 - RNA, 19 nt, Artificial Sequence
  Description of Artificial Sequence: Synthetic oligonucleotide
auaaggacggaaggaacac

SEQ ID NO: 1936262 - RNA, 19 nt, Artificial Sequence
  Description of Artificial Sequence: Synthetic oligonucleotide
acggucucugcuugggucc

SEQ ID NO: 1936263 - RNA, 19 nt, Artificial Sequence
  Description of Artificial Sequence: Synthetic oligonucleotide
gguuuugcgcuguaaaucc

SEQ ID NO: 1936264 - RNA, 19 nt, Artificial Sequence
  Description of Artificial Sequence: Synthetic oligonucleotide
cuuuggagucagaaucucg

SEQ ID NO: 1936265 - RNA, 19 nt, Artificial Sequence
  Description of Artificial Sequence: Synthetic oligonucleotide
uugcaaucuggcuuuggag

SEQ ID NO: 1936266 - RNA, 19 nt, Artificial Sequence
  Description of Artificial Sequence: Synthetic oligonucleotide
uggagucagaaucucggca

SEQ ID NO: 1936267 - RNA, 19 nt, Artificial Sequence
  Description of Artificial Sequence: Synthetic oligonucleotide
cucaucagccuguacgucc

SEQ ID NO: 1936268 - RNA, 19 nt, Artificial Sequence
  Description of Artificial Sequence: Synthetic oligonucleotide
cuacuagaauguuugccag

SEQ ID NO: 1936269 - RNA, 19 nt, Artificial Sequence
  Description of Artificial Sequence: Synthetic oligonucleotide
acucccuugauaugaaacu

SEQ ID NO: 1936270 - RNA, 19 nt, Artificial Sequence
  Description of Artificial Sequence: Synthetic oligonucleotide
uguucaaccuccaccucca

SEQ ID NO: 1936271 - RNA, 19 nt, Artificial Sequence
  Description of Artificial Sequence: Synthetic oligonucleotide
ugggcagucuagucuaagg

SEQ ID NO: 1936272 - RNA, 19 nt, Artificial Sequence
  Description of Artificial Sequence: Synthetic oligonucleotide
ucgcuguucuuguuggagg

SEQ ID NO: 1936273 - RNA, 19 nt, Artificial Sequence
  Description of Artificial Sequence: Synthetic oligonucleotide
cugaagauacacucucccc

SEQ ID NO: 1936274 - RNA, 19 nt, Artificial Sequence
  Description of Artificial Sequence: Synthetic oligonucleotide
uacagcagcugaaaaguuc

SEQ ID NO: 1936275 - RNA, 19 nt, Artificial Sequence
  Description of Artificial Sequence: Synthetic oligonucleotide
uguacguccagcugcugca

SEQ ID NO: 1936276 - RNA, 19 nt, Artificial Sequence
  Description of Artificial Sequence: Synthetic oligonucleotide
gauacacucuccccagcag

SEQ ID NO: 1936277 - RNA, 19 nt, Artificial Sequence
  Description of Artificial Sequence: Synthetic oligonucleotide
ucuuuugucucgguuuugc

SEQ ID NO: 1936278 - RNA, 19 nt, Artificial Sequence
  Description of Artificial Sequence: Synthetic oligonucleotide
gucaauacucccuugauau

SEQ ID NO: 1936279 - RNA, 19 nt, Artificial Sequence
  Description of Artificial Sequence: Synthetic oligonucleotide
guggcugacuuucaguacc

SEQ ID NO: 1936280 - RNA, 19 nt, Artificial Sequence
  Description of Artificial Sequence: Synthetic oligonucleotide
agaucuuucugcaauggcu

SEQ ID NO: 1936281 - RNA, 19 nt, Artificial Sequence
  Description of Artificial Sequence: Synthetic oligonucleotide
ucuuuguugccaucagcca

SEQ ID NO: 1936282 - RNA, 19 nt, Artificial Sequence
  Description of Artificial Sequence: Synthetic oligonucleotide
ugacaggcuguaauuuacc

SEQ ID NO: 1936283 - RNA, 19 nt, Artificial Sequence
  Description of Artificial Sequence: Synthetic oligonucleotide
acacugaguagucaauacu

SEQ ID NO: 1936284 - RNA, 19 nt, Artificial Sequence
  Description of Artificial Sequence: Synthetic oligonucleotide
uuugcgcuguaaauccagc

SEQ ID NO: 1936285 - RNA, 19 nt, Artificial Sequence
  Description of Artificial Sequence: Synthetic oligonucleotide
ucccuugauaugaaacugu

SEQ ID NO: 1936286 - RNA, 19 nt, Artificial Sequence
  Description of Artificial Sequence: Synthetic oligonucleotide
agggcuacuagaauguuug

SEQ ID NO: 1936287 - RNA, 19 nt, Artificial Sequence
  Description of Artificial Sequence: Synthetic oligonucleotide
aaagggcuuucuuacguuu

SEQ ID NO: 1936288 - RNA, 19 nt, Artificial Sequence
  Description of Artificial Sequence: Synthetic oligonucleotide
ggcagucuagucuaagggg

SEQ ID NO: 1936289 - RNA, 19 nt, Artificial Sequence
  Description of Artificial Sequence: Synthetic oligonucleotide
accgcuuccgugcauagga

SEQ ID NO: 1936290 - RNA, 19 nt, Artificial Sequence
  Description of Artificial Sequence: Synthetic oligonucleotide
cuucagcccugucaaaccg

SEQ ID NO: 1936291 - RNA, 19 nt, Artificial Sequence
  Description of Artificial Sequence: Synthetic oligonucleotide
uuccuguucucgaagcaac

SEQ ID NO: 1936292 - RNA, 19 nt, Artificial Sequence
  Description of Artificial Sequence: Synthetic oligonucleotide
agcucguucuguuggauga

SEQ ID NO: 1936293 - RNA, 19 nt, Artificial Sequence
  Description of Artificial Sequence: Synthetic oligonucleotide
agaggugagugugagagga

SEQ ID NO: 1936294 - RNA, 19 nt, Artificial Sequence
  Description of Artificial Sequence: Synthetic oligonucleotide
cuuggguccuuuuagaucu

SEQ ID NO: 1936295 - RNA, 19 nt, Artificial Sequence
  Description of Artificial Sequence: Synthetic oligonucleotide
aacacuaagcauggauuca

SEQ ID NO: 1936296 - RNA, 19 nt, Artificial Sequence
  Description of Artificial Sequence: Synthetic oligonucleotide
ucuacaggaaccacuuguu

SEQ ID NO: 1936297 - RNA, 19 nt, Artificial Sequence
  Description of Artificial Sequence: Synthetic oligonucleotide
ucuaccauuuugcucuuuu

SEQ ID NO: 1936298 - RNA, 19 nt, Artificial Sequence
  Description of Artificial Sequence: Synthetic oligonucleotide
cugacaggcuguaauuuac

SEQ ID NO: 1936299 - RNA, 19 nt, Artificial Sequence
  Description of Artificial Sequence: Synthetic oligonucleotide
uggucaauucuguuccuga

SEQ ID NO: 1936300 - RNA, 19 nt, Artificial Sequence
  Description of Artificial Sequence: Synthetic oligonucleotide
aggaacacugaguagucaa

SEQ ID NO: 1936301 - RNA, 19 nt, Artificial Sequence
  Description of Artificial Sequence: Synthetic oligonucleotide
ucaauacucccuugauaug

SEQ ID NO: 1936302 - RNA, 19 nt, Artificial Sequence
  Description of Artificial Sequence: Synthetic oligonucleotide
uccucaucagccuguacgu

SEQ ID NO: 1936303 - RNA, 19 nt, Artificial Sequence
  Description of Artificial Sequence: Synthetic oligonucleotide
augaccagauauauuaaca

SEQ ID NO: 1936304 - RNA, 19 nt, Artificial Sequence
  Description of Artificial Sequence: Synthetic oligonucleotide
gcuacuagaauguuugcca

SEQ ID NO: 1936305 - RNA, 19 nt, Artificial Sequence
  Description of Artificial Sequence: Synthetic oligonucleotide
cucauguggcuacagcagc

SEQ ID NO: 1936306 - RNA, 19 nt, Artificial Sequence
  Description of Artificial Sequence: Synthetic oligonucleotide
uuuuguaguguuggaaauc

SEQ ID NO: 1936307 - RNA, 19 nt, Artificial Sequence
  Description of Artificial Sequence: Synthetic oligonucleotide
ucgaagcaacuguucaacc

SEQ ID NO: 1936308 - RNA, 19 nt, Artificial Sequence
  Description of Artificial Sequence: Synthetic oligonucleotide
ggauucaaacacaaacagg

SEQ ID NO: 1936309 - RNA, 19 nt, Artificial Sequence
  Description of Artificial Sequence: Synthetic oligonucleotide
uguucucgaagcaacuguu

SEQ ID NO: 1936310 - RNA, 19 nt, Artificial Sequence
  Description of Artificial Sequence: Synthetic oligonucleotide
guagucaauacucccuuga

SEQ ID NO: 1936311 - RNA, 19 nt, Artificial Sequence
  Description of Artificial Sequence: Synthetic oligonucleotide
uuugccaggcuuguuugcc

SEQ ID NO: 1936312 - RNA, 19 nt, Artificial Sequence
  Description of Artificial Sequence: Synthetic oligonucleotide
guaauaaggacggaaggaa

SEQ ID NO: 1936313 - RNA, 19 nt, Artificial Sequence
  Description of Artificial Sequence: Synthetic oligonucleotide
gaaucucggcauuucugug

SEQ ID NO: 1936314 - RNA, 19 nt, Artificial Sequence
  Description of Artificial Sequence: Synthetic oligonucleotide
aggcucuuccauccuuugc

SEQ ID NO: 1936315 - RNA, 19 nt, Artificial Sequence
  Description of Artificial Sequence: Synthetic oligonucleotide
cagaaucucggcauuucug

SEQ ID NO: 1936316 - RNA, 19 nt, Artificial Sequence
  Description of Artificial Sequence: Synthetic oligonucleotide
uuggagucagaaucucggc

SEQ ID NO: 1936317 - RNA, 19 nt, Artificial Sequence
  Description of Artificial Sequence: Synthetic oligonucleotide
uguuggaugaugguacaaa

SEQ ID NO: 1936318 - RNA, 19 nt, Artificial Sequence
  Description of Artificial Sequence: Synthetic oligonucleotide
uugcaauuccauuuucuuu

SEQ ID NO: 1936319 - RNA, 19 nt, Artificial Sequence
  Description of Artificial Sequence: Synthetic oligonucleotide
uucaguaccuuguggcuuc

SEQ ID NO: 1936320 - RNA, 19 nt, Artificial Sequence
  Description of Artificial Sequence: Synthetic oligonucleotide
acaugcuaacacuaagcau

SEQ ID NO: 1936321 - RNA, 19 nt, Artificial Sequence
  Description of Artificial Sequence: Synthetic oligonucleotide
aaaccgcuuccgugcauag

SEQ ID NO: 1936322 - RNA, 19 nt, Artificial Sequence
  Description of Artificial Sequence: Synthetic oligonucleotide
gcugaaaaguucuuggcuc

SEQ ID NO: 1936323 - RNA, 19 nt, Artificial Sequence
  Description of Artificial Sequence: Synthetic oligonucleotide
aguagucaauacucccuug

SEQ ID NO: 1936324 - RNA, 19 nt, Artificial Sequence
  Description of Artificial Sequence: Synthetic oligonucleotide
cugucaaaccgcuuccgug

SEQ ID NO: 1936325 - RNA, 19 nt, Artificial Sequence
  Description of Artificial Sequence: Synthetic oligonucleotide
ggcuacagcagcugaaaag

SEQ ID NO: 1936326 - RNA, 19 nt, Artificial Sequence
  Description of Artificial Sequence: Synthetic oligonucleotide
cauaggaauacucuaggcu

SEQ ID NO: 1936327 - RNA, 19 nt, Artificial Sequence
  Description of Artificial Sequence: Synthetic oligonucleotide
gaauacucuaggcuggccu

SEQ ID NO: 1936328 - RNA, 19 nt, Artificial Sequence
  Description of Artificial Sequence: Synthetic oligonucleotide
ugcaguugaggcucuuugu

SEQ ID NO: 1936329 - RNA, 19 nt, Artificial Sequence
  Description of Artificial Sequence: Synthetic oligonucleotide
ucuuccauccuuugcuuua

SEQ ID NO: 1936330 - RNA, 19 nt, Artificial Sequence
  Description of Artificial Sequence: Synthetic oligonucleotide
uucagcccugucaaaccgc

SEQ ID NO: 1936331 - RNA, 19 nt, Artificial Sequence
  Description of Artificial Sequence: Synthetic oligonucleotide
caauacucccuugauauga

SEQ ID NO: 1936332 - RNA, 19 nt, Artificial Sequence
  Description of Artificial Sequence: Synthetic oligonucleotide
caguugaggcucuuuguug

SEQ ID NO: 1936333 - RNA, 19 nt, Artificial Sequence
  Description of Artificial Sequence: Synthetic oligonucleotide
ucccaaugucagcugacac

SEQ ID NO: 1936334 - RNA, 19 nt, Artificial Sequence
  Description of Artificial Sequence: Synthetic oligonucleotide
ugggaaugaccagauauau

SEQ ID NO: 1936335 - RNA, 19 nt, Artificial Sequence
  Description of Artificial Sequence: Synthetic oligonucleotide
ucucgaagcaacuguucaa

SEQ ID NO: 1936336 - RNA, 19 nt, Artificial Sequence
  Description of Artificial Sequence: Synthetic oligonucleotide
uagucaauacucccuugau

SEQ ID NO: 1936337 - RNA, 19 nt, Artificial Sequence
  Description of Artificial Sequence: Synthetic oligonucleotide
guuucacggucucugcuug

SEQ ID NO: 1936338 - RNA, 19 nt, Artificial Sequence
  Description of Artificial Sequence: Synthetic oligonucleotide
cuugggaaugaccagauau

SEQ ID NO: 1936339 - RNA, 19 nt, Artificial Sequence
  Description of Artificial Sequence: Synthetic oligonucleotide
aggaauacucuaggcuggc

SEQ ID NO: 1936340 - RNA, 19 nt, Artificial Sequence
  Description of Artificial Sequence: Synthetic oligonucleotide
agucaauacucccuugaua

SEQ ID NO: 1936341 - RNA, 19 nt, Artificial Sequence
  Description of Artificial Sequence: Synthetic oligonucleotide
accaugucaucuaaggccu

SEQ ID NO: 1936342 - RNA, 19 nt, Artificial Sequence
  Description of Artificial Sequence: Synthetic oligonucleotide
gccaaaagggcuuucuuac

SEQ ID NO: 1936343 - RNA, 19 nt, Artificial Sequence
  Description of Artificial Sequence: Synthetic oligonucleotide
ucagcccugucaaaccgcu

SEQ ID NO: 1936344 - RNA, 19 nt, Artificial Sequence
  Description of Artificial Sequence: Synthetic oligonucleotide
uuucacggucucugcuugg

SEQ ID NO: 1936345 - RNA, 19 nt, Artificial Sequence
  Description of Artificial Sequence: Synthetic oligonucleotide
cuguacguccagcugcugc

SEQ ID NO: 1936346 - RNA, 19 nt, Artificial Sequence
  Description of Artificial Sequence: Synthetic oligonucleotide
uaccuuguggcuucccacu

SEQ ID NO: 1936347 - RNA, 19 nt, Artificial Sequence
  Description of Artificial Sequence: Synthetic oligonucleotide
cucggcauuucuguggccc

SEQ ID NO: 1936348 - RNA, 19 nt, Artificial Sequence
  Description of Artificial Sequence: Synthetic oligonucleotide
auuaacaugcuaacacuaa

SEQ ID NO: 1936349 - RNA, 19 nt, Artificial Sequence
  Description of Artificial Sequence: Synthetic oligonucleotide
ucgguuuugcgcuguaaau

SEQ ID NO: 1936350 - RNA, 19 nt, Artificial Sequence
  Description of Artificial Sequence: Synthetic oligonucleotide
agucuaaggggagggcuac

SEQ ID NO: 1936351 - RNA, 19 nt, Artificial Sequence
  Description of Artificial Sequence: Synthetic oligonucleotide
ugggaauucugaagcccug

SEQ ID NO: 1936352 - RNA, 19 nt, Artificial Sequence
  Description of Artificial Sequence: Synthetic oligonucleotide
augguacaaagguguuccg

SEQ ID NO: 1936353 - RNA, 19 nt, Artificial Sequence
  Description of Artificial Sequence: Synthetic oligonucleotide
agucuagucuaaggggagg

SEQ ID NO: 1936354 - RNA, 19 nt, Artificial Sequence
  Description of Artificial Sequence: Synthetic oligonucleotide
aucuuucugcaauggcuug

SEQ ID NO: 1936355 - RNA, 19 nt, Artificial Sequence
  Description of Artificial Sequence: Synthetic oligonucleotide
ucuuucugcaauggcuuga

SEQ ID NO: 1936356 - RNA, 19 nt, Artificial Sequence
  Description of Artificial Sequence: Synthetic oligonucleotide
uccgugcauaggaauacuc

SEQ ID NO: 1936357 - RNA, 19 nt, Artificial Sequence
  Description of Artificial Sequence: Synthetic oligonucleotide
uugcgcuguaaauccagcu

SEQ ID NO: 1936358 - RNA, 19 nt, Artificial Sequence
  Description of Artificial Sequence: Synthetic oligonucleotide
gucacagucuguacuuggg

SEQ ID NO: 1936359 - RNA, 19 nt, Artificial Sequence
  Description of Artificial Sequence: Synthetic oligonucleotide
cuucuuggccuuccggagc

SEQ ID NO: 1936360 - RNA, 19 nt, Artificial Sequence
  Description of Artificial Sequence: Synthetic oligonucleotide
ugaccgggacucucuacag

SEQ ID NO: 1936361 - RNA, 19 nt, Artificial Sequence
  Description of Artificial Sequence: Synthetic oligonucleotide
caucuaaggccuguaacuc

SEQ ID NO: 1936362 - RNA, 19 nt, Artificial Sequence
  Description of Artificial Sequence: Synthetic oligonucleotide
aguuucacggucucugcuu

SEQ ID NO: 1936363 - RNA, 19 nt, Artificial Sequence
  Description of Artificial Sequence: Synthetic oligonucleotide
cagucuagucuaaggggag

SEQ ID NO: 1936364 - RNA, 19 nt, Artificial Sequence
  Description of Artificial Sequence: Synthetic oligonucleotide
cuaaggggagggcuacuag

SEQ ID NO: 1936365 - RNA, 19 nt, Artificial Sequence
  Description of Artificial Sequence: Synthetic oligonucleotide
gagaaguaguuugcaguug

SEQ ID NO: 1936366 - RNA, 19 nt, Artificial Sequence
  Description of Artificial Sequence: Synthetic oligonucleotide
uagucuaaggggagggcua

SEQ ID NO: 1936367 - RNA, 19 nt, Artificial Sequence
  Description of Artificial Sequence: Synthetic oligonucleotide
ucagccaacccugaagaua

SEQ ID NO: 1936368 - RNA, 19 nt, Artificial Sequence
  Description of Artificial Sequence: Synthetic oligonucleotide
cuuuguugccaucagccaa

SEQ ID NO: 1936369 - RNA, 19 nt, Artificial Sequence
  Description of Artificial Sequence: Synthetic oligonucleotide
uuguuugccuguuucuguu

SEQ ID NO: 1936370 - RNA, 19 nt, Artificial Sequence
  Description of Artificial Sequence: Synthetic oligonucleotide
ggucaauucuguuccugag

SEQ ID NO: 1936371 - RNA, 19 nt, Artificial Sequence
  Description of Artificial Sequence: Synthetic oligonucleotide
uccgugagcuguucuuuug

SEQ ID NO: 1936372 - RNA, 19 nt, Artificial Sequence
  Description of Artificial Sequence: Synthetic oligonucleotide
uccuguucucgaagcaacu

SEQ ID NO: 1936373 - RNA, 19 nt, Artificial Sequence
  Description of Artificial Sequence: Synthetic oligonucleotide
ucucuacaggaaccacuug

SEQ ID NO: 1936374 - RNA, 19 nt, Artificial Sequence
  Description of Artificial Sequence: Synthetic oligonucleotide
ugcuuggguccuuuuagau

SEQ ID NO: 1936375 - RNA, 19 nt, Artificial Sequence
  Description of Artificial Sequence: Synthetic oligonucleotide
uuucugcaauggcuugagc

SEQ ID NO: 1936376 - RNA, 19 nt, Artificial Sequence
  Description of Artificial Sequence: Synthetic oligonucleotide
cagagauauguuaacugaa

SEQ ID NO: 1936377 - RNA, 19 nt, Artificial Sequence
  Description of Artificial Sequence: Synthetic oligonucleotide
gagcucguucuguuggaug

SEQ ID NO: 1936378 - RNA, 19 nt, Artificial Sequence
  Description of Artificial Sequence: Synthetic oligonucleotide
cuugaccugggcagucuag

SEQ ID NO: 1936379 - RNA, 19 nt, Artificial Sequence
  Description of Artificial Sequence: Synthetic oligonucleotide
gaaggaacacugaguaguc

SEQ ID NO: 1936380 - RNA, 19 nt, Artificial Sequence
  Description of Artificial Sequence: Synthetic oligonucleotide
ggacggaaggaacacugag

SEQ ID NO: 1936381 - RNA, 19 nt, Artificial Sequence
  Description of Artificial Sequence: Synthetic oligonucleotide
uccugaggaucccaauguc

SEQ ID NO: 1936382 - RNA, 19 nt, Artificial Sequence
  Description of Artificial Sequence: Synthetic oligonucleotide
agcaggcugaccgggacuc

SEQ ID NO: 1936383 - RNA, 19 nt, Artificial Sequence
  Description of Artificial Sequence: Synthetic oligonucleotide
guaguuugcaguugaggcu

SEQ ID NO: 1936384 - RNA, 19 nt, Artificial Sequence
  Description of Artificial Sequence: Synthetic oligonucleotide
guaccuuguggcuucccac

SEQ ID NO: 1936385 - RNA, 19 nt, Artificial Sequence
  Description of Artificial Sequence: Synthetic oligonucleotide
guaauguacucagcuucag

SEQ ID NO: 1936386 - RNA, 19 nt, Artificial Sequence
  Description of Artificial Sequence: Synthetic oligonucleotide
gucagcugacaccauguca

SEQ ID NO: 1936387 - RNA, 19 nt, Artificial Sequence
  Description of Artificial Sequence: Synthetic oligonucleotide
uuguuugccucuggagaag

SEQ ID NO: 1936388 - RNA, 19 nt, Artificial Sequence
  Description of Artificial Sequence: Synthetic oligonucleotide
cuuccgugcauaggaauac

SEQ ID NO: 1936389 - RNA, 19 nt, Artificial Sequence
  Description of Artificial Sequence: Synthetic oligonucleotide
ugaaaaguucuuggcuccu

SEQ ID NO: 1936390 - RNA, 19 nt, Artificial Sequence
  Description of Artificial Sequence: Synthetic oligonucleotide
uuucaguaccuuguggcuu

SEQ ID NO: 1936391 - RNA, 19 nt, Artificial Sequence
  Description of Artificial Sequence: Synthetic oligonucleotide
cccaaugucagcugacacc

SEQ ID NO: 1936392 - RNA, 19 nt, Artificial Sequence
  Description of Artificial Sequence: Synthetic oligonucleotide
ugucagcugacaccauguc

SEQ ID NO: 1936393 - RNA, 19 nt, Artificial Sequence
  Description of Artificial Sequence: Synthetic oligonucleotide
aaggggagggcuacuagaa

SEQ ID NO: 1936394 - RNA, 19 nt, Artificial Sequence
  Description of Artificial Sequence: Synthetic oligonucleotide
gcuuaucacugacaggcug

SEQ ID NO: 1936395 - RNA, 19 nt, Artificial Sequence
  Description of Artificial Sequence: Synthetic oligonucleotide
gucgcuguucuuguuggag

SEQ ID NO: 1936396 - RNA, 19 nt, Artificial Sequence
  Description of Artificial Sequence: Synthetic oligonucleotide
uuguaguguuggaaaucaa

SEQ ID NO: 1936397 - RNA, 19 nt, Artificial Sequence
  Description of Artificial Sequence: Synthetic oligonucleotide
cucaguaauaaggacggaa

SEQ ID NO: 1936398 - RNA, 19 nt, Artificial Sequence
  Description of Artificial Sequence: Synthetic oligonucleotide
uccauccuuugcuuuacuu

SEQ ID NO: 1936399 - RNA, 19 nt, Artificial Sequence
  Description of Artificial Sequence: Synthetic oligonucleotide
uggcugacuuucaguaccu

SEQ ID NO: 1936400 - RNA, 19 nt, Artificial Sequence
  Description of Artificial Sequence: Synthetic oligonucleotide
ggcuacuagaauguuugcc

SEQ ID NO: 1936401 - RNA, 19 nt, Artificial Sequence
  Description of Artificial Sequence: Synthetic oligonucleotide
cacggucucugcuuggguc

SEQ ID NO: 1936402 - RNA, 19 nt, Artificial Sequence
  Description of Artificial Sequence: Synthetic oligonucleotide
uguuugccucuggagaagu

SEQ ID NO: 1936403 - RNA, 19 nt, Artificial Sequence
  Description of Artificial Sequence: Synthetic oligonucleotide
guuuccuguucucgaagca

SEQ ID NO: 1936404 - RNA, 19 nt, Artificial Sequence
  Description of Artificial Sequence: Synthetic oligonucleotide
acucucuacaggaaccacu

SEQ ID NO: 1936405 - RNA, 19 nt, Artificial Sequence
  Description of Artificial Sequence: Synthetic oligonucleotide
cucuacaggaaccacuugu

SEQ ID NO: 1936406 - RNA, 19 nt, Artificial Sequence
  Description of Artificial Sequence: Synthetic oligonucleotide
agcauggauucaaacacaa

SEQ ID NO: 1936407 - RNA, 19 nt, Artificial Sequence
  Description of Artificial Sequence: Synthetic oligonucleotide
aaccgcuuccgugcauagg

SEQ ID NO: 1936408 - RNA, 19 nt, Artificial Sequence
  Description of Artificial Sequence: Synthetic oligonucleotide
ggaaggaacacugaguagu

SEQ ID NO: 1936409 - RNA, 19 nt, Artificial Sequence
  Description of Artificial Sequence: Synthetic oligonucleotide
ccaaaagggcuuucuuacg

SEQ ID NO: 1936410 - RNA, 19 nt, Artificial Sequence
  Description of Artificial Sequence: Synthetic oligonucleotide
accuuguggcuucccacug

SEQ ID NO: 1936411 - RNA, 19 nt, Artificial Sequence
  Description of Artificial Sequence: Synthetic oligonucleotide
ucgcuguaauguacucagc

SEQ ID NO: 1936412 - RNA, 19 nt, Artificial Sequence
  Description of Artificial Sequence: Synthetic oligonucleotide
ggcuuguuugccucuggag

SEQ ID NO: 1936413 - RNA, 19 nt, Artificial Sequence
  Description of Artificial Sequence: Synthetic oligonucleotide
ugccuguuucuguuuccug

SEQ ID NO: 1936414 - RNA, 19 nt, Artificial Sequence
  Description of Artificial Sequence: Synthetic oligonucleotide
caauggcuugagccaaaag

SEQ ID NO: 1936415 - RNA, 19 nt, Artificial Sequence
  Description of Artificial Sequence: Synthetic oligonucleotide
aggaucccaaugucagcug

SEQ ID NO: 1936416 - RNA, 19 nt, Artificial Sequence
  Description of Artificial Sequence: Synthetic oligonucleotide
ucuaaggggagggcuacua

SEQ ID NO: 1936417 - RNA, 19 nt, Artificial Sequence
  Description of Artificial Sequence: Synthetic oligonucleotide
uggcuacagcagcugaaaa

SEQ ID NO: 1936418 - RNA, 19 nt, Artificial Sequence
  Description of Artificial Sequence: Synthetic oligonucleotide
cugaccgggacucucuaca

SEQ ID NO: 1936419 - RNA, 19 nt, Artificial Sequence
  Description of Artificial Sequence: Synthetic oligonucleotide
cuuugcaaucuggcuuugg

SEQ ID NO: 1936420 - RNA, 19 nt, Artificial Sequence
  Description of Artificial Sequence: Synthetic oligonucleotide
gaacacugaguagucaaua

SEQ ID NO: 1936421 - RNA, 19 nt, Artificial Sequence
  Description of Artificial Sequence: Synthetic oligonucleotide
uccggagcucguucuguug

SEQ ID NO: 1936422 - RNA, 19 nt, Artificial Sequence
  Description of Artificial Sequence: Synthetic oligonucleotide
aggaaccacuuguuugccu

SEQ ID NO: 1936423 - RNA, 19 nt, Artificial Sequence
  Description of Artificial Sequence: Synthetic oligonucleotide
caaaagggcuuucuuacgu

SEQ ID NO: 1936424 - RNA, 19 nt, Artificial Sequence
  Description of Artificial Sequence: Synthetic oligonucleotide
cagcuucgcuguaauguac

SEQ ID NO: 1936425 - RNA, 19 nt, Artificial Sequence
  Description of Artificial Sequence: Synthetic oligonucleotide
ccucauguggcuacagcag

SEQ ID NO: 1936426 - RNA, 19 nt, Artificial Sequence
  Description of Artificial Sequence: Synthetic oligonucleotide
agggcuuucuuacguuuau

SEQ ID NO: 1936427 - RNA, 19 nt, Artificial Sequence
  Description of Artificial Sequence: Synthetic oligonucleotide
ugaccugggcagucuaguc

SEQ ID NO: 1936428 - RNA, 19 nt, Artificial Sequence
  Description of Artificial Sequence: Synthetic oligonucleotide
ucggcauuucuguggcccu

SEQ ID NO: 1936429 - RNA, 19 nt, Artificial Sequence
  Description of Artificial Sequence: Synthetic oligonucleotide
uggauccucuugaguuuca

SEQ ID NO: 1936430 - RNA, 19 nt, Artificial Sequence
  Description of Artificial Sequence: Synthetic oligonucleotide
cucgguuuugcgcuguaaa

SEQ ID NO: 1936431 - RNA, 19 nt, Artificial Sequence
  Description of Artificial Sequence: Synthetic oligonucleotide
aggcuguaauuuaccacag

SEQ ID NO: 1936432 - RNA, 19 nt, Artificial Sequence
  Description of Artificial Sequence: Synthetic oligonucleotide
uugucucgguuuugcgcug

SEQ ID NO: 1936433 - RNA, 19 nt, Artificial Sequence
  Description of Artificial Sequence: Synthetic oligonucleotide
acucuaggcuggccugguc

SEQ ID NO: 1936434 - RNA, 19 nt, Artificial Sequence
  Description of Artificial Sequence: Synthetic oligonucleotide
cuggucaauucuguuccug

SEQ ID NO: 1936435 - RNA, 19 nt, Artificial Sequence
  Description of Artificial Sequence: Synthetic oligonucleotide
ucacggucucugcuugggu

SEQ ID NO: 1936436 - RNA, 19 nt, Artificial Sequence
  Description of Artificial Sequence: Synthetic oligonucleotide
gcgcuguaaauccagcuuc

SEQ ID NO: 1936437 - RNA, 19 nt, Artificial Sequence
  Description of Artificial Sequence: Synthetic oligonucleotide
auacucccuugauaugaaa

SEQ ID NO: 1936438 - RNA, 19 nt, Artificial Sequence
  Description of Artificial Sequence: Synthetic oligonucleotide
agcuucgcuguaauguacu

SEQ ID NO: 1936439 - RNA, 19 nt, Artificial Sequence
  Description of Artificial Sequence: Synthetic oligonucleotide
aggcucuuuguugccauca

SEQ ID NO: 1936440 - RNA, 19 nt, Artificial Sequence
  Description of Artificial Sequence: Synthetic oligonucleotide
auuagucgcuguucuuguu

SEQ ID NO: 1936441 - RNA, 19 nt, Artificial Sequence
  Description of Artificial Sequence: Synthetic oligonucleotide
gcagucuagucuaagggga

SEQ ID NO: 1936442 - RNA, 19 nt, Artificial Sequence
  Description of Artificial Sequence: Synthetic oligonucleotide
uccauuagucgcuguucuu

SEQ ID NO: 1936443 - RNA, 19 nt, Artificial Sequence
  Description of Artificial Sequence: Synthetic oligonucleotide
ccauuagucgcuguucuug

SEQ ID NO: 1936444 - RNA, 19 nt, Artificial Sequence
  Description of Artificial Sequence: Synthetic oligonucleotide
aucccaaugucagcugaca

SEQ ID NO: 1936445 - RNA, 19 nt, Artificial Sequence
  Description of Artificial Sequence: Synthetic oligonucleotide
uaaauccagcuucgcugua

SEQ ID NO: 1936446 - RNA, 19 nt, Artificial Sequence
  Description of Artificial Sequence: Synthetic oligonucleotide
cacucuccccagcaggcug

SEQ ID NO: 1936447 - RNA, 19 nt, Artificial Sequence
  Description of Artificial Sequence: Synthetic oligonucleotide
gaccugggcagucuagucu

SEQ ID NO: 1936448 - RNA, 19 nt, Artificial Sequence
  Description of Artificial Sequence: Synthetic oligonucleotide
gcuuggguccuuuuagauc

SEQ ID NO: 1936449 - RNA, 19 nt, Artificial Sequence
  Description of Artificial Sequence: Synthetic oligonucleotide
aucagccaacccugaagau

SEQ ID NO: 1936450 - RNA, 19 nt, Artificial Sequence
  Description of Artificial Sequence: Synthetic oligonucleotide
aagggcuuucuuacguuua

SEQ ID NO: 1936451 - RNA, 19 nt, Artificial Sequence
  Description of Artificial Sequence: Synthetic oligonucleotide
cuucgcuguaauguacuca

SEQ ID NO: 1936452 - RNA, 19 nt, Artificial Sequence
  Description of Artificial Sequence: Synthetic oligonucleotide
cccuugauaugaaacuguc

SEQ ID NO: 1936453 - RNA, 19 nt, Artificial Sequence
  Description of Artificial Sequence: Synthetic oligonucleotide
gcuacagcagcugaaaagu

SEQ ID NO: 1936454 - RNA, 19 nt, Artificial Sequence
  Description of Artificial Sequence: Synthetic oligonucleotide
uuugcaguugaggcucuuu

SEQ ID NO: 1936455 - RNA, 19 nt, Artificial Sequence
  Description of Artificial Sequence: Synthetic oligonucleotide
uuccgugcauaggaauacu

SEQ ID NO: 1936456 - RNA, 19 nt, Artificial Sequence
  Description of Artificial Sequence: Synthetic oligonucleotide
gacucucuacaggaaccac

SEQ ID NO: 1936457 - RNA, 19 nt, Artificial Sequence
  Description of Artificial Sequence: Synthetic oligonucleotide
aggacuucccaacgagauu

SEQ ID NO: 1936458 - RNA, 19 nt, Artificial Sequence
  Description of Artificial Sequence: Synthetic oligonucleotide
uuccgugagcuguucuuuu

SEQ ID NO: 1936459 - RNA, 19 nt, Artificial Sequence
  Description of Artificial Sequence: Synthetic oligonucleotide
gacggaaggaacacugagu

SEQ ID NO: 1936460 - RNA, 19 nt, Artificial Sequence
  Description of Artificial Sequence: Synthetic oligonucleotide
cuguaaauccagcuucgcu

SEQ ID NO: 1936461 - RNA, 19 nt, Artificial Sequence
  Description of Artificial Sequence: Synthetic oligonucleotide
gaggacuucccaacgagau

SEQ ID NO: 1936462 - RNA, 19 nt, Artificial Sequence
  Description of Artificial Sequence: Synthetic oligonucleotide
gucaaaccgcuuccgugca

SEQ ID NO: 1936463 - RNA, 19 nt, Artificial Sequence
  Description of Artificial Sequence: Synthetic oligonucleotide
ucaaaccgcuuccgugcau

SEQ ID NO: 1936464 - RNA, 19 nt, Artificial Sequence
  Description of Artificial Sequence: Synthetic oligonucleotide
ggaucccaaugucagcuga

SEQ ID NO: 1936465 - RNA, 19 nt, Artificial Sequence
  Description of Artificial Sequence: Synthetic oligonucleotide
cauuagucgcuguucuugu

SEQ ID NO: 1936466 - RNA, 19 nt, Artificial Sequence
  Description of Artificial Sequence: Synthetic oligonucleotide
cugcuuggguccuuuuaga

SEQ ID NO: 1936467 - RNA, 19 nt, Artificial Sequence
  Description of Artificial Sequence: Synthetic oligonucleotide
agucgcuguucuuguugga

SEQ ID NO: 1936468 - RNA, 19 nt, Artificial Sequence
  Description of Artificial Sequence: Synthetic oligonucleotide
ggagaaguaguuugcaguu

SEQ ID NO: 1936469 - RNA, 19 nt, Artificial Sequence
  Description of Artificial Sequence: Synthetic oligonucleotide
gggaauucugaagcccugc

SEQ ID NO: 1936470 - RNA, 19 nt, Artificial Sequence
  Description of Artificial Sequence: Synthetic oligonucleotide
gcaacuguucaaccuccac

SEQ ID NO: 1936471 - RNA, 19 nt, Artificial Sequence
  Description of Artificial Sequence: Synthetic oligonucleotide
aggggagggcuacuagaau

SEQ ID NO: 1936472 - RNA, 19 nt, Artificial Sequence
  Description of Artificial Sequence: Synthetic oligonucleotide
cagccuguacguccagcug

SEQ ID NO: 1936473 - RNA, 19 nt, Artificial Sequence
  Description of Artificial Sequence: Synthetic oligonucleotide
cuucccacugccaguggaa

SEQ ID NO: 1936474 - RNA, 19 nt, Artificial Sequence
  Description of Artificial Sequence: Synthetic oligonucleotide
cuagucuaaggggagggcu

SEQ ID NO: 1936475 - RNA, 19 nt, Artificial Sequence
  Description of Artificial Sequence: Synthetic oligonucleotide
acuugggaaugaccagaua

SEQ ID NO: 1936476 - RNA, 19 nt, Artificial Sequence
  Description of Artificial Sequence: Synthetic oligonucleotide
accacuuguuugccuguuu

SEQ ID NO: 1936477 - RNA, 19 nt, Artificial Sequence
  Description of Artificial Sequence: Synthetic oligonucleotide
ccuugauaugaaacuguca

SEQ ID NO: 1936478 - RNA, 19 nt, Artificial Sequence
  Description of Artificial Sequence: Synthetic oligonucleotide
uuccggagcucguucuguu

SEQ ID NO: 1936479 - RNA, 19 nt, Artificial Sequence
  Description of Artificial Sequence: Synthetic oligonucleotide
ucucgguuuugcgcuguaa

SEQ ID NO: 1936480 - RNA, 19 nt, Artificial Sequence
  Description of Artificial Sequence: Synthetic oligonucleotide
gaggugagugugagaggac

SEQ ID NO: 1936481 - RNA, 19 nt, Artificial Sequence
  Description of Artificial Sequence: Synthetic oligonucleotide
ugcuaacacuaagcaugga

SEQ ID NO: 1936482 - RNA, 19 nt, Artificial Sequence
  Description of Artificial Sequence: Synthetic oligonucleotide
cugggcagucuagucuaag

SEQ ID NO: 1936483 - RNA, 19 nt, Artificial Sequence
  Description of Artificial Sequence: Synthetic oligonucleotide
uacucuaggcuggccuggu

SEQ ID NO: 1936484 - RNA, 19 nt, Artificial Sequence
  Description of Artificial Sequence: Synthetic oligonucleotide
uggcccucaugggaauucu

SEQ ID NO: 1936485 - RNA, 19 nt, Artificial Sequence
  Description of Artificial Sequence: Synthetic oligonucleotide
gggcuacuagaauguuugc

SEQ ID NO: 1936486 - RNA, 19 nt, Artificial Sequence
  Description of Artificial Sequence: Synthetic oligonucleotide
gcuguaaauccagcuucgc

SEQ ID NO: 1936487 - RNA, 19 nt, Artificial Sequence
  Description of Artificial Sequence: Synthetic oligonucleotide
uggccuggucaauucuguu

SEQ ID NO: 1936488 - RNA, 19 nt, Artificial Sequence
  Description of Artificial Sequence: Synthetic oligonucleotide
acucaguaauaaggacgga

SEQ ID NO: 1936489 - RNA, 19 nt, Artificial Sequence
  Description of Artificial Sequence: Synthetic oligonucleotide
ggaauacucuaggcuggcc

SEQ ID NO: 1936490 - RNA, 19 nt, Artificial Sequence
  Description of Artificial Sequence: Synthetic oligonucleotide
agcaacuguucaaccucca

SEQ ID NO: 1936491 - RNA, 19 nt, Artificial Sequence
  Description of Artificial Sequence: Synthetic oligonucleotide
gcccugucaaaccgcuucc

SEQ ID NO: 1936492 - RNA, 19 nt, Artificial Sequence
  Description of Artificial Sequence: Synthetic oligonucleotide
ggaauucugaagcccugcu

SEQ ID NO: 1936493 - RNA, 19 nt, Artificial Sequence
  Description of Artificial Sequence: Synthetic oligonucleotide
ccagauauauuaacaugcu

SEQ ID NO: 1936494 - RNA, 19 nt, Artificial Sequence
  Description of Artificial Sequence: Synthetic oligonucleotide
uaacuccuucuggauccuc

SEQ ID NO: 1936495 - RNA, 19 nt, Artificial Sequence
  Description of Artificial Sequence: Synthetic oligonucleotide
acacucuccccagcaggcu

SEQ ID NO: 1936496 - RNA, 19 nt, Artificial Sequence
  Description of Artificial Sequence: Synthetic oligonucleotide
caaaccgcuuccgugcaua

SEQ ID NO: 1936497 - RNA, 19 nt, Artificial Sequence
  Description of Artificial Sequence: Synthetic oligonucleotide
cugcaauggcuugagccaa

SEQ ID NO: 1936498 - RNA, 19 nt, Artificial Sequence
  Description of Artificial Sequence: Synthetic oligonucleotide
guggcccucaugggaauuc

SEQ ID NO: 1936499 - RNA, 19 nt, Artificial Sequence
  Description of Artificial Sequence: Synthetic oligonucleotide
gagucagaaucucggcauu

SEQ ID NO: 1936500 - RNA, 19 nt, Artificial Sequence
  Description of Artificial Sequence: Synthetic oligonucleotide
uguggcccucaugggaauu

SEQ ID NO: 1936501 - RNA, 19 nt, Artificial Sequence
  Description of Artificial Sequence: Synthetic oligonucleotide
gcccucaugggaauucuga

SEQ ID NO: 1936502 - RNA, 19 nt, Artificial Sequence
  Description of Artificial Sequence: Synthetic oligonucleotide
cgugcauaggaauacucua

SEQ ID NO: 1936503 - RNA, 19 nt, Artificial Sequence
  Description of Artificial Sequence: Synthetic oligonucleotide
gagggcuacuagaauguuu

SEQ ID NO: 1936504 - RNA, 19 nt, Artificial Sequence
  Description of Artificial Sequence: Synthetic oligonucleotide
gcaguugaggcucuuuguu

SEQ ID NO: 1936505 - RNA, 19 nt, Artificial Sequence
  Description of Artificial Sequence: Synthetic oligonucleotide
gcugaccgggacucucuac

SEQ ID NO: 1936506 - RNA, 19 nt, Artificial Sequence
  Description of Artificial Sequence: Synthetic oligonucleotide
gcuuccgugcauaggaaua

SEQ ID NO: 1936507 - RNA, 19 nt, Artificial Sequence
  Description of Artificial Sequence: Synthetic oligonucleotide
cgugagcuguucuuuuguc

SEQ ID NO: 1936508 - RNA, 19 nt, Artificial Sequence
  Description of Artificial Sequence: Synthetic oligonucleotide
cuacagcagcugaaaaguu

SEQ ID NO: 1936509 - RNA, 19 nt, Artificial Sequence
  Description of Artificial Sequence: Synthetic oligonucleotide
cccugucaaaccgcuuccg

SEQ ID NO: 1936510 - RNA, 19 nt, Artificial Sequence
  Description of Artificial Sequence: Synthetic oligonucleotide
ggcauuucuguggcccuca

SEQ ID NO: 1936511 - RNA, 19 nt, Artificial Sequence
  Description of Artificial Sequence: Synthetic oligonucleotide
ccgugcauaggaauacucu

SEQ ID NO: 1936512 - RNA, 19 nt, Artificial Sequence
  Description of Artificial Sequence: Synthetic oligonucleotide
uggccuuccggagcucguu

SEQ ID NO: 1936513 - RNA, 19 nt, Artificial Sequence
  Description of Artificial Sequence: Synthetic oligonucleotide
guguuccgugagcuguucu

SEQ ID NO: 1936514 - RNA, 19 nt, Artificial Sequence
  Description of Artificial Sequence: Synthetic oligonucleotide
cgaagcaacuguucaaccu

SEQ ID NO: 1936515 - RNA, 19 nt, Artificial Sequence
  Description of Artificial Sequence: Synthetic oligonucleotide
cgcuguaauguacucagcu

SEQ ID NO: 1936516 - RNA, 19 nt, Artificial Sequence
  Description of Artificial Sequence: Synthetic oligonucleotide
cacugacaggcuguaauuu

SEQ ID NO: 1936517 - RNA, 19 nt, Artificial Sequence
  Description of Artificial Sequence: Synthetic oligonucleotide
ggaacacugaguagucaau

SEQ ID NO: 1936518 - RNA, 19 nt, Artificial Sequence
  Description of Artificial Sequence: Synthetic oligonucleotide
gcauggauucaaacacaaa

SEQ ID NO: 1936519 - RNA, 19 nt, Artificial Sequence
  Description of Artificial Sequence: Synthetic oligonucleotide
guaacuccuucuggauccu

SEQ ID NO: 1936520 - RNA, 19 nt, Artificial Sequence
  Description of Artificial Sequence: Synthetic oligonucleotide
ggcccucaugggaauucug

SEQ ID NO: 1936521 - RNA, 19 nt, Artificial Sequence
  Description of Artificial Sequence: Synthetic oligonucleotide
gccaucagccaacccugaa

SEQ ID NO: 1936522 - RNA, 19 nt, Artificial Sequence
  Description of Artificial Sequence: Synthetic oligonucleotide
cagcuucagcccugucaaa

SEQ ID NO: 1936523 - RNA, 19 nt, Artificial Sequence
  Description of Artificial Sequence: Synthetic oligonucleotide
ucagggccccaggcucuuc

SEQ ID NO: 1936524 - RNA, 19 nt, Artificial Sequence
  Description of Artificial Sequence: Synthetic oligonucleotide
ccugucaaaccgcuuccgu

SEQ ID NO: 1936525 - RNA, 19 nt, Artificial Sequence
  Description of Artificial Sequence: Synthetic oligonucleotide
cuucuaccauuuugcucuu

SEQ ID NO: 1936526 - RNA, 19 nt, Artificial Sequence
  Description of Artificial Sequence: Synthetic oligonucleotide
ggcugaccgggacucucua

SEQ ID NO: 1936527 - RNA, 19 nt, Artificial Sequence
  Description of Artificial Sequence: Synthetic oligonucleotide
gucuaaggggagggcuacu

SEQ ID NO: 1936528 - RNA, 19 nt, Artificial Sequence
  Description of Artificial Sequence: Synthetic oligonucleotide
guacguccagcugcugcau

SEQ ID NO: 1936529 - RNA, 19 nt, Artificial Sequence
  Description of Artificial Sequence: Synthetic oligonucleotide
ccgugagcuguucuuuugu

SEQ ID NO: 1936530 - RNA, 19 nt, Artificial Sequence
  Description of Artificial Sequence: Synthetic oligonucleotide
ccuugaccugggcagucua

SEQ ID NO: 1936531 - RNA, 19 nt, Artificial Sequence
  Description of Artificial Sequence: Synthetic oligonucleotide
cuguggcccucaugggaau

SEQ ID NO: 1936532 - RNA, 19 nt, Artificial Sequence
  Description of Artificial Sequence: Synthetic oligonucleotide
gccuguacguccagcugcu

SEQ ID NO: 1936533 - RNA, 19 nt, Artificial Sequence
  Description of Artificial Sequence: Synthetic oligonucleotide
ggagcucguucuguuggau

SEQ ID NO: 1936534 - RNA, 19 nt, Artificial Sequence
  Description of Artificial Sequence: Synthetic oligonucleotide
ccgggacucucuacaggaa

SEQ ID NO: 1936535 - RNA, 19 nt, Artificial Sequence
  Description of Artificial Sequence: Synthetic oligonucleotide
ccuguacguccagcugcug

SEQ ID NO: 1936536 - RNA, 19 nt, Artificial Sequence
  Description of Artificial Sequence: Synthetic oligonucleotide
ccugggcagucuagucuaa

SEQ ID NO: 1936537 - RNA, 19 nt, Artificial Sequence
  Description of Artificial Sequence: Synthetic oligonucleotide
ccgcuuccgugcauaggaa

SEQ ID NO: 1936538 - RNA, 19 nt, Artificial Sequence
  Description of Artificial Sequence: Synthetic oligonucleotide
gcauuucuguggcccucau

SEQ ID NO: 1936539 - RNA, 19 nt, Artificial Sequence
  Description of Artificial Sequence: Synthetic oligonucleotide
gcucguucuguuggaugau

SEQ ID NO: 1936540 - RNA, 19 nt, Artificial Sequence
  Description of Artificial Sequence: Synthetic oligonucleotide
cggcauuucuguggcccuc

SEQ ID NO: 1936541 - RNA, 19 nt, Artificial Sequence
  Description of Artificial Sequence: Synthetic oligonucleotide
cagcccugucaaaccgcuu

SEQ ID NO: 1936542 - RNA, 19 nt, Artificial Sequence
  Description of Artificial Sequence: Synthetic oligonucleotide
cgcuuccgugcauaggaau

SEQ ID NO: 1936543 - RNA, 19 nt, Artificial Sequence
  Description of Artificial Sequence: Synthetic oligonucleotide
ggcugacuuucaguaccuu

SEQ ID NO: 1936544 - RNA, 19 nt, Artificial Sequence
  Description of Artificial Sequence: Synthetic oligonucleotide
aacacuaaaauuaaaggac

SEQ ID NO: 1936545 - RNA, 19 nt, Artificial Sequence
  Description of Artificial Sequence: Synthetic oligonucleotide
uauaaaggugacuugaacg

SEQ ID NO: 1936546 - RNA, 19 nt, Artificial Sequence
  Description of Artificial Sequence: Synthetic oligonucleotide
guaaaagucaccuggaugg

SEQ ID NO: 1936547 - RNA, 19 nt, Artificial Sequence
  Description of Artificial Sequence: Synthetic oligonucleotide
aaauauugcacucagagua

SEQ ID NO: 1936548 - RNA, 19 nt, Artificial Sequence
  Description of Artificial Sequence: Synthetic oligonucleotide
aaacacuaaaauuaaagga

SEQ ID NO: 1936549 - RNA, 19 nt, Artificial Sequence
  Description of Artificial Sequence: Synthetic oligonucleotide
aaauauugcacauggagca

SEQ ID NO: 1936550 - RNA, 19 nt, Artificial Sequence
  Description of Artificial Sequence: Synthetic oligonucleotide
aacacacacacacacacac

SEQ ID NO: 1936551 - RNA, 19 nt, Artificial Sequence
  Description of Artificial Sequence: Synthetic oligonucleotide
acaagaucaauaccgaggc

SEQ ID NO: 1936552 - RNA, 19 nt, Artificial Sequence
  Description of Artificial Sequence: Synthetic oligonucleotide
acauggaacaucuagcuac

SEQ ID NO: 1936553 - RNA, 19 nt, Artificial Sequence
  Description of Artificial Sequence: Synthetic oligonucleotide
aacugauguugauaaagcc

SEQ ID NO: 1936554 - RNA, 19 nt, Artificial Sequence
  Description of Artificial Sequence: Synthetic oligonucleotide
acaaauauugcacauggag

SEQ ID NO: 1936555 - RNA, 19 nt, Artificial Sequence
  Description of Artificial Sequence: Synthetic oligonucleotide
auuuacaaggguuuuggac

SEQ ID NO: 1936556 - RNA, 19 nt, Artificial Sequence
  Description of Artificial Sequence: Synthetic oligonucleotide
uucauaacaaauauugcac

SEQ ID NO: 1936557 - RNA, 19 nt, Artificial Sequence
  Description of Artificial Sequence: Synthetic oligonucleotide
uuuacaaggguuuuggacu

SEQ ID NO: 1936558 - RNA, 19 nt, Artificial Sequence
  Description of Artificial Sequence: Synthetic oligonucleotide
aguuagggaagccaaaggg

SEQ ID NO: 1936559 - RNA, 19 nt, Artificial Sequence
  Description of Artificial Sequence: Synthetic oligonucleotide
aagaucaauaccgaggcag

SEQ ID NO: 1936560 - RNA, 19 nt, Artificial Sequence
  Description of Artificial Sequence: Synthetic oligonucleotide
ugcauauuggcacaaagaa

SEQ ID NO: 1936561 - RNA, 19 nt, Artificial Sequence
  Description of Artificial Sequence: Synthetic oligonucleotide
ucaacggaaacuuugcucu

SEQ ID NO: 1936562 - RNA, 19 nt, Artificial Sequence
  Description of Artificial Sequence: Synthetic oligonucleotide
aacaacagagcccacguga

SEQ ID NO: 1936563 - RNA, 19 nt, Artificial Sequence
  Description of Artificial Sequence: Synthetic oligonucleotide
ugacuugaacgacacaagg

SEQ ID NO: 1936564 - RNA, 19 nt, Artificial Sequence
  Description of Artificial Sequence: Synthetic oligonucleotide
aacgacacaagguucauaa

SEQ ID NO: 1936565 - RNA, 19 nt, Artificial Sequence
  Description of Artificial Sequence: Synthetic oligonucleotide
auugaaauauugcacucag

SEQ ID NO: 1936566 - RNA, 19 nt, Artificial Sequence
  Description of Artificial Sequence: Synthetic oligonucleotide
uaaaggacaggccuaauaa

SEQ ID NO: 1936567 - RNA, 19 nt, Artificial Sequence
  Description of Artificial Sequence: Synthetic oligonucleotide
auaaaggugacuugaacga

SEQ ID NO: 1936568 - RNA, 19 nt, Artificial Sequence
  Description of Artificial Sequence: Synthetic oligonucleotide
uuuggauacugccuggaag

SEQ ID NO: 1936569 - RNA, 19 nt, Artificial Sequence
  Description of Artificial Sequence: Synthetic oligonucleotide
agcuacaagauuauaaagg

SEQ ID NO: 1936570 - RNA, 19 nt, Artificial Sequence
  Description of Artificial Sequence: Synthetic oligonucleotide
guucauaacaaauauugca

SEQ ID NO: 1936571 - RNA, 19 nt, Artificial Sequence
  Description of Artificial Sequence: Synthetic oligonucleotide
uguuuguuuucaucaacgg

SEQ ID NO: 1936572 - RNA, 19 nt, Artificial Sequence
  Description of Artificial Sequence: Synthetic oligonucleotide
aaacuugggguuuuguugu

SEQ ID NO: 1936573 - RNA, 19 nt, Artificial Sequence
  Description of Artificial Sequence: Synthetic oligonucleotide
agguucauaacaaauauug

SEQ ID NO: 1936574 - RNA, 19 nt, Artificial Sequence
  Description of Artificial Sequence: Synthetic oligonucleotide
uguugauaaagccucuucu

SEQ ID NO: 1936575 - RNA, 19 nt, Artificial Sequence
  Description of Artificial Sequence: Synthetic oligonucleotide
aguaauaacgauaaauacu

SEQ ID NO: 1936576 - RNA, 19 nt, Artificial Sequence
  Description of Artificial Sequence: Synthetic oligonucleotide
accucuccuauuuacaagg

SEQ ID NO: 1936577 - RNA, 19 nt, Artificial Sequence
  Description of Artificial Sequence: Synthetic oligonucleotide
ucauaacaaauauugcaca

SEQ ID NO: 1936578 - RNA, 19 nt, Artificial Sequence
  Description of Artificial Sequence: Synthetic oligonucleotide
gaugcgaaauaccaaaaca

SEQ ID NO: 1936579 - RNA, 19 nt, Artificial Sequence
  Description of Artificial Sequence: Synthetic oligonucleotide
aucaacggaaacuuugcuc

SEQ ID NO: 1936580 - RNA, 19 nt, Artificial Sequence
  Description of Artificial Sequence: Synthetic oligonucleotide
ucuagacuggcauuggccc

SEQ ID NO: 1936581 - RNA, 19 nt, Artificial Sequence
  Description of Artificial Sequence: Synthetic oligonucleotide
cuaaggaccugcuacuagg

SEQ ID NO: 1936582 - RNA, 19 nt, Artificial Sequence
  Description of Artificial Sequence: Synthetic oligonucleotide
uuauaaaggugacuugaac

SEQ ID NO: 1936583 - RNA, 19 nt, Artificial Sequence
  Description of Artificial Sequence: Synthetic oligonucleotide
agacguagcucuaaggacc

SEQ ID NO: 1936584 - RNA, 19 nt, Artificial Sequence
  Description of Artificial Sequence: Synthetic oligonucleotide
ugcgaaauaccaaaacacu

SEQ ID NO: 1936585 - RNA, 19 nt, Artificial Sequence
  Description of Artificial Sequence: Synthetic oligonucleotide
aacuuugguucccuaacug

SEQ ID NO: 1936586 - RNA, 19 nt, Artificial Sequence
  Description of Artificial Sequence: Synthetic oligonucleotide
gauaaagccucuucugcgc

SEQ ID NO: 1936587 - RNA, 19 nt, Artificial Sequence
  Description of Artificial Sequence: Synthetic oligonucleotide
aaauucagucuuuggcgag

SEQ ID NO: 1936588 - RNA, 19 nt, Artificial Sequence
  Description of Artificial Sequence: Synthetic oligonucleotide
aaaagcgccaggaacaaca

SEQ ID NO: 1936589 - RNA, 19 nt, Artificial Sequence
  Description of Artificial Sequence: Synthetic oligonucleotide
ucuugauuuggcuugcaac

SEQ ID NO: 1936590 - RNA, 19 nt, Artificial Sequence
  Description of Artificial Sequence: Synthetic oligonucleotide
aauauugcacauggagcac

SEQ ID NO: 1936591 - RNA, 19 nt, Artificial Sequence
  Description of Artificial Sequence: Synthetic oligonucleotide
caggcuauugaaauauugc

SEQ ID NO: 1936592 - RNA, 19 nt, Artificial Sequence
  Description of Artificial Sequence: Synthetic oligonucleotide
uaauaauaguaauaacgau

SEQ ID NO: 1936593 - RNA, 19 nt, Artificial Sequence
  Description of Artificial Sequence: Synthetic oligonucleotide
gaaacuuugcucuugccaa

SEQ ID NO: 1936594 - RNA, 19 nt, Artificial Sequence
  Description of Artificial Sequence: Synthetic oligonucleotide
cucucuugccccaaaaggc

SEQ ID NO: 1936595 - RNA, 19 nt, Artificial Sequence
  Description of Artificial Sequence: Synthetic oligonucleotide
auacucuugauuuggcuug

SEQ ID NO: 1936596 - RNA, 19 nt, Artificial Sequence
  Description of Artificial Sequence: Synthetic oligonucleotide
uugcauauuggcacaaaga

SEQ ID NO: 1936597 - RNA, 19 nt, Artificial Sequence
  Description of Artificial Sequence: Synthetic oligonucleotide
guugauaaagccucuucug

SEQ ID NO: 1936598 - RNA, 19 nt, Artificial Sequence
  Description of Artificial Sequence: Synthetic oligonucleotide
ugggguccaagucagaaga

SEQ ID NO: 1936599 - RNA, 19 nt, Artificial Sequence
  Description of Artificial Sequence: Synthetic oligonucleotide
ucuccuauuuacaaggguu

SEQ ID NO: 1936600 - RNA, 19 nt, Artificial Sequence
  Description of Artificial Sequence: Synthetic oligonucleotide
aaaaggcaagaccacggca

SEQ ID NO: 1936601 - RNA, 19 nt, Artificial Sequence
  Description of Artificial Sequence: Synthetic oligonucleotide
aagcaacacuccuucuuac

SEQ ID NO: 1936602 - RNA, 19 nt, Artificial Sequence
  Description of Artificial Sequence: Synthetic oligonucleotide
aacuuugcucuugccaacc

SEQ ID NO: 1936603 - RNA, 19 nt, Artificial Sequence
  Description of Artificial Sequence: Synthetic oligonucleotide
acuaccaggcuauugaaau

SEQ ID NO: 1936604 - RNA, 19 nt, Artificial Sequence
  Description of Artificial Sequence: Synthetic oligonucleotide
uggaacaucuagcuacaag

SEQ ID NO: 1936605 - RNA, 19 nt, Artificial Sequence
  Description of Artificial Sequence: Synthetic oligonucleotide
ucuaacuaggugcgcaggc

SEQ ID NO: 1936606 - RNA, 19 nt, Artificial Sequence
  Description of Artificial Sequence: Synthetic oligonucleotide
ucaguaggcagcugggucc

SEQ ID NO: 1936607 - RNA, 19 nt, Artificial Sequence
  Description of Artificial Sequence: Synthetic oligonucleotide
cacacacacacacacacag

SEQ ID NO: 1936608 - RNA, 19 nt, Artificial Sequence
  Description of Artificial Sequence: Synthetic oligonucleotide
aggcuauugaaauauugca

SEQ ID NO: 1936609 - RNA, 19 nt, Artificial Sequence
  Description of Artificial Sequence: Synthetic oligonucleotide
caggccaacacacacacac

SEQ ID NO: 1936610 - RNA, 19 nt, Artificial Sequence
  Description of Artificial Sequence: Synthetic oligonucleotide
cacuaaaauuaaaggacag

SEQ ID NO: 1936611 - RNA, 19 nt, Artificial Sequence
  Description of Artificial Sequence: Synthetic oligonucleotide
ucggcugaaacaaaagcaa

SEQ ID NO: 1936612 - RNA, 19 nt, Artificial Sequence
  Description of Artificial Sequence: Synthetic oligonucleotide
ggugaggucagcuaguggc

SEQ ID NO: 1936613 - RNA, 19 nt, Artificial Sequence
  Description of Artificial Sequence: Synthetic oligonucleotide
ucuaaggaccugcuacuag

SEQ ID NO: 1936614 - RNA, 19 nt, Artificial Sequence
  Description of Artificial Sequence: Synthetic oligonucleotide
gaacaucagaggcugcccg

SEQ ID NO: 1936615 - RNA, 19 nt, Artificial Sequence
  Description of Artificial Sequence: Synthetic oligonucleotide
  modified_base (3)..(3): a, c, u, g, unknown or other
agngccaaggacgaguuag

SEQ ID NO: 1936616 - RNA, 19 nt, Artificial Sequence
  Description of Artificial Sequence: Synthetic oligonucleotide
uuuucaucaacggaaacuu

SEQ ID NO: 1936617 - RNA, 19 nt, Artificial Sequence
  Description of Artificial Sequence: Synthetic oligonucleotide
aaccucuccuauuuacaag

SEQ ID NO: 1936618 - RNA, 19 nt, Artificial Sequence
  Description of Artificial Sequence: Synthetic oligonucleotide
gaguuagggaagccaaagg

SEQ ID NO: 1936619 - RNA, 19 nt, Artificial Sequence
  Description of Artificial Sequence: Synthetic oligonucleotide
uugcacauggagcacagaa

SEQ ID NO: 1936620 - RNA, 19 nt, Artificial Sequence
  Description of Artificial Sequence: Synthetic oligonucleotide
aaggacgaguuagggaagc

SEQ ID NO: 1936621 - RNA, 19 nt, Artificial Sequence
  Description of Artificial Sequence: Synthetic oligonucleotide
  modified_base (9)..(9): a, c, u, g, unknown or other
agcggaagngccaaggacg

SEQ ID NO: 1936622 - RNA, 19 nt, Artificial Sequence
  Description of Artificial Sequence: Synthetic oligonucleotide
cuuacuaccaggcuauuga

SEQ ID NO: 1936623 - RNA, 19 nt, Artificial Sequence
  Description of Artificial Sequence: Synthetic oligonucleotide
cacacacacacacagguug

SEQ ID NO: 1936624 - RNA, 19 nt, Artificial Sequence
  Description of Artificial Sequence: Synthetic oligonucleotide
uuggacuugcauugcauug

SEQ ID NO: 1936625 - RNA, 19 nt, Artificial Sequence
  Description of Artificial Sequence: Synthetic oligonucleotide
uugguucccuaacugaugu

SEQ ID NO: 1936626 - RNA, 19 nt, Artificial Sequence
  Description of Artificial Sequence: Synthetic oligonucleotide
acggaaacuuugcucuugc

SEQ ID NO: 1936627 - RNA, 19 nt, Artificial Sequence
  Description of Artificial Sequence: Synthetic oligonucleotide
aaaggacaggccuaauaau

SEQ ID NO: 1936628 - RNA, 19 nt, Artificial Sequence
  Description of Artificial Sequence: Synthetic oligonucleotide
aaagccucuucugcgcagc

SEQ ID NO: 1936629 - RNA, 19 nt, Artificial Sequence
  Description of Artificial Sequence: Synthetic oligonucleotide
cacacacacacacacacac

SEQ ID NO: 1936630 - RNA, 19 nt, Artificial Sequence
  Description of Artificial Sequence: Synthetic oligonucleotide
acgauaaauacucuugauu

SEQ ID NO: 1936631 - RNA, 19 nt, Artificial Sequence
  Description of Artificial Sequence: Synthetic oligonucleotide
uuggcgaggagccacggga

SEQ ID NO: 1936632 - RNA, 19 nt, Artificial Sequence
  Description of Artificial Sequence: Synthetic oligonucleotide
cuauugaaauauugcacuc

SEQ ID NO: 1936633 - RNA, 19 nt, Artificial Sequence
  Description of Artificial Sequence: Synthetic oligonucleotide
cucuagacuggcauuggcc

SEQ ID NO: 1936634 - RNA, 19 nt, Artificial Sequence
  Description of Artificial Sequence: Synthetic oligonucleotide
aauaccgaggcaggaugcg

SEQ ID NO: 1936635 - RNA, 19 nt, Artificial Sequence
  Description of Artificial Sequence: Synthetic oligonucleotide
uucagagcacucaguaggc

SEQ ID NO: 1936636 - RNA, 19 nt, Artificial Sequence
  Description of Artificial Sequence: Synthetic oligonucleotide
aauuaaaggacaggccuaa

SEQ ID NO: 1936637 - RNA, 19 nt, Artificial Sequence
  Description of Artificial Sequence: Synthetic oligonucleotide
aacaucuagcuacaagauu

SEQ ID NO: 1936638 - RNA, 19 nt, Artificial Sequence
  Description of Artificial Sequence: Synthetic oligonucleotide
agcgccaggaacaacagag

SEQ ID NO: 1936639 - RNA, 19 nt, Artificial Sequence
  Description of Artificial Sequence: Synthetic oligonucleotide
agaagagggcagaaaagcg

SEQ ID NO: 1936640 - RNA, 19 nt, Artificial Sequence
  Description of Artificial Sequence: Synthetic oligonucleotide
uccaagucagaagagggca

SEQ ID NO: 1936641 - RNA, 19 nt, Artificial Sequence
  Description of Artificial Sequence: Synthetic oligonucleotide
acaucuagcuacaagauua

SEQ ID NO: 1936642 - RNA, 19 nt, Artificial Sequence
  Description of Artificial Sequence: Synthetic oligonucleotide
uccaacuuuuggauacugc

SEQ ID NO: 1936643 - RNA, 19 nt, Artificial Sequence
  Description of Artificial Sequence: Synthetic oligonucleotide
gagacguagcucuaaggac

SEQ ID NO: 1936644 - RNA, 19 nt, Artificial Sequence
  Description of Artificial Sequence: Synthetic oligonucleotide
uuuggcuugcaaccucucc

SEQ ID NO: 1936645 - RNA, 19 nt, Artificial Sequence
  Description of Artificial Sequence: Synthetic oligonucleotide
aggcaggaccugcagaugg

SEQ ID NO: 1936646 - RNA, 19 nt, Artificial Sequence
  Description of Artificial Sequence: Synthetic oligonucleotide
uaauaacgauaaauacucu

SEQ ID NO: 1936647 - RNA, 19 nt, Artificial Sequence
  Description of Artificial Sequence: Synthetic oligonucleotide
uaaggaccugcuacuaggc

SEQ ID NO: 1936648 - RNA, 19 nt, Artificial Sequence
  Description of Artificial Sequence: Synthetic oligonucleotide
guuagggaagccaaagggc

SEQ ID NO: 1936649 - RNA, 19 nt, Artificial Sequence
  Description of Artificial Sequence: Synthetic oligonucleotide
acuuuuggauacugccugg

SEQ ID NO: 1936650 - RNA, 19 nt, Artificial Sequence
  Description of Artificial Sequence: Synthetic oligonucleotide
aaagucaccuggauggaca

SEQ ID NO: 1936651 - RNA, 19 nt, Artificial Sequence
  Description of Artificial Sequence: Synthetic oligonucleotide
uaacuaggugcgcaggcca

SEQ ID NO: 1936652 - RNA, 19 nt, Artificial Sequence
  Description of Artificial Sequence: Synthetic oligonucleotide
aaaggcaagaccacggcaa

SEQ ID NO: 1936653 - RNA, 19 nt, Artificial Sequence
  Description of Artificial Sequence: Synthetic oligonucleotide
ggagccacgggauaugggg

SEQ ID NO: 1936654 - RNA, 19 nt, Artificial Sequence
  Description of Artificial Sequence: Synthetic oligonucleotide
acauaggucggcugaaaca

SEQ ID NO: 1936655 - RNA, 19 nt, Artificial Sequence
  Description of Artificial Sequence: Synthetic oligonucleotide
ugucuaacuaggugcgcag

SEQ ID NO: 1936656 - RNA, 19 nt, Artificial Sequence
  Description of Artificial Sequence: Synthetic oligonucleotide
ucucgccugucucagggag

SEQ ID NO: 1936657 - RNA, 19 nt, Artificial Sequence
  Description of Artificial Sequence: Synthetic oligonucleotide
  modified_base (16)..(16): a, c, u, g, unknown or other
cugguggagcggaagngcc

SEQ ID NO: 1936658 - RNA, 19 nt, Artificial Sequence
  Description of Artificial Sequence: Synthetic oligonucleotide
auugcauugcccugcacau

SEQ ID NO: 1936659 - RNA, 19 nt, Artificial Sequence
  Description of Artificial Sequence: Synthetic oligonucleotide
guuguuuguuuucaucaac

SEQ ID NO: 1936660 - RNA, 19 nt, Artificial Sequence
  Description of Artificial Sequence: Synthetic oligonucleotide
ugcaaccucuccuauuuac

SEQ ID NO: 1936661 - RNA, 19 nt, Artificial Sequence
  Description of Artificial Sequence: Synthetic oligonucleotide
uauuuacaaggguuuugga

SEQ ID NO: 1936662 - RNA, 19 nt, Artificial Sequence
  Description of Artificial Sequence: Synthetic oligonucleotide
  modified_base (10)..(10): a, c, u, g, unknown or other
gagcggaagngccaaggac

SEQ ID NO: 1936663 - RNA, 19 nt, Artificial Sequence
  Description of Artificial Sequence: Synthetic oligonucleotide
uuuuggacuugcauugcau

SEQ ID NO: 1936664 - RNA, 19 nt, Artificial Sequence
  Description of Artificial Sequence: Synthetic oligonucleotide
ucagcuaguggccccggcc

SEQ ID NO: 1936665 - RNA, 19 nt, Artificial Sequence
  Description of Artificial Sequence: Synthetic oligonucleotide
caaaaggcaagaccacggc

SEQ ID NO: 1936666 - RNA, 19 nt, Artificial Sequence
  Description of Artificial Sequence: Synthetic oligonucleotide
aggguuuuggacuugcauu

SEQ ID NO: 1936667 - RNA, 19 nt, Artificial Sequence
  Description of Artificial Sequence: Synthetic oligonucleotide
cacucagaguaaaagucac

SEQ ID NO: 1936668 - RNA, 19 nt, Artificial Sequence
  Description of Artificial Sequence: Synthetic oligonucleotide
caaauucagucuuuggcga

SEQ ID NO: 1936669 - RNA, 19 nt, Artificial Sequence
  Description of Artificial Sequence: Synthetic oligonucleotide
uccacaaauucagucuuug

SEQ ID NO: 1936670 - RNA, 19 nt, Artificial Sequence
  Description of Artificial Sequence: Synthetic oligonucleotide
uggacuugcauugcauugc

SEQ ID NO: 1936671 - RNA, 19 nt, Artificial Sequence
  Description of Artificial Sequence: Synthetic oligonucleotide
cagagcacucaguaggcag

SEQ ID NO: 1936672 - RNA, 19 nt, Artificial Sequence
  Description of Artificial Sequence: Synthetic oligonucleotide
aauauugcacucagaguaa

SEQ ID NO: 1936673 - RNA, 19 nt, Artificial Sequence
  Description of Artificial Sequence: Synthetic oligonucleotide
aaggacaggccuaauaaua

SEQ ID NO: 1936674 - RNA, 19 nt, Artificial Sequence
  Description of Artificial Sequence: Synthetic oligonucleotide
caauaccgaggcaggaugc

SEQ ID NO: 1936675 - RNA, 19 nt, Artificial Sequence
  Description of Artificial Sequence: Synthetic oligonucleotide
ggguuuuggacuugcauug

SEQ ID NO: 1936676 - RNA, 19 nt, Artificial Sequence
  Description of Artificial Sequence: Synthetic oligonucleotide
agaucaauaccgaggcagg

SEQ ID NO: 1936677 - RNA, 19 nt, Artificial Sequence
  Description of Artificial Sequence: Synthetic oligonucleotide
gugacuccagcccugcucc

SEQ ID NO: 1936678 - RNA, 19 nt, Artificial Sequence
  Description of Artificial Sequence: Synthetic oligonucleotide
ugcgcaggccaacacacac

SEQ ID NO: 1936679 - RNA, 19 nt, Artificial Sequence
  Description of Artificial Sequence: Synthetic oligonucleotide
uugggguccaagucagaag

SEQ ID NO: 1936680 - RNA, 19 nt, Artificial Sequence
  Description of Artificial Sequence: Synthetic oligonucleotide
uuuggcgaggagccacggg

SEQ ID NO: 1936681 - RNA, 19 nt, Artificial Sequence
  Description of Artificial Sequence: Synthetic oligonucleotide
caacacuccuucuuacuac

SEQ ID NO: 1936682 - RNA, 19 nt, Artificial Sequence
  Description of Artificial Sequence: Synthetic oligonucleotide
uuuuggauacugccuggaa

SEQ ID NO: 1936683 - RNA, 19 nt, Artificial Sequence
  Description of Artificial Sequence: Synthetic oligonucleotide
ugggagacguagcucuaag

SEQ ID NO: 1936684 - RNA, 19 nt, Artificial Sequence
  Description of Artificial Sequence: Synthetic oligonucleotide
aggccuaauaauaauagua

SEQ ID NO: 1936685 - RNA, 19 nt, Artificial Sequence
  Description of Artificial Sequence: Synthetic oligonucleotide
caggaugucuaacuaggug

SEQ ID NO: 1936686 - RNA, 19 nt, Artificial Sequence
  Description of Artificial Sequence: Synthetic oligonucleotide
uaggucggcugaaacaaaa

SEQ ID NO: 1936687 - RNA, 19 nt, Artificial Sequence
  Description of Artificial Sequence: Synthetic oligonucleotide
ggagacguagcucuaagga

SEQ ID NO: 1936688 - RNA, 19 nt, Artificial Sequence
  Description of Artificial Sequence: Synthetic oligonucleotide
acuggcauuggccccacga

SEQ ID NO: 1936689 - RNA, 19 nt, Artificial Sequence
  Description of Artificial Sequence: Synthetic oligonucleotide
ccaaaaggcaagaccacgg

SEQ ID NO: 1936690 - RNA, 19 nt, Artificial Sequence
  Description of Artificial Sequence: Synthetic oligonucleotide
cuugcauugcauugcccug

SEQ ID NO: 1936691 - RNA, 19 nt, Artificial Sequence
  Description of Artificial Sequence: Synthetic oligonucleotide
uaccaggcuauugaaauau

SEQ ID NO: 1936692 - RNA, 19 nt, Artificial Sequence
  Description of Artificial Sequence: Synthetic oligonucleotide
aacggaaacuuugcucuug

SEQ ID NO: 1936693 - RNA, 19 nt, Artificial Sequence
  Description of Artificial Sequence: Synthetic oligonucleotide
auaaagccucuucugcgca

SEQ ID NO: 1936694 - RNA, 19 nt, Artificial Sequence
  Description of Artificial Sequence: Synthetic oligonucleotide
  modified_base (12)..(12): a, c, u, g, unknown or other
uggagcggaagngccaagg

SEQ ID NO: 1936695 - RNA, 19 nt, Artificial Sequence
  Description of Artificial Sequence: Synthetic oligonucleotide
acgacacaagguucauaac

SEQ ID NO: 1936696 - RNA, 19 nt, Artificial Sequence
  Description of Artificial Sequence: Synthetic oligonucleotide
ucuuacuaccaggcuauug

SEQ ID NO: 1936697 - RNA, 19 nt, Artificial Sequence
  Description of Artificial Sequence: Synthetic oligonucleotide
aaggaccugcuacuaggca

SEQ ID NO: 1936698 - RNA, 19 nt, Artificial Sequence
  Description of Artificial Sequence: Synthetic oligonucleotide
uuacuaccaggcuauugaa

SEQ ID NO: 1936699 - RNA, 19 nt, Artificial Sequence
  Description of Artificial Sequence: Synthetic oligonucleotide
uuuguugugggauguuguu

SEQ ID NO: 1936700 - RNA, 19 nt, Artificial Sequence
  Description of Artificial Sequence: Synthetic oligonucleotide
uaaagccucuucugcgcag

SEQ ID NO: 1936701 - RNA, 19 nt, Artificial Sequence
  Description of Artificial Sequence: Synthetic oligonucleotide
ugauuuggcuugcaaccuc

SEQ ID NO: 1936702 - RNA, 19 nt, Artificial Sequence
  Description of Artificial Sequence: Synthetic oligonucleotide
cuagacuggcauuggcccc

SEQ ID NO: 1936703 - RNA, 19 nt, Artificial Sequence
  Description of Artificial Sequence: Synthetic oligonucleotide
ggcaggaugucuaacuagg

SEQ ID NO: 1936704 - RNA, 19 nt, Artificial Sequence
  Description of Artificial Sequence: Synthetic oligonucleotide
gucggcugaaacaaaagca

SEQ ID NO: 1936705 - RNA, 19 nt, Artificial Sequence
  Description of Artificial Sequence: Synthetic oligonucleotide
guuuuguugugggauguug

SEQ ID NO: 1936706 - RNA, 19 nt, Artificial Sequence
  Description of Artificial Sequence: Synthetic oligonucleotide
uuacaaggguuuuggacuu

SEQ ID NO: 1936707 - RNA, 19 nt, Artificial Sequence
  Description of Artificial Sequence: Synthetic oligonucleotide
ccaacacacacacacacac

SEQ ID NO: 1936708 - RNA, 19 nt, Artificial Sequence
  Description of Artificial Sequence: Synthetic oligonucleotide
ggucggcugaaacaaaagc

SEQ ID NO: 1936709 - RNA, 19 nt, Artificial Sequence
  Description of Artificial Sequence: Synthetic oligonucleotide
ugcuacuaggcagcaaggc

SEQ ID NO: 1936710 - RNA, 19 nt, Artificial Sequence
  Description of Artificial Sequence: Synthetic oligonucleotide
cuuugcucuugccaaccag

SEQ ID NO: 1936711 - RNA, 19 nt, Artificial Sequence
  Description of Artificial Sequence: Synthetic oligonucleotide
acaagguucauaacaaaua

SEQ ID NO: 1936712 - RNA, 19 nt, Artificial Sequence
  Description of Artificial Sequence: Synthetic oligonucleotide
cuaacuaggugcgcaggcc

SEQ ID NO: 1936713 - RNA, 19 nt, Artificial Sequence
  Description of Artificial Sequence: Synthetic oligonucleotide
aaagcgccaggaacaacag

SEQ ID NO: 1936714 - RNA, 19 nt, Artificial Sequence
  Description of Artificial Sequence: Synthetic oligonucleotide
ggaugucuaacuaggugcg

SEQ ID NO: 1936715 - RNA, 19 nt, Artificial Sequence
  Description of Artificial Sequence: Synthetic oligonucleotide
gcuacuaggcagcaaggcc

SEQ ID NO: 1936716 - RNA, 19 nt, Artificial Sequence
  Description of Artificial Sequence: Synthetic oligonucleotide
cacucaguaggcagcuggg

SEQ ID NO: 1936717 - RNA, 19 nt, Artificial Sequence
  Description of Artificial Sequence: Synthetic oligonucleotide
uugcauugcauugcccugc

SEQ ID NO: 1936718 - RNA, 19 nt, Artificial Sequence
  Description of Artificial Sequence: Synthetic oligonucleotide
gguucauaacaaauauugc

SEQ ID NO: 1936719 - RNA, 19 nt, Artificial Sequence
  Description of Artificial Sequence: Synthetic oligonucleotide
caggaugcgaaauaccaaa

SEQ ID NO: 1936720 - RNA, 19 nt, Artificial Sequence
  Description of Artificial Sequence: Synthetic oligonucleotide
cacauaggucggcugaaac

SEQ ID NO: 1936721 - RNA, 19 nt, Artificial Sequence
  Description of Artificial Sequence: Synthetic oligonucleotide
cacuccuucuuacuaccag

SEQ ID NO: 1936722 - RNA, 19 nt, Artificial Sequence
  Description of Artificial Sequence: Synthetic oligonucleotide
uggugucugggagacguag

SEQ ID NO: 1936723 - RNA, 19 nt, Artificial Sequence
  Description of Artificial Sequence: Synthetic oligonucleotide
ugggguuuuguugugggau

SEQ ID NO: 1936724 - RNA, 19 nt, Artificial Sequence
  Description of Artificial Sequence: Synthetic oligonucleotide
cucaguaggcagcuggguc

SEQ ID NO: 1936725 - RNA, 19 nt, Artificial Sequence
  Description of Artificial Sequence: Synthetic oligonucleotide
auuauaaaggugacuugaa

SEQ ID NO: 1936726 - RNA, 19 nt, Artificial Sequence
  Description of Artificial Sequence: Synthetic oligonucleotide
gaacaacagagcccacgug

SEQ ID NO: 1936727 - RNA, 19 nt, Artificial Sequence
  Description of Artificial Sequence: Synthetic oligonucleotide
agcccacgugacuccagcc

SEQ ID NO: 1936728 - RNA, 19 nt, Artificial Sequence
  Description of Artificial Sequence: Synthetic oligonucleotide
cugcuacuaggcagcaagg

SEQ ID NO: 1936729 - RNA, 19 nt, Artificial Sequence
  Description of Artificial Sequence: Synthetic oligonucleotide
uaaaagucaccuggaugga

SEQ ID NO: 1936730 - RNA, 19 nt, Artificial Sequence
  Description of Artificial Sequence: Synthetic oligonucleotide
aagguucauaacaaauauu

SEQ ID NO: 1936731 - RNA, 19 nt, Artificial Sequence
  Description of Artificial Sequence: Synthetic oligonucleotide
uggguccuaacacuuccaa

SEQ ID NO: 1936732 - RNA, 19 nt, Artificial Sequence
  Description of Artificial Sequence: Synthetic oligonucleotide
cacauggagcacagaaaac

SEQ ID NO: 1936733 - RNA, 19 nt, Artificial Sequence
  Description of Artificial Sequence: Synthetic oligonucleotide
gugacuugaacgacacaag

SEQ ID NO: 1936734 - RNA, 19 nt, Artificial Sequence
  Description of Artificial Sequence: Synthetic oligonucleotide
acacacacacacagguugg

SEQ ID NO: 1936735 - RNA, 19 nt, Artificial Sequence
  Description of Artificial Sequence: Synthetic oligonucleotide
  modified_base (2)..(2): a, c, u, g, unknown or other
gngccaaggacgaguuagg

SEQ ID NO: 1936736 - RNA, 19 nt, Artificial Sequence
  Description of Artificial Sequence: Synthetic oligonucleotide
cauaggucggcugaaacaa

SEQ ID NO: 1936737 - RNA, 19 nt, Artificial Sequence
  Description of Artificial Sequence: Synthetic oligonucleotide
gguucccuaacugauguug

SEQ ID NO: 1936738 - RNA, 19 nt, Artificial Sequence
  Description of Artificial Sequence: Synthetic oligonucleotide
augucuaacuaggugcgca

SEQ ID NO: 1936739 - RNA, 19 nt, Artificial Sequence
  Description of Artificial Sequence: Synthetic oligonucleotide
ggaugcgaaauaccaaaac

SEQ ID NO: 1936740 - RNA, 19 nt, Artificial Sequence
  Description of Artificial Sequence: Synthetic oligonucleotide
guagugcaacuuugguucc

SEQ ID NO: 1936741 - RNA, 19 nt, Artificial Sequence
  Description of Artificial Sequence: Synthetic oligonucleotide
ugggcaggaugucuaacua

SEQ ID NO: 1936742 - RNA, 19 nt, Artificial Sequence
  Description of Artificial Sequence: Synthetic oligonucleotide
ugcauugcauugcccugca

SEQ ID NO: 1936743 - RNA, 19 nt, Artificial Sequence
  Description of Artificial Sequence: Synthetic oligonucleotide
cauaacaaauauugcacau

SEQ ID NO: 1936744 - RNA, 19 nt, Artificial Sequence
  Description of Artificial Sequence: Synthetic oligonucleotide
ccaaggacgaguuagggaa

SEQ ID NO: 1936745 - RNA, 19 nt, Artificial Sequence
  Description of Artificial Sequence: Synthetic oligonucleotide
caagguucauaacaaauau

SEQ ID NO: 1936746 - RNA, 19 nt, Artificial Sequence
  Description of Artificial Sequence: Synthetic oligonucleotide
aggacgaguuagggaagcc

SEQ ID NO: 1936747 - RNA, 19 nt, Artificial Sequence
  Description of Artificial Sequence: Synthetic oligonucleotide
gcaacuuugguucccuaac

SEQ ID NO: 1936748 - RNA, 19 nt, Artificial Sequence
  Description of Artificial Sequence: Synthetic oligonucleotide
uaccgaggcaggaugcgaa

SEQ ID NO: 1936749 - RNA, 19 nt, Artificial Sequence
  Description of Artificial Sequence: Synthetic oligonucleotide
agggcagucuugaaggaug

SEQ ID NO: 1936750 - RNA, 19 nt, Artificial Sequence
  Description of Artificial Sequence: Synthetic oligonucleotide
cauggaacaucuagcuaca

SEQ ID NO: 1936751 - RNA, 19 nt, Artificial Sequence
  Description of Artificial Sequence: Synthetic oligonucleotide
ucuucugcgcagccccucu

SEQ ID NO: 1936752 - RNA, 19 nt, Artificial Sequence
  Description of Artificial Sequence: Synthetic oligonucleotide
gcaagcggcguguaggcag

SEQ ID NO: 1936753 - RNA, 19 nt, Artificial Sequence
  Description of Artificial Sequence: Synthetic oligonucleotide
ccaggcuauugaaauauug

SEQ ID NO: 1936754 - RNA, 19 nt, Artificial Sequence
  Description of Artificial Sequence: Synthetic oligonucleotide
acgacucucgccugucuca

SEQ ID NO: 1936755 - RNA, 19 nt, Artificial Sequence
  Description of Artificial Sequence: Synthetic oligonucleotide
gaugucuaacuaggugcgc

SEQ ID NO: 1936756 - RNA, 19 nt, Artificial Sequence
  Description of Artificial Sequence: Synthetic oligonucleotide
gacgaguuagggaagccaa

SEQ ID NO: 1936757 - RNA, 19 nt, Artificial Sequence
  Description of Artificial Sequence: Synthetic oligonucleotide
acgggauauggggagcagg

SEQ ID NO: 1936758 - RNA, 19 nt, Artificial Sequence
  Description of Artificial Sequence: Synthetic oligonucleotide
ggccaacacacacacacac

SEQ ID NO: 1936759 - RNA, 19 nt, Artificial Sequence
  Description of Artificial Sequence: Synthetic oligonucleotide
uagacuggcauuggcccca

SEQ ID NO: 1936760 - RNA, 19 nt, Artificial Sequence
  Description of Artificial Sequence: Synthetic oligonucleotide
gggagacguagcucuaagg

SEQ ID NO: 1936761 - RNA, 19 nt, Artificial Sequence
  Description of Artificial Sequence: Synthetic oligonucleotide
ggugccgcccuccagcucc

SEQ ID NO: 1936762 - RNA, 19 nt, Artificial Sequence
  Description of Artificial Sequence: Synthetic oligonucleotide
cacacacacacacacaggu

SEQ ID NO: 1936763 - RNA, 19 nt, Artificial Sequence
  Description of Artificial Sequence: Synthetic oligonucleotide
agaaaacuugggguuuugu

SEQ ID NO: 1936764 - RNA, 19 nt, Artificial Sequence
  Description of Artificial Sequence: Synthetic oligonucleotide
gacauggaacaucuagcua

SEQ ID NO: 1936765 - RNA, 19 nt, Artificial Sequence
  Description of Artificial Sequence: Synthetic oligonucleotide
  modified_base (15)..(15): a, c, u, g, unknown or other
ugguggagcggaagngcca

SEQ ID NO: 1936766 - RNA, 19 nt, Artificial Sequence
  Description of Artificial Sequence: Synthetic oligonucleotide
guccaagucagaagagggc

SEQ ID NO: 1936767 - RNA, 19 nt, Artificial Sequence
  Description of Artificial Sequence: Synthetic oligonucleotide
ccagguagugcaacuuugg

SEQ ID NO: 1936768 - RNA, 19 nt, Artificial Sequence
  Description of Artificial Sequence: Synthetic oligonucleotide
caagcggcguguaggcagc

SEQ ID NO: 1936769 - RNA, 19 nt, Artificial Sequence
  Description of Artificial Sequence: Synthetic oligonucleotide
acacacacacacacacagg

SEQ ID NO: 1936770 - RNA, 19 nt, Artificial Sequence
  Description of Artificial Sequence: Synthetic oligonucleotide
gagcccacgugacuccagc

SEQ ID NO: 1936771 - RNA, 19 nt, Artificial Sequence
  Description of Artificial Sequence: Synthetic oligonucleotide
aggacaggccuaauaauaa

SEQ ID NO: 1936772 - RNA, 19 nt, Artificial Sequence
  Description of Artificial Sequence: Synthetic oligonucleotide
cuucuuacuaccaggcuau

SEQ ID NO: 1936773 - RNA, 19 nt, Artificial Sequence
  Description of Artificial Sequence: Synthetic oligonucleotide
uucccuaacugauguugau

SEQ ID NO: 1936774 - RNA, 19 nt, Artificial Sequence
  Description of Artificial Sequence: Synthetic oligonucleotide
aucaauaccgaggcaggau

SEQ ID NO: 1936775 - RNA, 19 nt, Artificial Sequence
  Description of Artificial Sequence: Synthetic oligonucleotide
gacuugaacgacacaaggu

SEQ ID NO: 1936776 - RNA, 19 nt, Artificial Sequence
  Description of Artificial Sequence: Synthetic oligonucleotide
gucugggagacguagcucu

SEQ ID NO: 1936777 - RNA, 19 nt, Artificial Sequence
  Description of Artificial Sequence: Synthetic oligonucleotide
gaucaauaccgaggcagga

SEQ ID NO: 1936778 - RNA, 19 nt, Artificial Sequence
  Description of Artificial Sequence: Synthetic oligonucleotide
cacaagguucauaacaaau

SEQ ID NO: 1936779 - RNA, 19 nt, Artificial Sequence
  Description of Artificial Sequence: Synthetic oligonucleotide
acuaggugcgcaggccaac

SEQ ID NO: 1936780 - RNA, 19 nt, Artificial Sequence
  Description of Artificial Sequence: Synthetic oligonucleotide
ggacuugcauugcauugcc

SEQ ID NO: 1936781 - RNA, 19 nt, Artificial Sequence
  Description of Artificial Sequence: Synthetic oligonucleotide
aggugcgcaggccaacaca

SEQ ID NO: 1936782 - RNA, 19 nt, Artificial Sequence
  Description of Artificial Sequence: Synthetic oligonucleotide
gcauauuggcacaaagaac

SEQ ID NO: 1936783 - RNA, 19 nt, Artificial Sequence
  Description of Artificial Sequence: Synthetic oligonucleotide
ccacaaauucagucuuugg

SEQ ID NO: 1936784 - RNA, 19 nt, Artificial Sequence
  Description of Artificial Sequence: Synthetic oligonucleotide
uccuauuuacaaggguuuu

SEQ ID NO: 1936785 - RNA, 19 nt, Artificial Sequence
  Description of Artificial Sequence: Synthetic oligonucleotide
uggcuugcaaccucuccua

SEQ ID NO: 1936786 - RNA, 19 nt, Artificial Sequence
  Description of Artificial Sequence: Synthetic oligonucleotide
cacacacacacagguuggg

SEQ ID NO: 1936787 - RNA, 19 nt, Artificial Sequence
  Description of Artificial Sequence: Synthetic oligonucleotide
uggagugggcaggaugucu

SEQ ID NO: 1936788 - RNA, 19 nt, Artificial Sequence
  Description of Artificial Sequence: Synthetic oligonucleotide
uagugcaacuuugguuccc

SEQ ID NO: 1936789 - RNA, 19 nt, Artificial Sequence
  Description of Artificial Sequence: Synthetic oligonucleotide
ggacauggaacaucuagcu

SEQ ID NO: 1936790 - RNA, 19 nt, Artificial Sequence
  Description of Artificial Sequence: Synthetic oligonucleotide
gggguuuuguugugggaug

SEQ ID NO: 1936791 - RNA, 19 nt, Artificial Sequence
  Description of Artificial Sequence: Synthetic oligonucleotide
  modified_base (4)..(4): a, c, u, g, unknown or other
aagngccaaggacgaguua

SEQ ID NO: 1936792 - RNA, 19 nt, Artificial Sequence
  Description of Artificial Sequence: Synthetic oligonucleotide
uaggugcgcaggccaacac

SEQ ID NO: 1936793 - RNA, 19 nt, Artificial Sequence
  Description of Artificial Sequence: Synthetic oligonucleotide
aggucggcugaaacaaaag

SEQ ID NO: 1936794 - RNA, 19 nt, Artificial Sequence
  Description of Artificial Sequence: Synthetic oligonucleotide
gaacaucuagcuacaagau

SEQ ID NO: 1936795 - RNA, 19 nt, Artificial Sequence
  Description of Artificial Sequence: Synthetic oligonucleotide
uccuggguccuaacacuuc

SEQ ID NO: 1936796 - RNA, 19 nt, Artificial Sequence
  Description of Artificial Sequence: Synthetic oligonucleotide
gacuugcauugcauugccc

SEQ ID NO: 1936797 - RNA, 19 nt, Artificial Sequence
  Description of Artificial Sequence: Synthetic oligonucleotide
guucccuaacugauguuga

SEQ ID NO: 1936798 - RNA, 19 nt, Artificial Sequence
  Description of Artificial Sequence: Synthetic oligonucleotide
cugcacauaggucggcuga

SEQ ID NO: 1936799 - RNA, 19 nt, Artificial Sequence
  Description of Artificial Sequence: Synthetic oligonucleotide
caacacacacacacacaca

SEQ ID NO: 1936800 - RNA, 19 nt, Artificial Sequence
  Description of Artificial Sequence: Synthetic oligonucleotide
cccuaacugauguugauaa

SEQ ID NO: 1936801 - RNA, 19 nt, Artificial Sequence
  Description of Artificial Sequence: Synthetic oligonucleotide
cgaaauaccaaaacacuaa

SEQ ID NO: 1936802 - RNA, 19 nt, Artificial Sequence
  Description of Artificial Sequence: Synthetic oligonucleotide
gauuuggcuugcaaccucu

SEQ ID NO: 1936803 - RNA, 19 nt, Artificial Sequence
  Description of Artificial Sequence: Synthetic oligonucleotide
gcagucuugaaggaugaca

SEQ ID NO: 1936804 - RNA, 19 nt, Artificial Sequence
  Description of Artificial Sequence: Synthetic oligonucleotide
gagcaggcggcaagcggcg

SEQ ID NO: 1936805 - RNA, 19 nt, Artificial Sequence
  Description of Artificial Sequence: Synthetic oligonucleotide
gaaaagcgccaggaacaac

SEQ ID NO: 1936806 - RNA, 19 nt, Artificial Sequence
  Description of Artificial Sequence: Synthetic oligonucleotide
ugccaaccagagucugggc

SEQ ID NO: 1936807 - RNA, 19 nt, Artificial Sequence
  Description of Artificial Sequence: Synthetic oligonucleotide
ugaacgacacaagguucau

SEQ ID NO: 1936808 - RNA, 19 nt, Artificial Sequence
  Description of Artificial Sequence: Synthetic oligonucleotide
ccucuccuauuuacaaggg

SEQ ID NO: 1936809 - RNA, 19 nt, Artificial Sequence
  Description of Artificial Sequence: Synthetic oligonucleotide
ugcacauaggucggcugaa

SEQ ID NO: 1936810 - RNA, 19 nt, Artificial Sequence
  Description of Artificial Sequence: Synthetic oligonucleotide
uuggccccacgacucucgc

SEQ ID NO: 1936811 - RNA, 19 nt, Artificial Sequence
  Description of Artificial Sequence: Synthetic oligonucleotide
caucagaggcugcccgggc

SEQ ID NO: 1936812 - RNA, 19 nt, Artificial Sequence
  Description of Artificial Sequence: Synthetic oligonucleotide
ggaacaacagagcccacgu

SEQ ID NO: 1936813 - RNA, 19 nt, Artificial Sequence
  Description of Artificial Sequence: Synthetic oligonucleotide
uacaaggguuuuggacuug

SEQ ID NO: 1936814 - RNA, 19 nt, Artificial Sequence
  Description of Artificial Sequence: Synthetic oligonucleotide
gggagcaggcggcaagcgg

SEQ ID NO: 1936815 - RNA, 19 nt, Artificial Sequence
  Description of Artificial Sequence: Synthetic oligonucleotide
cuugggguccaagucagaa

SEQ ID NO: 1936816 - RNA, 19 nt, Artificial Sequence
  Description of Artificial Sequence: Synthetic oligonucleotide
ggugcgcaggccaacacac

SEQ ID NO: 1936817 - RNA, 19 nt, Artificial Sequence
  Description of Artificial Sequence: Synthetic oligonucleotide
cuuuggcgaggagccacgg

SEQ ID NO: 1936818 - RNA, 19 nt, Artificial Sequence
  Description of Artificial Sequence: Synthetic oligonucleotide
acagaaaacuugggguuuu

SEQ ID NO: 1936819 - RNA, 19 nt, Artificial Sequence
  Description of Artificial Sequence: Synthetic oligonucleotide
uggcgaggagccacgggau

SEQ ID NO: 1936820 - RNA, 19 nt, Artificial Sequence
  Description of Artificial Sequence: Synthetic oligonucleotide
cgauaaauacucuugauuu

SEQ ID NO: 1936821 - RNA, 19 nt, Artificial Sequence
  Description of Artificial Sequence: Synthetic oligonucleotide
caagucagaagagggcaga

SEQ ID NO: 1936822 - RNA, 19 nt, Artificial Sequence
  Description of Artificial Sequence: Synthetic oligonucleotide
aacuaggugcgcaggccaa

SEQ ID NO: 1936823 - RNA, 19 nt, Artificial Sequence
  Description of Artificial Sequence: Synthetic oligonucleotide
gagguggugaggucagcua

SEQ ID NO: 1936824 - RNA, 19 nt, Artificial Sequence
  Description of Artificial Sequence: Synthetic oligonucleotide
acucaguaggcagcugggu

SEQ ID NO: 1936825 - RNA, 19 nt, Artificial Sequence
  Description of Artificial Sequence: Synthetic oligonucleotide
auaccgaggcaggaugcga

SEQ ID NO: 1936826 - RNA, 19 nt, Artificial Sequence
  Description of Artificial Sequence: Synthetic oligonucleotide
caagaucaauaccgaggca

SEQ ID NO: 1936827 - RNA, 19 nt, Artificial Sequence
  Description of Artificial Sequence: Synthetic oligonucleotide
gcggcaagcggcguguagg

SEQ ID NO: 1936828 - RNA, 19 nt, Artificial Sequence
  Description of Artificial Sequence: Synthetic oligonucleotide
aggaugcgaaauaccaaaa

SEQ ID NO: 1936829 - RNA, 19 nt, Artificial Sequence
  Description of Artificial Sequence: Synthetic oligonucleotide
gcgaaauaccaaaacacua

SEQ ID NO: 1936830 - RNA, 19 nt, Artificial Sequence
  Description of Artificial Sequence: Synthetic oligonucleotide
gggauauggggagcaggcg

SEQ ID NO: 1936831 - RNA, 19 nt, Artificial Sequence
  Description of Artificial Sequence: Synthetic oligonucleotide
cgggauauggggagcaggc

SEQ ID NO: 1936832 - RNA, 19 nt, Artificial Sequence
  Description of Artificial Sequence: Synthetic oligonucleotide
cccagguagugcaacuuug

SEQ ID NO: 1936833 - RNA, 19 nt, Artificial Sequence
  Description of Artificial Sequence: Synthetic oligonucleotide
gguuuuggacuugcauugc

SEQ ID NO: 1936834 - RNA, 19 nt, Artificial Sequence
  Description of Artificial Sequence: Synthetic oligonucleotide
acacacacacacacacaca

SEQ ID NO: 1936835 - RNA, 19 nt, Artificial Sequence
  Description of Artificial Sequence: Synthetic oligonucleotide
cagaaaacuugggguuuug

SEQ ID NO: 1936836 - RNA, 19 nt, Artificial Sequence
  Description of Artificial Sequence: Synthetic oligonucleotide
ccuucuuacuaccaggcua

SEQ ID NO: 1936837 - RNA, 19 nt, Artificial Sequence
  Description of Artificial Sequence: Synthetic oligonucleotide
auacugccuggaagacagc

SEQ ID NO: 1936838 - RNA, 19 nt, Artificial Sequence
  Description of Artificial Sequence: Synthetic oligonucleotide
ucugcgcagccccucucuu

SEQ ID NO: 1936839 - RNA, 19 nt, Artificial Sequence
  Description of Artificial Sequence: Synthetic oligonucleotide
gccaaggacgaguuaggga

SEQ ID NO: 1936840 - RNA, 19 nt, Artificial Sequence
  Description of Artificial Sequence: Synthetic oligonucleotide
  modified_base (11)..(11): a, c, u, g, unknown or other
ggagcggaagngccaagga

SEQ ID NO: 1936841 - RNA, 19 nt, Artificial Sequence
  Description of Artificial Sequence: Synthetic oligonucleotide
cuaguggccccggccuugg

SEQ ID NO: 1936842 - RNA, 19 nt, Artificial Sequence
  Description of Artificial Sequence: Synthetic oligonucleotide
aagcggcguguaggcagcg

SEQ ID NO: 1936843 - RNA, 19 nt, Artificial Sequence
  Description of Artificial Sequence: Synthetic oligonucleotide
gcccacgugacuccagccc

SEQ ID NO: 1936844 - RNA, 19 nt, Artificial Sequence
  Description of Artificial Sequence: Synthetic oligonucleotide
cauugcccugcacauaggu

SEQ ID NO: 1936845 - RNA, 19 nt, Artificial Sequence
  Description of Artificial Sequence: Synthetic oligonucleotide
caacuuugguucccuaacu

SEQ ID NO: 1936846 - RNA, 19 nt, Artificial Sequence
  Description of Artificial Sequence: Synthetic oligonucleotide
cugcgcagccccucucuug

SEQ ID NO: 1936847 - RNA, 19 nt, Artificial Sequence
  Description of Artificial Sequence: Synthetic oligonucleotide
aggugacuugaacgacaca

SEQ ID NO: 1936848 - RNA, 19 nt, Artificial Sequence
  Description of Artificial Sequence: Synthetic oligonucleotide
accgaggcaggaugcgaaa

SEQ ID NO: 1936849 - RNA, 19 nt, Artificial Sequence
  Description of Artificial Sequence: Synthetic oligonucleotide
uggccccggccuuggagug

SEQ ID NO: 1936850 - RNA, 19 nt, Artificial Sequence
  Description of Artificial Sequence: Synthetic oligonucleotide
cuugccccaaaaggcaaga

SEQ ID NO: 1936851 - RNA, 19 nt, Artificial Sequence
  Description of Artificial Sequence: Synthetic oligonucleotide
ggcauuggccccacgacuc

SEQ ID NO: 1936852 - RNA, 19 nt, Artificial Sequence
  Description of Artificial Sequence: Synthetic oligonucleotide
gucagcuaguggccccggc

SEQ ID NO: 1936853 - RNA, 19 nt, Artificial Sequence
  Description of Artificial Sequence: Synthetic oligonucleotide
gcagcaaggcccaucuuca

SEQ ID NO: 1936854 - RNA, 19 nt, Artificial Sequence
  Description of Artificial Sequence: Synthetic oligonucleotide
caucaacggaaacuuugcu

SEQ ID NO: 1936855 - RNA, 19 nt, Artificial Sequence
  Description of Artificial Sequence: Synthetic oligonucleotide
cuggguccuaacacuucca

SEQ ID NO: 1936856 - RNA, 19 nt, Artificial Sequence
  Description of Artificial Sequence: Synthetic oligonucleotide
gauguugauaaagccucuu

SEQ ID NO: 1936857 - RNA, 19 nt, Artificial Sequence
  Description of Artificial Sequence: Synthetic oligonucleotide
ugacuccagcccugcucca

SEQ ID NO: 1936858 - RNA, 19 nt, Artificial Sequence
  Description of Artificial Sequence: Synthetic oligonucleotide
ggugucugggagacguagc

SEQ ID NO: 1936859 - RNA, 19 nt, Artificial Sequence
  Description of Artificial Sequence: Synthetic oligonucleotide
  modified_base (5)..(5): a, c, u, g, unknown or other
gaagngccaaggacgaguu

SEQ ID NO: 1936860 - RNA, 19 nt, Artificial Sequence
  Description of Artificial Sequence: Synthetic oligonucleotide
cucuccuauuuacaagggu

SEQ ID NO: 1936861 - RNA, 19 nt, Artificial Sequence
  Description of Artificial Sequence: Synthetic oligonucleotide
  modified_base (18)..(18): a, c, u, g, unknown or other
ggcugguggagcggaagng

SEQ ID NO: 1936862 - RNA, 19 nt, Artificial Sequence
  Description of Artificial Sequence: Synthetic oligonucleotide
  modified_base (14)..(14): a, c, u, g, unknown or other
gguggagcggaagngccaa

SEQ ID NO: 1936863 - RNA, 19 nt, Artificial Sequence
  Description of Artificial Sequence: Synthetic oligonucleotide
gcaaccucuccuauuuaca

SEQ ID NO: 1936864 - RNA, 19 nt, Artificial Sequence
  Description of Artificial Sequence: Synthetic oligonucleotide
cccucucuugccccaaaag

SEQ ID NO: 1936865 - RNA, 19 nt, Artificial Sequence
  Description of Artificial Sequence: Synthetic oligonucleotide
ggacgaguuagggaagcca

SEQ ID NO: 1936866 - RNA, 19 nt, Artificial Sequence
  Description of Artificial Sequence: Synthetic oligonucleotide
caucuagcuacaagauuau

SEQ ID NO: 1936867 - RNA, 19 nt, Artificial Sequence
  Description of Artificial Sequence: Synthetic oligonucleotide
ugguucccuaacugauguu

SEQ ID NO: 1936868 - RNA, 19 nt, Artificial Sequence
  Description of Artificial Sequence: Synthetic oligonucleotide
gccaaagggccuugggguc

SEQ ID NO: 1936869 - RNA, 19 nt, Artificial Sequence
  Description of Artificial Sequence: Synthetic oligonucleotide
aggccaacacacacacaca

SEQ ID NO: 1936870 - RNA, 19 nt, Artificial Sequence
  Description of Artificial Sequence: Synthetic oligonucleotide
ccugcacauaggucggcug

SEQ ID NO: 1936871 - RNA, 19 nt, Artificial Sequence
  Description of Artificial Sequence: Synthetic oligonucleotide
gggcagaaaagcgccagga

SEQ ID NO: 1936872 - RNA, 19 nt, Artificial Sequence
  Description of Artificial Sequence: Synthetic oligonucleotide
uugcauugcccugcacaua

SEQ ID NO: 1936873 - RNA, 19 nt, Artificial Sequence
  Description of Artificial Sequence: Synthetic oligonucleotide
gaacgacacaagguucaua

SEQ ID NO: 1936874 - RNA, 19 nt, Artificial Sequence
  Description of Artificial Sequence: Synthetic oligonucleotide
cagguagugcaacuuuggu

SEQ ID NO: 1936875 - RNA, 19 nt, Artificial Sequence
  Description of Artificial Sequence: Synthetic oligonucleotide
acacacacacacacagguu

SEQ ID NO: 1936876 - RNA, 19 nt, Artificial Sequence
  Description of Artificial Sequence: Synthetic oligonucleotide
agcggcguguaggcagcgg

SEQ ID NO: 1936877 - RNA, 19 nt, Artificial Sequence
  Description of Artificial Sequence: Synthetic oligonucleotide
ggauacugccuggaagaca

SEQ ID NO: 1936878 - RNA, 19 nt, Artificial Sequence
  Description of Artificial Sequence: Synthetic oligonucleotide
cacgggauauggggagcag

SEQ ID NO: 1936879 - RNA, 19 nt, Artificial Sequence
  Description of Artificial Sequence: Synthetic oligonucleotide
gacagguccuggguccuaa

SEQ ID NO: 1936880 - RNA, 19 nt, Artificial Sequence
  Description of Artificial Sequence: Synthetic oligonucleotide
cuucugcgcagccccucuc

SEQ ID NO: 1936881 - RNA, 19 nt, Artificial Sequence
  Description of Artificial Sequence: Synthetic oligonucleotide
cuuugcauauuggcacaaa

SEQ ID NO: 1936882 - RNA, 19 nt, Artificial Sequence
  Description of Artificial Sequence: Synthetic oligonucleotide
auaggucggcugaaacaaa

SEQ ID NO: 1936883 - RNA, 19 nt, Artificial Sequence
  Description of Artificial Sequence: Synthetic oligonucleotide
caccuggauggacauggaa

SEQ ID NO: 1936884 - RNA, 19 nt, Artificial Sequence
  Description of Artificial Sequence: Synthetic oligonucleotide
auggaacaucuagcuacaa

SEQ ID NO: 1936885 - RNA, 19 nt, Artificial Sequence
  Description of Artificial Sequence: Synthetic oligonucleotide
agcuaguggccccggccuu

SEQ ID NO: 1936886 - RNA, 19 nt, Artificial Sequence
  Description of Artificial Sequence: Synthetic oligonucleotide
agagcccacgugacuccag

SEQ ID NO: 1936887 - RNA, 19 nt, Artificial Sequence
  Description of Artificial Sequence: Synthetic oligonucleotide
acgugacuccagcccugcu

SEQ ID NO: 1936888 - RNA, 19 nt, Artificial Sequence
  Description of Artificial Sequence: Synthetic oligonucleotide
uucuuacuaccaggcuauu

SEQ ID NO: 1936889 - RNA, 19 nt, Artificial Sequence
  Description of Artificial Sequence: Synthetic oligonucleotide
  modified_base (13)..(13): a, c, u, g, unknown or other
guggagcggaagngccaag

SEQ ID NO: 1936890 - RNA, 19 nt, Artificial Sequence
  Description of Artificial Sequence: Synthetic oligonucleotide
gcaagaccacggcaaggga

SEQ ID NO: 1936891 - RNA, 19 nt, Artificial Sequence
  Description of Artificial Sequence: Synthetic oligonucleotide
gauggacauggaacaucua

SEQ ID NO: 1936892 - RNA, 19 nt, Artificial Sequence
  Description of Artificial Sequence: Synthetic oligonucleotide
  modified_base (8)..(8): a, c, u, g, unknown or other
gcggaagngccaaggacga

SEQ ID NO: 1936893 - RNA, 19 nt, Artificial Sequence
  Description of Artificial Sequence: Synthetic oligonucleotide
caaccagagucugggccca

SEQ ID NO: 1936894 - RNA, 19 nt, Artificial Sequence
  Description of Artificial Sequence: Synthetic oligonucleotide
cgugacuccagcccugcuc

SEQ ID NO: 1936895 - RNA, 19 nt, Artificial Sequence
  Description of Artificial Sequence: Synthetic oligonucleotide
ggcggcaagcggcguguag

SEQ ID NO: 1936896 - RNA, 19 nt, Artificial Sequence
  Description of Artificial Sequence: Synthetic oligonucleotide
cucucgccugucucaggga

SEQ ID NO: 1936897 - RNA, 19 nt, Artificial Sequence
  Description of Artificial Sequence: Synthetic oligonucleotide
cagcuaguggccccggccu

SEQ ID NO: 1936898 - RNA, 19 nt, Artificial Sequence
  Description of Artificial Sequence: Synthetic oligonucleotide
gccaacacacacacacaca

SEQ ID NO: 1936899 - RNA, 19 nt, Artificial Sequence
  Description of Artificial Sequence: Synthetic oligonucleotide
gcgccaggaacaacagagc

SEQ ID NO: 1936900 - RNA, 19 nt, Artificial Sequence
  Description of Artificial Sequence: Synthetic oligonucleotide
ggagugggcaggaugucua

SEQ ID NO: 1936901 - RNA, 19 nt, Artificial Sequence
  Description of Artificial Sequence: Synthetic oligonucleotide
ccuaacugauguugauaaa

SEQ ID NO: 1936902 - RNA, 19 nt, Artificial Sequence
  Description of Artificial Sequence: Synthetic oligonucleotide
cacagaaaacuugggguuu

SEQ ID NO: 1936903 - RNA, 19 nt, Artificial Sequence
  Description of Artificial Sequence: Synthetic oligonucleotide
gggcagucuugaaggauga

SEQ ID NO: 1936904 - RNA, 19 nt, Artificial Sequence
  Description of Artificial Sequence: Synthetic oligonucleotide
gcuaguggccccggccuug

SEQ ID NO: 1936905 - RNA, 19 nt, Artificial Sequence
  Description of Artificial Sequence: Synthetic oligonucleotide
cugggagacguagcucuaa

SEQ ID NO: 1936906 - RNA, 19 nt, Artificial Sequence
  Description of Artificial Sequence: Synthetic oligonucleotide
ggucagcuaguggccccgg

SEQ ID NO: 1936907 - RNA, 19 nt, Artificial Sequence
  Description of Artificial Sequence: Synthetic oligonucleotide
gugcaacuuugguucccua

SEQ ID NO: 1936908 - RNA, 19 nt, Artificial Sequence
  Description of Artificial Sequence: Synthetic oligonucleotide
ccuggugucugggagacgu

SEQ ID NO: 1936909 - RNA, 19 nt, Artificial Sequence
  Description of Artificial Sequence: Synthetic oligonucleotide
gccccggccuuggaguggg

SEQ ID NO: 1936910 - RNA, 19 nt, Artificial Sequence
  Description of Artificial Sequence: Synthetic oligonucleotide
ggcagucuugaaggaugac

SEQ ID NO: 1936911 - RNA, 19 nt, Artificial Sequence
  Description of Artificial Sequence: Synthetic oligonucleotide
gugcgcaggccaacacaca

SEQ ID NO: 1936912 - RNA, 19 nt, Artificial Sequence
  Description of Artificial Sequence: Synthetic oligonucleotide
caacggaaacuuugcucuu

SEQ ID NO: 1936913 - RNA, 19 nt, Artificial Sequence
  Description of Artificial Sequence: Synthetic oligonucleotide
agcaggcggcaagcggcgu

SEQ ID NO: 1936914 - RNA, 19 nt, Artificial Sequence
  Description of Artificial Sequence: Synthetic oligonucleotide
cuggauggacauggaacau

SEQ ID NO: 1936915 - RNA, 19 nt, Artificial Sequence
  Description of Artificial Sequence: Synthetic oligonucleotide
cagccccucucuugcccca

SEQ ID NO: 1936916 - RNA, 19 nt, Artificial Sequence
  Description of Artificial Sequence: Synthetic oligonucleotide
gcaggaugucuaacuaggu

SEQ ID NO: 1936917 - RNA, 19 nt, Artificial Sequence
  Description of Artificial Sequence: Synthetic oligonucleotide
ggcgaggagccacgggaua

SEQ ID NO: 1936918 - RNA, 19 nt, Artificial Sequence
  Description of Artificial Sequence: Synthetic oligonucleotide
cgacucucgccugucucag

SEQ ID NO: 1936919 - RNA, 19 nt, Artificial Sequence
  Description of Artificial Sequence: Synthetic oligonucleotide
gcgcaggccaacacacaca

SEQ ID NO: 1936920 - RNA, 19 nt, Artificial Sequence
  Description of Artificial Sequence: Synthetic oligonucleotide
gcacauaggucggcugaaa

SEQ ID NO: 1936921 - RNA, 19 nt, Artificial Sequence
  Description of Artificial Sequence: Synthetic oligonucleotide
cccacgugacuccagcccu

SEQ ID NO: 1936922 - RNA, 19 nt, Artificial Sequence
  Description of Artificial Sequence: Synthetic oligonucleotide
ccuuugcauauuggcacaa

SEQ ID NO: 1936923 - RNA, 19 nt, Artificial Sequence
  Description of Artificial Sequence: Synthetic oligonucleotide
gcauuggccccacgacucu

SEQ ID NO: 1936924 - RNA, 19 nt, Artificial Sequence
  Description of Artificial Sequence: Synthetic oligonucleotide
cacggcaagggagggcagu

SEQ ID NO: 1936925 - RNA, 19 nt, Artificial Sequence
  Description of Artificial Sequence: Synthetic oligonucleotide
ccacgggauauggggagca

SEQ ID NO: 1936926 - RNA, 19 nt, Artificial Sequence
  Description of Artificial Sequence: Synthetic oligonucleotide
  modified_base (7)..(7): a, c, u, g, unknown or other
cggaagngccaaggacgag

SEQ ID NO: 1936927 - RNA, 19 nt, Artificial Sequence
  Description of Artificial Sequence: Synthetic oligonucleotide
ggcuugcaaccucuccuau

SEQ ID NO: 1936928 - RNA, 19 nt, Artificial Sequence
  Description of Artificial Sequence: Synthetic oligonucleotide
agccccucucuugccccaa

SEQ ID NO: 1936929 - RNA, 19 nt, Artificial Sequence
  Description of Artificial Sequence: Synthetic oligonucleotide
gguccccaggcaggaccug

SEQ ID NO: 1936930 - RNA, 19 nt, Artificial Sequence
  Description of Artificial Sequence: Synthetic oligonucleotide
gcgaggagccacgggauau

SEQ ID NO: 1936931 - RNA, 19 nt, Artificial Sequence
  Description of Artificial Sequence: Synthetic oligonucleotide
cccacgacucucgccuguc

SEQ ID NO: 1936932 - RNA, 19 nt, Artificial Sequence
  Description of Artificial Sequence: Synthetic oligonucleotide
gcaggccaacacacacaca

SEQ ID NO: 1936933 - RNA, 19 nt, Artificial Sequence
  Description of Artificial Sequence: Synthetic oligonucleotide
gcccuccagcuccacaaau

SEQ ID NO: 1936934 - RNA, 19 nt, Artificial Sequence
  Description of Artificial Sequence: Synthetic oligonucleotide
gggccucuagacuggcauu

SEQ ID NO: 1936935 - RNA, 19 nt, Artificial Sequence
  Description of Artificial Sequence: Synthetic oligonucleotide
ccccucucuugccccaaaa

SEQ ID NO: 1936936 - RNA, 19 nt, Artificial Sequence
  Description of Artificial Sequence: Synthetic oligonucleotide
cccggccuuggagugggca

SEQ ID NO: 1936937 - RNA, 19 nt, Artificial Sequence
  Description of Artificial Sequence: Synthetic oligonucleotide
aggcggcaagcggcgugua

SEQ ID NO: 1936938 - RNA, 19 nt, Artificial Sequence
  Description of Artificial Sequence: Synthetic oligonucleotide
cgggccucuagacuggcau

SEQ ID NO: 1936939 - RNA, 19 nt, Artificial Sequence
  Description of Artificial Sequence: Synthetic oligonucleotide
ccgggccucuagacuggca

SEQ ID NO: 1936940 - RNA, 19 nt, Artificial Sequence
  Description of Artificial Sequence: Synthetic oligonucleotide
gccccucucuugccccaaa

SEQ ID NO: 1936941 - RNA, 19 nt, Artificial Sequence
  Description of Artificial Sequence: Synthetic oligonucleotide
ccacgacucucgccugucu

SEQ ID NO: 1936942 - RNA, 19 nt, Artificial Sequence
  Description of Artificial Sequence: Synthetic oligonucleotide
ccgaggcaggaugcgaaau

SEQ ID NO: 1936943 - RNA, 19 nt, Artificial Sequence
  Description of Artificial Sequence: Synthetic oligonucleotide
ccccacgacucucgccugu

SEQ ID NO: 1936944 - RNA, 19 nt, Artificial Sequence
  Description of Artificial Sequence: Synthetic oligonucleotide
aauaaaggauuucagaucg

SEQ ID NO: 1936945 - RNA, 19 nt, Artificial Sequence
  Description of Artificial Sequence: Synthetic oligonucleotide
aauguuguagaauucagcu

SEQ ID NO: 1936946 - RNA, 19 nt, Artificial Sequence
  Description of Artificial Sequence: Synthetic oligonucleotide
aaggauuucagaucggaac

SEQ ID NO: 1936947 - RNA, 19 nt, Artificial Sequence
  Description of Artificial Sequence: Synthetic oligonucleotide
  modified_base (10)..(10): a, c, u, g, unknown or other
uuugacaccncacacagga

SEQ ID NO: 1936948 - RNA, 19 nt, Artificial Sequence
  Description of Artificial Sequence: Synthetic oligonucleotide
aaaguaacgauugcagccc

SEQ ID NO: 1936949 - RNA, 19 nt, Artificial Sequence
  Description of Artificial Sequence: Synthetic oligonucleotide
aacgauugcagcccuagac

SEQ ID NO: 1936950 - RNA, 19 nt, Artificial Sequence
  Description of Artificial Sequence: Synthetic oligonucleotide
aggauuucagaucggaacc

SEQ ID NO: 1936951 - RNA, 19 nt, Artificial Sequence
  Description of Artificial Sequence: Synthetic oligonucleotide
aggaaguucaauaugggcc

SEQ ID NO: 1936952 - RNA, 19 nt, Artificial Sequence
  Description of Artificial Sequence: Synthetic oligonucleotide
ucugcucccgacaacagcg

SEQ ID NO: 1936953 - RNA, 19 nt, Artificial Sequence
  Description of Artificial Sequence: Synthetic oligonucleotide
uucgccuuggcacaggcgg

SEQ ID NO: 1936954 - RNA, 19 nt, Artificial Sequence
  Description of Artificial Sequence: Synthetic oligonucleotide
aacacgugguggcaaaggg

SEQ ID NO: 1936955 - RNA, 19 nt, Artificial Sequence
  Description of Artificial Sequence: Synthetic oligonucleotide
agaucggaaccccaagucc

SEQ ID NO: 1936956 - RNA, 19 nt, Artificial Sequence
  Description of Artificial Sequence: Synthetic oligonucleotide
auugguuugggguggcacc

SEQ ID NO: 1936957 - RNA, 19 nt, Artificial Sequence
  Description of Artificial Sequence: Synthetic oligonucleotide
aguaaguggggucacgguc

SEQ ID NO: 1936958 - RNA, 19 nt, Artificial Sequence
  Description of Artificial Sequence: Synthetic oligonucleotide
ugaugauucggaucagggg

SEQ ID NO: 1936959 - RNA, 19 nt, Artificial Sequence
  Description of Artificial Sequence: Synthetic oligonucleotide
aaugagguaggccccgguc

SEQ ID NO: 1936960 - RNA, 19 nt, Artificial Sequence
  Description of Artificial Sequence: Synthetic oligonucleotide
gagacagaggcucaaggag

SEQ ID NO: 1936961 - RNA, 19 nt, Artificial Sequence
  Description of Artificial Sequence: Synthetic oligonucleotide
caaaaguaacgauugcagc

SEQ ID NO: 1936962 - RNA, 19 nt, Artificial Sequence
  Description of Artificial Sequence: Synthetic oligonucleotide
cauagugucccacuugggg

SEQ ID NO: 1936963 - RNA, 19 nt, Artificial Sequence
  Description of Artificial Sequence: Synthetic oligonucleotide
ugagcuuaggccguguggg

SEQ ID NO: 1936964 - RNA, 19 nt, Artificial Sequence
  Description of Artificial Sequence: Synthetic oligonucleotide
aagcacgcgguacacauug

SEQ ID NO: 1936965 - RNA, 19 nt, Artificial Sequence
  Description of Artificial Sequence: Synthetic oligonucleotide
gaauucagcuuccuccagg

SEQ ID NO: 1936966 - RNA, 19 nt, Artificial Sequence
  Description of Artificial Sequence: Synthetic oligonucleotide
aguggauccgccaugcagc

SEQ ID NO: 1936967 - RNA, 19 nt, Artificial Sequence
  Description of Artificial Sequence: Synthetic oligonucleotide
agugauaagggagagggca

SEQ ID NO: 1936968 - RNA, 19 nt, Artificial Sequence
  Description of Artificial Sequence: Synthetic oligonucleotide
aauagcuucucugagcuua

SEQ ID NO: 1936969 - RNA, 19 nt, Artificial Sequence
  Description of Artificial Sequence: Synthetic oligonucleotide
gacaacagcgucuggcggg

SEQ ID NO: 1936970 - RNA, 19 nt, Artificial Sequence
  Description of Artificial Sequence: Synthetic oligonucleotide
caauguuguagaauucagc

SEQ ID NO: 1936971 - RNA, 19 nt, Artificial Sequence
  Description of Artificial Sequence: Synthetic oligonucleotide
uaugacugggcugggaggg

SEQ ID NO: 1936972 - RNA, 19 nt, Artificial Sequence
  Description of Artificial Sequence: Synthetic oligonucleotide
agcccuagacacuuagggc

SEQ ID NO: 1936973 - RNA, 19 nt, Artificial Sequence
  Description of Artificial Sequence: Synthetic oligonucleotide
gaugacucugccuggacac

SEQ ID NO: 1936974 - RNA, 19 nt, Artificial Sequence
  Description of Artificial Sequence: Synthetic oligonucleotide
ucuggcuuguaauagcuuc

SEQ ID NO: 1936975 - RNA, 19 nt, Artificial Sequence
  Description of Artificial Sequence: Synthetic oligonucleotide
gaaguaaguggggucacgg

SEQ ID NO: 1936976 - RNA, 19 nt, Artificial Sequence
  Description of Artificial Sequence: Synthetic oligonucleotide
  modified_base (8)..(8): a, c, u, g, unknown or other
ugacaccncacacaggaac

SEQ ID NO: 1936977 - RNA, 19 nt, Artificial Sequence
  Description of Artificial Sequence: Synthetic oligonucleotide
caaggaggugcuaugacug

SEQ ID NO: 1936978 - RNA, 19 nt, Artificial Sequence
  Description of Artificial Sequence: Synthetic oligonucleotide
aauaugggcccgaaguaag

SEQ ID NO: 1936979 - RNA, 19 nt, Artificial Sequence
  Description of Artificial Sequence: Synthetic oligonucleotide
gcagugauaagggagaggg

SEQ ID NO: 1936980 - RNA, 19 nt, Artificial Sequence
  Description of Artificial Sequence: Synthetic oligonucleotide
cuuguaauagcuucucuga

SEQ ID NO: 1936981 - RNA, 19 nt, Artificial Sequence
  Description of Artificial Sequence: Synthetic oligonucleotide
agagggcaagucuuccucc

SEQ ID NO: 1936982 - RNA, 19 nt, Artificial Sequence
  Description of Artificial Sequence: Synthetic oligonucleotide
cacacuuuggccaugggca

SEQ ID NO: 1936983 - RNA, 19 nt, Artificial Sequence
  Description of Artificial Sequence: Synthetic oligonucleotide
ggaaguucaauaugggccc

SEQ ID NO: 1936984 - RNA, 19 nt, Artificial Sequence
  Description of Artificial Sequence: Synthetic oligonucleotide
gauaugggugggcagugcc

SEQ ID NO: 1936985 - RNA, 19 nt, Artificial Sequence
  Description of Artificial Sequence: Synthetic oligonucleotide
  modified_base (13)..(13): a, c, u, g, unknown or other
uccuuugacaccncacaca

SEQ ID NO: 1936986 - RNA, 19 nt, Artificial Sequence
  Description of Artificial Sequence: Synthetic oligonucleotide
cagcccuagacacuuaggg

SEQ ID NO: 1936987 - RNA, 19 nt, Artificial Sequence
  Description of Artificial Sequence: Synthetic oligonucleotide
uaaaggauuucagaucgga

SEQ ID NO: 1936988 - RNA, 19 nt, Artificial Sequence
  Description of Artificial Sequence: Synthetic oligonucleotide
ugggcccgaaguaaguggg

SEQ ID NO: 1936989 - RNA, 19 nt, Artificial Sequence
  Description of Artificial Sequence: Synthetic oligonucleotide
gacacuuagggcuccagga

SEQ ID NO: 1936990 - RNA, 19 nt, Artificial Sequence
  Description of Artificial Sequence: Synthetic oligonucleotide
ugaggaaggacuucugcuc

SEQ ID NO: 1936991 - RNA, 19 nt, Artificial Sequence
  Description of Artificial Sequence: Synthetic oligonucleotide
ccaaaaguaacgauugcag

SEQ ID NO: 1936992 - RNA, 19 nt, Artificial Sequence
  Description of Artificial Sequence: Synthetic oligonucleotide
gaggaaggacuucugcucc

SEQ ID NO: 1936993 - RNA, 19 nt, Artificial Sequence
  Description of Artificial Sequence: Synthetic oligonucleotide
ucaauaugggcccgaagua

SEQ ID NO: 1936994 - RNA, 19 nt, Artificial Sequence
  Description of Artificial Sequence: Synthetic oligonucleotide
uucagaucggaaccccaag

SEQ ID NO: 1936995 - RNA, 19 nt, Artificial Sequence
  Description of Artificial Sequence: Synthetic oligonucleotide
ucagaucggaaccccaagu

SEQ ID NO: 1936996 - RNA, 19 nt, Artificial Sequence
  Description of Artificial Sequence: Synthetic oligonucleotide
ugaagcacgcgguacacau

SEQ ID NO: 1936997 - RNA, 19 nt, Artificial Sequence
  Description of Artificial Sequence: Synthetic oligonucleotide
gaucggaaccccaaguccc

SEQ ID NO: 1936998 - RNA, 19 nt, Artificial Sequence
  Description of Artificial Sequence: Synthetic oligonucleotide
cuguguagucuuuuccucc

SEQ ID NO: 1936999 - RNA, 19 nt, Artificial Sequence
  Description of Artificial Sequence: Synthetic oligonucleotide
acuuagggcuccaggaacc

SEQ ID NO: 1937000 - RNA, 19 nt, Artificial Sequence
  Description of Artificial Sequence: Synthetic oligonucleotide
agacacuuagggcuccagg

SEQ ID NO: 1937001 - RNA, 19 nt, Artificial Sequence
  Description of Artificial Sequence: Synthetic oligonucleotide
caggcgaggggacaaacgg

SEQ ID NO: 1937002 - RNA, 19 nt, Artificial Sequence
  Description of Artificial Sequence: Synthetic oligonucleotide
ugggcagugccacacuuug

SEQ ID NO: 1937003 - RNA, 19 nt, Artificial Sequence
  Description of Artificial Sequence: Synthetic oligonucleotide
caaggugaugccaauccug

SEQ ID NO: 1937004 - RNA, 19 nt, Artificial Sequence
  Description of Artificial Sequence: Synthetic oligonucleotide
caagucuuccuccucgggc

SEQ ID NO: 1937005 - RNA, 19 nt, Artificial Sequence
  Description of Artificial Sequence: Synthetic oligonucleotide
guaauagcuucucugagcu

SEQ ID NO: 1937006 - RNA, 19 nt, Artificial Sequence
  Description of Artificial Sequence: Synthetic oligonucleotide
acgauugcagcccuagaca

SEQ ID NO: 1937007 - RNA, 19 nt, Artificial Sequence
  Description of Artificial Sequence: Synthetic oligonucleotide
agacagaggcucaaggagg

SEQ ID NO: 1937008 - RNA, 19 nt, Artificial Sequence
  Description of Artificial Sequence: Synthetic oligonucleotide
augggcccgaaguaagugg

SEQ ID NO: 1937009 - RNA, 19 nt, Artificial Sequence
  Description of Artificial Sequence: Synthetic oligonucleotide
aaguaaguggggucacggu

SEQ ID NO: 1937010 - RNA, 19 nt, Artificial Sequence
  Description of Artificial Sequence: Synthetic oligonucleotide
accaauguuguagaauuca

SEQ ID NO: 1937011 - RNA, 19 nt, Artificial Sequence
  Description of Artificial Sequence: Synthetic oligonucleotide
ggacaaacgggccugggag

SEQ ID NO: 1937012 - RNA, 19 nt, Artificial Sequence
  Description of Artificial Sequence: Synthetic oligonucleotide
gaggaaccgauguucacca

SEQ ID NO: 1937013 - RNA, 19 nt, Artificial Sequence
  Description of Artificial Sequence: Synthetic oligonucleotide
uugguuugggguggcaccg

SEQ ID NO: 1937014 - RNA, 19 nt, Artificial Sequence
  Description of Artificial Sequence: Synthetic oligonucleotide
auaagggagagggcaaguc

SEQ ID NO: 1937015 - RNA, 19 nt, Artificial Sequence
  Description of Artificial Sequence: Synthetic oligonucleotide
aguuugccaugccugagga

SEQ ID NO: 1937016 - RNA, 19 nt, Artificial Sequence
  Description of Artificial Sequence: Synthetic oligonucleotide
cugccaaacacgugguggc

SEQ ID NO: 1937017 - RNA, 19 nt, Artificial Sequence
  Description of Artificial Sequence: Synthetic oligonucleotide
ucggcuagaguucccuccc

SEQ ID NO: 1937018 - RNA, 19 nt, Artificial Sequence
  Description of Artificial Sequence: Synthetic oligonucleotide
agcgccagccaucagacau

SEQ ID NO: 1937019 - RNA, 19 nt, Artificial Sequence
  Description of Artificial Sequence: Synthetic oligonucleotide
acauccgggugccucuggc

SEQ ID NO: 1937020 - RNA, 19 nt, Artificial Sequence
  Description of Artificial Sequence: Synthetic oligonucleotide
aacucggccugguccucgc

SEQ ID NO: 1937021 - RNA, 19 nt, Artificial Sequence
  Description of Artificial Sequence: Synthetic oligonucleotide
aaguaacgauugcagcccu

SEQ ID NO: 1937022 - RNA, 19 nt, Artificial Sequence
  Description of Artificial Sequence: Synthetic oligonucleotide
gccauagugucccacuugg

SEQ ID NO: 1937023 - RNA, 19 nt, Artificial Sequence
  Description of Artificial Sequence: Synthetic oligonucleotide
ugauaagggagagggcaag

SEQ ID NO: 1937024 - RNA, 19 nt, Artificial Sequence
  Description of Artificial Sequence: Synthetic oligonucleotide
cugucuuugaugauucgga

SEQ ID NO: 1937025 - RNA, 19 nt, Artificial Sequence
  Description of Artificial Sequence: Synthetic oligonucleotide
cucggcuagaguucccucc

SEQ ID NO: 1937026 - RNA, 19 nt, Artificial Sequence
  Description of Artificial Sequence: Synthetic oligonucleotide
aggguugagucccagccca

SEQ ID NO: 1937027 - RNA, 19 nt, Artificial Sequence
  Description of Artificial Sequence: Synthetic oligonucleotide
guaacgauugcagcccuag

SEQ ID NO: 1937028 - RNA, 19 nt, Artificial Sequence
  Description of Artificial Sequence: Synthetic oligonucleotide
cugagcuuaggccgugugg

SEQ ID NO: 1937029 - RNA, 19 nt, Artificial Sequence
  Description of Artificial Sequence: Synthetic oligonucleotide
ugucuuugaugauucggau

SEQ ID NO: 1937030 - RNA, 19 nt, Artificial Sequence
  Description of Artificial Sequence: Synthetic oligonucleotide
ggugaugccaauccuguac

SEQ ID NO: 1937031 - RNA, 19 nt, Artificial Sequence
  Description of Artificial Sequence: Synthetic oligonucleotide
uggcuuaguccucgcauug

SEQ ID NO: 1937032 - RNA, 19 nt, Artificial Sequence
  Description of Artificial Sequence: Synthetic oligonucleotide
uagucuuuuccuccauccu

SEQ ID NO: 1937033 - RNA, 19 nt, Artificial Sequence
  Description of Artificial Sequence: Synthetic oligonucleotide
  modified_base (12)..(12): a, c, u, g, unknown or other
ccuuugacaccncacacag

SEQ ID NO: 1937034 - RNA, 19 nt, Artificial Sequence
  Description of Artificial Sequence: Synthetic oligonucleotide
gucccagcccagcagaugc

SEQ ID NO: 1937035 - RNA, 19 nt, Artificial Sequence
  Description of Artificial Sequence: Synthetic oligonucleotide
ugccugaggaaguucaaua

SEQ ID NO: 1937036 - RNA, 19 nt, Artificial Sequence
  Description of Artificial Sequence: Synthetic oligonucleotide
guaggccccggucucaucc

SEQ ID NO: 1937037 - RNA, 19 nt, Artificial Sequence
  Description of Artificial Sequence: Synthetic oligonucleotide
guacacauugguuuggggu

SEQ ID NO: 1937038 - RNA, 19 nt, Artificial Sequence
  Description of Artificial Sequence: Synthetic oligonucleotide
  modified_base (2)..(2): a, c, u, g, unknown or other
cncacacaggaacucggcc

SEQ ID NO: 1937039 - RNA, 19 nt, Artificial Sequence
  Description of Artificial Sequence: Synthetic oligonucleotide
acggucaaugagguaggcc

SEQ ID NO: 1937040 - RNA, 19 nt, Artificial Sequence
  Description of Artificial Sequence: Synthetic oligonucleotide
uguaggaggaaccgauguu

SEQ ID NO: 1937041 - RNA, 19 nt, Artificial Sequence
  Description of Artificial Sequence: Synthetic oligonucleotide
ucugagcuuaggccgugug

SEQ ID NO: 1937042 - RNA, 19 nt, Artificial Sequence
  Description of Artificial Sequence: Synthetic oligonucleotide
gacucgcaccgcuucuucg

SEQ ID NO: 1937043 - RNA, 19 nt, Artificial Sequence
  Description of Artificial Sequence: Synthetic oligonucleotide
gaaguucaauaugggcccg

SEQ ID NO: 1937044 - RNA, 19 nt, Artificial Sequence
  Description of Artificial Sequence: Synthetic oligonucleotide
ggauccgccaugcagcaag

SEQ ID NO: 1937045 - RNA, 19 nt, Artificial Sequence
  Description of Artificial Sequence: Synthetic oligonucleotide
uccuuguccagcaccaguu

SEQ ID NO: 1937046 - RNA, 19 nt, Artificial Sequence
  Description of Artificial Sequence: Synthetic oligonucleotide
guaggaggaaccgauguuc

SEQ ID NO: 1937047 - RNA, 19 nt, Artificial Sequence
  Description of Artificial Sequence: Synthetic oligonucleotide
  modified_base (11)..(11): a, c, u, g, unknown or other
cuuugacaccncacacagg

SEQ ID NO: 1937048 - RNA, 19 nt, Artificial Sequence
  Description of Artificial Sequence: Synthetic oligonucleotide
uaugggcccgaaguaagug

SEQ ID NO: 1937049 - RNA, 19 nt, Artificial Sequence
  Description of Artificial Sequence: Synthetic oligonucleotide
auccugucuuugaugauuc

SEQ ID NO: 1937050 - RNA, 19 nt, Artificial Sequence
  Description of Artificial Sequence: Synthetic oligonucleotide
gaagcgccagccaucagac

SEQ ID NO: 1937051 - RNA, 19 nt, Artificial Sequence
  Description of Artificial Sequence: Synthetic oligonucleotide
auguuguagaauucagcuu

SEQ ID NO: 1937052 - RNA, 19 nt, Artificial Sequence
  Description of Artificial Sequence: Synthetic oligonucleotide
ugcucgaagcgccagccau

SEQ ID NO: 1937053 - RNA, 19 nt, Artificial Sequence
  Description of Artificial Sequence: Synthetic oligonucleotide
aggaacucggccugguccu

SEQ ID NO: 1937054 - RNA, 19 nt, Artificial Sequence
  Description of Artificial Sequence: Synthetic oligonucleotide
ggaaccgauguucaccagc

SEQ ID NO: 1937055 - RNA, 19 nt, Artificial Sequence
  Description of Artificial Sequence: Synthetic oligonucleotide
auaaaggauuucagaucgg

SEQ ID NO: 1937056 - RNA, 19 nt, Artificial Sequence
  Description of Artificial Sequence: Synthetic oligonucleotide
  modified_base (4)..(4): a, c, u, g, unknown or other
accncacacaggaacucgg

SEQ ID NO: 1937057 - RNA, 19 nt, Artificial Sequence
  Description of Artificial Sequence: Synthetic oligonucleotide
agauaugggugggcagugc

SEQ ID NO: 1937058 - RNA, 19 nt, Artificial Sequence
  Description of Artificial Sequence: Synthetic oligonucleotide
agcugcucgaagcgccagc

SEQ ID NO: 1937059 - RNA, 19 nt, Artificial Sequence
  Description of Artificial Sequence: Synthetic oligonucleotide
acgcgguacacauugguuu

SEQ ID NO: 1937060 - RNA, 19 nt, Artificial Sequence
  Description of Artificial Sequence: Synthetic oligonucleotide
aaacgggccugggagauau

SEQ ID NO: 1937061 - RNA, 19 nt, Artificial Sequence
  Description of Artificial Sequence: Synthetic oligonucleotide
uccugucuuugaugauucg

SEQ ID NO: 1937062 - RNA, 19 nt, Artificial Sequence
  Description of Artificial Sequence: Synthetic oligonucleotide
accaguuugccaugccuga

SEQ ID NO: 1937063 - RNA, 19 nt, Artificial Sequence
  Description of Artificial Sequence: Synthetic oligonucleotide
gagcuuaggccgugugggg

SEQ ID NO: 1937064 - RNA, 19 nt, Artificial Sequence
  Description of Artificial Sequence: Synthetic oligonucleotide
accguggucacuguguagu

SEQ ID NO: 1937065 - RNA, 19 nt, Artificial Sequence
  Description of Artificial Sequence: Synthetic oligonucleotide
aucccgguccgacucgcac

SEQ ID NO: 1937066 - RNA, 19 nt, Artificial Sequence
  Description of Artificial Sequence: Synthetic oligonucleotide
gcugccaaacacguggugg

SEQ ID NO: 1937067 - RNA, 19 nt, Artificial Sequence
  Description of Artificial Sequence: Synthetic oligonucleotide
ggcagcagugauaagggag

SEQ ID NO: 1937068 - RNA, 19 nt, Artificial Sequence
  Description of Artificial Sequence: Synthetic oligonucleotide
cucgcugccguaguuguag

SEQ ID NO: 1937069 - RNA, 19 nt, Artificial Sequence
  Description of Artificial Sequence: Synthetic oligonucleotide
ugccaauccuguaccuggc

SEQ ID NO: 1937070 - RNA, 19 nt, Artificial Sequence
  Description of Artificial Sequence: Synthetic oligonucleotide
gguacacauugguuugggg

SEQ ID NO: 1937071 - RNA, 19 nt, Artificial Sequence
  Description of Artificial Sequence: Synthetic oligonucleotide
guaaguggggucacgguca

SEQ ID NO: 1937072 - RNA, 19 nt, Artificial Sequence
  Description of Artificial Sequence: Synthetic oligonucleotide
ggggucacggucaaugagg

SEQ ID NO: 1937073 - RNA, 19 nt, Artificial Sequence
  Description of Artificial Sequence: Synthetic oligonucleotide
aggaggugcuaugacuggg

SEQ ID NO: 1937074 - RNA, 19 nt, Artificial Sequence
  Description of Artificial Sequence: Synthetic oligonucleotide
uaacgauugcagcccuaga

SEQ ID NO: 1937075 - RNA, 19 nt, Artificial Sequence
  Description of Artificial Sequence: Synthetic oligonucleotide
guggaguuccuuugacacc

SEQ ID NO: 1937076 - RNA, 19 nt, Artificial Sequence
  Description of Artificial Sequence: Synthetic oligonucleotide
acacgugguggcaaagggg

SEQ ID NO: 1937077 - RNA, 19 nt, Artificial Sequence
  Description of Artificial Sequence: Synthetic oligonucleotide
agccauagugucccacuug

SEQ ID NO: 1937078 - RNA, 19 nt, Artificial Sequence
  Description of Artificial Sequence: Synthetic oligonucleotide
accccauuccucccugauc

SEQ ID NO: 1937079 - RNA, 19 nt, Artificial Sequence
  Description of Artificial Sequence: Synthetic oligonucleotide
ucaaugagguaggccccgg

SEQ ID NO: 1937080 - RNA, 19 nt, Artificial Sequence
  Description of Artificial Sequence: Synthetic oligonucleotide
uuggcuuaguccucgcauu

SEQ ID NO: 1937081 - RNA, 19 nt, Artificial Sequence
  Description of Artificial Sequence: Synthetic oligonucleotide
ugaugccaauccuguaccu

SEQ ID NO: 1937082 - RNA, 19 nt, Artificial Sequence
  Description of Artificial Sequence: Synthetic oligonucleotide
  modified_base (6)..(6): a, c, u, g, unknown or other
acaccncacacaggaacuc

SEQ ID NO: 1937083 - RNA, 19 nt, Artificial Sequence
  Description of Artificial Sequence: Synthetic oligonucleotide
gucaaugagguaggccccg

SEQ ID NO: 1937084 - RNA, 19 nt, Artificial Sequence
  Description of Artificial Sequence: Synthetic oligonucleotide
aaccgauguucaccagcug

SEQ ID NO: 1937085 - RNA, 19 nt, Artificial Sequence
  Description of Artificial Sequence: Synthetic oligonucleotide
gggaagggcagccaaggug

SEQ ID NO: 1937086 - RNA, 19 nt, Artificial Sequence
  Description of Artificial Sequence: Synthetic oligonucleotide
guaucugaagccauagugu

SEQ ID NO: 1937087 - RNA, 19 nt, Artificial Sequence
  Description of Artificial Sequence: Synthetic oligonucleotide
uugccaugccugaggaagu

SEQ ID NO: 1937088 - RNA, 19 nt, Artificial Sequence
  Description of Artificial Sequence: Synthetic oligonucleotide
cguaguuguaggaggaacc

SEQ ID NO: 1937089 - RNA, 19 nt, Artificial Sequence
  Description of Artificial Sequence: Synthetic oligonucleotide
aggugcuaugacugggcug

SEQ ID NO: 1937090 - RNA, 19 nt, Artificial Sequence
  Description of Artificial Sequence: Synthetic oligonucleotide
ggaggaaccgauguucacc

SEQ ID NO: 1937091 - RNA, 19 nt, Artificial Sequence
  Description of Artificial Sequence: Synthetic oligonucleotide
gacaaacgggccugggaga

SEQ ID NO: 1937092 - RNA, 19 nt, Artificial Sequence
  Description of Artificial Sequence: Synthetic oligonucleotide
uaguccucgcauugucccc

SEQ ID NO: 1937093 - RNA, 19 nt, Artificial Sequence
  Description of Artificial Sequence: Synthetic oligonucleotide
  modified_base (5)..(5): a, c, u, g, unknown or other
caccncacacaggaacucg

SEQ ID NO: 1937094 - RNA, 19 nt, Artificial Sequence
  Description of Artificial Sequence: Synthetic oligonucleotide
cauugguuugggguggcac

SEQ ID NO: 1937095 - RNA, 19 nt, Artificial Sequence
  Description of Artificial Sequence: Synthetic oligonucleotide
cagugauaagggagagggc

SEQ ID NO: 1937096 - RNA, 19 nt, Artificial Sequence
  Description of Artificial Sequence: Synthetic oligonucleotide
agggcaagucuuccuccuc

SEQ ID NO: 1937097 - RNA, 19 nt, Artificial Sequence
  Description of Artificial Sequence: Synthetic oligonucleotide
augcaggcagcagugauaa

SEQ ID NO: 1937098 - RNA, 19 nt, Artificial Sequence
  Description of Artificial Sequence: Synthetic oligonucleotide
  modified_base (9)..(9): a, c, u, g, unknown or other
uugacaccncacacaggaa

SEQ ID NO: 1937099 - RNA, 19 nt, Artificial Sequence
  Description of Artificial Sequence: Synthetic oligonucleotide
uaccuggcuuccugcuugg

SEQ ID NO: 1937100 - RNA, 19 nt, Artificial Sequence
  Description of Artificial Sequence: Synthetic oligonucleotide
caggguugagucccagccc

SEQ ID NO: 1937101 - RNA, 19 nt, Artificial Sequence
  Description of Artificial Sequence: Synthetic oligonucleotide
gaaccccaagucccuggag

SEQ ID NO: 1937102 - RNA, 19 nt, Artificial Sequence
  Description of Artificial Sequence: Synthetic oligonucleotide
agcuguggaguuccuuuga

SEQ ID NO: 1937103 - RNA, 19 nt, Artificial Sequence
  Description of Artificial Sequence: Synthetic oligonucleotide
guugagucccagcccagca

SEQ ID NO: 1937104 - RNA, 19 nt, Artificial Sequence
  Description of Artificial Sequence: Synthetic oligonucleotide
ccugucuuugaugauucgg

SEQ ID NO: 1937105 - RNA, 19 nt, Artificial Sequence
  Description of Artificial Sequence: Synthetic oligonucleotide
ucccgguccgacucgcacc

SEQ ID NO: 1937106 - RNA, 19 nt, Artificial Sequence
  Description of Artificial Sequence: Synthetic oligonucleotide
uaaguggggucacggucaa

SEQ ID NO: 1937107 - RNA, 19 nt, Artificial Sequence
  Description of Artificial Sequence: Synthetic oligonucleotide
ggaggcaggguugaguccc

SEQ ID NO: 1937108 - RNA, 19 nt, Artificial Sequence
  Description of Artificial Sequence: Synthetic oligonucleotide
cuuagggcuccaggaaccc

SEQ ID NO: 1937109 - RNA, 19 nt, Artificial Sequence
  Description of Artificial Sequence: Synthetic oligonucleotide
ucgcugccguaguuguagg

SEQ ID NO: 1937110 - RNA, 19 nt, Artificial Sequence
  Description of Artificial Sequence: Synthetic oligonucleotide
aggaaccccauuccucccu

SEQ ID NO: 1937111 - RNA, 19 nt, Artificial Sequence
  Description of Artificial Sequence: Synthetic oligonucleotide
agggaguggauccgccaug

SEQ ID NO: 1937112 - RNA, 19 nt, Artificial Sequence
  Description of Artificial Sequence: Synthetic oligonucleotide
gccuggacacaccagggcc

SEQ ID NO: 1937113 - RNA, 19 nt, Artificial Sequence
  Description of Artificial Sequence: Synthetic oligonucleotide
guuugggguggcaccgugg

SEQ ID NO: 1937114 - RNA, 19 nt, Artificial Sequence
  Description of Artificial Sequence: Synthetic oligonucleotide
ggcaagucuuccuccucgg

SEQ ID NO: 1937115 - RNA, 19 nt, Artificial Sequence
  Description of Artificial Sequence: Synthetic oligonucleotide
gauccgccaugcagcaagg

SEQ ID NO: 1937116 - RNA, 19 nt, Artificial Sequence
  Description of Artificial Sequence: Synthetic oligonucleotide
uuguagaauucagcuuccu

SEQ ID NO: 1937117 - RNA, 19 nt, Artificial Sequence
  Description of Artificial Sequence: Synthetic oligonucleotide
cuguggaguuccuuugaca

SEQ ID NO: 1937118 - RNA, 19 nt, Artificial Sequence
  Description of Artificial Sequence: Synthetic oligonucleotide
ccacacuuuggccaugggc

SEQ ID NO: 1937119 - RNA, 19 nt, Artificial Sequence
  Description of Artificial Sequence: Synthetic oligonucleotide
ggcuccaggaaccccauuc

SEQ ID NO: 1937120 - RNA, 19 nt, Artificial Sequence
  Description of Artificial Sequence: Synthetic oligonucleotide
ggaccaauguuguagaauu

SEQ ID NO: 1937121 - RNA, 19 nt, Artificial Sequence
  Description of Artificial Sequence: Synthetic oligonucleotide
gaaccgauguucaccagcu

SEQ ID NO: 1937122 - RNA, 19 nt, Artificial Sequence
  Description of Artificial Sequence: Synthetic oligonucleotide
auagcuucucugagcuuag

SEQ ID NO: 1937123 - RNA, 19 nt, Artificial Sequence
  Description of Artificial Sequence: Synthetic oligonucleotide
uagacacuuagggcuccag

SEQ ID NO: 1937124 - RNA, 19 nt, Artificial Sequence
  Description of Artificial Sequence: Synthetic oligonucleotide
gaacucggccugguccucg

SEQ ID NO: 1937125 - RNA, 19 nt, Artificial Sequence
  Description of Artificial Sequence: Synthetic oligonucleotide
aucaggggaccaauguugu

SEQ ID NO: 1937126 - RNA, 19 nt, Artificial Sequence
  Description of Artificial Sequence: Synthetic oligonucleotide
uguggggagcuguggaguu

SEQ ID NO: 1937127 - RNA, 19 nt, Artificial Sequence
  Description of Artificial Sequence: Synthetic oligonucleotide
uccgacucgcaccgcuucu

SEQ ID NO: 1937128 - RNA, 19 nt, Artificial Sequence
  Description of Artificial Sequence: Synthetic oligonucleotide
acucugcugccaaacacgu

SEQ ID NO: 1937129 - RNA, 19 nt, Artificial Sequence
  Description of Artificial Sequence: Synthetic oligonucleotide
uggcuuguaauagcuucuc

SEQ ID NO: 1937130 - RNA, 19 nt, Artificial Sequence
  Description of Artificial Sequence: Synthetic oligonucleotide
caaacacgugguggcaaag

SEQ ID NO: 1937131 - RNA, 19 nt, Artificial Sequence
  Description of Artificial Sequence: Synthetic oligonucleotide
cucgcaccgcuucuucgcc

SEQ ID NO: 1937132 - RNA, 19 nt, Artificial Sequence
  Description of Artificial Sequence: Synthetic oligonucleotide
caauaugggcccgaaguaa

SEQ ID NO: 1937133 - RNA, 19 nt, Artificial Sequence
  Description of Artificial Sequence: Synthetic oligonucleotide
uccgggugccucuggcuug

SEQ ID NO: 1937134 - RNA, 19 nt, Artificial Sequence
  Description of Artificial Sequence: Synthetic oligonucleotide
aggcgaggggacaaacggg

SEQ ID NO: 1937135 - RNA, 19 nt, Artificial Sequence
  Description of Artificial Sequence: Synthetic oligonucleotide
gguggcaaaggggaagggc

SEQ ID NO: 1937136 - RNA, 19 nt, Artificial Sequence
  Description of Artificial Sequence: Synthetic oligonucleotide
acaaacgggccugggagau

SEQ ID NO: 1937137 - RNA, 19 nt, Artificial Sequence
  Description of Artificial Sequence: Synthetic oligonucleotide
auggagacagaggcucaag

SEQ ID NO: 1937138 - RNA, 19 nt, Artificial Sequence
  Description of Artificial Sequence: Synthetic oligonucleotide
ggcgaggggacaaacgggc

SEQ ID NO: 1937139 - RNA, 19 nt, Artificial Sequence
  Description of Artificial Sequence: Synthetic oligonucleotide
uccuggcacugaagcacgc

SEQ ID NO: 1937140 - RNA, 19 nt, Artificial Sequence
  Description of Artificial Sequence: Synthetic oligonucleotide
caggaaccccauuccuccc

SEQ ID NO: 1937141 - RNA, 19 nt, Artificial Sequence
  Description of Artificial Sequence: Synthetic oligonucleotide
gcuuaggccguguggggag

SEQ ID NO: 1937142 - RNA, 19 nt, Artificial Sequence
  Description of Artificial Sequence: Synthetic oligonucleotide
gcccuagacacuuagggcu

SEQ ID NO: 1937143 - RNA, 19 nt, Artificial Sequence
  Description of Artificial Sequence: Synthetic oligonucleotide
gacuucugcucccgacaac

SEQ ID NO: 1937144 - RNA, 19 nt, Artificial Sequence
  Description of Artificial Sequence: Synthetic oligonucleotide
ugcucccgacaacagcguc

SEQ ID NO: 1937145 - RNA, 19 nt, Artificial Sequence
  Description of Artificial Sequence: Synthetic oligonucleotide
ccuggacacaccagggccc

SEQ ID NO: 1937146 - RNA, 19 nt, Artificial Sequence
  Description of Artificial Sequence: Synthetic oligonucleotide
gaugcaggcagcagugaua

SEQ ID NO: 1937147 - RNA, 19 nt, Artificial Sequence
  Description of Artificial Sequence: Synthetic oligonucleotide
uaauagcuucucugagcuu

SEQ ID NO: 1937148 - RNA, 19 nt, Artificial Sequence
  Description of Artificial Sequence: Synthetic oligonucleotide
ugccaaacacgugguggca

SEQ ID NO: 1937149 - RNA, 19 nt, Artificial Sequence
  Description of Artificial Sequence: Synthetic oligonucleotide
auaugggugggcagugcca

SEQ ID NO: 1937150 - RNA, 19 nt, Artificial Sequence
  Description of Artificial Sequence: Synthetic oligonucleotide
uaggccccggucucauccc

SEQ ID NO: 1937151 - RNA, 19 nt, Artificial Sequence
  Description of Artificial Sequence: Synthetic oligonucleotide
cucugccuggacacaccag

SEQ ID NO: 1937152 - RNA, 19 nt, Artificial Sequence
  Description of Artificial Sequence: Synthetic oligonucleotide
aguucaauaugggcccgaa

SEQ ID NO: 1937153 - RNA, 19 nt, Artificial Sequence
  Description of Artificial Sequence: Synthetic oligonucleotide
gcuucuucgccuuggcaca

SEQ ID NO: 1937154 - RNA, 19 nt, Artificial Sequence
  Description of Artificial Sequence: Synthetic oligonucleotide
auccgggugccucuggcuu

SEQ ID NO: 1937155 - RNA, 19 nt, Artificial Sequence
  Description of Artificial Sequence: Synthetic oligonucleotide
gacucugccuggacacacc

SEQ ID NO: 1937156 - RNA, 19 nt, Artificial Sequence
  Description of Artificial Sequence: Synthetic oligonucleotide
ucaucccgguccgacucgc

SEQ ID NO: 1937157 - RNA, 19 nt, Artificial Sequence
  Description of Artificial Sequence: Synthetic oligonucleotide
ugcuuggcuuaguccucgc

SEQ ID NO: 1937158 - RNA, 19 nt, Artificial Sequence
  Description of Artificial Sequence: Synthetic oligonucleotide
cccugauccucacaacacc

SEQ ID NO: 1937159 - RNA, 19 nt, Artificial Sequence
  Description of Artificial Sequence: Synthetic oligonucleotide
guggauccgccaugcagca

SEQ ID NO: 1937160 - RNA, 19 nt, Artificial Sequence
  Description of Artificial Sequence: Synthetic oligonucleotide
cuuggcuuaguccucgcau

SEQ ID NO: 1937161 - RNA, 19 nt, Artificial Sequence
  Description of Artificial Sequence: Synthetic oligonucleotide
ggcucaaggaggugcuaug

SEQ ID NO: 1937162 - RNA, 19 nt, Artificial Sequence
  Description of Artificial Sequence: Synthetic oligonucleotide
gcuuaguccucgcauuguc

SEQ ID NO: 1937163 - RNA, 19 nt, Artificial Sequence
  Description of Artificial Sequence: Synthetic oligonucleotide
ccuguaccuggcuuccugc

SEQ ID NO: 1937164 - RNA, 19 nt, Artificial Sequence
  Description of Artificial Sequence: Synthetic oligonucleotide
ugcuaugacugggcuggga

SEQ ID NO: 1937165 - RNA, 19 nt, Artificial Sequence
  Description of Artificial Sequence: Synthetic oligonucleotide
  modified_base (3)..(3): a, c, u, g, unknown or other
ccncacacaggaacucggc

SEQ ID NO: 1937166 - RNA, 19 nt, Artificial Sequence
  Description of Artificial Sequence: Synthetic oligonucleotide
cccggucucaucccggucc

SEQ ID NO: 1937167 - RNA, 19 nt, Artificial Sequence
  Description of Artificial Sequence: Synthetic oligonucleotide
ucaggggaccaauguugua

SEQ ID NO: 1937168 - RNA, 19 nt, Artificial Sequence
  Description of Artificial Sequence: Synthetic oligonucleotide
ccaggcgaggggacaaacg

SEQ ID NO: 1937169 - RNA, 19 nt, Artificial Sequence
  Description of Artificial Sequence: Synthetic oligonucleotide
gaggugcuaugacugggcu

SEQ ID NO: 1937170 - RNA, 19 nt, Artificial Sequence
  Description of Artificial Sequence: Synthetic oligonucleotide
gcuguggaguuccuuugac

SEQ ID NO: 1937171 - RNA, 19 nt, Artificial Sequence
  Description of Artificial Sequence: Synthetic oligonucleotide
ggaggugcuaugacugggc

SEQ ID NO: 1937172 - RNA, 19 nt, Artificial Sequence
  Description of Artificial Sequence: Synthetic oligonucleotide
cccaaaaguaacgauugca

SEQ ID NO: 1937173 - RNA, 19 nt, Artificial Sequence
  Description of Artificial Sequence: Synthetic oligonucleotide
caccguggucacuguguag

SEQ ID NO: 1937174 - RNA, 19 nt, Artificial Sequence
  Description of Artificial Sequence: Synthetic oligonucleotide
gugauaagggagagggcaa

SEQ ID NO: 1937175 - RNA, 19 nt, Artificial Sequence
  Description of Artificial Sequence: Synthetic oligonucleotide
gauaagggagagggcaagu

SEQ ID NO: 1937176 - RNA, 19 nt, Artificial Sequence
  Description of Artificial Sequence: Synthetic oligonucleotide
cuucuucgccuuggcacag

SEQ ID NO: 1937177 - RNA, 19 nt, Artificial Sequence
  Description of Artificial Sequence: Synthetic oligonucleotide
cuuaggccguguggggagc

SEQ ID NO: 1937178 - RNA, 19 nt, Artificial Sequence
  Description of Artificial Sequence: Synthetic oligonucleotide
cugggagauaugggugggc

SEQ ID NO: 1937179 - RNA, 19 nt, Artificial Sequence
  Description of Artificial Sequence: Synthetic oligonucleotide
ucccgacaacagcgucugg

SEQ ID NO: 1937180 - RNA, 19 nt, Artificial Sequence
  Description of Artificial Sequence: Synthetic oligonucleotide
ccauagugucccacuuggg

SEQ ID NO: 1937181 - RNA, 19 nt, Artificial Sequence
  Description of Artificial Sequence: Synthetic oligonucleotide
ucgaagcgccagccaucag

SEQ ID NO: 1937182 - RNA, 19 nt, Artificial Sequence
  Description of Artificial Sequence: Synthetic oligonucleotide
ggaaccccauuccucccug

SEQ ID NO: 1937183 - RNA, 19 nt, Artificial Sequence
  Description of Artificial Sequence: Synthetic oligonucleotide
cagccauguccuuguccag

SEQ ID NO: 1937184 - RNA, 19 nt, Artificial Sequence
  Description of Artificial Sequence: Synthetic oligonucleotide
cugguccucgcugccguag

SEQ ID NO: 1937185 - RNA, 19 nt, Artificial Sequence
  Description of Artificial Sequence: Synthetic oligonucleotide
cacauugguuugggguggc

SEQ ID NO: 1937186 - RNA, 19 nt, Artificial Sequence
  Description of Artificial Sequence: Synthetic oligonucleotide
cucgaagcgccagccauca

SEQ ID NO: 1937187 - RNA, 19 nt, Artificial Sequence
  Description of Artificial Sequence: Synthetic oligonucleotide
ccaugccugaggaaguuca

SEQ ID NO: 1937188 - RNA, 19 nt, Artificial Sequence
  Description of Artificial Sequence: Synthetic oligonucleotide
gggaguggauccgccaugc

SEQ ID NO: 1937189 - RNA, 19 nt, Artificial Sequence
  Description of Artificial Sequence: Synthetic oligonucleotide
ucggaaccccaagucccug

SEQ ID NO: 1937190 - RNA, 19 nt, Artificial Sequence
  Description of Artificial Sequence: Synthetic oligonucleotide
ucgcaccgcuucuucgccu

SEQ ID NO: 1937191 - RNA, 19 nt, Artificial Sequence
  Description of Artificial Sequence: Synthetic oligonucleotide
aucggaaccccaagucccu

SEQ ID NO: 1937192 - RNA, 19 nt, Artificial Sequence
  Description of Artificial Sequence: Synthetic oligonucleotide
gagggaguggauccgccau

SEQ ID NO: 1937193 - RNA, 19 nt, Artificial Sequence
  Description of Artificial Sequence: Synthetic oligonucleotide
ccaccucaggccuuccaag

SEQ ID NO: 1937194 - RNA, 19 nt, Artificial Sequence
  Description of Artificial Sequence: Synthetic oligonucleotide
gaaccccauuccucccuga

SEQ ID NO: 1937195 - RNA, 19 nt, Artificial Sequence
  Description of Artificial Sequence: Synthetic oligonucleotide
cacggucaaugagguaggc

SEQ ID NO: 1937196 - RNA, 19 nt, Artificial Sequence
  Description of Artificial Sequence: Synthetic oligonucleotide
gggacaaacgggccuggga

SEQ ID NO: 1937197 - RNA, 19 nt, Artificial Sequence
  Description of Artificial Sequence: Synthetic oligonucleotide
augacucugccuggacaca

SEQ ID NO: 1937198 - RNA, 19 nt, Artificial Sequence
  Description of Artificial Sequence: Synthetic oligonucleotide
agcacgcgguacacauugg

SEQ ID NO: 1937199 - RNA, 19 nt, Artificial Sequence
  Description of Artificial Sequence: Synthetic oligonucleotide
cccgguccgacucgcaccg

SEQ ID NO: 1937200 - RNA, 19 nt, Artificial Sequence
  Description of Artificial Sequence: Synthetic oligonucleotide
caugccugaggaaguucaa

SEQ ID NO: 1937201 - RNA, 19 nt, Artificial Sequence
  Description of Artificial Sequence: Synthetic oligonucleotide
guccgacucgcaccgcuuc

SEQ ID NO: 1937202 - RNA, 19 nt, Artificial Sequence
  Description of Artificial Sequence: Synthetic oligonucleotide
gccuuccaaggucccagag

SEQ ID NO: 1937203 - RNA, 19 nt, Artificial Sequence
  Description of Artificial Sequence: Synthetic oligonucleotide
gcagcccuagacacuuagg

SEQ ID NO: 1937204 - RNA, 19 nt, Artificial Sequence
  Description of Artificial Sequence: Synthetic oligonucleotide
guuugccaugccugaggaa

SEQ ID NO: 1937205 - RNA, 19 nt, Artificial Sequence
  Description of Artificial Sequence: Synthetic oligonucleotide
ggacuucugcucccgacaa

SEQ ID NO: 1937206 - RNA, 19 nt, Artificial Sequence
  Description of Artificial Sequence: Synthetic oligonucleotide
ggaaccccaagucccugga

SEQ ID NO: 1937207 - RNA, 19 nt, Artificial Sequence
  Description of Artificial Sequence: Synthetic oligonucleotide
gguugagucccagcccagc

SEQ ID NO: 1937208 - RNA, 19 nt, Artificial Sequence
  Description of Artificial Sequence: Synthetic oligonucleotide
gcgguacacauugguuugg

SEQ ID NO: 1937209 - RNA, 19 nt, Artificial Sequence
  Description of Artificial Sequence: Synthetic oligonucleotide
ggugccucuggcuuguaau

SEQ ID NO: 1937210 - RNA, 19 nt, Artificial Sequence
  Description of Artificial Sequence: Synthetic oligonucleotide
ggagggaguggauccgcca

SEQ ID NO: 1937211 - RNA, 19 nt, Artificial Sequence
  Description of Artificial Sequence: Synthetic oligonucleotide
cgcgguacacauugguuug

SEQ ID NO: 1937212 - RNA, 19 nt, Artificial Sequence
  Description of Artificial Sequence: Synthetic oligonucleotide
ugccaugccugaggaaguu

SEQ ID NO: 1937213 - RNA, 19 nt, Artificial Sequence
  Description of Artificial Sequence: Synthetic oligonucleotide
cucacauccgggugccucu

SEQ ID NO: 1937214 - RNA, 19 nt, Artificial Sequence
  Description of Artificial Sequence: Synthetic oligonucleotide
gggccugggagauaugggu

SEQ ID NO: 1937215 - RNA, 19 nt, Artificial Sequence
  Description of Artificial Sequence: Synthetic oligonucleotide
cagagggccccaggccugg

SEQ ID NO: 1937216 - RNA, 19 nt, Artificial Sequence
  Description of Artificial Sequence: Synthetic oligonucleotide
ccugggagauauggguggg

SEQ ID NO: 1937217 - RNA, 19 nt, Artificial Sequence
  Description of Artificial Sequence: Synthetic oligonucleotide
cauggagacagaggcucaa

SEQ ID NO: 1937218 - RNA, 19 nt, Artificial Sequence
  Description of Artificial Sequence: Synthetic oligonucleotide
ggggcucggcuagaguucc

SEQ ID NO: 1937219 - RNA, 19 nt, Artificial Sequence
  Description of Artificial Sequence: Synthetic oligonucleotide
gccugaggaaguucaauau

SEQ ID NO: 1937220 - RNA, 19 nt, Artificial Sequence
  Description of Artificial Sequence: Synthetic oligonucleotide
aguaacgauugcagcccua

SEQ ID NO: 1937221 - RNA, 19 nt, Artificial Sequence
  Description of Artificial Sequence: Synthetic oligonucleotide
uaggccguguggggagcug

SEQ ID NO: 1937222 - RNA, 19 nt, Artificial Sequence
  Description of Artificial Sequence: Synthetic oligonucleotide
gcacugaagcacgcgguac

SEQ ID NO: 1937223 - RNA, 19 nt, Artificial Sequence
  Description of Artificial Sequence: Synthetic oligonucleotide
cccgaaguaagugggguca

SEQ ID NO: 1937224 - RNA, 19 nt, Artificial Sequence
  Description of Artificial Sequence: Synthetic oligonucleotide
ccggucucaucccgguccg

SEQ ID NO: 1937225 - RNA, 19 nt, Artificial Sequence
  Description of Artificial Sequence: Synthetic oligonucleotide
ggcacugaagcacgcggua

SEQ ID NO: 1937226 - RNA, 19 nt, Artificial Sequence
  Description of Artificial Sequence: Synthetic oligonucleotide
caguaucugaagccauagu

SEQ ID NO: 1937227 - RNA, 19 nt, Artificial Sequence
  Description of Artificial Sequence: Synthetic oligonucleotide
cgaagcgccagccaucaga

SEQ ID NO: 1937228 - RNA, 19 nt, Artificial Sequence
  Description of Artificial Sequence: Synthetic oligonucleotide
ccuagacacuuagggcucc

SEQ ID NO: 1937229 - RNA, 19 nt, Artificial Sequence
  Description of Artificial Sequence: Synthetic oligonucleotide
gcccgaaguaagugggguc

SEQ ID NO: 1937230 - RNA, 19 nt, Artificial Sequence
  Description of Artificial Sequence: Synthetic oligonucleotide
gggcagugccacacuuugg

SEQ ID NO: 1937231 - RNA, 19 nt, Artificial Sequence
  Description of Artificial Sequence: Synthetic oligonucleotide
gugcuaugacugggcuggg

SEQ ID NO: 1937232 - RNA, 19 nt, Artificial Sequence
  Description of Artificial Sequence: Synthetic oligonucleotide
cuagacacuuagggcucca

SEQ ID NO: 1937233 - RNA, 19 nt, Artificial Sequence
  Description of Artificial Sequence: Synthetic oligonucleotide
gggugccauggugccaugg

SEQ ID NO: 1937234 - RNA, 19 nt, Artificial Sequence
  Description of Artificial Sequence: Synthetic oligonucleotide
acucggccugguccucgcu

SEQ ID NO: 1937235 - RNA, 19 nt, Artificial Sequence
  Description of Artificial Sequence: Synthetic oligonucleotide
uugcagcccuagacacuua

SEQ ID NO: 1937236 - RNA, 19 nt, Artificial Sequence
  Description of Artificial Sequence: Synthetic oligonucleotide
gggcccgaaguaagugggg

SEQ ID NO: 1937237 - RNA, 19 nt, Artificial Sequence
  Description of Artificial Sequence: Synthetic oligonucleotide
cagcugcucgaagcgccag

SEQ ID NO: 1937238 - RNA, 19 nt, Artificial Sequence
  Description of Artificial Sequence: Synthetic oligonucleotide
ccagcaccaguuugccaug

SEQ ID NO: 1937239 - RNA, 19 nt, Artificial Sequence
  Description of Artificial Sequence: Synthetic oligonucleotide
ggagagggcaagucuuccu

SEQ ID NO: 1937240 - RNA, 19 nt, Artificial Sequence
  Description of Artificial Sequence: Synthetic oligonucleotide
gcucacauccgggugccuc

SEQ ID NO: 1937241 - RNA, 19 nt, Artificial Sequence
  Description of Artificial Sequence: Synthetic oligonucleotide
cgaaguaaguggggucacg

SEQ ID NO: 1937242 - RNA, 19 nt, Artificial Sequence
  Description of Artificial Sequence: Synthetic oligonucleotide
cacuuuggccaugggcaga

SEQ ID NO: 1937243 - RNA, 19 nt, Artificial Sequence
  Description of Artificial Sequence: Synthetic oligonucleotide
cacgcgguacacauugguu

SEQ ID NO: 1937244 - RNA, 19 nt, Artificial Sequence
  Description of Artificial Sequence: Synthetic oligonucleotide
ccucccugauccucacaac

SEQ ID NO: 1937245 - RNA, 19 nt, Artificial Sequence
  Description of Artificial Sequence: Synthetic oligonucleotide
ccaaacacgugguggcaaa

SEQ ID NO: 1937246 - RNA, 19 nt, Artificial Sequence
  Description of Artificial Sequence: Synthetic oligonucleotide
ggcagccaaggugaugcca

SEQ ID NO: 1937247 - RNA, 19 nt, Artificial Sequence
  Description of Artificial Sequence: Synthetic oligonucleotide
aacgggccugggagauaug

SEQ ID NO: 1937248 - RNA, 19 nt, Artificial Sequence
  Description of Artificial Sequence: Synthetic oligonucleotide
cugcucgaagcgccagcca

SEQ ID NO: 1937249 - RNA, 19 nt, Artificial Sequence
  Description of Artificial Sequence: Synthetic oligonucleotide
gaggggugccauggugcca

SEQ ID NO: 1937250 - RNA, 19 nt, Artificial Sequence
  Description of Artificial Sequence: Synthetic oligonucleotide
uggauccgccaugcagcaa

SEQ ID NO: 1937251 - RNA, 19 nt, Artificial Sequence
  Description of Artificial Sequence: Synthetic oligonucleotide
cgguacacauugguuuggg

SEQ ID NO: 1937252 - RNA, 19 nt, Artificial Sequence
  Description of Artificial Sequence: Synthetic oligonucleotide
caccaguaucugaagccau

SEQ ID NO: 1937253 - RNA, 19 nt, Artificial Sequence
  Description of Artificial Sequence: Synthetic oligonucleotide
gggaccaauguuguagaau

SEQ ID NO: 1937254 - RNA, 19 nt, Artificial Sequence
  Description of Artificial Sequence: Synthetic oligonucleotide
agagggccccaggccuggg

SEQ ID NO: 1937255 - RNA, 19 nt, Artificial Sequence
  Description of Artificial Sequence: Synthetic oligonucleotide
agguaggccccggucucau

SEQ ID NO: 1937256 - RNA, 19 nt, Artificial Sequence
  Description of Artificial Sequence: Synthetic oligonucleotide
cccaagucccuggagguga

SEQ ID NO: 1937257 - RNA, 19 nt, Artificial Sequence
  Description of Artificial Sequence: Synthetic oligonucleotide
cugcugccaaacacguggu

SEQ ID NO: 1937258 - RNA, 19 nt, Artificial Sequence
  Description of Artificial Sequence: Synthetic oligonucleotide
cauccgggugccucuggcu

SEQ ID NO: 1937259 - RNA, 19 nt, Artificial Sequence
  Description of Artificial Sequence: Synthetic oligonucleotide
gcgaggggacaaacgggcc

SEQ ID NO: 1937260 - RNA, 19 nt, Artificial Sequence
  Description of Artificial Sequence: Synthetic oligonucleotide
caagucccuggaggugauc

SEQ ID NO: 1937261 - RNA, 19 nt, Artificial Sequence
  Description of Artificial Sequence: Synthetic oligonucleotide
ggguugagucccagcccag

SEQ ID NO: 1937262 - RNA, 19 nt, Artificial Sequence
  Description of Artificial Sequence: Synthetic oligonucleotide
ccauggagacagaggcuca

SEQ ID NO: 1937263 - RNA, 19 nt, Artificial Sequence
  Description of Artificial Sequence: Synthetic oligonucleotide
gcgccagccaucagacaug

SEQ ID NO: 1937264 - RNA, 19 nt, Artificial Sequence
  Description of Artificial Sequence: Synthetic oligonucleotide
gccaaacacgugguggcaa

SEQ ID NO: 1937265 - RNA, 19 nt, Artificial Sequence
  Description of Artificial Sequence: Synthetic oligonucleotide
cagggcccaccucaggccu

SEQ ID NO: 1937266 - RNA, 19 nt, Artificial Sequence
  Description of Artificial Sequence: Synthetic oligonucleotide
ccgaaguaaguggggucac

SEQ ID NO: 1937267 - RNA, 19 nt, Artificial Sequence
  Description of Artificial Sequence: Synthetic oligonucleotide
caucccgguccgacucgca

SEQ ID NO: 1937268 - RNA, 19 nt, Artificial Sequence
  Description of Artificial Sequence: Synthetic oligonucleotide
gcucgaagcgccagccauc

SEQ ID NO: 1937269 - RNA, 19 nt, Artificial Sequence
  Description of Artificial Sequence: Synthetic oligonucleotide
ggccuuccaaggucccaga

SEQ ID NO: 1937270 - RNA, 19 nt, Artificial Sequence
  Description of Artificial Sequence: Synthetic oligonucleotide
ccauguccuuguccagcac

SEQ ID NO: 1937271 - RNA, 19 nt, Artificial Sequence
  Description of Artificial Sequence: Synthetic oligonucleotide
ggggcccaccccgugguac

SEQ ID NO: 1937272 - RNA, 19 nt, Artificial Sequence
  Description of Artificial Sequence: Synthetic oligonucleotide
  modified_base (18)..(18): a, c, u, g, unknown or other
ggaguuccuuugacaccnc

SEQ ID NO: 1937273 - RNA, 19 nt, Artificial Sequence
  Description of Artificial Sequence: Synthetic oligonucleotide
ggccccggucucaucccgg

SEQ ID NO: 1937274 - RNA, 19 nt, Artificial Sequence
  Description of Artificial Sequence: Synthetic oligonucleotide
gggcccaccccgugguaca

SEQ ID NO: 1937275 - RNA, 19 nt, Artificial Sequence
  Description of Artificial Sequence: Synthetic oligonucleotide
cugcucccgacaacagcgu

SEQ ID NO: 1937276 - RNA, 19 nt, Artificial Sequence
  Description of Artificial Sequence: Synthetic oligonucleotide
ggcccgaaguaaguggggu

SEQ ID NO: 1937277 - RNA, 19 nt, Artificial Sequence
  Description of Artificial Sequence: Synthetic oligonucleotide
gaagggcagccaaggugau

SEQ ID NO: 1937278 - RNA, 19 nt, Artificial Sequence
  Description of Artificial Sequence: Synthetic oligonucleotide
cccaccccgugguacaaaa

SEQ ID NO: 1937279 - RNA, 19 nt, Artificial Sequence
  Description of Artificial Sequence: Synthetic oligonucleotide
ggucacggucaaugaggua

SEQ ID NO: 1937280 - RNA, 19 nt, Artificial Sequence
  Description of Artificial Sequence: Synthetic oligonucleotide
cccaggcgaggggacaaac

SEQ ID NO: 1937281 - RNA, 19 nt, Artificial Sequence
  Description of Artificial Sequence: Synthetic oligonucleotide
ggcuuaguccucgcauugu

SEQ ID NO: 1937282 - RNA, 19 nt, Artificial Sequence
  Description of Artificial Sequence: Synthetic oligonucleotide
ggaacucggccugguccuc

SEQ ID NO: 1937283 - RNA, 19 nt, Artificial Sequence
  Description of Artificial Sequence: Synthetic oligonucleotide
cccagagggccccaggccu

SEQ ID NO: 1937284 - RNA, 19 nt, Artificial Sequence
  Description of Artificial Sequence: Synthetic oligonucleotide
gccguaguuguaggaggaa

SEQ ID NO: 1937285 - RNA, 19 nt, Artificial Sequence
  Description of Artificial Sequence: Synthetic oligonucleotide
ggcucggcuagaguucccu

SEQ ID NO: 1937286 - RNA, 19 nt, Artificial Sequence
  Description of Artificial Sequence: Synthetic oligonucleotide
cggcuagaguucccucccc

SEQ ID NO: 1937287 - RNA, 19 nt, Artificial Sequence
  Description of Artificial Sequence: Synthetic oligonucleotide
cgacucgcaccgcuucuuc

SEQ ID NO: 1937288 - RNA, 19 nt, Artificial Sequence
  Description of Artificial Sequence: Synthetic oligonucleotide
caaacgggccugggagaua

SEQ ID NO: 1937289 - RNA, 19 nt, Artificial Sequence
  Description of Artificial Sequence: Synthetic oligonucleotide
ggucacuguguagucuuuu

SEQ ID NO: 1937290 - RNA, 19 nt, Artificial Sequence
  Description of Artificial Sequence: Synthetic oligonucleotide
ggggugccauggugccaug

SEQ ID NO: 1937291 - RNA, 19 nt, Artificial Sequence
  Description of Artificial Sequence: Synthetic oligonucleotide
gggcccaccucaggccuuc

SEQ ID NO: 1937292 - RNA, 19 nt, Artificial Sequence
  Description of Artificial Sequence: Synthetic oligonucleotide
agggcccaccucaggccuu

SEQ ID NO: 1937293 - RNA, 19 nt, Artificial Sequence
  Description of Artificial Sequence: Synthetic oligonucleotide
gggcucggcuagaguuccc

SEQ ID NO: 1937294 - RNA, 19 nt, Artificial Sequence
  Description of Artificial Sequence: Synthetic oligonucleotide
ccccggucucaucccgguc

SEQ ID NO: 1937295 - RNA, 19 nt, Artificial Sequence
  Description of Artificial Sequence: Synthetic oligonucleotide
gccccggucucaucccggu

SEQ ID NO: 1937296 - RNA, 19 nt, Artificial Sequence
  Description of Artificial Sequence: Synthetic oligonucleotide
ccauccugucuuugaugau

SEQ ID NO: 1937297 - RNA, 19 nt, Artificial Sequence
  Description of Artificial Sequence: Synthetic oligonucleotide
cccauuccucccugauccu

SEQ ID NO: 1937298 - RNA, 19 nt, Artificial Sequence
  Description of Artificial Sequence: Synthetic oligonucleotide
ccucgcugccguaguugua

SEQ ID NO: 1937299 - RNA, 19 nt, Artificial Sequence
  Description of Artificial Sequence: Synthetic oligonucleotide
ccaagucccuggaggugau

SEQ ID NO: 1937300 - RNA, 19 nt, Artificial Sequence
  Description of Artificial Sequence: Synthetic oligonucleotide
ggcccaccccgugguacaa

SEQ ID NO: 1937301 - RNA, 19 nt, Artificial Sequence
  Description of Artificial Sequence: Synthetic oligonucleotide
gguccgacucgcaccgcuu

SEQ ID NO: 1937302 - RNA, 19 nt, Artificial Sequence
  Description of Artificial Sequence: Synthetic oligonucleotide
ccgguccgacucgcaccgc

SEQ ID NO: 1937303 - RNA, 19 nt, Artificial Sequence
  Description of Artificial Sequence: Synthetic oligonucleotide
gcccaggcgaggggacaaa

SEQ ID NO: 1937304 - RNA, 19 nt, Artificial Sequence
  Description of Artificial Sequence: Synthetic oligonucleotide
gcccaccccgugguacaaa

SEQ ID NO: 1937305 - RNA, 19 nt, Artificial Sequence
  Description of Artificial Sequence: Synthetic oligonucleotide
cgguccgacucgcaccgcu

SEQ ID NO: 1937306 - RNA, 19 nt, Artificial Sequence
  Description of Artificial Sequence: Synthetic oligonucleotide
cgcaccgcuucuucgccuu

SEQ ID NO: 1937307 - RNA, 19 nt, Artificial Sequence
  Description of Artificial Sequence: Synthetic oligonucleotide
gggcuccaggaaccccauu

SEQ ID NO: 1937308 - RNA, 19 nt, Artificial Sequence
  Description of Artificial Sequence: Synthetic oligonucleotide
ggcucacauccgggugccu

SEQ ID NO: 1937309 - RNA, 19 nt, Artificial Sequence
  Description of Artificial Sequence: Synthetic oligonucleotide
ccgggugccucuggcuugu

SEQ ID NO: 1937310 - RNA, 19 nt, Artificial Sequence
  Description of Artificial Sequence: Synthetic oligonucleotide
ccgacucgcaccgcuucuu

SEQ ID NO: 1937311 - RNA, 19 nt, Artificial Sequence
  Description of Artificial Sequence: Synthetic oligonucleotide
aauacgacgucauuggggc

SEQ ID NO: 1937312 - RNA, 19 nt, Artificial Sequence
  Description of Artificial Sequence: Synthetic oligonucleotide
uguaauacugaauacgacg

SEQ ID NO: 1937313 - RNA, 19 nt, Artificial Sequence
  Description of Artificial Sequence: Synthetic oligonucleotide
aaacacguguucuacaagc

SEQ ID NO: 1937314 - RNA, 19 nt, Artificial Sequence
  Description of Artificial Sequence: Synthetic oligonucleotide
aaccuagccauacaggccc

SEQ ID NO: 1937315 - RNA, 19 nt, Artificial Sequence
  Description of Artificial Sequence: Synthetic oligonucleotide
uauuguuccaucaauguca

SEQ ID NO: 1937316 - RNA, 19 nt, Artificial Sequence
  Description of Artificial Sequence: Synthetic oligonucleotide
aauuuugcuaucugguccg

SEQ ID NO: 1937317 - RNA, 19 nt, Artificial Sequence
  Description of Artificial Sequence: Synthetic oligonucleotide
agcuaggucauccaggucc

SEQ ID NO: 1937318 - RNA, 19 nt, Artificial Sequence
  Description of Artificial Sequence: Synthetic oligonucleotide
uaaguuaugcaguugagug

SEQ ID NO: 1937319 - RNA, 19 nt, Artificial Sequence
  Description of Artificial Sequence: Synthetic oligonucleotide
uauuaauucacccuuugga

SEQ ID NO: 1937320 - RNA, 19 nt, Artificial Sequence
  Description of Artificial Sequence: Synthetic oligonucleotide
auauucuacagucuggaac

SEQ ID NO: 1937321 - RNA, 19 nt, Artificial Sequence
  Description of Artificial Sequence: Synthetic oligonucleotide
aaaugguacccgcacaacg

SEQ ID NO: 1937322 - RNA, 19 nt, Artificial Sequence
  Description of Artificial Sequence: Synthetic oligonucleotide
acgacagguacccugauac

SEQ ID NO: 1937323 - RNA, 19 nt, Artificial Sequence
  Description of Artificial Sequence: Synthetic oligonucleotide
uauucuacagucuggaacu

SEQ ID NO: 1937324 - RNA, 19 nt, Artificial Sequence
  Description of Artificial Sequence: Synthetic oligonucleotide
aaguuaugcaguugagugg

SEQ ID NO: 1937325 - RNA, 19 nt, Artificial Sequence
  Description of Artificial Sequence: Synthetic oligonucleotide
aaugucagaaaugaugacu

SEQ ID NO: 1937326 - RNA, 19 nt, Artificial Sequence
  Description of Artificial Sequence: Synthetic oligonucleotide
uauguaagggcccacgugu

SEQ ID NO: 1937327 - RNA, 19 nt, Artificial Sequence
  Description of Artificial Sequence: Synthetic oligonucleotide
acuuugugcaguaaugugc

SEQ ID NO: 1937328 - RNA, 19 nt, Artificial Sequence
  Description of Artificial Sequence: Synthetic oligonucleotide
uccauuuaaguuaugcagu

SEQ ID NO: 1937329 - RNA, 19 nt, Artificial Sequence
  Description of Artificial Sequence: Synthetic oligonucleotide
gaugaguccagucuuuacc

SEQ ID NO: 1937330 - RNA, 19 nt, Artificial Sequence
  Description of Artificial Sequence: Synthetic oligonucleotide
auagacaucguuaggacgg

SEQ ID NO: 1937331 - RNA, 19 nt, Artificial Sequence
  Description of Artificial Sequence: Synthetic oligonucleotide
uggguuguaauacugaaua

SEQ ID NO: 1937332 - RNA, 19 nt, Artificial Sequence
  Description of Artificial Sequence: Synthetic oligonucleotide
acagguaaaugguacccgc

SEQ ID NO: 1937333 - RNA, 19 nt, Artificial Sequence
  Description of Artificial Sequence: Synthetic oligonucleotide
cugaauacgacgucauugg

SEQ ID NO: 1937334 - RNA, 19 nt, Artificial Sequence
  Description of Artificial Sequence: Synthetic oligonucleotide
uucacggugaauauucuac

SEQ ID NO: 1937335 - RNA, 19 nt, Artificial Sequence
  Description of Artificial Sequence: Synthetic oligonucleotide
ugacucaaugucuccaugg

SEQ ID NO: 1937336 - RNA, 19 nt, Artificial Sequence
  Description of Artificial Sequence: Synthetic oligonucleotide
caauuuugcuaucuggucc

SEQ ID NO: 1937337 - RNA, 19 nt, Artificial Sequence
  Description of Artificial Sequence: Synthetic oligonucleotide
aaguaucauucucugcagg

SEQ ID NO: 1937338 - RNA, 19 nt, Artificial Sequence
  Description of Artificial Sequence: Synthetic oligonucleotide
uuuaaguuaugcaguugag

SEQ ID NO: 1937339 - RNA, 19 nt, Artificial Sequence
  Description of Artificial Sequence: Synthetic oligonucleotide
uguauuaauucacccuuug

SEQ ID NO: 1937340 - RNA, 19 nt, Artificial Sequence
  Description of Artificial Sequence: Synthetic oligonucleotide
auuaauucacccuuuggau

SEQ ID NO: 1937341 - RNA, 19 nt, Artificial Sequence
  Description of Artificial Sequence: Synthetic oligonucleotide
ucagacuugguuauuguuc

SEQ ID NO: 1937342 - RNA, 19 nt, Artificial Sequence
  Description of Artificial Sequence: Synthetic oligonucleotide
uuauauagagaagcgaccu

SEQ ID NO: 1937343 - RNA, 19 nt, Artificial Sequence
  Description of Artificial Sequence: Synthetic oligonucleotide
agaacaacccugaugaguc

SEQ ID NO: 1937344 - RNA, 19 nt, Artificial Sequence
  Description of Artificial Sequence: Synthetic oligonucleotide
cagagaacaacccugauga

SEQ ID NO: 1937345 - RNA, 19 nt, Artificial Sequence
  Description of Artificial Sequence: Synthetic oligonucleotide
uccgaagagagacggagag

SEQ ID NO: 1937346 - RNA, 19 nt, Artificial Sequence
  Description of Artificial Sequence: Synthetic oligonucleotide
ucuacagucuggaacuccc

SEQ ID NO: 1937347 - RNA, 19 nt, Artificial Sequence
  Description of Artificial Sequence: Synthetic oligonucleotide
caggaaguauguaagggcc

SEQ ID NO: 1937348 - RNA, 19 nt, Artificial Sequence
  Description of Artificial Sequence: Synthetic oligonucleotide
agagacuucuuguaugaag

SEQ ID NO: 1937349 - RNA, 19 nt, Artificial Sequence
  Description of Artificial Sequence: Synthetic oligonucleotide
agcaacacuaacuggaccu

SEQ ID NO: 1937350 - RNA, 19 nt, Artificial Sequence
  Description of Artificial Sequence: Synthetic oligonucleotide
acuaacuggaccucuggag

SEQ ID NO: 1937351 - RNA, 19 nt, Artificial Sequence
  Description of Artificial Sequence: Synthetic oligonucleotide
auugggucucgccaguagc

SEQ ID NO: 1937352 - RNA, 19 nt, Artificial Sequence
  Description of Artificial Sequence: Synthetic oligonucleotide
uuugcuaucugguccgaag

SEQ ID NO: 1937353 - RNA, 19 nt, Artificial Sequence
  Description of Artificial Sequence: Synthetic oligonucleotide
cauagacaucguuaggacg

SEQ ID NO: 1937354 - RNA, 19 nt, Artificial Sequence
  Description of Artificial Sequence: Synthetic oligonucleotide
gaauacgacgucauugggg

SEQ ID NO: 1937355 - RNA, 19 nt, Artificial Sequence
  Description of Artificial Sequence: Synthetic oligonucleotide
cuaucugguccgaagagag

SEQ ID NO: 1937356 - RNA, 19 nt, Artificial Sequence
  Description of Artificial Sequence: Synthetic oligonucleotide
ugaauacgacgucauuggg

SEQ ID NO: 1937357 - RNA, 19 nt, Artificial Sequence
  Description of Artificial Sequence: Synthetic oligonucleotide
agguaaaugguacccgcac

SEQ ID NO: 1937358 - RNA, 19 nt, Artificial Sequence
  Description of Artificial Sequence: Synthetic oligonucleotide
gucuuuacccaguuguggg

SEQ ID NO: 1937359 - RNA, 19 nt, Artificial Sequence
  Description of Artificial Sequence: Synthetic oligonucleotide
gguuguaauacugaauacg

SEQ ID NO: 1937360 - RNA, 19 nt, Artificial Sequence
  Description of Artificial Sequence: Synthetic oligonucleotide
uguguagucggcgacagga

SEQ ID NO: 1937361 - RNA, 19 nt, Artificial Sequence
  Description of Artificial Sequence: Synthetic oligonucleotide
cuuguguguaagcauagac

SEQ ID NO: 1937362 - RNA, 19 nt, Artificial Sequence
  Description of Artificial Sequence: Synthetic oligonucleotide
gaaguaucauucucugcag

SEQ ID NO: 1937363 - RNA, 19 nt, Artificial Sequence
  Description of Artificial Sequence: Synthetic oligonucleotide
aucugguccgaagagagac

SEQ ID NO: 1937364 - RNA, 19 nt, Artificial Sequence
  Description of Artificial Sequence: Synthetic oligonucleotide
accaguggagauuuuaacu

SEQ ID NO: 1937365 - RNA, 19 nt, Artificial Sequence
  Description of Artificial Sequence: Synthetic oligonucleotide
accucaauugaccagugga

SEQ ID NO: 1937366 - RNA, 19 nt, Artificial Sequence
  Description of Artificial Sequence: Synthetic oligonucleotide
ugagaaguggaaacacgug

SEQ ID NO: 1937367 - RNA, 19 nt, Artificial Sequence
  Description of Artificial Sequence: Synthetic oligonucleotide
uugaguggugcccagcaca

SEQ ID NO: 1937368 - RNA, 19 nt, Artificial Sequence
  Description of Artificial Sequence: Synthetic oligonucleotide
uguagucggcgacaggaag

SEQ ID NO: 1937369 - RNA, 19 nt, Artificial Sequence
  Description of Artificial Sequence: Synthetic oligonucleotide
ucuuaauaucauucagaca

SEQ ID NO: 1937370 - RNA, 19 nt, Artificial Sequence
  Description of Artificial Sequence: Synthetic oligonucleotide
uuaaguuaugcaguugagu

SEQ ID NO: 1937371 - RNA, 19 nt, Artificial Sequence
  Description of Artificial Sequence: Synthetic oligonucleotide
gacuuugucauuccaguuc

SEQ ID NO: 1937372 - RNA, 19 nt, Artificial Sequence
  Description of Artificial Sequence: Synthetic oligonucleotide
uagagaagcgaccucaauu

SEQ ID NO: 1937373 - RNA, 19 nt, Artificial Sequence
  Description of Artificial Sequence: Synthetic oligonucleotide
uuaauucacccuuuggauu

SEQ ID NO: 1937374 - RNA, 19 nt, Artificial Sequence
  Description of Artificial Sequence: Synthetic oligonucleotide
guuguaauacugaauacga

SEQ ID NO: 1937375 - RNA, 19 nt, Artificial Sequence
  Description of Artificial Sequence: Synthetic oligonucleotide
uacuuugugcaguaaugug

SEQ ID NO: 1937376 - RNA, 19 nt, Artificial Sequence
  Description of Artificial Sequence: Synthetic oligonucleotide
guuauauagagaagcgacc

SEQ ID NO: 1937377 - RNA, 19 nt, Artificial Sequence
  Description of Artificial Sequence: Synthetic oligonucleotide
uuguaauacugaauacgac

SEQ ID NO: 1937378 - RNA, 19 nt, Artificial Sequence
  Description of Artificial Sequence: Synthetic oligonucleotide
uggaacucccacuugugug

SEQ ID NO: 1937379 - RNA, 19 nt, Artificial Sequence
  Description of Artificial Sequence: Synthetic oligonucleotide
auauagagaagcgaccuca

SEQ ID NO: 1937380 - RNA, 19 nt, Artificial Sequence
  Description of Artificial Sequence: Synthetic oligonucleotide
uacagugacucaaugucuc

SEQ ID NO: 1937381 - RNA, 19 nt, Artificial Sequence
  Description of Artificial Sequence: Synthetic oligonucleotide
acaucguuaggacgguuuc

SEQ ID NO: 1937382 - RNA, 19 nt, Artificial Sequence
  Description of Artificial Sequence: Synthetic oligonucleotide
agcucagcgagcaagagug

SEQ ID NO: 1937383 - RNA, 19 nt, Artificial Sequence
  Description of Artificial Sequence: Synthetic oligonucleotide
uucuaucacuucccugugg

SEQ ID NO: 1937384 - RNA, 19 nt, Artificial Sequence
  Description of Artificial Sequence: Synthetic oligonucleotide
uuaggacgguuuccaaagg

SEQ ID NO: 1937385 - RNA, 19 nt, Artificial Sequence
  Description of Artificial Sequence: Synthetic oligonucleotide
aguuaugcaguugaguggu

SEQ ID NO: 1937386 - RNA, 19 nt, Artificial Sequence
  Description of Artificial Sequence: Synthetic oligonucleotide
uguuccuuacugagaagug

SEQ ID NO: 1937387 - RNA, 19 nt, Artificial Sequence
  Description of Artificial Sequence: Synthetic oligonucleotide
uaugcaguugaguggugcc

SEQ ID NO: 1937388 - RNA, 19 nt, Artificial Sequence
  Description of Artificial Sequence: Synthetic oligonucleotide
ucuuccaacuccugugacc

SEQ ID NO: 1937389 - RNA, 19 nt, Artificial Sequence
  Description of Artificial Sequence: Synthetic oligonucleotide
ugcuaucugguccgaagag

SEQ ID NO: 1937390 - RNA, 19 nt, Artificial Sequence
  Description of Artificial Sequence: Synthetic oligonucleotide
uaggacgguuuccaaaggc

SEQ ID NO: 1937391 - RNA, 19 nt, Artificial Sequence
  Description of Artificial Sequence: Synthetic oligonucleotide
gaagcgaccucaauugacc

SEQ ID NO: 1937392 - RNA, 19 nt, Artificial Sequence
  Description of Artificial Sequence: Synthetic oligonucleotide
aauauucuacagucuggaa

SEQ ID NO: 1937393 - RNA, 19 nt, Artificial Sequence
  Description of Artificial Sequence: Synthetic oligonucleotide
ucucgccaguagcagaagg

SEQ ID NO: 1937394 - RNA, 19 nt, Artificial Sequence
  Description of Artificial Sequence: Synthetic oligonucleotide
gagacggagagacuucuug

SEQ ID NO: 1937395 - RNA, 19 nt, Artificial Sequence
  Description of Artificial Sequence: Synthetic oligonucleotide
uaauggaacacaggcuuag

SEQ ID NO: 1937396 - RNA, 19 nt, Artificial Sequence
  Description of Artificial Sequence: Synthetic oligonucleotide
ucuuuucuaucacuucccu

SEQ ID NO: 1937397 - RNA, 19 nt, Artificial Sequence
  Description of Artificial Sequence: Synthetic oligonucleotide
aaugguacccgcacaacga

SEQ ID NO: 1937398 - RNA, 19 nt, Artificial Sequence
  Description of Artificial Sequence: Synthetic oligonucleotide
agucuuuacccaguugugg

SEQ ID NO: 1937399 - RNA, 19 nt, Artificial Sequence
  Description of Artificial Sequence: Synthetic oligonucleotide
ucaauugaccaguggagau

SEQ ID NO: 1937400 - RNA, 19 nt, Artificial Sequence
  Description of Artificial Sequence: Synthetic oligonucleotide
ugugauacgaugacuuguu

SEQ ID NO: 1937401 - RNA, 19 nt, Artificial Sequence
  Description of Artificial Sequence: Synthetic oligonucleotide
acccuuuggauucacggug

SEQ ID NO: 1937402 - RNA, 19 nt, Artificial Sequence
  Description of Artificial Sequence: Synthetic oligonucleotide
uccacagguaaaugguacc

SEQ ID NO: 1937403 - RNA, 19 nt, Artificial Sequence
  Description of Artificial Sequence: Synthetic oligonucleotide
uauauagagaagcgaccuc

SEQ ID NO: 1937404 - RNA, 19 nt, Artificial Sequence
  Description of Artificial Sequence: Synthetic oligonucleotide
ucagguauugggucucgcc

SEQ ID NO: 1937405 - RNA, 19 nt, Artificial Sequence
  Description of Artificial Sequence: Synthetic oligonucleotide
ugcuacagugacucaaugu

SEQ ID NO: 1937406 - RNA, 19 nt, Artificial Sequence
  Description of Artificial Sequence: Synthetic oligonucleotide
cguguaauggaacacaggc

SEQ ID NO: 1937407 - RNA, 19 nt, Artificial Sequence
  Description of Artificial Sequence: Synthetic oligonucleotide
uaugaagcugugcuacagu

SEQ ID NO: 1937408 - RNA, 19 nt, Artificial Sequence
  Description of Artificial Sequence: Synthetic oligonucleotide
uauugggucucgccaguag

SEQ ID NO: 1937409 - RNA, 19 nt, Artificial Sequence
  Description of Artificial Sequence: Synthetic oligonucleotide
ucccaaagcaucagacuug

SEQ ID NO: 1937410 - RNA, 19 nt, Artificial Sequence
  Description of Artificial Sequence: Synthetic oligonucleotide
ucacggugaauauucuaca

SEQ ID NO: 1937411 - RNA, 19 nt, Artificial Sequence
  Description of Artificial Sequence: Synthetic oligonucleotide
ccugguuauauagagaagc

SEQ ID NO: 1937412 - RNA, 19 nt, Artificial Sequence
  Description of Artificial Sequence: Synthetic oligonucleotide
augguacccgcacaacgac

SEQ ID NO: 1937413 - RNA, 19 nt, Artificial Sequence
  Description of Artificial Sequence: Synthetic oligonucleotide
uuuacccaguugugggagg

SEQ ID NO: 1937414 - RNA, 19 nt, Artificial Sequence
  Description of Artificial Sequence: Synthetic oligonucleotide
uucuacaagcucacucagc

SEQ ID NO: 1937415 - RNA, 19 nt, Artificial Sequence
  Description of Artificial Sequence: Synthetic oligonucleotide
uuaugcaguugaguggugc

SEQ ID NO: 1937416 - RNA, 19 nt, Artificial Sequence
  Description of Artificial Sequence: Synthetic oligonucleotide
gcuacagugacucaauguc

SEQ ID NO: 1937417 - RNA, 19 nt, Artificial Sequence
  Description of Artificial Sequence: Synthetic oligonucleotide
cacguguaauggaacacag

SEQ ID NO: 1937418 - RNA, 19 nt, Artificial Sequence
  Description of Artificial Sequence: Synthetic oligonucleotide
agguauugggucucgccag

SEQ ID NO: 1937419 - RNA, 19 nt, Artificial Sequence
  Description of Artificial Sequence: Synthetic oligonucleotide
agaagcgaccucaauugac

SEQ ID NO: 1937420 - RNA, 19 nt, Artificial Sequence
  Description of Artificial Sequence: Synthetic oligonucleotide
acugagaaguggaaacacg

SEQ ID NO: 1937421 - RNA, 19 nt, Artificial Sequence
  Description of Artificial Sequence: Synthetic oligonucleotide
uccacucuuucuuggauuc

SEQ ID NO: 1937422 - RNA, 19 nt, Artificial Sequence
  Description of Artificial Sequence: Synthetic oligonucleotide
ugucccaaagcaucagacu

SEQ ID NO: 1937423 - RNA, 19 nt, Artificial Sequence
  Description of Artificial Sequence: Synthetic oligonucleotide
ucuuuacccaguuguggga

SEQ ID NO: 1937424 - RNA, 19 nt, Artificial Sequence
  Description of Artificial Sequence: Synthetic oligonucleotide
cacaacgacagguacccug

SEQ ID NO: 1937425 - RNA, 19 nt, Artificial Sequence
  Description of Artificial Sequence: Synthetic oligonucleotide
ccaaccuagccauacaggc

SEQ ID NO: 1937426 - RNA, 19 nt, Artificial Sequence
  Description of Artificial Sequence: Synthetic oligonucleotide
ugaccaguggagauuuuaa

SEQ ID NO: 1937427 - RNA, 19 nt, Artificial Sequence
  Description of Artificial Sequence: Synthetic oligonucleotide
aagcgaccucaauugacca

SEQ ID NO: 1937428 - RNA, 19 nt, Artificial Sequence
  Description of Artificial Sequence: Synthetic oligonucleotide
uugggucucgccaguagca

SEQ ID NO: 1937429 - RNA, 19 nt, Artificial Sequence
  Description of Artificial Sequence: Synthetic oligonucleotide
uguccuagcucagcgagca

SEQ ID NO: 1937430 - RNA, 19 nt, Artificial Sequence
  Description of Artificial Sequence: Synthetic oligonucleotide
caaccuagccauacaggcc

SEQ ID NO: 1937431 - RNA, 19 nt, Artificial Sequence
  Description of Artificial Sequence: Synthetic oligonucleotide
guaaaugguacccgcacaa

SEQ ID NO: 1937432 - RNA, 19 nt, Artificial Sequence
  Description of Artificial Sequence: Synthetic oligonucleotide
guauguaagggcccacgug

SEQ ID NO: 1937433 - RNA, 19 nt, Artificial Sequence
  Description of Artificial Sequence: Synthetic oligonucleotide
ugugcuacagugacucaau

SEQ ID NO: 1937434 - RNA, 19 nt, Artificial Sequence
  Description of Artificial Sequence: Synthetic oligonucleotide
gaccaguggagauuuuaac

SEQ ID NO: 1937435 - RNA, 19 nt, Artificial Sequence
  Description of Artificial Sequence: Synthetic oligonucleotide
acaggcuuagugacagugc

SEQ ID NO: 1937436 - RNA, 19 nt, Artificial Sequence
  Description of Artificial Sequence: Synthetic oligonucleotide
cucaagcuaggucauccag

SEQ ID NO: 1937437 - RNA, 19 nt, Artificial Sequence
  Description of Artificial Sequence: Synthetic oligonucleotide
gaagcagcuguccuagcuc

SEQ ID NO: 1937438 - RNA, 19 nt, Artificial Sequence
  Description of Artificial Sequence: Synthetic oligonucleotide
agcaagaguggaagugucc

SEQ ID NO: 1937439 - RNA, 19 nt, Artificial Sequence
  Description of Artificial Sequence: Synthetic oligonucleotide
agacggagagacuucuugu

SEQ ID NO: 1937440 - RNA, 19 nt, Artificial Sequence
  Description of Artificial Sequence: Synthetic oligonucleotide
aacaacccugaugagucca

SEQ ID NO: 1937441 - RNA, 19 nt, Artificial Sequence
  Description of Artificial Sequence: Synthetic oligonucleotide
gacucaaugucuccaugga

SEQ ID NO: 1937442 - RNA, 19 nt, Artificial Sequence
  Description of Artificial Sequence: Synthetic oligonucleotide
guaucauucucugcaggcc

SEQ ID NO: 1937443 - RNA, 19 nt, Artificial Sequence
  Description of Artificial Sequence: Synthetic oligonucleotide
uaagggcccacguguaaug

SEQ ID NO: 1937444 - RNA, 19 nt, Artificial Sequence
  Description of Artificial Sequence: Synthetic oligonucleotide
gauucuaaauucuuccauu

SEQ ID NO: 1937445 - RNA, 19 nt, Artificial Sequence
  Description of Artificial Sequence: Synthetic oligonucleotide
cugguccgaagagagacgg

SEQ ID NO: 1937446 - RNA, 19 nt, Artificial Sequence
  Description of Artificial Sequence: Synthetic oligonucleotide
cuuuacccaguugugggag

SEQ ID NO: 1937447 - RNA, 19 nt, Artificial Sequence
  Description of Artificial Sequence: Synthetic oligonucleotide
uacgacgucauuggggcca

SEQ ID NO: 1937448 - RNA, 19 nt, Artificial Sequence
  Description of Artificial Sequence: Synthetic oligonucleotide
aguggugcccagcacacaa

SEQ ID NO: 1937449 - RNA, 19 nt, Artificial Sequence
  Description of Artificial Sequence: Synthetic oligonucleotide
auacgacgucauuggggcc

SEQ ID NO: 1937450 - RNA, 19 nt, Artificial Sequence
  Description of Artificial Sequence: Synthetic oligonucleotide
cauuggggccaucauggag

SEQ ID NO: 1937451 - RNA, 19 nt, Artificial Sequence
  Description of Artificial Sequence: Synthetic oligonucleotide
cucguagccagcaacacua

SEQ ID NO: 1937452 - RNA, 19 nt, Artificial Sequence
  Description of Artificial Sequence: Synthetic oligonucleotide
aacacuaacuggaccucug

SEQ ID NO: 1937453 - RNA, 19 nt, Artificial Sequence
  Description of Artificial Sequence: Synthetic oligonucleotide
aguugugggaggaucuguc

SEQ ID NO: 1937454 - RNA, 19 nt, Artificial Sequence
  Description of Artificial Sequence: Synthetic oligonucleotide
ugaugaguccagucuuuac

SEQ ID NO: 1937455 - RNA, 19 nt, Artificial Sequence
  Description of Artificial Sequence: Synthetic oligonucleotide
aagcuaggucauccagguc

SEQ ID NO: 1937456 - RNA, 19 nt, Artificial Sequence
  Description of Artificial Sequence: Synthetic oligonucleotide
ucggcgacaggaagcagcu

SEQ ID NO: 1937457 - RNA, 19 nt, Artificial Sequence
  Description of Artificial Sequence: Synthetic oligonucleotide
aguggaaacacguguucua

SEQ ID NO: 1937458 - RNA, 19 nt, Artificial Sequence
  Description of Artificial Sequence: Synthetic oligonucleotide
aguaaugugcugguccacu

SEQ ID NO: 1937459 - RNA, 19 nt, Artificial Sequence
  Description of Artificial Sequence: Synthetic oligonucleotide
ggauucacggugaauauuc

SEQ ID NO: 1937460 - RNA, 19 nt, Artificial Sequence
  Description of Artificial Sequence: Synthetic oligonucleotide
agcgaccucaauugaccag

SEQ ID NO: 1937461 - RNA, 19 nt, Artificial Sequence
  Description of Artificial Sequence: Synthetic oligonucleotide
uucuuccaacuccugugac

SEQ ID NO: 1937462 - RNA, 19 nt, Artificial Sequence
  Description of Artificial Sequence: Synthetic oligonucleotide
agagaacaacccugaugag

SEQ ID NO: 1937463 - RNA, 19 nt, Artificial Sequence
  Description of Artificial Sequence: Synthetic oligonucleotide
uguaagggcccacguguaa

SEQ ID NO: 1937464 - RNA, 19 nt, Artificial Sequence
  Description of Artificial Sequence: Synthetic oligonucleotide
guagucggcgacaggaagc

SEQ ID NO: 1937465 - RNA, 19 nt, Artificial Sequence
  Description of Artificial Sequence: Synthetic oligonucleotide
cagguacccugauacuggg

SEQ ID NO: 1937466 - RNA, 19 nt, Artificial Sequence
  Description of Artificial Sequence: Synthetic oligonucleotide
gaacaacccugaugagucc

SEQ ID NO: 1937467 - RNA, 19 nt, Artificial Sequence
  Description of Artificial Sequence: Synthetic oligonucleotide
aagggcugcuuggacgggg

SEQ ID NO: 1937468 - RNA, 19 nt, Artificial Sequence
  Description of Artificial Sequence: Synthetic oligonucleotide
uucuuguaugaagcugugc

SEQ ID NO: 1937469 - RNA, 19 nt, Artificial Sequence
  Description of Artificial Sequence: Synthetic oligonucleotide
gacgguuuccaaaggcagc

SEQ ID NO: 1937470 - RNA, 19 nt, Artificial Sequence
  Description of Artificial Sequence: Synthetic oligonucleotide
uaucugguccgaagagaga

SEQ ID NO: 1937471 - RNA, 19 nt, Artificial Sequence
  Description of Artificial Sequence: Synthetic oligonucleotide
acucguagccagcaacacu

SEQ ID NO: 1937472 - RNA, 19 nt, Artificial Sequence
  Description of Artificial Sequence: Synthetic oligonucleotide
cagucuuuacccaguugug

SEQ ID NO: 1937473 - RNA, 19 nt, Artificial Sequence
  Description of Artificial Sequence: Synthetic oligonucleotide
gggaggaucugucccaaag

SEQ ID NO: 1937474 - RNA, 19 nt, Artificial Sequence
  Description of Artificial Sequence: Synthetic oligonucleotide
uaaaugguacccgcacaac

SEQ ID NO: 1937475 - RNA, 19 nt, Artificial Sequence
  Description of Artificial Sequence: Synthetic oligonucleotide
ggcuuagugacagugcccc

SEQ ID NO: 1937476 - RNA, 19 nt, Artificial Sequence
  Description of Artificial Sequence: Synthetic oligonucleotide
cuccacaggaaguauguaa

SEQ ID NO: 1937477 - RNA, 19 nt, Artificial Sequence
  Description of Artificial Sequence: Synthetic oligonucleotide
auacuggguuguaauacug

SEQ ID NO: 1937478 - RNA, 19 nt, Artificial Sequence
  Description of Artificial Sequence: Synthetic oligonucleotide
aacgacagguacccugaua

SEQ ID NO: 1937479 - RNA, 19 nt, Artificial Sequence
  Description of Artificial Sequence: Synthetic oligonucleotide
ugguacccgcacaacgaca

SEQ ID NO: 1937480 - RNA, 19 nt, Artificial Sequence
  Description of Artificial Sequence: Synthetic oligonucleotide
acggagagacuucuuguau

SEQ ID NO: 1937481 - RNA, 19 nt, Artificial Sequence
  Description of Artificial Sequence: Synthetic oligonucleotide
gguccgaagagagacggag

SEQ ID NO: 1937482 - RNA, 19 nt, Artificial Sequence
  Description of Artificial Sequence: Synthetic oligonucleotide
auucacggugaauauucua

SEQ ID NO: 1937483 - RNA, 19 nt, Artificial Sequence
  Description of Artificial Sequence: Synthetic oligonucleotide
cagguauugggucucgcca

SEQ ID NO: 1937484 - RNA, 19 nt, Artificial Sequence
  Description of Artificial Sequence: Synthetic oligonucleotide
uagucggcgacaggaagca

SEQ ID NO: 1937485 - RNA, 19 nt, Artificial Sequence
  Description of Artificial Sequence: Synthetic oligonucleotide
ggaaacacguguucuacaa

SEQ ID NO: 1937486 - RNA, 19 nt, Artificial Sequence
  Description of Artificial Sequence: Synthetic oligonucleotide
aucagguauugggucucgc

SEQ ID NO: 1937487 - RNA, 19 nt, Artificial Sequence
  Description of Artificial Sequence: Synthetic oligonucleotide
acgaugacuuguuuccuuu

SEQ ID NO: 1937488 - RNA, 19 nt, Artificial Sequence
  Description of Artificial Sequence: Synthetic oligonucleotide
agagagacggagagacuuc

SEQ ID NO: 1937489 - RNA, 19 nt, Artificial Sequence
  Description of Artificial Sequence: Synthetic oligonucleotide
gagaagcgaccucaauuga

SEQ ID NO: 1937490 - RNA, 19 nt, Artificial Sequence
  Description of Artificial Sequence: Synthetic oligonucleotide
auagagaagcgaccucaau

SEQ ID NO: 1937491 - RNA, 19 nt, Artificial Sequence
  Description of Artificial Sequence: Synthetic oligonucleotide
uacgaugacuuguuuccuu

SEQ ID NO: 1937492 - RNA, 19 nt, Artificial Sequence
  Description of Artificial Sequence: Synthetic oligonucleotide
cucaauugaccaguggaga

SEQ ID NO: 1937493 - RNA, 19 nt, Artificial Sequence
  Description of Artificial Sequence: Synthetic oligonucleotide
uuacccaguugugggagga

SEQ ID NO: 1937494 - RNA, 19 nt, Artificial Sequence
  Description of Artificial Sequence: Synthetic oligonucleotide
uacccgcacaacgacaggu

SEQ ID NO: 1937495 - RNA, 19 nt, Artificial Sequence
  Description of Artificial Sequence: Synthetic oligonucleotide
gguacccgcacaacgacag

SEQ ID NO: 1937496 - RNA, 19 nt, Artificial Sequence
  Description of Artificial Sequence: Synthetic oligonucleotide
gugacucaaugucuccaug

SEQ ID NO: 1937497 - RNA, 19 nt, Artificial Sequence
  Description of Artificial Sequence: Synthetic oligonucleotide
cuucuguguagucggcgac

SEQ ID NO: 1937498 - RNA, 19 nt, Artificial Sequence
  Description of Artificial Sequence: Synthetic oligonucleotide
gagaacaacccugaugagu

SEQ ID NO: 1937499 - RNA, 19 nt, Artificial Sequence
  Description of Artificial Sequence: Synthetic oligonucleotide
aauucacccuuuggauuca

SEQ ID NO: 1937500 - RNA, 19 nt, Artificial Sequence
  Description of Artificial Sequence: Synthetic oligonucleotide
acaacgacagguacccuga

SEQ ID NO: 1937501 - RNA, 19 nt, Artificial Sequence
  Description of Artificial Sequence: Synthetic oligonucleotide
acguguaauggaacacagg

SEQ ID NO: 1937502 - RNA, 19 nt, Artificial Sequence
  Description of Artificial Sequence: Synthetic oligonucleotide
guggaaacacguguucuac

SEQ ID NO: 1937503 - RNA, 19 nt, Artificial Sequence
  Description of Artificial Sequence: Synthetic oligonucleotide
gucggcgacaggaagcagc

SEQ ID NO: 1937504 - RNA, 19 nt, Artificial Sequence
  Description of Artificial Sequence: Synthetic oligonucleotide
gacggagagacuucuugua

SEQ ID NO: 1937505 - RNA, 19 nt, Artificial Sequence
  Description of Artificial Sequence: Synthetic oligonucleotide
cuuguaugaagcugugcua

SEQ ID NO: 1937506 - RNA, 19 nt, Artificial Sequence
  Description of Artificial Sequence: Synthetic oligonucleotide
aggacgguuuccaaaggca

SEQ ID NO: 1937507 - RNA, 19 nt, Artificial Sequence
  Description of Artificial Sequence: Synthetic oligonucleotide
ucgccaguagcagaaggaa

SEQ ID NO: 1937508 - RNA, 19 nt, Artificial Sequence
  Description of Artificial Sequence: Synthetic oligonucleotide
cucgccaguagcagaagga

SEQ ID NO: 1937509 - RNA, 19 nt, Artificial Sequence
  Description of Artificial Sequence: Synthetic oligonucleotide
uacugaauacgacgucauu

SEQ ID NO: 1937510 - RNA, 19 nt, Artificial Sequence
  Description of Artificial Sequence: Synthetic oligonucleotide
gguaaaugguacccgcaca

SEQ ID NO: 1937511 - RNA, 19 nt, Artificial Sequence
  Description of Artificial Sequence: Synthetic oligonucleotide
ugggucucgccaguagcag

SEQ ID NO: 1937512 - RNA, 19 nt, Artificial Sequence
  Description of Artificial Sequence: Synthetic oligonucleotide
agucuggaacucccacuug

SEQ ID NO: 1937513 - RNA, 19 nt, Artificial Sequence
  Description of Artificial Sequence: Synthetic oligonucleotide
caagcuaggucauccaggu

SEQ ID NO: 1937514 - RNA, 19 nt, Artificial Sequence
  Description of Artificial Sequence: Synthetic oligonucleotide
uccaacuccugugacccuc

SEQ ID NO: 1937515 - RNA, 19 nt, Artificial Sequence
  Description of Artificial Sequence: Synthetic oligonucleotide
cagccugugauacgaugac

SEQ ID NO: 1937516 - RNA, 19 nt, Artificial Sequence
  Description of Artificial Sequence: Synthetic oligonucleotide
ggacgguuuccaaaggcag

SEQ ID NO: 1937517 - RNA, 19 nt, Artificial Sequence
  Description of Artificial Sequence: Synthetic oligonucleotide
aagugucccaggaggacau

SEQ ID NO: 1937518 - RNA, 19 nt, Artificial Sequence
  Description of Artificial Sequence: Synthetic oligonucleotide
agacuugguuauuguucca

SEQ ID NO: 1937519 - RNA, 19 nt, Artificial Sequence
  Description of Artificial Sequence: Synthetic oligonucleotide
cccaaccuagccauacagg

SEQ ID NO: 1937520 - RNA, 19 nt, Artificial Sequence
  Description of Artificial Sequence: Synthetic oligonucleotide
cagguaaaugguacccgca

SEQ ID NO: 1937521 - RNA, 19 nt, Artificial Sequence
  Description of Artificial Sequence: Synthetic oligonucleotide
auacugaauacgacgucau

SEQ ID NO: 1937522 - RNA, 19 nt, Artificial Sequence
  Description of Artificial Sequence: Synthetic oligonucleotide
gcaguaaugugcuggucca

SEQ ID NO: 1937523 - RNA, 19 nt, Artificial Sequence
  Description of Artificial Sequence: Synthetic oligonucleotide
gaaguauguaagggcccac

SEQ ID NO: 1937524 - RNA, 19 nt, Artificial Sequence
  Description of Artificial Sequence: Synthetic oligonucleotide
auacgaugacuuguuuccu

SEQ ID NO: 1937525 - RNA, 19 nt, Artificial Sequence
  Description of Artificial Sequence: Synthetic oligonucleotide
guugaguggugcccagcac

SEQ ID NO: 1937526 - RNA, 19 nt, Artificial Sequence
  Description of Artificial Sequence: Synthetic oligonucleotide
gacucguagccagcaacac

SEQ ID NO: 1937527 - RNA, 19 nt, Artificial Sequence
  Description of Artificial Sequence: Synthetic oligonucleotide
uggauucacggugaauauu

SEQ ID NO: 1937528 - RNA, 19 nt, Artificial Sequence
  Description of Artificial Sequence: Synthetic oligonucleotide
cccugcucaagcuagguca

SEQ ID NO: 1937529 - RNA, 19 nt, Artificial Sequence
  Description of Artificial Sequence: Synthetic oligonucleotide
ugccccaaccuagccauac

SEQ ID NO: 1937530 - RNA, 19 nt, Artificial Sequence
  Description of Artificial Sequence: Synthetic oligonucleotide
cacucagccugugauacga

SEQ ID NO: 1937531 - RNA, 19 nt, Artificial Sequence
  Description of Artificial Sequence: Synthetic oligonucleotide
cuguuccuuacugagaagu

SEQ ID NO: 1937532 - RNA, 19 nt, Artificial Sequence
  Description of Artificial Sequence: Synthetic oligonucleotide
uuuugcuaucugguccgaa

SEQ ID NO: 1937533 - RNA, 19 nt, Artificial Sequence
  Description of Artificial Sequence: Synthetic oligonucleotide
guacccgcacaacgacagg

SEQ ID NO: 1937534 - RNA, 19 nt, Artificial Sequence
  Description of Artificial Sequence: Synthetic oligonucleotide
cuuagugacagugccccaa

SEQ ID NO: 1937535 - RNA, 19 nt, Artificial Sequence
  Description of Artificial Sequence: Synthetic oligonucleotide
acaacccugaugaguccag

SEQ ID NO: 1937536 - RNA, 19 nt, Artificial Sequence
  Description of Artificial Sequence: Synthetic oligonucleotide
caucagguauugggucucg

SEQ ID NO: 1937537 - RNA, 19 nt, Artificial Sequence
  Description of Artificial Sequence: Synthetic oligonucleotide
ugguccgaagagagacgga

SEQ ID NO: 1937538 - RNA, 19 nt, Artificial Sequence
  Description of Artificial Sequence: Synthetic oligonucleotide
uagacaucguuaggacggu

SEQ ID NO: 1937539 - RNA, 19 nt, Artificial Sequence
  Description of Artificial Sequence: Synthetic oligonucleotide
caucauggagcuucaauuu

SEQ ID NO: 1937540 - RNA, 19 nt, Artificial Sequence
  Description of Artificial Sequence: Synthetic oligonucleotide
uggcaucaacuuugauugu

SEQ ID NO: 1937541 - RNA, 19 nt, Artificial Sequence
  Description of Artificial Sequence: Synthetic oligonucleotide
ccugugauacgaugacuug

SEQ ID NO: 1937542 - RNA, 19 nt, Artificial Sequence
  Description of Artificial Sequence: Synthetic oligonucleotide
aggcagagaacaacccuga

SEQ ID NO: 1937543 - RNA, 19 nt, Artificial Sequence
  Description of Artificial Sequence: Synthetic oligonucleotide
gcgagcaagaguggaagug

SEQ ID NO: 1937544 - RNA, 19 nt, Artificial Sequence
  Description of Artificial Sequence: Synthetic oligonucleotide
ggacggggcgaacagguuc

SEQ ID NO: 1937545 - RNA, 19 nt, Artificial Sequence
  Description of Artificial Sequence: Synthetic oligonucleotide
cuguguagucggcgacagg

SEQ ID NO: 1937546 - RNA, 19 nt, Artificial Sequence
  Description of Artificial Sequence: Synthetic oligonucleotide
cacaacuccacaggaagua

SEQ ID NO: 1937547 - RNA, 19 nt, Artificial Sequence
  Description of Artificial Sequence: Synthetic oligonucleotide
aggaucugucccaaagcau

SEQ ID NO: 1937548 - RNA, 19 nt, Artificial Sequence
  Description of Artificial Sequence: Synthetic oligonucleotide
gcauggaaaggcagaauuc

SEQ ID NO: 1937549 - RNA, 19 nt, Artificial Sequence
  Description of Artificial Sequence: Synthetic oligonucleotide
ccccaaccuagccauacag

SEQ ID NO: 1937550 - RNA, 19 nt, Artificial Sequence
  Description of Artificial Sequence: Synthetic oligonucleotide
guguaauggaacacaggcu

SEQ ID NO: 1937551 - RNA, 19 nt, Artificial Sequence
  Description of Artificial Sequence: Synthetic oligonucleotide
cgcacaacgacagguaccc

SEQ ID NO: 1937552 - RNA, 19 nt, Artificial Sequence
  Description of Artificial Sequence: Synthetic oligonucleotide
cauggacucguagccagca

SEQ ID NO: 1937553 - RNA, 19 nt, Artificial Sequence
  Description of Artificial Sequence: Synthetic oligonucleotide
agccugugauacgaugacu

SEQ ID NO: 1937554 - RNA, 19 nt, Artificial Sequence
  Description of Artificial Sequence: Synthetic oligonucleotide
cugugcuacagugacucaa

SEQ ID NO: 1937555 - RNA, 19 nt, Artificial Sequence
  Description of Artificial Sequence: Synthetic oligonucleotide
cagugacucaaugucucca

SEQ ID NO: 1937556 - RNA, 19 nt, Artificial Sequence
  Description of Artificial Sequence: Synthetic oligonucleotide
cagaauucuguuccuuacu

SEQ ID NO: 1937557 - RNA, 19 nt, Artificial Sequence
  Description of Artificial Sequence: Synthetic oligonucleotide
ggcagaauucuguuccuua

SEQ ID NO: 1937558 - RNA, 19 nt, Artificial Sequence
  Description of Artificial Sequence: Synthetic oligonucleotide
gcgaacagguucuuaauau

SEQ ID NO: 1937559 - RNA, 19 nt, Artificial Sequence
  Description of Artificial Sequence: Synthetic oligonucleotide
cuccauggagauggcauca

SEQ ID NO: 1937560 - RNA, 19 nt, Artificial Sequence
  Description of Artificial Sequence: Synthetic oligonucleotide
gauucacggugaauauucu

SEQ ID NO: 1937561 - RNA, 19 nt, Artificial Sequence
  Description of Artificial Sequence: Synthetic oligonucleotide
cugugauacgaugacuugu

SEQ ID NO: 1937562 - RNA, 19 nt, Artificial Sequence
  Description of Artificial Sequence: Synthetic oligonucleotide
gagagacggagagacuucu

SEQ ID NO: 1937563 - RNA, 19 nt, Artificial Sequence
  Description of Artificial Sequence: Synthetic oligonucleotide
ggcgaacagguucuuaaua

SEQ ID NO: 1937564 - RNA, 19 nt, Artificial Sequence
  Description of Artificial Sequence: Synthetic oligonucleotide
ccgcacaacgacagguacc

SEQ ID NO: 1937565 - RNA, 19 nt, Artificial Sequence
  Description of Artificial Sequence: Synthetic oligonucleotide
auggacucguagccagcaa

SEQ ID NO: 1937566 - RNA, 19 nt, Artificial Sequence
  Description of Artificial Sequence: Synthetic oligonucleotide
caguaaugugcugguccac

SEQ ID NO: 1937567 - RNA, 19 nt, Artificial Sequence
  Description of Artificial Sequence: Synthetic oligonucleotide
gacaucguuaggacgguuu

SEQ ID NO: 1937568 - RNA, 19 nt, Artificial Sequence
  Description of Artificial Sequence: Synthetic oligonucleotide
cagugccccaaccuagcca

SEQ ID NO: 1937569 - RNA, 19 nt, Artificial Sequence
  Description of Artificial Sequence: Synthetic oligonucleotide
agcccugguuauauagaga

SEQ ID NO: 1937570 - RNA, 19 nt, Artificial Sequence
  Description of Artificial Sequence: Synthetic oligonucleotide
ggacucguagccagcaaca

SEQ ID NO: 1937571 - RNA, 19 nt, Artificial Sequence
  Description of Artificial Sequence: Synthetic oligonucleotide
gugacccucaucacuggaa

SEQ ID NO: 1937572 - RNA, 19 nt, Artificial Sequence
  Description of Artificial Sequence: Synthetic oligonucleotide
cacccuuuggauucacggu

SEQ ID NO: 1937573 - RNA, 19 nt, Artificial Sequence
  Description of Artificial Sequence: Synthetic oligonucleotide
cuggguuguaauacugaau

SEQ ID NO: 1937574 - RNA, 19 nt, Artificial Sequence
  Description of Artificial Sequence: Synthetic oligonucleotide
gcccacguguaauggaaca

SEQ ID NO: 1937575 - RNA, 19 nt, Artificial Sequence
  Description of Artificial Sequence: Synthetic oligonucleotide
caagcucacucagccugug

SEQ ID NO: 1937576 - RNA, 19 nt, Artificial Sequence
  Description of Artificial Sequence: Synthetic oligonucleotide
gacggggcgaacagguucu

SEQ ID NO: 1937577 - RNA, 19 nt, Artificial Sequence
  Description of Artificial Sequence: Synthetic oligonucleotide
guccgaagagagacggaga

SEQ ID NO: 1937578 - RNA, 19 nt, Artificial Sequence
  Description of Artificial Sequence: Synthetic oligonucleotide
ggaacugaacucugggcau

SEQ ID NO: 1937579 - RNA, 19 nt, Artificial Sequence
  Description of Artificial Sequence: Synthetic oligonucleotide
uggacggggcgaacagguu

SEQ ID NO: 1937580 - RNA, 19 nt, Artificial Sequence
  Description of Artificial Sequence: Synthetic oligonucleotide
ugggaggaucugucccaaa

SEQ ID NO: 1937581 - RNA, 19 nt, Artificial Sequence
  Description of Artificial Sequence: Synthetic oligonucleotide
ccuagcucagcgagcaaga

SEQ ID NO: 1937582 - RNA, 19 nt, Artificial Sequence
  Description of Artificial Sequence: Synthetic oligonucleotide
cagucuggaacucccacuu

SEQ ID NO: 1937583 - RNA, 19 nt, Artificial Sequence
  Description of Artificial Sequence: Synthetic oligonucleotide
gcucaagcuaggucaucca

SEQ ID NO: 1937584 - RNA, 19 nt, Artificial Sequence
  Description of Artificial Sequence: Synthetic oligonucleotide
gaagagagacggagagacu

SEQ ID NO: 1937585 - RNA, 19 nt, Artificial Sequence
  Description of Artificial Sequence: Synthetic oligonucleotide
cccgcacaacgacagguac

SEQ ID NO: 1937586 - RNA, 19 nt, Artificial Sequence
  Description of Artificial Sequence: Synthetic oligonucleotide
gcaacacuaacuggaccuc

SEQ ID NO: 1937587 - RNA, 19 nt, Artificial Sequence
  Description of Artificial Sequence: Synthetic oligonucleotide
auguaagggcccacgugua

SEQ ID NO: 1937588 - RNA, 19 nt, Artificial Sequence
  Description of Artificial Sequence: Synthetic oligonucleotide
ggucucgccaguagcagaa

SEQ ID NO: 1937589 - RNA, 19 nt, Artificial Sequence
  Description of Artificial Sequence: Synthetic oligonucleotide
cccacguguaauggaacac

SEQ ID NO: 1937590 - RNA, 19 nt, Artificial Sequence
  Description of Artificial Sequence: Synthetic oligonucleotide
agucggcgacaggaagcag

SEQ ID NO: 1937591 - RNA, 19 nt, Artificial Sequence
  Description of Artificial Sequence: Synthetic oligonucleotide
guggugcccagcacacaac

SEQ ID NO: 1937592 - RNA, 19 nt, Artificial Sequence
  Description of Artificial Sequence: Synthetic oligonucleotide
ccacguguaauggaacaca

SEQ ID NO: 1937593 - RNA, 19 nt, Artificial Sequence
  Description of Artificial Sequence: Synthetic oligonucleotide
gggucucgccaguagcaga

SEQ ID NO: 1937594 - RNA, 19 nt, Artificial Sequence
  Description of Artificial Sequence: Synthetic oligonucleotide
guguagucggcgacaggaa

SEQ ID NO: 1937595 - RNA, 19 nt, Artificial Sequence
  Description of Artificial Sequence: Synthetic oligonucleotide
gcucagcgagcaagagugg

SEQ ID NO: 1937596 - RNA, 19 nt, Artificial Sequence
  Description of Artificial Sequence: Synthetic oligonucleotide
caauugaccaguggagauu

SEQ ID NO: 1937597 - RNA, 19 nt, Artificial Sequence
  Description of Artificial Sequence: Synthetic oligonucleotide
gugauacgaugacuuguuu

SEQ ID NO: 1937598 - RNA, 19 nt, Artificial Sequence
  Description of Artificial Sequence: Synthetic oligonucleotide
caacacuaacuggaccucu

SEQ ID NO: 1937599 - RNA, 19 nt, Artificial Sequence
  Description of Artificial Sequence: Synthetic oligonucleotide
gcgaccucaauugaccagu

SEQ ID NO: 1937600 - RNA, 19 nt, Artificial Sequence
  Description of Artificial Sequence: Synthetic oligonucleotide
agagacggagagacuucuu

SEQ ID NO: 1937601 - RNA, 19 nt, Artificial Sequence
  Description of Artificial Sequence: Synthetic oligonucleotide
guauugggucucgccagua

SEQ ID NO: 1937602 - RNA, 19 nt, Artificial Sequence
  Description of Artificial Sequence: Synthetic oligonucleotide
gaguggugcccagcacaca

SEQ ID NO: 1937603 - RNA, 19 nt, Artificial Sequence
  Description of Artificial Sequence: Synthetic oligonucleotide
agacaucguuaggacgguu

SEQ ID NO: 1937604 - RNA, 19 nt, Artificial Sequence
  Description of Artificial Sequence: Synthetic oligonucleotide
cugcucaagcuaggucauc

SEQ ID NO: 1937605 - RNA, 19 nt, Artificial Sequence
  Description of Artificial Sequence: Synthetic oligonucleotide
cguagccagcaacacuaac

SEQ ID NO: 1937606 - RNA, 19 nt, Artificial Sequence
  Description of Artificial Sequence: Synthetic oligonucleotide
accuagccauacaggcccu

SEQ ID NO: 1937607 - RNA, 19 nt, Artificial Sequence
  Description of Artificial Sequence: Synthetic oligonucleotide
gguccacucuuucuuggau

SEQ ID NO: 1937608 - RNA, 19 nt, Artificial Sequence
  Description of Artificial Sequence: Synthetic oligonucleotide
gggcccacguguaauggaa

SEQ ID NO: 1937609 - RNA, 19 nt, Artificial Sequence
  Description of Artificial Sequence: Synthetic oligonucleotide
acucagccugugauacgau

SEQ ID NO: 1937610 - RNA, 19 nt, Artificial Sequence
  Description of Artificial Sequence: Synthetic oligonucleotide
ggcccacguguaauggaac

SEQ ID NO: 1937611 - RNA, 19 nt, Artificial Sequence
  Description of Artificial Sequence: Synthetic oligonucleotide
acgacgucauuggggccau

SEQ ID NO: 1937612 - RNA, 19 nt, Artificial Sequence
  Description of Artificial Sequence: Synthetic oligonucleotide
gcugugcuacagugacuca

SEQ ID NO: 1937613 - RNA, 19 nt, Artificial Sequence
  Description of Artificial Sequence: Synthetic oligonucleotide
guccagucuuuacccaguu

SEQ ID NO: 1937614 - RNA, 19 nt, Artificial Sequence
  Description of Artificial Sequence: Synthetic oligonucleotide
ccaacuccugugacccuca

SEQ ID NO: 1937615 - RNA, 19 nt, Artificial Sequence
  Description of Artificial Sequence: Synthetic oligonucleotide
gggcgaacagguucuuaau

SEQ ID NO: 1937616 - RNA, 19 nt, Artificial Sequence
  Description of Artificial Sequence: Synthetic oligonucleotide
acccugauacuggguugua

SEQ ID NO: 1937617 - RNA, 19 nt, Artificial Sequence
  Description of Artificial Sequence: Synthetic oligonucleotide
caacccugaugaguccagu

SEQ ID NO: 1937618 - RNA, 19 nt, Artificial Sequence
  Description of Artificial Sequence: Synthetic oligonucleotide
ccgaagagagacggagaga

SEQ ID NO: 1937619 - RNA, 19 nt, Artificial Sequence
  Description of Artificial Sequence: Synthetic oligonucleotide
cgagcaagaguggaagugu

SEQ ID NO: 1937620 - RNA, 19 nt, Artificial Sequence
  Description of Artificial Sequence: Synthetic oligonucleotide
ccugaugaguccagucuuu

SEQ ID NO: 1937621 - RNA, 19 nt, Artificial Sequence
  Description of Artificial Sequence: Synthetic oligonucleotide
ccugcucaagcuaggucau

SEQ ID NO: 1937622 - RNA, 19 nt, Artificial Sequence
  Description of Artificial Sequence: Synthetic oligonucleotide
caacgacagguacccugau

SEQ ID NO: 1937623 - RNA, 19 nt, Artificial Sequence
  Description of Artificial Sequence: Synthetic oligonucleotide
cccugauacuggguuguaa

SEQ ID NO: 1937624 - RNA, 19 nt, Artificial Sequence
  Description of Artificial Sequence: Synthetic oligonucleotide
acggggcgaacagguucuu

SEQ ID NO: 1937625 - RNA, 19 nt, Artificial Sequence
  Description of Artificial Sequence: Synthetic oligonucleotide
uggggccaucauggagcuu

SEQ ID NO: 1937626 - RNA, 19 nt, Artificial Sequence
  Description of Artificial Sequence: Synthetic oligonucleotide
caacuccugugacccucau

SEQ ID NO: 1937627 - RNA, 19 nt, Artificial Sequence
  Description of Artificial Sequence: Synthetic oligonucleotide
cgacagguacccugauacu

SEQ ID NO: 1937628 - RNA, 19 nt, Artificial Sequence
  Description of Artificial Sequence: Synthetic oligonucleotide
gcacaacgacagguacccu

SEQ ID NO: 1937629 - RNA, 19 nt, Artificial Sequence
  Description of Artificial Sequence: Synthetic oligonucleotide
ugaauuucugucuugaugg

SEQ ID NO: 1937630 - RNA, 19 nt, Artificial Sequence
  Description of Artificial Sequence: Synthetic oligonucleotide
aauaacuuaacuucuucuc

SEQ ID NO: 1937631 - RNA, 19 nt, Artificial Sequence
  Description of Artificial Sequence: Synthetic oligonucleotide
gaaauuguauucuaccugg

SEQ ID NO: 1937632 - RNA, 19 nt, Artificial Sequence
  Description of Artificial Sequence: Synthetic oligonucleotide
aacacugugauguccgucc

SEQ ID NO: 1937633 - RNA, 19 nt, Artificial Sequence
  Description of Artificial Sequence: Synthetic oligonucleotide
  modified_base (7)..(7): a, c, u, g, unknown or other
ucuucanaggggauggaag

SEQ ID NO: 1937634 - RNA, 19 nt, Artificial Sequence
  Description of Artificial Sequence: Synthetic oligonucleotide
uuaacuucuucucugggga

SEQ ID NO: 1937635 - RNA, 19 nt, Artificial Sequence
  Description of Artificial Sequence: Synthetic oligonucleotide
acacaccucauauaguagc

SEQ ID NO: 1937636 - RNA, 19 nt, Artificial Sequence
  Description of Artificial Sequence: Synthetic oligonucleotide
uugaaggucuccgagaagg

SEQ ID NO: 1937637 - RNA, 19 nt, Artificial Sequence
  Description of Artificial Sequence: Synthetic oligonucleotide
guugguaaaaugcacauca

SEQ ID NO: 1937638 - RNA, 19 nt, Artificial Sequence
  Description of Artificial Sequence: Synthetic oligonucleotide
uaaaaugcacaucagggau

SEQ ID NO: 1937639 - RNA, 19 nt, Artificial Sequence
  Description of Artificial Sequence: Synthetic oligonucleotide
uaggguauacucaaaguug

SEQ ID NO: 1937640 - RNA, 19 nt, Artificial Sequence
  Description of Artificial Sequence: Synthetic oligonucleotide
ugagguugcggucaaauac

SEQ ID NO: 1937641 - RNA, 19 nt, Artificial Sequence
  Description of Artificial Sequence: Synthetic oligonucleotide
ucaucuucgguuccgaaug

SEQ ID NO: 1937642 - RNA, 19 nt, Artificial Sequence
  Description of Artificial Sequence: Synthetic oligonucleotide
uuaucuggcaguaggcccg

SEQ ID NO: 1937643 - RNA, 19 nt, Artificial Sequence
  Description of Artificial Sequence: Synthetic oligonucleotide
aggcuggguauccagaucc

SEQ ID NO: 1937644 - RNA, 19 nt, Artificial Sequence
  Description of Artificial Sequence: Synthetic oligonucleotide
gguaaaaugcacaucaggg

SEQ ID NO: 1937645 - RNA, 19 nt, Artificial Sequence
  Description of Artificial Sequence: Synthetic oligonucleotide
uccguugagcguuaggugg

SEQ ID NO: 1937646 - RNA, 19 nt, Artificial Sequence
  Description of Artificial Sequence: Synthetic oligonucleotide
gacuuagaggcuucuaggg

SEQ ID NO: 1937647 - RNA, 19 nt, Artificial Sequence
  Description of Artificial Sequence: Synthetic oligonucleotide
uucugagaagagaagucgg

SEQ ID NO: 1937648 - RNA, 19 nt, Artificial Sequence
  Description of Artificial Sequence: Synthetic oligonucleotide
ugacuuagaggcuucuagg

SEQ ID NO: 1937649 - RNA, 19 nt, Artificial Sequence
  Description of Artificial Sequence: Synthetic oligonucleotide
uuuaucuggcaguaggccc

SEQ ID NO: 1937650 - RNA, 19 nt, Artificial Sequence
  Description of Artificial Sequence: Synthetic oligonucleotide
ucauauaguagcugcagcu

SEQ ID NO: 1937651 - RNA, 19 nt, Artificial Sequence
  Description of Artificial Sequence: Synthetic oligonucleotide
aacuagaagucaucuucgg

SEQ ID NO: 1937652 - RNA, 19 nt, Artificial Sequence
  Description of Artificial Sequence: Synthetic oligonucleotide
  modified_base (15)..(15): a, c, u, g, unknown or other
cuuccaguucuucanaggg

SEQ ID NO: 1937653 - RNA, 19 nt, Artificial Sequence
  Description of Artificial Sequence: Synthetic oligonucleotide
auaacuuaacuucuucucu

SEQ ID NO: 1937654 - RNA, 19 nt, Artificial Sequence
  Description of Artificial Sequence: Synthetic oligonucleotide
aagcaguucacggaggccg

SEQ ID NO: 1937655 - RNA, 19 nt, Artificial Sequence
  Description of Artificial Sequence: Synthetic oligonucleotide
acagaaaccccuauggugg

SEQ ID NO: 1937656 - RNA, 19 nt, Artificial Sequence
  Description of Artificial Sequence: Synthetic oligonucleotide
guugcggucaaauaccacc

SEQ ID NO: 1937657 - RNA, 19 nt, Artificial Sequence
  Description of Artificial Sequence: Synthetic oligonucleotide
ugggaaauuguauucuacc

SEQ ID NO: 1937658 - RNA, 19 nt, Artificial Sequence
  Description of Artificial Sequence: Synthetic oligonucleotide
gucaaauaccaccacacgc

SEQ ID NO: 1937659 - RNA, 19 nt, Artificial Sequence
  Description of Artificial Sequence: Synthetic oligonucleotide
aaucucaagagcgggcggc

SEQ ID NO: 1937660 - RNA, 19 nt, Artificial Sequence
  Description of Artificial Sequence: Synthetic oligonucleotide
gccgaagugacuuagaggc

SEQ ID NO: 1937661 - RNA, 19 nt, Artificial Sequence
  Description of Artificial Sequence: Synthetic oligonucleotide
agaucuuccugaucgcccc

SEQ ID NO: 1937662 - RNA, 19 nt, Artificial Sequence
  Description of Artificial Sequence: Synthetic oligonucleotide
aguccucugaauucaugcc

SEQ ID NO: 1937663 - RNA, 19 nt, Artificial Sequence
  Description of Artificial Sequence: Synthetic oligonucleotide
cuagcuagggaacacuugc

SEQ ID NO: 1937664 - RNA, 19 nt, Artificial Sequence
  Description of Artificial Sequence: Synthetic oligonucleotide
uaacuuaacuucuucucug

SEQ ID NO: 1937665 - RNA, 19 nt, Artificial Sequence
  Description of Artificial Sequence: Synthetic oligonucleotide
aauggccccuuuucaagac

SEQ ID NO: 1937666 - RNA, 19 nt, Artificial Sequence
  Description of Artificial Sequence: Synthetic oligonucleotide
aagacugagguccgagggg

SEQ ID NO: 1937667 - RNA, 19 nt, Artificial Sequence
  Description of Artificial Sequence: Synthetic oligonucleotide
cauccgaagacugaggucc

SEQ ID NO: 1937668 - RNA, 19 nt, Artificial Sequence
  Description of Artificial Sequence: Synthetic oligonucleotide
ucugaauucaugcccggca

SEQ ID NO: 1937669 - RNA, 19 nt, Artificial Sequence
  Description of Artificial Sequence: Synthetic oligonucleotide
gaaaaccuuuaucuggcag

SEQ ID NO: 1937670 - RNA, 19 nt, Artificial Sequence
  Description of Artificial Sequence: Synthetic oligonucleotide
guuguuauagcuguaggug

SEQ ID NO: 1937671 - RNA, 19 nt, Artificial Sequence
  Description of Artificial Sequence: Synthetic oligonucleotide
ucaagacagacccuucacc

SEQ ID NO: 1937672 - RNA, 19 nt, Artificial Sequence
  Description of Artificial Sequence: Synthetic oligonucleotide
uaguccucugaauucaugc

SEQ ID NO: 1937673 - RNA, 19 nt, Artificial Sequence
  Description of Artificial Sequence: Synthetic oligonucleotide
guaggugucgaucuggaug

SEQ ID NO: 1937674 - RNA, 19 nt, Artificial Sequence
  Description of Artificial Sequence: Synthetic oligonucleotide
uguacuggcuuguugcugc

SEQ ID NO: 1937675 - RNA, 19 nt, Artificial Sequence
  Description of Artificial Sequence: Synthetic oligonucleotide
agaagguggaaucuggagu

SEQ ID NO: 1937676 - RNA, 19 nt, Artificial Sequence
  Description of Artificial Sequence: Synthetic oligonucleotide
ugcacuuuaacaucagaaa

SEQ ID NO: 1937677 - RNA, 19 nt, Artificial Sequence
  Description of Artificial Sequence: Synthetic oligonucleotide
aacacuugcuuguguuugg

SEQ ID NO: 1937678 - RNA, 19 nt, Artificial Sequence
  Description of Artificial Sequence: Synthetic oligonucleotide
gaacuagaagucaucuucg

SEQ ID NO: 1937679 - RNA, 19 nt, Artificial Sequence
  Description of Artificial Sequence: Synthetic oligonucleotide
aaagcagaucuuccugauc

SEQ ID NO: 1937680 - RNA, 19 nt, Artificial Sequence
  Description of Artificial Sequence: Synthetic oligonucleotide
uccauuagcuccacucagg

SEQ ID NO: 1937681 - RNA, 19 nt, Artificial Sequence
  Description of Artificial Sequence: Synthetic oligonucleotide
uguguuugggaaauuguau

SEQ ID NO: 1937682 - RNA, 19 nt, Artificial Sequence
  Description of Artificial Sequence: Synthetic oligonucleotide
gaagguggaaucuggaguc

SEQ ID NO: 1937683 - RNA, 19 nt, Artificial Sequence
  Description of Artificial Sequence: Synthetic oligonucleotide
uauaguagcugcagcugag

SEQ ID NO: 1937684 - RNA, 19 nt, Artificial Sequence
  Description of Artificial Sequence: Synthetic oligonucleotide
acugcaugggcacagcuug

SEQ ID NO: 1937685 - RNA, 19 nt, Artificial Sequence
  Description of Artificial Sequence: Synthetic oligonucleotide
gaugguacaccgauugggg

SEQ ID NO: 1937686 - RNA, 19 nt, Artificial Sequence
  Description of Artificial Sequence: Synthetic oligonucleotide
ugguugguccacauuauca

SEQ ID NO: 1937687 - RNA, 19 nt, Artificial Sequence
  Description of Artificial Sequence: Synthetic oligonucleotide
cuucugagaagagaagucg

SEQ ID NO: 1937688 - RNA, 19 nt, Artificial Sequence
  Description of Artificial Sequence: Synthetic oligonucleotide
cugacacucgcauacacac

SEQ ID NO: 1937689 - RNA, 19 nt, Artificial Sequence
  Description of Artificial Sequence: Synthetic oligonucleotide
uaggugucgaucuggaugu

SEQ ID NO: 1937690 - RNA, 19 nt, Artificial Sequence
  Description of Artificial Sequence: Synthetic oligonucleotide
gcauacacaccucauauag

SEQ ID NO: 1937691 - RNA, 19 nt, Artificial Sequence
  Description of Artificial Sequence: Synthetic oligonucleotide
guugcugcgguuguuauag

SEQ ID NO: 1937692 - RNA, 19 nt, Artificial Sequence
  Description of Artificial Sequence: Synthetic oligonucleotide
cacagaaaccccuauggug

SEQ ID NO: 1937693 - RNA, 19 nt, Artificial Sequence
  Description of Artificial Sequence: Synthetic oligonucleotide
gagaagucggugcucaagc

SEQ ID NO: 1937694 - RNA, 19 nt, Artificial Sequence
  Description of Artificial Sequence: Synthetic oligonucleotide
guggcgacaaucucaagag

SEQ ID NO: 1937695 - RNA, 19 nt, Artificial Sequence
  Description of Artificial Sequence: Synthetic oligonucleotide
agacagacccuucaccuuc

SEQ ID NO: 1937696 - RNA, 19 nt, Artificial Sequence
  Description of Artificial Sequence: Synthetic oligonucleotide
gaugacagcugugacacug

SEQ ID NO: 1937697 - RNA, 19 nt, Artificial Sequence
  Description of Artificial Sequence: Synthetic oligonucleotide
auacacaccucauauagua

SEQ ID NO: 1937698 - RNA, 19 nt, Artificial Sequence
  Description of Artificial Sequence: Synthetic oligonucleotide
uuuccguucagcucccuug

SEQ ID NO: 1937699 - RNA, 19 nt, Artificial Sequence
  Description of Artificial Sequence: Synthetic oligonucleotide
ggaacuagaagucaucuuc

SEQ ID NO: 1937700 - RNA, 19 nt, Artificial Sequence
  Description of Artificial Sequence: Synthetic oligonucleotide
ggcacagaaaccccuaugg

SEQ ID NO: 1937701 - RNA, 19 nt, Artificial Sequence
  Description of Artificial Sequence: Synthetic oligonucleotide
auagcuguaggugucgauc

SEQ ID NO: 1937702 - RNA, 19 nt, Artificial Sequence
  Description of Artificial Sequence: Synthetic oligonucleotide
gaagucggugcucaagcag

SEQ ID NO: 1937703 - RNA, 19 nt, Artificial Sequence
  Description of Artificial Sequence: Synthetic oligonucleotide
aaaugcacaucagggauga

SEQ ID NO: 1937704 - RNA, 19 nt, Artificial Sequence
  Description of Artificial Sequence: Synthetic oligonucleotide
acaaucucaagagcgggcg

SEQ ID NO: 1937705 - RNA, 19 nt, Artificial Sequence
  Description of Artificial Sequence: Synthetic oligonucleotide
gaagcaguugcacuuuaac

SEQ ID NO: 1937706 - RNA, 19 nt, Artificial Sequence
  Description of Artificial Sequence: Synthetic oligonucleotide
ugagugcuggaguugaacu

SEQ ID NO: 1937707 - RNA, 19 nt, Artificial Sequence
  Description of Artificial Sequence: Synthetic oligonucleotide
ucuucgguuccgaauggcc

SEQ ID NO: 1937708 - RNA, 19 nt, Artificial Sequence
  Description of Artificial Sequence: Synthetic oligonucleotide
aacuucuucucuggggagg

SEQ ID NO: 1937709 - RNA, 19 nt, Artificial Sequence
  Description of Artificial Sequence: Synthetic oligonucleotide
auggaagaacaugacugcc

SEQ ID NO: 1937710 - RNA, 19 nt, Artificial Sequence
  Description of Artificial Sequence: Synthetic oligonucleotide
ucugagaagagaagucggu

SEQ ID NO: 1937711 - RNA, 19 nt, Artificial Sequence
  Description of Artificial Sequence: Synthetic oligonucleotide
aaagccguguggcugaauu

SEQ ID NO: 1937712 - RNA, 19 nt, Artificial Sequence
  Description of Artificial Sequence: Synthetic oligonucleotide
caccucauauaguagcugc

SEQ ID NO: 1937713 - RNA, 19 nt, Artificial Sequence
  Description of Artificial Sequence: Synthetic oligonucleotide
uuguguuugggaaauugua

SEQ ID NO: 1937714 - RNA, 19 nt, Artificial Sequence
  Description of Artificial Sequence: Synthetic oligonucleotide
cccuuuucaagacagaccc

SEQ ID NO: 1937715 - RNA, 19 nt, Artificial Sequence
  Description of Artificial Sequence: Synthetic oligonucleotide
gaauucaugcccggcaucc

SEQ ID NO: 1937716 - RNA, 19 nt, Artificial Sequence
  Description of Artificial Sequence: Synthetic oligonucleotide
uugggaaauuguauucuac

SEQ ID NO: 1937717 - RNA, 19 nt, Artificial Sequence
  Description of Artificial Sequence: Synthetic oligonucleotide
aagaggacaggcuggguau

SEQ ID NO: 1937718 - RNA, 19 nt, Artificial Sequence
  Description of Artificial Sequence: Synthetic oligonucleotide
ucgcauacacaccucauau

SEQ ID NO: 1937719 - RNA, 19 nt, Artificial Sequence
  Description of Artificial Sequence: Synthetic oligonucleotide
agcguuagguggcugagug

SEQ ID NO: 1937720 - RNA, 19 nt, Artificial Sequence
  Description of Artificial Sequence: Synthetic oligonucleotide
uucaagacagacccuucac

SEQ ID NO: 1937721 - RNA, 19 nt, Artificial Sequence
  Description of Artificial Sequence: Synthetic oligonucleotide
cuucgguuccgaauggccc

SEQ ID NO: 1937722 - RNA, 19 nt, Artificial Sequence
  Description of Artificial Sequence: Synthetic oligonucleotide
gauggagugaguaggcaug

SEQ ID NO: 1937723 - RNA, 19 nt, Artificial Sequence
  Description of Artificial Sequence: Synthetic oligonucleotide
aggcuucuaggguauacuc

SEQ ID NO: 1937724 - RNA, 19 nt, Artificial Sequence
  Description of Artificial Sequence: Synthetic oligonucleotide
uuucugucuugauggagug

SEQ ID NO: 1937725 - RNA, 19 nt, Artificial Sequence
  Description of Artificial Sequence: Synthetic oligonucleotide
cuuuaucuggcaguaggcc

SEQ ID NO: 1937726 - RNA, 19 nt, Artificial Sequence
  Description of Artificial Sequence: Synthetic oligonucleotide
acacauaguccucugaauu

SEQ ID NO: 1937727 - RNA, 19 nt, Artificial Sequence
  Description of Artificial Sequence: Synthetic oligonucleotide
cacuggcucacgaugacag

SEQ ID NO: 1937728 - RNA, 19 nt, Artificial Sequence
  Description of Artificial Sequence: Synthetic oligonucleotide
ggcgacaaucucaagagcg

SEQ ID NO: 1937729 - RNA, 19 nt, Artificial Sequence
  Description of Artificial Sequence: Synthetic oligonucleotide
agcagaucuuccugaucgc

SEQ ID NO: 1937730 - RNA, 19 nt, Artificial Sequence
  Description of Artificial Sequence: Synthetic oligonucleotide
gagguugcggucaaauacc

SEQ ID NO: 1937731 - RNA, 19 nt, Artificial Sequence
  Description of Artificial Sequence: Synthetic oligonucleotide
acuuagaggcuucuagggu

SEQ ID NO: 1937732 - RNA, 19 nt, Artificial Sequence
  Description of Artificial Sequence: Synthetic oligonucleotide
  modified_base (4)..(4): a, c, u, g, unknown or other
ucanaggggauggaagaac

SEQ ID NO: 1937733 - RNA, 19 nt, Artificial Sequence
  Description of Artificial Sequence: Synthetic oligonucleotide
cacauaguccucugaauuc

SEQ ID NO: 1937734 - RNA, 19 nt, Artificial Sequence
  Description of Artificial Sequence: Synthetic oligonucleotide
uucgguuccgaauggcccc

SEQ ID NO: 1937735 - RNA, 19 nt, Artificial Sequence
  Description of Artificial Sequence: Synthetic oligonucleotide
  modified_base (6)..(6): a, c, u, g, unknown or other
cuucanaggggauggaaga

SEQ ID NO: 1937736 - RNA, 19 nt, Artificial Sequence
  Description of Artificial Sequence: Synthetic oligonucleotide
guccucugaauucaugccc

SEQ ID NO: 1937737 - RNA, 19 nt, Artificial Sequence
  Description of Artificial Sequence: Synthetic oligonucleotide
ugucacagaaaaccuuuau

SEQ ID NO: 1937738 - RNA, 19 nt, Artificial Sequence
  Description of Artificial Sequence: Synthetic oligonucleotide
gugcucaagcaguucacgg

SEQ ID NO: 1937739 - RNA, 19 nt, Artificial Sequence
  Description of Artificial Sequence: Synthetic oligonucleotide
ugauggagugaguaggcau

SEQ ID NO: 1937740 - RNA, 19 nt, Artificial Sequence
  Description of Artificial Sequence: Synthetic oligonucleotide
gaacuggucagugcugagg

SEQ ID NO: 1937741 - RNA, 19 nt, Artificial Sequence
  Description of Artificial Sequence: Synthetic oligonucleotide
uccgaauggccccuuuuca

SEQ ID NO: 1937742 - RNA, 19 nt, Artificial Sequence
  Description of Artificial Sequence: Synthetic oligonucleotide
cuugaacacugugaugucc

SEQ ID NO: 1937743 - RNA, 19 nt, Artificial Sequence
  Description of Artificial Sequence: Synthetic oligonucleotide
cucggugggcucuggaugg

SEQ ID NO: 1937744 - RNA, 19 nt, Artificial Sequence
  Description of Artificial Sequence: Synthetic oligonucleotide
gucuugauggagugaguag

SEQ ID NO: 1937745 - RNA, 19 nt, Artificial Sequence
  Description of Artificial Sequence: Synthetic oligonucleotide
aggccgaagugacuuagag

SEQ ID NO: 1937746 - RNA, 19 nt, Artificial Sequence
  Description of Artificial Sequence: Synthetic oligonucleotide
ugaugcuugagauggcuuu

SEQ ID NO: 1937747 - RNA, 19 nt, Artificial Sequence
  Description of Artificial Sequence: Synthetic oligonucleotide
cugauuuuccguucagcuc

SEQ ID NO: 1937748 - RNA, 19 nt, Artificial Sequence
  Description of Artificial Sequence: Synthetic oligonucleotide
uagcuguaggugucgaucu

SEQ ID NO: 1937749 - RNA, 19 nt, Artificial Sequence
  Description of Artificial Sequence: Synthetic oligonucleotide
  modified_base (3)..(3): a, c, u, g, unknown or other
canaggggauggaagaaca

SEQ ID NO: 1937750 - RNA, 19 nt, Artificial Sequence
  Description of Artificial Sequence: Synthetic oligonucleotide
uuuugcuagcuagggaaca

SEQ ID NO: 1937751 - RNA, 19 nt, Artificial Sequence
  Description of Artificial Sequence: Synthetic oligonucleotide
uugagaggcaagcccuuca

SEQ ID NO: 1937752 - RNA, 19 nt, Artificial Sequence
  Description of Artificial Sequence: Synthetic oligonucleotide
aucacuggcucacgaugac

SEQ ID NO: 1937753 - RNA, 19 nt, Artificial Sequence
  Description of Artificial Sequence: Synthetic oligonucleotide
ggucaaauaccaccacacg

SEQ ID NO: 1937754 - RNA, 19 nt, Artificial Sequence
  Description of Artificial Sequence: Synthetic oligonucleotide
uuagaggcuucuaggguau

SEQ ID NO: 1937755 - RNA, 19 nt, Artificial Sequence
  Description of Artificial Sequence: Synthetic oligonucleotide
cuucacacccuucugagaa

SEQ ID NO: 1937756 - RNA, 19 nt, Artificial Sequence
  Description of Artificial Sequence: Synthetic oligonucleotide
aaaccccuaugguggcgac

SEQ ID NO: 1937757 - RNA, 19 nt, Artificial Sequence
  Description of Artificial Sequence: Synthetic oligonucleotide
agguugguaaaaugcacau

SEQ ID NO: 1937758 - RNA, 19 nt, Artificial Sequence
  Description of Artificial Sequence: Synthetic oligonucleotide
ggaugguacaccgauuggg

SEQ ID NO: 1937759 - RNA, 19 nt, Artificial Sequence
  Description of Artificial Sequence: Synthetic oligonucleotide
uccguuugugugagggaag

SEQ ID NO: 1937760 - RNA, 19 nt, Artificial Sequence
  Description of Artificial Sequence: Synthetic oligonucleotide
uugagcguuagguggcuga

SEQ ID NO: 1937761 - RNA, 19 nt, Artificial Sequence
  Description of Artificial Sequence: Synthetic oligonucleotide
augcccggcauccgaagac

SEQ ID NO: 1937762 - RNA, 19 nt, Artificial Sequence
  Description of Artificial Sequence: Synthetic oligonucleotide
gaagaggacaggcugggua

SEQ ID NO: 1937763 - RNA, 19 nt, Artificial Sequence
  Description of Artificial Sequence: Synthetic oligonucleotide
ugaguccucccuccauuag

SEQ ID NO: 1937764 - RNA, 19 nt, Artificial Sequence
  Description of Artificial Sequence: Synthetic oligonucleotide
ugcugcgguuguuauagcu

SEQ ID NO: 1937765 - RNA, 19 nt, Artificial Sequence
  Description of Artificial Sequence: Synthetic oligonucleotide
gacaaucucaagagcgggc

SEQ ID NO: 1937766 - RNA, 19 nt, Artificial Sequence
  Description of Artificial Sequence: Synthetic oligonucleotide
aggguauacucaaaguugu

SEQ ID NO: 1937767 - RNA, 19 nt, Artificial Sequence
  Description of Artificial Sequence: Synthetic oligonucleotide
ugacacucgcauacacacc

SEQ ID NO: 1937768 - RNA, 19 nt, Artificial Sequence
  Description of Artificial Sequence: Synthetic oligonucleotide
agccguguggcugaauuuc

SEQ ID NO: 1937769 - RNA, 19 nt, Artificial Sequence
  Description of Artificial Sequence: Synthetic oligonucleotide
agaggcuucuaggguauac

SEQ ID NO: 1937770 - RNA, 19 nt, Artificial Sequence
  Description of Artificial Sequence: Synthetic oligonucleotide
ucuguccgggucaucuagc

SEQ ID NO: 1937771 - RNA, 19 nt, Artificial Sequence
  Description of Artificial Sequence: Synthetic oligonucleotide
cuucgucccugauuuuccg

SEQ ID NO: 1937772 - RNA, 19 nt, Artificial Sequence
  Description of Artificial Sequence: Synthetic oligonucleotide
gguggcgacaaucucaaga

SEQ ID NO: 1937773 - RNA, 19 nt, Artificial Sequence
  Description of Artificial Sequence: Synthetic oligonucleotide
ucacggaggccgaagugac

SEQ ID NO: 1937774 - RNA, 19 nt, Artificial Sequence
  Description of Artificial Sequence: Synthetic oligonucleotide
ugugugagggaagcaguug

SEQ ID NO: 1937775 - RNA, 19 nt, Artificial Sequence
  Description of Artificial Sequence: Synthetic oligonucleotide
  modified_base (5)..(5): a, c, u, g, unknown or other
uucanaggggauggaagaa

SEQ ID NO: 1937776 - RNA, 19 nt, Artificial Sequence
  Description of Artificial Sequence: Synthetic oligonucleotide
cuggauguugagaggcaag

SEQ ID NO: 1937777 - RNA, 19 nt, Artificial Sequence
  Description of Artificial Sequence: Synthetic oligonucleotide
uucacacccuucugagaag

SEQ ID NO: 1937778 - RNA, 19 nt, Artificial Sequence
  Description of Artificial Sequence: Synthetic oligonucleotide
cagguugguaaaaugcaca

SEQ ID NO: 1937779 - RNA, 19 nt, Artificial Sequence
  Description of Artificial Sequence: Synthetic oligonucleotide
aguucacggaggccgaagu

SEQ ID NO: 1937780 - RNA, 19 nt, Artificial Sequence
  Description of Artificial Sequence: Synthetic oligonucleotide
agugcugagguugcgguca

SEQ ID NO: 1937781 - RNA, 19 nt, Artificial Sequence
  Description of Artificial Sequence: Synthetic oligonucleotide
uguccgggucaucuagcag

SEQ ID NO: 1937782 - RNA, 19 nt, Artificial Sequence
  Description of Artificial Sequence: Synthetic oligonucleotide
acacugugauguccguccg

SEQ ID NO: 1937783 - RNA, 19 nt, Artificial Sequence
  Description of Artificial Sequence: Synthetic oligonucleotide
agagaagucggugcucaag

SEQ ID NO: 1937784 - RNA, 19 nt, Artificial Sequence
  Description of Artificial Sequence: Synthetic oligonucleotide
aucuucgguuccgaauggc

SEQ ID NO: 1937785 - RNA, 19 nt, Artificial Sequence
  Description of Artificial Sequence: Synthetic oligonucleotide
agaagucggugcucaagca

SEQ ID NO: 1937786 - RNA, 19 nt, Artificial Sequence
  Description of Artificial Sequence: Synthetic oligonucleotide
cugagaagagaagucggug

SEQ ID NO: 1937787 - RNA, 19 nt, Artificial Sequence
  Description of Artificial Sequence: Synthetic oligonucleotide
aucuagcagguggaggaac

SEQ ID NO: 1937788 - RNA, 19 nt, Artificial Sequence
  Description of Artificial Sequence: Synthetic oligonucleotide
uccugaacgcccuccuuga

SEQ ID NO: 1937789 - RNA, 19 nt, Artificial Sequence
  Description of Artificial Sequence: Synthetic oligonucleotide
uagcuagggaacacuugcu

SEQ ID NO: 1937790 - RNA, 19 nt, Artificial Sequence
  Description of Artificial Sequence: Synthetic oligonucleotide
uggcucacgaugacagcug

SEQ ID NO: 1937791 - RNA, 19 nt, Artificial Sequence
  Description of Artificial Sequence: Synthetic oligonucleotide
uggcgacaaucucaagagc

SEQ ID NO: 1937792 - RNA, 19 nt, Artificial Sequence
  Description of Artificial Sequence: Synthetic oligonucleotide
caaucucaagagcgggcgg

SEQ ID NO: 1937793 - RNA, 19 nt, Artificial Sequence
  Description of Artificial Sequence: Synthetic oligonucleotide
gcuagggaacacuugcuug

SEQ ID NO: 1937794 - RNA, 19 nt, Artificial Sequence
  Description of Artificial Sequence: Synthetic oligonucleotide
gguauacucaaaguuguuc

SEQ ID NO: 1937795 - RNA, 19 nt, Artificial Sequence
  Description of Artificial Sequence: Synthetic oligonucleotide
ugacacugcaugggcacag

SEQ ID NO: 1937796 - RNA, 19 nt, Artificial Sequence
  Description of Artificial Sequence: Synthetic oligonucleotide
ugcuagcuagggaacacuu

SEQ ID NO: 1937797 - RNA, 19 nt, Artificial Sequence
  Description of Artificial Sequence: Synthetic oligonucleotide
caucuucgguuccgaaugg

SEQ ID NO: 1937798 - RNA, 19 nt, Artificial Sequence
  Description of Artificial Sequence: Synthetic oligonucleotide
ugagcguuagguggcugag

SEQ ID NO: 1937799 - RNA, 19 nt, Artificial Sequence
  Description of Artificial Sequence: Synthetic oligonucleotide
caguugcacuuuaacauca

SEQ ID NO: 1937800 - RNA, 19 nt, Artificial Sequence
  Description of Artificial Sequence: Synthetic oligonucleotide
uugugugagggaagcaguu

SEQ ID NO: 1937801 - RNA, 19 nt, Artificial Sequence
  Description of Artificial Sequence: Synthetic oligonucleotide
aguaggcccgguguacugg

SEQ ID NO: 1937802 - RNA, 19 nt, Artificial Sequence
  Description of Artificial Sequence: Synthetic oligonucleotide
cuuucguucuucgucccug

SEQ ID NO: 1937803 - RNA, 19 nt, Artificial Sequence
  Description of Artificial Sequence: Synthetic oligonucleotide
cagcugugacacugcaugg

SEQ ID NO: 1937804 - RNA, 19 nt, Artificial Sequence
  Description of Artificial Sequence: Synthetic oligonucleotide
ggccgaagugacuuagagg

SEQ ID NO: 1937805 - RNA, 19 nt, Artificial Sequence
  Description of Artificial Sequence: Synthetic oligonucleotide
uucggcucuucuguccggg

SEQ ID NO: 1937806 - RNA, 19 nt, Artificial Sequence
  Description of Artificial Sequence: Synthetic oligonucleotide
ccauuagcuccacucaggg

SEQ ID NO: 1937807 - RNA, 19 nt, Artificial Sequence
  Description of Artificial Sequence: Synthetic oligonucleotide
cacgaugacagcugugaca

SEQ ID NO: 1937808 - RNA, 19 nt, Artificial Sequence
  Description of Artificial Sequence: Synthetic oligonucleotide
acucaaaguuguucccaga

SEQ ID NO: 1937809 - RNA, 19 nt, Artificial Sequence
  Description of Artificial Sequence: Synthetic oligonucleotide
uauagcuguaggugucgau

SEQ ID NO: 1937810 - RNA, 19 nt, Artificial Sequence
  Description of Artificial Sequence: Synthetic oligonucleotide
cuaggguauacucaaaguu

SEQ ID NO: 1937811 - RNA, 19 nt, Artificial Sequence
  Description of Artificial Sequence: Synthetic oligonucleotide
agcuagggaacacuugcuu

SEQ ID NO: 1937812 - RNA, 19 nt, Artificial Sequence
  Description of Artificial Sequence: Synthetic oligonucleotide
ucaugcccggcauccgaag

SEQ ID NO: 1937813 - RNA, 19 nt, Artificial Sequence
  Description of Artificial Sequence: Synthetic oligonucleotide
ugcuuucguucuucguccc

SEQ ID NO: 1937814 - RNA, 19 nt, Artificial Sequence
  Description of Artificial Sequence: Synthetic oligonucleotide
uucaugcccggcauccgaa

SEQ ID NO: 1937815 - RNA, 19 nt, Artificial Sequence
  Description of Artificial Sequence: Synthetic oligonucleotide
agcuugcugacacucgcau

SEQ ID NO: 1937816 - RNA, 19 nt, Artificial Sequence
  Description of Artificial Sequence: Synthetic oligonucleotide
  modified_base (2)..(2): a, c, u, g, unknown or other
anaggggauggaagaacau

SEQ ID NO: 1937817 - RNA, 19 nt, Artificial Sequence
  Description of Artificial Sequence: Synthetic oligonucleotide
ugcggucaaauaccaccac

SEQ ID NO: 1937818 - RNA, 19 nt, Artificial Sequence
  Description of Artificial Sequence: Synthetic oligonucleotide
guucacggaggccgaagug

SEQ ID NO: 1937819 - RNA, 19 nt, Artificial Sequence
  Description of Artificial Sequence: Synthetic oligonucleotide
gcuucuaggguauacucaa

SEQ ID NO: 1937820 - RNA, 19 nt, Artificial Sequence
  Description of Artificial Sequence: Synthetic oligonucleotide
ucguucuucgucccugauu

SEQ ID NO: 1937821 - RNA, 19 nt, Artificial Sequence
  Description of Artificial Sequence: Synthetic oligonucleotide
gguugguccacauuaucaa

SEQ ID NO: 1937822 - RNA, 19 nt, Artificial Sequence
  Description of Artificial Sequence: Synthetic oligonucleotide
uuuuccguucagcucccuu

SEQ ID NO: 1937823 - RNA, 19 nt, Artificial Sequence
  Description of Artificial Sequence: Synthetic oligonucleotide
cuuguguuugggaaauugu

SEQ ID NO: 1937824 - RNA, 19 nt, Artificial Sequence
  Description of Artificial Sequence: Synthetic oligonucleotide
uucgucccugauuuuccgu

SEQ ID NO: 1937825 - RNA, 19 nt, Artificial Sequence
  Description of Artificial Sequence: Synthetic oligonucleotide
cuugucacagaaaaccuuu

SEQ ID NO: 1937826 - RNA, 19 nt, Artificial Sequence
  Description of Artificial Sequence: Synthetic oligonucleotide
aucuggaguccuccguuga

SEQ ID NO: 1937827 - RNA, 19 nt, Artificial Sequence
  Description of Artificial Sequence: Synthetic oligonucleotide
gcugugacacugcaugggc

SEQ ID NO: 1937828 - RNA, 19 nt, Artificial Sequence
  Description of Artificial Sequence: Synthetic oligonucleotide
ucuggaugguacaccgauu

SEQ ID NO: 1937829 - RNA, 19 nt, Artificial Sequence
  Description of Artificial Sequence: Synthetic oligonucleotide
ucgucccugauuuuccguu

SEQ ID NO: 1937830 - RNA, 19 nt, Artificial Sequence
  Description of Artificial Sequence: Synthetic oligonucleotide
gauuuuccguucagcuccc

SEQ ID NO: 1937831 - RNA, 19 nt, Artificial Sequence
  Description of Artificial Sequence: Synthetic oligonucleotide
cuggaguccuccguugagc

SEQ ID NO: 1937832 - RNA, 19 nt, Artificial Sequence
  Description of Artificial Sequence: Synthetic oligonucleotide
aagccguguggcugaauuu

SEQ ID NO: 1937833 - RNA, 19 nt, Artificial Sequence
  Description of Artificial Sequence: Synthetic oligonucleotide
ucuaccugguugguccaca

SEQ ID NO: 1937834 - RNA, 19 nt, Artificial Sequence
  Description of Artificial Sequence: Synthetic oligonucleotide
gcaguugcacuuuaacauc

SEQ ID NO: 1937835 - RNA, 19 nt, Artificial Sequence
  Description of Artificial Sequence: Synthetic oligonucleotide
uguugagaggcaagcccuu

SEQ ID NO: 1937836 - RNA, 19 nt, Artificial Sequence
  Description of Artificial Sequence: Synthetic oligonucleotide
aagucaucuucgguuccga

SEQ ID NO: 1937837 - RNA, 19 nt, Artificial Sequence
  Description of Artificial Sequence: Synthetic oligonucleotide
ugauguccguccguuugug

SEQ ID NO: 1937838 - RNA, 19 nt, Artificial Sequence
  Description of Artificial Sequence: Synthetic oligonucleotide
gguuguuauagcuguaggu

SEQ ID NO: 1937839 - RNA, 19 nt, Artificial Sequence
  Description of Artificial Sequence: Synthetic oligonucleotide
uagggaacacuugcuugug

SEQ ID NO: 1937840 - RNA, 19 nt, Artificial Sequence
  Description of Artificial Sequence: Synthetic oligonucleotide
guacuggcuuguugcugcg

SEQ ID NO: 1937841 - RNA, 19 nt, Artificial Sequence
  Description of Artificial Sequence: Synthetic oligonucleotide
ggugcucaagcaguucacg

SEQ ID NO: 1937842 - RNA, 19 nt, Artificial Sequence
  Description of Artificial Sequence: Synthetic oligonucleotide
aagagaagucggugcucaa

SEQ ID NO: 1937843 - RNA, 19 nt, Artificial Sequence
  Description of Artificial Sequence: Synthetic oligonucleotide
gcuguaggugucgaucugg

SEQ ID NO: 1937844 - RNA, 19 nt, Artificial Sequence
  Description of Artificial Sequence: Synthetic oligonucleotide
guaggcccgguguacuggc

SEQ ID NO: 1937845 - RNA, 19 nt, Artificial Sequence
  Description of Artificial Sequence: Synthetic oligonucleotide
aggcuugaacacugugaug

SEQ ID NO: 1937846 - RNA, 19 nt, Artificial Sequence
  Description of Artificial Sequence: Synthetic oligonucleotide
aguugcacuuuaacaucag

SEQ ID NO: 1937847 - RNA, 19 nt, Artificial Sequence
  Description of Artificial Sequence: Synthetic oligonucleotide
uguaggugucgaucuggau

SEQ ID NO: 1937848 - RNA, 19 nt, Artificial Sequence
  Description of Artificial Sequence: Synthetic oligonucleotide
gagaggcaagcccuucaca

SEQ ID NO: 1937849 - RNA, 19 nt, Artificial Sequence
  Description of Artificial Sequence: Synthetic oligonucleotide
cucugaauucaugcccggc

SEQ ID NO: 1937850 - RNA, 19 nt, Artificial Sequence
  Description of Artificial Sequence: Synthetic oligonucleotide
guuugggaaauuguauucu

SEQ ID NO: 1937851 - RNA, 19 nt, Artificial Sequence
  Description of Artificial Sequence: Synthetic oligonucleotide
cugguugguccacauuauc

SEQ ID NO: 1937852 - RNA, 19 nt, Artificial Sequence
  Description of Artificial Sequence: Synthetic oligonucleotide
gcgacaaucucaagagcgg

SEQ ID NO: 1937853 - RNA, 19 nt, Artificial Sequence
  Description of Artificial Sequence: Synthetic oligonucleotide
auaguccucugaauucaug

SEQ ID NO: 1937854 - RNA, 19 nt, Artificial Sequence
  Description of Artificial Sequence: Synthetic oligonucleotide
uguugcugcgguuguuaua

SEQ ID NO: 1937855 - RNA, 19 nt, Artificial Sequence
  Description of Artificial Sequence: Synthetic oligonucleotide
ucacuggcucacgaugaca

SEQ ID NO: 1937856 - RNA, 19 nt, Artificial Sequence
  Description of Artificial Sequence: Synthetic oligonucleotide
ccccuuuucaagacagacc

SEQ ID NO: 1937857 - RNA, 19 nt, Artificial Sequence
  Description of Artificial Sequence: Synthetic oligonucleotide
ugcaugggcacagcuugcu

SEQ ID NO: 1937858 - RNA, 19 nt, Artificial Sequence
  Description of Artificial Sequence: Synthetic oligonucleotide
gagggaagcaguugcacuu

SEQ ID NO: 1937859 - RNA, 19 nt, Artificial Sequence
  Description of Artificial Sequence: Synthetic oligonucleotide
caagcaguucacggaggcc

SEQ ID NO: 1937860 - RNA, 19 nt, Artificial Sequence
  Description of Artificial Sequence: Synthetic oligonucleotide
gaacacugugauguccguc

SEQ ID NO: 1937861 - RNA, 19 nt, Artificial Sequence
  Description of Artificial Sequence: Synthetic oligonucleotide
ucaagagcgggcggcucug

SEQ ID NO: 1937862 - RNA, 19 nt, Artificial Sequence
  Description of Artificial Sequence: Synthetic oligonucleotide
cacacccuucugagaagag

SEQ ID NO: 1937863 - RNA, 19 nt, Artificial Sequence
  Description of Artificial Sequence: Synthetic oligonucleotide
cuucggcucuucuguccgg

SEQ ID NO: 1937864 - RNA, 19 nt, Artificial Sequence
  Description of Artificial Sequence: Synthetic oligonucleotide
cugcaugggcacagcuugc

SEQ ID NO: 1937865 - RNA, 19 nt, Artificial Sequence
  Description of Artificial Sequence: Synthetic oligonucleotide
gugagggaagcaguugcac

SEQ ID NO: 1937866 - RNA, 19 nt, Artificial Sequence
  Description of Artificial Sequence: Synthetic oligonucleotide
cugugacacugcaugggca

SEQ ID NO: 1937867 - RNA, 19 nt, Artificial Sequence
  Description of Artificial Sequence: Synthetic oligonucleotide
cacuaucuguacacagaca

SEQ ID NO: 1937868 - RNA, 19 nt, Artificial Sequence
  Description of Artificial Sequence: Synthetic oligonucleotide
cuguaggugucgaucugga

SEQ ID NO: 1937869 - RNA, 19 nt, Artificial Sequence
  Description of Artificial Sequence: Synthetic oligonucleotide
accccuaugguggcgacaa

SEQ ID NO: 1937870 - RNA, 19 nt, Artificial Sequence
  Description of Artificial Sequence: Synthetic oligonucleotide
ggggauucccacagcaaag

SEQ ID NO: 1937871 - RNA, 19 nt, Artificial Sequence
  Description of Artificial Sequence: Synthetic oligonucleotide
aagagcgggcggcucugau

SEQ ID NO: 1937872 - RNA, 19 nt, Artificial Sequence
  Description of Artificial Sequence: Synthetic oligonucleotide
agucaucuucgguuccgaa

SEQ ID NO: 1937873 - RNA, 19 nt, Artificial Sequence
  Description of Artificial Sequence: Synthetic oligonucleotide
guggaggaacuagaaguca

SEQ ID NO: 1937874 - RNA, 19 nt, Artificial Sequence
  Description of Artificial Sequence: Synthetic oligonucleotide
gcugcgguuguuauagcug

SEQ ID NO: 1937875 - RNA, 19 nt, Artificial Sequence
  Description of Artificial Sequence: Synthetic oligonucleotide
guccguuugugugagggaa

SEQ ID NO: 1937876 - RNA, 19 nt, Artificial Sequence
  Description of Artificial Sequence: Synthetic oligonucleotide
uucguucuucgucccugau

SEQ ID NO: 1937877 - RNA, 19 nt, Artificial Sequence
  Description of Artificial Sequence: Synthetic oligonucleotide
acggaggccgaagugacuu

SEQ ID NO: 1937878 - RNA, 19 nt, Artificial Sequence
  Description of Artificial Sequence: Synthetic oligonucleotide
uggcaguaggcccggugua

SEQ ID NO: 1937879 - RNA, 19 nt, Artificial Sequence
  Description of Artificial Sequence: Synthetic oligonucleotide
gcgguuguuauagcuguag

SEQ ID NO: 1937880 - RNA, 19 nt, Artificial Sequence
  Description of Artificial Sequence: Synthetic oligonucleotide
gggcacagcuugcugacac

SEQ ID NO: 1937881 - RNA, 19 nt, Artificial Sequence
  Description of Artificial Sequence: Synthetic oligonucleotide
cauacacaccucauauagu

SEQ ID NO: 1937882 - RNA, 19 nt, Artificial Sequence
  Description of Artificial Sequence: Synthetic oligonucleotide
gacacugcaugggcacagc

SEQ ID NO: 1937883 - RNA, 19 nt, Artificial Sequence
  Description of Artificial Sequence: Synthetic oligonucleotide
cacaccucauauaguagcu

SEQ ID NO: 1937884 - RNA, 19 nt, Artificial Sequence
  Description of Artificial Sequence: Synthetic oligonucleotide
auccgaagacugagguccg

SEQ ID NO: 1937885 - RNA, 19 nt, Artificial Sequence
  Description of Artificial Sequence: Synthetic oligonucleotide
caguaggcccgguguacug

SEQ ID NO: 1937886 - RNA, 19 nt, Artificial Sequence
  Description of Artificial Sequence: Synthetic oligonucleotide
cuguccgggucaucuagca

SEQ ID NO: 1937887 - RNA, 19 nt, Artificial Sequence
  Description of Artificial Sequence: Synthetic oligonucleotide
ugcgguuguuauagcugua

SEQ ID NO: 1937888 - RNA, 19 nt, Artificial Sequence
  Description of Artificial Sequence: Synthetic oligonucleotide
ugaagaggacaggcugggu

SEQ ID NO: 1937889 - RNA, 19 nt, Artificial Sequence
  Description of Artificial Sequence: Synthetic oligonucleotide
agguugcggucaaauacca

SEQ ID NO: 1937890 - RNA, 19 nt, Artificial Sequence
  Description of Artificial Sequence: Synthetic oligonucleotide
cucgcauacacaccucaua

SEQ ID NO: 1937891 - RNA, 19 nt, Artificial Sequence
  Description of Artificial Sequence: Synthetic oligonucleotide
cugcgguuguuauagcugu

SEQ ID NO: 1937892 - RNA, 19 nt, Artificial Sequence
  Description of Artificial Sequence: Synthetic oligonucleotide
ggaggccgaagugacuuag

SEQ ID NO: 1937893 - RNA, 19 nt, Artificial Sequence
  Description of Artificial Sequence: Synthetic oligonucleotide
ugcccggcauccgaagacu

SEQ ID NO: 1937894 - RNA, 19 nt, Artificial Sequence
  Description of Artificial Sequence: Synthetic oligonucleotide
uugcugcgguuguuauagc

SEQ ID NO: 1937895 - RNA, 19 nt, Artificial Sequence
  Description of Artificial Sequence: Synthetic oligonucleotide
ccguccguuugugugaggg

SEQ ID NO: 1937896 - RNA, 19 nt, Artificial Sequence
  Description of Artificial Sequence: Synthetic oligonucleotide
ccccacuaucuguacacag

SEQ ID NO: 1937897 - RNA, 19 nt, Artificial Sequence
  Description of Artificial Sequence: Synthetic oligonucleotide
aucucaagagcgggcggcu

SEQ ID NO: 1937898 - RNA, 19 nt, Artificial Sequence
  Description of Artificial Sequence: Synthetic oligonucleotide
uccguucagcucccuuguc

SEQ ID NO: 1937899 - RNA, 19 nt, Artificial Sequence
  Description of Artificial Sequence: Synthetic oligonucleotide
ccguugagcguuagguggc

SEQ ID NO: 1937900 - RNA, 19 nt, Artificial Sequence
  Description of Artificial Sequence: Synthetic oligonucleotide
gguugguaaaaugcacauc

SEQ ID NO: 1937901 - RNA, 19 nt, Artificial Sequence
  Description of Artificial Sequence: Synthetic oligonucleotide
acacucgcauacacaccuc

SEQ ID NO: 1937902 - RNA, 19 nt, Artificial Sequence
  Description of Artificial Sequence: Synthetic oligonucleotide
ggcuucuaggguauacuca

SEQ ID NO: 1937903 - RNA, 19 nt, Artificial Sequence
  Description of Artificial Sequence: Synthetic oligonucleotide
gcuagcuagggaacacuug

SEQ ID NO: 1937904 - RNA, 19 nt, Artificial Sequence
  Description of Artificial Sequence: Synthetic oligonucleotide
gaggcuucuaggguauacu

SEQ ID NO: 1937905 - RNA, 19 nt, Artificial Sequence
  Description of Artificial Sequence: Synthetic oligonucleotide
caggcuggguauccagauc

SEQ ID NO: 1937906 - RNA, 19 nt, Artificial Sequence
  Description of Artificial Sequence: Synthetic oligonucleotide
ggcauccgaagacugaggu

SEQ ID NO: 1937907 - RNA, 19 nt, Artificial Sequence
  Description of Artificial Sequence: Synthetic oligonucleotide
gccccuuuucaagacagac

SEQ ID NO: 1937908 - RNA, 19 nt, Artificial Sequence
  Description of Artificial Sequence: Synthetic oligonucleotide
ggaggaacuagaagucauc

SEQ ID NO: 1937909 - RNA, 19 nt, Artificial Sequence
  Description of Artificial Sequence: Synthetic oligonucleotide
uccguccguuugugugagg

SEQ ID NO: 1937910 - RNA, 19 nt, Artificial Sequence
  Description of Artificial Sequence: Synthetic oligonucleotide
guccguccguuugugugag

SEQ ID NO: 1937911 - RNA, 19 nt, Artificial Sequence
  Description of Artificial Sequence: Synthetic oligonucleotide
ugguggcgacaaucucaag

SEQ ID NO: 1937912 - RNA, 19 nt, Artificial Sequence
  Description of Artificial Sequence: Synthetic oligonucleotide
ccucugaauucaugcccgg

SEQ ID NO: 1937913 - RNA, 19 nt, Artificial Sequence
  Description of Artificial Sequence: Synthetic oligonucleotide
ggucaucuagcagguggag

SEQ ID NO: 1937914 - RNA, 19 nt, Artificial Sequence
  Description of Artificial Sequence: Synthetic oligonucleotide
caugcccggcauccgaaga

SEQ ID NO: 1937915 - RNA, 19 nt, Artificial Sequence
  Description of Artificial Sequence: Synthetic oligonucleotide
gauguccguccguuugugu

SEQ ID NO: 1937916 - RNA, 19 nt, Artificial Sequence
  Description of Artificial Sequence: Synthetic oligonucleotide
guugagcguuagguggcug

SEQ ID NO: 1937917 - RNA, 19 nt, Artificial Sequence
  Description of Artificial Sequence: Synthetic oligonucleotide
ucgguuccgaauggccccu

SEQ ID NO: 1937918 - RNA, 19 nt, Artificial Sequence
  Description of Artificial Sequence: Synthetic oligonucleotide
cccacuaucuguacacaga

SEQ ID NO: 1937919 - RNA, 19 nt, Artificial Sequence
  Description of Artificial Sequence: Synthetic oligonucleotide
acugcccgcugcagguugg

SEQ ID NO: 1937920 - RNA, 19 nt, Artificial Sequence
  Description of Artificial Sequence: Synthetic oligonucleotide
cugaauucaugcccggcau

SEQ ID NO: 1937921 - RNA, 19 nt, Artificial Sequence
  Description of Artificial Sequence: Synthetic oligonucleotide
uccgaagacugagguccga

SEQ ID NO: 1937922 - RNA, 19 nt, Artificial Sequence
  Description of Artificial Sequence: Synthetic oligonucleotide
guggcugaauuucugucuu

SEQ ID NO: 1937923 - RNA, 19 nt, Artificial Sequence
  Description of Artificial Sequence: Synthetic oligonucleotide
ucucaagagcgggcggcuc

SEQ ID NO: 1937924 - RNA, 19 nt, Artificial Sequence
  Description of Artificial Sequence: Synthetic oligonucleotide
aggucuccgagaaggugga

SEQ ID NO: 1937925 - RNA, 19 nt, Artificial Sequence
  Description of Artificial Sequence: Synthetic oligonucleotide
gugauguccguccguuugu

SEQ ID NO: 1937926 - RNA, 19 nt, Artificial Sequence
  Description of Artificial Sequence: Synthetic oligonucleotide
cuggcucacgaugacagcu

SEQ ID NO: 1937927 - RNA, 19 nt, Artificial Sequence
  Description of Artificial Sequence: Synthetic oligonucleotide
cgacaaucucaagagcggg

SEQ ID NO: 1937928 - RNA, 19 nt, Artificial Sequence
  Description of Artificial Sequence: Synthetic oligonucleotide
ccguuugugugagggaagc

SEQ ID NO: 1937929 - RNA, 19 nt, Artificial Sequence
  Description of Artificial Sequence: Synthetic oligonucleotide
acucgcauacacaccucau

SEQ ID NO: 1937930 - RNA, 19 nt, Artificial Sequence
  Description of Artificial Sequence: Synthetic oligonucleotide
accacacgcucggugggcu

SEQ ID NO: 1937931 - RNA, 19 nt, Artificial Sequence
  Description of Artificial Sequence: Synthetic oligonucleotide
ccuccauuagcuccacuca

SEQ ID NO: 1937932 - RNA, 19 nt, Artificial Sequence
  Description of Artificial Sequence: Synthetic oligonucleotide
ggaaucuggaguccuccgu

SEQ ID NO: 1937933 - RNA, 19 nt, Artificial Sequence
  Description of Artificial Sequence: Synthetic oligonucleotide
gcguuagguggcugagugc

SEQ ID NO: 1937934 - RNA, 19 nt, Artificial Sequence
  Description of Artificial Sequence: Synthetic oligonucleotide
agggaagcaguugcacuuu

SEQ ID NO: 1937935 - RNA, 19 nt, Artificial Sequence
  Description of Artificial Sequence: Synthetic oligonucleotide
agcaguucacggaggccga

SEQ ID NO: 1937936 - RNA, 19 nt, Artificial Sequence
  Description of Artificial Sequence: Synthetic oligonucleotide
ccuaugguggcgacaaucu

SEQ ID NO: 1937937 - RNA, 19 nt, Artificial Sequence
  Description of Artificial Sequence: Synthetic oligonucleotide
ugggcacagcuugcugaca

SEQ ID NO: 1937938 - RNA, 19 nt, Artificial Sequence
  Description of Artificial Sequence: Synthetic oligonucleotide
caccacacgcucggugggc

SEQ ID NO: 1937939 - RNA, 19 nt, Artificial Sequence
  Description of Artificial Sequence: Synthetic oligonucleotide
ggugggcucuggaugguac

SEQ ID NO: 1937940 - RNA, 19 nt, Artificial Sequence
  Description of Artificial Sequence: Synthetic oligonucleotide
ggcccgguguacuggcuug

SEQ ID NO: 1937941 - RNA, 19 nt, Artificial Sequence
  Description of Artificial Sequence: Synthetic oligonucleotide
cccuaugguggcgacaauc

SEQ ID NO: 1937942 - RNA, 19 nt, Artificial Sequence
  Description of Artificial Sequence: Synthetic oligonucleotide
cccugauuuuccguucagc

SEQ ID NO: 1937943 - RNA, 19 nt, Artificial Sequence
  Description of Artificial Sequence: Synthetic oligonucleotide
cagaaacuuuucucuugcu

SEQ ID NO: 1937944 - RNA, 19 nt, Artificial Sequence
  Description of Artificial Sequence: Synthetic oligonucleotide
  modified_base (9)..(9): a, c, u, g, unknown or other
guucuucanaggggaugga

SEQ ID NO: 1937945 - RNA, 19 nt, Artificial Sequence
  Description of Artificial Sequence: Synthetic oligonucleotide
gguguacuggcuuguugcu

SEQ ID NO: 1937946 - RNA, 19 nt, Artificial Sequence
  Description of Artificial Sequence: Synthetic oligonucleotide
cucaagagcgggcggcucu

SEQ ID NO: 1937947 - RNA, 19 nt, Artificial Sequence
  Description of Artificial Sequence: Synthetic oligonucleotide
ccaccacacgcucgguggg

SEQ ID NO: 1937948 - RNA, 19 nt, Artificial Sequence
  Description of Artificial Sequence: Synthetic oligonucleotide
cauaguccucugaauucau

SEQ ID NO: 1937949 - RNA, 19 nt, Artificial Sequence
  Description of Artificial Sequence: Synthetic oligonucleotide
ggcaguaggcccgguguac

SEQ ID NO: 1937950 - RNA, 19 nt, Artificial Sequence
  Description of Artificial Sequence: Synthetic oligonucleotide
gguggaaucuggaguccuc

SEQ ID NO: 1937951 - RNA, 19 nt, Artificial Sequence
  Description of Artificial Sequence: Synthetic oligonucleotide
gucuccgagaagguggaau

SEQ ID NO: 1937952 - RNA, 19 nt, Artificial Sequence
  Description of Artificial Sequence: Synthetic oligonucleotide
gcacagaaaccccuauggu

SEQ ID NO: 1937953 - RNA, 19 nt, Artificial Sequence
  Description of Artificial Sequence: Synthetic oligonucleotide
gaacgcccuccuugaaggu

SEQ ID NO: 1937954 - RNA, 19 nt, Artificial Sequence
  Description of Artificial Sequence: Synthetic oligonucleotide
ccgaagacugagguccgag

SEQ ID NO: 1937955 - RNA, 19 nt, Artificial Sequence
  Description of Artificial Sequence: Synthetic oligonucleotide
gguugcggucaaauaccac

SEQ ID NO: 1937956 - RNA, 19 nt, Artificial Sequence
  Description of Artificial Sequence: Synthetic oligonucleotide
acgcucggugggcucugga

SEQ ID NO: 1937957 - RNA, 19 nt, Artificial Sequence
  Description of Artificial Sequence: Synthetic oligonucleotide
ugcuuguguuugggaaauu

SEQ ID NO: 1937958 - RNA, 19 nt, Artificial Sequence
  Description of Artificial Sequence: Synthetic oligonucleotide
uagcuccacucagggcaca

SEQ ID NO: 1937959 - RNA, 19 nt, Artificial Sequence
  Description of Artificial Sequence: Synthetic oligonucleotide
ucggugggcucuggauggu

SEQ ID NO: 1937960 - RNA, 19 nt, Artificial Sequence
  Description of Artificial Sequence: Synthetic oligonucleotide
cguucuucgucccugauuu

SEQ ID NO: 1937961 - RNA, 19 nt, Artificial Sequence
  Description of Artificial Sequence: Synthetic oligonucleotide
cuagcagguggaggaacua

SEQ ID NO: 1937962 - RNA, 19 nt, Artificial Sequence
  Description of Artificial Sequence: Synthetic oligonucleotide
uagaggcuucuaggguaua

SEQ ID NO: 1937963 - RNA, 19 nt, Artificial Sequence
  Description of Artificial Sequence: Synthetic oligonucleotide
cacugcaugggcacagcuu

SEQ ID NO: 1937964 - RNA, 19 nt, Artificial Sequence
  Description of Artificial Sequence: Synthetic oligonucleotide
ggcggcucugaugcuugag

SEQ ID NO: 1937965 - RNA, 19 nt, Artificial Sequence
  Description of Artificial Sequence: Synthetic oligonucleotide
ugacugcccgcugcagguu

SEQ ID NO: 1937966 - RNA, 19 nt, Artificial Sequence
  Description of Artificial Sequence: Synthetic oligonucleotide
gcuugcugacacucgcaua

SEQ ID NO: 1937967 - RNA, 19 nt, Artificial Sequence
  Description of Artificial Sequence: Synthetic oligonucleotide
cccuugucacagaaaaccu

SEQ ID NO: 1937968 - RNA, 19 nt, Artificial Sequence
  Description of Artificial Sequence: Synthetic oligonucleotide
gcucacgaugacagcugug

SEQ ID NO: 1937969 - RNA, 19 nt, Artificial Sequence
  Description of Artificial Sequence: Synthetic oligonucleotide
agcacucucuucggcucuu

SEQ ID NO: 1937970 - RNA, 19 nt, Artificial Sequence
  Description of Artificial Sequence: Synthetic oligonucleotide
cggcauccgaagacugagg

SEQ ID NO: 1937971 - RNA, 19 nt, Artificial Sequence
  Description of Artificial Sequence: Synthetic oligonucleotide
acacgcucggugggcucug

SEQ ID NO: 1937972 - RNA, 19 nt, Artificial Sequence
  Description of Artificial Sequence: Synthetic oligonucleotide
cacgcucggugggcucugg

SEQ ID NO: 1937973 - RNA, 19 nt, Artificial Sequence
  Description of Artificial Sequence: Synthetic oligonucleotide
ggcucacgaugacagcugu

SEQ ID NO: 1937974 - RNA, 19 nt, Artificial Sequence
  Description of Artificial Sequence: Synthetic oligonucleotide
gagcguuagguggcugagu

SEQ ID NO: 1937975 - RNA, 19 nt, Artificial Sequence
  Description of Artificial Sequence: Synthetic oligonucleotide
cguuagguggcugagugcu

SEQ ID NO: 1937976 - RNA, 19 nt, Artificial Sequence
  Description of Artificial Sequence: Synthetic oligonucleotide
cacugugauguccguccgu

SEQ ID NO: 1937977 - RNA, 19 nt, Artificial Sequence
  Description of Artificial Sequence: Synthetic oligonucleotide
guccuccguugagcguuag

SEQ ID NO: 1937978 - RNA, 19 nt, Artificial Sequence
  Description of Artificial Sequence: Synthetic oligonucleotide
ggcuggguauccagaucca

SEQ ID NO: 1937979 - RNA, 19 nt, Artificial Sequence
  Description of Artificial Sequence: Synthetic oligonucleotide
gugcuggaguugaacuggu

SEQ ID NO: 1937980 - RNA, 19 nt, Artificial Sequence
  Description of Artificial Sequence: Synthetic oligonucleotide
gcccggcauccgaagacug

SEQ ID NO: 1937981 - RNA, 19 nt, Artificial Sequence
  Description of Artificial Sequence: Synthetic oligonucleotide
cccggcauccgaagacuga

SEQ ID NO: 1937982 - RNA, 19 nt, Artificial Sequence
  Description of Artificial Sequence: Synthetic oligonucleotide
cacggaggccgaagugacu

SEQ ID NO: 1937983 - RNA, 19 nt, Artificial Sequence
  Description of Artificial Sequence: Synthetic oligonucleotide
caagagcgggcggcucuga

SEQ ID NO: 1937984 - RNA, 19 nt, Artificial Sequence
  Description of Artificial Sequence: Synthetic oligonucleotide
cacacgcucggugggcucu

SEQ ID NO: 1937985 - RNA, 19 nt, Artificial Sequence
  Description of Artificial Sequence: Synthetic oligonucleotide
cgcauacacaccucauaua

SEQ ID NO: 1937986 - RNA, 19 nt, Artificial Sequence
  Description of Artificial Sequence: Synthetic oligonucleotide
cuggcuuguugcugcgguu

SEQ ID NO: 1937987 - RNA, 19 nt, Artificial Sequence
  Description of Artificial Sequence: Synthetic oligonucleotide
gcaguaggcccgguguacu

SEQ ID NO: 1937988 - RNA, 19 nt, Artificial Sequence
  Description of Artificial Sequence: Synthetic oligonucleotide
aggugucgaucuggauguu

SEQ ID NO: 1937989 - RNA, 19 nt, Artificial Sequence
  Description of Artificial Sequence: Synthetic oligonucleotide
ccugguugguccacauuau

SEQ ID NO: 1937990 - RNA, 19 nt, Artificial Sequence
  Description of Artificial Sequence: Synthetic oligonucleotide
ggccccuuuucaagacaga

SEQ ID NO: 1937991 - RNA, 19 nt, Artificial Sequence
  Description of Artificial Sequence: Synthetic oligonucleotide
cguccguuugugugaggga

SEQ ID NO: 1937992 - RNA, 19 nt, Artificial Sequence
  Description of Artificial Sequence: Synthetic oligonucleotide
ccgaagugacuuagaggcu

SEQ ID NO: 1937993 - RNA, 19 nt, Artificial Sequence
  Description of Artificial Sequence: Synthetic oligonucleotide
cgaagugacuuagaggcuu

SEQ ID NO: 1937994 - RNA, 19 nt, Artificial Sequence
  Description of Artificial Sequence: Synthetic oligonucleotide
cguuugugugagggaagca

SEQ ID NO: 1937995 - RNA, 19 nt, Artificial Sequence
  Description of Artificial Sequence: Synthetic oligonucleotide
gguuccgaauggccccuuu

SEQ ID NO: 1937996 - RNA, 19 nt, Artificial Sequence
  Description of Artificial Sequence: Synthetic oligonucleotide
gcaaagccguguggcugaa

SEQ ID NO: 1937997 - RNA, 19 nt, Artificial Sequence
  Description of Artificial Sequence: Synthetic oligonucleotide
ggcaagcccuucacacccu

SEQ ID NO: 1937998 - RNA, 19 nt, Artificial Sequence
  Description of Artificial Sequence: Synthetic oligonucleotide
ggucuccgagaagguggaa

SEQ ID NO: 1937999 - RNA, 19 nt, Artificial Sequence
  Description of Artificial Sequence: Synthetic oligonucleotide
ccgggucaucuagcaggug

SEQ ID NO: 1938000 - RNA, 19 nt, Artificial Sequence
  Description of Artificial Sequence: Synthetic oligonucleotide
caaagccguguggcugaau

SEQ ID NO: 1938001 - RNA, 19 nt, Artificial Sequence
  Description of Artificial Sequence: Synthetic oligonucleotide
gcccgguguacuggcuugu

SEQ ID NO: 1938002 - RNA, 19 nt, Artificial Sequence
  Description of Artificial Sequence: Synthetic oligonucleotide
cgcucggugggcucuggau

SEQ ID NO: 1938003 - RNA, 19 nt, Artificial Sequence
  Description of Artificial Sequence: Synthetic oligonucleotide
gcgggcggcucugaugcuu

SEQ ID NO: 1938004 - RNA, 19 nt, Artificial Sequence
  Description of Artificial Sequence: Synthetic oligonucleotide
cguugagcguuagguggcu

SEQ ID NO: 1938005 - RNA, 19 nt, Artificial Sequence
  Description of Artificial Sequence: Synthetic oligonucleotide
cgcugcagguugguaaaau

SEQ ID NO: 1938006 - RNA, 19 nt, Artificial Sequence
  Description of Artificial Sequence: Synthetic oligonucleotide
cccgguguacuggcuuguu

SEQ ID NO: 1938007 - RNA, 19 nt, Artificial Sequence
  Description of Artificial Sequence: Synthetic oligonucleotide
ccccuaugguggcgacaau

SEQ ID NO: 1938008 - RNA, 19 nt, Artificial Sequence
  Description of Artificial Sequence: Synthetic oligonucleotide
cgguuccgaauggccccuu

SEQ ID NO: 1938009 - RNA, 19 nt, Artificial Sequence
  Description of Artificial Sequence: Synthetic oligonucleotide
aaauacaacagaguggugc

SEQ ID NO: 1938010 - RNA, 19 nt, Artificial Sequence
  Description of Artificial Sequence: Synthetic oligonucleotide
aauuggauaaaccagcuca

SEQ ID NO: 1938011 - RNA, 19 nt, Artificial Sequence
  Description of Artificial Sequence: Synthetic oligonucleotide
ugaccaaucauagacauag

SEQ ID NO: 1938012 - RNA, 19 nt, Artificial Sequence
  Description of Artificial Sequence: Synthetic oligonucleotide
aaaagaagccccaauagag

SEQ ID NO: 1938013 - RNA, 19 nt, Artificial Sequence
  Description of Artificial Sequence: Synthetic oligonucleotide
aguaauuggauaaaccagc

SEQ ID NO: 1938014 - RNA, 19 nt, Artificial Sequence
  Description of Artificial Sequence: Synthetic oligonucleotide
agguauucaccacugaggc

SEQ ID NO: 1938015 - RNA, 19 nt, Artificial Sequence
  Description of Artificial Sequence: Synthetic oligonucleotide
aauugcaccucuugcuugc

SEQ ID NO: 1938016 - RNA, 19 nt, Artificial Sequence
  Description of Artificial Sequence: Synthetic oligonucleotide
aacaguaauuggauaaacc

SEQ ID NO: 1938017 - RNA, 19 nt, Artificial Sequence
  Description of Artificial Sequence: Synthetic oligonucleotide
aauacaacagaguggugcu

SEQ ID NO: 1938018 - RNA, 19 nt, Artificial Sequence
  Description of Artificial Sequence: Synthetic oligonucleotide
aacgcuaggccgcuuaggg

SEQ ID NO: 1938019 - RNA, 19 nt, Artificial Sequence
  Description of Artificial Sequence: Synthetic oligonucleotide
cuugcuugcacaaucggcc

SEQ ID NO: 1938020 - RNA, 19 nt, Artificial Sequence
  Description of Artificial Sequence: Synthetic oligonucleotide
aaacaguaauuggauaaac

SEQ ID NO: 1938021 - RNA, 19 nt, Artificial Sequence
  Description of Artificial Sequence: Synthetic oligonucleotide
aaucauagacauaggagag

SEQ ID NO: 1938022 - RNA, 19 nt, Artificial Sequence
  Description of Artificial Sequence: Synthetic oligonucleotide
uugagcacgaacucgaagu

SEQ ID NO: 1938023 - RNA, 19 nt, Artificial Sequence
  Description of Artificial Sequence: Synthetic oligonucleotide
aaugcacuagguccgaaga

SEQ ID NO: 1938024 - RNA, 19 nt, Artificial Sequence
  Description of Artificial Sequence: Synthetic oligonucleotide
cuuagcgcgggguugagcg

SEQ ID NO: 1938025 - RNA, 19 nt, Artificial Sequence
  Description of Artificial Sequence: Synthetic oligonucleotide
agcacagcgcgccaaauac

SEQ ID NO: 1938026 - RNA, 19 nt, Artificial Sequence
  Description of Artificial Sequence: Synthetic oligonucleotide
agaguggugcugcaaaacg

SEQ ID NO: 1938027 - RNA, 19 nt, Artificial Sequence
  Description of Artificial Sequence: Synthetic oligonucleotide
uuuguguguuaccagguac

SEQ ID NO: 1938028 - RNA, 19 nt, Artificial Sequence
  Description of Artificial Sequence: Synthetic oligonucleotide
cagguauucaccacugagg

SEQ ID NO: 1938029 - RNA, 19 nt, Artificial Sequence
  Description of Artificial Sequence: Synthetic oligonucleotide
uccgaagagaggauguacc

SEQ ID NO: 1938030 - RNA, 19 nt, Artificial Sequence
  Description of Artificial Sequence: Synthetic oligonucleotide
uaggguaaguaguagucgc

SEQ ID NO: 1938031 - RNA, 19 nt, Artificial Sequence
  Description of Artificial Sequence: Synthetic oligonucleotide
uggccuaaacaguaauugg

SEQ ID NO: 1938032 - RNA, 19 nt, Artificial Sequence
  Description of Artificial Sequence: Synthetic oligonucleotide
cagagcauaggguaaguag

SEQ ID NO: 1938033 - RNA, 19 nt, Artificial Sequence
  Description of Artificial Sequence: Synthetic oligonucleotide
acaucaacuggugccagcc

SEQ ID NO: 1938034 - RNA, 19 nt, Artificial Sequence
  Description of Artificial Sequence: Synthetic oligonucleotide
acaugcaaugacaucaggg

SEQ ID NO: 1938035 - RNA, 19 nt, Artificial Sequence
  Description of Artificial Sequence: Synthetic oligonucleotide
ucgucgucggccuugagca

SEQ ID NO: 1938036 - RNA, 19 nt, Artificial Sequence
  Description of Artificial Sequence: Synthetic oligonucleotide
aagucaacauggccaggac

SEQ ID NO: 1938037 - RNA, 19 nt, Artificial Sequence
  Description of Artificial Sequence: Synthetic oligonucleotide
cauaggguaaguaguaguc

SEQ ID NO: 1938038 - RNA, 19 nt, Artificial Sequence
  Description of Artificial Sequence: Synthetic oligonucleotide
gcugcaaaacgcuaggccg

SEQ ID NO: 1938039 - RNA, 19 nt, Artificial Sequence
  Description of Artificial Sequence: Synthetic oligonucleotide
guaguagucgcagagcugc

SEQ ID NO: 1938040 - RNA, 19 nt, Artificial Sequence
  Description of Artificial Sequence: Synthetic oligonucleotide
ugauuuguacucuguguca

SEQ ID NO: 1938041 - RNA, 19 nt, Artificial Sequence
  Description of Artificial Sequence: Synthetic oligonucleotide
auaggguaaguaguagucg

SEQ ID NO: 1938042 - RNA, 19 nt, Artificial Sequence
  Description of Artificial Sequence: Synthetic oligonucleotide
caugcaaugacaucaggga

SEQ ID NO: 1938043 - RNA, 19 nt, Artificial Sequence
  Description of Artificial Sequence: Synthetic oligonucleotide
agagaggauguacccaccg

SEQ ID NO: 1938044 - RNA, 19 nt, Artificial Sequence
  Description of Artificial Sequence: Synthetic oligonucleotide
gauaaaccagcucacccca

SEQ ID NO: 1938045 - RNA, 19 nt, Artificial Sequence
  Description of Artificial Sequence: Synthetic oligonucleotide
uccacgcccagaaaagaag

SEQ ID NO: 1938046 - RNA, 19 nt, Artificial Sequence
  Description of Artificial Sequence: Synthetic oligonucleotide
cagcgauacaucuucacug

SEQ ID NO: 1938047 - RNA, 19 nt, Artificial Sequence
  Description of Artificial Sequence: Synthetic oligonucleotide
gugauuuguacucuguguc

SEQ ID NO: 1938048 - RNA, 19 nt, Artificial Sequence
  Description of Artificial Sequence: Synthetic oligonucleotide
acuagguccgaagagagga

SEQ ID NO: 1938049 - RNA, 19 nt, Artificial Sequence
  Description of Artificial Sequence: Synthetic oligonucleotide
cucacgugcgcguagcucc

SEQ ID NO: 1938050 - RNA, 19 nt, Artificial Sequence
  Description of Artificial Sequence: Synthetic oligonucleotide
accucuugcuugcacaauc

SEQ ID NO: 1938051 - RNA, 19 nt, Artificial Sequence
  Description of Artificial Sequence: Synthetic oligonucleotide
guacccaccgcccagagca

SEQ ID NO: 1938052 - RNA, 19 nt, Artificial Sequence
  Description of Artificial Sequence: Synthetic oligonucleotide
cucgagaucaagcguacgc

SEQ ID NO: 1938053 - RNA, 19 nt, Artificial Sequence
  Description of Artificial Sequence: Synthetic oligonucleotide
ucaacuggugccagccagg

SEQ ID NO: 1938054 - RNA, 19 nt, Artificial Sequence
  Description of Artificial Sequence: Synthetic oligonucleotide
uacgccgcuccucugagcc

SEQ ID NO: 1938055 - RNA, 19 nt, Artificial Sequence
  Description of Artificial Sequence: Synthetic oligonucleotide
ugcacaaucggcccucgug

SEQ ID NO: 1938056 - RNA, 19 nt, Artificial Sequence
  Description of Artificial Sequence: Synthetic oligonucleotide
auuggauaaaccagcucac

SEQ ID NO: 1938057 - RNA, 19 nt, Artificial Sequence
  Description of Artificial Sequence: Synthetic oligonucleotide
aauacccuccuugcgcugg

SEQ ID NO: 1938058 - RNA, 19 nt, Artificial Sequence
  Description of Artificial Sequence: Synthetic oligonucleotide
aauagaggcgacggcggcg

SEQ ID NO: 1938059 - RNA, 19 nt, Artificial Sequence
  Description of Artificial Sequence: Synthetic oligonucleotide
acauccuuagggccgccgc

SEQ ID NO: 1938060 - RNA, 19 nt, Artificial Sequence
  Description of Artificial Sequence: Synthetic oligonucleotide
uggugcugcaaaacgcuag

SEQ ID NO: 1938061 - RNA, 19 nt, Artificial Sequence
  Description of Artificial Sequence: Synthetic oligonucleotide
acugaggcgcagguaaugc

SEQ ID NO: 1938062 - RNA, 19 nt, Artificial Sequence
  Description of Artificial Sequence: Synthetic oligonucleotide
agccccgugauuuguacuc

SEQ ID NO: 1938063 - RNA, 19 nt, Artificial Sequence
  Description of Artificial Sequence: Synthetic oligonucleotide
ggauaaaccagcucacccc

SEQ ID NO: 1938064 - RNA, 19 nt, Artificial Sequence
  Description of Artificial Sequence: Synthetic oligonucleotide
gauuguugcagccccguga

SEQ ID NO: 1938065 - RNA, 19 nt, Artificial Sequence
  Description of Artificial Sequence: Synthetic oligonucleotide
uaaguaguagucgcagagc

SEQ ID NO: 1938066 - RNA, 19 nt, Artificial Sequence
  Description of Artificial Sequence: Synthetic oligonucleotide
ugcuugcucgagaucaagc

SEQ ID NO: 1938067 - RNA, 19 nt, Artificial Sequence
  Description of Artificial Sequence: Synthetic oligonucleotide
aucaagcguacgccgcucc

SEQ ID NO: 1938068 - RNA, 19 nt, Artificial Sequence
  Description of Artificial Sequence: Synthetic oligonucleotide
gaagcgcgcccacacaucc

SEQ ID NO: 1938069 - RNA, 19 nt, Artificial Sequence
  Description of Artificial Sequence: Synthetic oligonucleotide
uaauuggauaaaccagcuc

SEQ ID NO: 1938070 - RNA, 19 nt, Artificial Sequence
  Description of Artificial Sequence: Synthetic oligonucleotide
uaggagaggcgcaauugca

SEQ ID NO: 1938071 - RNA, 19 nt, Artificial Sequence
  Description of Artificial Sequence: Synthetic oligonucleotide
uagacauaggagaggcgca

SEQ ID NO: 1938072 - RNA, 19 nt, Artificial Sequence
  Description of Artificial Sequence: Synthetic oligonucleotide
ucgagaucaagcguacgcc

SEQ ID NO: 1938073 - RNA, 19 nt, Artificial Sequence
  Description of Artificial Sequence: Synthetic oligonucleotide
uaggcaucgcgcagggagg

SEQ ID NO: 1938074 - RNA, 19 nt, Artificial Sequence
  Description of Artificial Sequence: Synthetic oligonucleotide
agcgauacaucuucacugu

SEQ ID NO: 1938075 - RNA, 19 nt, Artificial Sequence
  Description of Artificial Sequence: Synthetic oligonucleotide
gcuugcucgagaucaagcg

SEQ ID NO: 1938076 - RNA, 19 nt, Artificial Sequence
  Description of Artificial Sequence: Synthetic oligonucleotide
ucguccacgcccagaaaag

SEQ ID NO: 1938077 - RNA, 19 nt, Artificial Sequence
  Description of Artificial Sequence: Synthetic oligonucleotide
cugcaaaacgcuaggccgc

SEQ ID NO: 1938078 - RNA, 19 nt, Artificial Sequence
  Description of Artificial Sequence: Synthetic oligonucleotide
gucagcaccacucggcgcc

SEQ ID NO: 1938079 - RNA, 19 nt, Artificial Sequence
  Description of Artificial Sequence: Synthetic oligonucleotide
uugcucgagaucaagcgua

SEQ ID NO: 1938080 - RNA, 19 nt, Artificial Sequence
  Description of Artificial Sequence: Synthetic oligonucleotide
acgaacucgaaguccacgu

SEQ ID NO: 1938081 - RNA, 19 nt, Artificial Sequence
  Description of Artificial Sequence: Synthetic oligonucleotide
agucgcagagcugccaggc

SEQ ID NO: 1938082 - RNA, 19 nt, Artificial Sequence
  Description of Artificial Sequence: Synthetic oligonucleotide
ucgccgaguacgcaggcgc

SEQ ID NO: 1938083 - RNA, 19 nt, Artificial Sequence
  Description of Artificial Sequence: Synthetic oligonucleotide
cacaacacaugcaaugaca

SEQ ID NO: 1938084 - RNA, 19 nt, Artificial Sequence
  Description of Artificial Sequence: Synthetic oligonucleotide
uucucguaggcaucgcgca

SEQ ID NO: 1938085 - RNA, 19 nt, Artificial Sequence
  Description of Artificial Sequence: Synthetic oligonucleotide
cuucacugugccacgcgcg

SEQ ID NO: 1938086 - RNA, 19 nt, Artificial Sequence
  Description of Artificial Sequence: Synthetic oligonucleotide
gaggucgccgaguacgcag

SEQ ID NO: 1938087 - RNA, 19 nt, Artificial Sequence
  Description of Artificial Sequence: Synthetic oligonucleotide
gguacugauuguugcagcc

SEQ ID NO: 1938088 - RNA, 19 nt, Artificial Sequence
  Description of Artificial Sequence: Synthetic oligonucleotide
uuggccuguguccgaagag

SEQ ID NO: 1938089 - RNA, 19 nt, Artificial Sequence
  Description of Artificial Sequence: Synthetic oligonucleotide
aaggagucgucgucggccu

SEQ ID NO: 1938090 - RNA, 19 nt, Artificial Sequence
  Description of Artificial Sequence: Synthetic oligonucleotide
cuugagcacgaacucgaag

SEQ ID NO: 1938091 - RNA, 19 nt, Artificial Sequence
  Description of Artificial Sequence: Synthetic oligonucleotide
augcacuagguccgaagag

SEQ ID NO: 1938092 - RNA, 19 nt, Artificial Sequence
  Description of Artificial Sequence: Synthetic oligonucleotide
ugcacaucaacuggugcca

SEQ ID NO: 1938093 - RNA, 19 nt, Artificial Sequence
  Description of Artificial Sequence: Synthetic oligonucleotide
caaucggcccucgugaagc

SEQ ID NO: 1938094 - RNA, 19 nt, Artificial Sequence
  Description of Artificial Sequence: Synthetic oligonucleotide
aguagagcauccaggcgcg

SEQ ID NO: 1938095 - RNA, 19 nt, Artificial Sequence
  Description of Artificial Sequence: Synthetic oligonucleotide
accccagacaauuggccag

SEQ ID NO: 1938096 - RNA, 19 nt, Artificial Sequence
  Description of Artificial Sequence: Synthetic oligonucleotide
gggaauacccuccuugcgc

SEQ ID NO: 1938097 - RNA, 19 nt, Artificial Sequence
  Description of Artificial Sequence: Synthetic oligonucleotide
ucguaggcaucgcgcaggg

SEQ ID NO: 1938098 - RNA, 19 nt, Artificial Sequence
  Description of Artificial Sequence: Synthetic oligonucleotide
ccuugugccagccacgugc

SEQ ID NO: 1938099 - RNA, 19 nt, Artificial Sequence
  Description of Artificial Sequence: Synthetic oligonucleotide
agcgcgccgaaguaccuuc

SEQ ID NO: 1938100 - RNA, 19 nt, Artificial Sequence
  Description of Artificial Sequence: Synthetic oligonucleotide
uccaggcgcgcaaaggagu

SEQ ID NO: 1938101 - RNA, 19 nt, Artificial Sequence
  Description of Artificial Sequence: Synthetic oligonucleotide
gagaucaagcguacgccgc

SEQ ID NO: 1938102 - RNA, 19 nt, Artificial Sequence
  Description of Artificial Sequence: Synthetic oligonucleotide
cucgccagcgaccuccggg

SEQ ID NO: 1938103 - RNA, 19 nt, Artificial Sequence
  Description of Artificial Sequence: Synthetic oligonucleotide
ugauuguugcagccccgug

SEQ ID NO: 1938104 - RNA, 19 nt, Artificial Sequence
  Description of Artificial Sequence: Synthetic oligonucleotide
agaucaagcguacgccgcu

SEQ ID NO: 1938105 - RNA, 19 nt, Artificial Sequence
  Description of Artificial Sequence: Synthetic oligonucleotide
gcgcugaccaaucauagac

SEQ ID NO: 1938106 - RNA, 19 nt, Artificial Sequence
  Description of Artificial Sequence: Synthetic oligonucleotide
cacgcccagaaaagaagcc

SEQ ID NO: 1938107 - RNA, 19 nt, Artificial Sequence
  Description of Artificial Sequence: Synthetic oligonucleotide
ucacgugcgcguagcuccg

SEQ ID NO: 1938108 - RNA, 19 nt, Artificial Sequence
  Description of Artificial Sequence: Synthetic oligonucleotide
acaaucggcccucgugaag

SEQ ID NO: 1938109 - RNA, 19 nt, Artificial Sequence
  Description of Artificial Sequence: Synthetic oligonucleotide
guucucguaggcaucgcgc

SEQ ID NO: 1938110 - RNA, 19 nt, Artificial Sequence
  Description of Artificial Sequence: Synthetic oligonucleotide
cauccuuagggccgccgcg

SEQ ID NO: 1938111 - RNA, 19 nt, Artificial Sequence
  Description of Artificial Sequence: Synthetic oligonucleotide
uuagcgcgggguugagcgg

SEQ ID NO: 1938112 - RNA, 19 nt, Artificial Sequence
  Description of Artificial Sequence: Synthetic oligonucleotide
cucggaagcacagcgcgcc

SEQ ID NO: 1938113 - RNA, 19 nt, Artificial Sequence
  Description of Artificial Sequence: Synthetic oligonucleotide
ugcucgagaucaagcguac

SEQ ID NO: 1938114 - RNA, 19 nt, Artificial Sequence
  Description of Artificial Sequence: Synthetic oligonucleotide
gccgcuuagggucagcacc

SEQ ID NO: 1938115 - RNA, 19 nt, Artificial Sequence
  Description of Artificial Sequence: Synthetic oligonucleotide
gguucucguaggcaucgcg

SEQ ID NO: 1938116 - RNA, 19 nt, Artificial Sequence
  Description of Artificial Sequence: Synthetic oligonucleotide
ucgccagcgaccuccgggc

SEQ ID NO: 1938117 - RNA, 19 nt, Artificial Sequence
  Description of Artificial Sequence: Synthetic oligonucleotide
ucaccacugaggcgcaggu

SEQ ID NO: 1938118 - RNA, 19 nt, Artificial Sequence
  Description of Artificial Sequence: Synthetic oligonucleotide
uccgggcucuguuugugug

SEQ ID NO: 1938119 - RNA, 19 nt, Artificial Sequence
  Description of Artificial Sequence: Synthetic oligonucleotide
caauagaggcgacggcggc

SEQ ID NO: 1938120 - RNA, 19 nt, Artificial Sequence
  Description of Artificial Sequence: Synthetic oligonucleotide
aaggccuuagcgcgggguu

SEQ ID NO: 1938121 - RNA, 19 nt, Artificial Sequence
  Description of Artificial Sequence: Synthetic oligonucleotide
uucauggugcaggcgggag

SEQ ID NO: 1938122 - RNA, 19 nt, Artificial Sequence
  Description of Artificial Sequence: Synthetic oligonucleotide
ccaauagaggcgacggcgg

SEQ ID NO: 1938123 - RNA, 19 nt, Artificial Sequence
  Description of Artificial Sequence: Synthetic oligonucleotide
cgccgaaguaccuucaugg

SEQ ID NO: 1938124 - RNA, 19 nt, Artificial Sequence
  Description of Artificial Sequence: Synthetic oligonucleotide
guacugauuguugcagccc

SEQ ID NO: 1938125 - RNA, 19 nt, Artificial Sequence
  Description of Artificial Sequence: Synthetic oligonucleotide
cacgaacucgaaguccacg

SEQ ID NO: 1938126 - RNA, 19 nt, Artificial Sequence
  Description of Artificial Sequence: Synthetic oligonucleotide
ugcuugcacaaucggcccu

SEQ ID NO: 1938127 - RNA, 19 nt, Artificial Sequence
  Description of Artificial Sequence: Synthetic oligonucleotide
cccaauagaggcgacggcg

SEQ ID NO: 1938128 - RNA, 19 nt, Artificial Sequence
  Description of Artificial Sequence: Synthetic oligonucleotide
agacaauuggccagauugu

SEQ ID NO: 1938129 - RNA, 19 nt, Artificial Sequence
  Description of Artificial Sequence: Synthetic oligonucleotide
ucaagcguacgccgcuccu

SEQ ID NO: 1938130 - RNA, 19 nt, Artificial Sequence
  Description of Artificial Sequence: Synthetic oligonucleotide
aaucggcccucgugaagca

SEQ ID NO: 1938131 - RNA, 19 nt, Artificial Sequence
  Description of Artificial Sequence: Synthetic oligonucleotide
cuugacucguccacgccca

SEQ ID NO: 1938132 - RNA, 19 nt, Artificial Sequence
  Description of Artificial Sequence: Synthetic oligonucleotide
acgugcgcguagcuccgcc

SEQ ID NO: 1938133 - RNA, 19 nt, Artificial Sequence
  Description of Artificial Sequence: Synthetic oligonucleotide
gucgucggccuugagcacg

SEQ ID NO: 1938134 - RNA, 19 nt, Artificial Sequence
  Description of Artificial Sequence: Synthetic oligonucleotide
ugugcuugcucgagaucaa

SEQ ID NO: 1938135 - RNA, 19 nt, Artificial Sequence
  Description of Artificial Sequence: Synthetic oligonucleotide
gcuugacucguccacgccc

SEQ ID NO: 1938136 - RNA, 19 nt, Artificial Sequence
  Description of Artificial Sequence: Synthetic oligonucleotide
uaguagucgcagagcugcc

SEQ ID NO: 1938137 - RNA, 19 nt, Artificial Sequence
  Description of Artificial Sequence: Synthetic oligonucleotide
gcaaaggagucgucgucgg

SEQ ID NO: 1938138 - RNA, 19 nt, Artificial Sequence
  Description of Artificial Sequence: Synthetic oligonucleotide
uucucgccagcgaccuccg

SEQ ID NO: 1938139 - RNA, 19 nt, Artificial Sequence
  Description of Artificial Sequence: Synthetic oligonucleotide
ccucuugcuugcacaaucg

SEQ ID NO: 1938140 - RNA, 19 nt, Artificial Sequence
  Description of Artificial Sequence: Synthetic oligonucleotide
gaauacccuccuugcgcug

SEQ ID NO: 1938141 - RNA, 19 nt, Artificial Sequence
  Description of Artificial Sequence: Synthetic oligonucleotide
acugauuguugcagccccg

SEQ ID NO: 1938142 - RNA, 19 nt, Artificial Sequence
  Description of Artificial Sequence: Synthetic oligonucleotide
ugcggcgcucaaccgcgcg

SEQ ID NO: 1938143 - RNA, 19 nt, Artificial Sequence
  Description of Artificial Sequence: Synthetic oligonucleotide
gcgcagguaaugcacuagg

SEQ ID NO: 1938144 - RNA, 19 nt, Artificial Sequence
  Description of Artificial Sequence: Synthetic oligonucleotide
ggccuaaacaguaauugga

SEQ ID NO: 1938145 - RNA, 19 nt, Artificial Sequence
  Description of Artificial Sequence: Synthetic oligonucleotide
ggguaaguaguagucgcag

SEQ ID NO: 1938146 - RNA, 19 nt, Artificial Sequence
  Description of Artificial Sequence: Synthetic oligonucleotide
agagcauccaggcgcgcaa

SEQ ID NO: 1938147 - RNA, 19 nt, Artificial Sequence
  Description of Artificial Sequence: Synthetic oligonucleotide
cuggugcccacagcgaagc

SEQ ID NO: 1938148 - RNA, 19 nt, Artificial Sequence
  Description of Artificial Sequence: Synthetic oligonucleotide
cgcgccaaauacaacagag

SEQ ID NO: 1938149 - RNA, 19 nt, Artificial Sequence
  Description of Artificial Sequence: Synthetic oligonucleotide
ccgaagagaggauguaccc

SEQ ID NO: 1938150 - RNA, 19 nt, Artificial Sequence
  Description of Artificial Sequence: Synthetic oligonucleotide
agccacgugcugcgcaccg

SEQ ID NO: 1938151 - RNA, 19 nt, Artificial Sequence
  Description of Artificial Sequence: Synthetic oligonucleotide
caaaggagucgucgucggc

SEQ ID NO: 1938152 - RNA, 19 nt, Artificial Sequence
  Description of Artificial Sequence: Synthetic oligonucleotide
uagagcauccaggcgcgca

SEQ ID NO: 1938153 - RNA, 19 nt, Artificial Sequence
  Description of Artificial Sequence: Synthetic oligonucleotide
cucguccacgcccagaaaa

SEQ ID NO: 1938154 - RNA, 19 nt, Artificial Sequence
  Description of Artificial Sequence: Synthetic oligonucleotide
ggcgcaauugcaccucuug

SEQ ID NO: 1938155 - RNA, 19 nt, Artificial Sequence
  Description of Artificial Sequence: Synthetic oligonucleotide
guaauuggauaaaccagcu

SEQ ID NO: 1938156 - RNA, 19 nt, Artificial Sequence
  Description of Artificial Sequence: Synthetic oligonucleotide
ggccgugagguucucguag

SEQ ID NO: 1938157 - RNA, 19 nt, Artificial Sequence
  Description of Artificial Sequence: Synthetic oligonucleotide
gcagcuuggccuguguccg

SEQ ID NO: 1938158 - RNA, 19 nt, Artificial Sequence
  Description of Artificial Sequence: Synthetic oligonucleotide
agcgcgccaaauacaacag

SEQ ID NO: 1938159 - RNA, 19 nt, Artificial Sequence
  Description of Artificial Sequence: Synthetic oligonucleotide
cucgcccucggaagcacag

SEQ ID NO: 1938160 - RNA, 19 nt, Artificial Sequence
  Description of Artificial Sequence: Synthetic oligonucleotide
caccgcccagagcauaggg

SEQ ID NO: 1938161 - RNA, 19 nt, Artificial Sequence
  Description of Artificial Sequence: Synthetic oligonucleotide
cugcgcaccgcgcugcggc

SEQ ID NO: 1938162 - RNA, 19 nt, Artificial Sequence
  Description of Artificial Sequence: Synthetic oligonucleotide
uccuuagggccgccgcgcc

SEQ ID NO: 1938163 - RNA, 19 nt, Artificial Sequence
  Description of Artificial Sequence: Synthetic oligonucleotide
cgagaucaagcguacgccg

SEQ ID NO: 1938164 - RNA, 19 nt, Artificial Sequence
  Description of Artificial Sequence: Synthetic oligonucleotide
gguaaguaguagucgcaga

SEQ ID NO: 1938165 - RNA, 19 nt, Artificial Sequence
  Description of Artificial Sequence: Synthetic oligonucleotide
gaccuccgggcuugacucg

SEQ ID NO: 1938166 - RNA, 19 nt, Artificial Sequence
  Description of Artificial Sequence: Synthetic oligonucleotide
caacuggugccagccaggc

SEQ ID NO: 1938167 - RNA, 19 nt, Artificial Sequence
  Description of Artificial Sequence: Synthetic oligonucleotide
agccccaauagaggcgacg

SEQ ID NO: 1938168 - RNA, 19 nt, Artificial Sequence
  Description of Artificial Sequence: Synthetic oligonucleotide
ggauguacccaccgcccag

SEQ ID NO: 1938169 - RNA, 19 nt, Artificial Sequence
  Description of Artificial Sequence: Synthetic oligonucleotide
caccccagacaauuggcca

SEQ ID NO: 1938170 - RNA, 19 nt, Artificial Sequence
  Description of Artificial Sequence: Synthetic oligonucleotide
ccaagcgcgccgaaguacc

SEQ ID NO: 1938171 - RNA, 19 nt, Artificial Sequence
  Description of Artificial Sequence: Synthetic oligonucleotide
cacgugcucauccagccaa

SEQ ID NO: 1938172 - RNA, 19 nt, Artificial Sequence
  Description of Artificial Sequence: Synthetic oligonucleotide
ucgucggccuugagcacga

SEQ ID NO: 1938173 - RNA, 19 nt, Artificial Sequence
  Description of Artificial Sequence: Synthetic oligonucleotide
aggguaaguaguagucgca

SEQ ID NO: 1938174 - RNA, 19 nt, Artificial Sequence
  Description of Artificial Sequence: Synthetic oligonucleotide
gccccaauagaggcgacgg

SEQ ID NO: 1938175 - RNA, 19 nt, Artificial Sequence
  Description of Artificial Sequence: Synthetic oligonucleotide
ccgaaguaccuucauggug

SEQ ID NO: 1938176 - RNA, 19 nt, Artificial Sequence
  Description of Artificial Sequence: Synthetic oligonucleotide
uccgggcuugacucgucca

SEQ ID NO: 1938177 - RNA, 19 nt, Artificial Sequence
  Description of Artificial Sequence: Synthetic oligonucleotide
gccgugagguucucguagg

SEQ ID NO: 1938178 - RNA, 19 nt, Artificial Sequence
  Description of Artificial Sequence: Synthetic oligonucleotide
gcgcaauugcaccucuugc

SEQ ID NO: 1938179 - RNA, 19 nt, Artificial Sequence
  Description of Artificial Sequence: Synthetic oligonucleotide
cuggugccagccaggcacc

SEQ ID NO: 1938180 - RNA, 19 nt, Artificial Sequence
  Description of Artificial Sequence: Synthetic oligonucleotide
uggaaggcgccugcgcuac

SEQ ID NO: 1938181 - RNA, 19 nt, Artificial Sequence
  Description of Artificial Sequence: Synthetic oligonucleotide
cuguguccgaagaggccac

SEQ ID NO: 1938182 - RNA, 19 nt, Artificial Sequence
  Description of Artificial Sequence: Synthetic oligonucleotide
cacuagccaccaacacugc

SEQ ID NO: 1938183 - RNA, 19 nt, Artificial Sequence
  Description of Artificial Sequence: Synthetic oligonucleotide
ucucgcccucggaagcaca

SEQ ID NO: 1938184 - RNA, 19 nt, Artificial Sequence
  Description of Artificial Sequence: Synthetic oligonucleotide
guccuccgggcucuguuug

SEQ ID NO: 1938185 - RNA, 19 nt, Artificial Sequence
  Description of Artificial Sequence: Synthetic oligonucleotide
acgcuaggccgcuuagggu

SEQ ID NO: 1938186 - RNA, 19 nt, Artificial Sequence
  Description of Artificial Sequence: Synthetic oligonucleotide
cacgcgcgcagguauucac

SEQ ID NO: 1938187 - RNA, 19 nt, Artificial Sequence
  Description of Artificial Sequence: Synthetic oligonucleotide
caucgcgcagggagggcag

SEQ ID NO: 1938188 - RNA, 19 nt, Artificial Sequence
  Description of Artificial Sequence: Synthetic oligonucleotide
gagaggcgcaauugcaccu

SEQ ID NO: 1938189 - RNA, 19 nt, Artificial Sequence
  Description of Artificial Sequence: Synthetic oligonucleotide
ggcgucucgcccucggaag

SEQ ID NO: 1938190 - RNA, 19 nt, Artificial Sequence
  Description of Artificial Sequence: Synthetic oligonucleotide
aggucgccgaguacgcagg

SEQ ID NO: 1938191 - RNA, 19 nt, Artificial Sequence
  Description of Artificial Sequence: Synthetic oligonucleotide
cuugcucgagaucaagcgu

SEQ ID NO: 1938192 - RNA, 19 nt, Artificial Sequence
  Description of Artificial Sequence: Synthetic oligonucleotide
caaaacgcuaggccgcuua

SEQ ID NO: 1938193 - RNA, 19 nt, Artificial Sequence
  Description of Artificial Sequence: Synthetic oligonucleotide
cuccgggcuugacucgucc

SEQ ID NO: 1938194 - RNA, 19 nt, Artificial Sequence
  Description of Artificial Sequence: Synthetic oligonucleotide
acgugcugcgcaccgcgcu

SEQ ID NO: 1938195 - RNA, 19 nt, Artificial Sequence
  Description of Artificial Sequence: Synthetic oligonucleotide
cugaggcgcagguaaugca

SEQ ID NO: 1938196 - RNA, 19 nt, Artificial Sequence
  Description of Artificial Sequence: Synthetic oligonucleotide
cuuagggccgccgcgccuc

SEQ ID NO: 1938197 - RNA, 19 nt, Artificial Sequence
  Description of Artificial Sequence: Synthetic oligonucleotide
ucucgccagcgaccuccgg

SEQ ID NO: 1938198 - RNA, 19 nt, Artificial Sequence
  Description of Artificial Sequence: Synthetic oligonucleotide
gaucaagcguacgccgcuc

SEQ ID NO: 1938199 - RNA, 19 nt, Artificial Sequence
  Description of Artificial Sequence: Synthetic oligonucleotide
ggaauacccuccuugcgcu

SEQ ID NO: 1938200 - RNA, 19 nt, Artificial Sequence
  Description of Artificial Sequence: Synthetic oligonucleotide
ugcagccccgugauuugua

SEQ ID NO: 1938201 - RNA, 19 nt, Artificial Sequence
  Description of Artificial Sequence: Synthetic oligonucleotide
ugcaggcgggaggucgccg

SEQ ID NO: 1938202 - RNA, 19 nt, Artificial Sequence
  Description of Artificial Sequence: Synthetic oligonucleotide
cccgugcugugcuugcucg

SEQ ID NO: 1938203 - RNA, 19 nt, Artificial Sequence
  Description of Artificial Sequence: Synthetic oligonucleotide
cauccagccaagucaacau

SEQ ID NO: 1938204 - RNA, 19 nt, Artificial Sequence
  Description of Artificial Sequence: Synthetic oligonucleotide
gucggccuugagcacgaac

SEQ ID NO: 1938205 - RNA, 19 nt, Artificial Sequence
  Description of Artificial Sequence: Synthetic oligonucleotide
gcauaggguaaguaguagu

SEQ ID NO: 1938206 - RNA, 19 nt, Artificial Sequence
  Description of Artificial Sequence: Synthetic oligonucleotide
gucgccgaguacgcaggcg

SEQ ID NO: 1938207 - RNA, 19 nt, Artificial Sequence
  Description of Artificial Sequence: Synthetic oligonucleotide
gggcuugacucguccacgc

SEQ ID NO: 1938208 - RNA, 19 nt, Artificial Sequence
  Description of Artificial Sequence: Synthetic oligonucleotide
aucgcgcagggagggcagc

SEQ ID NO: 1938209 - RNA, 19 nt, Artificial Sequence
  Description of Artificial Sequence: Synthetic oligonucleotide
aucagggaauacccuccuu

SEQ ID NO: 1938210 - RNA, 19 nt, Artificial Sequence
  Description of Artificial Sequence: Synthetic oligonucleotide
gggcgcacuagccaccaac

SEQ ID NO: 1938211 - RNA, 19 nt, Artificial Sequence
  Description of Artificial Sequence: Synthetic oligonucleotide
ccgugauuuguacucugug

SEQ ID NO: 1938212 - RNA, 19 nt, Artificial Sequence
  Description of Artificial Sequence: Synthetic oligonucleotide
ugacucguccacgcccaga

SEQ ID NO: 1938213 - RNA, 19 nt, Artificial Sequence
  Description of Artificial Sequence: Synthetic oligonucleotide
cgcuaggccgcuuaggguc

SEQ ID NO: 1938214 - RNA, 19 nt, Artificial Sequence
  Description of Artificial Sequence: Synthetic oligonucleotide
aggcgcgcaaaggagucgu

SEQ ID NO: 1938215 - RNA, 19 nt, Artificial Sequence
  Description of Artificial Sequence: Synthetic oligonucleotide
caagcguacgccgcuccuc

SEQ ID NO: 1938216 - RNA, 19 nt, Artificial Sequence
  Description of Artificial Sequence: Synthetic oligonucleotide
ccuaaacaguaauuggaua

SEQ ID NO: 1938217 - RNA, 19 nt, Artificial Sequence
  Description of Artificial Sequence: Synthetic oligonucleotide
aggguggcgcugaccaauc

SEQ ID NO: 1938218 - RNA, 19 nt, Artificial Sequence
  Description of Artificial Sequence: Synthetic oligonucleotide
ugugccacgcgcgcaggua

SEQ ID NO: 1938219 - RNA, 19 nt, Artificial Sequence
  Description of Artificial Sequence: Synthetic oligonucleotide
cacgugcugcgcaccgcgc

SEQ ID NO: 1938220 - RNA, 19 nt, Artificial Sequence
  Description of Artificial Sequence: Synthetic oligonucleotide
accgcccagagcauagggu

SEQ ID NO: 1938221 - RNA, 19 nt, Artificial Sequence
  Description of Artificial Sequence: Synthetic oligonucleotide
gcgcgcaaaggagucgucg

SEQ ID NO: 1938222 - RNA, 19 nt, Artificial Sequence
  Description of Artificial Sequence: Synthetic oligonucleotide
uugcagccccgugauuugu

SEQ ID NO: 1938223 - RNA, 19 nt, Artificial Sequence
  Description of Artificial Sequence: Synthetic oligonucleotide
agcucaccccagacaauug

SEQ ID NO: 1938224 - RNA, 19 nt, Artificial Sequence
  Description of Artificial Sequence: Synthetic oligonucleotide
cauggccuaaacaguaauu

SEQ ID NO: 1938225 - RNA, 19 nt, Artificial Sequence
  Description of Artificial Sequence: Synthetic oligonucleotide
ccacgugcugcgcaccgcg

SEQ ID NO: 1938226 - RNA, 19 nt, Artificial Sequence
  Description of Artificial Sequence: Synthetic oligonucleotide
guccacgcccagaaaagaa

SEQ ID NO: 1938227 - RNA, 19 nt, Artificial Sequence
  Description of Artificial Sequence: Synthetic oligonucleotide
guggcgcugaccaaucaua

SEQ ID NO: 1938228 - RNA, 19 nt, Artificial Sequence
  Description of Artificial Sequence: Synthetic oligonucleotide
guacgccgcuccucugagc

SEQ ID NO: 1938229 - RNA, 19 nt, Artificial Sequence
  Description of Artificial Sequence: Synthetic oligonucleotide
acagcgaagcgcgcccaca

SEQ ID NO: 1938230 - RNA, 19 nt, Artificial Sequence
  Description of Artificial Sequence: Synthetic oligonucleotide
ggcgcagguaaugcacuag

SEQ ID NO: 1938231 - RNA, 19 nt, Artificial Sequence
  Description of Artificial Sequence: Synthetic oligonucleotide
cgggaggucgccgaguacg

SEQ ID NO: 1938232 - RNA, 19 nt, Artificial Sequence
  Description of Artificial Sequence: Synthetic oligonucleotide
auugcaccucuugcuugca

SEQ ID NO: 1938233 - RNA, 19 nt, Artificial Sequence
  Description of Artificial Sequence: Synthetic oligonucleotide
ggcuugacucguccacgcc

SEQ ID NO: 1938234 - RNA, 19 nt, Artificial Sequence
  Description of Artificial Sequence: Synthetic oligonucleotide
cccagcgauacaucuucac

SEQ ID NO: 1938235 - RNA, 19 nt, Artificial Sequence
  Description of Artificial Sequence: Synthetic oligonucleotide
guccccgugcugugcuugc

SEQ ID NO: 1938236 - RNA, 19 nt, Artificial Sequence
  Description of Artificial Sequence: Synthetic oligonucleotide
aucggcccucgugaagcag

SEQ ID NO: 1938237 - RNA, 19 nt, Artificial Sequence
  Description of Artificial Sequence: Synthetic oligonucleotide
cacagcgaagcgcgcccac

SEQ ID NO: 1938238 - RNA, 19 nt, Artificial Sequence
  Description of Artificial Sequence: Synthetic oligonucleotide
agcguacgccgcuccucug

SEQ ID NO: 1938239 - RNA, 19 nt, Artificial Sequence
  Description of Artificial Sequence: Synthetic oligonucleotide
aaccgcgcggggcgcacua

SEQ ID NO: 1938240 - RNA, 19 nt, Artificial Sequence
  Description of Artificial Sequence: Synthetic oligonucleotide
gcagccccgugauuuguac

SEQ ID NO: 1938241 - RNA, 19 nt, Artificial Sequence
  Description of Artificial Sequence: Synthetic oligonucleotide
ccaacacugccaggaaggc

SEQ ID NO: 1938242 - RNA, 19 nt, Artificial Sequence
  Description of Artificial Sequence: Synthetic oligonucleotide
aagcgcgccgaaguaccuu

SEQ ID NO: 1938243 - RNA, 19 nt, Artificial Sequence
  Description of Artificial Sequence: Synthetic oligonucleotide
gucgcagagcugccaggca

SEQ ID NO: 1938244 - RNA, 19 nt, Artificial Sequence
  Description of Artificial Sequence: Synthetic oligonucleotide
gcgccgaaguaccuucaug

SEQ ID NO: 1938245 - RNA, 19 nt, Artificial Sequence
  Description of Artificial Sequence: Synthetic oligonucleotide
acgugcucauccagccaag

SEQ ID NO: 1938246 - RNA, 19 nt, Artificial Sequence
  Description of Artificial Sequence: Synthetic oligonucleotide
aggcacccagcgauacauc

SEQ ID NO: 1938247 - RNA, 19 nt, Artificial Sequence
  Description of Artificial Sequence: Synthetic oligonucleotide
ggcgcugaccaaucauaga

SEQ ID NO: 1938248 - RNA, 19 nt, Artificial Sequence
  Description of Artificial Sequence: Synthetic oligonucleotide
uagaggcgacggcggcgug

SEQ ID NO: 1938249 - RNA, 19 nt, Artificial Sequence
  Description of Artificial Sequence: Synthetic oligonucleotide
cgcccucggaagcacagcg

SEQ ID NO: 1938250 - RNA, 19 nt, Artificial Sequence
  Description of Artificial Sequence: Synthetic oligonucleotide
cccacagcgaagcgcgccc

SEQ ID NO: 1938251 - RNA, 19 nt, Artificial Sequence
  Description of Artificial Sequence: Synthetic oligonucleotide
gguaaugcacuagguccga

SEQ ID NO: 1938252 - RNA, 19 nt, Artificial Sequence
  Description of Artificial Sequence: Synthetic oligonucleotide
gcucgagaucaagcguacg

SEQ ID NO: 1938253 - RNA, 19 nt, Artificial Sequence
  Description of Artificial Sequence: Synthetic oligonucleotide
ggcgcacuagccaccaaca

SEQ ID NO: 1938254 - RNA, 19 nt, Artificial Sequence
  Description of Artificial Sequence: Synthetic oligonucleotide
gcgucucgcccucggaagc

SEQ ID NO: 1938255 - RNA, 19 nt, Artificial Sequence
  Description of Artificial Sequence: Synthetic oligonucleotide
cgcucaaccgcgcggggcg

SEQ ID NO: 1938256 - RNA, 19 nt, Artificial Sequence
  Description of Artificial Sequence: Synthetic oligonucleotide
cccaccgcccagagcauag

SEQ ID NO: 1938257 - RNA, 19 nt, Artificial Sequence
  Description of Artificial Sequence: Synthetic oligonucleotide
gcggcgcucaaccgcgcgg

SEQ ID NO: 1938258 - RNA, 19 nt, Artificial Sequence
  Description of Artificial Sequence: Synthetic oligonucleotide
ccaggcgcgcaaaggaguc

SEQ ID NO: 1938259 - RNA, 19 nt, Artificial Sequence
  Description of Artificial Sequence: Synthetic oligonucleotide
cuggaaggcgccugcgcua

SEQ ID NO: 1938260 - RNA, 19 nt, Artificial Sequence
  Description of Artificial Sequence: Synthetic oligonucleotide
ggcgcggacgcuggaaggc

SEQ ID NO: 1938261 - RNA, 19 nt, Artificial Sequence
  Description of Artificial Sequence: Synthetic oligonucleotide
ccucggaagcacagcgcgc

SEQ ID NO: 1938262 - RNA, 19 nt, Artificial Sequence
  Description of Artificial Sequence: Synthetic oligonucleotide
gcgugcaggcucacgugcg

SEQ ID NO: 1938263 - RNA, 19 nt, Artificial Sequence
  Description of Artificial Sequence: Synthetic oligonucleotide
ugccacgcgcgcagguauu

SEQ ID NO: 1938264 - RNA, 19 nt, Artificial Sequence
  Description of Artificial Sequence: Synthetic oligonucleotide
uacccaccgcccagagcau

SEQ ID NO: 1938265 - RNA, 19 nt, Artificial Sequence
  Description of Artificial Sequence: Synthetic oligonucleotide
gccuaaacaguaauuggau

SEQ ID NO: 1938266 - RNA, 19 nt, Artificial Sequence
  Description of Artificial Sequence: Synthetic oligonucleotide
gaggguggcgcugaccaau

SEQ ID NO: 1938267 - RNA, 19 nt, Artificial Sequence
  Description of Artificial Sequence: Synthetic oligonucleotide
guaaugcacuagguccgaa

SEQ ID NO: 1938268 - RNA, 19 nt, Artificial Sequence
  Description of Artificial Sequence: Synthetic oligonucleotide
ucaaccgcgcggggcgcac

SEQ ID NO: 1938269 - RNA, 19 nt, Artificial Sequence
  Description of Artificial Sequence: Synthetic oligonucleotide
agcgaccuccgggcuugac

SEQ ID NO: 1938270 - RNA, 19 nt, Artificial Sequence
  Description of Artificial Sequence: Synthetic oligonucleotide
gcgcaaaggagucgucguc

SEQ ID NO: 1938271 - RNA, 19 nt, Artificial Sequence
  Description of Artificial Sequence: Synthetic oligonucleotide
gcgcacuagccaccaacac

SEQ ID NO: 1938272 - RNA, 19 nt, Artificial Sequence
  Description of Artificial Sequence: Synthetic oligonucleotide
guagagcauccaggcgcgc

SEQ ID NO: 1938273 - RNA, 19 nt, Artificial Sequence
  Description of Artificial Sequence: Synthetic oligonucleotide
gccgaguacgcaggcgcgg

SEQ ID NO: 1938274 - RNA, 19 nt, Artificial Sequence
  Description of Artificial Sequence: Synthetic oligonucleotide
gugcugcgcaccgcgcugc

SEQ ID NO: 1938275 - RNA, 19 nt, Artificial Sequence
  Description of Artificial Sequence: Synthetic oligonucleotide
ggucgccgaguacgcaggc

SEQ ID NO: 1938276 - RNA, 19 nt, Artificial Sequence
  Description of Artificial Sequence: Synthetic oligonucleotide
cgugauuuguacucugugu

SEQ ID NO: 1938277 - RNA, 19 nt, Artificial Sequence
  Description of Artificial Sequence: Synthetic oligonucleotide
ccgggcuugacucguccac

SEQ ID NO: 1938278 - RNA, 19 nt, Artificial Sequence
  Description of Artificial Sequence: Synthetic oligonucleotide
gcgcagguauucaccacug

SEQ ID NO: 1938279 - RNA, 19 nt, Artificial Sequence
  Description of Artificial Sequence: Synthetic oligonucleotide
cuaggccgcuuagggucag

SEQ ID NO: 1938280 - RNA, 19 nt, Artificial Sequence
  Description of Artificial Sequence: Synthetic oligonucleotide
gccaagcgcgccgaaguac

SEQ ID NO: 1938281 - RNA, 19 nt, Artificial Sequence
  Description of Artificial Sequence: Synthetic oligonucleotide
gggaggucgccgaguacgc

SEQ ID NO: 1938282 - RNA, 19 nt, Artificial Sequence
  Description of Artificial Sequence: Synthetic oligonucleotide
ccccaauagaggcgacggc

SEQ ID NO: 1938283 - RNA, 19 nt, Artificial Sequence
  Description of Artificial Sequence: Synthetic oligonucleotide
ccgcuuagggucagcacca

SEQ ID NO: 1938284 - RNA, 19 nt, Artificial Sequence
  Description of Artificial Sequence: Synthetic oligonucleotide
ccagcgauacaucuucacu

SEQ ID NO: 1938285 - RNA, 19 nt, Artificial Sequence
  Description of Artificial Sequence: Synthetic oligonucleotide
gccgcgccucccuugugcc

SEQ ID NO: 1938286 - RNA, 19 nt, Artificial Sequence
  Description of Artificial Sequence: Synthetic oligonucleotide
ggccgcuuagggucagcac

SEQ ID NO: 1938287 - RNA, 19 nt, Artificial Sequence
  Description of Artificial Sequence: Synthetic oligonucleotide
caggcacccagcgauacau

SEQ ID NO: 1938288 - RNA, 19 nt, Artificial Sequence
  Description of Artificial Sequence: Synthetic oligonucleotide
acccagcgauacaucuuca

SEQ ID NO: 1938289 - RNA, 19 nt, Artificial Sequence
  Description of Artificial Sequence: Synthetic oligonucleotide
cugauuguugcagccccgu

SEQ ID NO: 1938290 - RNA, 19 nt, Artificial Sequence
  Description of Artificial Sequence: Synthetic oligonucleotide
gucucgcccucggaagcac

SEQ ID NO: 1938291 - RNA, 19 nt, Artificial Sequence
  Description of Artificial Sequence: Synthetic oligonucleotide
ggcgcucaaccgcgcgggg

SEQ ID NO: 1938292 - RNA, 19 nt, Artificial Sequence
  Description of Artificial Sequence: Synthetic oligonucleotide
ccccgugauuuguacucug

SEQ ID NO: 1938293 - RNA, 19 nt, Artificial Sequence
  Description of Artificial Sequence: Synthetic oligonucleotide
gccgaaguaccuucauggu

SEQ ID NO: 1938294 - RNA, 19 nt, Artificial Sequence
  Description of Artificial Sequence: Synthetic oligonucleotide
uccccgugcugugcuugcu

SEQ ID NO: 1938295 - RNA, 19 nt, Artificial Sequence
  Description of Artificial Sequence: Synthetic oligonucleotide
cagccacgugcugcgcacc

SEQ ID NO: 1938296 - RNA, 19 nt, Artificial Sequence
  Description of Artificial Sequence: Synthetic oligonucleotide
gcguacgccgcuccucuga

SEQ ID NO: 1938297 - RNA, 19 nt, Artificial Sequence
  Description of Artificial Sequence: Synthetic oligonucleotide
cugcggcgcucaaccgcgc

SEQ ID NO: 1938298 - RNA, 19 nt, Artificial Sequence
  Description of Artificial Sequence: Synthetic oligonucleotide
gaagcacagcgcgccaaau

SEQ ID NO: 1938299 - RNA, 19 nt, Artificial Sequence
  Description of Artificial Sequence: Synthetic oligonucleotide
gcgcggacgcuggaaggcg

SEQ ID NO: 1938300 - RNA, 19 nt, Artificial Sequence
  Description of Artificial Sequence: Synthetic oligonucleotide
ugcgggcgucucgcccucg

SEQ ID NO: 1938301 - RNA, 19 nt, Artificial Sequence
  Description of Artificial Sequence: Synthetic oligonucleotide
ccgcccagagcauagggua

SEQ ID NO: 1938302 - RNA, 19 nt, Artificial Sequence
  Description of Artificial Sequence: Synthetic oligonucleotide
cgcugcacaucaacuggug

SEQ ID NO: 1938303 - RNA, 19 nt, Artificial Sequence
  Description of Artificial Sequence: Synthetic oligonucleotide
gcaucgcgcagggagggca

SEQ ID NO: 1938304 - RNA, 19 nt, Artificial Sequence
  Description of Artificial Sequence: Synthetic oligonucleotide
cgcaauugcaccucuugcu

SEQ ID NO: 1938305 - RNA, 19 nt, Artificial Sequence
  Description of Artificial Sequence: Synthetic oligonucleotide
gcgcgccaaauacaacaga

SEQ ID NO: 1938306 - RNA, 19 nt, Artificial Sequence
  Description of Artificial Sequence: Synthetic oligonucleotide
aggagucgucgucggccuu

SEQ ID NO: 1938307 - RNA, 19 nt, Artificial Sequence
  Description of Artificial Sequence: Synthetic oligonucleotide
gcccacagcgaagcgcgcc

SEQ ID NO: 1938308 - RNA, 19 nt, Artificial Sequence
  Description of Artificial Sequence: Synthetic oligonucleotide
cguacgccgcuccucugag

SEQ ID NO: 1938309 - RNA, 19 nt, Artificial Sequence
  Description of Artificial Sequence: Synthetic oligonucleotide
gugccacgcgcgcagguau

SEQ ID NO: 1938310 - RNA, 19 nt, Artificial Sequence
  Description of Artificial Sequence: Synthetic oligonucleotide
gcucacgugcgcguagcuc

SEQ ID NO: 1938311 - RNA, 19 nt, Artificial Sequence
  Description of Artificial Sequence: Synthetic oligonucleotide
gcacagcgcgccaaauaca

SEQ ID NO: 1938312 - RNA, 19 nt, Artificial Sequence
  Description of Artificial Sequence: Synthetic oligonucleotide
cacgugcgcguagcuccgc

SEQ ID NO: 1938313 - RNA, 19 nt, Artificial Sequence
  Description of Artificial Sequence: Synthetic oligonucleotide
gccaggcacccagcgauac

SEQ ID NO: 1938314 - RNA, 19 nt, Artificial Sequence
  Description of Artificial Sequence: Synthetic oligonucleotide
gcuaggccgcuuaggguca

SEQ ID NO: 1938315 - RNA, 19 nt, Artificial Sequence
  Description of Artificial Sequence: Synthetic oligonucleotide
cagcucaccccagacaauu

SEQ ID NO: 1938316 - RNA, 19 nt, Artificial Sequence
  Description of Artificial Sequence: Synthetic oligonucleotide
ccucgugaagcagcaucug

SEQ ID NO: 1938317 - RNA, 19 nt, Artificial Sequence
  Description of Artificial Sequence: Synthetic oligonucleotide
cgggcuugacucguccacg

SEQ ID NO: 1938318 - RNA, 19 nt, Artificial Sequence
  Description of Artificial Sequence: Synthetic oligonucleotide
cgccgaguacgcaggcgcg

SEQ ID NO: 1938319 - RNA, 19 nt, Artificial Sequence
  Description of Artificial Sequence: Synthetic oligonucleotide
ccuccuugcgcuggcagca

SEQ ID NO: 1938320 - RNA, 19 nt, Artificial Sequence
  Description of Artificial Sequence: Synthetic oligonucleotide
ggccuuagcgcgggguuga

SEQ ID NO: 1938321 - RNA, 19 nt, Artificial Sequence
  Description of Artificial Sequence: Synthetic oligonucleotide
ccuuagcgcgggguugagc

SEQ ID NO: 1938322 - RNA, 19 nt, Artificial Sequence
  Description of Artificial Sequence: Synthetic oligonucleotide
gcgaagcgcgcccacacau

SEQ ID NO: 1938323 - RNA, 19 nt, Artificial Sequence
  Description of Artificial Sequence: Synthetic oligonucleotide
gcgaccuccgggcuugacu

SEQ ID NO: 1938324 - RNA, 19 nt, Artificial Sequence
  Description of Artificial Sequence: Synthetic oligonucleotide
cagcuuggccuguguccga

SEQ ID NO: 1938325 - RNA, 19 nt, Artificial Sequence
  Description of Artificial Sequence: Synthetic oligonucleotide
agguccccgugcugugcuu

SEQ ID NO: 1938326 - RNA, 19 nt, Artificial Sequence
  Description of Artificial Sequence: Synthetic oligonucleotide
caagcgcgccgaaguaccu

SEQ ID NO: 1938327 - RNA, 19 nt, Artificial Sequence
  Description of Artificial Sequence: Synthetic oligonucleotide
gcgccaaauacaacagagu

SEQ ID NO: 1938328 - RNA, 19 nt, Artificial Sequence
  Description of Artificial Sequence: Synthetic oligonucleotide
gccgccaagcgcgccgaag

SEQ ID NO: 1938329 - RNA, 19 nt, Artificial Sequence
  Description of Artificial Sequence: Synthetic oligonucleotide
gcgcgcagguauucaccac

SEQ ID NO: 1938330 - RNA, 19 nt, Artificial Sequence
  Description of Artificial Sequence: Synthetic oligonucleotide
gcggacgcuggaaggcgcc

SEQ ID NO: 1938331 - RNA, 19 nt, Artificial Sequence
  Description of Artificial Sequence: Synthetic oligonucleotide
accgcgcggggcgcacuag

SEQ ID NO: 1938332 - RNA, 19 nt, Artificial Sequence
  Description of Artificial Sequence: Synthetic oligonucleotide
gcuuagggucagcaccacu

SEQ ID NO: 1938333 - RNA, 19 nt, Artificial Sequence
  Description of Artificial Sequence: Synthetic oligonucleotide
cugcgggcgucucgcccuc

SEQ ID NO: 1938334 - RNA, 19 nt, Artificial Sequence
  Description of Artificial Sequence: Synthetic oligonucleotide
gcgcucaaccgcgcggggc

SEQ ID NO: 1938335 - RNA, 19 nt, Artificial Sequence
  Description of Artificial Sequence: Synthetic oligonucleotide
gcacgaacucgaaguccac

SEQ ID NO: 1938336 - RNA, 19 nt, Artificial Sequence
  Description of Artificial Sequence: Synthetic oligonucleotide
cgcggacgcuggaaggcgc

SEQ ID NO: 1938337 - RNA, 19 nt, Artificial Sequence
  Description of Artificial Sequence: Synthetic oligonucleotide
ccuccgggcucuguuugug

SEQ ID NO: 1938338 - RNA, 19 nt, Artificial Sequence
  Description of Artificial Sequence: Synthetic oligonucleotide
cgcacuagccaccaacacu

SEQ ID NO: 1938339 - RNA, 19 nt, Artificial Sequence
  Description of Artificial Sequence: Synthetic oligonucleotide
cgaagcgcgcccacacauc

SEQ ID NO: 1938340 - RNA, 19 nt, Artificial Sequence
  Description of Artificial Sequence: Synthetic oligonucleotide
cgugcugcgcaccgcgcug

SEQ ID NO: 1938341 - RNA, 19 nt, Artificial Sequence
  Description of Artificial Sequence: Synthetic oligonucleotide
cgcgcggggcgcacuagcc

SEQ ID NO: 1938342 - RNA, 19 nt, Artificial Sequence
  Description of Artificial Sequence: Synthetic oligonucleotide
acccaccgcccagagcaua

SEQ ID NO: 1938343 - RNA, 19 nt, Artificial Sequence
  Description of Artificial Sequence: Synthetic oligonucleotide
gcugcgcaccgcgcugcgg

SEQ ID NO: 1938344 - RNA, 19 nt, Artificial Sequence
  Description of Artificial Sequence: Synthetic oligonucleotide
ggaggucgccgaguacgca

SEQ ID NO: 1938345 - RNA, 19 nt, Artificial Sequence
  Description of Artificial Sequence: Synthetic oligonucleotide
cgugagguucucguaggca

SEQ ID NO: 1938346 - RNA, 19 nt, Artificial Sequence
  Description of Artificial Sequence: Synthetic oligonucleotide
cucaaccgcgcggggcgca

SEQ ID NO: 1938347 - RNA, 19 nt, Artificial Sequence
  Description of Artificial Sequence: Synthetic oligonucleotide
ccaccgcccagagcauagg

SEQ ID NO: 1938348 - RNA, 19 nt, Artificial Sequence
  Description of Artificial Sequence: Synthetic oligonucleotide
agccaggcacccagcgaua

SEQ ID NO: 1938349 - RNA, 19 nt, Artificial Sequence
  Description of Artificial Sequence: Synthetic oligonucleotide
cccgugauuuguacucugu

SEQ ID NO: 1938350 - RNA, 19 nt, Artificial Sequence
  Description of Artificial Sequence: Synthetic oligonucleotide
guguuaccagguacugauu

SEQ ID NO: 1938351 - RNA, 19 nt, Artificial Sequence
  Description of Artificial Sequence: Synthetic oligonucleotide
aggcgcaauugcaccucuu

SEQ ID NO: 1938352 - RNA, 19 nt, Artificial Sequence
  Description of Artificial Sequence: Synthetic oligonucleotide
ccagagcauaggguaagua

SEQ ID NO: 1938353 - RNA, 19 nt, Artificial Sequence
  Description of Artificial Sequence: Synthetic oligonucleotide
ccgcgcggggcgcacuagc

SEQ ID NO: 1938354 - RNA, 19 nt, Artificial Sequence
  Description of Artificial Sequence: Synthetic oligonucleotide
gcucaaccgcgcggggcgc

SEQ ID NO: 1938355 - RNA, 19 nt, Artificial Sequence
  Description of Artificial Sequence: Synthetic oligonucleotide
gccacgcgcgcagguauuc

SEQ ID NO: 1938356 - RNA, 19 nt, Artificial Sequence
  Description of Artificial Sequence: Synthetic oligonucleotide
gcgggaggucgccgaguac

SEQ ID NO: 1938357 - RNA, 19 nt, Artificial Sequence
  Description of Artificial Sequence: Synthetic oligonucleotide
cugugccacgcgcgcaggu

SEQ ID NO: 1938358 - RNA, 19 nt, Artificial Sequence
  Description of Artificial Sequence: Synthetic oligonucleotide
gccuuagcgcgggguugag

SEQ ID NO: 1938359 - RNA, 19 nt, Artificial Sequence
  Description of Artificial Sequence: Synthetic oligonucleotide
cccuugugccagccacgug

SEQ ID NO: 1938360 - RNA, 19 nt, Artificial Sequence
  Description of Artificial Sequence: Synthetic oligonucleotide
gcggggcgcacuagccacc

SEQ ID NO: 1938361 - RNA, 19 nt, Artificial Sequence
  Description of Artificial Sequence: Synthetic oligonucleotide
ccgcugcacaucaacuggu

SEQ ID NO: 1938362 - RNA, 19 nt, Artificial Sequence
  Description of Artificial Sequence: Synthetic oligonucleotide
ccgaguacgcaggcgcgga

SEQ ID NO: 1938363 - RNA, 19 nt, Artificial Sequence
  Description of Artificial Sequence: Synthetic oligonucleotide
cgucgucggccuugagcac

SEQ ID NO: 1938364 - RNA, 19 nt, Artificial Sequence
  Description of Artificial Sequence: Synthetic oligonucleotide
ccgugcugugcuugcucga

SEQ ID NO: 1938365 - RNA, 19 nt, Artificial Sequence
  Description of Artificial Sequence: Synthetic oligonucleotide
ggcucacgugcgcguagcu

SEQ ID NO: 1938366 - RNA, 19 nt, Artificial Sequence
  Description of Artificial Sequence: Synthetic oligonucleotide
ccgccaagcgcgccgaagu

SEQ ID NO: 1938367 - RNA, 19 nt, Artificial Sequence
  Description of Artificial Sequence: Synthetic oligonucleotide
gcgcguagcuccgccagua

SEQ ID NO: 1938368 - RNA, 19 nt, Artificial Sequence
  Description of Artificial Sequence: Synthetic oligonucleotide
ggcgcgcaaaggagucguc

SEQ ID NO: 1938369 - RNA, 19 nt, Artificial Sequence
  Description of Artificial Sequence: Synthetic oligonucleotide
gcaggcucacgugcgcgua

SEQ ID NO: 1938370 - RNA, 19 nt, Artificial Sequence
  Description of Artificial Sequence: Synthetic oligonucleotide
gggcucuguuuguguguua

SEQ ID NO: 1938371 - RNA, 19 nt, Artificial Sequence
  Description of Artificial Sequence: Synthetic oligonucleotide
cgugcgcguagcuccgcca

SEQ ID NO: 1938372 - RNA, 19 nt, Artificial Sequence
  Description of Artificial Sequence: Synthetic oligonucleotide
ccgggcucuguuugugugu

SEQ ID NO: 1938373 - RNA, 19 nt, Artificial Sequence
  Description of Artificial Sequence: Synthetic oligonucleotide
gccccgugauuuguacucu

SEQ ID NO: 1938374 - RNA, 19 nt, Artificial Sequence
  Description of Artificial Sequence: Synthetic oligonucleotide
gcgcgccgaaguaccuuca

SEQ ID NO: 1938375 - RNA, 19 nt, Artificial Sequence
  Description of Artificial Sequence: Synthetic oligonucleotide
ccacgcgcgcagguauuca

SEQ ID NO: 1938376 - RNA, 19 nt, Artificial Sequence
  Description of Artificial Sequence: Synthetic oligonucleotide
gccagcgaccuccgggcuu

SEQ ID NO: 1938377 - RNA, 19 nt, Artificial Sequence
  Description of Artificial Sequence: Synthetic oligonucleotide
ccacugaggcgcagguaau

SEQ ID NO: 1938378 - RNA, 19 nt, Artificial Sequence
  Description of Artificial Sequence: Synthetic oligonucleotide
cgucucgcccucggaagca

SEQ ID NO: 1938379 - RNA, 19 nt, Artificial Sequence
  Description of Artificial Sequence: Synthetic oligonucleotide
ggaaggcgccugcgcuacu

SEQ ID NO: 1938380 - RNA, 19 nt, Artificial Sequence
  Description of Artificial Sequence: Synthetic oligonucleotide
ggggcgcacuagccaccaa

SEQ ID NO: 1938381 - RNA, 19 nt, Artificial Sequence
  Description of Artificial Sequence: Synthetic oligonucleotide
cgugggucgugcucccgcu

SEQ ID NO: 1938382 - RNA, 19 nt, Artificial Sequence
  Description of Artificial Sequence: Synthetic oligonucleotide
ccuuagggccgccgcgccu

SEQ ID NO: 1938383 - RNA, 19 nt, Artificial Sequence
  Description of Artificial Sequence: Synthetic oligonucleotide
cgccucccuugugccagcc

SEQ ID NO: 1938384 - RNA, 19 nt, Artificial Sequence
  Description of Artificial Sequence: Synthetic oligonucleotide
ccgcgcugcggcgcucaac

SEQ ID NO: 1938385 - RNA, 19 nt, Artificial Sequence
  Description of Artificial Sequence: Synthetic oligonucleotide
cgccaagcgcgccgaagua

SEQ ID NO: 1938386 - RNA, 19 nt, Artificial Sequence
  Description of Artificial Sequence: Synthetic oligonucleotide
caaccgcgcggggcgcacu

SEQ ID NO: 1938387 - RNA, 19 nt, Artificial Sequence
  Description of Artificial Sequence: Synthetic oligonucleotide
ccgccgcgccucccuugug

SEQ ID NO: 1938388 - RNA, 19 nt, Artificial Sequence
  Description of Artificial Sequence: Synthetic oligonucleotide
gcgcgggguugagcggcuc

SEQ ID NO: 1938389 - RNA, 19 nt, Artificial Sequence
  Description of Artificial Sequence: Synthetic oligonucleotide
cguaggcaucgcgcaggga

SEQ ID NO: 1938390 - RNA, 19 nt, Artificial Sequence
  Description of Artificial Sequence: Synthetic oligonucleotide
gcaccgcgcugcggcgcuc

SEQ ID NO: 1938391 - RNA, 19 nt, Artificial Sequence
  Description of Artificial Sequence: Synthetic oligonucleotide
cgggcucuguuuguguguu

SEQ ID NO: 1938392 - RNA, 19 nt, Artificial Sequence
  Description of Artificial Sequence: Synthetic oligonucleotide
cgcgccgaaguaccuucau

SEQ ID NO: 1938393 - RNA, 19 nt, Artificial Sequence
  Description of Artificial Sequence: Synthetic oligonucleotide
cgccagcgaccuccgggcu

SEQ ID NO: 1938394 - RNA, 19 nt, Artificial Sequence
  Description of Artificial Sequence: Synthetic oligonucleotide
cggcggcgugcaggcucac

SEQ ID NO: 1938395 - RNA, 19 nt, Artificial Sequence
  Description of Artificial Sequence: Synthetic oligonucleotide
acuucuagauuguugaugc

SEQ ID NO: 1938396 - RNA, 19 nt, Artificial Sequence
  Description of Artificial Sequence: Synthetic oligonucleotide
aacauucucauugaaacgg

SEQ ID NO: 1938397 - RNA, 19 nt, Artificial Sequence
  Description of Artificial Sequence: Synthetic oligonucleotide
uacuacaacauucucauug

SEQ ID NO: 1938398 - RNA, 19 nt, Artificial Sequence
  Description of Artificial Sequence: Synthetic oligonucleotide
ugaaaagcgacauccaucc

SEQ ID NO: 1938399 - RNA, 19 nt, Artificial Sequence
  Description of Artificial Sequence: Synthetic oligonucleotide
auacccuccaucuucaaac

SEQ ID NO: 1938400 - RNA, 19 nt, Artificial Sequence
  Description of Artificial Sequence: Synthetic oligonucleotide
uggauuauuccagaaaacg

SEQ ID NO: 1938401 - RNA, 19 nt, Artificial Sequence
  Description of Artificial Sequence: Synthetic oligonucleotide
gaagcauugguccaggggc

SEQ ID NO: 1938402 - RNA, 19 nt, Artificial Sequence
  Description of Artificial Sequence: Synthetic oligonucleotide
uccacggaaaccuugaagc

SEQ ID NO: 1938403 - RNA, 19 nt, Artificial Sequence
  Description of Artificial Sequence: Synthetic oligonucleotide
aggaagguaaguucaaagg

SEQ ID NO: 1938404 - RNA, 19 nt, Artificial Sequence
  Description of Artificial Sequence: Synthetic oligonucleotide
aaaagcgacauccauccca

SEQ ID NO: 1938405 - RNA, 19 nt, Artificial Sequence
  Description of Artificial Sequence: Synthetic oligonucleotide
gaaaccuugaagcagugac

SEQ ID NO: 1938406 - RNA, 19 nt, Artificial Sequence
  Description of Artificial Sequence: Synthetic oligonucleotide
uggcaagugcuucagacgg

SEQ ID NO: 1938407 - RNA, 19 nt, Artificial Sequence
  Description of Artificial Sequence: Synthetic oligonucleotide
augaugauggacuuggaug

SEQ ID NO: 1938408 - RNA, 19 nt, Artificial Sequence
  Description of Artificial Sequence: Synthetic oligonucleotide
uuucauugaggccagucug

SEQ ID NO: 1938409 - RNA, 19 nt, Artificial Sequence
  Description of Artificial Sequence: Synthetic oligonucleotide
uuugcagaggcguggacgg

SEQ ID NO: 1938410 - RNA, 19 nt, Artificial Sequence
  Description of Artificial Sequence: Synthetic oligonucleotide
gugacuuucacacaggauc

SEQ ID NO: 1938411 - RNA, 19 nt, Artificial Sequence
  Description of Artificial Sequence: Synthetic oligonucleotide
cuuggauggguaaagcccg

SEQ ID NO: 1938412 - RNA, 19 nt, Artificial Sequence
  Description of Artificial Sequence: Synthetic oligonucleotide
aaccucuuagcauugggca

SEQ ID NO: 1938413 - RNA, 19 nt, Artificial Sequence
  Description of Artificial Sequence: Synthetic oligonucleotide
acuuggauggguaaagccc

SEQ ID NO: 1938414 - RNA, 19 nt, Artificial Sequence
  Description of Artificial Sequence: Synthetic oligonucleotide
ggaagguaaguucaaaggg

SEQ ID NO: 1938415 - RNA, 19 nt, Artificial Sequence
  Description of Artificial Sequence: Synthetic oligonucleotide
gaaacggggauucagguga

SEQ ID NO: 1938416 - RNA, 19 nt, Artificial Sequence
  Description of Artificial Sequence: Synthetic oligonucleotide
gacguaaucacacaggugu

SEQ ID NO: 1938417 - RNA, 19 nt, Artificial Sequence
  Description of Artificial Sequence: Synthetic oligonucleotide
ugacuuucacacaggaucc

SEQ ID NO: 1938418 - RNA, 19 nt, Artificial Sequence
  Description of Artificial Sequence: Synthetic oligonucleotide
uauaccacgggcuggauuc

SEQ ID NO: 1938419 - RNA, 19 nt, Artificial Sequence
  Description of Artificial Sequence: Synthetic oligonucleotide
uuagcauugggcaggacaa

SEQ ID NO: 1938420 - RNA, 19 nt, Artificial Sequence
  Description of Artificial Sequence: Synthetic oligonucleotide
gaggugguaggguacacgg

SEQ ID NO: 1938421 - RNA, 19 nt, Artificial Sequence
  Description of Artificial Sequence: Synthetic oligonucleotide
ggcaaugucguuuucauug

SEQ ID NO: 1938422 - RNA, 19 nt, Artificial Sequence
  Description of Artificial Sequence: Synthetic oligonucleotide
aauugcacuguggagaaga

SEQ ID NO: 1938423 - RNA, 19 nt, Artificial Sequence
  Description of Artificial Sequence: Synthetic oligonucleotide
ucguacuacaacauucuca

SEQ ID NO: 1938424 - RNA, 19 nt, Artificial Sequence
  Description of Artificial Sequence: Synthetic oligonucleotide
acuguagugggguauacca

SEQ ID NO: 1938425 - RNA, 19 nt, Artificial Sequence
  Description of Artificial Sequence: Synthetic oligonucleotide
uuacagaccacauacccuc

SEQ ID NO: 1938426 - RNA, 19 nt, Artificial Sequence
  Description of Artificial Sequence: Synthetic oligonucleotide
uuucguacuacaacauucu

SEQ ID NO: 1938427 - RNA, 19 nt, Artificial Sequence
  Description of Artificial Sequence: Synthetic oligonucleotide
aaguucaaagggccucccc

SEQ ID NO: 1938428 - RNA, 19 nt, Artificial Sequence
  Description of Artificial Sequence: Synthetic oligonucleotide
ggaaucaccacucucuucc

SEQ ID NO: 1938429 - RNA, 19 nt, Artificial Sequence
  Description of Artificial Sequence: Synthetic oligonucleotide
aaucuuauuugcagaggcg

SEQ ID NO: 1938430 - RNA, 19 nt, Artificial Sequence
  Description of Artificial Sequence: Synthetic oligonucleotide
gacaguuugagccacaggu

SEQ ID NO: 1938431 - RNA, 19 nt, Artificial Sequence
  Description of Artificial Sequence: Synthetic oligonucleotide
ugcaggauagacuguagug

SEQ ID NO: 1938432 - RNA, 19 nt, Artificial Sequence
  Description of Artificial Sequence: Synthetic oligonucleotide
agagcgaagguugaugugg

SEQ ID NO: 1938433 - RNA, 19 nt, Artificial Sequence
  Description of Artificial Sequence: Synthetic oligonucleotide
uggacguaaucacacaggu

SEQ ID NO: 1938434 - RNA, 19 nt, Artificial Sequence
  Description of Artificial Sequence: Synthetic oligonucleotide
caggauagacuguaguggg

SEQ ID NO: 1938435 - RNA, 19 nt, Artificial Sequence
  Description of Artificial Sequence: Synthetic oligonucleotide
gagagaauugcacugugga

SEQ ID NO: 1938436 - RNA, 19 nt, Artificial Sequence
  Description of Artificial Sequence: Synthetic oligonucleotide
uuggguguugaagaaagcc

SEQ ID NO: 1938437 - RNA, 19 nt, Artificial Sequence
  Description of Artificial Sequence: Synthetic oligonucleotide
gauggguaaagcccguuug

SEQ ID NO: 1938438 - RNA, 19 nt, Artificial Sequence
  Description of Artificial Sequence: Synthetic oligonucleotide
cagaaaacgggaugggcgg

SEQ ID NO: 1938439 - RNA, 19 nt, Artificial Sequence
  Description of Artificial Sequence: Synthetic oligonucleotide
uguggaaccucuuagcauu

SEQ ID NO: 1938440 - RNA, 19 nt, Artificial Sequence
  Description of Artificial Sequence: Synthetic oligonucleotide
gagaauugcacuguggaga

SEQ ID NO: 1938441 - RNA, 19 nt, Artificial Sequence
  Description of Artificial Sequence: Synthetic oligonucleotide
ugaggaaaggugcaggaua

SEQ ID NO: 1938442 - RNA, 19 nt, Artificial Sequence
  Description of Artificial Sequence: Synthetic oligonucleotide
ugaacucugaccucugcac

SEQ ID NO: 1938443 - RNA, 19 nt, Artificial Sequence
  Description of Artificial Sequence: Synthetic oligonucleotide
ucuuauuugcagaggcgug

SEQ ID NO: 1938444 - RNA, 19 nt, Artificial Sequence
  Description of Artificial Sequence: Synthetic oligonucleotide
gacuuggauggguaaagcc

SEQ ID NO: 1938445 - RNA, 19 nt, Artificial Sequence
  Description of Artificial Sequence: Synthetic oligonucleotide
ugaagcagugacuuucaca

SEQ ID NO: 1938446 - RNA, 19 nt, Artificial Sequence
  Description of Artificial Sequence: Synthetic oligonucleotide
ugugaguacugcacaaaga

SEQ ID NO: 1938447 - RNA, 19 nt, Artificial Sequence
  Description of Artificial Sequence: Synthetic oligonucleotide
agagaauugcacuguggag

SEQ ID NO: 1938448 - RNA, 19 nt, Artificial Sequence
  Description of Artificial Sequence: Synthetic oligonucleotide
auuugcagaggcguggacg

SEQ ID NO: 1938449 - RNA, 19 nt, Artificial Sequence
  Description of Artificial Sequence: Synthetic oligonucleotide
gauguggaaccucuuagca

SEQ ID NO: 1938450 - RNA, 19 nt, Artificial Sequence
  Description of Artificial Sequence: Synthetic oligonucleotide
ucaaaccggggauugaagu

SEQ ID NO: 1938451 - RNA, 19 nt, Artificial Sequence
  Description of Artificial Sequence: Synthetic oligonucleotide
ugauguggaaccucuuagc

SEQ ID NO: 1938452 - RNA, 19 nt, Artificial Sequence
  Description of Artificial Sequence: Synthetic oligonucleotide
acuacaacauucucauuga

SEQ ID NO: 1938453 - RNA, 19 nt, Artificial Sequence
  Description of Artificial Sequence: Synthetic oligonucleotide
cuuauuugcagaggcgugg

SEQ ID NO: 1938454 - RNA, 19 nt, Artificial Sequence
  Description of Artificial Sequence: Synthetic oligonucleotide
auugaaacggggauucagg

SEQ ID NO: 1938455 - RNA, 19 nt, Artificial Sequence
  Description of Artificial Sequence: Synthetic oligonucleotide
uuuccaaccagauuucguu

SEQ ID NO: 1938456 - RNA, 19 nt, Artificial Sequence
  Description of Artificial Sequence: Synthetic oligonucleotide
ggauuauuccagaaaacgg

SEQ ID NO: 1938457 - RNA, 19 nt, Artificial Sequence
  Description of Artificial Sequence: Synthetic oligonucleotide
aaagcgacauccaucccag

SEQ ID NO: 1938458 - RNA, 19 nt, Artificial Sequence
  Description of Artificial Sequence: Synthetic oligonucleotide
agauuucguuccucgggcc

SEQ ID NO: 1938459 - RNA, 19 nt, Artificial Sequence
  Description of Artificial Sequence: Synthetic oligonucleotide
ugaucugaagucccucuug

SEQ ID NO: 1938460 - RNA, 19 nt, Artificial Sequence
  Description of Artificial Sequence: Synthetic oligonucleotide
gucguuuucauugaggcca

SEQ ID NO: 1938461 - RNA, 19 nt, Artificial Sequence
  Description of Artificial Sequence: Synthetic oligonucleotide
agacgguggacguaaucac

SEQ ID NO: 1938462 - RNA, 19 nt, Artificial Sequence
  Description of Artificial Sequence: Synthetic oligonucleotide
augccugcuaugaugaugg

SEQ ID NO: 1938463 - RNA, 19 nt, Artificial Sequence
  Description of Artificial Sequence: Synthetic oligonucleotide
aaugccugcuaugaugaug

SEQ ID NO: 1938464 - RNA, 19 nt, Artificial Sequence
  Description of Artificial Sequence: Synthetic oligonucleotide
agcgacauccaucccagag

SEQ ID NO: 1938465 - RNA, 19 nt, Artificial Sequence
  Description of Artificial Sequence: Synthetic oligonucleotide
aguucaaagggccuccccu

SEQ ID NO: 1938466 - RNA, 19 nt, Artificial Sequence
  Description of Artificial Sequence: Synthetic oligonucleotide
aacuguguggaugacaguu

SEQ ID NO: 1938467 - RNA, 19 nt, Artificial Sequence
  Description of Artificial Sequence: Synthetic oligonucleotide
ucaccugccacuucuagau

SEQ ID NO: 1938468 - RNA, 19 nt, Artificial Sequence
  Description of Artificial Sequence: Synthetic oligonucleotide
uggauggugaucugaaguc

SEQ ID NO: 1938469 - RNA, 19 nt, Artificial Sequence
  Description of Artificial Sequence: Synthetic oligonucleotide
uucaaaccggggauugaag

SEQ ID NO: 1938470 - RNA, 19 nt, Artificial Sequence
  Description of Artificial Sequence: Synthetic oligonucleotide
caucccagagcgaagguug

SEQ ID NO: 1938471 - RNA, 19 nt, Artificial Sequence
  Description of Artificial Sequence: Synthetic oligonucleotide
gugaguacugcacaaagaa

SEQ ID NO: 1938472 - RNA, 19 nt, Artificial Sequence
  Description of Artificial Sequence: Synthetic oligonucleotide
gguguuucguacuacaaca

SEQ ID NO: 1938473 - RNA, 19 nt, Artificial Sequence
  Description of Artificial Sequence: Synthetic oligonucleotide
uaugccuguacguggguca

SEQ ID NO: 1938474 - RNA, 19 nt, Artificial Sequence
  Description of Artificial Sequence: Synthetic oligonucleotide
ucuggccgcaacugaaggg

SEQ ID NO: 1938475 - RNA, 19 nt, Artificial Sequence
  Description of Artificial Sequence: Synthetic oligonucleotide
guuucguacuacaacauuc

SEQ ID NO: 1938476 - RNA, 19 nt, Artificial Sequence
  Description of Artificial Sequence: Synthetic oligonucleotide
gauucaggugaaaagcgac

SEQ ID NO: 1938477 - RNA, 19 nt, Artificial Sequence
  Description of Artificial Sequence: Synthetic oligonucleotide
guaaucuuauuugcagagg

SEQ ID NO: 1938478 - RNA, 19 nt, Artificial Sequence
  Description of Artificial Sequence: Synthetic oligonucleotide
uguggaugacaguuugagc

SEQ ID NO: 1938479 - RNA, 19 nt, Artificial Sequence
  Description of Artificial Sequence: Synthetic oligonucleotide
gaacucugaccucugcacc

SEQ ID NO: 1938480 - RNA, 19 nt, Artificial Sequence
  Description of Artificial Sequence: Synthetic oligonucleotide
cagauuucguuccucgggc

SEQ ID NO: 1938481 - RNA, 19 nt, Artificial Sequence
  Description of Artificial Sequence: Synthetic oligonucleotide
ugccuaugccuguacgugg

SEQ ID NO: 1938482 - RNA, 19 nt, Artificial Sequence
  Description of Artificial Sequence: Synthetic oligonucleotide
aaagggccuccccuucugg

SEQ ID NO: 1938483 - RNA, 19 nt, Artificial Sequence
  Description of Artificial Sequence: Synthetic oligonucleotide
aucuuauuugcagaggcgu

SEQ ID NO: 1938484 - RNA, 19 nt, Artificial Sequence
  Description of Artificial Sequence: Synthetic oligonucleotide
cuggcaagugcuucagacg

SEQ ID NO: 1938485 - RNA, 19 nt, Artificial Sequence
  Description of Artificial Sequence: Synthetic oligonucleotide
cacguagggagcuugggug

SEQ ID NO: 1938486 - RNA, 19 nt, Artificial Sequence
  Description of Artificial Sequence: Synthetic oligonucleotide
ccagaaaacgggaugggcg

SEQ ID NO: 1938487 - RNA, 19 nt, Artificial Sequence
  Description of Artificial Sequence: Synthetic oligonucleotide
gauuucguuccucgggccc

SEQ ID NO: 1938488 - RNA, 19 nt, Artificial Sequence
  Description of Artificial Sequence: Synthetic oligonucleotide
aaguucuuguucaccauca

SEQ ID NO: 1938489 - RNA, 19 nt, Artificial Sequence
  Description of Artificial Sequence: Synthetic oligonucleotide
ugucguuuucauugaggcc

SEQ ID NO: 1938490 - RNA, 19 nt, Artificial Sequence
  Description of Artificial Sequence: Synthetic oligonucleotide
aagccaucucuccucucuc

SEQ ID NO: 1938491 - RNA, 19 nt, Artificial Sequence
  Description of Artificial Sequence: Synthetic oligonucleotide
uuauuccagaaaacgggau

SEQ ID NO: 1938492 - RNA, 19 nt, Artificial Sequence
  Description of Artificial Sequence: Synthetic oligonucleotide
agguguugcccauccacgg

SEQ ID NO: 1938493 - RNA, 19 nt, Artificial Sequence
  Description of Artificial Sequence: Synthetic oligonucleotide
ugacaguuugagccacagg

SEQ ID NO: 1938494 - RNA, 19 nt, Artificial Sequence
  Description of Artificial Sequence: Synthetic oligonucleotide
auuucguuccucgggcccc

SEQ ID NO: 1938495 - RNA, 19 nt, Artificial Sequence
  Description of Artificial Sequence: Synthetic oligonucleotide
cugguggacaggccgaacg

SEQ ID NO: 1938496 - RNA, 19 nt, Artificial Sequence
  Description of Artificial Sequence: Synthetic oligonucleotide
gaugggcggguucacguag

SEQ ID NO: 1938497 - RNA, 19 nt, Artificial Sequence
  Description of Artificial Sequence: Synthetic oligonucleotide
caaaccggggauugaagug

SEQ ID NO: 1938498 - RNA, 19 nt, Artificial Sequence
  Description of Artificial Sequence: Synthetic oligonucleotide
accucuuagcauugggcag

SEQ ID NO: 1938499 - RNA, 19 nt, Artificial Sequence
  Description of Artificial Sequence: Synthetic oligonucleotide
ggcggguucacguagggag

SEQ ID NO: 1938500 - RNA, 19 nt, Artificial Sequence
  Description of Artificial Sequence: Synthetic oligonucleotide
aaccuugaagcagugacuu

SEQ ID NO: 1938501 - RNA, 19 nt, Artificial Sequence
  Description of Artificial Sequence: Synthetic oligonucleotide
gauuguugaugccuggcaa

SEQ ID NO: 1938502 - RNA, 19 nt, Artificial Sequence
  Description of Artificial Sequence: Synthetic oligonucleotide
cauugggcaggacaaugcc

SEQ ID NO: 1938503 - RNA, 19 nt, Artificial Sequence
  Description of Artificial Sequence: Synthetic oligonucleotide
cagguguugcccauccacg

SEQ ID NO: 1938504 - RNA, 19 nt, Artificial Sequence
  Description of Artificial Sequence: Synthetic oligonucleotide
uugaagugaaaggcaaugu

SEQ ID NO: 1938505 - RNA, 19 nt, Artificial Sequence
  Description of Artificial Sequence: Synthetic oligonucleotide
cucauugaaacggggauuc

SEQ ID NO: 1938506 - RNA, 19 nt, Artificial Sequence
  Description of Artificial Sequence: Synthetic oligonucleotide
uguuucguacuacaacauu

SEQ ID NO: 1938507 - RNA, 19 nt, Artificial Sequence
  Description of Artificial Sequence: Synthetic oligonucleotide
ggggauugaagugaaaggc

SEQ ID NO: 1938508 - RNA, 19 nt, Artificial Sequence
  Description of Artificial Sequence: Synthetic oligonucleotide
aaaccuugaagcagugacu

SEQ ID NO: 1938509 - RNA, 19 nt, Artificial Sequence
  Description of Artificial Sequence: Synthetic oligonucleotide
cauugaaacggggauucag

SEQ ID NO: 1938510 - RNA, 19 nt, Artificial Sequence
  Description of Artificial Sequence: Synthetic oligonucleotide
ucacguagggagcuugggu

SEQ ID NO: 1938511 - RNA, 19 nt, Artificial Sequence
  Description of Artificial Sequence: Synthetic oligonucleotide
aaacgggaugggcggguuc

SEQ ID NO: 1938512 - RNA, 19 nt, Artificial Sequence
  Description of Artificial Sequence: Synthetic oligonucleotide
guguccacgaggugguagg

SEQ ID NO: 1938513 - RNA, 19 nt, Artificial Sequence
  Description of Artificial Sequence: Synthetic oligonucleotide
guaggguacacggugugag

SEQ ID NO: 1938514 - RNA, 19 nt, Artificial Sequence
  Description of Artificial Sequence: Synthetic oligonucleotide
acgguggacguaaucacac

SEQ ID NO: 1938515 - RNA, 19 nt, Artificial Sequence
  Description of Artificial Sequence: Synthetic oligonucleotide
uguguggaugacaguuuga

SEQ ID NO: 1938516 - RNA, 19 nt, Artificial Sequence
  Description of Artificial Sequence: Synthetic oligonucleotide
cuuuguguuacagaccaca

SEQ ID NO: 1938517 - RNA, 19 nt, Artificial Sequence
  Description of Artificial Sequence: Synthetic oligonucleotide
guaaagcccguuugggaug

SEQ ID NO: 1938518 - RNA, 19 nt, Artificial Sequence
  Description of Artificial Sequence: Synthetic oligonucleotide
uguacgugggucagcugga

SEQ ID NO: 1938519 - RNA, 19 nt, Artificial Sequence
  Description of Artificial Sequence: Synthetic oligonucleotide
uccagaaaacgggaugggc

SEQ ID NO: 1938520 - RNA, 19 nt, Artificial Sequence
  Description of Artificial Sequence: Synthetic oligonucleotide
ugguggacaggccgaacgc

SEQ ID NO: 1938521 - RNA, 19 nt, Artificial Sequence
  Description of Artificial Sequence: Synthetic oligonucleotide
cacggugugaguacugcac

SEQ ID NO: 1938522 - RNA, 19 nt, Artificial Sequence
  Description of Artificial Sequence: Synthetic oligonucleotide
uccaggaguaggaagcauu

SEQ ID NO: 1938523 - RNA, 19 nt, Artificial Sequence
  Description of Artificial Sequence: Synthetic oligonucleotide
guuccgugggaacuggaug

SEQ ID NO: 1938524 - RNA, 19 nt, Artificial Sequence
  Description of Artificial Sequence: Synthetic oligonucleotide
gagcccgagacagcaaugg

SEQ ID NO: 1938525 - RNA, 19 nt, Artificial Sequence
  Description of Artificial Sequence: Synthetic oligonucleotide
uugccuaugccuguacgug

SEQ ID NO: 1938526 - RNA, 19 nt, Artificial Sequence
  Description of Artificial Sequence: Synthetic oligonucleotide
uucguacuacaacauucuc

SEQ ID NO: 1938527 - RNA, 19 nt, Artificial Sequence
  Description of Artificial Sequence: Synthetic oligonucleotide
uagugggguauaccacggg

SEQ ID NO: 1938528 - RNA, 19 nt, Artificial Sequence
  Description of Artificial Sequence: Synthetic oligonucleotide
guaaguucaaagggccucc

SEQ ID NO: 1938529 - RNA, 19 nt, Artificial Sequence
  Description of Artificial Sequence: Synthetic oligonucleotide
cacuucuagauuguugaug

SEQ ID NO: 1938530 - RNA, 19 nt, Artificial Sequence
  Description of Artificial Sequence: Synthetic oligonucleotide
gugccugguggacaggccg

SEQ ID NO: 1938531 - RNA, 19 nt, Artificial Sequence
  Description of Artificial Sequence: Synthetic oligonucleotide
uccauggauuauuccagaa

SEQ ID NO: 1938532 - RNA, 19 nt, Artificial Sequence
  Description of Artificial Sequence: Synthetic oligonucleotide
gggauucaggugaaaagcg

SEQ ID NO: 1938533 - RNA, 19 nt, Artificial Sequence
  Description of Artificial Sequence: Synthetic oligonucleotide
ccagucugaaaguucacag

SEQ ID NO: 1938534 - RNA, 19 nt, Artificial Sequence
  Description of Artificial Sequence: Synthetic oligonucleotide
gcugcaaggagcccgagac

SEQ ID NO: 1938535 - RNA, 19 nt, Artificial Sequence
  Description of Artificial Sequence: Synthetic oligonucleotide
ggggauucaggugaaaagc

SEQ ID NO: 1938536 - RNA, 19 nt, Artificial Sequence
  Description of Artificial Sequence: Synthetic oligonucleotide
cuguguggaugacaguuug

SEQ ID NO: 1938537 - RNA, 19 nt, Artificial Sequence
  Description of Artificial Sequence: Synthetic oligonucleotide
gaagcucuggccgcaacug

SEQ ID NO: 1938538 - RNA, 19 nt, Artificial Sequence
  Description of Artificial Sequence: Synthetic oligonucleotide
cuuggguguugaagaaagc

SEQ ID NO: 1938539 - RNA, 19 nt, Artificial Sequence
  Description of Artificial Sequence: Synthetic oligonucleotide
cuggccgcaacugaagggc

SEQ ID NO: 1938540 - RNA, 19 nt, Artificial Sequence
  Description of Artificial Sequence: Synthetic oligonucleotide
ggaaccucuuagcauuggg

SEQ ID NO: 1938541 - RNA, 19 nt, Artificial Sequence
  Description of Artificial Sequence: Synthetic oligonucleotide
aucaccugccacuucuaga

SEQ ID NO: 1938542 - RNA, 19 nt, Artificial Sequence
  Description of Artificial Sequence: Synthetic oligonucleotide
acccuccaucuucaaaccg

SEQ ID NO: 1938543 - RNA, 19 nt, Artificial Sequence
  Description of Artificial Sequence: Synthetic oligonucleotide
cacggaaaccuugaagcag

SEQ ID NO: 1938544 - RNA, 19 nt, Artificial Sequence
  Description of Artificial Sequence: Synthetic oligonucleotide
cuucuagauuguugaugcc

SEQ ID NO: 1938545 - RNA, 19 nt, Artificial Sequence
  Description of Artificial Sequence: Synthetic oligonucleotide
ucaggugaaaagcgacauc

SEQ ID NO: 1938546 - RNA, 19 nt, Artificial Sequence
  Description of Artificial Sequence: Synthetic oligonucleotide
ggagaagacaggcuggaca

SEQ ID NO: 1938547 - RNA, 19 nt, Artificial Sequence
  Description of Artificial Sequence: Synthetic oligonucleotide
uacacggugugaguacugc

SEQ ID NO: 1938548 - RNA, 19 nt, Artificial Sequence
  Description of Artificial Sequence: Synthetic oligonucleotide
auguggaaccucuuagcau

SEQ ID NO: 1938549 - RNA, 19 nt, Artificial Sequence
  Description of Artificial Sequence: Synthetic oligonucleotide
cuguagugggguauaccac

SEQ ID NO: 1938550 - RNA, 19 nt, Artificial Sequence
  Description of Artificial Sequence: Synthetic oligonucleotide
uccacgaggugguagggua

SEQ ID NO: 1938551 - RNA, 19 nt, Artificial Sequence
  Description of Artificial Sequence: Synthetic oligonucleotide
acgugggucagcuggacau

SEQ ID NO: 1938552 - RNA, 19 nt, Artificial Sequence
  Description of Artificial Sequence: Synthetic oligonucleotide
uggguguuucguacuacaa

SEQ ID NO: 1938553 - RNA, 19 nt, Artificial Sequence
  Description of Artificial Sequence: Synthetic oligonucleotide
ugcaccaggaagguaaguu

SEQ ID NO: 1938554 - RNA, 19 nt, Artificial Sequence
  Description of Artificial Sequence: Synthetic oligonucleotide
aacgggaugggcggguuca

SEQ ID NO: 1938555 - RNA, 19 nt, Artificial Sequence
  Description of Artificial Sequence: Synthetic oligonucleotide
uucaaagggccuccccuuc

SEQ ID NO: 1938556 - RNA, 19 nt, Artificial Sequence
  Description of Artificial Sequence: Synthetic oligonucleotide
ccagauuucguuccucggg

SEQ ID NO: 1938557 - RNA, 19 nt, Artificial Sequence
  Description of Artificial Sequence: Synthetic oligonucleotide
gaaaagcgacauccauccc

SEQ ID NO: 1938558 - RNA, 19 nt, Artificial Sequence
  Description of Artificial Sequence: Synthetic oligonucleotide
caaugucguuuucauugag

SEQ ID NO: 1938559 - RNA, 19 nt, Artificial Sequence
  Description of Artificial Sequence: Synthetic oligonucleotide
cucucgggaaucaccacuc

SEQ ID NO: 1938560 - RNA, 19 nt, Artificial Sequence
  Description of Artificial Sequence: Synthetic oligonucleotide
cagauagggugccccagcc

SEQ ID NO: 1938561 - RNA, 19 nt, Artificial Sequence
  Description of Artificial Sequence: Synthetic oligonucleotide
ggcugagagaauugcacug

SEQ ID NO: 1938562 - RNA, 19 nt, Artificial Sequence
  Description of Artificial Sequence: Synthetic oligonucleotide
acggugugaguacugcaca

SEQ ID NO: 1938563 - RNA, 19 nt, Artificial Sequence
  Description of Artificial Sequence: Synthetic oligonucleotide
aagggccuccccuucugga

SEQ ID NO: 1938564 - RNA, 19 nt, Artificial Sequence
  Description of Artificial Sequence: Synthetic oligonucleotide
agaaaacgggaugggcggg

SEQ ID NO: 1938565 - RNA, 19 nt, Artificial Sequence
  Description of Artificial Sequence: Synthetic oligonucleotide
uauuugcagaggcguggac

SEQ ID NO: 1938566 - RNA, 19 nt, Artificial Sequence
  Description of Artificial Sequence: Synthetic oligonucleotide
ugcuucagacgguggacgu

SEQ ID NO: 1938567 - RNA, 19 nt, Artificial Sequence
  Description of Artificial Sequence: Synthetic oligonucleotide
ucagacgguggacguaauc

SEQ ID NO: 1938568 - RNA, 19 nt, Artificial Sequence
  Description of Artificial Sequence: Synthetic oligonucleotide
ucucauugaaacggggauu

SEQ ID NO: 1938569 - RNA, 19 nt, Artificial Sequence
  Description of Artificial Sequence: Synthetic oligonucleotide
gauggacuuggauggguaa

SEQ ID NO: 1938570 - RNA, 19 nt, Artificial Sequence
  Description of Artificial Sequence: Synthetic oligonucleotide
uaaguucaaagggccuccc

SEQ ID NO: 1938571 - RNA, 19 nt, Artificial Sequence
  Description of Artificial Sequence: Synthetic oligonucleotide
gacuguagugggguauacc

SEQ ID NO: 1938572 - RNA, 19 nt, Artificial Sequence
  Description of Artificial Sequence: Synthetic oligonucleotide
cagacgguggacguaauca

SEQ ID NO: 1938573 - RNA, 19 nt, Artificial Sequence
  Description of Artificial Sequence: Synthetic oligonucleotide
uacgugggucagcuggaca

SEQ ID NO: 1938574 - RNA, 19 nt, Artificial Sequence
  Description of Artificial Sequence: Synthetic oligonucleotide
ccuggcaagugcuucagac

SEQ ID NO: 1938575 - RNA, 19 nt, Artificial Sequence
  Description of Artificial Sequence: Synthetic oligonucleotide
ugcuaugaugauggacuug

SEQ ID NO: 1938576 - RNA, 19 nt, Artificial Sequence
  Description of Artificial Sequence: Synthetic oligonucleotide
auagacuguagugggguau

SEQ ID NO: 1938577 - RNA, 19 nt, Artificial Sequence
  Description of Artificial Sequence: Synthetic oligonucleotide
gaugccuggcaagugcuuc

SEQ ID NO: 1938578 - RNA, 19 nt, Artificial Sequence
  Description of Artificial Sequence: Synthetic oligonucleotide
uccgugggaacuggauggg

SEQ ID NO: 1938579 - RNA, 19 nt, Artificial Sequence
  Description of Artificial Sequence: Synthetic oligonucleotide
uguccacgaggugguaggg

SEQ ID NO: 1938580 - RNA, 19 nt, Artificial Sequence
  Description of Artificial Sequence: Synthetic oligonucleotide
ggguguuucguacuacaac

SEQ ID NO: 1938581 - RNA, 19 nt, Artificial Sequence
  Description of Artificial Sequence: Synthetic oligonucleotide
agacuguagugggguauac

SEQ ID NO: 1938582 - RNA, 19 nt, Artificial Sequence
  Description of Artificial Sequence: Synthetic oligonucleotide
ugcaguccuccauggauua

SEQ ID NO: 1938583 - RNA, 19 nt, Artificial Sequence
  Description of Artificial Sequence: Synthetic oligonucleotide
cuggaagggcaucugcauc

SEQ ID NO: 1938584 - RNA, 19 nt, Artificial Sequence
  Description of Artificial Sequence: Synthetic oligonucleotide
ccuuucuaggccaggggcc

SEQ ID NO: 1938585 - RNA, 19 nt, Artificial Sequence
  Description of Artificial Sequence: Synthetic oligonucleotide
cagcccuccuuucuaggcc

SEQ ID NO: 1938586 - RNA, 19 nt, Artificial Sequence
  Description of Artificial Sequence: Synthetic oligonucleotide
agcccguuugggauggagg

SEQ ID NO: 1938587 - RNA, 19 nt, Artificial Sequence
  Description of Artificial Sequence: Synthetic oligonucleotide
ccugcuaugaugauggacu

SEQ ID NO: 1938588 - RNA, 19 nt, Artificial Sequence
  Description of Artificial Sequence: Synthetic oligonucleotide
gguaaguucaaagggccuc

SEQ ID NO: 1938589 - RNA, 19 nt, Artificial Sequence
  Description of Artificial Sequence: Synthetic oligonucleotide
gcgacauccaucccagagc

SEQ ID NO: 1938590 - RNA, 19 nt, Artificial Sequence
  Description of Artificial Sequence: Synthetic oligonucleotide
uuggauggguaaagcccgu

SEQ ID NO: 1938591 - RNA, 19 nt, Artificial Sequence
  Description of Artificial Sequence: Synthetic oligonucleotide
aagcccguuugggauggag

SEQ ID NO: 1938592 - RNA, 19 nt, Artificial Sequence
  Description of Artificial Sequence: Synthetic oligonucleotide
uaggguacacggugugagu

SEQ ID NO: 1938593 - RNA, 19 nt, Artificial Sequence
  Description of Artificial Sequence: Synthetic oligonucleotide
ucucgggaaucaccacucu

SEQ ID NO: 1938594 - RNA, 19 nt, Artificial Sequence
  Description of Artificial Sequence: Synthetic oligonucleotide
agguugauguggaaccucu

SEQ ID NO: 1938595 - RNA, 19 nt, Artificial Sequence
  Description of Artificial Sequence: Synthetic oligonucleotide
acacggugugaguacugca

SEQ ID NO: 1938596 - RNA, 19 nt, Artificial Sequence
  Description of Artificial Sequence: Synthetic oligonucleotide
cacaggauccacacugaga

SEQ ID NO: 1938597 - RNA, 19 nt, Artificial Sequence
  Description of Artificial Sequence: Synthetic oligonucleotide
gauagacuguaguggggua

SEQ ID NO: 1938598 - RNA, 19 nt, Artificial Sequence
  Description of Artificial Sequence: Synthetic oligonucleotide
guguuacagaccacauacc

SEQ ID NO: 1938599 - RNA, 19 nt, Artificial Sequence
  Description of Artificial Sequence: Synthetic oligonucleotide
cagagcgaagguugaugug

SEQ ID NO: 1938600 - RNA, 19 nt, Artificial Sequence
  Description of Artificial Sequence: Synthetic oligonucleotide
agcauugguccaggggcgg

SEQ ID NO: 1938601 - RNA, 19 nt, Artificial Sequence
  Description of Artificial Sequence: Synthetic oligonucleotide
ucuggguguuucguacuac

SEQ ID NO: 1938602 - RNA, 19 nt, Artificial Sequence
  Description of Artificial Sequence: Synthetic oligonucleotide
ucauugaaacggggauuca

SEQ ID NO: 1938603 - RNA, 19 nt, Artificial Sequence
  Description of Artificial Sequence: Synthetic oligonucleotide
ggauugaagugaaaggcaa

SEQ ID NO: 1938604 - RNA, 19 nt, Artificial Sequence
  Description of Artificial Sequence: Synthetic oligonucleotide
gacgguggacguaaucaca

SEQ ID NO: 1938605 - RNA, 19 nt, Artificial Sequence
  Description of Artificial Sequence: Synthetic oligonucleotide
cggggauugaagugaaagg

SEQ ID NO: 1938606 - RNA, 19 nt, Artificial Sequence
  Description of Artificial Sequence: Synthetic oligonucleotide
agaggcguggacggucccg

SEQ ID NO: 1938607 - RNA, 19 nt, Artificial Sequence
  Description of Artificial Sequence: Synthetic oligonucleotide
ccucuuagcauugggcagg

SEQ ID NO: 1938608 - RNA, 19 nt, Artificial Sequence
  Description of Artificial Sequence: Synthetic oligonucleotide
uagacuguagugggguaua

SEQ ID NO: 1938609 - RNA, 19 nt, Artificial Sequence
  Description of Artificial Sequence: Synthetic oligonucleotide
uggccgcaacugaagggca

SEQ ID NO: 1938610 - RNA, 19 nt, Artificial Sequence
  Description of Artificial Sequence: Synthetic oligonucleotide
gggauugaagugaaaggca

SEQ ID NO: 1938611 - RNA, 19 nt, Artificial Sequence
  Description of Artificial Sequence: Synthetic oligonucleotide
ccacauacccuccaucuuc

SEQ ID NO: 1938612 - RNA, 19 nt, Artificial Sequence
  Description of Artificial Sequence: Synthetic oligonucleotide
ugaggccagucugaaaguu

SEQ ID NO: 1938613 - RNA, 19 nt, Artificial Sequence
  Description of Artificial Sequence: Synthetic oligonucleotide
cuugccuaugccuguacgu

SEQ ID NO: 1938614 - RNA, 19 nt, Artificial Sequence
  Description of Artificial Sequence: Synthetic oligonucleotide
uggacaggccgaacgcuuu

SEQ ID NO: 1938615 - RNA, 19 nt, Artificial Sequence
  Description of Artificial Sequence: Synthetic oligonucleotide
gggucagcuggacaucacc

SEQ ID NO: 1938616 - RNA, 19 nt, Artificial Sequence
  Description of Artificial Sequence: Synthetic oligonucleotide
agcugcaaggagcccgaga

SEQ ID NO: 1938617 - RNA, 19 nt, Artificial Sequence
  Description of Artificial Sequence: Synthetic oligonucleotide
gaauugcacuguggagaag

SEQ ID NO: 1938618 - RNA, 19 nt, Artificial Sequence
  Description of Artificial Sequence: Synthetic oligonucleotide
cuaugccuguacguggguc

SEQ ID NO: 1938619 - RNA, 19 nt, Artificial Sequence
  Description of Artificial Sequence: Synthetic oligonucleotide
cuucaaaccggggauugaa

SEQ ID NO: 1938620 - RNA, 19 nt, Artificial Sequence
  Description of Artificial Sequence: Synthetic oligonucleotide
agugacuuucacacaggau

SEQ ID NO: 1938621 - RNA, 19 nt, Artificial Sequence
  Description of Artificial Sequence: Synthetic oligonucleotide
ugcagaggcguggacgguc

SEQ ID NO: 1938622 - RNA, 19 nt, Artificial Sequence
  Description of Artificial Sequence: Synthetic oligonucleotide
gagaagcucuggccgcaac

SEQ ID NO: 1938623 - RNA, 19 nt, Artificial Sequence
  Description of Artificial Sequence: Synthetic oligonucleotide
aggguacacggugugagua

SEQ ID NO: 1938624 - RNA, 19 nt, Artificial Sequence
  Description of Artificial Sequence: Synthetic oligonucleotide
aguucacaguaaucuuauu

SEQ ID NO: 1938625 - RNA, 19 nt, Artificial Sequence
  Description of Artificial Sequence: Synthetic oligonucleotide
cuucagacgguggacguaa

SEQ ID NO: 1938626 - RNA, 19 nt, Artificial Sequence
  Description of Artificial Sequence: Synthetic oligonucleotide
ggguaaagcccguuuggga

SEQ ID NO: 1938627 - RNA, 19 nt, Artificial Sequence
  Description of Artificial Sequence: Synthetic oligonucleotide
cauacccuccaucuucaaa

SEQ ID NO: 1938628 - RNA, 19 nt, Artificial Sequence
  Description of Artificial Sequence: Synthetic oligonucleotide
gugaacuguguggaugaca

SEQ ID NO: 1938629 - RNA, 19 nt, Artificial Sequence
  Description of Artificial Sequence: Synthetic oligonucleotide
cacacaggauccacacuga

SEQ ID NO: 1938630 - RNA, 19 nt, Artificial Sequence
  Description of Artificial Sequence: Synthetic oligonucleotide
ggcguggacggucccgugg

SEQ ID NO: 1938631 - RNA, 19 nt, Artificial Sequence
  Description of Artificial Sequence: Synthetic oligonucleotide
gagcgaagguugaugugga

SEQ ID NO: 1938632 - RNA, 19 nt, Artificial Sequence
  Description of Artificial Sequence: Synthetic oligonucleotide
aggugcaggauagacugua

SEQ ID NO: 1938633 - RNA, 19 nt, Artificial Sequence
  Description of Artificial Sequence: Synthetic oligonucleotide
gacuuucacacaggaucca

SEQ ID NO: 1938634 - RNA, 19 nt, Artificial Sequence
  Description of Artificial Sequence: Synthetic oligonucleotide
aaaacgggaugggcggguu

SEQ ID NO: 1938635 - RNA, 19 nt, Artificial Sequence
  Description of Artificial Sequence: Synthetic oligonucleotide
gcgaagguugauguggaac

SEQ ID NO: 1938636 - RNA, 19 nt, Artificial Sequence
  Description of Artificial Sequence: Synthetic oligonucleotide
augccuguacgugggucag

SEQ ID NO: 1938637 - RNA, 19 nt, Artificial Sequence
  Description of Artificial Sequence: Synthetic oligonucleotide
cuaugaugauggacuugga

SEQ ID NO: 1938638 - RNA, 19 nt, Artificial Sequence
  Description of Artificial Sequence: Synthetic oligonucleotide
gaagguugauguggaaccu

SEQ ID NO: 1938639 - RNA, 19 nt, Artificial Sequence
  Description of Artificial Sequence: Synthetic oligonucleotide
gccuaugccuguacguggg

SEQ ID NO: 1938640 - RNA, 19 nt, Artificial Sequence
  Description of Artificial Sequence: Synthetic oligonucleotide
ggguacacggugugaguac

SEQ ID NO: 1938641 - RNA, 19 nt, Artificial Sequence
  Description of Artificial Sequence: Synthetic oligonucleotide
cggggauucaggugaaaag

SEQ ID NO: 1938642 - RNA, 19 nt, Artificial Sequence
  Description of Artificial Sequence: Synthetic oligonucleotide
cacgggcuggauuccagga

SEQ ID NO: 1938643 - RNA, 19 nt, Artificial Sequence
  Description of Artificial Sequence: Synthetic oligonucleotide
cauugguccaggggcggug

SEQ ID NO: 1938644 - RNA, 19 nt, Artificial Sequence
  Description of Artificial Sequence: Synthetic oligonucleotide
augggcggguucacguagg

SEQ ID NO: 1938645 - RNA, 19 nt, Artificial Sequence
  Description of Artificial Sequence: Synthetic oligonucleotide
aaccggggauugaagugaa

SEQ ID NO: 1938646 - RNA, 19 nt, Artificial Sequence
  Description of Artificial Sequence: Synthetic oligonucleotide
gggguauaccacgggcugg

SEQ ID NO: 1938647 - RNA, 19 nt, Artificial Sequence
  Description of Artificial Sequence: Synthetic oligonucleotide
guugaucuggguguuucgu

SEQ ID NO: 1938648 - RNA, 19 nt, Artificial Sequence
  Description of Artificial Sequence: Synthetic oligonucleotide
gugcaggauagacuguagu

SEQ ID NO: 1938649 - RNA, 19 nt, Artificial Sequence
  Description of Artificial Sequence: Synthetic oligonucleotide
auagggugccccagcccuc

SEQ ID NO: 1938650 - RNA, 19 nt, Artificial Sequence
  Description of Artificial Sequence: Synthetic oligonucleotide
uucagacgguggacguaau

SEQ ID NO: 1938651 - RNA, 19 nt, Artificial Sequence
  Description of Artificial Sequence: Synthetic oligonucleotide
caccuugaacucugaccuc

SEQ ID NO: 1938652 - RNA, 19 nt, Artificial Sequence
  Description of Artificial Sequence: Synthetic oligonucleotide
gcccgagacagcaauggug

SEQ ID NO: 1938653 - RNA, 19 nt, Artificial Sequence
  Description of Artificial Sequence: Synthetic oligonucleotide
ggacguaaucacacaggug

SEQ ID NO: 1938654 - RNA, 19 nt, Artificial Sequence
  Description of Artificial Sequence: Synthetic oligonucleotide
agcgaagguugauguggaa

SEQ ID NO: 1938655 - RNA, 19 nt, Artificial Sequence
  Description of Artificial Sequence: Synthetic oligonucleotide
caaccagauuucguuccuc

SEQ ID NO: 1938656 - RNA, 19 nt, Artificial Sequence
  Description of Artificial Sequence: Synthetic oligonucleotide
aaacggggauucaggugaa

SEQ ID NO: 1938657 - RNA, 19 nt, Artificial Sequence
  Description of Artificial Sequence: Synthetic oligonucleotide
cgagacagcaauggugucc

SEQ ID NO: 1938658 - RNA, 19 nt, Artificial Sequence
  Description of Artificial Sequence: Synthetic oligonucleotide
gguguugcccauccacgga

SEQ ID NO: 1938659 - RNA, 19 nt, Artificial Sequence
  Description of Artificial Sequence: Synthetic oligonucleotide
gucccguggauggugaucu

SEQ ID NO: 1938660 - RNA, 19 nt, Artificial Sequence
  Description of Artificial Sequence: Synthetic oligonucleotide
guagggagcuuggguguug

SEQ ID NO: 1938661 - RNA, 19 nt, Artificial Sequence
  Description of Artificial Sequence: Synthetic oligonucleotide
gugggucagcuggacauca

SEQ ID NO: 1938662 - RNA, 19 nt, Artificial Sequence
  Description of Artificial Sequence: Synthetic oligonucleotide
acauacccuccaucuucaa

SEQ ID NO: 1938663 - RNA, 19 nt, Artificial Sequence
  Description of Artificial Sequence: Synthetic oligonucleotide
agcucuggccgcaacugaa

SEQ ID NO: 1938664 - RNA, 19 nt, Artificial Sequence
  Description of Artificial Sequence: Synthetic oligonucleotide
aggggagcucuggaaggug

SEQ ID NO: 1938665 - RNA, 19 nt, Artificial Sequence
  Description of Artificial Sequence: Synthetic oligonucleotide
ugccugcuaugaugaugga

SEQ ID NO: 1938666 - RNA, 19 nt, Artificial Sequence
  Description of Artificial Sequence: Synthetic oligonucleotide
ggaugggcugagagaauug

SEQ ID NO: 1938667 - RNA, 19 nt, Artificial Sequence
  Description of Artificial Sequence: Synthetic oligonucleotide
gaaaacgggaugggcgggu

SEQ ID NO: 1938668 - RNA, 19 nt, Artificial Sequence
  Description of Artificial Sequence: Synthetic oligonucleotide
ccauggauuauuccagaaa

SEQ ID NO: 1938669 - RNA, 19 nt, Artificial Sequence
  Description of Artificial Sequence: Synthetic oligonucleotide
cauugaggccagucugaaa

SEQ ID NO: 1938670 - RNA, 19 nt, Artificial Sequence
  Description of Artificial Sequence: Synthetic oligonucleotide
guucaaagggccuccccuu

SEQ ID NO: 1938671 - RNA, 19 nt, Artificial Sequence
  Description of Artificial Sequence: Synthetic oligonucleotide
accacgggcuggauuccag

SEQ ID NO: 1938672 - RNA, 19 nt, Artificial Sequence
  Description of Artificial Sequence: Synthetic oligonucleotide
acguaaucacacagguguu

SEQ ID NO: 1938673 - RNA, 19 nt, Artificial Sequence
  Description of Artificial Sequence: Synthetic oligonucleotide
acgggaugggcggguucac

SEQ ID NO: 1938674 - RNA, 19 nt, Artificial Sequence
  Description of Artificial Sequence: Synthetic oligonucleotide
gugggguauaccacgggcu

SEQ ID NO: 1938675 - RNA, 19 nt, Artificial Sequence
  Description of Artificial Sequence: Synthetic oligonucleotide
aacggggauucaggugaaa

SEQ ID NO: 1938676 - RNA, 19 nt, Artificial Sequence
  Description of Artificial Sequence: Synthetic oligonucleotide
gccagucugaaaguucaca

SEQ ID NO: 1938677 - RNA, 19 nt, Artificial Sequence
  Description of Artificial Sequence: Synthetic oligonucleotide
ucccguggauggugaucug

SEQ ID NO: 1938678 - RNA, 19 nt, Artificial Sequence
  Description of Artificial Sequence: Synthetic oligonucleotide
gcggugugaacugugugga

SEQ ID NO: 1938679 - RNA, 19 nt, Artificial Sequence
  Description of Artificial Sequence: Synthetic oligonucleotide
cccgagacagcaauggugu

SEQ ID NO: 1938680 - RNA, 19 nt, Artificial Sequence
  Description of Artificial Sequence: Synthetic oligonucleotide
ccauccacggaaaccuuga

SEQ ID NO: 1938681 - RNA, 19 nt, Artificial Sequence
  Description of Artificial Sequence: Synthetic oligonucleotide
gccugcuaugaugauggac

SEQ ID NO: 1938682 - RNA, 19 nt, Artificial Sequence
  Description of Artificial Sequence: Synthetic oligonucleotide
gggcggugugaacugugug

SEQ ID NO: 1938683 - RNA, 19 nt, Artificial Sequence
  Description of Artificial Sequence: Synthetic oligonucleotide
cugcaaggagcccgagaca

SEQ ID NO: 1938684 - RNA, 19 nt, Artificial Sequence
  Description of Artificial Sequence: Synthetic oligonucleotide
ggcuggauuccaggaguag

SEQ ID NO: 1938685 - RNA, 19 nt, Artificial Sequence
  Description of Artificial Sequence: Synthetic oligonucleotide
uggauggguaaagcccguu

SEQ ID NO: 1938686 - RNA, 19 nt, Artificial Sequence
  Description of Artificial Sequence: Synthetic oligonucleotide
ugccuguacgugggucagc

SEQ ID NO: 1938687 - RNA, 19 nt, Artificial Sequence
  Description of Artificial Sequence: Synthetic oligonucleotide
guacgugggucagcuggac

SEQ ID NO: 1938688 - RNA, 19 nt, Artificial Sequence
  Description of Artificial Sequence: Synthetic oligonucleotide
ucuuagcauugggcaggac

SEQ ID NO: 1938689 - RNA, 19 nt, Artificial Sequence
  Description of Artificial Sequence: Synthetic oligonucleotide
cacgaggugguaggguaca

SEQ ID NO: 1938690 - RNA, 19 nt, Artificial Sequence
  Description of Artificial Sequence: Synthetic oligonucleotide
ggugugaguacugcacaaa

SEQ ID NO: 1938691 - RNA, 19 nt, Artificial Sequence
  Description of Artificial Sequence: Synthetic oligonucleotide
cccagagcgaagguugaug

SEQ ID NO: 1938692 - RNA, 19 nt, Artificial Sequence
  Description of Artificial Sequence: Synthetic oligonucleotide
gcucuggccgcaacugaag

SEQ ID NO: 1938693 - RNA, 19 nt, Artificial Sequence
  Description of Artificial Sequence: Synthetic oligonucleotide
ggguauaccacgggcugga

SEQ ID NO: 1938694 - RNA, 19 nt, Artificial Sequence
  Description of Artificial Sequence: Synthetic oligonucleotide
cagaggcguggacgguccc

SEQ ID NO: 1938695 - RNA, 19 nt, Artificial Sequence
  Description of Artificial Sequence: Synthetic oligonucleotide
guauaccacgggcuggauu

SEQ ID NO: 1938696 - RNA, 19 nt, Artificial Sequence
  Description of Artificial Sequence: Synthetic oligonucleotide
aggggcggugugaacugug

SEQ ID NO: 1938697 - RNA, 19 nt, Artificial Sequence
  Description of Artificial Sequence: Synthetic oligonucleotide
cucuuagcauugggcagga

SEQ ID NO: 1938698 - RNA, 19 nt, Artificial Sequence
  Description of Artificial Sequence: Synthetic oligonucleotide
gguaggguacacgguguga

SEQ ID NO: 1938699 - RNA, 19 nt, Artificial Sequence
  Description of Artificial Sequence: Synthetic oligonucleotide
gugaucugaagucccucuu

SEQ ID NO: 1938700 - RNA, 19 nt, Artificial Sequence
  Description of Artificial Sequence: Synthetic oligonucleotide
ucccagagcgaagguugau

SEQ ID NO: 1938701 - RNA, 19 nt, Artificial Sequence
  Description of Artificial Sequence: Synthetic oligonucleotide
ccagagcgaagguugaugu

SEQ ID NO: 1938702 - RNA, 19 nt, Artificial Sequence
  Description of Artificial Sequence: Synthetic oligonucleotide
guguuucguacuacaacau

SEQ ID NO: 1938703 - RNA, 19 nt, Artificial Sequence
  Description of Artificial Sequence: Synthetic oligonucleotide
gggguuccgugggaacugg

SEQ ID NO: 1938704 - RNA, 19 nt, Artificial Sequence
  Description of Artificial Sequence: Synthetic oligonucleotide
ccacgaggugguaggguac

SEQ ID NO: 1938705 - RNA, 19 nt, Artificial Sequence
  Description of Artificial Sequence: Synthetic oligonucleotide
ccguuugggauggagguga

SEQ ID NO: 1938706 - RNA, 19 nt, Artificial Sequence
  Description of Artificial Sequence: Synthetic oligonucleotide
gcccguuugggauggaggu

SEQ ID NO: 1938707 - RNA, 19 nt, Artificial Sequence
  Description of Artificial Sequence: Synthetic oligonucleotide
ggagcccgagacagcaaug

SEQ ID NO: 1938708 - RNA, 19 nt, Artificial Sequence
  Description of Artificial Sequence: Synthetic oligonucleotide
cuccucucucgggaaucac

SEQ ID NO: 1938709 - RNA, 19 nt, Artificial Sequence
  Description of Artificial Sequence: Synthetic oligonucleotide
gcggguucacguagggagc

SEQ ID NO: 1938710 - RNA, 19 nt, Artificial Sequence
  Description of Artificial Sequence: Synthetic oligonucleotide
aggcguggacggucccgug

SEQ ID NO: 1938711 - RNA, 19 nt, Artificial Sequence
  Description of Artificial Sequence: Synthetic oligonucleotide
uuucuaggccaggggccuu

SEQ ID NO: 1938712 - RNA, 19 nt, Artificial Sequence
  Description of Artificial Sequence: Synthetic oligonucleotide
aaagcccguuugggaugga

SEQ ID NO: 1938713 - RNA, 19 nt, Artificial Sequence
  Description of Artificial Sequence: Synthetic oligonucleotide
acggucccguggaugguga

SEQ ID NO: 1938714 - RNA, 19 nt, Artificial Sequence
  Description of Artificial Sequence: Synthetic oligonucleotide
cacagguguugcccaucca

SEQ ID NO: 1938715 - RNA, 19 nt, Artificial Sequence
  Description of Artificial Sequence: Synthetic oligonucleotide
gggacugcaggggagcucu

SEQ ID NO: 1938716 - RNA, 19 nt, Artificial Sequence
  Description of Artificial Sequence: Synthetic oligonucleotide
cugcuaugaugauggacuu

SEQ ID NO: 1938717 - RNA, 19 nt, Artificial Sequence
  Description of Artificial Sequence: Synthetic oligonucleotide
gguacacggugugaguacu

SEQ ID NO: 1938718 - RNA, 19 nt, Artificial Sequence
  Description of Artificial Sequence: Synthetic oligonucleotide
gaggcguggacggucccgu

SEQ ID NO: 1938719 - RNA, 19 nt, Artificial Sequence
  Description of Artificial Sequence: Synthetic oligonucleotide
ccccagcccuccuuucuag

SEQ ID NO: 1938720 - RNA, 19 nt, Artificial Sequence
  Description of Artificial Sequence: Synthetic oligonucleotide
ggauggguaaagcccguuu

SEQ ID NO: 1938721 - RNA, 19 nt, Artificial Sequence
  Description of Artificial Sequence: Synthetic oligonucleotide
ccccagguguuguugaucu

SEQ ID NO: 1938722 - RNA, 19 nt, Artificial Sequence
  Description of Artificial Sequence: Synthetic oligonucleotide
ccguggauggugaucugaa

SEQ ID NO: 1938723 - RNA, 19 nt, Artificial Sequence
  Description of Artificial Sequence: Synthetic oligonucleotide
guccaggggcggugugaac

SEQ ID NO: 1938724 - RNA, 19 nt, Artificial Sequence
  Description of Artificial Sequence: Synthetic oligonucleotide
ggucccguggauggugauc

SEQ ID NO: 1938725 - RNA, 19 nt, Artificial Sequence
  Description of Artificial Sequence: Synthetic oligonucleotide
caucuucaaaccggggauu

SEQ ID NO: 1938726 - RNA, 19 nt, Artificial Sequence
  Description of Artificial Sequence: Synthetic oligonucleotide
cccguuugggauggaggug

SEQ ID NO: 1938727 - RNA, 19 nt, Artificial Sequence
  Description of Artificial Sequence: Synthetic oligonucleotide
gguggacaggccgaacgcu

SEQ ID NO: 1938728 - RNA, 19 nt, Artificial Sequence
  Description of Artificial Sequence: Synthetic oligonucleotide
ccuguacgugggucagcug

SEQ ID NO: 1938729 - RNA, 19 nt, Artificial Sequence
  Description of Artificial Sequence: Synthetic oligonucleotide
ggacaaugccugcuaugau

SEQ ID NO: 1938730 - RNA, 19 nt, Artificial Sequence
  Description of Artificial Sequence: Synthetic oligonucleotide
ccgagacagcaaugguguc

SEQ ID NO: 1938731 - RNA, 19 nt, Artificial Sequence
  Description of Artificial Sequence: Synthetic oligonucleotide
guggacaggccgaacgcuu

SEQ ID NO: 1938732 - RNA, 19 nt, Artificial Sequence
  Description of Artificial Sequence: Synthetic oligonucleotide
gccuguacgugggucagcu

SEQ ID NO: 1938733 - RNA, 19 nt, Artificial Sequence
  Description of Artificial Sequence: Synthetic oligonucleotide
gcaggacaaugccugcuau

SEQ ID NO: 1938734 - RNA, 19 nt, Artificial Sequence
  Description of Artificial Sequence: Synthetic oligonucleotide
ggccagucugaaaguucac

SEQ ID NO: 1938735 - RNA, 19 nt, Artificial Sequence
  Description of Artificial Sequence: Synthetic oligonucleotide
ccgugggaacuggaugggc

SEQ ID NO: 1938736 - RNA, 19 nt, Artificial Sequence
  Description of Artificial Sequence: Synthetic oligonucleotide
cagcugcaaggagcccgag

SEQ ID NO: 1938737 - RNA, 19 nt, Artificial Sequence
  Description of Artificial Sequence: Synthetic oligonucleotide
guccacgaggugguagggu

SEQ ID NO: 1938738 - RNA, 19 nt, Artificial Sequence
  Description of Artificial Sequence: Synthetic oligonucleotide
ugguguccacgagguggua

SEQ ID NO: 1938739 - RNA, 19 nt, Artificial Sequence
  Description of Artificial Sequence: Synthetic oligonucleotide
gguuccgugggaacuggau

SEQ ID NO: 1938740 - RNA, 19 nt, Artificial Sequence
  Description of Artificial Sequence: Synthetic oligonucleotide
ccaggaagguaaguucaaa

SEQ ID NO: 1938741 - RNA, 19 nt, Artificial Sequence
  Description of Artificial Sequence: Synthetic oligonucleotide
accggggauugaagugaaa

SEQ ID NO: 1938742 - RNA, 19 nt, Artificial Sequence
  Description of Artificial Sequence: Synthetic oligonucleotide
ccaucaccuugaacucuga

SEQ ID NO: 1938743 - RNA, 19 nt, Artificial Sequence
  Description of Artificial Sequence: Synthetic oligonucleotide
caccacucucuuccucacu

SEQ ID NO: 1938744 - RNA, 19 nt, Artificial Sequence
  Description of Artificial Sequence: Synthetic oligonucleotide
cccguggauggugaucuga

SEQ ID NO: 1938745 - RNA, 19 nt, Artificial Sequence
  Description of Artificial Sequence: Synthetic oligonucleotide
ccccaguuuccuuucugcu

SEQ ID NO: 1938746 - RNA, 19 nt, Artificial Sequence
  Description of Artificial Sequence: Synthetic oligonucleotide
ggugccccagcccuccuuu

SEQ ID NO: 1938747 - RNA, 19 nt, Artificial Sequence
  Description of Artificial Sequence: Synthetic oligonucleotide
gcuucagacgguggacgua

SEQ ID NO: 1938748 - RNA, 19 nt, Artificial Sequence
  Description of Artificial Sequence: Synthetic oligonucleotide
ccugguggacaggccgaac

SEQ ID NO: 1938749 - RNA, 19 nt, Artificial Sequence
  Description of Artificial Sequence: Synthetic oligonucleotide
gggcggguucacguaggga

SEQ ID NO: 1938750 - RNA, 19 nt, Artificial Sequence
  Description of Artificial Sequence: Synthetic oligonucleotide
cgguggacguaaucacaca

SEQ ID NO: 1938751 - RNA, 19 nt, Artificial Sequence
  Description of Artificial Sequence: Synthetic oligonucleotide
ggguuccgugggaacugga

SEQ ID NO: 1938752 - RNA, 19 nt, Artificial Sequence
  Description of Artificial Sequence: Synthetic oligonucleotide
ggacaggccgaacgcuuuu

SEQ ID NO: 1938753 - RNA, 19 nt, Artificial Sequence
  Description of Artificial Sequence: Synthetic oligonucleotide
gguugauguggaaccucuu

SEQ ID NO: 1938754 - RNA, 19 nt, Artificial Sequence
  Description of Artificial Sequence: Synthetic oligonucleotide
caccugccacuucuagauu

SEQ ID NO: 1938755 - RNA, 19 nt, Artificial Sequence
  Description of Artificial Sequence: Synthetic oligonucleotide
ggccuugccuaugccugua

SEQ ID NO: 1938756 - RNA, 19 nt, Artificial Sequence
  Description of Artificial Sequence: Synthetic oligonucleotide
gccugguggacaggccgaa

SEQ ID NO: 1938757 - RNA, 19 nt, Artificial Sequence
  Description of Artificial Sequence: Synthetic oligonucleotide
gcauugguccaggggcggu

SEQ ID NO: 1938758 - RNA, 19 nt, Artificial Sequence
  Description of Artificial Sequence: Synthetic oligonucleotide
caggggcggugugaacugu

SEQ ID NO: 1938759 - RNA, 19 nt, Artificial Sequence
  Description of Artificial Sequence: Synthetic oligonucleotide
ccuaugccuguacgugggu

SEQ ID NO: 1938760 - RNA, 19 nt, Artificial Sequence
  Description of Artificial Sequence: Synthetic oligonucleotide
ggccgcaacugaagggcau

SEQ ID NO: 1938761 - RNA, 19 nt, Artificial Sequence
  Description of Artificial Sequence: Synthetic oligonucleotide
gccgcaacugaagggcauu

SEQ ID NO: 1938762 - RNA, 19 nt, Artificial Sequence
  Description of Artificial Sequence: Synthetic oligonucleotide
cgggaaucaccacucucuu

SEQ ID NO: 1938763 - RNA, 19 nt, Artificial Sequence
  Description of Artificial Sequence: Synthetic oligonucleotide
cggguucacguagggagcu

SEQ ID NO: 1938764 - RNA, 19 nt, Artificial Sequence
  Description of Artificial Sequence: Synthetic oligonucleotide
ccucugcaccaggaaggua

SEQ ID NO: 1938765 - RNA, 19 nt, Artificial Sequence
  Description of Artificial Sequence: Synthetic oligonucleotide
ggguucacguagggagcuu

SEQ ID NO: 1938766 - RNA, 19 nt, Artificial Sequence
  Description of Artificial Sequence: Synthetic oligonucleotide
ccgcaacugaagggcauuu

SEQ ID NO: 1938767 - RNA, 19 nt, Artificial Sequence
  Description of Artificial Sequence: Synthetic oligonucleotide
gcccauccacggaaaccuu

SEQ ID NO: 1938768 - RNA, 19 nt, Artificial Sequence
  Description of Artificial Sequence: Synthetic oligonucleotide
cgcaacugaagggcauuuu

SEQ ID NO: 1938769 - RNA, 19 nt, Artificial Sequence
  Description of Artificial Sequence: Synthetic oligonucleotide
cggucccguggauggugau

SEQ ID NO: 1938770 - RNA, 19 nt, Artificial Sequence
  Description of Artificial Sequence: Synthetic oligonucleotide
aaaacaucgauauuccugc

SEQ ID NO: 1938771 - RNA, 19 nt, Artificial Sequence
  Description of Artificial Sequence: Synthetic oligonucleotide
aaaucuuccaguugggucc

SEQ ID NO: 1938772 - RNA, 19 nt, Artificial Sequence
  Description of Artificial Sequence: Synthetic oligonucleotide
aacuaugucaguuaugguc

SEQ ID NO: 1938773 - RNA, 19 nt, Artificial Sequence
  Description of Artificial Sequence: Synthetic oligonucleotide
auuauauugaaucgcauuc

SEQ ID NO: 1938774 - RNA, 19 nt, Artificial Sequence
  Description of Artificial Sequence: Synthetic oligonucleotide
cuugaaaaguauuaggugg

SEQ ID NO: 1938775 - RNA, 19 nt, Artificial Sequence
  Description of Artificial Sequence: Synthetic oligonucleotide
uguguuaugcaccauauca

SEQ ID NO: 1938776 - RNA, 19 nt, Artificial Sequence
  Description of Artificial Sequence: Synthetic oligonucleotide
ucucaaaucuuccaguugg

SEQ ID NO: 1938777 - RNA, 19 nt, Artificial Sequence
  Description of Artificial Sequence: Synthetic oligonucleotide
agaauuuagacuguggagc

SEQ ID NO: 1938778 - RNA, 19 nt, Artificial Sequence
  Description of Artificial Sequence: Synthetic oligonucleotide
ucuagagucacauaggcug

SEQ ID NO: 1938779 - RNA, 19 nt, Artificial Sequence
  Description of Artificial Sequence: Synthetic oligonucleotide
aaucgcauuccauaucuac

SEQ ID NO: 1938780 - RNA, 19 nt, Artificial Sequence
  Description of Artificial Sequence: Synthetic oligonucleotide
gaagaaaucucuucugccg

SEQ ID NO: 1938781 - RNA, 19 nt, Artificial Sequence
  Description of Artificial Sequence: Synthetic oligonucleotide
aagaauuuagacuguggag

SEQ ID NO: 1938782 - RNA, 19 nt, Artificial Sequence
  Description of Artificial Sequence: Synthetic oligonucleotide
aaggaaaguugucaucgcc

SEQ ID NO: 1938783 - RNA, 19 nt, Artificial Sequence
  Description of Artificial Sequence: Synthetic oligonucleotide
aaaguugucaucgccuugc

SEQ ID NO: 1938784 - RNA, 19 nt, Artificial Sequence
  Description of Artificial Sequence: Synthetic oligonucleotide
uagcauagguuuuaaaagg

SEQ ID NO: 1938785 - RNA, 19 nt, Artificial Sequence
  Description of Artificial Sequence: Synthetic oligonucleotide
gaucacguauaucacaccg

SEQ ID NO: 1938786 - RNA, 19 nt, Artificial Sequence
  Description of Artificial Sequence: Synthetic oligonucleotide
uuauucauggcuuccacgc

SEQ ID NO: 1938787 - RNA, 19 nt, Artificial Sequence
  Description of Artificial Sequence: Synthetic oligonucleotide
uuucaaaacaucgauauuc

SEQ ID NO: 1938788 - RNA, 19 nt, Artificial Sequence
  Description of Artificial Sequence: Synthetic oligonucleotide
uccaguuggguccaaacgg

SEQ ID NO: 1938789 - RNA, 19 nt, Artificial Sequence
  Description of Artificial Sequence: Synthetic oligonucleotide
aaaggaaaguugucaucgc

SEQ ID NO: 1938790 - RNA, 19 nt, Artificial Sequence
  Description of Artificial Sequence: Synthetic oligonucleotide
uccuccaguaacaaaagcc

SEQ ID NO: 1938791 - RNA, 19 nt, Artificial Sequence
  Description of Artificial Sequence: Synthetic oligonucleotide
auuguuuaucaccacauca

SEQ ID NO: 1938792 - RNA, 19 nt, Artificial Sequence
  Description of Artificial Sequence: Synthetic oligonucleotide
auaucuaccccauucagcu

SEQ ID NO: 1938793 - RNA, 19 nt, Artificial Sequence
  Description of Artificial Sequence: Synthetic oligonucleotide
cuggcuaucacacacuggg

SEQ ID NO: 1938794 - RNA, 19 nt, Artificial Sequence
  Description of Artificial Sequence: Synthetic oligonucleotide
uccacucucagcauagacg

SEQ ID NO: 1938795 - RNA, 19 nt, Artificial Sequence
  Description of Artificial Sequence: Synthetic oligonucleotide
uucaaaacaucgauauucc

SEQ ID NO: 1938796 - RNA, 19 nt, Artificial Sequence
  Description of Artificial Sequence: Synthetic oligonucleotide
aaauacuuccucuccacca

SEQ ID NO: 1938797 - RNA, 19 nt, Artificial Sequence
  Description of Artificial Sequence: Synthetic oligonucleotide
agcugcaagagacuuauuc

SEQ ID NO: 1938798 - RNA, 19 nt, Artificial Sequence
  Description of Artificial Sequence: Synthetic oligonucleotide
ugcccugccacuuugauca

SEQ ID NO: 1938799 - RNA, 19 nt, Artificial Sequence
  Description of Artificial Sequence: Synthetic oligonucleotide
cauagguuuuaaaaggggc

SEQ ID NO: 1938800 - RNA, 19 nt, Artificial Sequence
  Description of Artificial Sequence: Synthetic oligonucleotide
ugaagaacuuggcauuacg

SEQ ID NO: 1938801 - RNA, 19 nt, Artificial Sequence
  Description of Artificial Sequence: Synthetic oligonucleotide
aacaaaagccacuuuuccu

SEQ ID NO: 1938802 - RNA, 19 nt, Artificial Sequence
  Description of Artificial Sequence: Synthetic oligonucleotide
agaacuuggcauuacgaag

SEQ ID NO: 1938803 - RNA, 19 nt, Artificial Sequence
  Description of Artificial Sequence: Synthetic oligonucleotide
uauaucacaccgaauugca

SEQ ID NO: 1938804 - RNA, 19 nt, Artificial Sequence
  Description of Artificial Sequence: Synthetic oligonucleotide
aacuuggcauuacgaagcc

SEQ ID NO: 1938805 - RNA, 19 nt, Artificial Sequence
  Description of Artificial Sequence: Synthetic oligonucleotide
acagggaauucuuucaauc

SEQ ID NO: 1938806 - RNA, 19 nt, Artificial Sequence
  Description of Artificial Sequence: Synthetic oligonucleotide
acugggagaaacgaaauuc

SEQ ID NO: 1938807 - RNA, 19 nt, Artificial Sequence
  Description of Artificial Sequence: Synthetic oligonucleotide
uccccagucgaccacaggg

SEQ ID NO: 1938808 - RNA, 19 nt, Artificial Sequence
  Description of Artificial Sequence: Synthetic oligonucleotide
accugacagaaauacuucc

SEQ ID NO: 1938809 - RNA, 19 nt, Artificial Sequence
  Description of Artificial Sequence: Synthetic oligonucleotide
aguccuuccauuauauccc

SEQ ID NO: 1938810 - RNA, 19 nt, Artificial Sequence
  Description of Artificial Sequence: Synthetic oligonucleotide
accaucaaaucuaaugacc

SEQ ID NO: 1938811 - RNA, 19 nt, Artificial Sequence
  Description of Artificial Sequence: Synthetic oligonucleotide
cuuccaagcauuaggagac

SEQ ID NO: 1938812 - RNA, 19 nt, Artificial Sequence
  Description of Artificial Sequence: Synthetic oligonucleotide
aagaacuuggcauuacgaa

SEQ ID NO: 1938813 - RNA, 19 nt, Artificial Sequence
  Description of Artificial Sequence: Synthetic oligonucleotide
cuuggcauuacgaagccug

SEQ ID NO: 1938814 - RNA, 19 nt, Artificial Sequence
  Description of Artificial Sequence: Synthetic oligonucleotide
ucuuuagagaguugaauuc

SEQ ID NO: 1938815 - RNA, 19 nt, Artificial Sequence
  Description of Artificial Sequence: Synthetic oligonucleotide
ucaaaucuaaugaccgccc

SEQ ID NO: 1938816 - RNA, 19 nt, Artificial Sequence
  Description of Artificial Sequence: Synthetic oligonucleotide
uuuagacuguggagcaucg

SEQ ID NO: 1938817 - RNA, 19 nt, Artificial Sequence
  Description of Artificial Sequence: Synthetic oligonucleotide
ucuuucacugggagaaacg

SEQ ID NO: 1938818 - RNA, 19 nt, Artificial Sequence
  Description of Artificial Sequence: Synthetic oligonucleotide
aaugcagcuccuuucugug

SEQ ID NO: 1938819 - RNA, 19 nt, Artificial Sequence
  Description of Artificial Sequence: Synthetic oligonucleotide
uuccaguuggguccaaacg

SEQ ID NO: 1938820 - RNA, 19 nt, Artificial Sequence
  Description of Artificial Sequence: Synthetic oligonucleotide
uauugaaucgcauuccaua

SEQ ID NO: 1938821 - RNA, 19 nt, Artificial Sequence
  Description of Artificial Sequence: Synthetic oligonucleotide
ucugccguagcuuucaaaa

SEQ ID NO: 1938822 - RNA, 19 nt, Artificial Sequence
  Description of Artificial Sequence: Synthetic oligonucleotide
aaaguauuaggugguagca

SEQ ID NO: 1938823 - RNA, 19 nt, Artificial Sequence
  Description of Artificial Sequence: Synthetic oligonucleotide
acguauaucacaccgaauu

SEQ ID NO: 1938824 - RNA, 19 nt, Artificial Sequence
  Description of Artificial Sequence: Synthetic oligonucleotide
uuaucaccacaucaggaug

SEQ ID NO: 1938825 - RNA, 19 nt, Artificial Sequence
  Description of Artificial Sequence: Synthetic oligonucleotide
uuauauugaaucgcauucc

SEQ ID NO: 1938826 - RNA, 19 nt, Artificial Sequence
  Description of Artificial Sequence: Synthetic oligonucleotide
auuacgaagccugauccac

SEQ ID NO: 1938827 - RNA, 19 nt, Artificial Sequence
  Description of Artificial Sequence: Synthetic oligonucleotide
cugaauuauauugaaucgc

SEQ ID NO: 1938828 - RNA, 19 nt, Artificial Sequence
  Description of Artificial Sequence: Synthetic oligonucleotide
ugcugcauuguuuaucacc

SEQ ID NO: 1938829 - RNA, 19 nt, Artificial Sequence
  Description of Artificial Sequence: Synthetic oligonucleotide
uugcaugaaccuuauuucc

SEQ ID NO: 1938830 - RNA, 19 nt, Artificial Sequence
  Description of Artificial Sequence: Synthetic oligonucleotide
uuuuauaggccccggcuga

SEQ ID NO: 1938831 - RNA, 19 nt, Artificial Sequence
  Description of Artificial Sequence: Synthetic oligonucleotide
ugcuuuccaauuucuagag

SEQ ID NO: 1938832 - RNA, 19 nt, Artificial Sequence
  Description of Artificial Sequence: Synthetic oligonucleotide
uucacugggagaaacgaaa

SEQ ID NO: 1938833 - RNA, 19 nt, Artificial Sequence
  Description of Artificial Sequence: Synthetic oligonucleotide
cuuauucauggcuuccacg

SEQ ID NO: 1938834 - RNA, 19 nt, Artificial Sequence
  Description of Artificial Sequence: Synthetic oligonucleotide
uuuccaauuucuagaguca

SEQ ID NO: 1938835 - RNA, 19 nt, Artificial Sequence
  Description of Artificial Sequence: Synthetic oligonucleotide
uccaagaagcauaaucacu

SEQ ID NO: 1938836 - RNA, 19 nt, Artificial Sequence
  Description of Artificial Sequence: Synthetic oligonucleotide
gagaguugaauucaccuga

SEQ ID NO: 1938837 - RNA, 19 nt, Artificial Sequence
  Description of Artificial Sequence: Synthetic oligonucleotide
aacaucgauauuccugcug

SEQ ID NO: 1938838 - RNA, 19 nt, Artificial Sequence
  Description of Artificial Sequence: Synthetic oligonucleotide
aaaucuaaugaccgcccca

SEQ ID NO: 1938839 - RNA, 19 nt, Artificial Sequence
  Description of Artificial Sequence: Synthetic oligonucleotide
uuuagagaguugaauucac

SEQ ID NO: 1938840 - RNA, 19 nt, Artificial Sequence
  Description of Artificial Sequence: Synthetic oligonucleotide
uuagagaguugaauucacc

SEQ ID NO: 1938841 - RNA, 19 nt, Artificial Sequence
  Description of Artificial Sequence: Synthetic oligonucleotide
uaggcugugccauugagaa

SEQ ID NO: 1938842 - RNA, 19 nt, Artificial Sequence
  Description of Artificial Sequence: Synthetic oligonucleotide
acaccgaauugcaugaacc

SEQ ID NO: 1938843 - RNA, 19 nt, Artificial Sequence
  Description of Artificial Sequence: Synthetic oligonucleotide
gguccaaacggcuaaaggc

SEQ ID NO: 1938844 - RNA, 19 nt, Artificial Sequence
  Description of Artificial Sequence: Synthetic oligonucleotide
ugccguagcuuucaaaaca

SEQ ID NO: 1938845 - RNA, 19 nt, Artificial Sequence
  Description of Artificial Sequence: Synthetic oligonucleotide
aaguggcuagguuugcaag

SEQ ID NO: 1938846 - RNA, 19 nt, Artificial Sequence
  Description of Artificial Sequence: Synthetic oligonucleotide
aauacuuccucuccaccau

SEQ ID NO: 1938847 - RNA, 19 nt, Artificial Sequence
  Description of Artificial Sequence: Synthetic oligonucleotide
caucgccuugccaagaccg

SEQ ID NO: 1938848 - RNA, 19 nt, Artificial Sequence
  Description of Artificial Sequence: Synthetic oligonucleotide
ugauagcaagaaaugcagc

SEQ ID NO: 1938849 - RNA, 19 nt, Artificial Sequence
  Description of Artificial Sequence: Synthetic oligonucleotide
auugaaucgcauuccauau

SEQ ID NO: 1938850 - RNA, 19 nt, Artificial Sequence
  Description of Artificial Sequence: Synthetic oligonucleotide
uuacaacugcucaucuuag

SEQ ID NO: 1938851 - RNA, 19 nt, Artificial Sequence
  Description of Artificial Sequence: Synthetic oligonucleotide
aggaucacguauaucacac

SEQ ID NO: 1938852 - RNA, 19 nt, Artificial Sequence
  Description of Artificial Sequence: Synthetic oligonucleotide
ugcaaaggaaaguggcuag

SEQ ID NO: 1938853 - RNA, 19 nt, Artificial Sequence
  Description of Artificial Sequence: Synthetic oligonucleotide
gauagcaagaaaugcagcu

SEQ ID NO: 1938854 - RNA, 19 nt, Artificial Sequence
  Description of Artificial Sequence: Synthetic oligonucleotide
uccaguaacaaaagccacu

SEQ ID NO: 1938855 - RNA, 19 nt, Artificial Sequence
  Description of Artificial Sequence: Synthetic oligonucleotide
gaacgcgcgacccagcugc

SEQ ID NO: 1938856 - RNA, 19 nt, Artificial Sequence
  Description of Artificial Sequence: Synthetic oligonucleotide
aaguugucaucgccuugcc

SEQ ID NO: 1938857 - RNA, 19 nt, Artificial Sequence
  Description of Artificial Sequence: Synthetic oligonucleotide
ucgaugcuuugauagagug

SEQ ID NO: 1938858 - RNA, 19 nt, Artificial Sequence
  Description of Artificial Sequence: Synthetic oligonucleotide
aucgcauuccauaucuacc

SEQ ID NO: 1938859 - RNA, 19 nt, Artificial Sequence
  Description of Artificial Sequence: Synthetic oligonucleotide
uucugugcuuuaauuagcu

SEQ ID NO: 1938860 - RNA, 19 nt, Artificial Sequence
  Description of Artificial Sequence: Synthetic oligonucleotide
ucacguauaucacaccgaa

SEQ ID NO: 1938861 - RNA, 19 nt, Artificial Sequence
  Description of Artificial Sequence: Synthetic oligonucleotide
uagugauagcaagaaaugc

SEQ ID NO: 1938862 - RNA, 19 nt, Artificial Sequence
  Description of Artificial Sequence: Synthetic oligonucleotide
ugagaacuaugucaguuau

SEQ ID NO: 1938863 - RNA, 19 nt, Artificial Sequence
  Description of Artificial Sequence: Synthetic oligonucleotide
auuuagacuguggagcauc

SEQ ID NO: 1938864 - RNA, 19 nt, Artificial Sequence
  Description of Artificial Sequence: Synthetic oligonucleotide
agugauagcaagaaaugca

SEQ ID NO: 1938865 - RNA, 19 nt, Artificial Sequence
  Description of Artificial Sequence: Synthetic oligonucleotide
ugggagaaacgaaauuccc

SEQ ID NO: 1938866 - RNA, 19 nt, Artificial Sequence
  Description of Artificial Sequence: Synthetic oligonucleotide
agcauagguuuuaaaaggg

SEQ ID NO: 1938867 - RNA, 19 nt, Artificial Sequence
  Description of Artificial Sequence: Synthetic oligonucleotide
auuaggugguagcauaggu

SEQ ID NO: 1938868 - RNA, 19 nt, Artificial Sequence
  Description of Artificial Sequence: Synthetic oligonucleotide
aaaaggggcaggaagaauu

SEQ ID NO: 1938869 - RNA, 19 nt, Artificial Sequence
  Description of Artificial Sequence: Synthetic oligonucleotide
uagaaaggaaaguugucau

SEQ ID NO: 1938870 - RNA, 19 nt, Artificial Sequence
  Description of Artificial Sequence: Synthetic oligonucleotide
guauaucacaccgaauugc

SEQ ID NO: 1938871 - RNA, 19 nt, Artificial Sequence
  Description of Artificial Sequence: Synthetic oligonucleotide
uccuguuuuagaagaaauc

SEQ ID NO: 1938872 - RNA, 19 nt, Artificial Sequence
  Description of Artificial Sequence: Synthetic oligonucleotide
uuaugcaccauaucaggau

SEQ ID NO: 1938873 - RNA, 19 nt, Artificial Sequence
  Description of Artificial Sequence: Synthetic oligonucleotide
uagcuuucaaaacaucgau

SEQ ID NO: 1938874 - RNA, 19 nt, Artificial Sequence
  Description of Artificial Sequence: Synthetic oligonucleotide
agaaacgaaauucccugcu

SEQ ID NO: 1938875 - RNA, 19 nt, Artificial Sequence
  Description of Artificial Sequence: Synthetic oligonucleotide
aaugaccgccccauuaauc

SEQ ID NO: 1938876 - RNA, 19 nt, Artificial Sequence
  Description of Artificial Sequence: Synthetic oligonucleotide
aguauuaggugguagcaua

SEQ ID NO: 1938877 - RNA, 19 nt, Artificial Sequence
  Description of Artificial Sequence: Synthetic oligonucleotide
guugucaucgccuugccaa

SEQ ID NO: 1938878 - RNA, 19 nt, Artificial Sequence
  Description of Artificial Sequence: Synthetic oligonucleotide
ucaucuuaggagccuuuug

SEQ ID NO: 1938879 - RNA, 19 nt, Artificial Sequence
  Description of Artificial Sequence: Synthetic oligonucleotide
caagcauuaggagacaguc

SEQ ID NO: 1938880 - RNA, 19 nt, Artificial Sequence
  Description of Artificial Sequence: Synthetic oligonucleotide
gagaaacgaaauucccugc

SEQ ID NO: 1938881 - RNA, 19 nt, Artificial Sequence
  Description of Artificial Sequence: Synthetic oligonucleotide
auuauaucccacuccuccu

SEQ ID NO: 1938882 - RNA, 19 nt, Artificial Sequence
  Description of Artificial Sequence: Synthetic oligonucleotide
caucaaaucuaaugaccgc

SEQ ID NO: 1938883 - RNA, 19 nt, Artificial Sequence
  Description of Artificial Sequence: Synthetic oligonucleotide
ggugaccuucuuuagagag

SEQ ID NO: 1938884 - RNA, 19 nt, Artificial Sequence
  Description of Artificial Sequence: Synthetic oligonucleotide
guagugauagcaagaaaug

SEQ ID NO: 1938885 - RNA, 19 nt, Artificial Sequence
  Description of Artificial Sequence: Synthetic oligonucleotide
agacacccgagccaagaac

SEQ ID NO: 1938886 - RNA, 19 nt, Artificial Sequence
  Description of Artificial Sequence: Synthetic oligonucleotide
uaauuagcugcuuuccaau

SEQ ID NO: 1938887 - RNA, 19 nt, Artificial Sequence
  Description of Artificial Sequence: Synthetic oligonucleotide
aucacaccgaauugcauga

SEQ ID NO: 1938888 - RNA, 19 nt, Artificial Sequence
  Description of Artificial Sequence: Synthetic oligonucleotide
auagacgguagugauagca

SEQ ID NO: 1938889 - RNA, 19 nt, Artificial Sequence
  Description of Artificial Sequence: Synthetic oligonucleotide
uauuaggugguagcauagg

SEQ ID NO: 1938890 - RNA, 19 nt, Artificial Sequence
  Description of Artificial Sequence: Synthetic oligonucleotide
uauucauggcuuccacgcc

SEQ ID NO: 1938891 - RNA, 19 nt, Artificial Sequence
  Description of Artificial Sequence: Synthetic oligonucleotide
aaaggaaaguggcuagguu

SEQ ID NO: 1938892 - RNA, 19 nt, Artificial Sequence
  Description of Artificial Sequence: Synthetic oligonucleotide
gaauucaccugacagaaau

SEQ ID NO: 1938893 - RNA, 19 nt, Artificial Sequence
  Description of Artificial Sequence: Synthetic oligonucleotide
agacuuauucauggcuucc

SEQ ID NO: 1938894 - RNA, 19 nt, Artificial Sequence
  Description of Artificial Sequence: Synthetic oligonucleotide
aauuagcugcuuuccaauu

SEQ ID NO: 1938895 - RNA, 19 nt, Artificial Sequence
  Description of Artificial Sequence: Synthetic oligonucleotide
agacgguagugauagcaag

SEQ ID NO: 1938896 - RNA, 19 nt, Artificial Sequence
  Description of Artificial Sequence: Synthetic oligonucleotide
uauaucccacuccuccuug

SEQ ID NO: 1938897 - RNA, 19 nt, Artificial Sequence
  Description of Artificial Sequence: Synthetic oligonucleotide
aaucuaaugaccgccccau

SEQ ID NO: 1938898 - RNA, 19 nt, Artificial Sequence
  Description of Artificial Sequence: Synthetic oligonucleotide
uagacuguggagcaucgau

SEQ ID NO: 1938899 - RNA, 19 nt, Artificial Sequence
  Description of Artificial Sequence: Synthetic oligonucleotide
ccacucucagcauagacgg

SEQ ID NO: 1938900 - RNA, 19 nt, Artificial Sequence
  Description of Artificial Sequence: Synthetic oligonucleotide
uuaggugguagcauagguu

SEQ ID NO: 1938901 - RNA, 19 nt, Artificial Sequence
  Description of Artificial Sequence: Synthetic oligonucleotide
uccaauuucuagagucaca

SEQ ID NO: 1938902 - RNA, 19 nt, Artificial Sequence
  Description of Artificial Sequence: Synthetic oligonucleotide
cucaaaucuuccaguuggg

SEQ ID NO: 1938903 - RNA, 19 nt, Artificial Sequence
  Description of Artificial Sequence: Synthetic oligonucleotide
aguuauggucuuccaagca

SEQ ID NO: 1938904 - RNA, 19 nt, Artificial Sequence
  Description of Artificial Sequence: Synthetic oligonucleotide
gcauagacgguagugauag

SEQ ID NO: 1938905 - RNA, 19 nt, Artificial Sequence
  Description of Artificial Sequence: Synthetic oligonucleotide
ugaaccuuauuuccuguuu

SEQ ID NO: 1938906 - RNA, 19 nt, Artificial Sequence
  Description of Artificial Sequence: Synthetic oligonucleotide
aguggcuagguuugcaagu

SEQ ID NO: 1938907 - RNA, 19 nt, Artificial Sequence
  Description of Artificial Sequence: Synthetic oligonucleotide
ucgauauuccugcuggcua

SEQ ID NO: 1938908 - RNA, 19 nt, Artificial Sequence
  Description of Artificial Sequence: Synthetic oligonucleotide
ccccauuaauccaagaagc

SEQ ID NO: 1938909 - RNA, 19 nt, Artificial Sequence
  Description of Artificial Sequence: Synthetic oligonucleotide
ugcuggcuaucacacacug

SEQ ID NO: 1938910 - RNA, 19 nt, Artificial Sequence
  Description of Artificial Sequence: Synthetic oligonucleotide
aagaacgcgcgacccagcu

SEQ ID NO: 1938911 - RNA, 19 nt, Artificial Sequence
  Description of Artificial Sequence: Synthetic oligonucleotide
uccaaacggcuaaaggcac

SEQ ID NO: 1938912 - RNA, 19 nt, Artificial Sequence
  Description of Artificial Sequence: Synthetic oligonucleotide
aacggcuaaaggcaccuuu

SEQ ID NO: 1938913 - RNA, 19 nt, Artificial Sequence
  Description of Artificial Sequence: Synthetic oligonucleotide
aagaccgguaccuccucca

SEQ ID NO: 1938914 - RNA, 19 nt, Artificial Sequence
  Description of Artificial Sequence: Synthetic oligonucleotide
uaccccauucagcugcaag

SEQ ID NO: 1938915 - RNA, 19 nt, Artificial Sequence
  Description of Artificial Sequence: Synthetic oligonucleotide
caucgaugcuuugauagag

SEQ ID NO: 1938916 - RNA, 19 nt, Artificial Sequence
  Description of Artificial Sequence: Synthetic oligonucleotide
gagacuuauucauggcuuc

SEQ ID NO: 1938917 - RNA, 19 nt, Artificial Sequence
  Description of Artificial Sequence: Synthetic oligonucleotide
ucagcugcaagagacuuau

SEQ ID NO: 1938918 - RNA, 19 nt, Artificial Sequence
  Description of Artificial Sequence: Synthetic oligonucleotide
ucugugcuuuaauuagcug

SEQ ID NO: 1938919 - RNA, 19 nt, Artificial Sequence
  Description of Artificial Sequence: Synthetic oligonucleotide
aaccuuauuuccuguuuua

SEQ ID NO: 1938920 - RNA, 19 nt, Artificial Sequence
  Description of Artificial Sequence: Synthetic oligonucleotide
uuccacgccugauuuagcu

SEQ ID NO: 1938921 - RNA, 19 nt, Artificial Sequence
  Description of Artificial Sequence: Synthetic oligonucleotide
cugauuuagcugaagaacu

SEQ ID NO: 1938922 - RNA, 19 nt, Artificial Sequence
  Description of Artificial Sequence: Synthetic oligonucleotide
aaacaucgauauuccugcu

SEQ ID NO: 1938923 - RNA, 19 nt, Artificial Sequence
  Description of Artificial Sequence: Synthetic oligonucleotide
auaucccacuccuccuugg

SEQ ID NO: 1938924 - RNA, 19 nt, Artificial Sequence
  Description of Artificial Sequence: Synthetic oligonucleotide
uuauaucccacuccuccuu

SEQ ID NO: 1938925 - RNA, 19 nt, Artificial Sequence
  Description of Artificial Sequence: Synthetic oligonucleotide
uugaaucgcauuccauauc

SEQ ID NO: 1938926 - RNA, 19 nt, Artificial Sequence
  Description of Artificial Sequence: Synthetic oligonucleotide
guauuaggugguagcauag

SEQ ID NO: 1938927 - RNA, 19 nt, Artificial Sequence
  Description of Artificial Sequence: Synthetic oligonucleotide
ccauucagcugcaagagac

SEQ ID NO: 1938928 - RNA, 19 nt, Artificial Sequence
  Description of Artificial Sequence: Synthetic oligonucleotide
agaagcauaaucacugcaa

SEQ ID NO: 1938929 - RNA, 19 nt, Artificial Sequence
  Description of Artificial Sequence: Synthetic oligonucleotide
gccccauuaauccaagaag

SEQ ID NO: 1938930 - RNA, 19 nt, Artificial Sequence
  Description of Artificial Sequence: Synthetic oligonucleotide
uuacgaagccugauccacu

SEQ ID NO: 1938931 - RNA, 19 nt, Artificial Sequence
  Description of Artificial Sequence: Synthetic oligonucleotide
aaguauuaggugguagcau

SEQ ID NO: 1938932 - RNA, 19 nt, Artificial Sequence
  Description of Artificial Sequence: Synthetic oligonucleotide
cauuaggagacagucuuuc

SEQ ID NO: 1938933 - RNA, 19 nt, Artificial Sequence
  Description of Artificial Sequence: Synthetic oligonucleotide
accucagaggcccgguuuc

SEQ ID NO: 1938934 - RNA, 19 nt, Artificial Sequence
  Description of Artificial Sequence: Synthetic oligonucleotide
uugucaucgccuugccaag

SEQ ID NO: 1938935 - RNA, 19 nt, Artificial Sequence
  Description of Artificial Sequence: Synthetic oligonucleotide
agaguugaauucaccugac

SEQ ID NO: 1938936 - RNA, 19 nt, Artificial Sequence
  Description of Artificial Sequence: Synthetic oligonucleotide
cagggaauucuuucaauca

SEQ ID NO: 1938937 - RNA, 19 nt, Artificial Sequence
  Description of Artificial Sequence: Synthetic oligonucleotide
cuuccaguuggguccaaac

SEQ ID NO: 1938938 - RNA, 19 nt, Artificial Sequence
  Description of Artificial Sequence: Synthetic oligonucleotide
ucacugggagaaacgaaau

SEQ ID NO: 1938939 - RNA, 19 nt, Artificial Sequence
  Description of Artificial Sequence: Synthetic oligonucleotide
uccaagcauuaggagacag

SEQ ID NO: 1938940 - RNA, 19 nt, Artificial Sequence
  Description of Artificial Sequence: Synthetic oligonucleotide
ugaugaguccuuccauuau

SEQ ID NO: 1938941 - RNA, 19 nt, Artificial Sequence
  Description of Artificial Sequence: Synthetic oligonucleotide
cuuccugaugaguccuucc

SEQ ID NO: 1938942 - RNA, 19 nt, Artificial Sequence
  Description of Artificial Sequence: Synthetic oligonucleotide
cauaaucacugcaaaggaa

SEQ ID NO: 1938943 - RNA, 19 nt, Artificial Sequence
  Description of Artificial Sequence: Synthetic oligonucleotide
gaugaguccuuccauuaua

SEQ ID NO: 1938944 - RNA, 19 nt, Artificial Sequence
  Description of Artificial Sequence: Synthetic oligonucleotide
cauuguuuaucaccacauc

SEQ ID NO: 1938945 - RNA, 19 nt, Artificial Sequence
  Description of Artificial Sequence: Synthetic oligonucleotide
uccauaguccccagucgac

SEQ ID NO: 1938946 - RNA, 19 nt, Artificial Sequence
  Description of Artificial Sequence: Synthetic oligonucleotide
ucaucgccuugccaagacc

SEQ ID NO: 1938947 - RNA, 19 nt, Artificial Sequence
  Description of Artificial Sequence: Synthetic oligonucleotide
ugccaagaccgguaccucc

SEQ ID NO: 1938948 - RNA, 19 nt, Artificial Sequence
  Description of Artificial Sequence: Synthetic oligonucleotide
caccauaucaggaucacgu

SEQ ID NO: 1938949 - RNA, 19 nt, Artificial Sequence
  Description of Artificial Sequence: Synthetic oligonucleotide
aggaaaguugucaucgccu

SEQ ID NO: 1938950 - RNA, 19 nt, Artificial Sequence
  Description of Artificial Sequence: Synthetic oligonucleotide
guccaaacggcuaaaggca

SEQ ID NO: 1938951 - RNA, 19 nt, Artificial Sequence
  Description of Artificial Sequence: Synthetic oligonucleotide
ccugauuuagcugaagaac

SEQ ID NO: 1938952 - RNA, 19 nt, Artificial Sequence
  Description of Artificial Sequence: Synthetic oligonucleotide
guaggcgagacacccgagc

SEQ ID NO: 1938953 - RNA, 19 nt, Artificial Sequence
  Description of Artificial Sequence: Synthetic oligonucleotide
uggagcaucgaugcuuuga

SEQ ID NO: 1938954 - RNA, 19 nt, Artificial Sequence
  Description of Artificial Sequence: Synthetic oligonucleotide
augcccugccacuuugauc

SEQ ID NO: 1938955 - RNA, 19 nt, Artificial Sequence
  Description of Artificial Sequence: Synthetic oligonucleotide
acccgagccaagaacgcgc

SEQ ID NO: 1938956 - RNA, 19 nt, Artificial Sequence
  Description of Artificial Sequence: Synthetic oligonucleotide
cuaucacacacugggcacc

SEQ ID NO: 1938957 - RNA, 19 nt, Artificial Sequence
  Description of Artificial Sequence: Synthetic oligonucleotide
uccacgccugauuuagcug

SEQ ID NO: 1938958 - RNA, 19 nt, Artificial Sequence
  Description of Artificial Sequence: Synthetic oligonucleotide
aaguuccuccauagucccc

SEQ ID NO: 1938959 - RNA, 19 nt, Artificial Sequence
  Description of Artificial Sequence: Synthetic oligonucleotide
caccugacagaaauacuuc

SEQ ID NO: 1938960 - RNA, 19 nt, Artificial Sequence
  Description of Artificial Sequence: Synthetic oligonucleotide
agaggcccgguuucgcagg

SEQ ID NO: 1938961 - RNA, 19 nt, Artificial Sequence
  Description of Artificial Sequence: Synthetic oligonucleotide
ucgaccacagggaauucuu

SEQ ID NO: 1938962 - RNA, 19 nt, Artificial Sequence
  Description of Artificial Sequence: Synthetic oligonucleotide
uaaugaccgccccauuaau

SEQ ID NO: 1938963 - RNA, 19 nt, Artificial Sequence
  Description of Artificial Sequence: Synthetic oligonucleotide
aagcauuaggagacagucu

SEQ ID NO: 1938964 - RNA, 19 nt, Artificial Sequence
  Description of Artificial Sequence: Synthetic oligonucleotide
caucaggaugcccugccac

SEQ ID NO: 1938965 - RNA, 19 nt, Artificial Sequence
  Description of Artificial Sequence: Synthetic oligonucleotide
uggcuaucacacacugggc

SEQ ID NO: 1938966 - RNA, 19 nt, Artificial Sequence
  Description of Artificial Sequence: Synthetic oligonucleotide
gagccaagaacgcgcgacc

SEQ ID NO: 1938967 - RNA, 19 nt, Artificial Sequence
  Description of Artificial Sequence: Synthetic oligonucleotide
guuaugcaccauaucagga

SEQ ID NO: 1938968 - RNA, 19 nt, Artificial Sequence
  Description of Artificial Sequence: Synthetic oligonucleotide
ggguccaaacggcuaaagg

SEQ ID NO: 1938969 - RNA, 19 nt, Artificial Sequence
  Description of Artificial Sequence: Synthetic oligonucleotide
agagacuuauucauggcuu

SEQ ID NO: 1938970 - RNA, 19 nt, Artificial Sequence
  Description of Artificial Sequence: Synthetic oligonucleotide
uauaggccccggcugaauu

SEQ ID NO: 1938971 - RNA, 19 nt, Artificial Sequence
  Description of Artificial Sequence: Synthetic oligonucleotide
aucgauauuccugcuggcu

SEQ ID NO: 1938972 - RNA, 19 nt, Artificial Sequence
  Description of Artificial Sequence: Synthetic oligonucleotide
ugucuuccugaugaguccu

SEQ ID NO: 1938973 - RNA, 19 nt, Artificial Sequence
  Description of Artificial Sequence: Synthetic oligonucleotide
gcaugaaccuuauuuccug

SEQ ID NO: 1938974 - RNA, 19 nt, Artificial Sequence
  Description of Artificial Sequence: Synthetic oligonucleotide
gguagugauagcaagaaau

SEQ ID NO: 1938975 - RNA, 19 nt, Artificial Sequence
  Description of Artificial Sequence: Synthetic oligonucleotide
aauuuagacuguggagcau

SEQ ID NO: 1938976 - RNA, 19 nt, Artificial Sequence
  Description of Artificial Sequence: Synthetic oligonucleotide
acugcaaaggaaaguggcu

SEQ ID NO: 1938977 - RNA, 19 nt, Artificial Sequence
  Description of Artificial Sequence: Synthetic oligonucleotide
gcauaaucacugcaaagga

SEQ ID NO: 1938978 - RNA, 19 nt, Artificial Sequence
  Description of Artificial Sequence: Synthetic oligonucleotide
cuuucacugggagaaacga

SEQ ID NO: 1938979 - RNA, 19 nt, Artificial Sequence
  Description of Artificial Sequence: Synthetic oligonucleotide
caucgauauuccugcuggc

SEQ ID NO: 1938980 - RNA, 19 nt, Artificial Sequence
  Description of Artificial Sequence: Synthetic oligonucleotide
cacaccgaauugcaugaac

SEQ ID NO: 1938981 - RNA, 19 nt, Artificial Sequence
  Description of Artificial Sequence: Synthetic oligonucleotide
cuuggugaccuucuuuaga

SEQ ID NO: 1938982 - RNA, 19 nt, Artificial Sequence
  Description of Artificial Sequence: Synthetic oligonucleotide
gacgguagugauagcaaga

SEQ ID NO: 1938983 - RNA, 19 nt, Artificial Sequence
  Description of Artificial Sequence: Synthetic oligonucleotide
accgguaccuccuccagua

SEQ ID NO: 1938984 - RNA, 19 nt, Artificial Sequence
  Description of Artificial Sequence: Synthetic oligonucleotide
gaguugaauucaccugaca

SEQ ID NO: 1938985 - RNA, 19 nt, Artificial Sequence
  Description of Artificial Sequence: Synthetic oligonucleotide
uucagcugcaagagacuua

SEQ ID NO: 1938986 - RNA, 19 nt, Artificial Sequence
  Description of Artificial Sequence: Synthetic oligonucleotide
caucuuaggagccuuuugu

SEQ ID NO: 1938987 - RNA, 19 nt, Artificial Sequence
  Description of Artificial Sequence: Synthetic oligonucleotide
aguugucaucgccuugcca

SEQ ID NO: 1938988 - RNA, 19 nt, Artificial Sequence
  Description of Artificial Sequence: Synthetic oligonucleotide
cugccguagcuuucaaaac

SEQ ID NO: 1938989 - RNA, 19 nt, Artificial Sequence
  Description of Artificial Sequence: Synthetic oligonucleotide
gucaguuauggucuuccaa

SEQ ID NO: 1938990 - RNA, 19 nt, Artificial Sequence
  Description of Artificial Sequence: Synthetic oligonucleotide
guuggguccaaacggcuaa

SEQ ID NO: 1938991 - RNA, 19 nt, Artificial Sequence
  Description of Artificial Sequence: Synthetic oligonucleotide
ugaccgccccauuaaucca

SEQ ID NO: 1938992 - RNA, 19 nt, Artificial Sequence
  Description of Artificial Sequence: Synthetic oligonucleotide
aaaggggcaggaagaauuu

SEQ ID NO: 1938993 - RNA, 19 nt, Artificial Sequence
  Description of Artificial Sequence: Synthetic oligonucleotide
agaaaucucuucugccgua

SEQ ID NO: 1938994 - RNA, 19 nt, Artificial Sequence
  Description of Artificial Sequence: Synthetic oligonucleotide
ucuaccccauucagcugca

SEQ ID NO: 1938995 - RNA, 19 nt, Artificial Sequence
  Description of Artificial Sequence: Synthetic oligonucleotide
cauaguccccagucgacca

SEQ ID NO: 1938996 - RNA, 19 nt, Artificial Sequence
  Description of Artificial Sequence: Synthetic oligonucleotide
cuaaaggcaccuuugguuu

SEQ ID NO: 1938997 - RNA, 19 nt, Artificial Sequence
  Description of Artificial Sequence: Synthetic oligonucleotide
cauuacgaagccugaucca

SEQ ID NO: 1938998 - RNA, 19 nt, Artificial Sequence
  Description of Artificial Sequence: Synthetic oligonucleotide
gcuaucacacacugggcac

SEQ ID NO: 1938999 - RNA, 19 nt, Artificial Sequence
  Description of Artificial Sequence: Synthetic oligonucleotide
acacccgagccaagaacgc

SEQ ID NO: 1939000 - RNA, 19 nt, Artificial Sequence
  Description of Artificial Sequence: Synthetic oligonucleotide
agaccgguaccuccuccag

SEQ ID NO: 1939001 - RNA, 19 nt, Artificial Sequence
  Description of Artificial Sequence: Synthetic oligonucleotide
ucucagcauagacgguagu

SEQ ID NO: 1939002 - RNA, 19 nt, Artificial Sequence
  Description of Artificial Sequence: Synthetic oligonucleotide
acucucagcauagacggua

SEQ ID NO: 1939003 - RNA, 19 nt, Artificial Sequence
  Description of Artificial Sequence: Synthetic oligonucleotide
accauaucaggaucacgua

SEQ ID NO: 1939004 - RNA, 19 nt, Artificial Sequence
  Description of Artificial Sequence: Synthetic oligonucleotide
gaaaguggcuagguuugca

SEQ ID NO: 1939005 - RNA, 19 nt, Artificial Sequence
  Description of Artificial Sequence: Synthetic oligonucleotide
cuccauaguccccagucga

SEQ ID NO: 1939006 - RNA, 19 nt, Artificial Sequence
  Description of Artificial Sequence: Synthetic oligonucleotide
ggcuagguuugcaaguucc

SEQ ID NO: 1939007 - RNA, 19 nt, Artificial Sequence
  Description of Artificial Sequence: Synthetic oligonucleotide
gguuucgcaggguaggcga

SEQ ID NO: 1939008 - RNA, 19 nt, Artificial Sequence
  Description of Artificial Sequence: Synthetic oligonucleotide
aaauucccugcugcauugu

SEQ ID NO: 1939009 - RNA, 19 nt, Artificial Sequence
  Description of Artificial Sequence: Synthetic oligonucleotide
cagaggcccgguuucgcag

SEQ ID NO: 1939010 - RNA, 19 nt, Artificial Sequence
  Description of Artificial Sequence: Synthetic oligonucleotide
gcuuccacgccugauuuag

SEQ ID NO: 1939011 - RNA, 19 nt, Artificial Sequence
  Description of Artificial Sequence: Synthetic oligonucleotide
aaaccucagaggcccgguu

SEQ ID NO: 1939012 - RNA, 19 nt, Artificial Sequence
  Description of Artificial Sequence: Synthetic oligonucleotide
acggcuaaaggcaccuuug

SEQ ID NO: 1939013 - RNA, 19 nt, Artificial Sequence
  Description of Artificial Sequence: Synthetic oligonucleotide
ugcaccauaucaggaucac

SEQ ID NO: 1939014 - RNA, 19 nt, Artificial Sequence
  Description of Artificial Sequence: Synthetic oligonucleotide
aucacguauaucacaccga

SEQ ID NO: 1939015 - RNA, 19 nt, Artificial Sequence
  Description of Artificial Sequence: Synthetic oligonucleotide
auucagcugcaagagacuu

SEQ ID NO: 1939016 - RNA, 19 nt, Artificial Sequence
  Description of Artificial Sequence: Synthetic oligonucleotide
cacauaggcugugccauug

SEQ ID NO: 1939017 - RNA, 19 nt, Artificial Sequence
  Description of Artificial Sequence: Synthetic oligonucleotide
augaguccuuccauuauau

SEQ ID NO: 1939018 - RNA, 19 nt, Artificial Sequence
  Description of Artificial Sequence: Synthetic oligonucleotide
gcaaaggaaaguggcuagg

SEQ ID NO: 1939019 - RNA, 19 nt, Artificial Sequence
  Description of Artificial Sequence: Synthetic oligonucleotide
gucaucgccuugccaagac

SEQ ID NO: 1939020 - RNA, 19 nt, Artificial Sequence
  Description of Artificial Sequence: Synthetic oligonucleotide
ccccggcugaauuauauug

SEQ ID NO: 1939021 - RNA, 19 nt, Artificial Sequence
  Description of Artificial Sequence: Synthetic oligonucleotide
uuagacuguggagcaucga

SEQ ID NO: 1939022 - RNA, 19 nt, Artificial Sequence
  Description of Artificial Sequence: Synthetic oligonucleotide
ggucuuccaagcauuagga

SEQ ID NO: 1939023 - RNA, 19 nt, Artificial Sequence
  Description of Artificial Sequence: Synthetic oligonucleotide
uuuauaggccccggcugaa

SEQ ID NO: 1939024 - RNA, 19 nt, Artificial Sequence
  Description of Artificial Sequence: Synthetic oligonucleotide
cuuccacgccugauuuagc

SEQ ID NO: 1939025 - RNA, 19 nt, Artificial Sequence
  Description of Artificial Sequence: Synthetic oligonucleotide
uggcuagguuugcaaguuc

SEQ ID NO: 1939026 - RNA, 19 nt, Artificial Sequence
  Description of Artificial Sequence: Synthetic oligonucleotide
agaacgcgcgacccagcug

SEQ ID NO: 1939027 - RNA, 19 nt, Artificial Sequence
  Description of Artificial Sequence: Synthetic oligonucleotide
gaggcccgguuucgcaggg

SEQ ID NO: 1939028 - RNA, 19 nt, Artificial Sequence
  Description of Artificial Sequence: Synthetic oligonucleotide
caagaacgcgcgacccagc

SEQ ID NO: 1939029 - RNA, 19 nt, Artificial Sequence
  Description of Artificial Sequence: Synthetic oligonucleotide
cauagacgguagugauagc

SEQ ID NO: 1939030 - RNA, 19 nt, Artificial Sequence
  Description of Artificial Sequence: Synthetic oligonucleotide
gaagccugauccacucuca

SEQ ID NO: 1939031 - RNA, 19 nt, Artificial Sequence
  Description of Artificial Sequence: Synthetic oligonucleotide
cugcaagagacuuauucau

SEQ ID NO: 1939032 - RNA, 19 nt, Artificial Sequence
  Description of Artificial Sequence: Synthetic oligonucleotide
ggcugugccauugagaacu

SEQ ID NO: 1939033 - RNA, 19 nt, Artificial Sequence
  Description of Artificial Sequence: Synthetic oligonucleotide
agcuuucaaaacaucgaua

SEQ ID NO: 1939034 - RNA, 19 nt, Artificial Sequence
  Description of Artificial Sequence: Synthetic oligonucleotide
augcaccauaucaggauca

SEQ ID NO: 1939035 - RNA, 19 nt, Artificial Sequence
  Description of Artificial Sequence: Synthetic oligonucleotide
gauauuccugcuggcuauc

SEQ ID NO: 1939036 - RNA, 19 nt, Artificial Sequence
  Description of Artificial Sequence: Synthetic oligonucleotide
cguauaucacaccgaauug

SEQ ID NO: 1939037 - RNA, 19 nt, Artificial Sequence
  Description of Artificial Sequence: Synthetic oligonucleotide
cugcauuguuuaucaccac

SEQ ID NO: 1939038 - RNA, 19 nt, Artificial Sequence
  Description of Artificial Sequence: Synthetic oligonucleotide
acgaaauucccugcugcau

SEQ ID NO: 1939039 - RNA, 19 nt, Artificial Sequence
  Description of Artificial Sequence: Synthetic oligonucleotide
cuuaggagccuuuugucuu

SEQ ID NO: 1939040 - RNA, 19 nt, Artificial Sequence
  Description of Artificial Sequence: Synthetic oligonucleotide
uucgcaggguaggcgagac

SEQ ID NO: 1939041 - RNA, 19 nt, Artificial Sequence
  Description of Artificial Sequence: Synthetic oligonucleotide
aggcgagacacccgagcca

SEQ ID NO: 1939042 - RNA, 19 nt, Artificial Sequence
  Description of Artificial Sequence: Synthetic oligonucleotide
ugucaucgccuugccaaga

SEQ ID NO: 1939043 - RNA, 19 nt, Artificial Sequence
  Description of Artificial Sequence: Synthetic oligonucleotide
aucgaugcuuugauagagu

SEQ ID NO: 1939044 - RNA, 19 nt, Artificial Sequence
  Description of Artificial Sequence: Synthetic oligonucleotide
auauuccugcuggcuauca

SEQ ID NO: 1939045 - RNA, 19 nt, Artificial Sequence
  Description of Artificial Sequence: Synthetic oligonucleotide
cacccgagccaagaacgcg

SEQ ID NO: 1939046 - RNA, 19 nt, Artificial Sequence
  Description of Artificial Sequence: Synthetic oligonucleotide
cuugccaagaccgguaccu

SEQ ID NO: 1939047 - RNA, 19 nt, Artificial Sequence
  Description of Artificial Sequence: Synthetic oligonucleotide
uuucgcaggguaggcgaga

SEQ ID NO: 1939048 - RNA, 19 nt, Artificial Sequence
  Description of Artificial Sequence: Synthetic oligonucleotide
guccuuccauuauauccca

SEQ ID NO: 1939049 - RNA, 19 nt, Artificial Sequence
  Description of Artificial Sequence: Synthetic oligonucleotide
guuucgcaggguaggcgag

SEQ ID NO: 1939050 - RNA, 19 nt, Artificial Sequence
  Description of Artificial Sequence: Synthetic oligonucleotide
gaacuaugucaguuauggu

SEQ ID NO: 1939051 - RNA, 19 nt, Artificial Sequence
  Description of Artificial Sequence: Synthetic oligonucleotide
acccaggcuagaaaggaaa

SEQ ID NO: 1939052 - RNA, 19 nt, Artificial Sequence
  Description of Artificial Sequence: Synthetic oligonucleotide
uccugcuggcuaucacaca

SEQ ID NO: 1939053 - RNA, 19 nt, Artificial Sequence
  Description of Artificial Sequence: Synthetic oligonucleotide
cugcaaaggaaaguggcua

SEQ ID NO: 1939054 - RNA, 19 nt, Artificial Sequence
  Description of Artificial Sequence: Synthetic oligonucleotide
uaguccccagucgaccaca

SEQ ID NO: 1939055 - RNA, 19 nt, Artificial Sequence
  Description of Artificial Sequence: Synthetic oligonucleotide
gguaccuccuccaguaaca

SEQ ID NO: 1939056 - RNA, 19 nt, Artificial Sequence
  Description of Artificial Sequence: Synthetic oligonucleotide
cuagagucacauaggcugu

SEQ ID NO: 1939057 - RNA, 19 nt, Artificial Sequence
  Description of Artificial Sequence: Synthetic oligonucleotide
uuccaagcauuaggagaca

SEQ ID NO: 1939058 - RNA, 19 nt, Artificial Sequence
  Description of Artificial Sequence: Synthetic oligonucleotide
acgaagccugauccacucu

SEQ ID NO: 1939059 - RNA, 19 nt, Artificial Sequence
  Description of Artificial Sequence: Synthetic oligonucleotide
ccaaacggcuaaaggcacc

SEQ ID NO: 1939060 - RNA, 19 nt, Artificial Sequence
  Description of Artificial Sequence: Synthetic oligonucleotide
caccgaauugcaugaaccu

SEQ ID NO: 1939061 - RNA, 19 nt, Artificial Sequence
  Description of Artificial Sequence: Synthetic oligonucleotide
caugaaccuuauuuccugu

SEQ ID NO: 1939062 - RNA, 19 nt, Artificial Sequence
  Description of Artificial Sequence: Synthetic oligonucleotide
gucacauaggcugugccau

SEQ ID NO: 1939063 - RNA, 19 nt, Artificial Sequence
  Description of Artificial Sequence: Synthetic oligonucleotide
acuuggcauuacgaagccu

SEQ ID NO: 1939064 - RNA, 19 nt, Artificial Sequence
  Description of Artificial Sequence: Synthetic oligonucleotide
ccaagaacgcgcgacccag

SEQ ID NO: 1939065 - RNA, 19 nt, Artificial Sequence
  Description of Artificial Sequence: Synthetic oligonucleotide
aggguaggcgagacacccg

SEQ ID NO: 1939066 - RNA, 19 nt, Artificial Sequence
  Description of Artificial Sequence: Synthetic oligonucleotide
ggguaggcgagacacccga

SEQ ID NO: 1939067 - RNA, 19 nt, Artificial Sequence
  Description of Artificial Sequence: Synthetic oligonucleotide
uaggccccggcugaauuau

SEQ ID NO: 1939068 - RNA, 19 nt, Artificial Sequence
  Description of Artificial Sequence: Synthetic oligonucleotide
ccacgccugauuuagcuga

SEQ ID NO: 1939069 - RNA, 19 nt, Artificial Sequence
  Description of Artificial Sequence: Synthetic oligonucleotide
cugauccacucucagcaua

SEQ ID NO: 1939070 - RNA, 19 nt, Artificial Sequence
  Description of Artificial Sequence: Synthetic oligonucleotide
uuauaggccccggcugaau

SEQ ID NO: 1939071 - RNA, 19 nt, Artificial Sequence
  Description of Artificial Sequence: Synthetic oligonucleotide
agucgaccacagggaauuc

SEQ ID NO: 1939072 - RNA, 19 nt, Artificial Sequence
  Description of Artificial Sequence: Synthetic oligonucleotide
cauucagcugcaagagacu

SEQ ID NO: 1939073 - RNA, 19 nt, Artificial Sequence
  Description of Artificial Sequence: Synthetic oligonucleotide
gcaccauaucaggaucacg

SEQ ID NO: 1939074 - RNA, 19 nt, Artificial Sequence
  Description of Artificial Sequence: Synthetic oligonucleotide
caggcuagaaaggaaaguu

SEQ ID NO: 1939075 - RNA, 19 nt, Artificial Sequence
  Description of Artificial Sequence: Synthetic oligonucleotide
cugcugcauuguuuaucac

SEQ ID NO: 1939076 - RNA, 19 nt, Artificial Sequence
  Description of Artificial Sequence: Synthetic oligonucleotide
ucgcaggguaggcgagaca

SEQ ID NO: 1939077 - RNA, 19 nt, Artificial Sequence
  Description of Artificial Sequence: Synthetic oligonucleotide
agcauagacgguagugaua

SEQ ID NO: 1939078 - RNA, 19 nt, Artificial Sequence
  Description of Artificial Sequence: Synthetic oligonucleotide
gagcaucgaugcuuugaua

SEQ ID NO: 1939079 - RNA, 19 nt, Artificial Sequence
  Description of Artificial Sequence: Synthetic oligonucleotide
caaaggaaaguggcuaggu

SEQ ID NO: 1939080 - RNA, 19 nt, Artificial Sequence
  Description of Artificial Sequence: Synthetic oligonucleotide
aacgcgcgacccagcugcg

SEQ ID NO: 1939081 - RNA, 19 nt, Artificial Sequence
  Description of Artificial Sequence: Synthetic oligonucleotide
aguuggguccaaacggcua

SEQ ID NO: 1939082 - RNA, 19 nt, Artificial Sequence
  Description of Artificial Sequence: Synthetic oligonucleotide
gcuggcuaucacacacugg

SEQ ID NO: 1939083 - RNA, 19 nt, Artificial Sequence
  Description of Artificial Sequence: Synthetic oligonucleotide
ucacaccgaauugcaugaa

SEQ ID NO: 1939084 - RNA, 19 nt, Artificial Sequence
  Description of Artificial Sequence: Synthetic oligonucleotide
ggaaaguggcuagguuugc

SEQ ID NO: 1939085 - RNA, 19 nt, Artificial Sequence
  Description of Artificial Sequence: Synthetic oligonucleotide
gauccacucucagcauaga

SEQ ID NO: 1939086 - RNA, 19 nt, Artificial Sequence
  Description of Artificial Sequence: Synthetic oligonucleotide
ggagcaucgaugcuuugau

SEQ ID NO: 1939087 - RNA, 19 nt, Artificial Sequence
  Description of Artificial Sequence: Synthetic oligonucleotide
gaccgccccauuaauccaa

SEQ ID NO: 1939088 - RNA, 19 nt, Artificial Sequence
  Description of Artificial Sequence: Synthetic oligonucleotide
cccgagccaagaacgcgcg

SEQ ID NO: 1939089 - RNA, 19 nt, Artificial Sequence
  Description of Artificial Sequence: Synthetic oligonucleotide
cccggcugaauuauauuga

SEQ ID NO: 1939090 - RNA, 19 nt, Artificial Sequence
  Description of Artificial Sequence: Synthetic oligonucleotide
caaacggcuaaaggcaccu

SEQ ID NO: 1939091 - RNA, 19 nt, Artificial Sequence
  Description of Artificial Sequence: Synthetic oligonucleotide
gaaucgcauuccauaucua

SEQ ID NO: 1939092 - RNA, 19 nt, Artificial Sequence
  Description of Artificial Sequence: Synthetic oligonucleotide
aaacggcuaaaggcaccuu

SEQ ID NO: 1939093 - RNA, 19 nt, Artificial Sequence
  Description of Artificial Sequence: Synthetic oligonucleotide
acgccugauuuagcugaag

SEQ ID NO: 1939094 - RNA, 19 nt, Artificial Sequence
  Description of Artificial Sequence: Synthetic oligonucleotide
cauugagaacuaugucagu

SEQ ID NO: 1939095 - RNA, 19 nt, Artificial Sequence
  Description of Artificial Sequence: Synthetic oligonucleotide
cccgguuucgcaggguagg

SEQ ID NO: 1939096 - RNA, 19 nt, Artificial Sequence
  Description of Artificial Sequence: Synthetic oligonucleotide
aguccccagucgaccacag

SEQ ID NO: 1939097 - RNA, 19 nt, Artificial Sequence
  Description of Artificial Sequence: Synthetic oligonucleotide
cggcuaaaggcaccuuugg

SEQ ID NO: 1939098 - RNA, 19 nt, Artificial Sequence
  Description of Artificial Sequence: Synthetic oligonucleotide
caggaagaauuuagacugu

SEQ ID NO: 1939099 - RNA, 19 nt, Artificial Sequence
  Description of Artificial Sequence: Synthetic oligonucleotide
ggugguagcauagguuuua

SEQ ID NO: 1939100 - RNA, 19 nt, Artificial Sequence
  Description of Artificial Sequence: Synthetic oligonucleotide
cacccaggcuagaaaggaa

SEQ ID NO: 1939101 - RNA, 19 nt, Artificial Sequence
  Description of Artificial Sequence: Synthetic oligonucleotide
ggcuaaaggcaccuuuggu

SEQ ID NO: 1939102 - RNA, 19 nt, Artificial Sequence
  Description of Artificial Sequence: Synthetic oligonucleotide
accgccccauuaauccaag

SEQ ID NO: 1939103 - RNA, 19 nt, Artificial Sequence
  Description of Artificial Sequence: Synthetic oligonucleotide
guaccuccuccaguaacaa

SEQ ID NO: 1939104 - RNA, 19 nt, Artificial Sequence
  Description of Artificial Sequence: Synthetic oligonucleotide
agucuuucacugggagaaa

SEQ ID NO: 1939105 - RNA, 19 nt, Artificial Sequence
  Description of Artificial Sequence: Synthetic oligonucleotide
ucccugcugcauuguuuau

SEQ ID NO: 1939106 - RNA, 19 nt, Artificial Sequence
  Description of Artificial Sequence: Synthetic oligonucleotide
guggagcaucgaugcuuug

SEQ ID NO: 1939107 - RNA, 19 nt, Artificial Sequence
  Description of Artificial Sequence: Synthetic oligonucleotide
ccugacagaaauacuuccu

SEQ ID NO: 1939108 - RNA, 19 nt, Artificial Sequence
  Description of Artificial Sequence: Synthetic oligonucleotide
gccuugccaagaccgguac

SEQ ID NO: 1939109 - RNA, 19 nt, Artificial Sequence
  Description of Artificial Sequence: Synthetic oligonucleotide
acgcgcgacccagcugcgc

SEQ ID NO: 1939110 - RNA, 19 nt, Artificial Sequence
  Description of Artificial Sequence: Synthetic oligonucleotide
cacagggaauucuuucaau

SEQ ID NO: 1939111 - RNA, 19 nt, Artificial Sequence
  Description of Artificial Sequence: Synthetic oligonucleotide
gaccgguaccuccuccagu

SEQ ID NO: 1939112 - RNA, 19 nt, Artificial Sequence
  Description of Artificial Sequence: Synthetic oligonucleotide
ccuugccaagaccgguacc

SEQ ID NO: 1939113 - RNA, 19 nt, Artificial Sequence
  Description of Artificial Sequence: Synthetic oligonucleotide
ggcgagacacccgagccaa

SEQ ID NO: 1939114 - RNA, 19 nt, Artificial Sequence
  Description of Artificial Sequence: Synthetic oligonucleotide
cgagccaagaacgcgcgac

SEQ ID NO: 1939115 - RNA, 19 nt, Artificial Sequence
  Description of Artificial Sequence: Synthetic oligonucleotide
gguaggcgagacacccgag

SEQ ID NO: 1939116 - RNA, 19 nt, Artificial Sequence
  Description of Artificial Sequence: Synthetic oligonucleotide
ccggcugaauuauauugaa

SEQ ID NO: 1939117 - RNA, 19 nt, Artificial Sequence
  Description of Artificial Sequence: Synthetic oligonucleotide
gccaagaacgcgcgaccca

SEQ ID NO: 1939118 - RNA, 19 nt, Artificial Sequence
  Description of Artificial Sequence: Synthetic oligonucleotide
cagucgaccacagggaauu

SEQ ID NO: 1939119 - RNA, 19 nt, Artificial Sequence
  Description of Artificial Sequence: Synthetic oligonucleotide
aggugguagcauagguuuu

SEQ ID NO: 1939120 - RNA, 19 nt, Artificial Sequence
  Description of Artificial Sequence: Synthetic oligonucleotide
ccguagcuuucaaaacauc

SEQ ID NO: 1939121 - RNA, 19 nt, Artificial Sequence
  Description of Artificial Sequence: Synthetic oligonucleotide
gucgaccacagggaauucu

SEQ ID NO: 1939122 - RNA, 19 nt, Artificial Sequence
  Description of Artificial Sequence: Synthetic oligonucleotide
gaauugcaugaaccuuauu

SEQ ID NO: 1939123 - RNA, 19 nt, Artificial Sequence
  Description of Artificial Sequence: Synthetic oligonucleotide
cacgccugauuuagcugaa

SEQ ID NO: 1939124 - RNA, 19 nt, Artificial Sequence
  Description of Artificial Sequence: Synthetic oligonucleotide
cacguauaucacaccgaau

SEQ ID NO: 1939125 - RNA, 19 nt, Artificial Sequence
  Description of Artificial Sequence: Synthetic oligonucleotide
ccauaucaggaucacguau

SEQ ID NO: 1939126 - RNA, 19 nt, Artificial Sequence
  Description of Artificial Sequence: Synthetic oligonucleotide
ccacagggaauucuuucaa

SEQ ID NO: 1939127 - RNA, 19 nt, Artificial Sequence
  Description of Artificial Sequence: Synthetic oligonucleotide
ccucagaggcccgguuucg

SEQ ID NO: 1939128 - RNA, 19 nt, Artificial Sequence
  Description of Artificial Sequence: Synthetic oligonucleotide
ccauuaauccaagaagcau

SEQ ID NO: 1939129 - RNA, 19 nt, Artificial Sequence
  Description of Artificial Sequence: Synthetic oligonucleotide
gcaggguaggcgagacacc

SEQ ID NO: 1939130 - RNA, 19 nt, Artificial Sequence
  Description of Artificial Sequence: Synthetic oligonucleotide
cgguaccuccuccaguaac

SEQ ID NO: 1939131 - RNA, 19 nt, Artificial Sequence
  Description of Artificial Sequence: Synthetic oligonucleotide
cugcuggcuaucacacacu

SEQ ID NO: 1939132 - RNA, 19 nt, Artificial Sequence
  Description of Artificial Sequence: Synthetic oligonucleotide
cuaugucaguuauggucuu

SEQ ID NO: 1939133 - RNA, 19 nt, Artificial Sequence
  Description of Artificial Sequence: Synthetic oligonucleotide
cgcgcgacccagcugcgcc

SEQ ID NO: 1939134 - RNA, 19 nt, Artificial Sequence
  Description of Artificial Sequence: Synthetic oligonucleotide
ccccagucgaccacaggga

SEQ ID NO: 1939135 - RNA, 19 nt, Artificial Sequence
  Description of Artificial Sequence: Synthetic oligonucleotide
ccaagcauuaggagacagu

SEQ ID NO: 1939136 - RNA, 19 nt, Artificial Sequence
  Description of Artificial Sequence: Synthetic oligonucleotide
ccgguuucgcaggguaggc

SEQ ID NO: 1939137 - RNA, 19 nt, Artificial Sequence
  Description of Artificial Sequence: Synthetic oligonucleotide
cugggcacccaggcuagaa

SEQ ID NO: 1939138 - RNA, 19 nt, Artificial Sequence
  Description of Artificial Sequence: Synthetic oligonucleotide
cccauucagcugcaagaga

SEQ ID NO: 1939139 - RNA, 19 nt, Artificial Sequence
  Description of Artificial Sequence: Synthetic oligonucleotide
cucaucuuaggagccuuuu

SEQ ID NO: 1939140 - RNA, 19 nt, Artificial Sequence
  Description of Artificial Sequence: Synthetic oligonucleotide
gccguagcuuucaaaacau

SEQ ID NO: 1939141 - RNA, 19 nt, Artificial Sequence
  Description of Artificial Sequence: Synthetic oligonucleotide
gcccgguuucgcaggguag

SEQ ID NO: 1939142 - RNA, 19 nt, Artificial Sequence
  Description of Artificial Sequence: Synthetic oligonucleotide
ggcccgguuucgcagggua

SEQ ID NO: 1939143 - RNA, 19 nt, Artificial Sequence
  Description of Artificial Sequence: Synthetic oligonucleotide
cgguuucgcaggguaggcg

SEQ ID NO: 1939144 - RNA, 19 nt, Artificial Sequence
  Description of Artificial Sequence: Synthetic oligonucleotide
cccagucgaccacagggaa

SEQ ID NO: 1939145 - RNA, 19 nt, Artificial Sequence
  Description of Artificial Sequence: Synthetic oligonucleotide
gguuugcaaguuccuccau

SEQ ID NO: 1939146 - RNA, 19 nt, Artificial Sequence
  Description of Artificial Sequence: Synthetic oligonucleotide
ccaggcuagaaaggaaagu

SEQ ID NO: 1939147 - RNA, 19 nt, Artificial Sequence
  Description of Artificial Sequence: Synthetic oligonucleotide
cgauauuccugcuggcuau

SEQ ID NO: 1939148 - RNA, 19 nt, Artificial Sequence
  Description of Artificial Sequence: Synthetic oligonucleotide
gcaagaaaugcagcuccuu

SEQ ID NO: 1939149 - RNA, 19 nt, Artificial Sequence
  Description of Artificial Sequence: Synthetic oligonucleotide
aggcccgguuucgcagggu

SEQ ID NO: 1939150 - RNA, 19 nt, Artificial Sequence
  Description of Artificial Sequence: Synthetic oligonucleotide
cgagacacccgagccaaga

SEQ ID NO: 1939151 - RNA, 19 nt, Artificial Sequence
  Description of Artificial Sequence: Synthetic oligonucleotide
gcgagacacccgagccaag

SEQ ID NO: 1939152 - RNA, 19 nt, Artificial Sequence
  Description of Artificial Sequence: Synthetic oligonucleotide
caggaugcccugccacuuu

SEQ ID NO: 1939153 - RNA, 19 nt, Artificial Sequence
  Description of Artificial Sequence: Synthetic oligonucleotide
cgguagugauagcaagaaa

SEQ ID NO: 1939154 - RNA, 19 nt, Artificial Sequence
  Description of Artificial Sequence: Synthetic oligonucleotide
gcauuaggagacagucuuu

SEQ ID NO: 1939155 - RNA, 19 nt, Artificial Sequence
  Description of Artificial Sequence: Synthetic oligonucleotide
cuaccccauucagcugcaa

SEQ ID NO: 1939156 - RNA, 19 nt, Artificial Sequence
  Description of Artificial Sequence: Synthetic oligonucleotide
ggccccggcugaauuauau

SEQ ID NO: 1939157 - RNA, 19 nt, Artificial Sequence
  Description of Artificial Sequence: Synthetic oligonucleotide
ccagucgaccacagggaau

SEQ ID NO: 1939158 - RNA, 19 nt, Artificial Sequence
  Description of Artificial Sequence: Synthetic oligonucleotide
aggccccggcugaauuaua

SEQ ID NO: 1939159 - RNA, 19 nt, Artificial Sequence
  Description of Artificial Sequence: Synthetic oligonucleotide
gccccggcugaauuauauu

SEQ ID NO: 1939160 - RNA, 19 nt, Artificial Sequence
  Description of Artificial Sequence: Synthetic oligonucleotide
cggcugaauuauauugaau

SEQ ID NO: 1939161 - RNA, 19 nt, Artificial Sequence
  Description of Artificial Sequence: Synthetic oligonucleotide
cgccuugccaagaccggua

SEQ ID NO: 1939162 - RNA, 19 nt, Artificial Sequence
  Description of Artificial Sequence: Synthetic oligonucleotide
ccgagccaagaacgcgcga

SEQ ID NO: 1939163 - RNA, 19 nt, Artificial Sequence
  Description of Artificial Sequence: Synthetic oligonucleotide
ccgguaccuccuccaguaa

SEQ ID NO: 1939164 - RNA, 19 nt, Artificial Sequence
  Description of Artificial Sequence: Synthetic oligonucleotide
cagcugcaagagacuuauu

SEQ ID NO: 1939165 - RNA, 19 nt, Artificial Sequence
  Description of Artificial Sequence: Synthetic oligonucleotide
caagauauaaagcagaggc

SEQ ID NO: 1939166 - RNA, 19 nt, Artificial Sequence
  Description of Artificial Sequence: Synthetic oligonucleotide
uauguuagcagcaggauag

SEQ ID NO: 1939167 - RNA, 19 nt, Artificial Sequence
  Description of Artificial Sequence: Synthetic oligonucleotide
cucaauaaagacauggucc

SEQ ID NO: 1939168 - RNA, 19 nt, Artificial Sequence
  Description of Artificial Sequence: Synthetic oligonucleotide
uuuaacaacacagugacgu

SEQ ID NO: 1939169 - RNA, 19 nt, Artificial Sequence
  Description of Artificial Sequence: Synthetic oligonucleotide
uuaaauuccuaaaugcuca

SEQ ID NO: 1939170 - RNA, 19 nt, Artificial Sequence
  Description of Artificial Sequence: Synthetic oligonucleotide
ucuuacauuugccagaucu

SEQ ID NO: 1939171 - RNA, 19 nt, Artificial Sequence
  Description of Artificial Sequence: Synthetic oligonucleotide
aagaaugcaacaccuuuac

SEQ ID NO: 1939172 - RNA, 19 nt, Artificial Sequence
  Description of Artificial Sequence: Synthetic oligonucleotide
acaacuguuggauagauca

SEQ ID NO: 1939173 - RNA, 19 nt, Artificial Sequence
  Description of Artificial Sequence: Synthetic oligonucleotide
ugaaagaauagccaguacu

SEQ ID NO: 1939174 - RNA, 19 nt, Artificial Sequence
  Description of Artificial Sequence: Synthetic oligonucleotide
auagaucagguguaggugc

SEQ ID NO: 1939175 - RNA, 19 nt, Artificial Sequence
  Description of Artificial Sequence: Synthetic oligonucleotide
aauuucuugaaugguggcc

SEQ ID NO: 1939176 - RNA, 19 nt, Artificial Sequence
  Description of Artificial Sequence: Synthetic oligonucleotide
uguuggauagaucaggugu

SEQ ID NO: 1939177 - RNA, 19 nt, Artificial Sequence
  Description of Artificial Sequence: Synthetic oligonucleotide
uaaaugcucagaaucuugg

SEQ ID NO: 1939178 - RNA, 19 nt, Artificial Sequence
  Description of Artificial Sequence: Synthetic oligonucleotide
uuagacuugggucaguggc

SEQ ID NO: 1939179 - RNA, 19 nt, Artificial Sequence
  Description of Artificial Sequence: Synthetic oligonucleotide
gauacagucauucauuaca

SEQ ID NO: 1939180 - RNA, 19 nt, Artificial Sequence
  Description of Artificial Sequence: Synthetic oligonucleotide
ucaaccaucagcuccugcg

SEQ ID NO: 1939181 - RNA, 19 nt, Artificial Sequence
  Description of Artificial Sequence: Synthetic oligonucleotide
uugucaagaauuuugcagc

SEQ ID NO: 1939182 - RNA, 19 nt, Artificial Sequence
  Description of Artificial Sequence: Synthetic oligonucleotide
cagucauucauuacaaugg

SEQ ID NO: 1939183 - RNA, 19 nt, Artificial Sequence
  Description of Artificial Sequence: Synthetic oligonucleotide
aaugguggccuuaugacac

SEQ ID NO: 1939184 - RNA, 19 nt, Artificial Sequence
  Description of Artificial Sequence: Synthetic oligonucleotide
uacaacaacuguuggauag

SEQ ID NO: 1939185 - RNA, 19 nt, Artificial Sequence
  Description of Artificial Sequence: Synthetic oligonucleotide
gacacuacggcuuuuaaca

SEQ ID NO: 1939186 - RNA, 19 nt, Artificial Sequence
  Description of Artificial Sequence: Synthetic oligonucleotide
uucaagauauaaagcagag

SEQ ID NO: 1939187 - RNA, 19 nt, Artificial Sequence
  Description of Artificial Sequence: Synthetic oligonucleotide
aauuccuaaaugcucagaa

SEQ ID NO: 1939188 - RNA, 19 nt, Artificial Sequence
  Description of Artificial Sequence: Synthetic oligonucleotide
ugaggguagaacaugguug

SEQ ID NO: 1939189 - RNA, 19 nt, Artificial Sequence
  Description of Artificial Sequence: Synthetic oligonucleotide
aauucaagauauaaagcag

SEQ ID NO: 1939190 - RNA, 19 nt, Artificial Sequence
  Description of Artificial Sequence: Synthetic oligonucleotide
agguaggagaaauuguggc

SEQ ID NO: 1939191 - RNA, 19 nt, Artificial Sequence
  Description of Artificial Sequence: Synthetic oligonucleotide
auugagaacaauguucugg

SEQ ID NO: 1939192 - RNA, 19 nt, Artificial Sequence
  Description of Artificial Sequence: Synthetic oligonucleotide
aacacagugacguccaacu

SEQ ID NO: 1939193 - RNA, 19 nt, Artificial Sequence
  Description of Artificial Sequence: Synthetic oligonucleotide
agaacaauguucuggcuuc

SEQ ID NO: 1939194 - RNA, 19 nt, Artificial Sequence
  Description of Artificial Sequence: Synthetic oligonucleotide
acuauugcucugcaggccc

SEQ ID NO: 1939195 - RNA, 19 nt, Artificial Sequence
  Description of Artificial Sequence: Synthetic oligonucleotide
uagaacaugguugugagca

SEQ ID NO: 1939196 - RNA, 19 nt, Artificial Sequence
  Description of Artificial Sequence: Synthetic oligonucleotide
auuaaauuccuaaaugcuc

SEQ ID NO: 1939197 - RNA, 19 nt, Artificial Sequence
  Description of Artificial Sequence: Synthetic oligonucleotide
ugaagaauucaacuuaaaa

SEQ ID NO: 1939198 - RNA, 19 nt, Artificial Sequence
  Description of Artificial Sequence: Synthetic oligonucleotide
auacuauugcucugcaggc

SEQ ID NO: 1939199 - RNA, 19 nt, Artificial Sequence
  Description of Artificial Sequence: Synthetic oligonucleotide
uuccuaaaugcucagaauc

SEQ ID NO: 1939200 - RNA, 19 nt, Artificial Sequence
  Description of Artificial Sequence: Synthetic oligonucleotide
uguaguuacugacugcuca

SEQ ID NO: 1939201 - RNA, 19 nt, Artificial Sequence
  Description of Artificial Sequence: Synthetic oligonucleotide
aaugguacaacaacuguug

SEQ ID NO: 1939202 - RNA, 19 nt, Artificial Sequence
  Description of Artificial Sequence: Synthetic oligonucleotide
aauacuguauugucaagaa

SEQ ID NO: 1939203 - RNA, 19 nt, Artificial Sequence
  Description of Artificial Sequence: Synthetic oligonucleotide
aguagaaguggucaaaagu

SEQ ID NO: 1939204 - RNA, 19 nt, Artificial Sequence
  Description of Artificial Sequence: Synthetic oligonucleotide
aacgugaacauaagaaccg

SEQ ID NO: 1939205 - RNA, 19 nt, Artificial Sequence
  Description of Artificial Sequence: Synthetic oligonucleotide
auauguagaggaaagaaug

SEQ ID NO: 1939206 - RNA, 19 nt, Artificial Sequence
  Description of Artificial Sequence: Synthetic oligonucleotide
uccucuucgaaccucagga

SEQ ID NO: 1939207 - RNA, 19 nt, Artificial Sequence
  Description of Artificial Sequence: Synthetic oligonucleotide
uuucaagacacaucggcgc

SEQ ID NO: 1939208 - RNA, 19 nt, Artificial Sequence
  Description of Artificial Sequence: Synthetic oligonucleotide
uugagaacaauguucuggc

SEQ ID NO: 1939209 - RNA, 19 nt, Artificial Sequence
  Description of Artificial Sequence: Synthetic oligonucleotide
agcucuuguaguuacugac

SEQ ID NO: 1939210 - RNA, 19 nt, Artificial Sequence
  Description of Artificial Sequence: Synthetic oligonucleotide
ucaaaaguacggcagcucu

SEQ ID NO: 1939211 - RNA, 19 nt, Artificial Sequence
  Description of Artificial Sequence: Synthetic oligonucleotide
uugaaugguggccuuauga

SEQ ID NO: 1939212 - RNA, 19 nt, Artificial Sequence
  Description of Artificial Sequence: Synthetic oligonucleotide
aguacucuuagcaacagag

SEQ ID NO: 1939213 - RNA, 19 nt, Artificial Sequence
  Description of Artificial Sequence: Synthetic oligonucleotide
aggauugaagaauucaacu

SEQ ID NO: 1939214 - RNA, 19 nt, Artificial Sequence
  Description of Artificial Sequence: Synthetic oligonucleotide
aauagccaguacucuuagc

SEQ ID NO: 1939215 - RNA, 19 nt, Artificial Sequence
  Description of Artificial Sequence: Synthetic oligonucleotide
aaagacaugguccccaaua

SEQ ID NO: 1939216 - RNA, 19 nt, Artificial Sequence
  Description of Artificial Sequence: Synthetic oligonucleotide
uucaaaggaauucaagaua

SEQ ID NO: 1939217 - RNA, 19 nt, Artificial Sequence
  Description of Artificial Sequence: Synthetic oligonucleotide
uucauuacaauggucuugc

SEQ ID NO: 1939218 - RNA, 19 nt, Artificial Sequence
  Description of Artificial Sequence: Synthetic oligonucleotide
aaguggucaaaaguacggc

SEQ ID NO: 1939219 - RNA, 19 nt, Artificial Sequence
  Description of Artificial Sequence: Synthetic oligonucleotide
gaggaaagaaugcaacacc

SEQ ID NO: 1939220 - RNA, 19 nt, Artificial Sequence
  Description of Artificial Sequence: Synthetic oligonucleotide
cuggaugucaucugagugg

SEQ ID NO: 1939221 - RNA, 19 nt, Artificial Sequence
  Description of Artificial Sequence: Synthetic oligonucleotide
uccuauuaaauuccuaaau

SEQ ID NO: 1939222 - RNA, 19 nt, Artificial Sequence
  Description of Artificial Sequence: Synthetic oligonucleotide
ugcuaagaggauacuauug

SEQ ID NO: 1939223 - RNA, 19 nt, Artificial Sequence
  Description of Artificial Sequence: Synthetic oligonucleotide
aacucuuacauuugccaga

SEQ ID NO: 1939224 - RNA, 19 nt, Artificial Sequence
  Description of Artificial Sequence: Synthetic oligonucleotide
uguagaggaaagaaugcaa

SEQ ID NO: 1939225 - RNA, 19 nt, Artificial Sequence
  Description of Artificial Sequence: Synthetic oligonucleotide
acggcuuuuaacaacacag

SEQ ID NO: 1939226 - RNA, 19 nt, Artificial Sequence
  Description of Artificial Sequence: Synthetic oligonucleotide
ucaagauauaaagcagagg

SEQ ID NO: 1939227 - RNA, 19 nt, Artificial Sequence
  Description of Artificial Sequence: Synthetic oligonucleotide
ugaaugguggccuuaugac

SEQ ID NO: 1939228 - RNA, 19 nt, Artificial Sequence
  Description of Artificial Sequence: Synthetic oligonucleotide
uuacauuugccagaucucc

SEQ ID NO: 1939229 - RNA, 19 nt, Artificial Sequence
  Description of Artificial Sequence: Synthetic oligonucleotide
gaaagaauagccaguacuc

SEQ ID NO: 1939230 - RNA, 19 nt, Artificial Sequence
  Description of Artificial Sequence: Synthetic oligonucleotide
ucaggauccugccaguagc

SEQ ID NO: 1939231 - RNA, 19 nt, Artificial Sequence
  Description of Artificial Sequence: Synthetic oligonucleotide
uuuuaacaacacagugacg

SEQ ID NO: 1939232 - RNA, 19 nt, Artificial Sequence
  Description of Artificial Sequence: Synthetic oligonucleotide
gaggcauuagacuuggguc

SEQ ID NO: 1939233 - RNA, 19 nt, Artificial Sequence
  Description of Artificial Sequence: Synthetic oligonucleotide
ucuuagaguucaaaggaau

SEQ ID NO: 1939234 - RNA, 19 nt, Artificial Sequence
  Description of Artificial Sequence: Synthetic oligonucleotide
aaaaguacggcagcucuug

SEQ ID NO: 1939235 - RNA, 19 nt, Artificial Sequence
  Description of Artificial Sequence: Synthetic oligonucleotide
uccuauguuagcagcagga

SEQ ID NO: 1939236 - RNA, 19 nt, Artificial Sequence
  Description of Artificial Sequence: Synthetic oligonucleotide
aagguaggagaaauugugg

SEQ ID NO: 1939237 - RNA, 19 nt, Artificial Sequence
  Description of Artificial Sequence: Synthetic oligonucleotide
uagaaguggucaaaaguac

SEQ ID NO: 1939238 - RNA, 19 nt, Artificial Sequence
  Description of Artificial Sequence: Synthetic oligonucleotide
gaaucuuggaggauugaag

SEQ ID NO: 1939239 - RNA, 19 nt, Artificial Sequence
  Description of Artificial Sequence: Synthetic oligonucleotide
aagaaccgaucugagcagc

SEQ ID NO: 1939240 - RNA, 19 nt, Artificial Sequence
  Description of Artificial Sequence: Synthetic oligonucleotide
cagacaaugguacaacaac

SEQ ID NO: 1939241 - RNA, 19 nt, Artificial Sequence
  Description of Artificial Sequence: Synthetic oligonucleotide
gauguacucggacuuguug

SEQ ID NO: 1939242 - RNA, 19 nt, Artificial Sequence
  Description of Artificial Sequence: Synthetic oligonucleotide
agguguaggugccaugugg

SEQ ID NO: 1939243 - RNA, 19 nt, Artificial Sequence
  Description of Artificial Sequence: Synthetic oligonucleotide
ucagaaucuuggaggauug

SEQ ID NO: 1939244 - RNA, 19 nt, Artificial Sequence
  Description of Artificial Sequence: Synthetic oligonucleotide
agaaauuguggccacuggu

SEQ ID NO: 1939245 - RNA, 19 nt, Artificial Sequence
  Description of Artificial Sequence: Synthetic oligonucleotide
aaagaauagccaguacucu

SEQ ID NO: 1939246 - RNA, 19 nt, Artificial Sequence
  Description of Artificial Sequence: Synthetic oligonucleotide
uggccuuaugacacuacgg

SEQ ID NO: 1939247 - RNA, 19 nt, Artificial Sequence
  Description of Artificial Sequence: Synthetic oligonucleotide
gauagaucagguguaggug

SEQ ID NO: 1939248 - RNA, 19 nt, Artificial Sequence
  Description of Artificial Sequence: Synthetic oligonucleotide
caucuuagaguucaaagga

SEQ ID NO: 1939249 - RNA, 19 nt, Artificial Sequence
  Description of Artificial Sequence: Synthetic oligonucleotide
cuuuucucaagguaggaga

SEQ ID NO: 1939250 - RNA, 19 nt, Artificial Sequence
  Description of Artificial Sequence: Synthetic oligonucleotide
ucggacuuguuguacagca

SEQ ID NO: 1939251 - RNA, 19 nt, Artificial Sequence
  Description of Artificial Sequence: Synthetic oligonucleotide
cuaaaugcucagaaucuug

SEQ ID NO: 1939252 - RNA, 19 nt, Artificial Sequence
  Description of Artificial Sequence: Synthetic oligonucleotide
uagaguucaaaggaauuca

SEQ ID NO: 1939253 - RNA, 19 nt, Artificial Sequence
  Description of Artificial Sequence: Synthetic oligonucleotide
aagaauagccaguacucuu

SEQ ID NO: 1939254 - RNA, 19 nt, Artificial Sequence
  Description of Artificial Sequence: Synthetic oligonucleotide
aaaugcucagaaucuugga

SEQ ID NO: 1939255 - RNA, 19 nt, Artificial Sequence
  Description of Artificial Sequence: Synthetic oligonucleotide
caacucuuacauuugccag

SEQ ID NO: 1939256 - RNA, 19 nt, Artificial Sequence
  Description of Artificial Sequence: Synthetic oligonucleotide
acuaacuuuguucccagau

SEQ ID NO: 1939257 - RNA, 19 nt, Artificial Sequence
  Description of Artificial Sequence: Synthetic oligonucleotide
gaauuucuugaaugguggc

SEQ ID NO: 1939258 - RNA, 19 nt, Artificial Sequence
  Description of Artificial Sequence: Synthetic oligonucleotide
acaaugguacaacaacugu

SEQ ID NO: 1939259 - RNA, 19 nt, Artificial Sequence
  Description of Artificial Sequence: Synthetic oligonucleotide
uaagaaccgaucugagcag

SEQ ID NO: 1939260 - RNA, 19 nt, Artificial Sequence
  Description of Artificial Sequence: Synthetic oligonucleotide
acuuuguucccagaugccg

SEQ ID NO: 1939261 - RNA, 19 nt, Artificial Sequence
  Description of Artificial Sequence: Synthetic oligonucleotide
ucggcgcccaaucacacag

SEQ ID NO: 1939262 - RNA, 19 nt, Artificial Sequence
  Description of Artificial Sequence: Synthetic oligonucleotide
uccucaauaaagacauggu

SEQ ID NO: 1939263 - RNA, 19 nt, Artificial Sequence
  Description of Artificial Sequence: Synthetic oligonucleotide
gagaaauuguggccacugg

SEQ ID NO: 1939264 - RNA, 19 nt, Artificial Sequence
  Description of Artificial Sequence: Synthetic oligonucleotide
aguucuucccaacgugaac

SEQ ID NO: 1939265 - RNA, 19 nt, Artificial Sequence
  Description of Artificial Sequence: Synthetic oligonucleotide
ugucaagaauuuugcagca

SEQ ID NO: 1939266 - RNA, 19 nt, Artificial Sequence
  Description of Artificial Sequence: Synthetic oligonucleotide
aguuucuggagguaauacu

SEQ ID NO: 1939267 - RNA, 19 nt, Artificial Sequence
  Description of Artificial Sequence: Synthetic oligonucleotide
aguggucaaaaguacggca

SEQ ID NO: 1939268 - RNA, 19 nt, Artificial Sequence
  Description of Artificial Sequence: Synthetic oligonucleotide
agaaguggucaaaaguacg

SEQ ID NO: 1939269 - RNA, 19 nt, Artificial Sequence
  Description of Artificial Sequence: Synthetic oligonucleotide
gagguaauacuguauuguc

SEQ ID NO: 1939270 - RNA, 19 nt, Artificial Sequence
  Description of Artificial Sequence: Synthetic oligonucleotide
cuaacuuuguucccagaug

SEQ ID NO: 1939271 - RNA, 19 nt, Artificial Sequence
  Description of Artificial Sequence: Synthetic oligonucleotide
gcuaagaggauacuauugc

SEQ ID NO: 1939272 - RNA, 19 nt, Artificial Sequence
  Description of Artificial Sequence: Synthetic oligonucleotide
gaauagccaguacucuuag

SEQ ID NO: 1939273 - RNA, 19 nt, Artificial Sequence
  Description of Artificial Sequence: Synthetic oligonucleotide
aaggaauucaagauauaaa

SEQ ID NO: 1939274 - RNA, 19 nt, Artificial Sequence
  Description of Artificial Sequence: Synthetic oligonucleotide
gaagacggugaaugguggg

SEQ ID NO: 1939275 - RNA, 19 nt, Artificial Sequence
  Description of Artificial Sequence: Synthetic oligonucleotide
uggucaaaaguacggcagc

SEQ ID NO: 1939276 - RNA, 19 nt, Artificial Sequence
  Description of Artificial Sequence: Synthetic oligonucleotide
augguacaacaacuguugg

SEQ ID NO: 1939277 - RNA, 19 nt, Artificial Sequence
  Description of Artificial Sequence: Synthetic oligonucleotide
uuccuauuaaauuccuaaa

SEQ ID NO: 1939278 - RNA, 19 nt, Artificial Sequence
  Description of Artificial Sequence: Synthetic oligonucleotide
guccccaauauguagagga

SEQ ID NO: 1939279 - RNA, 19 nt, Artificial Sequence
  Description of Artificial Sequence: Synthetic oligonucleotide
gguagaacaugguugugag

SEQ ID NO: 1939280 - RNA, 19 nt, Artificial Sequence
  Description of Artificial Sequence: Synthetic oligonucleotide
ugacguccaacucuuacau

SEQ ID NO: 1939281 - RNA, 19 nt, Artificial Sequence
  Description of Artificial Sequence: Synthetic oligonucleotide
cacacaguucuucccaacg

SEQ ID NO: 1939282 - RNA, 19 nt, Artificial Sequence
  Description of Artificial Sequence: Synthetic oligonucleotide
ugguacaacaacuguugga

SEQ ID NO: 1939283 - RNA, 19 nt, Artificial Sequence
  Description of Artificial Sequence: Synthetic oligonucleotide
uggagguaauacuguauug

SEQ ID NO: 1939284 - RNA, 19 nt, Artificial Sequence
  Description of Artificial Sequence: Synthetic oligonucleotide
aauuccauggcugccuccu

SEQ ID NO: 1939285 - RNA, 19 nt, Artificial Sequence
  Description of Artificial Sequence: Synthetic oligonucleotide
cagugaggguagaacaugg

SEQ ID NO: 1939286 - RNA, 19 nt, Artificial Sequence
  Description of Artificial Sequence: Synthetic oligonucleotide
ucuuguaguuacugacugc

SEQ ID NO: 1939287 - RNA, 19 nt, Artificial Sequence
  Description of Artificial Sequence: Synthetic oligonucleotide
gaaauuguggccacugguc

SEQ ID NO: 1939288 - RNA, 19 nt, Artificial Sequence
  Description of Artificial Sequence: Synthetic oligonucleotide
caugguccccaauauguag

SEQ ID NO: 1939289 - RNA, 19 nt, Artificial Sequence
  Description of Artificial Sequence: Synthetic oligonucleotide
cugagaagacggugaaugg

SEQ ID NO: 1939290 - RNA, 19 nt, Artificial Sequence
  Description of Artificial Sequence: Synthetic oligonucleotide
gaggauacuauugcucugc

SEQ ID NO: 1939291 - RNA, 19 nt, Artificial Sequence
  Description of Artificial Sequence: Synthetic oligonucleotide
uagaucagguguaggugcc

SEQ ID NO: 1939292 - RNA, 19 nt, Artificial Sequence
  Description of Artificial Sequence: Synthetic oligonucleotide
gaaugguggccuuaugaca

SEQ ID NO: 1939293 - RNA, 19 nt, Artificial Sequence
  Description of Artificial Sequence: Synthetic oligonucleotide
auggugggaccacaguuuc

SEQ ID NO: 1939294 - RNA, 19 nt, Artificial Sequence
  Description of Artificial Sequence: Synthetic oligonucleotide
auuugccagaucuccucgg

SEQ ID NO: 1939295 - RNA, 19 nt, Artificial Sequence
  Description of Artificial Sequence: Synthetic oligonucleotide
ugacacuacggcuuuuaac

SEQ ID NO: 1939296 - RNA, 19 nt, Artificial Sequence
  Description of Artificial Sequence: Synthetic oligonucleotide
cugccaguagcucaagccc

SEQ ID NO: 1939297 - RNA, 19 nt, Artificial Sequence
  Description of Artificial Sequence: Synthetic oligonucleotide
gaggauugaagaauucaac

SEQ ID NO: 1939298 - RNA, 19 nt, Artificial Sequence
  Description of Artificial Sequence: Synthetic oligonucleotide
guggccuuaugacacuacg

SEQ ID NO: 1939299 - RNA, 19 nt, Artificial Sequence
  Description of Artificial Sequence: Synthetic oligonucleotide
caagaauuuugcagcaguc

SEQ ID NO: 1939300 - RNA, 19 nt, Artificial Sequence
  Description of Artificial Sequence: Synthetic oligonucleotide
gguaggagaaauuguggcc

SEQ ID NO: 1939301 - RNA, 19 nt, Artificial Sequence
  Description of Artificial Sequence: Synthetic oligonucleotide
uacggcuuuuaacaacaca

SEQ ID NO: 1939302 - RNA, 19 nt, Artificial Sequence
  Description of Artificial Sequence: Synthetic oligonucleotide
cauuugccagaucuccucg

SEQ ID NO: 1939303 - RNA, 19 nt, Artificial Sequence
  Description of Artificial Sequence: Synthetic oligonucleotide
acugguccuauguuagcag

SEQ ID NO: 1939304 - RNA, 19 nt, Artificial Sequence
  Description of Artificial Sequence: Synthetic oligonucleotide
aaagaaugcaacaccuuua

SEQ ID NO: 1939305 - RNA, 19 nt, Artificial Sequence
  Description of Artificial Sequence: Synthetic oligonucleotide
uguuguacagcagcucgcc

SEQ ID NO: 1939306 - RNA, 19 nt, Artificial Sequence
  Description of Artificial Sequence: Synthetic oligonucleotide
cagcagucuuucaagacac

SEQ ID NO: 1939307 - RNA, 19 nt, Artificial Sequence
  Description of Artificial Sequence: Synthetic oligonucleotide
aaggagaguagaagugguc

SEQ ID NO: 1939308 - RNA, 19 nt, Artificial Sequence
  Description of Artificial Sequence: Synthetic oligonucleotide
guuagcagcaggauagcug

SEQ ID NO: 1939309 - RNA, 19 nt, Artificial Sequence
  Description of Artificial Sequence: Synthetic oligonucleotide
uguaggugccaugugggug

SEQ ID NO: 1939310 - RNA, 19 nt, Artificial Sequence
  Description of Artificial Sequence: Synthetic oligonucleotide
ugugcagugaggguagaac

SEQ ID NO: 1939311 - RNA, 19 nt, Artificial Sequence
  Description of Artificial Sequence: Synthetic oligonucleotide
uuaacaacacagugacguc

SEQ ID NO: 1939312 - RNA, 19 nt, Artificial Sequence
  Description of Artificial Sequence: Synthetic oligonucleotide
guaggagaaauuguggcca

SEQ ID NO: 1939313 - RNA, 19 nt, Artificial Sequence
  Description of Artificial Sequence: Synthetic oligonucleotide
uuagcaacagagccaucuc

SEQ ID NO: 1939314 - RNA, 19 nt, Artificial Sequence
  Description of Artificial Sequence: Synthetic oligonucleotide
aggagaguagaagugguca

SEQ ID NO: 1939315 - RNA, 19 nt, Artificial Sequence
  Description of Artificial Sequence: Synthetic oligonucleotide
ggccuuaugacacuacggc

SEQ ID NO: 1939316 - RNA, 19 nt, Artificial Sequence
  Description of Artificial Sequence: Synthetic oligonucleotide
uugggucaguggcagaaac

SEQ ID NO: 1939317 - RNA, 19 nt, Artificial Sequence
  Description of Artificial Sequence: Synthetic oligonucleotide
gguuccagccaucugcagg

SEQ ID NO: 1939318 - RNA, 19 nt, Artificial Sequence
  Description of Artificial Sequence: Synthetic oligonucleotide
agcaacagagccaucucuc

SEQ ID NO: 1939319 - RNA, 19 nt, Artificial Sequence
  Description of Artificial Sequence: Synthetic oligonucleotide
acuacggcuuuuaacaaca

SEQ ID NO: 1939320 - RNA, 19 nt, Artificial Sequence
  Description of Artificial Sequence: Synthetic oligonucleotide
cauuacaauggucuugcca

SEQ ID NO: 1939321 - RNA, 19 nt, Artificial Sequence
  Description of Artificial Sequence: Synthetic oligonucleotide
agacaaugguacaacaacu

SEQ ID NO: 1939322 - RNA, 19 nt, Artificial Sequence
  Description of Artificial Sequence: Synthetic oligonucleotide
auauaaagcagaggcauua

SEQ ID NO: 1939323 - RNA, 19 nt, Artificial Sequence
  Description of Artificial Sequence: Synthetic oligonucleotide
ccaacgugaacauaagaac

SEQ ID NO: 1939324 - RNA, 19 nt, Artificial Sequence
  Description of Artificial Sequence: Synthetic oligonucleotide
auguagaggaaagaaugca

SEQ ID NO: 1939325 - RNA, 19 nt, Artificial Sequence
  Description of Artificial Sequence: Synthetic oligonucleotide
guaguuacugacugcucac

SEQ ID NO: 1939326 - RNA, 19 nt, Artificial Sequence
  Description of Artificial Sequence: Synthetic oligonucleotide
cagucuuccucaauaaaga

SEQ ID NO: 1939327 - RNA, 19 nt, Artificial Sequence
  Description of Artificial Sequence: Synthetic oligonucleotide
auuccuaaaugcucagaau

SEQ ID NO: 1939328 - RNA, 19 nt, Artificial Sequence
  Description of Artificial Sequence: Synthetic oligonucleotide
ugguccccaauauguagag

SEQ ID NO: 1939329 - RNA, 19 nt, Artificial Sequence
  Description of Artificial Sequence: Synthetic oligonucleotide
aguagcucaagcccacggu

SEQ ID NO: 1939330 - RNA, 19 nt, Artificial Sequence
  Description of Artificial Sequence: Synthetic oligonucleotide
ugcaacaccuuuacugaau

SEQ ID NO: 1939331 - RNA, 19 nt, Artificial Sequence
  Description of Artificial Sequence: Synthetic oligonucleotide
acacuuuucucaagguagg

SEQ ID NO: 1939332 - RNA, 19 nt, Artificial Sequence
  Description of Artificial Sequence: Synthetic oligonucleotide
uucccaacgugaacauaag

SEQ ID NO: 1939333 - RNA, 19 nt, Artificial Sequence
  Description of Artificial Sequence: Synthetic oligonucleotide
uagcucaagcccacgguga

SEQ ID NO: 1939334 - RNA, 19 nt, Artificial Sequence
  Description of Artificial Sequence: Synthetic oligonucleotide
cccaauauguagaggaaag

SEQ ID NO: 1939335 - RNA, 19 nt, Artificial Sequence
  Description of Artificial Sequence: Synthetic oligonucleotide
aaaacagacuggcgacuaa

SEQ ID NO: 1939336 - RNA, 19 nt, Artificial Sequence
  Description of Artificial Sequence: Synthetic oligonucleotide
uacucggacuuguuguaca

SEQ ID NO: 1939337 - RNA, 19 nt, Artificial Sequence
  Description of Artificial Sequence: Synthetic oligonucleotide
agaggauacuauugcucug

SEQ ID NO: 1939338 - RNA, 19 nt, Artificial Sequence
  Description of Artificial Sequence: Synthetic oligonucleotide
agacggugaauggugggac

SEQ ID NO: 1939339 - RNA, 19 nt, Artificial Sequence
  Description of Artificial Sequence: Synthetic oligonucleotide
ucccaacgugaacauaaga

SEQ ID NO: 1939340 - RNA, 19 nt, Artificial Sequence
  Description of Artificial Sequence: Synthetic oligonucleotide
acacaguucuucccaacgu

SEQ ID NO: 1939341 - RNA, 19 nt, Artificial Sequence
  Description of Artificial Sequence: Synthetic oligonucleotide
uccugagaagaguccuggg

SEQ ID NO: 1939342 - RNA, 19 nt, Artificial Sequence
  Description of Artificial Sequence: Synthetic oligonucleotide
acucggacuuguuguacag

SEQ ID NO: 1939343 - RNA, 19 nt, Artificial Sequence
  Description of Artificial Sequence: Synthetic oligonucleotide
caacuguuggauagaucag

SEQ ID NO: 1939344 - RNA, 19 nt, Artificial Sequence
  Description of Artificial Sequence: Synthetic oligonucleotide
aauggugggaccacaguuu

SEQ ID NO: 1939345 - RNA, 19 nt, Artificial Sequence
  Description of Artificial Sequence: Synthetic oligonucleotide
gacaugguccccaauaugu

SEQ ID NO: 1939346 - RNA, 19 nt, Artificial Sequence
  Description of Artificial Sequence: Synthetic oligonucleotide
gacacaucggcgcccaauc

SEQ ID NO: 1939347 - RNA, 19 nt, Artificial Sequence
  Description of Artificial Sequence: Synthetic oligonucleotide
aaaguacggcagcucuugu

SEQ ID NO: 1939348 - RNA, 19 nt, Artificial Sequence
  Description of Artificial Sequence: Synthetic oligonucleotide
ugagaacaauguucuggcu

SEQ ID NO: 1939349 - RNA, 19 nt, Artificial Sequence
  Description of Artificial Sequence: Synthetic oligonucleotide
agguaauacuguauuguca

SEQ ID NO: 1939350 - RNA, 19 nt, Artificial Sequence
  Description of Artificial Sequence: Synthetic oligonucleotide
uucuggcuuccacacaaaa

SEQ ID NO: 1939351 - RNA, 19 nt, Artificial Sequence
  Description of Artificial Sequence: Synthetic oligonucleotide
uccucggaugauacaguca

SEQ ID NO: 1939352 - RNA, 19 nt, Artificial Sequence
  Description of Artificial Sequence: Synthetic oligonucleotide
guccuauguuagcagcagg

SEQ ID NO: 1939353 - RNA, 19 nt, Artificial Sequence
  Description of Artificial Sequence: Synthetic oligonucleotide
cacuacggcuuuuaacaac

SEQ ID NO: 1939354 - RNA, 19 nt, Artificial Sequence
  Description of Artificial Sequence: Synthetic oligonucleotide
augucaucugaguggggug

SEQ ID NO: 1939355 - RNA, 19 nt, Artificial Sequence
  Description of Artificial Sequence: Synthetic oligonucleotide
aacagacuggcgacuaacu

SEQ ID NO: 1939356 - RNA, 19 nt, Artificial Sequence
  Description of Artificial Sequence: Synthetic oligonucleotide
cuauugcucugcaggcccg

SEQ ID NO: 1939357 - RNA, 19 nt, Artificial Sequence
  Description of Artificial Sequence: Synthetic oligonucleotide
cauuagacuugggucagug

SEQ ID NO: 1939358 - RNA, 19 nt, Artificial Sequence
  Description of Artificial Sequence: Synthetic oligonucleotide
agaaucuuggaggauugaa

SEQ ID NO: 1939359 - RNA, 19 nt, Artificial Sequence
  Description of Artificial Sequence: Synthetic oligonucleotide
aaccgaucugagcagcguu

SEQ ID NO: 1939360 - RNA, 19 nt, Artificial Sequence
  Description of Artificial Sequence: Synthetic oligonucleotide
ugccgucucgauguacucg

SEQ ID NO: 1939361 - RNA, 19 nt, Artificial Sequence
  Description of Artificial Sequence: Synthetic oligonucleotide
guagaacaugguugugagc

SEQ ID NO: 1939362 - RNA, 19 nt, Artificial Sequence
  Description of Artificial Sequence: Synthetic oligonucleotide
gacggugaauggugggacc

SEQ ID NO: 1939363 - RNA, 19 nt, Artificial Sequence
  Description of Artificial Sequence: Synthetic oligonucleotide
gugacguccaacucuuaca

SEQ ID NO: 1939364 - RNA, 19 nt, Artificial Sequence
  Description of Artificial Sequence: Synthetic oligonucleotide
augcuaagaggauacuauu

SEQ ID NO: 1939365 - RNA, 19 nt, Artificial Sequence
  Description of Artificial Sequence: Synthetic oligonucleotide
cucaggauccugccaguag

SEQ ID NO: 1939366 - RNA, 19 nt, Artificial Sequence
  Description of Artificial Sequence: Synthetic oligonucleotide
gagaacaauguucuggcuu

SEQ ID NO: 1939367 - RNA, 19 nt, Artificial Sequence
  Description of Artificial Sequence: Synthetic oligonucleotide
aguuacugacugcucacuu

SEQ ID NO: 1939368 - RNA, 19 nt, Artificial Sequence
  Description of Artificial Sequence: Synthetic oligonucleotide
uaggagaaauuguggccac

SEQ ID NO: 1939369 - RNA, 19 nt, Artificial Sequence
  Description of Artificial Sequence: Synthetic oligonucleotide
cugaaagaauagccaguac

SEQ ID NO: 1939370 - RNA, 19 nt, Artificial Sequence
  Description of Artificial Sequence: Synthetic oligonucleotide
gggaccacaguuucuggag

SEQ ID NO: 1939371 - RNA, 19 nt, Artificial Sequence
  Description of Artificial Sequence: Synthetic oligonucleotide
gaugauacagucauucauu

SEQ ID NO: 1939372 - RNA, 19 nt, Artificial Sequence
  Description of Artificial Sequence: Synthetic oligonucleotide
ucaagacacaucggcgccc

SEQ ID NO: 1939373 - RNA, 19 nt, Artificial Sequence
  Description of Artificial Sequence: Synthetic oligonucleotide
uccccaauauguagaggaa

SEQ ID NO: 1939374 - RNA, 19 nt, Artificial Sequence
  Description of Artificial Sequence: Synthetic oligonucleotide
agacuugggucaguggcag

SEQ ID NO: 1939375 - RNA, 19 nt, Artificial Sequence
  Description of Artificial Sequence: Synthetic oligonucleotide
cauugagaacaauguucug

SEQ ID NO: 1939376 - RNA, 19 nt, Artificial Sequence
  Description of Artificial Sequence: Synthetic oligonucleotide
ccugcgugcacucugggag

SEQ ID NO: 1939377 - RNA, 19 nt, Artificial Sequence
  Description of Artificial Sequence: Synthetic oligonucleotide
caugcuaagaggauacuau

SEQ ID NO: 1939378 - RNA, 19 nt, Artificial Sequence
  Description of Artificial Sequence: Synthetic oligonucleotide
ucauuacaauggucuugcc

SEQ ID NO: 1939379 - RNA, 19 nt, Artificial Sequence
  Description of Artificial Sequence: Synthetic oligonucleotide
uaugacacuacggcuuuua

SEQ ID NO: 1939380 - RNA, 19 nt, Artificial Sequence
  Description of Artificial Sequence: Synthetic oligonucleotide
guucccagaugccgucucg

SEQ ID NO: 1939381 - RNA, 19 nt, Artificial Sequence
  Description of Artificial Sequence: Synthetic oligonucleotide
aagcccacggugauuccag

SEQ ID NO: 1939382 - RNA, 19 nt, Artificial Sequence
  Description of Artificial Sequence: Synthetic oligonucleotide
gccgucucgauguacucgg

SEQ ID NO: 1939383 - RNA, 19 nt, Artificial Sequence
  Description of Artificial Sequence: Synthetic oligonucleotide
cugacugcucacuuuaucu

SEQ ID NO: 1939384 - RNA, 19 nt, Artificial Sequence
  Description of Artificial Sequence: Synthetic oligonucleotide
acaaaacagacuggcgacu

SEQ ID NO: 1939385 - RNA, 19 nt, Artificial Sequence
  Description of Artificial Sequence: Synthetic oligonucleotide
gucaagaauuuugcagcag

SEQ ID NO: 1939386 - RNA, 19 nt, Artificial Sequence
  Description of Artificial Sequence: Synthetic oligonucleotide
cuuguaguuacugacugcu

SEQ ID NO: 1939387 - RNA, 19 nt, Artificial Sequence
  Description of Artificial Sequence: Synthetic oligonucleotide
gggaacugaccuuucugcc

SEQ ID NO: 1939388 - RNA, 19 nt, Artificial Sequence
  Description of Artificial Sequence: Synthetic oligonucleotide
agaaccgaucugagcagcg

SEQ ID NO: 1939389 - RNA, 19 nt, Artificial Sequence
  Description of Artificial Sequence: Synthetic oligonucleotide
cuccucggaugauacaguc

SEQ ID NO: 1939390 - RNA, 19 nt, Artificial Sequence
  Description of Artificial Sequence: Synthetic oligonucleotide
ucuugaaugguggccuuau

SEQ ID NO: 1939391 - RNA, 19 nt, Artificial Sequence
  Description of Artificial Sequence: Synthetic oligonucleotide
cuauguuagcagcaggaua

SEQ ID NO: 1939392 - RNA, 19 nt, Artificial Sequence
  Description of Artificial Sequence: Synthetic oligonucleotide
aggauacuauugcucugca

SEQ ID NO: 1939393 - RNA, 19 nt, Artificial Sequence
  Description of Artificial Sequence: Synthetic oligonucleotide
cagcguugaccacacaguc

SEQ ID NO: 1939394 - RNA, 19 nt, Artificial Sequence
  Description of Artificial Sequence: Synthetic oligonucleotide
ucgauguacucggacuugu

SEQ ID NO: 1939395 - RNA, 19 nt, Artificial Sequence
  Description of Artificial Sequence: Synthetic oligonucleotide
ucucccaguucaucuuaga

SEQ ID NO: 1939396 - RNA, 19 nt, Artificial Sequence
  Description of Artificial Sequence: Synthetic oligonucleotide
aucuuagaguucaaaggaa

SEQ ID NO: 1939397 - RNA, 19 nt, Artificial Sequence
  Description of Artificial Sequence: Synthetic oligonucleotide
acacuacggcuuuuaacaa

SEQ ID NO: 1939398 - RNA, 19 nt, Artificial Sequence
  Description of Artificial Sequence: Synthetic oligonucleotide
ggagaaauuguggccacug

SEQ ID NO: 1939399 - RNA, 19 nt, Artificial Sequence
  Description of Artificial Sequence: Synthetic oligonucleotide
ggauacuauugcucugcag

SEQ ID NO: 1939400 - RNA, 19 nt, Artificial Sequence
  Description of Artificial Sequence: Synthetic oligonucleotide
uucuucccaacgugaacau

SEQ ID NO: 1939401 - RNA, 19 nt, Artificial Sequence
  Description of Artificial Sequence: Synthetic oligonucleotide
aucacacaguucuucccaa

SEQ ID NO: 1939402 - RNA, 19 nt, Artificial Sequence
  Description of Artificial Sequence: Synthetic oligonucleotide
augccgucucgauguacuc

SEQ ID NO: 1939403 - RNA, 19 nt, Artificial Sequence
  Description of Artificial Sequence: Synthetic oligonucleotide
ugccagccagguuccagcc

SEQ ID NO: 1939404 - RNA, 19 nt, Artificial Sequence
  Description of Artificial Sequence: Synthetic oligonucleotide
cccaacgugaacauaagaa

SEQ ID NO: 1939405 - RNA, 19 nt, Artificial Sequence
  Description of Artificial Sequence: Synthetic oligonucleotide
uacagcagcucgcccaauu

SEQ ID NO: 1939406 - RNA, 19 nt, Artificial Sequence
  Description of Artificial Sequence: Synthetic oligonucleotide
gugggaccacaguuucugg

SEQ ID NO: 1939407 - RNA, 19 nt, Artificial Sequence
  Description of Artificial Sequence: Synthetic oligonucleotide
caauuccauggcugccucc

SEQ ID NO: 1939408 - RNA, 19 nt, Artificial Sequence
  Description of Artificial Sequence: Synthetic oligonucleotide
augguccccaauauguaga

SEQ ID NO: 1939409 - RNA, 19 nt, Artificial Sequence
  Description of Artificial Sequence: Synthetic oligonucleotide
cuugaaugguggccuuaug

SEQ ID NO: 1939410 - RNA, 19 nt, Artificial Sequence
  Description of Artificial Sequence: Synthetic oligonucleotide
acgugaacauaagaaccga

SEQ ID NO: 1939411 - RNA, 19 nt, Artificial Sequence
  Description of Artificial Sequence: Synthetic oligonucleotide
gguacaacaacuguuggau

SEQ ID NO: 1939412 - RNA, 19 nt, Artificial Sequence
  Description of Artificial Sequence: Synthetic oligonucleotide
agaugccgucucgauguac

SEQ ID NO: 1939413 - RNA, 19 nt, Artificial Sequence
  Description of Artificial Sequence: Synthetic oligonucleotide
ggauugaagaauucaacuu

SEQ ID NO: 1939414 - RNA, 19 nt, Artificial Sequence
  Description of Artificial Sequence: Synthetic oligonucleotide
augacacuacggcuuuuaa

SEQ ID NO: 1939415 - RNA, 19 nt, Artificial Sequence
  Description of Artificial Sequence: Synthetic oligonucleotide
caaugguacaacaacuguu

SEQ ID NO: 1939416 - RNA, 19 nt, Artificial Sequence
  Description of Artificial Sequence: Synthetic oligonucleotide
ggauccugccaguagcuca

SEQ ID NO: 1939417 - RNA, 19 nt, Artificial Sequence
  Description of Artificial Sequence: Synthetic oligonucleotide
cuacggcuuuuaacaacac

SEQ ID NO: 1939418 - RNA, 19 nt, Artificial Sequence
  Description of Artificial Sequence: Synthetic oligonucleotide
gucucgauguacucggacu

SEQ ID NO: 1939419 - RNA, 19 nt, Artificial Sequence
  Description of Artificial Sequence: Synthetic oligonucleotide
acggugaauggugggacca

SEQ ID NO: 1939420 - RNA, 19 nt, Artificial Sequence
  Description of Artificial Sequence: Synthetic oligonucleotide
caacacagugacguccaac

SEQ ID NO: 1939421 - RNA, 19 nt, Artificial Sequence
  Description of Artificial Sequence: Synthetic oligonucleotide
gacuaacuuuguucccaga

SEQ ID NO: 1939422 - RNA, 19 nt, Artificial Sequence
  Description of Artificial Sequence: Synthetic oligonucleotide
aggauccugccaguagcuc

SEQ ID NO: 1939423 - RNA, 19 nt, Artificial Sequence
  Description of Artificial Sequence: Synthetic oligonucleotide
gaugccgucucgauguacu

SEQ ID NO: 1939424 - RNA, 19 nt, Artificial Sequence
  Description of Artificial Sequence: Synthetic oligonucleotide
cuuuguucccagaugccgu

SEQ ID NO: 1939425 - RNA, 19 nt, Artificial Sequence
  Description of Artificial Sequence: Synthetic oligonucleotide
uacugacugcucacuuuau

SEQ ID NO: 1939426 - RNA, 19 nt, Artificial Sequence
  Description of Artificial Sequence: Synthetic oligonucleotide
caacagagccaucucucca

SEQ ID NO: 1939427 - RNA, 19 nt, Artificial Sequence
  Description of Artificial Sequence: Synthetic oligonucleotide
accgaucugagcagcguug

SEQ ID NO: 1939428 - RNA, 19 nt, Artificial Sequence
  Description of Artificial Sequence: Synthetic oligonucleotide
cuuggaggauugaagaauu

SEQ ID NO: 1939429 - RNA, 19 nt, Artificial Sequence
  Description of Artificial Sequence: Synthetic oligonucleotide
uucccagaugccgucucga

SEQ ID NO: 1939430 - RNA, 19 nt, Artificial Sequence
  Description of Artificial Sequence: Synthetic oligonucleotide
caucggcgcccaaucacac

SEQ ID NO: 1939431 - RNA, 19 nt, Artificial Sequence
  Description of Artificial Sequence: Synthetic oligonucleotide
acagugacguccaacucuu

SEQ ID NO: 1939432 - RNA, 19 nt, Artificial Sequence
  Description of Artificial Sequence: Synthetic oligonucleotide
ggagguaauacuguauugu

SEQ ID NO: 1939433 - RNA, 19 nt, Artificial Sequence
  Description of Artificial Sequence: Synthetic oligonucleotide
agcucaagcccacggugau

SEQ ID NO: 1939434 - RNA, 19 nt, Artificial Sequence
  Description of Artificial Sequence: Synthetic oligonucleotide
acaucggcgcccaaucaca

SEQ ID NO: 1939435 - RNA, 19 nt, Artificial Sequence
  Description of Artificial Sequence: Synthetic oligonucleotide
cucggacuuguuguacagc

SEQ ID NO: 1939436 - RNA, 19 nt, Artificial Sequence
  Description of Artificial Sequence: Synthetic oligonucleotide
auguucuggcuuccacaca

SEQ ID NO: 1939437 - RNA, 19 nt, Artificial Sequence
  Description of Artificial Sequence: Synthetic oligonucleotide
gauccugccaguagcucaa

SEQ ID NO: 1939438 - RNA, 19 nt, Artificial Sequence
  Description of Artificial Sequence: Synthetic oligonucleotide
ucaucugagugggguggug

SEQ ID NO: 1939439 - RNA, 19 nt, Artificial Sequence
  Description of Artificial Sequence: Synthetic oligonucleotide
ggcauuagacuugggucag

SEQ ID NO: 1939440 - RNA, 19 nt, Artificial Sequence
  Description of Artificial Sequence: Synthetic oligonucleotide
ggguagaacaugguuguga

SEQ ID NO: 1939441 - RNA, 19 nt, Artificial Sequence
  Description of Artificial Sequence: Synthetic oligonucleotide
agcguugaccacacagucu

SEQ ID NO: 1939442 - RNA, 19 nt, Artificial Sequence
  Description of Artificial Sequence: Synthetic oligonucleotide
cacugguccuauguuagca

SEQ ID NO: 1939443 - RNA, 19 nt, Artificial Sequence
  Description of Artificial Sequence: Synthetic oligonucleotide
ccccaugcuaagaggauac

SEQ ID NO: 1939444 - RNA, 19 nt, Artificial Sequence
  Description of Artificial Sequence: Synthetic oligonucleotide
caucucuccagccuuccua

SEQ ID NO: 1939445 - RNA, 19 nt, Artificial Sequence
  Description of Artificial Sequence: Synthetic oligonucleotide
guuacugacugcucacuuu

SEQ ID NO: 1939446 - RNA, 19 nt, Artificial Sequence
  Description of Artificial Sequence: Synthetic oligonucleotide
cuggagguaauacuguauu

SEQ ID NO: 1939447 - RNA, 19 nt, Artificial Sequence
  Description of Artificial Sequence: Synthetic oligonucleotide
uucgaaccucaggauccug

SEQ ID NO: 1939448 - RNA, 19 nt, Artificial Sequence
  Description of Artificial Sequence: Synthetic oligonucleotide
aucggcgcccaaucacaca

SEQ ID NO: 1939449 - RNA, 19 nt, Artificial Sequence
  Description of Artificial Sequence: Synthetic oligonucleotide
gugaggguagaacaugguu

SEQ ID NO: 1939450 - RNA, 19 nt, Artificial Sequence
  Description of Artificial Sequence: Synthetic oligonucleotide
ugcgugcacucugggagcu

SEQ ID NO: 1939451 - RNA, 19 nt, Artificial Sequence
  Description of Artificial Sequence: Synthetic oligonucleotide
caaaacagacuggcgacua

SEQ ID NO: 1939452 - RNA, 19 nt, Artificial Sequence
  Description of Artificial Sequence: Synthetic oligonucleotide
auuguggccacugguccua

SEQ ID NO: 1939453 - RNA, 19 nt, Artificial Sequence
  Description of Artificial Sequence: Synthetic oligonucleotide
agacacaucggcgcccaau

SEQ ID NO: 1939454 - RNA, 19 nt, Artificial Sequence
  Description of Artificial Sequence: Synthetic oligonucleotide
ucuucccaacgugaacaua

SEQ ID NO: 1939455 - RNA, 19 nt, Artificial Sequence
  Description of Artificial Sequence: Synthetic oligonucleotide
caguacucuuagcaacaga

SEQ ID NO: 1939456 - RNA, 19 nt, Artificial Sequence
  Description of Artificial Sequence: Synthetic oligonucleotide
ccagaugccgucucgaugu

SEQ ID NO: 1939457 - RNA, 19 nt, Artificial Sequence
  Description of Artificial Sequence: Synthetic oligonucleotide
cgaaccucaggauccugcc

SEQ ID NO: 1939458 - RNA, 19 nt, Artificial Sequence
  Description of Artificial Sequence: Synthetic oligonucleotide
acaacacagugacguccaa

SEQ ID NO: 1939459 - RNA, 19 nt, Artificial Sequence
  Description of Artificial Sequence: Synthetic oligonucleotide
gcgacuaacuuuguuccca

SEQ ID NO: 1939460 - RNA, 19 nt, Artificial Sequence
  Description of Artificial Sequence: Synthetic oligonucleotide
agccagguuccagccaucu

SEQ ID NO: 1939461 - RNA, 19 nt, Artificial Sequence
  Description of Artificial Sequence: Synthetic oligonucleotide
cuuaugacacuacggcuuu

SEQ ID NO: 1939462 - RNA, 19 nt, Artificial Sequence
  Description of Artificial Sequence: Synthetic oligonucleotide
gguccccaauauguagagg

SEQ ID NO: 1939463 - RNA, 19 nt, Artificial Sequence
  Description of Artificial Sequence: Synthetic oligonucleotide
acaugguccccaauaugua

SEQ ID NO: 1939464 - RNA, 19 nt, Artificial Sequence
  Description of Artificial Sequence: Synthetic oligonucleotide
cucagaaucuuggaggauu

SEQ ID NO: 1939465 - RNA, 19 nt, Artificial Sequence
  Description of Artificial Sequence: Synthetic oligonucleotide
cacuuuucucaagguagga

SEQ ID NO: 1939466 - RNA, 19 nt, Artificial Sequence
  Description of Artificial Sequence: Synthetic oligonucleotide
caagacacaucggcgccca

SEQ ID NO: 1939467 - RNA, 19 nt, Artificial Sequence
  Description of Artificial Sequence: Synthetic oligonucleotide
guaguagcucuuggugaca

SEQ ID NO: 1939468 - RNA, 19 nt, Artificial Sequence
  Description of Artificial Sequence: Synthetic oligonucleotide
ucuugccauugagaacaau

SEQ ID NO: 1939469 - RNA, 19 nt, Artificial Sequence
  Description of Artificial Sequence: Synthetic oligonucleotide
caggauagcuggaugucau

SEQ ID NO: 1939470 - RNA, 19 nt, Artificial Sequence
  Description of Artificial Sequence: Synthetic oligonucleotide
ugguggccuuaugacacua

SEQ ID NO: 1939471 - RNA, 19 nt, Artificial Sequence
  Description of Artificial Sequence: Synthetic oligonucleotide
aagacacaucggcgcccaa

SEQ ID NO: 1939472 - RNA, 19 nt, Artificial Sequence
  Description of Artificial Sequence: Synthetic oligonucleotide
cgacuaacuuuguucccag

SEQ ID NO: 1939473 - RNA, 19 nt, Artificial Sequence
  Description of Artificial Sequence: Synthetic oligonucleotide
caagcccacggugauucca

SEQ ID NO: 1939474 - RNA, 19 nt, Artificial Sequence
  Description of Artificial Sequence: Synthetic oligonucleotide
ccaauauguagaggaaaga

SEQ ID NO: 1939475 - RNA, 19 nt, Artificial Sequence
  Description of Artificial Sequence: Synthetic oligonucleotide
uuaugacacuacggcuuuu

SEQ ID NO: 1939476 - RNA, 19 nt, Artificial Sequence
  Description of Artificial Sequence: Synthetic oligonucleotide
caaccaucagcuccugcgu

SEQ ID NO: 1939477 - RNA, 19 nt, Artificial Sequence
  Description of Artificial Sequence: Synthetic oligonucleotide
gccuuaugacacuacggcu

SEQ ID NO: 1939478 - RNA, 19 nt, Artificial Sequence
  Description of Artificial Sequence: Synthetic oligonucleotide
gcuccugcgugcacucugg

SEQ ID NO: 1939479 - RNA, 19 nt, Artificial Sequence
  Description of Artificial Sequence: Synthetic oligonucleotide
cccagaugccgucucgaug

SEQ ID NO: 1939480 - RNA, 19 nt, Artificial Sequence
  Description of Artificial Sequence: Synthetic oligonucleotide
ccaguacucuuagcaacag

SEQ ID NO: 1939481 - RNA, 19 nt, Artificial Sequence
  Description of Artificial Sequence: Synthetic oligonucleotide
accacaguuucuggaggua

SEQ ID NO: 1939482 - RNA, 19 nt, Artificial Sequence
  Description of Artificial Sequence: Synthetic oligonucleotide
gaaccgaucugagcagcgu

SEQ ID NO: 1939483 - RNA, 19 nt, Artificial Sequence
  Description of Artificial Sequence: Synthetic oligonucleotide
cucuuacauuugccagauc

SEQ ID NO: 1939484 - RNA, 19 nt, Artificial Sequence
  Description of Artificial Sequence: Synthetic oligonucleotide
ccacugguccuauguuagc

SEQ ID NO: 1939485 - RNA, 19 nt, Artificial Sequence
  Description of Artificial Sequence: Synthetic oligonucleotide
ccaauuccauggcugccuc

SEQ ID NO: 1939486 - RNA, 19 nt, Artificial Sequence
  Description of Artificial Sequence: Synthetic oligonucleotide
ggucaguggcagaaacuuc

SEQ ID NO: 1939487 - RNA, 19 nt, Artificial Sequence
  Description of Artificial Sequence: Synthetic oligonucleotide
ggucaaaaguacggcagcu

SEQ ID NO: 1939488 - RNA, 19 nt, Artificial Sequence
  Description of Artificial Sequence: Synthetic oligonucleotide
caggcccgugccagccagg

SEQ ID NO: 1939489 - RNA, 19 nt, Artificial Sequence
  Description of Artificial Sequence: Synthetic oligonucleotide
guacggcagcucuuguagu

SEQ ID NO: 1939490 - RNA, 19 nt, Artificial Sequence
  Description of Artificial Sequence: Synthetic oligonucleotide
cagaucuccucggaugaua

SEQ ID NO: 1939491 - RNA, 19 nt, Artificial Sequence
  Description of Artificial Sequence: Synthetic oligonucleotide
gagcucuccugagaagagu

SEQ ID NO: 1939492 - RNA, 19 nt, Artificial Sequence
  Description of Artificial Sequence: Synthetic oligonucleotide
gcaacaccuuuacugaauu

SEQ ID NO: 1939493 - RNA, 19 nt, Artificial Sequence
  Description of Artificial Sequence: Synthetic oligonucleotide
gguggccuuaugacacuac

SEQ ID NO: 1939494 - RNA, 19 nt, Artificial Sequence
  Description of Artificial Sequence: Synthetic oligonucleotide
caucugagugggguggugu

SEQ ID NO: 1939495 - RNA, 19 nt, Artificial Sequence
  Description of Artificial Sequence: Synthetic oligonucleotide
cuggaguguugggaacuga

SEQ ID NO: 1939496 - RNA, 19 nt, Artificial Sequence
  Description of Artificial Sequence: Synthetic oligonucleotide
gccagguuccagccaucug

SEQ ID NO: 1939497 - RNA, 19 nt, Artificial Sequence
  Description of Artificial Sequence: Synthetic oligonucleotide
cccgugccagccagguucc

SEQ ID NO: 1939498 - RNA, 19 nt, Artificial Sequence
  Description of Artificial Sequence: Synthetic oligonucleotide
cucgcccaauuccauggcu

SEQ ID NO: 1939499 - RNA, 19 nt, Artificial Sequence
  Description of Artificial Sequence: Synthetic oligonucleotide
cgucucgauguacucggac

SEQ ID NO: 1939500 - RNA, 19 nt, Artificial Sequence
  Description of Artificial Sequence: Synthetic oligonucleotide
ccaguagcucaagcccacg

SEQ ID NO: 1939501 - RNA, 19 nt, Artificial Sequence
  Description of Artificial Sequence: Synthetic oligonucleotide
ccuuccuauuaaauuccua

SEQ ID NO: 1939502 - RNA, 19 nt, Artificial Sequence
  Description of Artificial Sequence: Synthetic oligonucleotide
cggaugauacagucauuca

SEQ ID NO: 1939503 - RNA, 19 nt, Artificial Sequence
  Description of Artificial Sequence: Synthetic oligonucleotide
ccaugcuaagaggauacua

SEQ ID NO: 1939504 - RNA, 19 nt, Artificial Sequence
  Description of Artificial Sequence: Synthetic oligonucleotide
cuucgaaccucaggauccu

SEQ ID NO: 1939505 - RNA, 19 nt, Artificial Sequence
  Description of Artificial Sequence: Synthetic oligonucleotide
ccacaguuucuggagguaa

SEQ ID NO: 1939506 - RNA, 19 nt, Artificial Sequence
  Description of Artificial Sequence: Synthetic oligonucleotide
gagcagcguugaccacaca

SEQ ID NO: 1939507 - RNA, 19 nt, Artificial Sequence
  Description of Artificial Sequence: Synthetic oligonucleotide
ggcgcccaaucacacaguu

SEQ ID NO: 1939508 - RNA, 19 nt, Artificial Sequence
  Description of Artificial Sequence: Synthetic oligonucleotide
ccgaucugagcagcguuga

SEQ ID NO: 1939509 - RNA, 19 nt, Artificial Sequence
  Description of Artificial Sequence: Synthetic oligonucleotide
cggcuuuuaacaacacagu

SEQ ID NO: 1939510 - RNA, 19 nt, Artificial Sequence
  Description of Artificial Sequence: Synthetic oligonucleotide
cagaugccgucucgaugua

SEQ ID NO: 1939511 - RNA, 19 nt, Artificial Sequence
  Description of Artificial Sequence: Synthetic oligonucleotide
cguugaccacacagucuuc

SEQ ID NO: 1939512 - RNA, 19 nt, Artificial Sequence
  Description of Artificial Sequence: Synthetic oligonucleotide
cagugacguccaacucuua

SEQ ID NO: 1939513 - RNA, 19 nt, Artificial Sequence
  Description of Artificial Sequence: Synthetic oligonucleotide
cgugaacauaagaaccgau

SEQ ID NO: 1939514 - RNA, 19 nt, Artificial Sequence
  Description of Artificial Sequence: Synthetic oligonucleotide
gacuggcgacuaacuuugu

SEQ ID NO: 1939515 - RNA, 19 nt, Artificial Sequence
  Description of Artificial Sequence: Synthetic oligonucleotide
ccucuucgaaccucaggau

SEQ ID NO: 1939516 - RNA, 19 nt, Artificial Sequence
  Description of Artificial Sequence: Synthetic oligonucleotide
cggugaauggugggaccac

SEQ ID NO: 1939517 - RNA, 19 nt, Artificial Sequence
  Description of Artificial Sequence: Synthetic oligonucleotide
ccgucucgauguacucgga

SEQ ID NO: 1939518 - RNA, 19 nt, Artificial Sequence
  Description of Artificial Sequence: Synthetic oligonucleotide
gcauuagacuugggucagu

SEQ ID NO: 1939519 - RNA, 19 nt, Artificial Sequence
  Description of Artificial Sequence: Synthetic oligonucleotide
gccugagaagacggugaau

SEQ ID NO: 1939520 - RNA, 19 nt, Artificial Sequence
  Description of Artificial Sequence: Synthetic oligonucleotide
guacagcagcucgcccaau

SEQ ID NO: 1939521 - RNA, 19 nt, Artificial Sequence
  Description of Artificial Sequence: Synthetic oligonucleotide
cgugcacucugggagcucu

SEQ ID NO: 1939522 - RNA, 19 nt, Artificial Sequence
  Description of Artificial Sequence: Synthetic oligonucleotide
gcgugcacucugggagcuc

SEQ ID NO: 1939523 - RNA, 19 nt, Artificial Sequence
  Description of Artificial Sequence: Synthetic oligonucleotide
cccaugcuaagaggauacu

SEQ ID NO: 1939524 - RNA, 19 nt, Artificial Sequence
  Description of Artificial Sequence: Synthetic oligonucleotide
ccagaucuccucggaugau

SEQ ID NO: 1939525 - RNA, 19 nt, Artificial Sequence
  Description of Artificial Sequence: Synthetic oligonucleotide
cggcgcccaaucacacagu

SEQ ID NO: 1939526 - RNA, 19 nt, Artificial Sequence
  Description of Artificial Sequence: Synthetic oligonucleotide
ccgugccagccagguucca

SEQ ID NO: 1939527 - RNA, 19 nt, Artificial Sequence
  Description of Artificial Sequence: Synthetic oligonucleotide
uguauggagacacaguucg

SEQ ID NO: 1939528 - RNA, 19 nt, Artificial Sequence
  Description of Artificial Sequence: Synthetic oligonucleotide
uuguaauggaaguacaggg

SEQ ID NO: 1939529 - RNA, 19 nt, Artificial Sequence
  Description of Artificial Sequence: Synthetic oligonucleotide
aacgcaaacagugaguagg

SEQ ID NO: 1939530 - RNA, 19 nt, Artificial Sequence
  Description of Artificial Sequence: Synthetic oligonucleotide
ucagcaacgcguaagagug

SEQ ID NO: 1939531 - RNA, 19 nt, Artificial Sequence
  Description of Artificial Sequence: Synthetic oligonucleotide
uuuguaaagggcuuauugc

SEQ ID NO: 1939532 - RNA, 19 nt, Artificial Sequence
  Description of Artificial Sequence: Synthetic oligonucleotide
agagaauggagaccaagcc

SEQ ID NO: 1939533 - RNA, 19 nt, Artificial Sequence
  Description of Artificial Sequence: Synthetic oligonucleotide
uacaccagaaacuggauag

SEQ ID NO: 1939534 - RNA, 19 nt, Artificial Sequence
  Description of Artificial Sequence: Synthetic oligonucleotide
ugaacaagagcacagaguu

SEQ ID NO: 1939535 - RNA, 19 nt, Artificial Sequence
  Description of Artificial Sequence: Synthetic oligonucleotide
ugaagguucguucugcaag

SEQ ID NO: 1939536 - RNA, 19 nt, Artificial Sequence
  Description of Artificial Sequence: Synthetic oligonucleotide
gauaaugguguccagcagc

SEQ ID NO: 1939537 - RNA, 19 nt, Artificial Sequence
  Description of Artificial Sequence: Synthetic oligonucleotide
gaaggaaccacagcgauag

SEQ ID NO: 1939538 - RNA, 19 nt, Artificial Sequence
  Description of Artificial Sequence: Synthetic oligonucleotide
uaagguugcaggaaucucc

SEQ ID NO: 1939539 - RNA, 19 nt, Artificial Sequence
  Description of Artificial Sequence: Synthetic oligonucleotide
acauggaaaaguugcuugc

SEQ ID NO: 1939540 - RNA, 19 nt, Artificial Sequence
  Description of Artificial Sequence: Synthetic oligonucleotide
accgauccagccuagaagg

SEQ ID NO: 1939541 - RNA, 19 nt, Artificial Sequence
  Description of Artificial Sequence: Synthetic oligonucleotide
caagacguaguacacagcc

SEQ ID NO: 1939542 - RNA, 19 nt, Artificial Sequence
  Description of Artificial Sequence: Synthetic oligonucleotide
guugcaggaaucuccaccg

SEQ ID NO: 1939543 - RNA, 19 nt, Artificial Sequence
  Description of Artificial Sequence: Synthetic oligonucleotide
aaacacaucccagauccac

SEQ ID NO: 1939544 - RNA, 19 nt, Artificial Sequence
  Description of Artificial Sequence: Synthetic oligonucleotide
ucauccgggacacagguca

SEQ ID NO: 1939545 - RNA, 19 nt, Artificial Sequence
  Description of Artificial Sequence: Synthetic oligonucleotide
auugccuggcuccacagac

SEQ ID NO: 1939546 - RNA, 19 nt, Artificial Sequence
  Description of Artificial Sequence: Synthetic oligonucleotide
uugauaggggcagacaacg

SEQ ID NO: 1939547 - RNA, 19 nt, Artificial Sequence
  Description of Artificial Sequence: Synthetic oligonucleotide
aaagccgaugaccuccuuc

SEQ ID NO: 1939548 - RNA, 19 nt, Artificial Sequence
  Description of Artificial Sequence: Synthetic oligonucleotide
uguaauggaaguacagggu

SEQ ID NO: 1939549 - RNA, 19 nt, Artificial Sequence
  Description of Artificial Sequence: Synthetic oligonucleotide
ugccguaggaaauuggugc

SEQ ID NO: 1939550 - RNA, 19 nt, Artificial Sequence
  Description of Artificial Sequence: Synthetic oligonucleotide
gaugacaaagccgaugacc

SEQ ID NO: 1939551 - RNA, 19 nt, Artificial Sequence
  Description of Artificial Sequence: Synthetic oligonucleotide
gaagguucguucugcaagg

SEQ ID NO: 1939552 - RNA, 19 nt, Artificial Sequence
  Description of Artificial Sequence: Synthetic oligonucleotide
agagauaaugguguccagc

SEQ ID NO: 1939553 - RNA, 19 nt, Artificial Sequence
  Description of Artificial Sequence: Synthetic oligonucleotide
gagccauuggggcacaugg

SEQ ID NO: 1939554 - RNA, 19 nt, Artificial Sequence
  Description of Artificial Sequence: Synthetic oligonucleotide
agaaacuggauagagauaa

SEQ ID NO: 1939555 - RNA, 19 nt, Artificial Sequence
  Description of Artificial Sequence: Synthetic oligonucleotide
cuggauagagauaauggug

SEQ ID NO: 1939556 - RNA, 19 nt, Artificial Sequence
  Description of Artificial Sequence: Synthetic oligonucleotide
cuuguaauggaaguacagg

SEQ ID NO: 1939557 - RNA, 19 nt, Artificial Sequence
  Description of Artificial Sequence: Synthetic oligonucleotide
cuugaacuuguaauggaag

SEQ ID NO: 1939558 - RNA, 19 nt, Artificial Sequence
  Description of Artificial Sequence: Synthetic oligonucleotide
acuggauagagauaauggu

SEQ ID NO: 1939559 - RNA, 19 nt, Artificial Sequence
  Description of Artificial Sequence: Synthetic oligonucleotide
aaacuggauagagauaaug

SEQ ID NO: 1939560 - RNA, 19 nt, Artificial Sequence
  Description of Artificial Sequence: Synthetic oligonucleotide
uacagcacacuggagaccg

SEQ ID NO: 1939561 - RNA, 19 nt, Artificial Sequence
  Description of Artificial Sequence: Synthetic oligonucleotide
ccaaacacaucccagaucc

SEQ ID NO: 1939562 - RNA, 19 nt, Artificial Sequence
  Description of Artificial Sequence: Synthetic oligonucleotide
aauaagguugcaggaaucu

SEQ ID NO: 1939563 - RNA, 19 nt, Artificial Sequence
  Description of Artificial Sequence: Synthetic oligonucleotide
uggaaaaguugcuugcgcc

SEQ ID NO: 1939564 - RNA, 19 nt, Artificial Sequence
  Description of Artificial Sequence: Synthetic oligonucleotide
gagauaaugguguccagca

SEQ ID NO: 1939565 - RNA, 19 nt, Artificial Sequence
  Description of Artificial Sequence: Synthetic oligonucleotide
ucuugaacuuguaauggaa

SEQ ID NO: 1939566 - RNA, 19 nt, Artificial Sequence
  Description of Artificial Sequence: Synthetic oligonucleotide
gaaccacagcgauagagcc

SEQ ID NO: 1939567 - RNA, 19 nt, Artificial Sequence
  Description of Artificial Sequence: Synthetic oligonucleotide
ucggccaagacguaguaca

SEQ ID NO: 1939568 - RNA, 19 nt, Artificial Sequence
  Description of Artificial Sequence: Synthetic oligonucleotide
aucaccaacgcaaacagug

SEQ ID NO: 1939569 - RNA, 19 nt, Artificial Sequence
  Description of Artificial Sequence: Synthetic oligonucleotide
agaagaccgguucuugaac

SEQ ID NO: 1939570 - RNA, 19 nt, Artificial Sequence
  Description of Artificial Sequence: Synthetic oligonucleotide
gaugcggcaaagcagagaa

SEQ ID NO: 1939571 - RNA, 19 nt, Artificial Sequence
  Description of Artificial Sequence: Synthetic oligonucleotide
aagccgaugaccuccuucu

SEQ ID NO: 1939572 - RNA, 19 nt, Artificial Sequence
  Description of Artificial Sequence: Synthetic oligonucleotide
aggaaauuggugcggaucu

SEQ ID NO: 1939573 - RNA, 19 nt, Artificial Sequence
  Description of Artificial Sequence: Synthetic oligonucleotide
aguugauaggggcagacaa

SEQ ID NO: 1939574 - RNA, 19 nt, Artificial Sequence
  Description of Artificial Sequence: Synthetic oligonucleotide
gaacuuguaauggaaguac

SEQ ID NO: 1939575 - RNA, 19 nt, Artificial Sequence
  Description of Artificial Sequence: Synthetic oligonucleotide
agacguaguacacagccgu

SEQ ID NO: 1939576 - RNA, 19 nt, Artificial Sequence
  Description of Artificial Sequence: Synthetic oligonucleotide
guaauggaaguacaggguc

SEQ ID NO: 1939577 - RNA, 19 nt, Artificial Sequence
  Description of Artificial Sequence: Synthetic oligonucleotide
uccuccagaccauagcugc

SEQ ID NO: 1939578 - RNA, 19 nt, Artificial Sequence
  Description of Artificial Sequence: Synthetic oligonucleotide
ugugauacacaccgucccc

SEQ ID NO: 1939579 - RNA, 19 nt, Artificial Sequence
  Description of Artificial Sequence: Synthetic oligonucleotide
gacaaagccgaugaccucc

SEQ ID NO: 1939580 - RNA, 19 nt, Artificial Sequence
  Description of Artificial Sequence: Synthetic oligonucleotide
agaaagaguccucacaguu

SEQ ID NO: 1939581 - RNA, 19 nt, Artificial Sequence
  Description of Artificial Sequence: Synthetic oligonucleotide
augagaucggccaagacgu

SEQ ID NO: 1939582 - RNA, 19 nt, Artificial Sequence
  Description of Artificial Sequence: Synthetic oligonucleotide
ugaguaggaaaugccuugg

SEQ ID NO: 1939583 - RNA, 19 nt, Artificial Sequence
  Description of Artificial Sequence: Synthetic oligonucleotide
acccaggcuacccacgagc

SEQ ID NO: 1939584 - RNA, 19 nt, Artificial Sequence
  Description of Artificial Sequence: Synthetic oligonucleotide
agucuggcuugguugaagg

SEQ ID NO: 1939585 - RNA, 19 nt, Artificial Sequence
  Description of Artificial Sequence: Synthetic oligonucleotide
aguaggaaaugccuugggu

SEQ ID NO: 1939586 - RNA, 19 nt, Artificial Sequence
  Description of Artificial Sequence: Synthetic oligonucleotide
agagccugguccauguucc

SEQ ID NO: 1939587 - RNA, 19 nt, Artificial Sequence
  Description of Artificial Sequence: Synthetic oligonucleotide
cacaccguccccaagauga

SEQ ID NO: 1939588 - RNA, 19 nt, Artificial Sequence
  Description of Artificial Sequence: Synthetic oligonucleotide
aaaaguugcuugcgcccag

SEQ ID NO: 1939589 - RNA, 19 nt, Artificial Sequence
  Description of Artificial Sequence: Synthetic oligonucleotide
uguaagucugcagggguag

SEQ ID NO: 1939590 - RNA, 19 nt, Artificial Sequence
  Description of Artificial Sequence: Synthetic oligonucleotide
uucgcucuggcccaccuca

SEQ ID NO: 1939591 - RNA, 19 nt, Artificial Sequence
  Description of Artificial Sequence: Synthetic oligonucleotide
cagcgauagagccuggucc

SEQ ID NO: 1939592 - RNA, 19 nt, Artificial Sequence
  Description of Artificial Sequence: Synthetic oligonucleotide
aaguugcuugcgcccagcg

SEQ ID NO: 1939593 - RNA, 19 nt, Artificial Sequence
  Description of Artificial Sequence: Synthetic oligonucleotide
gaccacgcuggcuucaucc

SEQ ID NO: 1939594 - RNA, 19 nt, Artificial Sequence
  Description of Artificial Sequence: Synthetic oligonucleotide
aaaguugcuugcgcccagc

SEQ ID NO: 1939595 - RNA, 19 nt, Artificial Sequence
  Description of Artificial Sequence: Synthetic oligonucleotide
uaagaguggugugauacac

SEQ ID NO: 1939596 - RNA, 19 nt, Artificial Sequence
  Description of Artificial Sequence: Synthetic oligonucleotide
augacaaagccgaugaccu

SEQ ID NO: 1939597 - RNA, 19 nt, Artificial Sequence
  Description of Artificial Sequence: Synthetic oligonucleotide
acagcgauagagccugguc

SEQ ID NO: 1939598 - RNA, 19 nt, Artificial Sequence
  Description of Artificial Sequence: Synthetic oligonucleotide
guugcuugcgcccagcguc

SEQ ID NO: 1939599 - RNA, 19 nt, Artificial Sequence
  Description of Artificial Sequence: Synthetic oligonucleotide
gugaguaggaaaugccuug

SEQ ID NO: 1939600 - RNA, 19 nt, Artificial Sequence
  Description of Artificial Sequence: Synthetic oligonucleotide
auacacaccguccccaaga

SEQ ID NO: 1939601 - RNA, 19 nt, Artificial Sequence
  Description of Artificial Sequence: Synthetic oligonucleotide
cuggcuugguugaaggagc

SEQ ID NO: 1939602 - RNA, 19 nt, Artificial Sequence
  Description of Artificial Sequence: Synthetic oligonucleotide
aagacguaguacacagccg

SEQ ID NO: 1939603 - RNA, 19 nt, Artificial Sequence
  Description of Artificial Sequence: Synthetic oligonucleotide
aaggcgcagguguauggag

SEQ ID NO: 1939604 - RNA, 19 nt, Artificial Sequence
  Description of Artificial Sequence: Synthetic oligonucleotide
agaaggcgcagguguaugg

SEQ ID NO: 1939605 - RNA, 19 nt, Artificial Sequence
  Description of Artificial Sequence: Synthetic oligonucleotide
gaguaggaaaugccuuggg

SEQ ID NO: 1939606 - RNA, 19 nt, Artificial Sequence
  Description of Artificial Sequence: Synthetic oligonucleotide
uggugugauacacaccguc

SEQ ID NO: 1939607 - RNA, 19 nt, Artificial Sequence
  Description of Artificial Sequence: Synthetic oligonucleotide
aacgcguaagaguggugug

SEQ ID NO: 1939608 - RNA, 19 nt, Artificial Sequence
  Description of Artificial Sequence: Synthetic oligonucleotide
aggaaccacagcgauagag

SEQ ID NO: 1939609 - RNA, 19 nt, Artificial Sequence
  Description of Artificial Sequence: Synthetic oligonucleotide
aagguggaugcggcaaagc

SEQ ID NO: 1939610 - RNA, 19 nt, Artificial Sequence
  Description of Artificial Sequence: Synthetic oligonucleotide
cauucaccaaacacauccc

SEQ ID NO: 1939611 - RNA, 19 nt, Artificial Sequence
  Description of Artificial Sequence: Synthetic oligonucleotide
gugugauacacaccguccc

SEQ ID NO: 1939612 - RNA, 19 nt, Artificial Sequence
  Description of Artificial Sequence: Synthetic oligonucleotide
acuuguaauggaaguacag

SEQ ID NO: 1939613 - RNA, 19 nt, Artificial Sequence
  Description of Artificial Sequence: Synthetic oligonucleotide
agauaaugguguccagcag

SEQ ID NO: 1939614 - RNA, 19 nt, Artificial Sequence
  Description of Artificial Sequence: Synthetic oligonucleotide
acaagaguguccguccccg

SEQ ID NO: 1939615 - RNA, 19 nt, Artificial Sequence
  Description of Artificial Sequence: Synthetic oligonucleotide
uuauugccuggcuccacag

SEQ ID NO: 1939616 - RNA, 19 nt, Artificial Sequence
  Description of Artificial Sequence: Synthetic oligonucleotide
ucaccaacgcaaacaguga

SEQ ID NO: 1939617 - RNA, 19 nt, Artificial Sequence
  Description of Artificial Sequence: Synthetic oligonucleotide
ugaacuuguaauggaagua

SEQ ID NO: 1939618 - RNA, 19 nt, Artificial Sequence
  Description of Artificial Sequence: Synthetic oligonucleotide
agaguugauaggggcagac

SEQ ID NO: 1939619 - RNA, 19 nt, Artificial Sequence
  Description of Artificial Sequence: Synthetic oligonucleotide
auaagguugcaggaaucuc

SEQ ID NO: 1939620 - RNA, 19 nt, Artificial Sequence
  Description of Artificial Sequence: Synthetic oligonucleotide
accacgcuggcuucauccc

SEQ ID NO: 1939621 - RNA, 19 nt, Artificial Sequence
  Description of Artificial Sequence: Synthetic oligonucleotide
uccauguucccugucuugc

SEQ ID NO: 1939622 - RNA, 19 nt, Artificial Sequence
  Description of Artificial Sequence: Synthetic oligonucleotide
gagccgaugacaaagccga

SEQ ID NO: 1939623 - RNA, 19 nt, Artificial Sequence
  Description of Artificial Sequence: Synthetic oligonucleotide
agcgauagagccuggucca

SEQ ID NO: 1939624 - RNA, 19 nt, Artificial Sequence
  Description of Artificial Sequence: Synthetic oligonucleotide
ggaaaaguugcuugcgccc

SEQ ID NO: 1939625 - RNA, 19 nt, Artificial Sequence
  Description of Artificial Sequence: Synthetic oligonucleotide
cuacccacgagccagggca

SEQ ID NO: 1939626 - RNA, 19 nt, Artificial Sequence
  Description of Artificial Sequence: Synthetic oligonucleotide
cuucccuggagacagccac

SEQ ID NO: 1939627 - RNA, 19 nt, Artificial Sequence
  Description of Artificial Sequence: Synthetic oligonucleotide
gaccgagccgaugacaaag

SEQ ID NO: 1939628 - RNA, 19 nt, Artificial Sequence
  Description of Artificial Sequence: Synthetic oligonucleotide
ucagcaucaugagaucggc

SEQ ID NO: 1939629 - RNA, 19 nt, Artificial Sequence
  Description of Artificial Sequence: Synthetic oligonucleotide
acagcccacaccuugcccu

SEQ ID NO: 1939630 - RNA, 19 nt, Artificial Sequence
  Description of Artificial Sequence: Synthetic oligonucleotide
augaccuccuucuuuguaa

SEQ ID NO: 1939631 - RNA, 19 nt, Artificial Sequence
  Description of Artificial Sequence: Synthetic oligonucleotide
aagaguguccguccccgga

SEQ ID NO: 1939632 - RNA, 19 nt, Artificial Sequence
  Description of Artificial Sequence: Synthetic oligonucleotide
accacagcgauagagccug

SEQ ID NO: 1939633 - RNA, 19 nt, Artificial Sequence
  Description of Artificial Sequence: Synthetic oligonucleotide
cugagguucccaucauccg

SEQ ID NO: 1939634 - RNA, 19 nt, Artificial Sequence
  Description of Artificial Sequence: Synthetic oligonucleotide
caggccgcauccuaggccc

SEQ ID NO: 1939635 - RNA, 19 nt, Artificial Sequence
  Description of Artificial Sequence: Synthetic oligonucleotide
agguggaugcggcaaagca

SEQ ID NO: 1939636 - RNA, 19 nt, Artificial Sequence
  Description of Artificial Sequence: Synthetic oligonucleotide
uccuaggcccaguccagcg

SEQ ID NO: 1939637 - RNA, 19 nt, Artificial Sequence
  Description of Artificial Sequence: Synthetic oligonucleotide
ggaaucuccaccgauccag

SEQ ID NO: 1939638 - RNA, 19 nt, Artificial Sequence
  Description of Artificial Sequence: Synthetic oligonucleotide
aguguccguccccggaagc

SEQ ID NO: 1939639 - RNA, 19 nt, Artificial Sequence
  Description of Artificial Sequence: Synthetic oligonucleotide
agccaauaagguugcagga

SEQ ID NO: 1939640 - RNA, 19 nt, Artificial Sequence
  Description of Artificial Sequence: Synthetic oligonucleotide
auaggggcagacaacggag

SEQ ID NO: 1939641 - RNA, 19 nt, Artificial Sequence
  Description of Artificial Sequence: Synthetic oligonucleotide
gucagcaucaugagaucgg

SEQ ID NO: 1939642 - RNA, 19 nt, Artificial Sequence
  Description of Artificial Sequence: Synthetic oligonucleotide
caauaagguugcaggaauc

SEQ ID NO: 1939643 - RNA, 19 nt, Artificial Sequence
  Description of Artificial Sequence: Synthetic oligonucleotide
gaaagaguccucacaguuc

SEQ ID NO: 1939644 - RNA, 19 nt, Artificial Sequence
  Description of Artificial Sequence: Synthetic oligonucleotide
aagguugcaggaaucucca

SEQ ID NO: 1939645 - RNA, 19 nt, Artificial Sequence
  Description of Artificial Sequence: Synthetic oligonucleotide
gauccagccuagaaggaac

SEQ ID NO: 1939646 - RNA, 19 nt, Artificial Sequence
  Description of Artificial Sequence: Synthetic oligonucleotide
cuagaaggaaccacagcga

SEQ ID NO: 1939647 - RNA, 19 nt, Artificial Sequence
  Description of Artificial Sequence: Synthetic oligonucleotide
gaugaagguucguucugca

SEQ ID NO: 1939648 - RNA, 19 nt, Artificial Sequence
  Description of Artificial Sequence: Synthetic oligonucleotide
gauacacaccguccccaag

SEQ ID NO: 1939649 - RNA, 19 nt, Artificial Sequence
  Description of Artificial Sequence: Synthetic oligonucleotide
augaacaagagcacagagu

SEQ ID NO: 1939650 - RNA, 19 nt, Artificial Sequence
  Description of Artificial Sequence: Synthetic oligonucleotide
caccgauccagccuagaag

SEQ ID NO: 1939651 - RNA, 19 nt, Artificial Sequence
  Description of Artificial Sequence: Synthetic oligonucleotide
caccaacgcaaacagugag

SEQ ID NO: 1939652 - RNA, 19 nt, Artificial Sequence
  Description of Artificial Sequence: Synthetic oligonucleotide
agccacaggaucagcaacg

SEQ ID NO: 1939653 - RNA, 19 nt, Artificial Sequence
  Description of Artificial Sequence: Synthetic oligonucleotide
uggguugacugccguagga

SEQ ID NO: 1939654 - RNA, 19 nt, Artificial Sequence
  Description of Artificial Sequence: Synthetic oligonucleotide
cauguucccugucuugcag

SEQ ID NO: 1939655 - RNA, 19 nt, Artificial Sequence
  Description of Artificial Sequence: Synthetic oligonucleotide
cuugguugaaggagcagga

SEQ ID NO: 1939656 - RNA, 19 nt, Artificial Sequence
  Description of Artificial Sequence: Synthetic oligonucleotide
gaaaaguugcuugcgccca

SEQ ID NO: 1939657 - RNA, 19 nt, Artificial Sequence
  Description of Artificial Sequence: Synthetic oligonucleotide
uagagauaaugguguccag

SEQ ID NO: 1939658 - RNA, 19 nt, Artificial Sequence
  Description of Artificial Sequence: Synthetic oligonucleotide
cagagggagggucccagcg

SEQ ID NO: 1939659 - RNA, 19 nt, Artificial Sequence
  Description of Artificial Sequence: Synthetic oligonucleotide
acacccagagucuggcuug

SEQ ID NO: 1939660 - RNA, 19 nt, Artificial Sequence
  Description of Artificial Sequence: Synthetic oligonucleotide
ugcaggaaucuccaccgau

SEQ ID NO: 1939661 - RNA, 19 nt, Artificial Sequence
  Description of Artificial Sequence: Synthetic oligonucleotide
gagaucggccaagacguag

SEQ ID NO: 1939662 - RNA, 19 nt, Artificial Sequence
  Description of Artificial Sequence: Synthetic oligonucleotide
gagaagaccgguucuugaa

SEQ ID NO: 1939663 - RNA, 19 nt, Artificial Sequence
  Description of Artificial Sequence: Synthetic oligonucleotide
ggagaccaagcccaggacc

SEQ ID NO: 1939664 - RNA, 19 nt, Artificial Sequence
  Description of Artificial Sequence: Synthetic oligonucleotide
uauugccuggcuccacaga

SEQ ID NO: 1939665 - RNA, 19 nt, Artificial Sequence
  Description of Artificial Sequence: Synthetic oligonucleotide
aagggcuuauugccuggcu

SEQ ID NO: 1939666 - RNA, 19 nt, Artificial Sequence
  Description of Artificial Sequence: Synthetic oligonucleotide
auccagccuagaaggaacc

SEQ ID NO: 1939667 - RNA, 19 nt, Artificial Sequence
  Description of Artificial Sequence: Synthetic oligonucleotide
gaagaccgguucuugaacu

SEQ ID NO: 1939668 - RNA, 19 nt, Artificial Sequence
  Description of Artificial Sequence: Synthetic oligonucleotide
ucaugagaucggccaagac

SEQ ID NO: 1939669 - RNA, 19 nt, Artificial Sequence
  Description of Artificial Sequence: Synthetic oligonucleotide
cagguguauggagacacag

SEQ ID NO: 1939670 - RNA, 19 nt, Artificial Sequence
  Description of Artificial Sequence: Synthetic oligonucleotide
uccccagcaucaccaacgc

SEQ ID NO: 1939671 - RNA, 19 nt, Artificial Sequence
  Description of Artificial Sequence: Synthetic oligonucleotide
gaucagcaacgcguaagag

SEQ ID NO: 1939672 - RNA, 19 nt, Artificial Sequence
  Description of Artificial Sequence: Synthetic oligonucleotide
aguacacagccguguaagu

SEQ ID NO: 1939673 - RNA, 19 nt, Artificial Sequence
  Description of Artificial Sequence: Synthetic oligonucleotide
aagaccgguucuugaacuu

SEQ ID NO: 1939674 - RNA, 19 nt, Artificial Sequence
  Description of Artificial Sequence: Synthetic oligonucleotide
gccguaggaaauuggugcg

SEQ ID NO: 1939675 - RNA, 19 nt, Artificial Sequence
  Description of Artificial Sequence: Synthetic oligonucleotide
caacggagaagaccgguuc

SEQ ID NO: 1939676 - RNA, 19 nt, Artificial Sequence
  Description of Artificial Sequence: Synthetic oligonucleotide
uugcuugcgcccagcgucc

SEQ ID NO: 1939677 - RNA, 19 nt, Artificial Sequence
  Description of Artificial Sequence: Synthetic oligonucleotide
ggucagcaucaugagaucg

SEQ ID NO: 1939678 - RNA, 19 nt, Artificial Sequence
  Description of Artificial Sequence: Synthetic oligonucleotide
cugccguaggaaauuggug

SEQ ID NO: 1939679 - RNA, 19 nt, Artificial Sequence
  Description of Artificial Sequence: Synthetic oligonucleotide
guaggaaaugccuuggguu

SEQ ID NO: 1939680 - RNA, 19 nt, Artificial Sequence
  Description of Artificial Sequence: Synthetic oligonucleotide
gauagagccugguccaugu

SEQ ID NO: 1939681 - RNA, 19 nt, Artificial Sequence
  Description of Artificial Sequence: Synthetic oligonucleotide
ggcaaagcagagaauggag

SEQ ID NO: 1939682 - RNA, 19 nt, Artificial Sequence
  Description of Artificial Sequence: Synthetic oligonucleotide
gggcuuauugccuggcucc

SEQ ID NO: 1939683 - RNA, 19 nt, Artificial Sequence
  Description of Artificial Sequence: Synthetic oligonucleotide
aagaguggugugauacaca

SEQ ID NO: 1939684 - RNA, 19 nt, Artificial Sequence
  Description of Artificial Sequence: Synthetic oligonucleotide
cacagaguugauaggggca

SEQ ID NO: 1939685 - RNA, 19 nt, Artificial Sequence
  Description of Artificial Sequence: Synthetic oligonucleotide
gcugagguucccaucaucc

SEQ ID NO: 1939686 - RNA, 19 nt, Artificial Sequence
  Description of Artificial Sequence: Synthetic oligonucleotide
guggaugcggcaaagcaga

SEQ ID NO: 1939687 - RNA, 19 nt, Artificial Sequence
  Description of Artificial Sequence: Synthetic oligonucleotide
uggugcggaucugaggcag

SEQ ID NO: 1939688 - RNA, 19 nt, Artificial Sequence
  Description of Artificial Sequence: Synthetic oligonucleotide
uggagaccaagcccaggac

SEQ ID NO: 1939689 - RNA, 19 nt, Artificial Sequence
  Description of Artificial Sequence: Synthetic oligonucleotide
uccagaccauagcugcaga

SEQ ID NO: 1939690 - RNA, 19 nt, Artificial Sequence
  Description of Artificial Sequence: Synthetic oligonucleotide
cagauccacuggauggagc

SEQ ID NO: 1939691 - RNA, 19 nt, Artificial Sequence
  Description of Artificial Sequence: Synthetic oligonucleotide
uacacaccguccccaagau

SEQ ID NO: 1939692 - RNA, 19 nt, Artificial Sequence
  Description of Artificial Sequence: Synthetic oligonucleotide
cacgcuggcuucaucccag

SEQ ID NO: 1939693 - RNA, 19 nt, Artificial Sequence
  Description of Artificial Sequence: Synthetic oligonucleotide
ucugucucugaggcggcag

SEQ ID NO: 1939694 - RNA, 19 nt, Artificial Sequence
  Description of Artificial Sequence: Synthetic oligonucleotide
cauccuaggcccaguccag

SEQ ID NO: 1939695 - RNA, 19 nt, Artificial Sequence
  Description of Artificial Sequence: Synthetic oligonucleotide
gcacagaguugauaggggc

SEQ ID NO: 1939696 - RNA, 19 nt, Artificial Sequence
  Description of Artificial Sequence: Synthetic oligonucleotide
caacgcaaacagugaguag

SEQ ID NO: 1939697 - RNA, 19 nt, Artificial Sequence
  Description of Artificial Sequence: Synthetic oligonucleotide
ugccuuggguugacugccg

SEQ ID NO: 1939698 - RNA, 19 nt, Artificial Sequence
  Description of Artificial Sequence: Synthetic oligonucleotide
caucaugagaucggccaag

SEQ ID NO: 1939699 - RNA, 19 nt, Artificial Sequence
  Description of Artificial Sequence: Synthetic oligonucleotide
caguucgggaggcugauga

SEQ ID NO: 1939700 - RNA, 19 nt, Artificial Sequence
  Description of Artificial Sequence: Synthetic oligonucleotide
cuggagaccgagccgauga

SEQ ID NO: 1939701 - RNA, 19 nt, Artificial Sequence
  Description of Artificial Sequence: Synthetic oligonucleotide
ggugugauacacaccgucc

SEQ ID NO: 1939702 - RNA, 19 nt, Artificial Sequence
  Description of Artificial Sequence: Synthetic oligonucleotide
gacugccguaggaaauugg

SEQ ID NO: 1939703 - RNA, 19 nt, Artificial Sequence
  Description of Artificial Sequence: Synthetic oligonucleotide
gcagacaacggagaagacc

SEQ ID NO: 1939704 - RNA, 19 nt, Artificial Sequence
  Description of Artificial Sequence: Synthetic oligonucleotide
accgagccgaugacaaagc

SEQ ID NO: 1939705 - RNA, 19 nt, Artificial Sequence
  Description of Artificial Sequence: Synthetic oligonucleotide
gccguguaagucugcaggg

SEQ ID NO: 1939706 - RNA, 19 nt, Artificial Sequence
  Description of Artificial Sequence: Synthetic oligonucleotide
ccagagucuggcuugguug

SEQ ID NO: 1939707 - RNA, 19 nt, Artificial Sequence
  Description of Artificial Sequence: Synthetic oligonucleotide
uggaugcggcaaagcagag

SEQ ID NO: 1939708 - RNA, 19 nt, Artificial Sequence
  Description of Artificial Sequence: Synthetic oligonucleotide
cagccuagaaggaaccaca

SEQ ID NO: 1939709 - RNA, 19 nt, Artificial Sequence
  Description of Artificial Sequence: Synthetic oligonucleotide
aucggccaagacguaguac

SEQ ID NO: 1939710 - RNA, 19 nt, Artificial Sequence
  Description of Artificial Sequence: Synthetic oligonucleotide
gagacacaguucgggaggc

SEQ ID NO: 1939711 - RNA, 19 nt, Artificial Sequence
  Description of Artificial Sequence: Synthetic oligonucleotide
gaaucuccaccgauccagc

SEQ ID NO: 1939712 - RNA, 19 nt, Artificial Sequence
  Description of Artificial Sequence: Synthetic oligonucleotide
uccccggaagccuucccug

SEQ ID NO: 1939713 - RNA, 19 nt, Artificial Sequence
  Description of Artificial Sequence: Synthetic oligonucleotide
auggaaguacagggucagc

SEQ ID NO: 1939714 - RNA, 19 nt, Artificial Sequence
  Description of Artificial Sequence: Synthetic oligonucleotide
agcaacgcguaagaguggu

SEQ ID NO: 1939715 - RNA, 19 nt, Artificial Sequence
  Description of Artificial Sequence: Synthetic oligonucleotide
gaguguccguccccggaag

SEQ ID NO: 1939716 - RNA, 19 nt, Artificial Sequence
  Description of Artificial Sequence: Synthetic oligonucleotide
cacacccaggcuacccacg

SEQ ID NO: 1939717 - RNA, 19 nt, Artificial Sequence
  Description of Artificial Sequence: Synthetic oligonucleotide
guauggagacacaguucgg

SEQ ID NO: 1939718 - RNA, 19 nt, Artificial Sequence
  Description of Artificial Sequence: Synthetic oligonucleotide
aguugcuugcgcccagcgu

SEQ ID NO: 1939719 - RNA, 19 nt, Artificial Sequence
  Description of Artificial Sequence: Synthetic oligonucleotide
cguaagaguggugugauac

SEQ ID NO: 1939720 - RNA, 19 nt, Artificial Sequence
  Description of Artificial Sequence: Synthetic oligonucleotide
cagcaucaugagaucggcc

SEQ ID NO: 1939721 - RNA, 19 nt, Artificial Sequence
  Description of Artificial Sequence: Synthetic oligonucleotide
guacacagccguguaaguc

SEQ ID NO: 1939722 - RNA, 19 nt, Artificial Sequence
  Description of Artificial Sequence: Synthetic oligonucleotide
agaguguccguccccggaa

SEQ ID NO: 1939723 - RNA, 19 nt, Artificial Sequence
  Description of Artificial Sequence: Synthetic oligonucleotide
accagaaacuggauagaga

SEQ ID NO: 1939724 - RNA, 19 nt, Artificial Sequence
  Description of Artificial Sequence: Synthetic oligonucleotide
uugacugccguaggaaauu

SEQ ID NO: 1939725 - RNA, 19 nt, Artificial Sequence
  Description of Artificial Sequence: Synthetic oligonucleotide
gcauccuaggcccagucca

SEQ ID NO: 1939726 - RNA, 19 nt, Artificial Sequence
  Description of Artificial Sequence: Synthetic oligonucleotide
ugacaaagccgaugaccuc

SEQ ID NO: 1939727 - RNA, 19 nt, Artificial Sequence
  Description of Artificial Sequence: Synthetic oligonucleotide
gagaaggcgcagguguaug

SEQ ID NO: 1939728 - RNA, 19 nt, Artificial Sequence
  Description of Artificial Sequence: Synthetic oligonucleotide
agguagcugccuucgcucu

SEQ ID NO: 1939729 - RNA, 19 nt, Artificial Sequence
  Description of Artificial Sequence: Synthetic oligonucleotide
caagaguguccguccccgg

SEQ ID NO: 1939730 - RNA, 19 nt, Artificial Sequence
  Description of Artificial Sequence: Synthetic oligonucleotide
agaccgguucuugaacuug

SEQ ID NO: 1939731 - RNA, 19 nt, Artificial Sequence
  Description of Artificial Sequence: Synthetic oligonucleotide
accguccccaagaugaaca

SEQ ID NO: 1939732 - RNA, 19 nt, Artificial Sequence
  Description of Artificial Sequence: Synthetic oligonucleotide
uugcaggaaucuccaccga

SEQ ID NO: 1939733 - RNA, 19 nt, Artificial Sequence
  Description of Artificial Sequence: Synthetic oligonucleotide
gggguagcuggucugcaag

SEQ ID NO: 1939734 - RNA, 19 nt, Artificial Sequence
  Description of Artificial Sequence: Synthetic oligonucleotide
gacacaggucagcuuggga

SEQ ID NO: 1939735 - RNA, 19 nt, Artificial Sequence
  Description of Artificial Sequence: Synthetic oligonucleotide
uccgggacacaggucagcu

SEQ ID NO: 1939736 - RNA, 19 nt, Artificial Sequence
  Description of Artificial Sequence: Synthetic oligonucleotide
uaaugguguccagcagcag

SEQ ID NO: 1939737 - RNA, 19 nt, Artificial Sequence
  Description of Artificial Sequence: Synthetic oligonucleotide
uggagaccgagccgaugac

SEQ ID NO: 1939738 - RNA, 19 nt, Artificial Sequence
  Description of Artificial Sequence: Synthetic oligonucleotide
aggaaucuccaccgaucca

SEQ ID NO: 1939739 - RNA, 19 nt, Artificial Sequence
  Description of Artificial Sequence: Synthetic oligonucleotide
aucaugagaucggccaaga

SEQ ID NO: 1939740 - RNA, 19 nt, Artificial Sequence
  Description of Artificial Sequence: Synthetic oligonucleotide
aggcccaguccagcgaugg

SEQ ID NO: 1939741 - RNA, 19 nt, Artificial Sequence
  Description of Artificial Sequence: Synthetic oligonucleotide
aagguucguucugcaagga

SEQ ID NO: 1939742 - RNA, 19 nt, Artificial Sequence
  Description of Artificial Sequence: Synthetic oligonucleotide
acgcuggcuucaucccagc

SEQ ID NO: 1939743 - RNA, 19 nt, Artificial Sequence
  Description of Artificial Sequence: Synthetic oligonucleotide
accaacgcaaacagugagu

SEQ ID NO: 1939744 - RNA, 19 nt, Artificial Sequence
  Description of Artificial Sequence: Synthetic oligonucleotide
guaguacacagccguguaa

SEQ ID NO: 1939745 - RNA, 19 nt, Artificial Sequence
  Description of Artificial Sequence: Synthetic oligonucleotide
ugcaaggaaggagccaaua

SEQ ID NO: 1939746 - RNA, 19 nt, Artificial Sequence
  Description of Artificial Sequence: Synthetic oligonucleotide
agacagccacaggaucagc

SEQ ID NO: 1939747 - RNA, 19 nt, Artificial Sequence
  Description of Artificial Sequence: Synthetic oligonucleotide
ccagaaacuggauagagau

SEQ ID NO: 1939748 - RNA, 19 nt, Artificial Sequence
  Description of Artificial Sequence: Synthetic oligonucleotide
aggaaaugccuuggguuga

SEQ ID NO: 1939749 - RNA, 19 nt, Artificial Sequence
  Description of Artificial Sequence: Synthetic oligonucleotide
gaaggcgcagguguaugga

SEQ ID NO: 1939750 - RNA, 19 nt, Artificial Sequence
  Description of Artificial Sequence: Synthetic oligonucleotide
cagcagguagcugccuucg

SEQ ID NO: 1939751 - RNA, 19 nt, Artificial Sequence
  Description of Artificial Sequence: Synthetic oligonucleotide
agaucggccaagacguagu

SEQ ID NO: 1939752 - RNA, 19 nt, Artificial Sequence
  Description of Artificial Sequence: Synthetic oligonucleotide
cagcaacgcguaagagugg

SEQ ID NO: 1939753 - RNA, 19 nt, Artificial Sequence
  Description of Artificial Sequence: Synthetic oligonucleotide
agguucguucugcaaggaa

SEQ ID NO: 1939754 - RNA, 19 nt, Artificial Sequence
  Description of Artificial Sequence: Synthetic oligonucleotide
cgagccgaugacaaagccg

SEQ ID NO: 1939755 - RNA, 19 nt, Artificial Sequence
  Description of Artificial Sequence: Synthetic oligonucleotide
uccagccuagaaggaacca

SEQ ID NO: 1939756 - RNA, 19 nt, Artificial Sequence
  Description of Artificial Sequence: Synthetic oligonucleotide
guguauggagacacaguuc

SEQ ID NO: 1939757 - RNA, 19 nt, Artificial Sequence
  Description of Artificial Sequence: Synthetic oligonucleotide
agcgaugguggcaguauca

SEQ ID NO: 1939758 - RNA, 19 nt, Artificial Sequence
  Description of Artificial Sequence: Synthetic oligonucleotide
uccugagcacauucaccaa

SEQ ID NO: 1939759 - RNA, 19 nt, Artificial Sequence
  Description of Artificial Sequence: Synthetic oligonucleotide
acacaccguccccaagaug

SEQ ID NO: 1939760 - RNA, 19 nt, Artificial Sequence
  Description of Artificial Sequence: Synthetic oligonucleotide
ggcaguaucacagcccaca

SEQ ID NO: 1939761 - RNA, 19 nt, Artificial Sequence
  Description of Artificial Sequence: Synthetic oligonucleotide
acgcguaagagugguguga

SEQ ID NO: 1939762 - RNA, 19 nt, Artificial Sequence
  Description of Artificial Sequence: Synthetic oligonucleotide
ggagaagaccgguucuuga

SEQ ID NO: 1939763 - RNA, 19 nt, Artificial Sequence
  Description of Artificial Sequence: Synthetic oligonucleotide
gaguugauaggggcagaca

SEQ ID NO: 1939764 - RNA, 19 nt, Artificial Sequence
  Description of Artificial Sequence: Synthetic oligonucleotide
cauccgggacacaggucag

SEQ ID NO: 1939765 - RNA, 19 nt, Artificial Sequence
  Description of Artificial Sequence: Synthetic oligonucleotide
gcaaagcagagaauggaga

SEQ ID NO: 1939766 - RNA, 19 nt, Artificial Sequence
  Description of Artificial Sequence: Synthetic oligonucleotide
guacagggucagcaucaug

SEQ ID NO: 1939767 - RNA, 19 nt, Artificial Sequence
  Description of Artificial Sequence: Synthetic oligonucleotide
agguguauggagacacagu

SEQ ID NO: 1939768 - RNA, 19 nt, Artificial Sequence
  Description of Artificial Sequence: Synthetic oligonucleotide
guagcuggucugcaaggaa

SEQ ID NO: 1939769 - RNA, 19 nt, Artificial Sequence
  Description of Artificial Sequence: Synthetic oligonucleotide
ccgaugacaaagccgauga

SEQ ID NO: 1939770 - RNA, 19 nt, Artificial Sequence
  Description of Artificial Sequence: Synthetic oligonucleotide
uguccguccccggaagccu

SEQ ID NO: 1939771 - RNA, 19 nt, Artificial Sequence
  Description of Artificial Sequence: Synthetic oligonucleotide
cuccuguacaccagaaacu

SEQ ID NO: 1939772 - RNA, 19 nt, Artificial Sequence
  Description of Artificial Sequence: Synthetic oligonucleotide
agacaacggagaagaccgg

SEQ ID NO: 1939773 - RNA, 19 nt, Artificial Sequence
  Description of Artificial Sequence: Synthetic oligonucleotide
uggcuccuguacaccagaa

SEQ ID NO: 1939774 - RNA, 19 nt, Artificial Sequence
  Description of Artificial Sequence: Synthetic oligonucleotide
ucgcucuggcccaccucag

SEQ ID NO: 1939775 - RNA, 19 nt, Artificial Sequence
  Description of Artificial Sequence: Synthetic oligonucleotide
gguugacugccguaggaaa

SEQ ID NO: 1939776 - RNA, 19 nt, Artificial Sequence
  Description of Artificial Sequence: Synthetic oligonucleotide
ccauccugagcacauucac

SEQ ID NO: 1939777 - RNA, 19 nt, Artificial Sequence
  Description of Artificial Sequence: Synthetic oligonucleotide
caucauccgggacacaggu

SEQ ID NO: 1939778 - RNA, 19 nt, Artificial Sequence
  Description of Artificial Sequence: Synthetic oligonucleotide
gcggcaaagcagagaaugg

SEQ ID NO: 1939779 - RNA, 19 nt, Artificial Sequence
  Description of Artificial Sequence: Synthetic oligonucleotide
ccagaccauagcugcagag

SEQ ID NO: 1939780 - RNA, 19 nt, Artificial Sequence
  Description of Artificial Sequence: Synthetic oligonucleotide
ggauggagccauuggggca

SEQ ID NO: 1939781 - RNA, 19 nt, Artificial Sequence
  Description of Artificial Sequence: Synthetic oligonucleotide
aucauccgggacacagguc

SEQ ID NO: 1939782 - RNA, 19 nt, Artificial Sequence
  Description of Artificial Sequence: Synthetic oligonucleotide
ccccaagaugaacaagagc

SEQ ID NO: 1939783 - RNA, 19 nt, Artificial Sequence
  Description of Artificial Sequence: Synthetic oligonucleotide
guaagucugcagggguagc

SEQ ID NO: 1939784 - RNA, 19 nt, Artificial Sequence
  Description of Artificial Sequence: Synthetic oligonucleotide
guguccguccccggaagcc

SEQ ID NO: 1939785 - RNA, 19 nt, Artificial Sequence
  Description of Artificial Sequence: Synthetic oligonucleotide
acaggaucagcaacgcgua

SEQ ID NO: 1939786 - RNA, 19 nt, Artificial Sequence
  Description of Artificial Sequence: Synthetic oligonucleotide
gaccauagcugcagaggga

SEQ ID NO: 1939787 - RNA, 19 nt, Artificial Sequence
  Description of Artificial Sequence: Synthetic oligonucleotide
gcaguaucacagcccacac

SEQ ID NO: 1939788 - RNA, 19 nt, Artificial Sequence
  Description of Artificial Sequence: Synthetic oligonucleotide
ugagaucggccaagacgua

SEQ ID NO: 1939789 - RNA, 19 nt, Artificial Sequence
  Description of Artificial Sequence: Synthetic oligonucleotide
gacaacggagaagaccggu

SEQ ID NO: 1939790 - RNA, 19 nt, Artificial Sequence
  Description of Artificial Sequence: Synthetic oligonucleotide
gaucggccaagacguagua

SEQ ID NO: 1939791 - RNA, 19 nt, Artificial Sequence
  Description of Artificial Sequence: Synthetic oligonucleotide
cagaaacuggauagagaua

SEQ ID NO: 1939792 - RNA, 19 nt, Artificial Sequence
  Description of Artificial Sequence: Synthetic oligonucleotide
ggggagaaggcgcaggugu

SEQ ID NO: 1939793 - RNA, 19 nt, Artificial Sequence
  Description of Artificial Sequence: Synthetic oligonucleotide
cguacaguguguuccccag

SEQ ID NO: 1939794 - RNA, 19 nt, Artificial Sequence
  Description of Artificial Sequence: Synthetic oligonucleotide
gugcggaucugaggcagcc

SEQ ID NO: 1939795 - RNA, 19 nt, Artificial Sequence
  Description of Artificial Sequence: Synthetic oligonucleotide
caaacacaucccagaucca

SEQ ID NO: 1939796 - RNA, 19 nt, Artificial Sequence
  Description of Artificial Sequence: Synthetic oligonucleotide
agaaggaaccacagcgaua

SEQ ID NO: 1939797 - RNA, 19 nt, Artificial Sequence
  Description of Artificial Sequence: Synthetic oligonucleotide
uggcaguaucacagcccac

SEQ ID NO: 1939798 - RNA, 19 nt, Artificial Sequence
  Description of Artificial Sequence: Synthetic oligonucleotide
cccaggcuacccacgagcc

SEQ ID NO: 1939799 - RNA, 19 nt, Artificial Sequence
  Description of Artificial Sequence: Synthetic oligonucleotide
acaacggagaagaccgguu

SEQ ID NO: 1939800 - RNA, 19 nt, Artificial Sequence
  Description of Artificial Sequence: Synthetic oligonucleotide
caacgcguaagaguggugu

SEQ ID NO: 1939801 - RNA, 19 nt, Artificial Sequence
  Description of Artificial Sequence: Synthetic oligonucleotide
ccaagacguaguacacagc

SEQ ID NO: 1939802 - RNA, 19 nt, Artificial Sequence
  Description of Artificial Sequence: Synthetic oligonucleotide
agcguccuccagaccauag

SEQ ID NO: 1939803 - RNA, 19 nt, Artificial Sequence
  Description of Artificial Sequence: Synthetic oligonucleotide
ggugcagcagguagcugcc

SEQ ID NO: 1939804 - RNA, 19 nt, Artificial Sequence
  Description of Artificial Sequence: Synthetic oligonucleotide
ggucagcuugggaggaggg

SEQ ID NO: 1939805 - RNA, 19 nt, Artificial Sequence
  Description of Artificial Sequence: Synthetic oligonucleotide
aguacagggucagcaucau

SEQ ID NO: 1939806 - RNA, 19 nt, Artificial Sequence
  Description of Artificial Sequence: Synthetic oligonucleotide
cuucuuuguaaagggcuua

SEQ ID NO: 1939807 - RNA, 19 nt, Artificial Sequence
  Description of Artificial Sequence: Synthetic oligonucleotide
agguucccaucauccggga

SEQ ID NO: 1939808 - RNA, 19 nt, Artificial Sequence
  Description of Artificial Sequence: Synthetic oligonucleotide
aggcgcagguguauggaga

SEQ ID NO: 1939809 - RNA, 19 nt, Artificial Sequence
  Description of Artificial Sequence: Synthetic oligonucleotide
agaccgagccgaugacaaa

SEQ ID NO: 1939810 - RNA, 19 nt, Artificial Sequence
  Description of Artificial Sequence: Synthetic oligonucleotide
auagagccugguccauguu

SEQ ID NO: 1939811 - RNA, 19 nt, Artificial Sequence
  Description of Artificial Sequence: Synthetic oligonucleotide
uccagcgaugguggcagua

SEQ ID NO: 1939812 - RNA, 19 nt, Artificial Sequence
  Description of Artificial Sequence: Synthetic oligonucleotide
ccagccuagaaggaaccac

SEQ ID NO: 1939813 - RNA, 19 nt, Artificial Sequence
  Description of Artificial Sequence: Synthetic oligonucleotide
ugcggaucugaggcagccu

SEQ ID NO: 1939814 - RNA, 19 nt, Artificial Sequence
  Description of Artificial Sequence: Synthetic oligonucleotide
guguaagucugcaggggua

SEQ ID NO: 1939815 - RNA, 19 nt, Artificial Sequence
  Description of Artificial Sequence: Synthetic oligonucleotide
gccaauaagguugcaggaa

SEQ ID NO: 1939816 - RNA, 19 nt, Artificial Sequence
  Description of Artificial Sequence: Synthetic oligonucleotide
uccaccgauccagccuaga

SEQ ID NO: 1939817 - RNA, 19 nt, Artificial Sequence
  Description of Artificial Sequence: Synthetic oligonucleotide
cuucgcucuggcccaccuc

SEQ ID NO: 1939818 - RNA, 19 nt, Artificial Sequence
  Description of Artificial Sequence: Synthetic oligonucleotide
ccacaggaucagcaacgcg

SEQ ID NO: 1939819 - RNA, 19 nt, Artificial Sequence
  Description of Artificial Sequence: Synthetic oligonucleotide
ccguguaagucugcagggg

SEQ ID NO: 1939820 - RNA, 19 nt, Artificial Sequence
  Description of Artificial Sequence: Synthetic oligonucleotide
ggcggcagcaguggccugg

SEQ ID NO: 1939821 - RNA, 19 nt, Artificial Sequence
  Description of Artificial Sequence: Synthetic oligonucleotide
ccgagccgaugacaaagcc

SEQ ID NO: 1939822 - RNA, 19 nt, Artificial Sequence
  Description of Artificial Sequence: Synthetic oligonucleotide
ggaagguggaugcggcaaa

SEQ ID NO: 1939823 - RNA, 19 nt, Artificial Sequence
  Description of Artificial Sequence: Synthetic oligonucleotide
caccaaacacaucccagau

SEQ ID NO: 1939824 - RNA, 19 nt, Artificial Sequence
  Description of Artificial Sequence: Synthetic oligonucleotide
ccguaggaaauuggugcgg

SEQ ID NO: 1939825 - RNA, 19 nt, Artificial Sequence
  Description of Artificial Sequence: Synthetic oligonucleotide
cagcccguacaguguguuc

SEQ ID NO: 1939826 - RNA, 19 nt, Artificial Sequence
  Description of Artificial Sequence: Synthetic oligonucleotide
gguucccaucauccgggac

SEQ ID NO: 1939827 - RNA, 19 nt, Artificial Sequence
  Description of Artificial Sequence: Synthetic oligonucleotide
uccguccccggaagccuuc

SEQ ID NO: 1939828 - RNA, 19 nt, Artificial Sequence
  Description of Artificial Sequence: Synthetic oligonucleotide
cuccaccgauccagccuag

SEQ ID NO: 1939829 - RNA, 19 nt, Artificial Sequence
  Description of Artificial Sequence: Synthetic oligonucleotide
gccacaggaucagcaacgc

SEQ ID NO: 1939830 - RNA, 19 nt, Artificial Sequence
  Description of Artificial Sequence: Synthetic oligonucleotide
gcgaugguggcaguaucac

SEQ ID NO: 1939831 - RNA, 19 nt, Artificial Sequence
  Description of Artificial Sequence: Synthetic oligonucleotide
gcccguacaguguguuccc

SEQ ID NO: 1939832 - RNA, 19 nt, Artificial Sequence
  Description of Artificial Sequence: Synthetic oligonucleotide
caccguccccaagaugaac

SEQ ID NO: 1939833 - RNA, 19 nt, Artificial Sequence
  Description of Artificial Sequence: Synthetic oligonucleotide
caggguucuugagcagcac

SEQ ID NO: 1939834 - RNA, 19 nt, Artificial Sequence
  Description of Artificial Sequence: Synthetic oligonucleotide
guaggaaauuggugcggau

SEQ ID NO: 1939835 - RNA, 19 nt, Artificial Sequence
  Description of Artificial Sequence: Synthetic oligonucleotide
ccaacgcaaacagugagua

SEQ ID NO: 1939836 - RNA, 19 nt, Artificial Sequence
  Description of Artificial Sequence: Synthetic oligonucleotide
gcuacccacgagccagggc

SEQ ID NO: 1939837 - RNA, 19 nt, Artificial Sequence
  Description of Artificial Sequence: Synthetic oligonucleotide
gaaacuggauagagauaau

SEQ ID NO: 1939838 - RNA, 19 nt, Artificial Sequence
  Description of Artificial Sequence: Synthetic oligonucleotide
ccugagcacauucaccaaa

SEQ ID NO: 1939839 - RNA, 19 nt, Artificial Sequence
  Description of Artificial Sequence: Synthetic oligonucleotide
cugguccauguucccuguc

SEQ ID NO: 1939840 - RNA, 19 nt, Artificial Sequence
  Description of Artificial Sequence: Synthetic oligonucleotide
ggagaccgagccgaugaca

SEQ ID NO: 1939841 - RNA, 19 nt, Artificial Sequence
  Description of Artificial Sequence: Synthetic oligonucleotide
ccccggaagccuucccugg

SEQ ID NO: 1939842 - RNA, 19 nt, Artificial Sequence
  Description of Artificial Sequence: Synthetic oligonucleotide
ggagccauuggggcacaug

SEQ ID NO: 1939843 - RNA, 19 nt, Artificial Sequence
  Description of Artificial Sequence: Synthetic oligonucleotide
cacucagcccguacagugu

SEQ ID NO: 1939844 - RNA, 19 nt, Artificial Sequence
  Description of Artificial Sequence: Synthetic oligonucleotide
ccuugagagcagguacagc

SEQ ID NO: 1939845 - RNA, 19 nt, Artificial Sequence
  Description of Artificial Sequence: Synthetic oligonucleotide
guccccggaagccuucccu

SEQ ID NO: 1939846 - RNA, 19 nt, Artificial Sequence
  Description of Artificial Sequence: Synthetic oligonucleotide
ggguugacugccguaggaa

SEQ ID NO: 1939847 - RNA, 19 nt, Artificial Sequence
  Description of Artificial Sequence: Synthetic oligonucleotide
ggaugcggcaaagcagaga

SEQ ID NO: 1939848 - RNA, 19 nt, Artificial Sequence
  Description of Artificial Sequence: Synthetic oligonucleotide
cagaguugauaggggcaga

SEQ ID NO: 1939849 - RNA, 19 nt, Artificial Sequence
  Description of Artificial Sequence: Synthetic oligonucleotide
ggcuacccacgagccaggg

SEQ ID NO: 1939850 - RNA, 19 nt, Artificial Sequence
  Description of Artificial Sequence: Synthetic oligonucleotide
caggaucagcaacgcguaa

SEQ ID NO: 1939851 - RNA, 19 nt, Artificial Sequence
  Description of Artificial Sequence: Synthetic oligonucleotide
cgcauccuaggcccagucc

SEQ ID NO: 1939852 - RNA, 19 nt, Artificial Sequence
  Description of Artificial Sequence: Synthetic oligonucleotide
guucugcaaggaagccaca

SEQ ID NO: 1939853 - RNA, 19 nt, Artificial Sequence
  Description of Artificial Sequence: Synthetic oligonucleotide
gaggcugaugaagguucgu

SEQ ID NO: 1939854 - RNA, 19 nt, Artificial Sequence
  Description of Artificial Sequence: Synthetic oligonucleotide
acaccguccccaagaugaa

SEQ ID NO: 1939855 - RNA, 19 nt, Artificial Sequence
  Description of Artificial Sequence: Synthetic oligonucleotide
ccguacaguguguucccca

SEQ ID NO: 1939856 - RNA, 19 nt, Artificial Sequence
  Description of Artificial Sequence: Synthetic oligonucleotide
aggagccaauaagguugca

SEQ ID NO: 1939857 - RNA, 19 nt, Artificial Sequence
  Description of Artificial Sequence: Synthetic oligonucleotide
acgagccagggcagguggu

SEQ ID NO: 1939858 - RNA, 19 nt, Artificial Sequence
  Description of Artificial Sequence: Synthetic oligonucleotide
cagcccacacccagagucu

SEQ ID NO: 1939859 - RNA, 19 nt, Artificial Sequence
  Description of Artificial Sequence: Synthetic oligonucleotide
accgguucuugaacuugua

SEQ ID NO: 1939860 - RNA, 19 nt, Artificial Sequence
  Description of Artificial Sequence: Synthetic oligonucleotide
cggccaagacguaguacac

SEQ ID NO: 1939861 - RNA, 19 nt, Artificial Sequence
  Description of Artificial Sequence: Synthetic oligonucleotide
gcaacgcguaagaguggug

SEQ ID NO: 1939862 - RNA, 19 nt, Artificial Sequence
  Description of Artificial Sequence: Synthetic oligonucleotide
cguaggaaauuggugcgga

SEQ ID NO: 1939863 - RNA, 19 nt, Artificial Sequence
  Description of Artificial Sequence: Synthetic oligonucleotide
augcggcaaagcagagaau

SEQ ID NO: 1939864 - RNA, 19 nt, Artificial Sequence
  Description of Artificial Sequence: Synthetic oligonucleotide
ccuaggcccaguccagcga

SEQ ID NO: 1939865 - RNA, 19 nt, Artificial Sequence
  Description of Artificial Sequence: Synthetic oligonucleotide
gcagguguauggagacaca

SEQ ID NO: 1939866 - RNA, 19 nt, Artificial Sequence
  Description of Artificial Sequence: Synthetic oligonucleotide
ccaccgauccagccuagaa

SEQ ID NO: 1939867 - RNA, 19 nt, Artificial Sequence
  Description of Artificial Sequence: Synthetic oligonucleotide
ugccuucgcucuggcccac

SEQ ID NO: 1939868 - RNA, 19 nt, Artificial Sequence
  Description of Artificial Sequence: Synthetic oligonucleotide
cacagacaagaguguccgu

SEQ ID NO: 1939869 - RNA, 19 nt, Artificial Sequence
  Description of Artificial Sequence: Synthetic oligonucleotide
gcggaucugaggcagccuu

SEQ ID NO: 1939870 - RNA, 19 nt, Artificial Sequence
  Description of Artificial Sequence: Synthetic oligonucleotide
caggaccacgcuggcuuca

SEQ ID NO: 1939871 - RNA, 19 nt, Artificial Sequence
  Description of Artificial Sequence: Synthetic oligonucleotide
cccguacaguguguucccc

SEQ ID NO: 1939872 - RNA, 19 nt, Artificial Sequence
  Description of Artificial Sequence: Synthetic oligonucleotide
cacacucagcccguacagu

SEQ ID NO: 1939873 - RNA, 19 nt, Artificial Sequence
  Description of Artificial Sequence: Synthetic oligonucleotide
ccgauccagccuagaagga

SEQ ID NO: 1939874 - RNA, 19 nt, Artificial Sequence
  Description of Artificial Sequence: Synthetic oligonucleotide
cgaugguggcaguaucaca

SEQ ID NO: 1939875 - RNA, 19 nt, Artificial Sequence
  Description of Artificial Sequence: Synthetic oligonucleotide
cguguaagucugcaggggu

SEQ ID NO: 1939876 - RNA, 19 nt, Artificial Sequence
  Description of Artificial Sequence: Synthetic oligonucleotide
cguaguacacagccgugua

SEQ ID NO: 1939877 - RNA, 19 nt, Artificial Sequence
  Description of Artificial Sequence: Synthetic oligonucleotide
cgauagagccugguccaug

SEQ ID NO: 1939878 - RNA, 19 nt, Artificial Sequence
  Description of Artificial Sequence: Synthetic oligonucleotide
ggccgcauccuaggcccag

SEQ ID NO: 1939879 - RNA, 19 nt, Artificial Sequence
  Description of Artificial Sequence: Synthetic oligonucleotide
ccacgcuggcuucauccca

SEQ ID NO: 1939880 - RNA, 19 nt, Artificial Sequence
  Description of Artificial Sequence: Synthetic oligonucleotide
ccacagcgauagagccugg

SEQ ID NO: 1939881 - RNA, 19 nt, Artificial Sequence
  Description of Artificial Sequence: Synthetic oligonucleotide
ggaccacgcuggcuucauc

SEQ ID NO: 1939882 - RNA, 19 nt, Artificial Sequence
  Description of Artificial Sequence: Synthetic oligonucleotide
gggagaaggcgcaggugua

SEQ ID NO: 1939883 - RNA, 19 nt, Artificial Sequence
  Description of Artificial Sequence: Synthetic oligonucleotide
cacagcgauagagccuggu

SEQ ID NO: 1939884 - RNA, 19 nt, Artificial Sequence
  Description of Artificial Sequence: Synthetic oligonucleotide
cugcaaggaaggagccaau

SEQ ID NO: 1939885 - RNA, 19 nt, Artificial Sequence
  Description of Artificial Sequence: Synthetic oligonucleotide
ccgcauccuaggcccaguc

SEQ ID NO: 1939886 - RNA, 19 nt, Artificial Sequence
  Description of Artificial Sequence: Synthetic oligonucleotide
ggagaaggcgcagguguau

SEQ ID NO: 1939887 - RNA, 19 nt, Artificial Sequence
  Description of Artificial Sequence: Synthetic oligonucleotide
ccaggcuacccacgagcca

SEQ ID NO: 1939888 - RNA, 19 nt, Artificial Sequence
  Description of Artificial Sequence: Synthetic oligonucleotide
ccguccccaagaugaacaa

SEQ ID NO: 1939889 - RNA, 19 nt, Artificial Sequence
  Description of Artificial Sequence: Synthetic oligonucleotide
gcguaagaguggugugaua

SEQ ID NO: 1939890 - RNA, 19 nt, Artificial Sequence
  Description of Artificial Sequence: Synthetic oligonucleotide
cacaguucgggaggcugau

SEQ ID NO: 1939891 - RNA, 19 nt, Artificial Sequence
  Description of Artificial Sequence: Synthetic oligonucleotide
cgauccagccuagaaggaa

SEQ ID NO: 1939892 - RNA, 19 nt, Artificial Sequence
  Description of Artificial Sequence: Synthetic oligonucleotide
cacagcccacacccagagu

SEQ ID NO: 1939893 - RNA, 19 nt, Artificial Sequence
  Description of Artificial Sequence: Synthetic oligonucleotide
cagcugagguucccaucau

SEQ ID NO: 1939894 - RNA, 19 nt, Artificial Sequence
  Description of Artificial Sequence: Synthetic oligonucleotide
cagcccacaccuugcccuu

SEQ ID NO: 1939895 - RNA, 19 nt, Artificial Sequence
  Description of Artificial Sequence: Synthetic oligonucleotide
cguccccggaagccuuccc

SEQ ID NO: 1939896 - RNA, 19 nt, Artificial Sequence
  Description of Artificial Sequence: Synthetic oligonucleotide
ccugguccauguucccugu

SEQ ID NO: 1939897 - RNA, 19 nt, Artificial Sequence
  Description of Artificial Sequence: Synthetic oligonucleotide
ggcagccuugagagcaggu

SEQ ID NO: 1939898 - RNA, 19 nt, Artificial Sequence
  Description of Artificial Sequence: Synthetic oligonucleotide
ccguccccggaagccuucc

SEQ ID NO: 1939899 - RNA, 19 nt, Artificial Sequence
  Description of Artificial Sequence: Synthetic oligonucleotide
cagcguccuccagaccaua

SEQ ID NO: 1939900 - RNA, 19 nt, Artificial Sequence
  Description of Artificial Sequence: Synthetic oligonucleotide
gccuucgcucuggcccacc

SEQ ID NO: 1939901 - RNA, 19 nt, Artificial Sequence
  Description of Artificial Sequence: Synthetic oligonucleotide
caaagccgaugaccuccuu

SEQ ID NO: 1939902 - RNA, 19 nt, Artificial Sequence
  Description of Artificial Sequence: Synthetic oligonucleotide
guccguccccggaagccuu

SEQ ID NO: 1939903 - RNA, 19 nt, Artificial Sequence
  Description of Artificial Sequence: Synthetic oligonucleotide
gcgauagagccugguccau

SEQ ID NO: 1939904 - RNA, 19 nt, Artificial Sequence
  Description of Artificial Sequence: Synthetic oligonucleotide
cgcguaagaguggugugau

SEQ ID NO: 1939905 - RNA, 19 nt, Artificial Sequence
  Description of Artificial Sequence: Synthetic oligonucleotide
cagccauccugagcacauu

SEQ ID NO: 1939906 - RNA, 19 nt, Artificial Sequence
  Description of Artificial Sequence: Synthetic oligonucleotide
gccgcauccuaggcccagu

SEQ ID NO: 1939907 - RNA, 19 nt, Artificial Sequence
  Description of Artificial Sequence: Synthetic oligonucleotide
ccgggacacaggucagcuu

SEQ ID NO: 1939908 - RNA, 19 nt, Artificial Sequence
  Description of Artificial Sequence: Synthetic oligonucleotide
cgggaggcugaugaagguu

SEQ ID NO: 1939909 - RNA, 19 nt, Artificial Sequence
  Description of Artificial Sequence: Synthetic oligonucleotide
auuaaggagauucucaagc

SEQ ID NO: 1939910 - RNA, 19 nt, Artificial Sequence
  Description of Artificial Sequence: Synthetic oligonucleotide
aauaaguuguaacaugcac

SEQ ID NO: 1939911 - RNA, 19 nt, Artificial Sequence
  Description of Artificial Sequence: Synthetic oligonucleotide
aagguuauaaaucuuuauc

SEQ ID NO: 1939912 - RNA, 19 nt, Artificial Sequence
  Description of Artificial Sequence: Synthetic oligonucleotide
aagucaaaagccuuccucc

SEQ ID NO: 1939913 - RNA, 19 nt, Artificial Sequence
  Description of Artificial Sequence: Synthetic oligonucleotide
uucauuuccagcuuagugg

SEQ ID NO: 1939914 - RNA, 19 nt, Artificial Sequence
  Description of Artificial Sequence: Synthetic oligonucleotide
uucuugaucucuaacacgg

SEQ ID NO: 1939915 - RNA, 19 nt, Artificial Sequence
  Description of Artificial Sequence: Synthetic oligonucleotide
cuuaauagggcccugagag

SEQ ID NO: 1939916 - RNA, 19 nt, Artificial Sequence
  Description of Artificial Sequence: Synthetic oligonucleotide
uuuauuaaaugguugcuug

SEQ ID NO: 1939917 - RNA, 19 nt, Artificial Sequence
  Description of Artificial Sequence: Synthetic oligonucleotide
uaaguuguaacaugcacag

SEQ ID NO: 1939918 - RNA, 19 nt, Artificial Sequence
  Description of Artificial Sequence: Synthetic oligonucleotide
gauagucucuuguugaccg

SEQ ID NO: 1939919 - RNA, 19 nt, Artificial Sequence
  Description of Artificial Sequence: Synthetic oligonucleotide
auuuaaguugucaagcugc

SEQ ID NO: 1939920 - RNA, 19 nt, Artificial Sequence
  Description of Artificial Sequence: Synthetic oligonucleotide
agaauaaguuguaacaugc

SEQ ID NO: 1939921 - RNA, 19 nt, Artificial Sequence
  Description of Artificial Sequence: Synthetic oligonucleotide
ugagaguuuccccuuaugg

SEQ ID NO: 1939922 - RNA, 19 nt, Artificial Sequence
  Description of Artificial Sequence: Synthetic oligonucleotide
ucuaacacggcuuucagac

SEQ ID NO: 1939923 - RNA, 19 nt, Artificial Sequence
  Description of Artificial Sequence: Synthetic oligonucleotide
aagaauauuauaaagguua

SEQ ID NO: 1939924 - RNA, 19 nt, Artificial Sequence
  Description of Artificial Sequence: Synthetic oligonucleotide
uguaacaugcacaggcugg

SEQ ID NO: 1939925 - RNA, 19 nt, Artificial Sequence
  Description of Artificial Sequence: Synthetic oligonucleotide
guuccaaacacucugaaac

SEQ ID NO: 1939926 - RNA, 19 nt, Artificial Sequence
  Description of Artificial Sequence: Synthetic oligonucleotide
ugauauucgcuuuuguucc

SEQ ID NO: 1939927 - RNA, 19 nt, Artificial Sequence
  Description of Artificial Sequence: Synthetic oligonucleotide
ugaaagggaaguuucguag

SEQ ID NO: 1939928 - RNA, 19 nt, Artificial Sequence
  Description of Artificial Sequence: Synthetic oligonucleotide
ucuuuaucuuaauagggcc

SEQ ID NO: 1939929 - RNA, 19 nt, Artificial Sequence
  Description of Artificial Sequence: Synthetic oligonucleotide
aacaagguucccucauucc

SEQ ID NO: 1939930 - RNA, 19 nt, Artificial Sequence
  Description of Artificial Sequence: Synthetic oligonucleotide
gaguuuauuaaaugguugc

SEQ ID NO: 1939931 - RNA, 19 nt, Artificial Sequence
  Description of Artificial Sequence: Synthetic oligonucleotide
agauguuguucuuggaacc

SEQ ID NO: 1939932 - RNA, 19 nt, Artificial Sequence
  Description of Artificial Sequence: Synthetic oligonucleotide
ugaguuuauuaaaugguug

SEQ ID NO: 1939933 - RNA, 19 nt, Artificial Sequence
  Description of Artificial Sequence: Synthetic oligonucleotide
ucuacuuucucugaguggc

SEQ ID NO: 1939934 - RNA, 19 nt, Artificial Sequence
  Description of Artificial Sequence: Synthetic oligonucleotide
ucuuguuuaauuaggaguu

SEQ ID NO: 1939935 - RNA, 19 nt, Artificial Sequence
  Description of Artificial Sequence: Synthetic oligonucleotide
uugauauucgcuuuuguuc

SEQ ID NO: 1939936 - RNA, 19 nt, Artificial Sequence
  Description of Artificial Sequence: Synthetic oligonucleotide
ucacuuuucagauuauuga

SEQ ID NO: 1939937 - RNA, 19 nt, Artificial Sequence
  Description of Artificial Sequence: Synthetic oligonucleotide
uuucgaauuagccuucucu

SEQ ID NO: 1939938 - RNA, 19 nt, Artificial Sequence
  Description of Artificial Sequence: Synthetic oligonucleotide
aaucgcuucaguuugucaa

SEQ ID NO: 1939939 - RNA, 19 nt, Artificial Sequence
  Description of Artificial Sequence: Synthetic oligonucleotide
aguggcuagcuucauuucc

SEQ ID NO: 1939940 - RNA, 19 nt, Artificial Sequence
  Description of Artificial Sequence: Synthetic oligonucleotide
aaucacaagaaggugucuc

SEQ ID NO: 1939941 - RNA, 19 nt, Artificial Sequence
  Description of Artificial Sequence: Synthetic oligonucleotide
ucguaaguagccgauacgg

SEQ ID NO: 1939942 - RNA, 19 nt, Artificial Sequence
  Description of Artificial Sequence: Synthetic oligonucleotide
aguuucguagguuuucuuc

SEQ ID NO: 1939943 - RNA, 19 nt, Artificial Sequence
  Description of Artificial Sequence: Synthetic oligonucleotide
cagauuauugacuuguuuc

SEQ ID NO: 1939944 - RNA, 19 nt, Artificial Sequence
  Description of Artificial Sequence: Synthetic oligonucleotide
aaggagauucucaagcaac

SEQ ID NO: 1939945 - RNA, 19 nt, Artificial Sequence
  Description of Artificial Sequence: Synthetic oligonucleotide
gaaagcuaagcagaggucc

SEQ ID NO: 1939946 - RNA, 19 nt, Artificial Sequence
  Description of Artificial Sequence: Synthetic oligonucleotide
uggaaaguugccuugaaau

SEQ ID NO: 1939947 - RNA, 19 nt, Artificial Sequence
  Description of Artificial Sequence: Synthetic oligonucleotide
uagaauaaguuguaacaug

SEQ ID NO: 1939948 - RNA, 19 nt, Artificial Sequence
  Description of Artificial Sequence: Synthetic oligonucleotide
uuuaaagcaucauuuucac

SEQ ID NO: 1939949 - RNA, 19 nt, Artificial Sequence
  Description of Artificial Sequence: Synthetic oligonucleotide
uuuaauuccucguuuuccu

SEQ ID NO: 1939950 - RNA, 19 nt, Artificial Sequence
  Description of Artificial Sequence: Synthetic oligonucleotide
aacgcuguguucuugcuga

SEQ ID NO: 1939951 - RNA, 19 nt, Artificial Sequence
  Description of Artificial Sequence: Synthetic oligonucleotide
uauccuguggaaauuccag

SEQ ID NO: 1939952 - RNA, 19 nt, Artificial Sequence
  Description of Artificial Sequence: Synthetic oligonucleotide
agauuauugacuuguuucu

SEQ ID NO: 1939953 - RNA, 19 nt, Artificial Sequence
  Description of Artificial Sequence: Synthetic oligonucleotide
uuaaaugguugcuugucug

SEQ ID NO: 1939954 - RNA, 19 nt, Artificial Sequence
  Description of Artificial Sequence: Synthetic oligonucleotide
ggugaagaauauuauaaag

SEQ ID NO: 1939955 - RNA, 19 nt, Artificial Sequence
  Description of Artificial Sequence: Synthetic oligonucleotide
cuuuaucuuaauagggccc

SEQ ID NO: 1939956 - RNA, 19 nt, Artificial Sequence
  Description of Artificial Sequence: Synthetic oligonucleotide
aggcaaaagaacaagguuc

SEQ ID NO: 1939957 - RNA, 19 nt, Artificial Sequence
  Description of Artificial Sequence: Synthetic oligonucleotide
ucgauuucguggcagaugu

SEQ ID NO: 1939958 - RNA, 19 nt, Artificial Sequence
  Description of Artificial Sequence: Synthetic oligonucleotide
ugggaaaacacagcuacgg

SEQ ID NO: 1939959 - RNA, 19 nt, Artificial Sequence
  Description of Artificial Sequence: Synthetic oligonucleotide
cauucgagcuuuuaauucc

SEQ ID NO: 1939960 - RNA, 19 nt, Artificial Sequence
  Description of Artificial Sequence: Synthetic oligonucleotide
ucccgauucgauuucgugg

SEQ ID NO: 1939961 - RNA, 19 nt, Artificial Sequence
  Description of Artificial Sequence: Synthetic oligonucleotide
aaagccuuccuccggaacu

SEQ ID NO: 1939962 - RNA, 19 nt, Artificial Sequence
  Description of Artificial Sequence: Synthetic oligonucleotide
uuuuaacuugggaggaugc

SEQ ID NO: 1939963 - RNA, 19 nt, Artificial Sequence
  Description of Artificial Sequence: Synthetic oligonucleotide
auuuaaagcaucauuuuca

SEQ ID NO: 1939964 - RNA, 19 nt, Artificial Sequence
  Description of Artificial Sequence: Synthetic oligonucleotide
augggcagcauuuaaguug

SEQ ID NO: 1939965 - RNA, 19 nt, Artificial Sequence
  Description of Artificial Sequence: Synthetic oligonucleotide
ucaacauccucccgauucg

SEQ ID NO: 1939966 - RNA, 19 nt, Artificial Sequence
  Description of Artificial Sequence: Synthetic oligonucleotide
aaagcuaagcagagguccc

SEQ ID NO: 1939967 - RNA, 19 nt, Artificial Sequence
  Description of Artificial Sequence: Synthetic oligonucleotide
acucguaaguagccgauac

SEQ ID NO: 1939968 - RNA, 19 nt, Artificial Sequence
  Description of Artificial Sequence: Synthetic oligonucleotide
uuaaggagauucucaagca

SEQ ID NO: 1939969 - RNA, 19 nt, Artificial Sequence
  Description of Artificial Sequence: Synthetic oligonucleotide
uguggaaauuccagaaagc

SEQ ID NO: 1939970 - RNA, 19 nt, Artificial Sequence
  Description of Artificial Sequence: Synthetic oligonucleotide
uucugaaagggaaguuucg

SEQ ID NO: 1939971 - RNA, 19 nt, Artificial Sequence
  Description of Artificial Sequence: Synthetic oligonucleotide
ugucuuguuuaauuaggag

SEQ ID NO: 1939972 - RNA, 19 nt, Artificial Sequence
  Description of Artificial Sequence: Synthetic oligonucleotide
uaagcagagguccccauug

SEQ ID NO: 1939973 - RNA, 19 nt, Artificial Sequence
  Description of Artificial Sequence: Synthetic oligonucleotide
uucaugggcagcauuuaag

SEQ ID NO: 1939974 - RNA, 19 nt, Artificial Sequence
  Description of Artificial Sequence: Synthetic oligonucleotide
uguuguucuuggaaccgcg

SEQ ID NO: 1939975 - RNA, 19 nt, Artificial Sequence
  Description of Artificial Sequence: Synthetic oligonucleotide
uuaauuaggaguucugcuu

SEQ ID NO: 1939976 - RNA, 19 nt, Artificial Sequence
  Description of Artificial Sequence: Synthetic oligonucleotide
uguucuuggaaccgcgaag

SEQ ID NO: 1939977 - RNA, 19 nt, Artificial Sequence
  Description of Artificial Sequence: Synthetic oligonucleotide
ucguucuugaucucuaaca

SEQ ID NO: 1939978 - RNA, 19 nt, Artificial Sequence
  Description of Artificial Sequence: Synthetic oligonucleotide
uuagaauaaguuguaacau

SEQ ID NO: 1939979 - RNA, 19 nt, Artificial Sequence
  Description of Artificial Sequence: Synthetic oligonucleotide
ucgagcuuuuaauuccucg

SEQ ID NO: 1939980 - RNA, 19 nt, Artificial Sequence
  Description of Artificial Sequence: Synthetic oligonucleotide
guaaguagccgauacggug

SEQ ID NO: 1939981 - RNA, 19 nt, Artificial Sequence
  Description of Artificial Sequence: Synthetic oligonucleotide
ucauguguuuguccauucg

SEQ ID NO: 1939982 - RNA, 19 nt, Artificial Sequence
  Description of Artificial Sequence: Synthetic oligonucleotide
ucuauggaaaguugccuug

SEQ ID NO: 1939983 - RNA, 19 nt, Artificial Sequence
  Description of Artificial Sequence: Synthetic oligonucleotide
ugacuuguuucucuaguga

SEQ ID NO: 1939984 - RNA, 19 nt, Artificial Sequence
  Description of Artificial Sequence: Synthetic oligonucleotide
uuauuaaaugguugcuugu

SEQ ID NO: 1939985 - RNA, 19 nt, Artificial Sequence
  Description of Artificial Sequence: Synthetic oligonucleotide
guucuugaucucuaacacg

SEQ ID NO: 1939986 - RNA, 19 nt, Artificial Sequence
  Description of Artificial Sequence: Synthetic oligonucleotide
uuuaaguugucaagcugcu

SEQ ID NO: 1939987 - RNA, 19 nt, Artificial Sequence
  Description of Artificial Sequence: Synthetic oligonucleotide
uucgaauuagccuucucuc

SEQ ID NO: 1939988 - RNA, 19 nt, Artificial Sequence
  Description of Artificial Sequence: Synthetic oligonucleotide
uguguuuguccauucgagc

SEQ ID NO: 1939989 - RNA, 19 nt, Artificial Sequence
  Description of Artificial Sequence: Synthetic oligonucleotide
uuuaucuuaauagggcccu

SEQ ID NO: 1939990 - RNA, 19 nt, Artificial Sequence
  Description of Artificial Sequence: Synthetic oligonucleotide
cuucauuuccagcuuagug

SEQ ID NO: 1939991 - RNA, 19 nt, Artificial Sequence
  Description of Artificial Sequence: Synthetic oligonucleotide
uccccuuaugguuagguga

SEQ ID NO: 1939992 - RNA, 19 nt, Artificial Sequence
  Description of Artificial Sequence: Synthetic oligonucleotide
uacggacccagucucaacc

SEQ ID NO: 1939993 - RNA, 19 nt, Artificial Sequence
  Description of Artificial Sequence: Synthetic oligonucleotide
aaaugguugcuugucuguc

SEQ ID NO: 1939994 - RNA, 19 nt, Artificial Sequence
  Description of Artificial Sequence: Synthetic oligonucleotide
accugucuugucaacaucc

SEQ ID NO: 1939995 - RNA, 19 nt, Artificial Sequence
  Description of Artificial Sequence: Synthetic oligonucleotide
auaaguuguaacaugcaca

SEQ ID NO: 1939996 - RNA, 19 nt, Artificial Sequence
  Description of Artificial Sequence: Synthetic oligonucleotide
gauguuguucuuggaaccg

SEQ ID NO: 1939997 - RNA, 19 nt, Artificial Sequence
  Description of Artificial Sequence: Synthetic oligonucleotide
ucccucauuccuuaagugc

SEQ ID NO: 1939998 - RNA, 19 nt, Artificial Sequence
  Description of Artificial Sequence: Synthetic oligonucleotide
uucuacuuucucugagugg

SEQ ID NO: 1939999 - RNA, 19 nt, Artificial Sequence
  Description of Artificial Sequence: Synthetic oligonucleotide
uaauuaggaguucugcuuu

SEQ ID NO: 1940000 - RNA, 19 nt, Artificial Sequence
  Description of Artificial Sequence: Synthetic oligonucleotide
ucuuaauagggcccugaga

SEQ ID NO: 1940001 - RNA, 19 nt, Artificial Sequence
  Description of Artificial Sequence: Synthetic oligonucleotide
cagauguuguucuuggaac

SEQ ID NO: 1940002 - RNA, 19 nt, Artificial Sequence
  Description of Artificial Sequence: Synthetic oligonucleotide
cuggugaagaauauuauaa

SEQ ID NO: 1940003 - RNA, 19 nt, Artificial Sequence
  Description of Artificial Sequence: Synthetic oligonucleotide
gaugccuucgaucugggaa

SEQ ID NO: 1940004 - RNA, 19 nt, Artificial Sequence
  Description of Artificial Sequence: Synthetic oligonucleotide
auugacuuguuucucuagu

SEQ ID NO: 1940005 - RNA, 19 nt, Artificial Sequence
  Description of Artificial Sequence: Synthetic oligonucleotide
uauaaagguuauaaaucuu

SEQ ID NO: 1940006 - RNA, 19 nt, Artificial Sequence
  Description of Artificial Sequence: Synthetic oligonucleotide
uucgaucugggaaaacaca

SEQ ID NO: 1940007 - RNA, 19 nt, Artificial Sequence
  Description of Artificial Sequence: Synthetic oligonucleotide
acuccugacucguaaguag

SEQ ID NO: 1940008 - RNA, 19 nt, Artificial Sequence
  Description of Artificial Sequence: Synthetic oligonucleotide
uccagauacaugaccugag

SEQ ID NO: 1940009 - RNA, 19 nt, Artificial Sequence
  Description of Artificial Sequence: Synthetic oligonucleotide
aucgcuucaguuugucaac

SEQ ID NO: 1940010 - RNA, 19 nt, Artificial Sequence
  Description of Artificial Sequence: Synthetic oligonucleotide
ugugcaacuauguccacau

SEQ ID NO: 1940011 - RNA, 19 nt, Artificial Sequence
  Description of Artificial Sequence: Synthetic oligonucleotide
uuagugguuucaugggcag

SEQ ID NO: 1940012 - RNA, 19 nt, Artificial Sequence
  Description of Artificial Sequence: Synthetic oligonucleotide
cuggaccaagucaaaagcc

SEQ ID NO: 1940013 - RNA, 19 nt, Artificial Sequence
  Description of Artificial Sequence: Synthetic oligonucleotide
ucaguuugucaaccaacgc

SEQ ID NO: 1940014 - RNA, 19 nt, Artificial Sequence
  Description of Artificial Sequence: Synthetic oligonucleotide
uauugacuuguuucucuag

SEQ ID NO: 1940015 - RNA, 19 nt, Artificial Sequence
  Description of Artificial Sequence: Synthetic oligonucleotide
ucguagguuuucuucagca

SEQ ID NO: 1940016 - RNA, 19 nt, Artificial Sequence
  Description of Artificial Sequence: Synthetic oligonucleotide
ugggcagcauuuaaguugu

SEQ ID NO: 1940017 - RNA, 19 nt, Artificial Sequence
  Description of Artificial Sequence: Synthetic oligonucleotide
gagauucucaagcaacuuc

SEQ ID NO: 1940018 - RNA, 19 nt, Artificial Sequence
  Description of Artificial Sequence: Synthetic oligonucleotide
acaagguucccucauuccu

SEQ ID NO: 1940019 - RNA, 19 nt, Artificial Sequence
  Description of Artificial Sequence: Synthetic oligonucleotide
uaaaugguugcuugucugu

SEQ ID NO: 1940020 - RNA, 19 nt, Artificial Sequence
  Description of Artificial Sequence: Synthetic oligonucleotide
uggugaagaauauuauaaa

SEQ ID NO: 1940021 - RNA, 19 nt, Artificial Sequence
  Description of Artificial Sequence: Synthetic oligonucleotide
ugaguggcuagcuucauuu

SEQ ID NO: 1940022 - RNA, 19 nt, Artificial Sequence
  Description of Artificial Sequence: Synthetic oligonucleotide
ucuggugaagaauauuaua

SEQ ID NO: 1940023 - RNA, 19 nt, Artificial Sequence
  Description of Artificial Sequence: Synthetic oligonucleotide
uuucguagguuuucuucag

SEQ ID NO: 1940024 - RNA, 19 nt, Artificial Sequence
  Description of Artificial Sequence: Synthetic oligonucleotide
uccauggauagucucuugu

SEQ ID NO: 1940025 - RNA, 19 nt, Artificial Sequence
  Description of Artificial Sequence: Synthetic oligonucleotide
agauacaugaccugaggua

SEQ ID NO: 1940026 - RNA, 19 nt, Artificial Sequence
  Description of Artificial Sequence: Synthetic oligonucleotide
aguuauccuguggaaauuc

SEQ ID NO: 1940027 - RNA, 19 nt, Artificial Sequence
  Description of Artificial Sequence: Synthetic oligonucleotide
uauuaaaugguugcuuguc

SEQ ID NO: 1940028 - RNA, 19 nt, Artificial Sequence
  Description of Artificial Sequence: Synthetic oligonucleotide
uuaauuccucguuuuccug

SEQ ID NO: 1940029 - RNA, 19 nt, Artificial Sequence
  Description of Artificial Sequence: Synthetic oligonucleotide
uuaacuugggaggaugccu

SEQ ID NO: 1940030 - RNA, 19 nt, Artificial Sequence
  Description of Artificial Sequence: Synthetic oligonucleotide
agaguuuccccuuaugguu

SEQ ID NO: 1940031 - RNA, 19 nt, Artificial Sequence
  Description of Artificial Sequence: Synthetic oligonucleotide
uggaaauuccagaaagcua

SEQ ID NO: 1940032 - RNA, 19 nt, Artificial Sequence
  Description of Artificial Sequence: Synthetic oligonucleotide
aagaacaagguucccucau

SEQ ID NO: 1940033 - RNA, 19 nt, Artificial Sequence
  Description of Artificial Sequence: Synthetic oligonucleotide
gucugucuuguuuaauuag

SEQ ID NO: 1940034 - RNA, 19 nt, Artificial Sequence
  Description of Artificial Sequence: Synthetic oligonucleotide
gaauuagccuucucucuug

SEQ ID NO: 1940035 - RNA, 19 nt, Artificial Sequence
  Description of Artificial Sequence: Synthetic oligonucleotide
aauuagccuucucucuuga

SEQ ID NO: 1940036 - RNA, 19 nt, Artificial Sequence
  Description of Artificial Sequence: Synthetic oligonucleotide
ucucuaacacggcuuucag

SEQ ID NO: 1940037 - RNA, 19 nt, Artificial Sequence
  Description of Artificial Sequence: Synthetic oligonucleotide
uuccuuaagugcucugugc

SEQ ID NO: 1940038 - RNA, 19 nt, Artificial Sequence
  Description of Artificial Sequence: Synthetic oligonucleotide
cacaagaaggugucucugg

SEQ ID NO: 1940039 - RNA, 19 nt, Artificial Sequence
  Description of Artificial Sequence: Synthetic oligonucleotide
aagcuaagcagaggucccc

SEQ ID NO: 1940040 - RNA, 19 nt, Artificial Sequence
  Description of Artificial Sequence: Synthetic oligonucleotide
uccacaucaauuccagaau

SEQ ID NO: 1940041 - RNA, 19 nt, Artificial Sequence
  Description of Artificial Sequence: Synthetic oligonucleotide
ucgaauuagccuucucucu

SEQ ID NO: 1940042 - RNA, 19 nt, Artificial Sequence
  Description of Artificial Sequence: Synthetic oligonucleotide
uuuaacuugggaggaugcc

SEQ ID NO: 1940043 - RNA, 19 nt, Artificial Sequence
  Description of Artificial Sequence: Synthetic oligonucleotide
cagacuuucuagcucuugc

SEQ ID NO: 1940044 - RNA, 19 nt, Artificial Sequence
  Description of Artificial Sequence: Synthetic oligonucleotide
ucagauuauugacuuguuu

SEQ ID NO: 1940045 - RNA, 19 nt, Artificial Sequence
  Description of Artificial Sequence: Synthetic oligonucleotide
ugcaguuguuccaaacacu

SEQ ID NO: 1940046 - RNA, 19 nt, Artificial Sequence
  Description of Artificial Sequence: Synthetic oligonucleotide
uaacacggcuuucagacuu

SEQ ID NO: 1940047 - RNA, 19 nt, Artificial Sequence
  Description of Artificial Sequence: Synthetic oligonucleotide
uuaugguuaggugaaggaa

SEQ ID NO: 1940048 - RNA, 19 nt, Artificial Sequence
  Description of Artificial Sequence: Synthetic oligonucleotide
uuugucaaccaacgcugug

SEQ ID NO: 1940049 - RNA, 19 nt, Artificial Sequence
  Description of Artificial Sequence: Synthetic oligonucleotide
ucucugaguggcuagcuuc

SEQ ID NO: 1940050 - RNA, 19 nt, Artificial Sequence
  Description of Artificial Sequence: Synthetic oligonucleotide
caauucuacuuucucugag

SEQ ID NO: 1940051 - RNA, 19 nt, Artificial Sequence
  Description of Artificial Sequence: Synthetic oligonucleotide
cagcauuuaaguugucaag

SEQ ID NO: 1940052 - RNA, 19 nt, Artificial Sequence
  Description of Artificial Sequence: Synthetic oligonucleotide
ucaauuccagaaucuauuu

SEQ ID NO: 1940053 - RNA, 19 nt, Artificial Sequence
  Description of Artificial Sequence: Synthetic oligonucleotide
gaaauugucauguguuugu

SEQ ID NO: 1940054 - RNA, 19 nt, Artificial Sequence
  Description of Artificial Sequence: Synthetic oligonucleotide
aucuuaauagggcccugag

SEQ ID NO: 1940055 - RNA, 19 nt, Artificial Sequence
  Description of Artificial Sequence: Synthetic oligonucleotide
uccuguggaaauuccagaa

SEQ ID NO: 1940056 - RNA, 19 nt, Artificial Sequence
  Description of Artificial Sequence: Synthetic oligonucleotide
aguuuauuaaaugguugcu

SEQ ID NO: 1940057 - RNA, 19 nt, Artificial Sequence
  Description of Artificial Sequence: Synthetic oligonucleotide
ggaaauuccagaaagcuaa

SEQ ID NO: 1940058 - RNA, 19 nt, Artificial Sequence
  Description of Artificial Sequence: Synthetic oligonucleotide
guagccgauacgguggugg

SEQ ID NO: 1940059 - RNA, 19 nt, Artificial Sequence
  Description of Artificial Sequence: Synthetic oligonucleotide
aucacaagaaggugucucu

SEQ ID NO: 1940060 - RNA, 19 nt, Artificial Sequence
  Description of Artificial Sequence: Synthetic oligonucleotide
gucaaaagccuuccuccgg

SEQ ID NO: 1940061 - RNA, 19 nt, Artificial Sequence
  Description of Artificial Sequence: Synthetic oligonucleotide
agugauuccugcuucucau

SEQ ID NO: 1940062 - RNA, 19 nt, Artificial Sequence
  Description of Artificial Sequence: Synthetic oligonucleotide
cuugucaacauccucccga

SEQ ID NO: 1940063 - RNA, 19 nt, Artificial Sequence
  Description of Artificial Sequence: Synthetic oligonucleotide
uucucuagugauuccugcu

SEQ ID NO: 1940064 - RNA, 19 nt, Artificial Sequence
  Description of Artificial Sequence: Synthetic oligonucleotide
ucugaaagggaaguuucgu

SEQ ID NO: 1940065 - RNA, 19 nt, Artificial Sequence
  Description of Artificial Sequence: Synthetic oligonucleotide
agucucaaccacugcauga

SEQ ID NO: 1940066 - RNA, 19 nt, Artificial Sequence
  Description of Artificial Sequence: Synthetic oligonucleotide
cuuagugguuucaugggca

SEQ ID NO: 1940067 - RNA, 19 nt, Artificial Sequence
  Description of Artificial Sequence: Synthetic oligonucleotide
uuaggugaaggaaggcaaa

SEQ ID NO: 1940068 - RNA, 19 nt, Artificial Sequence
  Description of Artificial Sequence: Synthetic oligonucleotide
cuuaugguuaggugaagga

SEQ ID NO: 1940069 - RNA, 19 nt, Artificial Sequence
  Description of Artificial Sequence: Synthetic oligonucleotide
uugucaaccaacgcugugu

SEQ ID NO: 1940070 - RNA, 19 nt, Artificial Sequence
  Description of Artificial Sequence: Synthetic oligonucleotide
auguuguucuuggaaccgc

SEQ ID NO: 1940071 - RNA, 19 nt, Artificial Sequence
  Description of Artificial Sequence: Synthetic oligonucleotide
uccugacucguaaguagcc

SEQ ID NO: 1940072 - RNA, 19 nt, Artificial Sequence
  Description of Artificial Sequence: Synthetic oligonucleotide
uugccuugaaauugucaug

SEQ ID NO: 1940073 - RNA, 19 nt, Artificial Sequence
  Description of Artificial Sequence: Synthetic oligonucleotide
gacuuucuagcucuugcuc

SEQ ID NO: 1940074 - RNA, 19 nt, Artificial Sequence
  Description of Artificial Sequence: Synthetic oligonucleotide
agacuuucuagcucuugcu

SEQ ID NO: 1940075 - RNA, 19 nt, Artificial Sequence
  Description of Artificial Sequence: Synthetic oligonucleotide
uuaauagggcccugagagu

SEQ ID NO: 1940076 - RNA, 19 nt, Artificial Sequence
  Description of Artificial Sequence: Synthetic oligonucleotide
uccucguucuccauggaua

SEQ ID NO: 1940077 - RNA, 19 nt, Artificial Sequence
  Description of Artificial Sequence: Synthetic oligonucleotide
gcucugugcaacuaugucc

SEQ ID NO: 1940078 - RNA, 19 nt, Artificial Sequence
  Description of Artificial Sequence: Synthetic oligonucleotide
uucccucauuccuuaagug

SEQ ID NO: 1940079 - RNA, 19 nt, Artificial Sequence
  Description of Artificial Sequence: Synthetic oligonucleotide
accacugcaugagaagaac

SEQ ID NO: 1940080 - RNA, 19 nt, Artificial Sequence
  Description of Artificial Sequence: Synthetic oligonucleotide
acuuucucugaguggcuag

SEQ ID NO: 1940081 - RNA, 19 nt, Artificial Sequence
  Description of Artificial Sequence: Synthetic oligonucleotide
uuuucauuuaaagcaucau

SEQ ID NO: 1940082 - RNA, 19 nt, Artificial Sequence
  Description of Artificial Sequence: Synthetic oligonucleotide
cuccugacucguaaguagc

SEQ ID NO: 1940083 - RNA, 19 nt, Artificial Sequence
  Description of Artificial Sequence: Synthetic oligonucleotide
ucuugaucucuaacacggc

SEQ ID NO: 1940084 - RNA, 19 nt, Artificial Sequence
  Description of Artificial Sequence: Synthetic oligonucleotide
cucguaaguagccgauacg

SEQ ID NO: 1940085 - RNA, 19 nt, Artificial Sequence
  Description of Artificial Sequence: Synthetic oligonucleotide
uugaccguggacuccuucu

SEQ ID NO: 1940086 - RNA, 19 nt, Artificial Sequence
  Description of Artificial Sequence: Synthetic oligonucleotide
ucucuagugauuccugcuu

SEQ ID NO: 1940087 - RNA, 19 nt, Artificial Sequence
  Description of Artificial Sequence: Synthetic oligonucleotide
aauuaggaguucugcuuuu

SEQ ID NO: 1940088 - RNA, 19 nt, Artificial Sequence
  Description of Artificial Sequence: Synthetic oligonucleotide
ggcaaaagaacaagguucc

SEQ ID NO: 1940089 - RNA, 19 nt, Artificial Sequence
  Description of Artificial Sequence: Synthetic oligonucleotide
ucuuguugaccguggacuc

SEQ ID NO: 1940090 - RNA, 19 nt, Artificial Sequence
  Description of Artificial Sequence: Synthetic oligonucleotide
gauuauugacuuguuucuc

SEQ ID NO: 1940091 - RNA, 19 nt, Artificial Sequence
  Description of Artificial Sequence: Synthetic oligonucleotide
aaguuguaacaugcacagg

SEQ ID NO: 1940092 - RNA, 19 nt, Artificial Sequence
  Description of Artificial Sequence: Synthetic oligonucleotide
uguuuguccauucgagcuu

SEQ ID NO: 1940093 - RNA, 19 nt, Artificial Sequence
  Description of Artificial Sequence: Synthetic oligonucleotide
auguguuuguccauucgag

SEQ ID NO: 1940094 - RNA, 19 nt, Artificial Sequence
  Description of Artificial Sequence: Synthetic oligonucleotide
gaaauuccagaaagcuaag

SEQ ID NO: 1940095 - RNA, 19 nt, Artificial Sequence
  Description of Artificial Sequence: Synthetic oligonucleotide
ucguucuccauggauaguc

SEQ ID NO: 1940096 - RNA, 19 nt, Artificial Sequence
  Description of Artificial Sequence: Synthetic oligonucleotide
cugggaaaacacagcuacg

SEQ ID NO: 1940097 - RNA, 19 nt, Artificial Sequence
  Description of Artificial Sequence: Synthetic oligonucleotide
agggaaguuucguagguuu

SEQ ID NO: 1940098 - RNA, 19 nt, Artificial Sequence
  Description of Artificial Sequence: Synthetic oligonucleotide
ugcucugugcaacuauguc

SEQ ID NO: 1940099 - RNA, 19 nt, Artificial Sequence
  Description of Artificial Sequence: Synthetic oligonucleotide
gauucgauuucguggcaga

SEQ ID NO: 1940100 - RNA, 19 nt, Artificial Sequence
  Description of Artificial Sequence: Synthetic oligonucleotide
gaauaaguuguaacaugca

SEQ ID NO: 1940101 - RNA, 19 nt, Artificial Sequence
  Description of Artificial Sequence: Synthetic oligonucleotide
agaauauuauaaagguuau

SEQ ID NO: 1940102 - RNA, 19 nt, Artificial Sequence
  Description of Artificial Sequence: Synthetic oligonucleotide
gaagaaccugucuugucaa

SEQ ID NO: 1940103 - RNA, 19 nt, Artificial Sequence
  Description of Artificial Sequence: Synthetic oligonucleotide
aagccuuccuccggaacuc

SEQ ID NO: 1940104 - RNA, 19 nt, Artificial Sequence
  Description of Artificial Sequence: Synthetic oligonucleotide
uaucuuaauagggcccuga

SEQ ID NO: 1940105 - RNA, 19 nt, Artificial Sequence
  Description of Artificial Sequence: Synthetic oligonucleotide
agcuuuuaauuccucguuu

SEQ ID NO: 1940106 - RNA, 19 nt, Artificial Sequence
  Description of Artificial Sequence: Synthetic oligonucleotide
aagugcucugugcaacuau

SEQ ID NO: 1940107 - RNA, 19 nt, Artificial Sequence
  Description of Artificial Sequence: Synthetic oligonucleotide
cuugaaauugucauguguu

SEQ ID NO: 1940108 - RNA, 19 nt, Artificial Sequence
  Description of Artificial Sequence: Synthetic oligonucleotide
gagaguuuccccuuauggu

SEQ ID NO: 1940109 - RNA, 19 nt, Artificial Sequence
  Description of Artificial Sequence: Synthetic oligonucleotide
uucgauuucguggcagaug

SEQ ID NO: 1940110 - RNA, 19 nt, Artificial Sequence
  Description of Artificial Sequence: Synthetic oligonucleotide
aaguagccgauacgguggu

SEQ ID NO: 1940111 - RNA, 19 nt, Artificial Sequence
  Description of Artificial Sequence: Synthetic oligonucleotide
gauacaugaccugagguau

SEQ ID NO: 1940112 - RNA, 19 nt, Artificial Sequence
  Description of Artificial Sequence: Synthetic oligonucleotide
uccaguuauccuguggaaa

SEQ ID NO: 1940113 - RNA, 19 nt, Artificial Sequence
  Description of Artificial Sequence: Synthetic oligonucleotide
gaaggcaaaagaacaaggu

SEQ ID NO: 1940114 - RNA, 19 nt, Artificial Sequence
  Description of Artificial Sequence: Synthetic oligonucleotide
guaacaugcacaggcuggc

SEQ ID NO: 1940115 - RNA, 19 nt, Artificial Sequence
  Description of Artificial Sequence: Synthetic oligonucleotide
aguuuccccuuaugguuag

SEQ ID NO: 1940116 - RNA, 19 nt, Artificial Sequence
  Description of Artificial Sequence: Synthetic oligonucleotide
aaaucacaagaaggugucu

SEQ ID NO: 1940117 - RNA, 19 nt, Artificial Sequence
  Description of Artificial Sequence: Synthetic oligonucleotide
ugucaaccaacgcuguguu

SEQ ID NO: 1940118 - RNA, 19 nt, Artificial Sequence
  Description of Artificial Sequence: Synthetic oligonucleotide
augccuucgaucugggaaa

SEQ ID NO: 1940119 - RNA, 19 nt, Artificial Sequence
  Description of Artificial Sequence: Synthetic oligonucleotide
aucucuaacacggcuuuca

SEQ ID NO: 1940120 - RNA, 19 nt, Artificial Sequence
  Description of Artificial Sequence: Synthetic oligonucleotide
cuugcuccagauacaugac

SEQ ID NO: 1940121 - RNA, 19 nt, Artificial Sequence
  Description of Artificial Sequence: Synthetic oligonucleotide
guuaggugaaggaaggcaa

SEQ ID NO: 1940122 - RNA, 19 nt, Artificial Sequence
  Description of Artificial Sequence: Synthetic oligonucleotide
uuuucgaauuagccuucuc

SEQ ID NO: 1940123 - RNA, 19 nt, Artificial Sequence
  Description of Artificial Sequence: Synthetic oligonucleotide
guguuuguccauucgagcu

SEQ ID NO: 1940124 - RNA, 19 nt, Artificial Sequence
  Description of Artificial Sequence: Synthetic oligonucleotide
ucguggcagauguuguucu

SEQ ID NO: 1940125 - RNA, 19 nt, Artificial Sequence
  Description of Artificial Sequence: Synthetic oligonucleotide
cccgauucgauuucguggc

SEQ ID NO: 1940126 - RNA, 19 nt, Artificial Sequence
  Description of Artificial Sequence: Synthetic oligonucleotide
cuuuucagauuauugacuu

SEQ ID NO: 1940127 - RNA, 19 nt, Artificial Sequence
  Description of Artificial Sequence: Synthetic oligonucleotide
uucagauuauugacuuguu

SEQ ID NO: 1940128 - RNA, 19 nt, Artificial Sequence
  Description of Artificial Sequence: Synthetic oligonucleotide
acggugguggcugcuuucc

SEQ ID NO: 1940129 - RNA, 19 nt, Artificial Sequence
  Description of Artificial Sequence: Synthetic oligonucleotide
gcuuagugguuucaugggc

SEQ ID NO: 1940130 - RNA, 19 nt, Artificial Sequence
  Description of Artificial Sequence: Synthetic oligonucleotide
ugggaggaugccuucgauc

SEQ ID NO: 1940131 - RNA, 19 nt, Artificial Sequence
  Description of Artificial Sequence: Synthetic oligonucleotide
auuuccagcuuagugguuu

SEQ ID NO: 1940132 - RNA, 19 nt, Artificial Sequence
  Description of Artificial Sequence: Synthetic oligonucleotide
cugccugcucuauggaaag

SEQ ID NO: 1940133 - RNA, 19 nt, Artificial Sequence
  Description of Artificial Sequence: Synthetic oligonucleotide
cuuucucugaguggcuagc

SEQ ID NO: 1940134 - RNA, 19 nt, Artificial Sequence
  Description of Artificial Sequence: Synthetic oligonucleotide
aaguuucguagguuuucuu

SEQ ID NO: 1940135 - RNA, 19 nt, Artificial Sequence
  Description of Artificial Sequence: Synthetic oligonucleotide
uuguugaccguggacuccu

SEQ ID NO: 1940136 - RNA, 19 nt, Artificial Sequence
  Description of Artificial Sequence: Synthetic oligonucleotide
agggcccugagaguuuccc

SEQ ID NO: 1940137 - RNA, 19 nt, Artificial Sequence
  Description of Artificial Sequence: Synthetic oligonucleotide
ugucucuggugaagaauau

SEQ ID NO: 1940138 - RNA, 19 nt, Artificial Sequence
  Description of Artificial Sequence: Synthetic oligonucleotide
cuuguuuaauuaggaguuc

SEQ ID NO: 1940139 - RNA, 19 nt, Artificial Sequence
  Description of Artificial Sequence: Synthetic oligonucleotide
aggagauucucaagcaacu

SEQ ID NO: 1940140 - RNA, 19 nt, Artificial Sequence
  Description of Artificial Sequence: Synthetic oligonucleotide
acuugggaggaugccuucg

SEQ ID NO: 1940141 - RNA, 19 nt, Artificial Sequence
  Description of Artificial Sequence: Synthetic oligonucleotide
uuccaguuauccuguggaa

SEQ ID NO: 1940142 - RNA, 19 nt, Artificial Sequence
  Description of Artificial Sequence: Synthetic oligonucleotide
ucagacuuucuagcucuug

SEQ ID NO: 1940143 - RNA, 19 nt, Artificial Sequence
  Description of Artificial Sequence: Synthetic oligonucleotide
gacuuguuucucuagugau

SEQ ID NO: 1940144 - RNA, 19 nt, Artificial Sequence
  Description of Artificial Sequence: Synthetic oligonucleotide
uucguggcagauguuguuc

SEQ ID NO: 1940145 - RNA, 19 nt, Artificial Sequence
  Description of Artificial Sequence: Synthetic oligonucleotide
gacccagucucaaccacug

SEQ ID NO: 1940146 - RNA, 19 nt, Artificial Sequence
  Description of Artificial Sequence: Synthetic oligonucleotide
guggaaauuccagaaagcu

SEQ ID NO: 1940147 - RNA, 19 nt, Artificial Sequence
  Description of Artificial Sequence: Synthetic oligonucleotide
agugcucugugcaacuaug

SEQ ID NO: 1940148 - RNA, 19 nt, Artificial Sequence
  Description of Artificial Sequence: Synthetic oligonucleotide
uuaucuuaauagggcccug

SEQ ID NO: 1940149 - RNA, 19 nt, Artificial Sequence
  Description of Artificial Sequence: Synthetic oligonucleotide
ugaccguggacuccuucuc

SEQ ID NO: 1940150 - RNA, 19 nt, Artificial Sequence
  Description of Artificial Sequence: Synthetic oligonucleotide
auagggcccugagaguuuc

SEQ ID NO: 1940151 - RNA, 19 nt, Artificial Sequence
  Description of Artificial Sequence: Synthetic oligonucleotide
agaacaagguucccucauu

SEQ ID NO: 1940152 - RNA, 19 nt, Artificial Sequence
  Description of Artificial Sequence: Synthetic oligonucleotide
cugacucguaaguagccga

SEQ ID NO: 1940153 - RNA, 19 nt, Artificial Sequence
  Description of Artificial Sequence: Synthetic oligonucleotide
gaccaagucaaaagccuuc

SEQ ID NO: 1940154 - RNA, 19 nt, Artificial Sequence
  Description of Artificial Sequence: Synthetic oligonucleotide
ucgcuucaguuugucaacc

SEQ ID NO: 1940155 - RNA, 19 nt, Artificial Sequence
  Description of Artificial Sequence: Synthetic oligonucleotide
cuuguugaccguggacucc

SEQ ID NO: 1940156 - RNA, 19 nt, Artificial Sequence
  Description of Artificial Sequence: Synthetic oligonucleotide
cucccgauucgauuucgug

SEQ ID NO: 1940157 - RNA, 19 nt, Artificial Sequence
  Description of Artificial Sequence: Synthetic oligonucleotide
caggcuggcugguaaauga

SEQ ID NO: 1940158 - RNA, 19 nt, Artificial Sequence
  Description of Artificial Sequence: Synthetic oligonucleotide
agucucuuguugaccgugg

SEQ ID NO: 1940159 - RNA, 19 nt, Artificial Sequence
  Description of Artificial Sequence: Synthetic oligonucleotide
uuucucugaguggcuagcu

SEQ ID NO: 1940160 - RNA, 19 nt, Artificial Sequence
  Description of Artificial Sequence: Synthetic oligonucleotide
uucgagcuuuuaauuccuc

SEQ ID NO: 1940161 - RNA, 19 nt, Artificial Sequence
  Description of Artificial Sequence: Synthetic oligonucleotide
gguucccucauuccuuaag

SEQ ID NO: 1940162 - RNA, 19 nt, Artificial Sequence
  Description of Artificial Sequence: Synthetic oligonucleotide
uuucguggcagauguuguu

SEQ ID NO: 1940163 - RNA, 19 nt, Artificial Sequence
  Description of Artificial Sequence: Synthetic oligonucleotide
cuugauauucgcuuuuguu

SEQ ID NO: 1940164 - RNA, 19 nt, Artificial Sequence
  Description of Artificial Sequence: Synthetic oligonucleotide
uagccgauacggugguggc

SEQ ID NO: 1940165 - RNA, 19 nt, Artificial Sequence
  Description of Artificial Sequence: Synthetic oligonucleotide
uucuuggaaccgcgaaguc

SEQ ID NO: 1940166 - RNA, 19 nt, Artificial Sequence
  Description of Artificial Sequence: Synthetic oligonucleotide
acauccucccgauucgauu

SEQ ID NO: 1940167 - RNA, 19 nt, Artificial Sequence
  Description of Artificial Sequence: Synthetic oligonucleotide
uucucugaguggcuagcuu

SEQ ID NO: 1940168 - RNA, 19 nt, Artificial Sequence
  Description of Artificial Sequence: Synthetic oligonucleotide
auucgagcuuuuaauuccu

SEQ ID NO: 1940169 - RNA, 19 nt, Artificial Sequence
  Description of Artificial Sequence: Synthetic oligonucleotide
uccucccgauucgauuucg

SEQ ID NO: 1940170 - RNA, 19 nt, Artificial Sequence
  Description of Artificial Sequence: Synthetic oligonucleotide
auccucccgauucgauuuc

SEQ ID NO: 1940171 - RNA, 19 nt, Artificial Sequence
  Description of Artificial Sequence: Synthetic oligonucleotide
ugguuaggugaaggaaggc

SEQ ID NO: 1940172 - RNA, 19 nt, Artificial Sequence
  Description of Artificial Sequence: Synthetic oligonucleotide
gguuaggugaaggaaggca

SEQ ID NO: 1940173 - RNA, 19 nt, Artificial Sequence
  Description of Artificial Sequence: Synthetic oligonucleotide
augguugcuugucugucuu

SEQ ID NO: 1940174 - RNA, 19 nt, Artificial Sequence
  Description of Artificial Sequence: Synthetic oligonucleotide
ccuuaugguuaggugaagg

SEQ ID NO: 1940175 - RNA, 19 nt, Artificial Sequence
  Description of Artificial Sequence: Synthetic oligonucleotide
uccucguuuuccugcugga

SEQ ID NO: 1940176 - RNA, 19 nt, Artificial Sequence
  Description of Artificial Sequence: Synthetic oligonucleotide
gcaguuguuccaaacacuc

SEQ ID NO: 1940177 - RNA, 19 nt, Artificial Sequence
  Description of Artificial Sequence: Synthetic oligonucleotide
cugaaagggaaguuucgua

SEQ ID NO: 1940178 - RNA, 19 nt, Artificial Sequence
  Description of Artificial Sequence: Synthetic oligonucleotide
caacgcuguguucuugcug

SEQ ID NO: 1940179 - RNA, 19 nt, Artificial Sequence
  Description of Artificial Sequence: Synthetic oligonucleotide
cuugaucucuaacacggcu

SEQ ID NO: 1940180 - RNA, 19 nt, Artificial Sequence
  Description of Artificial Sequence: Synthetic oligonucleotide
uacaugaccugagguauuu

SEQ ID NO: 1940181 - RNA, 19 nt, Artificial Sequence
  Description of Artificial Sequence: Synthetic oligonucleotide
aaccacugcaugagaagaa

SEQ ID NO: 1940182 - RNA, 19 nt, Artificial Sequence
  Description of Artificial Sequence: Synthetic oligonucleotide
uccggaacuccugacucgu

SEQ ID NO: 1940183 - RNA, 19 nt, Artificial Sequence
  Description of Artificial Sequence: Synthetic oligonucleotide
gaacuccugacucguaagu

SEQ ID NO: 1940184 - RNA, 19 nt, Artificial Sequence
  Description of Artificial Sequence: Synthetic oligonucleotide
cagucucaaccacugcaug

SEQ ID NO: 1940185 - RNA, 19 nt, Artificial Sequence
  Description of Artificial Sequence: Synthetic oligonucleotide
guggcagauguuguucuug

SEQ ID NO: 1940186 - RNA, 19 nt, Artificial Sequence
  Description of Artificial Sequence: Synthetic oligonucleotide
guucccucauuccuuaagu

SEQ ID NO: 1940187 - RNA, 19 nt, Artificial Sequence
  Description of Artificial Sequence: Synthetic oligonucleotide
aagggaaguuucguagguu

SEQ ID NO: 1940188 - RNA, 19 nt, Artificial Sequence
  Description of Artificial Sequence: Synthetic oligonucleotide
ccucguucuccauggauag

SEQ ID NO: 1940189 - RNA, 19 nt, Artificial Sequence
  Description of Artificial Sequence: Synthetic oligonucleotide
cucuaacacggcuuucaga

SEQ ID NO: 1940190 - RNA, 19 nt, Artificial Sequence
  Description of Artificial Sequence: Synthetic oligonucleotide
acggacccagucucaacca

SEQ ID NO: 1940191 - RNA, 19 nt, Artificial Sequence
  Description of Artificial Sequence: Synthetic oligonucleotide
uacuuucucugaguggcua

SEQ ID NO: 1940192 - RNA, 19 nt, Artificial Sequence
  Description of Artificial Sequence: Synthetic oligonucleotide
gugucucuggugaagaaua

SEQ ID NO: 1940193 - RNA, 19 nt, Artificial Sequence
  Description of Artificial Sequence: Synthetic oligonucleotide
gaaguuucguagguuuucu

SEQ ID NO: 1940194 - RNA, 19 nt, Artificial Sequence
  Description of Artificial Sequence: Synthetic oligonucleotide
guucuuggaaccgcgaagu

SEQ ID NO: 1940195 - RNA, 19 nt, Artificial Sequence
  Description of Artificial Sequence: Synthetic oligonucleotide
cagcuacggacccagucuc

SEQ ID NO: 1940196 - RNA, 19 nt, Artificial Sequence
  Description of Artificial Sequence: Synthetic oligonucleotide
gaaccugucuugucaacau

SEQ ID NO: 1940197 - RNA, 19 nt, Artificial Sequence
  Description of Artificial Sequence: Synthetic oligonucleotide
ggauagucucuuguugacc

SEQ ID NO: 1940198 - RNA, 19 nt, Artificial Sequence
  Description of Artificial Sequence: Synthetic oligonucleotide
uccagcuuagugguuucau

SEQ ID NO: 1940199 - RNA, 19 nt, Artificial Sequence
  Description of Artificial Sequence: Synthetic oligonucleotide
cugcaugagaagaaccugu

SEQ ID NO: 1940200 - RNA, 19 nt, Artificial Sequence
  Description of Artificial Sequence: Synthetic oligonucleotide
cuccagauacaugaccuga

SEQ ID NO: 1940201 - RNA, 19 nt, Artificial Sequence
  Description of Artificial Sequence: Synthetic oligonucleotide
cagauacaugaccugaggu

SEQ ID NO: 1940202 - RNA, 19 nt, Artificial Sequence
  Description of Artificial Sequence: Synthetic oligonucleotide
cuauggaaaguugccuuga

SEQ ID NO: 1940203 - RNA, 19 nt, Artificial Sequence
  Description of Artificial Sequence: Synthetic oligonucleotide
acaggcuggcugguaaaug

SEQ ID NO: 1940204 - RNA, 19 nt, Artificial Sequence
  Description of Artificial Sequence: Synthetic oligonucleotide
cacucugaaacuuuucauu

SEQ ID NO: 1940205 - RNA, 19 nt, Artificial Sequence
  Description of Artificial Sequence: Synthetic oligonucleotide
ucugugcaacuauguccac

SEQ ID NO: 1940206 - RNA, 19 nt, Artificial Sequence
  Description of Artificial Sequence: Synthetic oligonucleotide
ggaaguuucguagguuuuc

SEQ ID NO: 1940207 - RNA, 19 nt, Artificial Sequence
  Description of Artificial Sequence: Synthetic oligonucleotide
cuacggacccagucucaac

SEQ ID NO: 1940208 - RNA, 19 nt, Artificial Sequence
  Description of Artificial Sequence: Synthetic oligonucleotide
gcaauucuacuuucucuga

SEQ ID NO: 1940209 - RNA, 19 nt, Artificial Sequence
  Description of Artificial Sequence: Synthetic oligonucleotide
auucgauuucguggcagau

SEQ ID NO: 1940210 - RNA, 19 nt, Artificial Sequence
  Description of Artificial Sequence: Synthetic oligonucleotide
uucagacuuucuagcucuu

SEQ ID NO: 1940211 - RNA, 19 nt, Artificial Sequence
  Description of Artificial Sequence: Synthetic oligonucleotide
uaagugcucugugcaacua

SEQ ID NO: 1940212 - RNA, 19 nt, Artificial Sequence
  Description of Artificial Sequence: Synthetic oligonucleotide
cuugggaggaugccuucga

SEQ ID NO: 1940213 - RNA, 19 nt, Artificial Sequence
  Description of Artificial Sequence: Synthetic oligonucleotide
uacggugguggcugcuuuc

SEQ ID NO: 1940214 - RNA, 19 nt, Artificial Sequence
  Description of Artificial Sequence: Synthetic oligonucleotide
cuuccuccggaacuccuga

SEQ ID NO: 1940215 - RNA, 19 nt, Artificial Sequence
  Description of Artificial Sequence: Synthetic oligonucleotide
agcuaagcagaggucccca

SEQ ID NO: 1940216 - RNA, 19 nt, Artificial Sequence
  Description of Artificial Sequence: Synthetic oligonucleotide
aauagggcccugagaguuu

SEQ ID NO: 1940217 - RNA, 19 nt, Artificial Sequence
  Description of Artificial Sequence: Synthetic oligonucleotide
ccugacucguaaguagccg

SEQ ID NO: 1940218 - RNA, 19 nt, Artificial Sequence
  Description of Artificial Sequence: Synthetic oligonucleotide
uuccuccggaacuccugac

SEQ ID NO: 1940219 - RNA, 19 nt, Artificial Sequence
  Description of Artificial Sequence: Synthetic oligonucleotide
cucuauggaaaguugccuu

SEQ ID NO: 1940220 - RNA, 19 nt, Artificial Sequence
  Description of Artificial Sequence: Synthetic oligonucleotide
guugaccguggacuccuuc

SEQ ID NO: 1940221 - RNA, 19 nt, Artificial Sequence
  Description of Artificial Sequence: Synthetic oligonucleotide
gucucuuguugaccgugga

SEQ ID NO: 1940222 - RNA, 19 nt, Artificial Sequence
  Description of Artificial Sequence: Synthetic oligonucleotide
gccgauacggugguggcug

SEQ ID NO: 1940223 - RNA, 19 nt, Artificial Sequence
  Description of Artificial Sequence: Synthetic oligonucleotide
ggcuagcuucauuuccagc

SEQ ID NO: 1940224 - RNA, 19 nt, Artificial Sequence
  Description of Artificial Sequence: Synthetic oligonucleotide
ggaaaguugccuugaaauu

SEQ ID NO: 1940225 - RNA, 19 nt, Artificial Sequence
  Description of Artificial Sequence: Synthetic oligonucleotide
ugucaacauccucccgauu

SEQ ID NO: 1940226 - RNA, 19 nt, Artificial Sequence
  Description of Artificial Sequence: Synthetic oligonucleotide
auacggugguggcugcuuu

SEQ ID NO: 1940227 - RNA, 19 nt, Artificial Sequence
  Description of Artificial Sequence: Synthetic oligonucleotide
aggugucucuggugaagaa

SEQ ID NO: 1940228 - RNA, 19 nt, Artificial Sequence
  Description of Artificial Sequence: Synthetic oligonucleotide
gcuuucagacuuucuagcu

SEQ ID NO: 1940229 - RNA, 19 nt, Artificial Sequence
  Description of Artificial Sequence: Synthetic oligonucleotide
cauuccuuaagugcucugu

SEQ ID NO: 1940230 - RNA, 19 nt, Artificial Sequence
  Description of Artificial Sequence: Synthetic oligonucleotide
gucaaccaacgcuguguuc

SEQ ID NO: 1940231 - RNA, 19 nt, Artificial Sequence
  Description of Artificial Sequence: Synthetic oligonucleotide
cucuggugaagaauauuau

SEQ ID NO: 1940232 - RNA, 19 nt, Artificial Sequence
  Description of Artificial Sequence: Synthetic oligonucleotide
cugugcaacuauguccaca

SEQ ID NO: 1940233 - RNA, 19 nt, Artificial Sequence
  Description of Artificial Sequence: Synthetic oligonucleotide
cccauuguguagcuuccac

SEQ ID NO: 1940234 - RNA, 19 nt, Artificial Sequence
  Description of Artificial Sequence: Synthetic oligonucleotide
cuagcucuugcuccagaua

SEQ ID NO: 1940235 - RNA, 19 nt, Artificial Sequence
  Description of Artificial Sequence: Synthetic oligonucleotide
cauccucccgauucgauuu

SEQ ID NO: 1940236 - RNA, 19 nt, Artificial Sequence
  Description of Artificial Sequence: Synthetic oligonucleotide
guuuccccuuaugguuagg

SEQ ID NO: 1940237 - RNA, 19 nt, Artificial Sequence
  Description of Artificial Sequence: Synthetic oligonucleotide
cccagucucaaccacugca

SEQ ID NO: 1940238 - RNA, 19 nt, Artificial Sequence
  Description of Artificial Sequence: Synthetic oligonucleotide
gcugcuuuccaguuauccu

SEQ ID NO: 1940239 - RNA, 19 nt, Artificial Sequence
  Description of Artificial Sequence: Synthetic oligonucleotide
aacacggcuuucagacuuu

SEQ ID NO: 1940240 - RNA, 19 nt, Artificial Sequence
  Description of Artificial Sequence: Synthetic oligonucleotide
uggaaccgcgaagucguuu

SEQ ID NO: 1940241 - RNA, 19 nt, Artificial Sequence
  Description of Artificial Sequence: Synthetic oligonucleotide
ugccuucgaucugggaaaa

SEQ ID NO: 1940242 - RNA, 19 nt, Artificial Sequence
  Description of Artificial Sequence: Synthetic oligonucleotide
ccuugaaauugucaugugu

SEQ ID NO: 1940243 - RNA, 19 nt, Artificial Sequence
  Description of Artificial Sequence: Synthetic oligonucleotide
cccucauuccuuaagugcu

SEQ ID NO: 1940244 - RNA, 19 nt, Artificial Sequence
  Description of Artificial Sequence: Synthetic oligonucleotide
cuaacacggcuuucagacu

SEQ ID NO: 1940245 - RNA, 19 nt, Artificial Sequence
  Description of Artificial Sequence: Synthetic oligonucleotide
caagguucccucauuccuu

SEQ ID NO: 1940246 - RNA, 19 nt, Artificial Sequence
  Description of Artificial Sequence: Synthetic oligonucleotide
ggaaucgcuucaguuuguc

SEQ ID NO: 1940247 - RNA, 19 nt, Artificial Sequence
  Description of Artificial Sequence: Synthetic oligonucleotide
auacaugaccugagguauu

SEQ ID NO: 1940248 - RNA, 19 nt, Artificial Sequence
  Description of Artificial Sequence: Synthetic oligonucleotide
gggcccugagaguuucccc

SEQ ID NO: 1940249 - RNA, 19 nt, Artificial Sequence
  Description of Artificial Sequence: Synthetic oligonucleotide
gacucguaaguagccgaua

SEQ ID NO: 1940250 - RNA, 19 nt, Artificial Sequence
  Description of Artificial Sequence: Synthetic oligonucleotide
cguggacuccuucuccagg

SEQ ID NO: 1940251 - RNA, 19 nt, Artificial Sequence
  Description of Artificial Sequence: Synthetic oligonucleotide
gcugccugcucuauggaaa

SEQ ID NO: 1940252 - RNA, 19 nt, Artificial Sequence
  Description of Artificial Sequence: Synthetic oligonucleotide
agccgauacggugguggcu

SEQ ID NO: 1940253 - RNA, 19 nt, Artificial Sequence
  Description of Artificial Sequence: Synthetic oligonucleotide
aguagccgauacgguggug

SEQ ID NO: 1940254 - RNA, 19 nt, Artificial Sequence
  Description of Artificial Sequence: Synthetic oligonucleotide
guuugucaaccaacgcugu

SEQ ID NO: 1940255 - RNA, 19 nt, Artificial Sequence
  Description of Artificial Sequence: Synthetic oligonucleotide
gguuucaugggcagcauuu

SEQ ID NO: 1940256 - RNA, 19 nt, Artificial Sequence
  Description of Artificial Sequence: Synthetic oligonucleotide
uuggaaccgcgaagucguu

SEQ ID NO: 1940257 - RNA, 19 nt, Artificial Sequence
  Description of Artificial Sequence: Synthetic oligonucleotide
caugggcagcauuuaaguu

SEQ ID NO: 1940258 - RNA, 19 nt, Artificial Sequence
  Description of Artificial Sequence: Synthetic oligonucleotide
cuagcuucauuuccagcuu

SEQ ID NO: 1940259 - RNA, 19 nt, Artificial Sequence
  Description of Artificial Sequence: Synthetic oligonucleotide
ccaguuauccuguggaaau

SEQ ID NO: 1940260 - RNA, 19 nt, Artificial Sequence
  Description of Artificial Sequence: Synthetic oligonucleotide
ggaaccgcgaagucguuuu

SEQ ID NO: 1940261 - RNA, 19 nt, Artificial Sequence
  Description of Artificial Sequence: Synthetic oligonucleotide
caacauccucccgauucga

SEQ ID NO: 1940262 - RNA, 19 nt, Artificial Sequence
  Description of Artificial Sequence: Synthetic oligonucleotide
gguugcuugucugucuugu

SEQ ID NO: 1940263 - RNA, 19 nt, Artificial Sequence
  Description of Artificial Sequence: Synthetic oligonucleotide
ccccuuaugguuaggugaa

SEQ ID NO: 1940264 - RNA, 19 nt, Artificial Sequence
  Description of Artificial Sequence: Synthetic oligonucleotide
caacuauguccacaucaau

SEQ ID NO: 1940265 - RNA, 19 nt, Artificial Sequence
  Description of Artificial Sequence: Synthetic oligonucleotide
agcuacggacccagucuca

SEQ ID NO: 1940266 - RNA, 19 nt, Artificial Sequence
  Description of Artificial Sequence: Synthetic oligonucleotide
ccuuaagugcucugugcaa

SEQ ID NO: 1940267 - RNA, 19 nt, Artificial Sequence
  Description of Artificial Sequence: Synthetic oligonucleotide
acaugaccugagguauuuu

SEQ ID NO: 1940268 - RNA, 19 nt, Artificial Sequence
  Description of Artificial Sequence: Synthetic oligonucleotide
cgauucgauuucguggcag

SEQ ID NO: 1940269 - RNA, 19 nt, Artificial Sequence
  Description of Artificial Sequence: Synthetic oligonucleotide
cuggcugguaaaugaguuu

SEQ ID NO: 1940270 - RNA, 19 nt, Artificial Sequence
  Description of Artificial Sequence: Synthetic oligonucleotide
gauacggugguggcugcuu

SEQ ID NO: 1940271 - RNA, 19 nt, Artificial Sequence
  Description of Artificial Sequence: Synthetic oligonucleotide
cuaagcagagguccccauu

SEQ ID NO: 1940272 - RNA, 19 nt, Artificial Sequence
  Description of Artificial Sequence: Synthetic oligonucleotide
gugcucugugcaacuaugu

SEQ ID NO: 1940273 - RNA, 19 nt, Artificial Sequence
  Description of Artificial Sequence: Synthetic oligonucleotide
cgagcuuuuaauuccucgu

SEQ ID NO: 1940274 - RNA, 19 nt, Artificial Sequence
  Description of Artificial Sequence: Synthetic oligonucleotide
gcugaugcagcuucucguu

SEQ ID NO: 1940275 - RNA, 19 nt, Artificial Sequence
  Description of Artificial Sequence: Synthetic oligonucleotide
ggugucucuggugaagaau

SEQ ID NO: 1940276 - RNA, 19 nt, Artificial Sequence
  Description of Artificial Sequence: Synthetic oligonucleotide
cuccucguucuccauggau

SEQ ID NO: 1940277 - RNA, 19 nt, Artificial Sequence
  Description of Artificial Sequence: Synthetic oligonucleotide
cguagguuuucuucagcaa

SEQ ID NO: 1940278 - RNA, 19 nt, Artificial Sequence
  Description of Artificial Sequence: Synthetic oligonucleotide
gucucuggugaagaauauu

SEQ ID NO: 1940279 - RNA, 19 nt, Artificial Sequence
  Description of Artificial Sequence: Synthetic oligonucleotide
gcuacggacccagucucaa

SEQ ID NO: 1940280 - RNA, 19 nt, Artificial Sequence
  Description of Artificial Sequence: Synthetic oligonucleotide
cacggcuuucagacuuucu

SEQ ID NO: 1940281 - RNA, 19 nt, Artificial Sequence
  Description of Artificial Sequence: Synthetic oligonucleotide
ccgauacggugguggcugc

SEQ ID NO: 1940282 - RNA, 19 nt, Artificial Sequence
  Description of Artificial Sequence: Synthetic oligonucleotide
ggaccaagucaaaagccuu

SEQ ID NO: 1940283 - RNA, 19 nt, Artificial Sequence
  Description of Artificial Sequence: Synthetic oligonucleotide
cccuuaugguuaggugaag

SEQ ID NO: 1940284 - RNA, 19 nt, Artificial Sequence
  Description of Artificial Sequence: Synthetic oligonucleotide
ggagauucucaagcaacuu

SEQ ID NO: 1940285 - RNA, 19 nt, Artificial Sequence
  Description of Artificial Sequence: Synthetic oligonucleotide
cugaguggcuagcuucauu

SEQ ID NO: 1940286 - RNA, 19 nt, Artificial Sequence
  Description of Artificial Sequence: Synthetic oligonucleotide
ggcuggcugguaaaugagu

SEQ ID NO: 1940287 - RNA, 19 nt, Artificial Sequence
  Description of Artificial Sequence: Synthetic oligonucleotide
cauuuccagcuuagugguu

SEQ ID NO: 1940288 - RNA, 19 nt, Artificial Sequence
  Description of Artificial Sequence: Synthetic oligonucleotide
cguaaguagccgauacggu

SEQ ID NO: 1940289 - RNA, 19 nt, Artificial Sequence
  Description of Artificial Sequence: Synthetic oligonucleotide
caguuauccuguggaaauu

SEQ ID NO: 1940290 - RNA, 19 nt, Artificial Sequence
  Description of Artificial Sequence: Synthetic oligonucleotide
caaccaacgcuguguucuu

SEQ ID NO: 1940291 - RNA, 19 nt, Artificial Sequence
  Description of Artificial Sequence: Synthetic oligonucleotide
cggaacuccugacucguaa

SEQ ID NO: 1940292 - RNA, 19 nt, Artificial Sequence
  Description of Artificial Sequence: Synthetic oligonucleotide
gccuucgaucugggaaaac

SEQ ID NO: 1940293 - RNA, 19 nt, Artificial Sequence
  Description of Artificial Sequence: Synthetic oligonucleotide
cucguucuccauggauagu

SEQ ID NO: 1940294 - RNA, 19 nt, Artificial Sequence
  Description of Artificial Sequence: Synthetic oligonucleotide
ccgauucgauuucguggca

SEQ ID NO: 1940295 - RNA, 19 nt, Artificial Sequence
  Description of Artificial Sequence: Synthetic oligonucleotide
ggcugguaaaugaguuuau

SEQ ID NO: 1940296 - RNA, 19 nt, Artificial Sequence
  Description of Artificial Sequence: Synthetic oligonucleotide
ccaacgcuguguucuugcu

SEQ ID NO: 1940297 - RNA, 19 nt, Artificial Sequence
  Description of Artificial Sequence: Synthetic oligonucleotide
ccucccgauucgauuucgu

SEQ ID NO: 1940298 - RNA, 19 nt, Artificial Sequence
  Description of Artificial Sequence: Synthetic oligonucleotide
ccggaacuccugacucgua

SEQ ID NO: 1940299 - RNA, 19 nt, Artificial Sequence
  Description of Artificial Sequence: Synthetic oligonucleotide
cguggcagauguuguucuu

SEQ ID NO: 1940300 - RNA, 19 nt, Artificial Sequence
  Description of Artificial Sequence: Synthetic oligonucleotide
cgauuucguggcagauguu

SEQ ID NO: 1940301 - RNA, 19 nt, Artificial Sequence
  Description of Artificial Sequence: Synthetic oligonucleotide
cgauacggugguggcugcu

SEQ ID NO: 1940302 - RNA, 19 nt, Artificial Sequence
  Description of Artificial Sequence: Synthetic oligonucleotide
aaugaucccagccauaacc

SEQ ID NO: 1940303 - RNA, 19 nt, Artificial Sequence
  Description of Artificial Sequence: Synthetic oligonucleotide
aauucauccuuauacacag

SEQ ID NO: 1940304 - RNA, 19 nt, Artificial Sequence
  Description of Artificial Sequence: Synthetic oligonucleotide
aacuuuauuggacacagcu

SEQ ID NO: 1940305 - RNA, 19 nt, Artificial Sequence
  Description of Artificial Sequence: Synthetic oligonucleotide
cuuuauuggacacagcugg

SEQ ID NO: 1940306 - RNA, 19 nt, Artificial Sequence
  Description of Artificial Sequence: Synthetic oligonucleotide
uacaagaccaacuacugag

SEQ ID NO: 1940307 - RNA, 19 nt, Artificial Sequence
  Description of Artificial Sequence: Synthetic oligonucleotide
agaaaacuccuguagaggg

SEQ ID NO: 1940308 - RNA, 19 nt, Artificial Sequence
  Description of Artificial Sequence: Synthetic oligonucleotide
aaacgcagcauauucgggg

SEQ ID NO: 1940309 - RNA, 19 nt, Artificial Sequence
  Description of Artificial Sequence: Synthetic oligonucleotide
uuacuaaugauuacuauau

SEQ ID NO: 1940310 - RNA, 19 nt, Artificial Sequence
  Description of Artificial Sequence: Synthetic oligonucleotide
aacacucugcccucuaccc

SEQ ID NO: 1940311 - RNA, 19 nt, Artificial Sequence
  Description of Artificial Sequence: Synthetic oligonucleotide
aauaggucaaaucuuuuau

SEQ ID NO: 1940312 - RNA, 19 nt, Artificial Sequence
  Description of Artificial Sequence: Synthetic oligonucleotide
acgaugagaccguagaggc

SEQ ID NO: 1940313 - RNA, 19 nt, Artificial Sequence
  Description of Artificial Sequence: Synthetic oligonucleotide
uuuacuaaugauuacuaua

SEQ ID NO: 1940314 - RNA, 19 nt, Artificial Sequence
  Description of Artificial Sequence: Synthetic oligonucleotide
uucaugaucaucucuggcc

SEQ ID NO: 1940315 - RNA, 19 nt, Artificial Sequence
  Description of Artificial Sequence: Synthetic oligonucleotide
uuuacaagaccaacuacug

SEQ ID NO: 1940316 - RNA, 19 nt, Artificial Sequence
  Description of Artificial Sequence: Synthetic oligonucleotide
uguggagaggauuagggcc

SEQ ID NO: 1940317 - RNA, 19 nt, Artificial Sequence
  Description of Artificial Sequence: Synthetic oligonucleotide
acauccgagaacuuuauug

SEQ ID NO: 1940318 - RNA, 19 nt, Artificial Sequence
  Description of Artificial Sequence: Synthetic oligonucleotide
gaugagaccguagaggccg

SEQ ID NO: 1940319 - RNA, 19 nt, Artificial Sequence
  Description of Artificial Sequence: Synthetic oligonucleotide
aguacugccaccaccaggc

SEQ ID NO: 1940320 - RNA, 19 nt, Artificial Sequence
  Description of Artificial Sequence: Synthetic oligonucleotide
uuagcgauaaguacugcca

SEQ ID NO: 1940321 - RNA, 19 nt, Artificial Sequence
  Description of Artificial Sequence: Synthetic oligonucleotide
uaauucauccuuauacaca

SEQ ID NO: 1940322 - RNA, 19 nt, Artificial Sequence
  Description of Artificial Sequence: Synthetic oligonucleotide
cauccgagaacuuuauugg

SEQ ID NO: 1940323 - RNA, 19 nt, Artificial Sequence
  Description of Artificial Sequence: Synthetic oligonucleotide
agcaguaacacucugcccu

SEQ ID NO: 1940324 - RNA, 19 nt, Artificial Sequence
  Description of Artificial Sequence: Synthetic oligonucleotide
auagcagcgaugccggugc

SEQ ID NO: 1940325 - RNA, 19 nt, Artificial Sequence
  Description of Artificial Sequence: Synthetic oligonucleotide
ucagcgaagaugaggauca

SEQ ID NO: 1940326 - RNA, 19 nt, Artificial Sequence
  Description of Artificial Sequence: Synthetic oligonucleotide
uaaagggcuacuuugugga

SEQ ID NO: 1940327 - RNA, 19 nt, Artificial Sequence
  Description of Artificial Sequence: Synthetic oligonucleotide
auaaauaaacauccaguga

SEQ ID NO: 1940328 - RNA, 19 nt, Artificial Sequence
  Description of Artificial Sequence: Synthetic oligonucleotide
aagaccaacuacugagggg

SEQ ID NO: 1940329 - RNA, 19 nt, Artificial Sequence
  Description of Artificial Sequence: Synthetic oligonucleotide
gauaaguacugccaccacc

SEQ ID NO: 1940330 - RNA, 19 nt, Artificial Sequence
  Description of Artificial Sequence: Synthetic oligonucleotide
uggucuuuacauccuaucc

SEQ ID NO: 1940331 - RNA, 19 nt, Artificial Sequence
  Description of Artificial Sequence: Synthetic oligonucleotide
cuaauucauccuuauacac

SEQ ID NO: 1940332 - RNA, 19 nt, Artificial Sequence
  Description of Artificial Sequence: Synthetic oligonucleotide
guaaagggcuacuuugugg

SEQ ID NO: 1940333 - RNA, 19 nt, Artificial Sequence
  Description of Artificial Sequence: Synthetic oligonucleotide
accgacauagcagcgaugc

SEQ ID NO: 1940334 - RNA, 19 nt, Artificial Sequence
  Description of Artificial Sequence: Synthetic oligonucleotide
ucuggaaugaggaggggug

SEQ ID NO: 1940335 - RNA, 19 nt, Artificial Sequence
  Description of Artificial Sequence: Synthetic oligonucleotide
uauacacagagcacucuag

SEQ ID NO: 1940336 - RNA, 19 nt, Artificial Sequence
  Description of Artificial Sequence: Synthetic oligonucleotide
agucucagcaacaggaacc

SEQ ID NO: 1940337 - RNA, 19 nt, Artificial Sequence
  Description of Artificial Sequence: Synthetic oligonucleotide
cauccuuauacacagagca

SEQ ID NO: 1940338 - RNA, 19 nt, Artificial Sequence
  Description of Artificial Sequence: Synthetic oligonucleotide
aaaugacaacucuaauuca

SEQ ID NO: 1940339 - RNA, 19 nt, Artificial Sequence
  Description of Artificial Sequence: Synthetic oligonucleotide
aagaucauggcggacgaag

SEQ ID NO: 1940340 - RNA, 19 nt, Artificial Sequence
  Description of Artificial Sequence: Synthetic oligonucleotide
auaggcagcucccauggcg

SEQ ID NO: 1940341 - RNA, 19 nt, Artificial Sequence
  Description of Artificial Sequence: Synthetic oligonucleotide
ucaugaccgacauagcagc

SEQ ID NO: 1940342 - RNA, 19 nt, Artificial Sequence
  Description of Artificial Sequence: Synthetic oligonucleotide
uauauaguugggagacagg

SEQ ID NO: 1940343 - RNA, 19 nt, Artificial Sequence
  Description of Artificial Sequence: Synthetic oligonucleotide
auuuacaagaccaacuacu

SEQ ID NO: 1940344 - RNA, 19 nt, Artificial Sequence
  Description of Artificial Sequence: Synthetic oligonucleotide
aauaaacauccagugaaga

SEQ ID NO: 1940345 - RNA, 19 nt, Artificial Sequence
  Description of Artificial Sequence: Synthetic oligonucleotide
ucaugaucaucucuggccu

SEQ ID NO: 1940346 - RNA, 19 nt, Artificial Sequence
  Description of Artificial Sequence: Synthetic oligonucleotide
uccaaagagucucagcaac

SEQ ID NO: 1940347 - RNA, 19 nt, Artificial Sequence
  Description of Artificial Sequence: Synthetic oligonucleotide
gauggcaaugaucccagcc

SEQ ID NO: 1940348 - RNA, 19 nt, Artificial Sequence
  Description of Artificial Sequence: Synthetic oligonucleotide
uuacuauauaguugggaga

SEQ ID NO: 1940349 - RNA, 19 nt, Artificial Sequence
  Description of Artificial Sequence: Synthetic oligonucleotide
cacagagcacucuagggcg

SEQ ID NO: 1940350 - RNA, 19 nt, Artificial Sequence
  Description of Artificial Sequence: Synthetic oligonucleotide
ucguucuggaaugaggagg

SEQ ID NO: 1940351 - RNA, 19 nt, Artificial Sequence
  Description of Artificial Sequence: Synthetic oligonucleotide
aaaacuccuguagagggug

SEQ ID NO: 1940352 - RNA, 19 nt, Artificial Sequence
  Description of Artificial Sequence: Synthetic oligonucleotide
agcgauaaguacugccacc

SEQ ID NO: 1940353 - RNA, 19 nt, Artificial Sequence
  Description of Artificial Sequence: Synthetic oligonucleotide
agcacuggcgagcaguaac

SEQ ID NO: 1940354 - RNA, 19 nt, Artificial Sequence
  Description of Artificial Sequence: Synthetic oligonucleotide
acaaugggcacuaggacac

SEQ ID NO: 1940355 - RNA, 19 nt, Artificial Sequence
  Description of Artificial Sequence: Synthetic oligonucleotide
cuauauaguugggagacag

SEQ ID NO: 1940356 - RNA, 19 nt, Artificial Sequence
  Description of Artificial Sequence: Synthetic oligonucleotide
gaucauggcggacgaagcg

SEQ ID NO: 1940357 - RNA, 19 nt, Artificial Sequence
  Description of Artificial Sequence: Synthetic oligonucleotide
gacaaugggcacuaggaca

SEQ ID NO: 1940358 - RNA, 19 nt, Artificial Sequence
  Description of Artificial Sequence: Synthetic oligonucleotide
ugcgcucuaaauaccagca

SEQ ID NO: 1940359 - RNA, 19 nt, Artificial Sequence
  Description of Artificial Sequence: Synthetic oligonucleotide
gacacugcgcauuuacaag

SEQ ID NO: 1940360 - RNA, 19 nt, Artificial Sequence
  Description of Artificial Sequence: Synthetic oligonucleotide
ugucagucaugucugcaag

SEQ ID NO: 1940361 - RNA, 19 nt, Artificial Sequence
  Description of Artificial Sequence: Synthetic oligonucleotide
acagacaaugggcacuagg

SEQ ID NO: 1940362 - RNA, 19 nt, Artificial Sequence
  Description of Artificial Sequence: Synthetic oligonucleotide
cauccaaagagucucagca

SEQ ID NO: 1940363 - RNA, 19 nt, Artificial Sequence
  Description of Artificial Sequence: Synthetic oligonucleotide
uuacaagaccaacuacuga

SEQ ID NO: 1940364 - RNA, 19 nt, Artificial Sequence
  Description of Artificial Sequence: Synthetic oligonucleotide
aaccacugggaugauggac

SEQ ID NO: 1940365 - RNA, 19 nt, Artificial Sequence
  Description of Artificial Sequence: Synthetic oligonucleotide
cugaagaucauggcggacg

SEQ ID NO: 1940366 - RNA, 19 nt, Artificial Sequence
  Description of Artificial Sequence: Synthetic oligonucleotide
uaacacucugcccucuacc

SEQ ID NO: 1940367 - RNA, 19 nt, Artificial Sequence
  Description of Artificial Sequence: Synthetic oligonucleotide
cuaaugauuacuauauagu

SEQ ID NO: 1940368 - RNA, 19 nt, Artificial Sequence
  Description of Artificial Sequence: Synthetic oligonucleotide
ugaagaucauggcggacga

SEQ ID NO: 1940369 - RNA, 19 nt, Artificial Sequence
  Description of Artificial Sequence: Synthetic oligonucleotide
ugggcacuaggacacugcg

SEQ ID NO: 1940370 - RNA, 19 nt, Artificial Sequence
  Description of Artificial Sequence: Synthetic oligonucleotide
uacuuuguggagaggauua

SEQ ID NO: 1940371 - RNA, 19 nt, Artificial Sequence
  Description of Artificial Sequence: Synthetic oligonucleotide
acugcgcauuuacaagacc

SEQ ID NO: 1940372 - RNA, 19 nt, Artificial Sequence
  Description of Artificial Sequence: Synthetic oligonucleotide
aucauggcggacgaagcgc

SEQ ID NO: 1940373 - RNA, 19 nt, Artificial Sequence
  Description of Artificial Sequence: Synthetic oligonucleotide
aaaacgcagcauauucggg

SEQ ID NO: 1940374 - RNA, 19 nt, Artificial Sequence
  Description of Artificial Sequence: Synthetic oligonucleotide
accguagaggccgagcacc

SEQ ID NO: 1940375 - RNA, 19 nt, Artificial Sequence
  Description of Artificial Sequence: Synthetic oligonucleotide
gaacagucguggcugcugg

SEQ ID NO: 1940376 - RNA, 19 nt, Artificial Sequence
  Description of Artificial Sequence: Synthetic oligonucleotide
cacgaugagaccguagagg

SEQ ID NO: 1940377 - RNA, 19 nt, Artificial Sequence
  Description of Artificial Sequence: Synthetic oligonucleotide
cuuuacauccuaucccgug

SEQ ID NO: 1940378 - RNA, 19 nt, Artificial Sequence
  Description of Artificial Sequence: Synthetic oligonucleotide
cacacucagaccagcaccc

SEQ ID NO: 1940379 - RNA, 19 nt, Artificial Sequence
  Description of Artificial Sequence: Synthetic oligonucleotide
uagggccacgaugagaccg

SEQ ID NO: 1940380 - RNA, 19 nt, Artificial Sequence
  Description of Artificial Sequence: Synthetic oligonucleotide
ugaggaucaggaucaugcc

SEQ ID NO: 1940381 - RNA, 19 nt, Artificial Sequence
  Description of Artificial Sequence: Synthetic oligonucleotide
aaagggcuacuuuguggag

SEQ ID NO: 1940382 - RNA, 19 nt, Artificial Sequence
  Description of Artificial Sequence: Synthetic oligonucleotide
agcacuuuacuaaugauua

SEQ ID NO: 1940383 - RNA, 19 nt, Artificial Sequence
  Description of Artificial Sequence: Synthetic oligonucleotide
ucagucagggaguuagcga

SEQ ID NO: 1940384 - RNA, 19 nt, Artificial Sequence
  Description of Artificial Sequence: Synthetic oligonucleotide
acagggcaagcucagccgg

SEQ ID NO: 1940385 - RNA, 19 nt, Artificial Sequence
  Description of Artificial Sequence: Synthetic oligonucleotide
acacugcgcauuuacaaga

SEQ ID NO: 1940386 - RNA, 19 nt, Artificial Sequence
  Description of Artificial Sequence: Synthetic oligonucleotide
aucagucagggaguuagcg

SEQ ID NO: 1940387 - RNA, 19 nt, Artificial Sequence
  Description of Artificial Sequence: Synthetic oligonucleotide
agggcuacuuuguggagag

SEQ ID NO: 1940388 - RNA, 19 nt, Artificial Sequence
  Description of Artificial Sequence: Synthetic oligonucleotide
caauggcaaagccagcagc

SEQ ID NO: 1940389 - RNA, 19 nt, Artificial Sequence
  Description of Artificial Sequence: Synthetic oligonucleotide
aucaugcccacgaacaguc

SEQ ID NO: 1940390 - RNA, 19 nt, Artificial Sequence
  Description of Artificial Sequence: Synthetic oligonucleotide
uagcgauaaguacugccac

SEQ ID NO: 1940391 - RNA, 19 nt, Artificial Sequence
  Description of Artificial Sequence: Synthetic oligonucleotide
uuacauccuaucccgugac

SEQ ID NO: 1940392 - RNA, 19 nt, Artificial Sequence
  Description of Artificial Sequence: Synthetic oligonucleotide
agaucauggcggacgaagc

SEQ ID NO: 1940393 - RNA, 19 nt, Artificial Sequence
  Description of Artificial Sequence: Synthetic oligonucleotide
gacgaagcgccuacgacag

SEQ ID NO: 1940394 - RNA, 19 nt, Artificial Sequence
  Description of Artificial Sequence: Synthetic oligonucleotide
ugcaagcgggaacagggca

SEQ ID NO: 1940395 - RNA, 19 nt, Artificial Sequence
  Description of Artificial Sequence: Synthetic oligonucleotide
uucguucuggaaugaggag

SEQ ID NO: 1940396 - RNA, 19 nt, Artificial Sequence
  Description of Artificial Sequence: Synthetic oligonucleotide
aagcgaaggcgaccccgcc

SEQ ID NO: 1940397 - RNA, 19 nt, Artificial Sequence
  Description of Artificial Sequence: Synthetic oligonucleotide
gaugggagaugagugggcc

SEQ ID NO: 1940398 - RNA, 19 nt, Artificial Sequence
  Description of Artificial Sequence: Synthetic oligonucleotide
auaggucaaaucuuuuaua

SEQ ID NO: 1940399 - RNA, 19 nt, Artificial Sequence
  Description of Artificial Sequence: Synthetic oligonucleotide
auggcgcugaagaucaugg

SEQ ID NO: 1940400 - RNA, 19 nt, Artificial Sequence
  Description of Artificial Sequence: Synthetic oligonucleotide
acauccagugaagagaaaa

SEQ ID NO: 1940401 - RNA, 19 nt, Artificial Sequence
  Description of Artificial Sequence: Synthetic oligonucleotide
cugcgcauuuacaagacca

SEQ ID NO: 1940402 - RNA, 19 nt, Artificial Sequence
  Description of Artificial Sequence: Synthetic oligonucleotide
gaccccgccagucagccgc

SEQ ID NO: 1940403 - RNA, 19 nt, Artificial Sequence
  Description of Artificial Sequence: Synthetic oligonucleotide
ugaauaggucaaaucuuuu

SEQ ID NO: 1940404 - RNA, 19 nt, Artificial Sequence
  Description of Artificial Sequence: Synthetic oligonucleotide
caaggcagcacuuuacuaa

SEQ ID NO: 1940405 - RNA, 19 nt, Artificial Sequence
  Description of Artificial Sequence: Synthetic oligonucleotide
acuuuauuggacacagcug

SEQ ID NO: 1940406 - RNA, 19 nt, Artificial Sequence
  Description of Artificial Sequence: Synthetic oligonucleotide
agaccguagaggccgagca

SEQ ID NO: 1940407 - RNA, 19 nt, Artificial Sequence
  Description of Artificial Sequence: Synthetic oligonucleotide
agaugagugggcccagaug

SEQ ID NO: 1940408 - RNA, 19 nt, Artificial Sequence
  Description of Artificial Sequence: Synthetic oligonucleotide
uucggggcuguucuugaug

SEQ ID NO: 1940409 - RNA, 19 nt, Artificial Sequence
  Description of Artificial Sequence: Synthetic oligonucleotide
ugugucaggcuguucguuc

SEQ ID NO: 1940410 - RNA, 19 nt, Artificial Sequence
  Description of Artificial Sequence: Synthetic oligonucleotide
acauccuaucccgugacug

SEQ ID NO: 1940411 - RNA, 19 nt, Artificial Sequence
  Description of Artificial Sequence: Synthetic oligonucleotide
gagucucagcaacaggaac

SEQ ID NO: 1940412 - RNA, 19 nt, Artificial Sequence
  Description of Artificial Sequence: Synthetic oligonucleotide
aagcgagcgaagauccccg

SEQ ID NO: 1940413 - RNA, 19 nt, Artificial Sequence
  Description of Artificial Sequence: Synthetic oligonucleotide
gagcacucuagggcgaugg

SEQ ID NO: 1940414 - RNA, 19 nt, Artificial Sequence
  Description of Artificial Sequence: Synthetic oligonucleotide
ugcgcauuuacaagaccaa

SEQ ID NO: 1940415 - RNA, 19 nt, Artificial Sequence
  Description of Artificial Sequence: Synthetic oligonucleotide
ucuuuacauccuaucccgu

SEQ ID NO: 1940416 - RNA, 19 nt, Artificial Sequence
  Description of Artificial Sequence: Synthetic oligonucleotide
guucguucuggaaugagga

SEQ ID NO: 1940417 - RNA, 19 nt, Artificial Sequence
  Description of Artificial Sequence: Synthetic oligonucleotide
ggcacuaggacacugcgca

SEQ ID NO: 1940418 - RNA, 19 nt, Artificial Sequence
  Description of Artificial Sequence: Synthetic oligonucleotide
aagggcuacuuuguggaga

SEQ ID NO: 1940419 - RNA, 19 nt, Artificial Sequence
  Description of Artificial Sequence: Synthetic oligonucleotide
caugaccgacauagcagcg

SEQ ID NO: 1940420 - RNA, 19 nt, Artificial Sequence
  Description of Artificial Sequence: Synthetic oligonucleotide
aguuagcgauaaguacugc

SEQ ID NO: 1940421 - RNA, 19 nt, Artificial Sequence
  Description of Artificial Sequence: Synthetic oligonucleotide
ugaccgacauagcagcgau

SEQ ID NO: 1940422 - RNA, 19 nt, Artificial Sequence
  Description of Artificial Sequence: Synthetic oligonucleotide
caagcgagcgaagaucccc

SEQ ID NO: 1940423 - RNA, 19 nt, Artificial Sequence
  Description of Artificial Sequence: Synthetic oligonucleotide
uauucggggcuguucuuga

SEQ ID NO: 1940424 - RNA, 19 nt, Artificial Sequence
  Description of Artificial Sequence: Synthetic oligonucleotide
ucaugcccacgaacagucg

SEQ ID NO: 1940425 - RNA, 19 nt, Artificial Sequence
  Description of Artificial Sequence: Synthetic oligonucleotide
gacggcgggagagcgagcg

SEQ ID NO: 1940426 - RNA, 19 nt, Artificial Sequence
  Description of Artificial Sequence: Synthetic oligonucleotide
gugcgugugugucaggcug

SEQ ID NO: 1940427 - RNA, 19 nt, Artificial Sequence
  Description of Artificial Sequence: Synthetic oligonucleotide
ucuagggcgaugggugggg

SEQ ID NO: 1940428 - RNA, 19 nt, Artificial Sequence
  Description of Artificial Sequence: Synthetic oligonucleotide
ugggagaugagugggccca

SEQ ID NO: 1940429 - RNA, 19 nt, Artificial Sequence
  Description of Artificial Sequence: Synthetic oligonucleotide
aaugaggagggguggucuu

SEQ ID NO: 1940430 - RNA, 19 nt, Artificial Sequence
  Description of Artificial Sequence: Synthetic oligonucleotide
uaucccgugacugguggug

SEQ ID NO: 1940431 - RNA, 19 nt, Artificial Sequence
  Description of Artificial Sequence: Synthetic oligonucleotide
gucagucaugucugcaagc

SEQ ID NO: 1940432 - RNA, 19 nt, Artificial Sequence
  Description of Artificial Sequence: Synthetic oligonucleotide
auauucggggcuguucuug

SEQ ID NO: 1940433 - RNA, 19 nt, Artificial Sequence
  Description of Artificial Sequence: Synthetic oligonucleotide
gcgaagauccccgaggcgg

SEQ ID NO: 1940434 - RNA, 19 nt, Artificial Sequence
  Description of Artificial Sequence: Synthetic oligonucleotide
ccagcauccccaacgaugc

SEQ ID NO: 1940435 - RNA, 19 nt, Artificial Sequence
  Description of Artificial Sequence: Synthetic oligonucleotide
ugugugucaggcuguucgu

SEQ ID NO: 1940436 - RNA, 19 nt, Artificial Sequence
  Description of Artificial Sequence: Synthetic oligonucleotide
cucagcgaagaugaggauc

SEQ ID NO: 1940437 - RNA, 19 nt, Artificial Sequence
  Description of Artificial Sequence: Synthetic oligonucleotide
acagacgcaugaauagguc

SEQ ID NO: 1940438 - RNA, 19 nt, Artificial Sequence
  Description of Artificial Sequence: Synthetic oligonucleotide
aggaaccccacaaggcagc

SEQ ID NO: 1940439 - RNA, 19 nt, Artificial Sequence
  Description of Artificial Sequence: Synthetic oligonucleotide
gagcaguaacacucugccc

SEQ ID NO: 1940440 - RNA, 19 nt, Artificial Sequence
  Description of Artificial Sequence: Synthetic oligonucleotide
aaggcgaccccgccaguca

SEQ ID NO: 1940441 - RNA, 19 nt, Artificial Sequence
  Description of Artificial Sequence: Synthetic oligonucleotide
agcgaagauccccgaggcg

SEQ ID NO: 1940442 - RNA, 19 nt, Artificial Sequence
  Description of Artificial Sequence: Synthetic oligonucleotide
ugggagccagcacuggcga

SEQ ID NO: 1940443 - RNA, 19 nt, Artificial Sequence
  Description of Artificial Sequence: Synthetic oligonucleotide
auccaaagagucucagcaa

SEQ ID NO: 1940444 - RNA, 19 nt, Artificial Sequence
  Description of Artificial Sequence: Synthetic oligonucleotide
cagucaugucugcaagcgg

SEQ ID NO: 1940445 - RNA, 19 nt, Artificial Sequence
  Description of Artificial Sequence: Synthetic oligonucleotide
agcgaugccggugccacuc

SEQ ID NO: 1940446 - RNA, 19 nt, Artificial Sequence
  Description of Artificial Sequence: Synthetic oligonucleotide
caccucagcgaagaugagg

SEQ ID NO: 1940447 - RNA, 19 nt, Artificial Sequence
  Description of Artificial Sequence: Synthetic oligonucleotide
cagacgcaugaauagguca

SEQ ID NO: 1940448 - RNA, 19 nt, Artificial Sequence
  Description of Artificial Sequence: Synthetic oligonucleotide
guagaggccgagcaccuca

SEQ ID NO: 1940449 - RNA, 19 nt, Artificial Sequence
  Description of Artificial Sequence: Synthetic oligonucleotide
ccuggaugggagaugagug

SEQ ID NO: 1940450 - RNA, 19 nt, Artificial Sequence
  Description of Artificial Sequence: Synthetic oligonucleotide
cguucuggaaugaggaggg

SEQ ID NO: 1940451 - RNA, 19 nt, Artificial Sequence
  Description of Artificial Sequence: Synthetic oligonucleotide
augaucccagccauaacca

SEQ ID NO: 1940452 - RNA, 19 nt, Artificial Sequence
  Description of Artificial Sequence: Synthetic oligonucleotide
agcacucuagggcgauggg

SEQ ID NO: 1940453 - RNA, 19 nt, Artificial Sequence
  Description of Artificial Sequence: Synthetic oligonucleotide
cacugcgcauuuacaagac

SEQ ID NO: 1940454 - RNA, 19 nt, Artificial Sequence
  Description of Artificial Sequence: Synthetic oligonucleotide
acaaggcagcacuuuacua

SEQ ID NO: 1940455 - RNA, 19 nt, Artificial Sequence
  Description of Artificial Sequence: Synthetic oligonucleotide
ggcuguucguucuggaaug

SEQ ID NO: 1940456 - RNA, 19 nt, Artificial Sequence
  Description of Artificial Sequence: Synthetic oligonucleotide
ugccacucuuggcugugcc

SEQ ID NO: 1940457 - RNA, 19 nt, Artificial Sequence
  Description of Artificial Sequence: Synthetic oligonucleotide
ccaucagucagggaguuag

SEQ ID NO: 1940458 - RNA, 19 nt, Artificial Sequence
  Description of Artificial Sequence: Synthetic oligonucleotide
guaggacggcgggagagcg

SEQ ID NO: 1940459 - RNA, 19 nt, Artificial Sequence
  Description of Artificial Sequence: Synthetic oligonucleotide
ucaggaucaugcccacgaa

SEQ ID NO: 1940460 - RNA, 19 nt, Artificial Sequence
  Description of Artificial Sequence: Synthetic oligonucleotide
gagaggauuagggccacga

SEQ ID NO: 1940461 - RNA, 19 nt, Artificial Sequence
  Description of Artificial Sequence: Synthetic oligonucleotide
gccgcugcgcucuaaauac

SEQ ID NO: 1940462 - RNA, 19 nt, Artificial Sequence
  Description of Artificial Sequence: Synthetic oligonucleotide
agaggccgagcaccucagc

SEQ ID NO: 1940463 - RNA, 19 nt, Artificial Sequence
  Description of Artificial Sequence: Synthetic oligonucleotide
uccuaucccgugacuggug

SEQ ID NO: 1940464 - RNA, 19 nt, Artificial Sequence
  Description of Artificial Sequence: Synthetic oligonucleotide
acuaggacacugcgcauuu

SEQ ID NO: 1940465 - RNA, 19 nt, Artificial Sequence
  Description of Artificial Sequence: Synthetic oligonucleotide
ucaggcuguucguucugga

SEQ ID NO: 1940466 - RNA, 19 nt, Artificial Sequence
  Description of Artificial Sequence: Synthetic oligonucleotide
cgagcaguaacacucugcc

SEQ ID NO: 1940467 - RNA, 19 nt, Artificial Sequence
  Description of Artificial Sequence: Synthetic oligonucleotide
gcucccauggcgcugaaga

SEQ ID NO: 1940468 - RNA, 19 nt, Artificial Sequence
  Description of Artificial Sequence: Synthetic oligonucleotide
auccccaacgaugccaaug

SEQ ID NO: 1940469 - RNA, 19 nt, Artificial Sequence
  Description of Artificial Sequence: Synthetic oligonucleotide
ggcaagcgagcgaagaucc

SEQ ID NO: 1940470 - RNA, 19 nt, Artificial Sequence
  Description of Artificial Sequence: Synthetic oligonucleotide
caucagucagggaguuagc

SEQ ID NO: 1940471 - RNA, 19 nt, Artificial Sequence
  Description of Artificial Sequence: Synthetic oligonucleotide
ggaguuagcgauaaguacu

SEQ ID NO: 1940472 - RNA, 19 nt, Artificial Sequence
  Description of Artificial Sequence: Synthetic oligonucleotide
ccacacucagaccagcacc

SEQ ID NO: 1940473 - RNA, 19 nt, Artificial Sequence
  Description of Artificial Sequence: Synthetic oligonucleotide
aagcgggaacagggcaagc

SEQ ID NO: 1940474 - RNA, 19 nt, Artificial Sequence
  Description of Artificial Sequence: Synthetic oligonucleotide
cugcaagcgggaacagggc

SEQ ID NO: 1940475 - RNA, 19 nt, Artificial Sequence
  Description of Artificial Sequence: Synthetic oligonucleotide
gagggguggucuuuacauc

SEQ ID NO: 1940476 - RNA, 19 nt, Artificial Sequence
  Description of Artificial Sequence: Synthetic oligonucleotide
gaucaggaucaugcccacg

SEQ ID NO: 1940477 - RNA, 19 nt, Artificial Sequence
  Description of Artificial Sequence: Synthetic oligonucleotide
agacgcaugaauaggucaa

SEQ ID NO: 1940478 - RNA, 19 nt, Artificial Sequence
  Description of Artificial Sequence: Synthetic oligonucleotide
ugccccgaacaccagcauc

SEQ ID NO: 1940479 - RNA, 19 nt, Artificial Sequence
  Description of Artificial Sequence: Synthetic oligonucleotide
ucagccgcugcgcucuaaa

SEQ ID NO: 1940480 - RNA, 19 nt, Artificial Sequence
  Description of Artificial Sequence: Synthetic oligonucleotide
uggcgcugaagaucauggc

SEQ ID NO: 1940481 - RNA, 19 nt, Artificial Sequence
  Description of Artificial Sequence: Synthetic oligonucleotide
cugguggugguaaagggcu

SEQ ID NO: 1940482 - RNA, 19 nt, Artificial Sequence
  Description of Artificial Sequence: Synthetic oligonucleotide
agggaguuagcgauaagua

SEQ ID NO: 1940483 - RNA, 19 nt, Artificial Sequence
  Description of Artificial Sequence: Synthetic oligonucleotide
gauggacuucaugaucauc

SEQ ID NO: 1940484 - RNA, 19 nt, Artificial Sequence
  Description of Artificial Sequence: Synthetic oligonucleotide
uguagagggugaugccauc

SEQ ID NO: 1940485 - RNA, 19 nt, Artificial Sequence
  Description of Artificial Sequence: Synthetic oligonucleotide
acuauauaguugggagaca

SEQ ID NO: 1940486 - RNA, 19 nt, Artificial Sequence
  Description of Artificial Sequence: Synthetic oligonucleotide
cacagcacggggcggcagg

SEQ ID NO: 1940487 - RNA, 19 nt, Artificial Sequence
  Description of Artificial Sequence: Synthetic oligonucleotide
cuuuacuaaugauuacuau

SEQ ID NO: 1940488 - RNA, 19 nt, Artificial Sequence
  Description of Artificial Sequence: Synthetic oligonucleotide
cgacauagcagcgaugccg

SEQ ID NO: 1940489 - RNA, 19 nt, Artificial Sequence
  Description of Artificial Sequence: Synthetic oligonucleotide
ggacacugcgcauuuacaa

SEQ ID NO: 1940490 - RNA, 19 nt, Artificial Sequence
  Description of Artificial Sequence: Synthetic oligonucleotide
caugaucaucucuggccuc

SEQ ID NO: 1940491 - RNA, 19 nt, Artificial Sequence
  Description of Artificial Sequence: Synthetic oligonucleotide
aggagggguggucuuuaca

SEQ ID NO: 1940492 - RNA, 19 nt, Artificial Sequence
  Description of Artificial Sequence: Synthetic oligonucleotide
gucaggcuguucguucugg

SEQ ID NO: 1940493 - RNA, 19 nt, Artificial Sequence
  Description of Artificial Sequence: Synthetic oligonucleotide
uggaaugaggagggguggu

SEQ ID NO: 1940494 - RNA, 19 nt, Artificial Sequence
  Description of Artificial Sequence: Synthetic oligonucleotide
guagccagaggcugacauc

SEQ ID NO: 1940495 - RNA, 19 nt, Artificial Sequence
  Description of Artificial Sequence: Synthetic oligonucleotide
augaccgacauagcagcga

SEQ ID NO: 1940496 - RNA, 19 nt, Artificial Sequence
  Description of Artificial Sequence: Synthetic oligonucleotide
cauccucaguggucagggg

SEQ ID NO: 1940497 - RNA, 19 nt, Artificial Sequence
  Description of Artificial Sequence: Synthetic oligonucleotide
caagcgggaacagggcaag

SEQ ID NO: 1940498 - RNA, 19 nt, Artificial Sequence
  Description of Artificial Sequence: Synthetic oligonucleotide
caaugaucccagccauaac

SEQ ID NO: 1940499 - RNA, 19 nt, Artificial Sequence
  Description of Artificial Sequence: Synthetic oligonucleotide
ccuuauacacagagcacuc

SEQ ID NO: 1940500 - RNA, 19 nt, Artificial Sequence
  Description of Artificial Sequence: Synthetic oligonucleotide
gaccguagaggccgagcac

SEQ ID NO: 1940501 - RNA, 19 nt, Artificial Sequence
  Description of Artificial Sequence: Synthetic oligonucleotide
ggcuacuuuguggagagga

SEQ ID NO: 1940502 - RNA, 19 nt, Artificial Sequence
  Description of Artificial Sequence: Synthetic oligonucleotide
aacagacaaugggcacuag

SEQ ID NO: 1940503 - RNA, 19 nt, Artificial Sequence
  Description of Artificial Sequence: Synthetic oligonucleotide
agccgcugcgcucuaaaua

SEQ ID NO: 1940504 - RNA, 19 nt, Artificial Sequence
  Description of Artificial Sequence: Synthetic oligonucleotide
ccuaucccgugacuggugg

SEQ ID NO: 1940505 - RNA, 19 nt, Artificial Sequence
  Description of Artificial Sequence: Synthetic oligonucleotide
agcgaaggcgaccccgcca

SEQ ID NO: 1940506 - RNA, 19 nt, Artificial Sequence
  Description of Artificial Sequence: Synthetic oligonucleotide
guagagggugaugccauca

SEQ ID NO: 1940507 - RNA, 19 nt, Artificial Sequence
  Description of Artificial Sequence: Synthetic oligonucleotide
aacuccuguagagggugau

SEQ ID NO: 1940508 - RNA, 19 nt, Artificial Sequence
  Description of Artificial Sequence: Synthetic oligonucleotide
cacagacgcaugaauaggu

SEQ ID NO: 1940509 - RNA, 19 nt, Artificial Sequence
  Description of Artificial Sequence: Synthetic oligonucleotide
acgaagcgccuacgacagc

SEQ ID NO: 1940510 - RNA, 19 nt, Artificial Sequence
  Description of Artificial Sequence: Synthetic oligonucleotide
gccacgaugagaccguaga

SEQ ID NO: 1940511 - RNA, 19 nt, Artificial Sequence
  Description of Artificial Sequence: Synthetic oligonucleotide
cucuagggcgauggguggg

SEQ ID NO: 1940512 - RNA, 19 nt, Artificial Sequence
  Description of Artificial Sequence: Synthetic oligonucleotide
ccagccauaaccacuggga

SEQ ID NO: 1940513 - RNA, 19 nt, Artificial Sequence
  Description of Artificial Sequence: Synthetic oligonucleotide
agaggcugacauccucagu

SEQ ID NO: 1940514 - RNA, 19 nt, Artificial Sequence
  Description of Artificial Sequence: Synthetic oligonucleotide
aguaacacucugcccucua

SEQ ID NO: 1940515 - RNA, 19 nt, Artificial Sequence
  Description of Artificial Sequence: Synthetic oligonucleotide
cugggcagugccccgaaca

SEQ ID NO: 1940516 - RNA, 19 nt, Artificial Sequence
  Description of Artificial Sequence: Synthetic oligonucleotide
uguccacagcacggggcgg

SEQ ID NO: 1940517 - RNA, 19 nt, Artificial Sequence
  Description of Artificial Sequence: Synthetic oligonucleotide
caacucuaauucauccuua

SEQ ID NO: 1940518 - RNA, 19 nt, Artificial Sequence
  Description of Artificial Sequence: Synthetic oligonucleotide
gaaaacuccuguagagggu

SEQ ID NO: 1940519 - RNA, 19 nt, Artificial Sequence
  Description of Artificial Sequence: Synthetic oligonucleotide
guagcugcccgugcgugug

SEQ ID NO: 1940520 - RNA, 19 nt, Artificial Sequence
  Description of Artificial Sequence: Synthetic oligonucleotide
auccuaucccgugacuggu

SEQ ID NO: 1940521 - RNA, 19 nt, Artificial Sequence
  Description of Artificial Sequence: Synthetic oligonucleotide
cagucagggaguuagcgau

SEQ ID NO: 1940522 - RNA, 19 nt, Artificial Sequence
  Description of Artificial Sequence: Synthetic oligonucleotide
agagucucagcaacaggaa

SEQ ID NO: 1940523 - RNA, 19 nt, Artificial Sequence
  Description of Artificial Sequence: Synthetic oligonucleotide
gaaugaggagggguggucu

SEQ ID NO: 1940524 - RNA, 19 nt, Artificial Sequence
  Description of Artificial Sequence: Synthetic oligonucleotide
gcgaaggcgaccccgccag

SEQ ID NO: 1940525 - RNA, 19 nt, Artificial Sequence
  Description of Artificial Sequence: Synthetic oligonucleotide
cagggcaagcucagccggc

SEQ ID NO: 1940526 - RNA, 19 nt, Artificial Sequence
  Description of Artificial Sequence: Synthetic oligonucleotide
cgagcgaagauccccgagg

SEQ ID NO: 1940527 - RNA, 19 nt, Artificial Sequence
  Description of Artificial Sequence: Synthetic oligonucleotide
cagcacuuuacuaaugauu

SEQ ID NO: 1940528 - RNA, 19 nt, Artificial Sequence
  Description of Artificial Sequence: Synthetic oligonucleotide
gaucaugcccacgaacagu

SEQ ID NO: 1940529 - RNA, 19 nt, Artificial Sequence
  Description of Artificial Sequence: Synthetic oligonucleotide
ccgagaacuuuauuggaca

SEQ ID NO: 1940530 - RNA, 19 nt, Artificial Sequence
  Description of Artificial Sequence: Synthetic oligonucleotide
agauccccgaggcggcuga

SEQ ID NO: 1940531 - RNA, 19 nt, Artificial Sequence
  Description of Artificial Sequence: Synthetic oligonucleotide
gcugaagaaaacuccugua

SEQ ID NO: 1940532 - RNA, 19 nt, Artificial Sequence
  Description of Artificial Sequence: Synthetic oligonucleotide
gccccgaacaccagcaucc

SEQ ID NO: 1940533 - RNA, 19 nt, Artificial Sequence
  Description of Artificial Sequence: Synthetic oligonucleotide
gcgauaaguacugccacca

SEQ ID NO: 1940534 - RNA, 19 nt, Artificial Sequence
  Description of Artificial Sequence: Synthetic oligonucleotide
gaaggcgaccccgccaguc

SEQ ID NO: 1940535 - RNA, 19 nt, Artificial Sequence
  Description of Artificial Sequence: Synthetic oligonucleotide
cagggaguuagcgauaagu

SEQ ID NO: 1940536 - RNA, 19 nt, Artificial Sequence
  Description of Artificial Sequence: Synthetic oligonucleotide
uaggacggcgggagagcga

SEQ ID NO: 1940537 - RNA, 19 nt, Artificial Sequence
  Description of Artificial Sequence: Synthetic oligonucleotide
augcccacgaacagucgug

SEQ ID NO: 1940538 - RNA, 19 nt, Artificial Sequence
  Description of Artificial Sequence: Synthetic oligonucleotide
ccacagacgcaugaauagg

SEQ ID NO: 1940539 - RNA, 19 nt, Artificial Sequence
  Description of Artificial Sequence: Synthetic oligonucleotide
acgcagcauauucggggcu

SEQ ID NO: 1940540 - RNA, 19 nt, Artificial Sequence
  Description of Artificial Sequence: Synthetic oligonucleotide
cgaagcgccuacgacagcg

SEQ ID NO: 1940541 - RNA, 19 nt, Artificial Sequence
  Description of Artificial Sequence: Synthetic oligonucleotide
aggacacugcgcauuuaca

SEQ ID NO: 1940542 - RNA, 19 nt, Artificial Sequence
  Description of Artificial Sequence: Synthetic oligonucleotide
gcaaugaucccagccauaa

SEQ ID NO: 1940543 - RNA, 19 nt, Artificial Sequence
  Description of Artificial Sequence: Synthetic oligonucleotide
ggagggguggucuuuacau

SEQ ID NO: 1940544 - RNA, 19 nt, Artificial Sequence
  Description of Artificial Sequence: Synthetic oligonucleotide
acgcaugaauaggucaaau

SEQ ID NO: 1940545 - RNA, 19 nt, Artificial Sequence
  Description of Artificial Sequence: Synthetic oligonucleotide
cccagccauaaccacuggg

SEQ ID NO: 1940546 - RNA, 19 nt, Artificial Sequence
  Description of Artificial Sequence: Synthetic oligonucleotide
ugguggugguaaagggcua

SEQ ID NO: 1940547 - RNA, 19 nt, Artificial Sequence
  Description of Artificial Sequence: Synthetic oligonucleotide
ccacaaggcagcacuuuac

SEQ ID NO: 1940548 - RNA, 19 nt, Artificial Sequence
  Description of Artificial Sequence: Synthetic oligonucleotide
uggugguaaagggcuacuu

SEQ ID NO: 1940549 - RNA, 19 nt, Artificial Sequence
  Description of Artificial Sequence: Synthetic oligonucleotide
cacaaggcagcacuuuacu

SEQ ID NO: 1940550 - RNA, 19 nt, Artificial Sequence
  Description of Artificial Sequence: Synthetic oligonucleotide
cgcaugaauaggucaaauc

SEQ ID NO: 1940551 - RNA, 19 nt, Artificial Sequence
  Description of Artificial Sequence: Synthetic oligonucleotide
gacgcaugaauaggucaaa

SEQ ID NO: 1940552 - RNA, 19 nt, Artificial Sequence
  Description of Artificial Sequence: Synthetic oligonucleotide
agcgagcgaagauccccga

SEQ ID NO: 1940553 - RNA, 19 nt, Artificial Sequence
  Description of Artificial Sequence: Synthetic oligonucleotide
auucggggcuguucuugau

SEQ ID NO: 1940554 - RNA, 19 nt, Artificial Sequence
  Description of Artificial Sequence: Synthetic oligonucleotide
gcaagcucagccggcggcg

SEQ ID NO: 1940555 - RNA, 19 nt, Artificial Sequence
  Description of Artificial Sequence: Synthetic oligonucleotide
guacugccaccaccaggcc

SEQ ID NO: 1940556 - RNA, 19 nt, Artificial Sequence
  Description of Artificial Sequence: Synthetic oligonucleotide
gagcgggcaagcgagcgaa

SEQ ID NO: 1940557 - RNA, 19 nt, Artificial Sequence
  Description of Artificial Sequence: Synthetic oligonucleotide
ggguaggacggcgggagag

SEQ ID NO: 1940558 - RNA, 19 nt, Artificial Sequence
  Description of Artificial Sequence: Synthetic oligonucleotide
gucaugucugcaagcggga

SEQ ID NO: 1940559 - RNA, 19 nt, Artificial Sequence
  Description of Artificial Sequence: Synthetic oligonucleotide
gagaugagugggcccagau

SEQ ID NO: 1940560 - RNA, 19 nt, Artificial Sequence
  Description of Artificial Sequence: Synthetic oligonucleotide
gggcaacagacaaugggca

SEQ ID NO: 1940561 - RNA, 19 nt, Artificial Sequence
  Description of Artificial Sequence: Synthetic oligonucleotide
gcgagcaguaacacucugc

SEQ ID NO: 1940562 - RNA, 19 nt, Artificial Sequence
  Description of Artificial Sequence: Synthetic oligonucleotide
acagagcacucuagggcga

SEQ ID NO: 1940563 - RNA, 19 nt, Artificial Sequence
  Description of Artificial Sequence: Synthetic oligonucleotide
caggcuguucguucuggaa

SEQ ID NO: 1940564 - RNA, 19 nt, Artificial Sequence
  Description of Artificial Sequence: Synthetic oligonucleotide
gugucaggcuguucguucu

SEQ ID NO: 1940565 - RNA, 19 nt, Artificial Sequence
  Description of Artificial Sequence: Synthetic oligonucleotide
gaccgacauagcagcgaug

SEQ ID NO: 1940566 - RNA, 19 nt, Artificial Sequence
  Description of Artificial Sequence: Synthetic oligonucleotide
gaagcgccuacgacagcga

SEQ ID NO: 1940567 - RNA, 19 nt, Artificial Sequence
  Description of Artificial Sequence: Synthetic oligonucleotide
gguaggacggcgggagagc

SEQ ID NO: 1940568 - RNA, 19 nt, Artificial Sequence
  Description of Artificial Sequence: Synthetic oligonucleotide
caacagacaaugggcacua

SEQ ID NO: 1940569 - RNA, 19 nt, Artificial Sequence
  Description of Artificial Sequence: Synthetic oligonucleotide
uagggcgauggguggggua

SEQ ID NO: 1940570 - RNA, 19 nt, Artificial Sequence
  Description of Artificial Sequence: Synthetic oligonucleotide
gcugcgcucuaaauaccag

SEQ ID NO: 1940571 - RNA, 19 nt, Artificial Sequence
  Description of Artificial Sequence: Synthetic oligonucleotide
gcgcauuuacaagaccaac

SEQ ID NO: 1940572 - RNA, 19 nt, Artificial Sequence
  Description of Artificial Sequence: Synthetic oligonucleotide
gcgagcgaagauccccgag

SEQ ID NO: 1940573 - RNA, 19 nt, Artificial Sequence
  Description of Artificial Sequence: Synthetic oligonucleotide
gggcaagcgagcgaagauc

SEQ ID NO: 1940574 - RNA, 19 nt, Artificial Sequence
  Description of Artificial Sequence: Synthetic oligonucleotide
ccagaggcugacauccuca

SEQ ID NO: 1940575 - RNA, 19 nt, Artificial Sequence
  Description of Artificial Sequence: Synthetic oligonucleotide
ggugguaaagggcuacuuu

SEQ ID NO: 1940576 - RNA, 19 nt, Artificial Sequence
  Description of Artificial Sequence: Synthetic oligonucleotide
cagcauccccaacgaugcc

SEQ ID NO: 1940577 - RNA, 19 nt, Artificial Sequence
  Description of Artificial Sequence: Synthetic oligonucleotide
agagcacucuagggcgaug

SEQ ID NO: 1940578 - RNA, 19 nt, Artificial Sequence
  Description of Artificial Sequence: Synthetic oligonucleotide
gcggcugaagcgaaggcga

SEQ ID NO: 1940579 - RNA, 19 nt, Artificial Sequence
  Description of Artificial Sequence: Synthetic oligonucleotide
agggccacgaugagaccgu

SEQ ID NO: 1940580 - RNA, 19 nt, Artificial Sequence
  Description of Artificial Sequence: Synthetic oligonucleotide
ggaaugaggaggggugguc

SEQ ID NO: 1940581 - RNA, 19 nt, Artificial Sequence
  Description of Artificial Sequence: Synthetic oligonucleotide
gcgccuacgacagcgaaaa

SEQ ID NO: 1940582 - RNA, 19 nt, Artificial Sequence
  Description of Artificial Sequence: Synthetic oligonucleotide
cccacacucagaccagcac

SEQ ID NO: 1940583 - RNA, 19 nt, Artificial Sequence
  Description of Artificial Sequence: Synthetic oligonucleotide
cugcccgugcguguguguc

SEQ ID NO: 1940584 - RNA, 19 nt, Artificial Sequence
  Description of Artificial Sequence: Synthetic oligonucleotide
cgaagauccccgaggcggc

SEQ ID NO: 1940585 - RNA, 19 nt, Artificial Sequence
  Description of Artificial Sequence: Synthetic oligonucleotide
uagcugcccgugcgugugu

SEQ ID NO: 1940586 - RNA, 19 nt, Artificial Sequence
  Description of Artificial Sequence: Synthetic oligonucleotide
gcaacagacaaugggcacu

SEQ ID NO: 1940587 - RNA, 19 nt, Artificial Sequence
  Description of Artificial Sequence: Synthetic oligonucleotide
gggcaagcucagccggcgg

SEQ ID NO: 1940588 - RNA, 19 nt, Artificial Sequence
  Description of Artificial Sequence: Synthetic oligonucleotide
ccccgaggcggcugaagcg

SEQ ID NO: 1940589 - RNA, 19 nt, Artificial Sequence
  Description of Artificial Sequence: Synthetic oligonucleotide
cacccagcugaagaaaacu

SEQ ID NO: 1940590 - RNA, 19 nt, Artificial Sequence
  Description of Artificial Sequence: Synthetic oligonucleotide
cuacuuuguggagaggauu

SEQ ID NO: 1940591 - RNA, 19 nt, Artificial Sequence
  Description of Artificial Sequence: Synthetic oligonucleotide
augaggagggguggucuuu

SEQ ID NO: 1940592 - RNA, 19 nt, Artificial Sequence
  Description of Artificial Sequence: Synthetic oligonucleotide
ccgccagucagccgcugcg

SEQ ID NO: 1940593 - RNA, 19 nt, Artificial Sequence
  Description of Artificial Sequence: Synthetic oligonucleotide
ccgugcgugugugucaggc

SEQ ID NO: 1940594 - RNA, 19 nt, Artificial Sequence
  Description of Artificial Sequence: Synthetic oligonucleotide
cagccauaaccacugggau

SEQ ID NO: 1940595 - RNA, 19 nt, Artificial Sequence
  Description of Artificial Sequence: Synthetic oligonucleotide
gggcacuaggacacugcgc

SEQ ID NO: 1940596 - RNA, 19 nt, Artificial Sequence
  Description of Artificial Sequence: Synthetic oligonucleotide
gggccuggaugggagauga

SEQ ID NO: 1940597 - RNA, 19 nt, Artificial Sequence
  Description of Artificial Sequence: Synthetic oligonucleotide
agucagggaguuagcgaua

SEQ ID NO: 1940598 - RNA, 19 nt, Artificial Sequence
  Description of Artificial Sequence: Synthetic oligonucleotide
cagcgaagaugaggaucag

SEQ ID NO: 1940599 - RNA, 19 nt, Artificial Sequence
  Description of Artificial Sequence: Synthetic oligonucleotide
uggccucaugaccgacaua

SEQ ID NO: 1940600 - RNA, 19 nt, Artificial Sequence
  Description of Artificial Sequence: Synthetic oligonucleotide
agcucccauggcgcugaag

SEQ ID NO: 1940601 - RNA, 19 nt, Artificial Sequence
  Description of Artificial Sequence: Synthetic oligonucleotide
ggagaggauuagggccacg

SEQ ID NO: 1940602 - RNA, 19 nt, Artificial Sequence
  Description of Artificial Sequence: Synthetic oligonucleotide
ggugccacucuuggcugug

SEQ ID NO: 1940603 - RNA, 19 nt, Artificial Sequence
  Description of Artificial Sequence: Synthetic oligonucleotide
ccgacauagcagcgaugcc

SEQ ID NO: 1940604 - RNA, 19 nt, Artificial Sequence
  Description of Artificial Sequence: Synthetic oligonucleotide
gccacucuuggcugugcca

SEQ ID NO: 1940605 - RNA, 19 nt, Artificial Sequence
  Description of Artificial Sequence: Synthetic oligonucleotide
gcacccagcugaagaaaac

SEQ ID NO: 1940606 - RNA, 19 nt, Artificial Sequence
  Description of Artificial Sequence: Synthetic oligonucleotide
ucguggcugcugggcagug

SEQ ID NO: 1940607 - RNA, 19 nt, Artificial Sequence
  Description of Artificial Sequence: Synthetic oligonucleotide
cccgaacaccagcaucccc

SEQ ID NO: 1940608 - RNA, 19 nt, Artificial Sequence
  Description of Artificial Sequence: Synthetic oligonucleotide
ggguagcugcccgugcgug

SEQ ID NO: 1940609 - RNA, 19 nt, Artificial Sequence
  Description of Artificial Sequence: Synthetic oligonucleotide
gcaagcgggaacagggcaa

SEQ ID NO: 1940610 - RNA, 19 nt, Artificial Sequence
  Description of Artificial Sequence: Synthetic oligonucleotide
gcggacgaagcgccuacga

SEQ ID NO: 1940611 - RNA, 19 nt, Artificial Sequence
  Description of Artificial Sequence: Synthetic oligonucleotide
cuggccucaugaccgacau

SEQ ID NO: 1940612 - RNA, 19 nt, Artificial Sequence
  Description of Artificial Sequence: Synthetic oligonucleotide
gcagcacuuuacuaaugau

SEQ ID NO: 1940613 - RNA, 19 nt, Artificial Sequence
  Description of Artificial Sequence: Synthetic oligonucleotide
gcaagcgagcgaagauccc

SEQ ID NO: 1940614 - RNA, 19 nt, Artificial Sequence
  Description of Artificial Sequence: Synthetic oligonucleotide
cgauaaguacugccaccac

SEQ ID NO: 1940615 - RNA, 19 nt, Artificial Sequence
  Description of Artificial Sequence: Synthetic oligonucleotide
gugccacucuuggcugugc

SEQ ID NO: 1940616 - RNA, 19 nt, Artificial Sequence
  Description of Artificial Sequence: Synthetic oligonucleotide
ggcggacgaagcgccuacg

SEQ ID NO: 1940617 - RNA, 19 nt, Artificial Sequence
  Description of Artificial Sequence: Synthetic oligonucleotide
ccgcugcgcucuaaauacc

SEQ ID NO: 1940618 - RNA, 19 nt, Artificial Sequence
  Description of Artificial Sequence: Synthetic oligonucleotide
ggccacgaugagaccguag

SEQ ID NO: 1940619 - RNA, 19 nt, Artificial Sequence
  Description of Artificial Sequence: Synthetic oligonucleotide
gcgaccccgccagucagcc

SEQ ID NO: 1940620 - RNA, 19 nt, Artificial Sequence
  Description of Artificial Sequence: Synthetic oligonucleotide
cuaucccgugacugguggu

SEQ ID NO: 1940621 - RNA, 19 nt, Artificial Sequence
  Description of Artificial Sequence: Synthetic oligonucleotide
gaagauccccgaggcggcu

SEQ ID NO: 1940622 - RNA, 19 nt, Artificial Sequence
  Description of Artificial Sequence: Synthetic oligonucleotide
cauauucggggcuguucuu

SEQ ID NO: 1940623 - RNA, 19 nt, Artificial Sequence
  Description of Artificial Sequence: Synthetic oligonucleotide
cagucagccgcugcgcucu

SEQ ID NO: 1940624 - RNA, 19 nt, Artificial Sequence
  Description of Artificial Sequence: Synthetic oligonucleotide
agccagaggcugacauccu

SEQ ID NO: 1940625 - RNA, 19 nt, Artificial Sequence
  Description of Artificial Sequence: Synthetic oligonucleotide
ggaaccccacaaggcagca

SEQ ID NO: 1940626 - RNA, 19 nt, Artificial Sequence
  Description of Artificial Sequence: Synthetic oligonucleotide
guggugguaaagggcuacu

SEQ ID NO: 1940627 - RNA, 19 nt, Artificial Sequence
  Description of Artificial Sequence: Synthetic oligonucleotide
gccucaugaccgacauagc

SEQ ID NO: 1940628 - RNA, 19 nt, Artificial Sequence
  Description of Artificial Sequence: Synthetic oligonucleotide
cgcugcgcucuaaauacca

SEQ ID NO: 1940629 - RNA, 19 nt, Artificial Sequence
  Description of Artificial Sequence: Synthetic oligonucleotide
cacuaggacacugcgcauu

SEQ ID NO: 1940630 - RNA, 19 nt, Artificial Sequence
  Description of Artificial Sequence: Synthetic oligonucleotide
ggcgggagagcgagcgggc

SEQ ID NO: 1940631 - RNA, 19 nt, Artificial Sequence
  Description of Artificial Sequence: Synthetic oligonucleotide
cccacgaacagucguggcu

SEQ ID NO: 1940632 - RNA, 19 nt, Artificial Sequence
  Description of Artificial Sequence: Synthetic oligonucleotide
gcgggcaagcgagcgaaga

SEQ ID NO: 1940633 - RNA, 19 nt, Artificial Sequence
  Description of Artificial Sequence: Synthetic oligonucleotide
ggagaugagugggcccaga

SEQ ID NO: 1940634 - RNA, 19 nt, Artificial Sequence
  Description of Artificial Sequence: Synthetic oligonucleotide
cccgccagucagccgcugc

SEQ ID NO: 1940635 - RNA, 19 nt, Artificial Sequence
  Description of Artificial Sequence: Synthetic oligonucleotide
gcuacuuuguggagaggau

SEQ ID NO: 1940636 - RNA, 19 nt, Artificial Sequence
  Description of Artificial Sequence: Synthetic oligonucleotide
cacggggcggcaggggcca

SEQ ID NO: 1940637 - RNA, 19 nt, Artificial Sequence
  Description of Artificial Sequence: Synthetic oligonucleotide
ggcaaugaucccagccaua

SEQ ID NO: 1940638 - RNA, 19 nt, Artificial Sequence
  Description of Artificial Sequence: Synthetic oligonucleotide
cuaggacacugcgcauuua

SEQ ID NO: 1940639 - RNA, 19 nt, Artificial Sequence
  Description of Artificial Sequence: Synthetic oligonucleotide
ggcuguucuugaugucagu

SEQ ID NO: 1940640 - RNA, 19 nt, Artificial Sequence
  Description of Artificial Sequence: Synthetic oligonucleotide
gggguaggacggcgggaga

SEQ ID NO: 1940641 - RNA, 19 nt, Artificial Sequence
  Description of Artificial Sequence: Synthetic oligonucleotide
ggcgaccccgccagucagc

SEQ ID NO: 1940642 - RNA, 19 nt, Artificial Sequence
  Description of Artificial Sequence: Synthetic oligonucleotide
ccccgaacaccagcauccc

SEQ ID NO: 1940643 - RNA, 19 nt, Artificial Sequence
  Description of Artificial Sequence: Synthetic oligonucleotide
agucagccgcugcgcucua

SEQ ID NO: 1940644 - RNA, 19 nt, Artificial Sequence
  Description of Artificial Sequence: Synthetic oligonucleotide
caguaacacucugcccucu

SEQ ID NO: 1940645 - RNA, 19 nt, Artificial Sequence
  Description of Artificial Sequence: Synthetic oligonucleotide
gggcgaugggugggguagc

SEQ ID NO: 1940646 - RNA, 19 nt, Artificial Sequence
  Description of Artificial Sequence: Synthetic oligonucleotide
gccagucagccgcugcgcu

SEQ ID NO: 1940647 - RNA, 19 nt, Artificial Sequence
  Description of Artificial Sequence: Synthetic oligonucleotide
gggguagcugcccgugcgu

SEQ ID NO: 1940648 - RNA, 19 nt, Artificial Sequence
  Description of Artificial Sequence: Synthetic oligonucleotide
gauccccgaggcggcugaa

SEQ ID NO: 1940649 - RNA, 19 nt, Artificial Sequence
  Description of Artificial Sequence: Synthetic oligonucleotide
gcgaugggugggguagcca

SEQ ID NO: 1940650 - RNA, 19 nt, Artificial Sequence
  Description of Artificial Sequence: Synthetic oligonucleotide
cagccgcugcgcucuaaau

SEQ ID NO: 1940651 - RNA, 19 nt, Artificial Sequence
  Description of Artificial Sequence: Synthetic oligonucleotide
cccgugcgugugugucagg

SEQ ID NO: 1940652 - RNA, 19 nt, Artificial Sequence
  Description of Artificial Sequence: Synthetic oligonucleotide
cagcacuggcgagcaguaa

SEQ ID NO: 1940653 - RNA, 19 nt, Artificial Sequence
  Description of Artificial Sequence: Synthetic oligonucleotide
accccgccagucagccgcu

SEQ ID NO: 1940654 - RNA, 19 nt, Artificial Sequence
  Description of Artificial Sequence: Synthetic oligonucleotide
gcagcauauucggggcugu

SEQ ID NO: 1940655 - RNA, 19 nt, Artificial Sequence
  Description of Artificial Sequence: Synthetic oligonucleotide
cuagggcgauggguggggu

SEQ ID NO: 1940656 - RNA, 19 nt, Artificial Sequence
  Description of Artificial Sequence: Synthetic oligonucleotide
cagagcacucuagggcgau

SEQ ID NO: 1940657 - RNA, 19 nt, Artificial Sequence
  Description of Artificial Sequence: Synthetic oligonucleotide
cgccagucagccgcugcgc

SEQ ID NO: 1940658 - RNA, 19 nt, Artificial Sequence
  Description of Artificial Sequence: Synthetic oligonucleotide
ccgugacugguggugguaa

SEQ ID NO: 1940659 - RNA, 19 nt, Artificial Sequence
  Description of Artificial Sequence: Synthetic oligonucleotide
gucagccgcugcgcucuaa

SEQ ID NO: 1940660 - RNA, 19 nt, Artificial Sequence
  Description of Artificial Sequence: Synthetic oligonucleotide
gcacuaggacacugcgcau

SEQ ID NO: 1940661 - RNA, 19 nt, Artificial Sequence
  Description of Artificial Sequence: Synthetic oligonucleotide
ccguagaggccgagcaccu

SEQ ID NO: 1940662 - RNA, 19 nt, Artificial Sequence
  Description of Artificial Sequence: Synthetic oligonucleotide
ggacggcgggagagcgagc

SEQ ID NO: 1940663 - RNA, 19 nt, Artificial Sequence
  Description of Artificial Sequence: Synthetic oligonucleotide
acggggcggcaggggccag

SEQ ID NO: 1940664 - RNA, 19 nt, Artificial Sequence
  Description of Artificial Sequence: Synthetic oligonucleotide
cagcgaugccggugccacu

SEQ ID NO: 1940665 - RNA, 19 nt, Artificial Sequence
  Description of Artificial Sequence: Synthetic oligonucleotide
ccgaggcggcugaagcgaa

SEQ ID NO: 1940666 - RNA, 19 nt, Artificial Sequence
  Description of Artificial Sequence: Synthetic oligonucleotide
gccaucagucagggaguua

SEQ ID NO: 1940667 - RNA, 19 nt, Artificial Sequence
  Description of Artificial Sequence: Synthetic oligonucleotide
cgugcgugugugucaggcu

SEQ ID NO: 1940668 - RNA, 19 nt, Artificial Sequence
  Description of Artificial Sequence: Synthetic oligonucleotide
cagcauauucggggcuguu

SEQ ID NO: 1940669 - RNA, 19 nt, Artificial Sequence
  Description of Artificial Sequence: Synthetic oligonucleotide
ccucagcgaagaugaggau

SEQ ID NO: 1940670 - RNA, 19 nt, Artificial Sequence
  Description of Artificial Sequence: Synthetic oligonucleotide
cagcucccauggcgcugaa

SEQ ID NO: 1940671 - RNA, 19 nt, Artificial Sequence
  Description of Artificial Sequence: Synthetic oligonucleotide
gggccacgaugagaccgua

SEQ ID NO: 1940672 - RNA, 19 nt, Artificial Sequence
  Description of Artificial Sequence: Synthetic oligonucleotide
cgggcaagcgagcgaagau

SEQ ID NO: 1940673 - RNA, 19 nt, Artificial Sequence
  Description of Artificial Sequence: Synthetic oligonucleotide
cggggcggcaggggccagg

SEQ ID NO: 1940674 - RNA, 19 nt, Artificial Sequence
  Description of Artificial Sequence: Synthetic oligonucleotide
ccccgccagucagccgcug

SEQ ID NO: 1940675 - RNA, 19 nt, Artificial Sequence
  Description of Artificial Sequence: Synthetic oligonucleotide
cgaaggcgaccccgccagu

SEQ ID NO: 1940676 - RNA, 19 nt, Artificial Sequence
  Description of Artificial Sequence: Synthetic oligonucleotide
aaauguaugauuuauaaua

SEQ ID NO: 1940677 - RNA, 19 nt, Artificial Sequence
  Description of Artificial Sequence: Synthetic oligonucleotide
aaagauucuugacucagcc

SEQ ID NO: 1940678 - RNA, 19 nt, Artificial Sequence
  Description of Artificial Sequence: Synthetic oligonucleotide
aaaauggacaaauguauuc

SEQ ID NO: 1940679 - RNA, 19 nt, Artificial Sequence
  Description of Artificial Sequence: Synthetic oligonucleotide
uacaaaagaauucagcugc

SEQ ID NO: 1940680 - RNA, 19 nt, Artificial Sequence
  Description of Artificial Sequence: Synthetic oligonucleotide
uguaugauuuauaauaccc

SEQ ID NO: 1940681 - RNA, 19 nt, Artificial Sequence
  Description of Artificial Sequence: Synthetic oligonucleotide
aauauacccauacagguug

SEQ ID NO: 1940682 - RNA, 19 nt, Artificial Sequence
  Description of Artificial Sequence: Synthetic oligonucleotide
aaagaauucagcugccuac

SEQ ID NO: 1940683 - RNA, 19 nt, Artificial Sequence
  Description of Artificial Sequence: Synthetic oligonucleotide
uacacucuaauaaagaccc

SEQ ID NO: 1940684 - RNA, 19 nt, Artificial Sequence
  Description of Artificial Sequence: Synthetic oligonucleotide
uauuacauaagaauaauau

SEQ ID NO: 1940685 - RNA, 19 nt, Artificial Sequence
  Description of Artificial Sequence: Synthetic oligonucleotide
uuuuagacaauuuccagag

SEQ ID NO: 1940686 - RNA, 19 nt, Artificial Sequence
  Description of Artificial Sequence: Synthetic oligonucleotide
gacucgaaagaacagaugg

SEQ ID NO: 1940687 - RNA, 19 nt, Artificial Sequence
  Description of Artificial Sequence: Synthetic oligonucleotide
uucauuaacccaaugagca

SEQ ID NO: 1940688 - RNA, 19 nt, Artificial Sequence
  Description of Artificial Sequence: Synthetic oligonucleotide
acuacaaccgcacugacuc

SEQ ID NO: 1940689 - RNA, 19 nt, Artificial Sequence
  Description of Artificial Sequence: Synthetic oligonucleotide
cuuagaauguuucauaggc

SEQ ID NO: 1940690 - RNA, 19 nt, Artificial Sequence
  Description of Artificial Sequence: Synthetic oligonucleotide
aaagucacaugacagcaac

SEQ ID NO: 1940691 - RNA, 19 nt, Artificial Sequence
  Description of Artificial Sequence: Synthetic oligonucleotide
cuuuacaccgaauauaccc

SEQ ID NO: 1940692 - RNA, 19 nt, Artificial Sequence
  Description of Artificial Sequence: Synthetic oligonucleotide
aauguaugauuuauaauac

SEQ ID NO: 1940693 - RNA, 19 nt, Artificial Sequence
  Description of Artificial Sequence: Synthetic oligonucleotide
aagauaaucgucaccauac

SEQ ID NO: 1940694 - RNA, 19 nt, Artificial Sequence
  Description of Artificial Sequence: Synthetic oligonucleotide
uguauucacaacauaaucu

SEQ ID NO: 1940695 - RNA, 19 nt, Artificial Sequence
  Description of Artificial Sequence: Synthetic oligonucleotide
agagauuuuagacaauuuc

SEQ ID NO: 1940696 - RNA, 19 nt, Artificial Sequence
  Description of Artificial Sequence: Synthetic oligonucleotide
gaggagauagacuacaacc

SEQ ID NO: 1940697 - RNA, 19 nt, Artificial Sequence
  Description of Artificial Sequence: Synthetic oligonucleotide
agauucuugacucagccuc

SEQ ID NO: 1940698 - RNA, 19 nt, Artificial Sequence
  Description of Artificial Sequence: Synthetic oligonucleotide
uaaacaauuacucccauua

SEQ ID NO: 1940699 - RNA, 19 nt, Artificial Sequence
  Description of Artificial Sequence: Synthetic oligonucleotide
aaguuauacacugccaagc

SEQ ID NO: 1940700 - RNA, 19 nt, Artificial Sequence
  Description of Artificial Sequence: Synthetic oligonucleotide
uacaauaguuuacauuugg

SEQ ID NO: 1940701 - RNA, 19 nt, Artificial Sequence
  Description of Artificial Sequence: Synthetic oligonucleotide
aauggacaaauguauucac

SEQ ID NO: 1940702 - RNA, 19 nt, Artificial Sequence
  Description of Artificial Sequence: Synthetic oligonucleotide
aauaauauucuuauuaaaa

SEQ ID NO: 1940703 - RNA, 19 nt, Artificial Sequence
  Description of Artificial Sequence: Synthetic oligonucleotide
uuuacauuugguuuagucu

SEQ ID NO: 1940704 - RNA, 19 nt, Artificial Sequence
  Description of Artificial Sequence: Synthetic oligonucleotide
aacaagauaaucgucacca

SEQ ID NO: 1940705 - RNA, 19 nt, Artificial Sequence
  Description of Artificial Sequence: Synthetic oligonucleotide
accaaaagauucuugacuc

SEQ ID NO: 1940706 - RNA, 19 nt, Artificial Sequence
  Description of Artificial Sequence: Synthetic oligonucleotide
uaaucuaaagauuccaaca

SEQ ID NO: 1940707 - RNA, 19 nt, Artificial Sequence
  Description of Artificial Sequence: Synthetic oligonucleotide
agaaguuaacacaacaccc

SEQ ID NO: 1940708 - RNA, 19 nt, Artificial Sequence
  Description of Artificial Sequence: Synthetic oligonucleotide
gacucaaacacccaguggc

SEQ ID NO: 1940709 - RNA, 19 nt, Artificial Sequence
  Description of Artificial Sequence: Synthetic oligonucleotide
aguauauugcuuuucuuag

SEQ ID NO: 1940710 - RNA, 19 nt, Artificial Sequence
  Description of Artificial Sequence: Synthetic oligonucleotide
uuauacacugccaagcuac

SEQ ID NO: 1940711 - RNA, 19 nt, Artificial Sequence
  Description of Artificial Sequence: Synthetic oligonucleotide
uauauugcuuuucuuagga

SEQ ID NO: 1940712 - RNA, 19 nt, Artificial Sequence
  Description of Artificial Sequence: Synthetic oligonucleotide
uuagacaauuuccagagaa

SEQ ID NO: 1940713 - RNA, 19 nt, Artificial Sequence
  Description of Artificial Sequence: Synthetic oligonucleotide
auuugguuuagucugaagu

SEQ ID NO: 1940714 - RNA, 19 nt, Artificial Sequence
  Description of Artificial Sequence: Synthetic oligonucleotide
uaugccaaguauuuaaaca

SEQ ID NO: 1940715 - RNA, 19 nt, Artificial Sequence
  Description of Artificial Sequence: Synthetic oligonucleotide
aauuacucccauuauuaca

SEQ ID NO: 1940716 - RNA, 19 nt, Artificial Sequence
  Description of Artificial Sequence: Synthetic oligonucleotide
aauaugauuccaccaacgu

SEQ ID NO: 1940717 - RNA, 19 nt, Artificial Sequence
  Description of Artificial Sequence: Synthetic oligonucleotide
accgaauauacccauacag

SEQ ID NO: 1940718 - RNA, 19 nt, Artificial Sequence
  Description of Artificial Sequence: Synthetic oligonucleotide
acuaagagauuuuagacaa

SEQ ID NO: 1940719 - RNA, 19 nt, Artificial Sequence
  Description of Artificial Sequence: Synthetic oligonucleotide
uuagucugaaguauauugc

SEQ ID NO: 1940720 - RNA, 19 nt, Artificial Sequence
  Description of Artificial Sequence: Synthetic oligonucleotide
gagauuuuagacaauuucc

SEQ ID NO: 1940721 - RNA, 19 nt, Artificial Sequence
  Description of Artificial Sequence: Synthetic oligonucleotide
acuaaaggcaaagaucacc

SEQ ID NO: 1940722 - RNA, 19 nt, Artificial Sequence
  Description of Artificial Sequence: Synthetic oligonucleotide
auguaugauuuauaauacc

SEQ ID NO: 1940723 - RNA, 19 nt, Artificial Sequence
  Description of Artificial Sequence: Synthetic oligonucleotide
ucauaggcauuuauuaugc

SEQ ID NO: 1940724 - RNA, 19 nt, Artificial Sequence
  Description of Artificial Sequence: Synthetic oligonucleotide
uucauaggcauuuauuaug

SEQ ID NO: 1940725 - RNA, 19 nt, Artificial Sequence
  Description of Artificial Sequence: Synthetic oligonucleotide
ucuucugcgucaaacagug

SEQ ID NO: 1940726 - RNA, 19 nt, Artificial Sequence
  Description of Artificial Sequence: Synthetic oligonucleotide
aaugaguccuaaccaaaag

SEQ ID NO: 1940727 - RNA, 19 nt, Artificial Sequence
  Description of Artificial Sequence: Synthetic oligonucleotide
uucugcgucaaacagugag

SEQ ID NO: 1940728 - RNA, 19 nt, Artificial Sequence
  Description of Artificial Sequence: Synthetic oligonucleotide
gauuuuagacaauuuccag

SEQ ID NO: 1940729 - RNA, 19 nt, Artificial Sequence
  Description of Artificial Sequence: Synthetic oligonucleotide
aauucagcugccuacaaua

SEQ ID NO: 1940730 - RNA, 19 nt, Artificial Sequence
  Description of Artificial Sequence: Synthetic oligonucleotide
uaaucgucaccauacaggc

SEQ ID NO: 1940731 - RNA, 19 nt, Artificial Sequence
  Description of Artificial Sequence: Synthetic oligonucleotide
gaguccauggcacauaggc

SEQ ID NO: 1940732 - RNA, 19 nt, Artificial Sequence
  Description of Artificial Sequence: Synthetic oligonucleotide
uuuucuuaggaaauauccu

SEQ ID NO: 1940733 - RNA, 19 nt, Artificial Sequence
  Description of Artificial Sequence: Synthetic oligonucleotide
caugacagcaacaagauaa

SEQ ID NO: 1940734 - RNA, 19 nt, Artificial Sequence
  Description of Artificial Sequence: Synthetic oligonucleotide
auuuuagacaauuuccaga

SEQ ID NO: 1940735 - RNA, 19 nt, Artificial Sequence
  Description of Artificial Sequence: Synthetic oligonucleotide
uuaggaacugcuuuccgag

SEQ ID NO: 1940736 - RNA, 19 nt, Artificial Sequence
  Description of Artificial Sequence: Synthetic oligonucleotide
ugaggaguugacuuucugg

SEQ ID NO: 1940737 - RNA, 19 nt, Artificial Sequence
  Description of Artificial Sequence: Synthetic oligonucleotide
aucuuagaauguuucauag

SEQ ID NO: 1940738 - RNA, 19 nt, Artificial Sequence
  Description of Artificial Sequence: Synthetic oligonucleotide
ucaucaauaugauuccacc

SEQ ID NO: 1940739 - RNA, 19 nt, Artificial Sequence
  Description of Artificial Sequence: Synthetic oligonucleotide
ugaaguauauugcuuuucu

SEQ ID NO: 1940740 - RNA, 19 nt, Artificial Sequence
  Description of Artificial Sequence: Synthetic oligonucleotide
ucuuagaauguuucauagg

SEQ ID NO: 1940741 - RNA, 19 nt, Artificial Sequence
  Description of Artificial Sequence: Synthetic oligonucleotide
uuuacaccgaauauaccca

SEQ ID NO: 1940742 - RNA, 19 nt, Artificial Sequence
  Description of Artificial Sequence: Synthetic oligonucleotide
auaaucgucaccauacagg

SEQ ID NO: 1940743 - RNA, 19 nt, Artificial Sequence
  Description of Artificial Sequence: Synthetic oligonucleotide
cuuacugcccacuuuacac

SEQ ID NO: 1940744 - RNA, 19 nt, Artificial Sequence
  Description of Artificial Sequence: Synthetic oligonucleotide
ugaaugucaagaaucuuuc

SEQ ID NO: 1940745 - RNA, 19 nt, Artificial Sequence
  Description of Artificial Sequence: Synthetic oligonucleotide
auuuuagauuuucuugguc

SEQ ID NO: 1940746 - RNA, 19 nt, Artificial Sequence
  Description of Artificial Sequence: Synthetic oligonucleotide
aaaagauucuugacucagc

SEQ ID NO: 1940747 - RNA, 19 nt, Artificial Sequence
  Description of Artificial Sequence: Synthetic oligonucleotide
ugaguccuaaccaaaagau

SEQ ID NO: 1940748 - RNA, 19 nt, Artificial Sequence
  Description of Artificial Sequence: Synthetic oligonucleotide
acaccgaauauacccauac

SEQ ID NO: 1940749 - RNA, 19 nt, Artificial Sequence
  Description of Artificial Sequence: Synthetic oligonucleotide
uuacaguagcuacaaaaga

SEQ ID NO: 1940750 - RNA, 19 nt, Artificial Sequence
  Description of Artificial Sequence: Synthetic oligonucleotide
agagaaguuaacacaacac

SEQ ID NO: 1940751 - RNA, 19 nt, Artificial Sequence
  Description of Artificial Sequence: Synthetic oligonucleotide
uagucuaccagugacauuc

SEQ ID NO: 1940752 - RNA, 19 nt, Artificial Sequence
  Description of Artificial Sequence: Synthetic oligonucleotide
agauaugagguagccaugc

SEQ ID NO: 1940753 - RNA, 19 nt, Artificial Sequence
  Description of Artificial Sequence: Synthetic oligonucleotide
caauaugauuccaccaacg

SEQ ID NO: 1940754 - RNA, 19 nt, Artificial Sequence
  Description of Artificial Sequence: Synthetic oligonucleotide
gaaguuaacacaacacccc

SEQ ID NO: 1940755 - RNA, 19 nt, Artificial Sequence
  Description of Artificial Sequence: Synthetic oligonucleotide
uugacucagccucagaaac

SEQ ID NO: 1940756 - RNA, 19 nt, Artificial Sequence
  Description of Artificial Sequence: Synthetic oligonucleotide
uaggcauuuauuaugccaa

SEQ ID NO: 1940757 - RNA, 19 nt, Artificial Sequence
  Description of Artificial Sequence: Synthetic oligonucleotide
cacuuuacaccgaauauac

SEQ ID NO: 1940758 - RNA, 19 nt, Artificial Sequence
  Description of Artificial Sequence: Synthetic oligonucleotide
uagaauguuucauaggcau

SEQ ID NO: 1940759 - RNA, 19 nt, Artificial Sequence
  Description of Artificial Sequence: Synthetic oligonucleotide
uuagaauguuucauaggca

SEQ ID NO: 1940760 - RNA, 19 nt, Artificial Sequence
  Description of Artificial Sequence: Synthetic oligonucleotide
aaguuaacacaacacccca

SEQ ID NO: 1940761 - RNA, 19 nt, Artificial Sequence
  Description of Artificial Sequence: Synthetic oligonucleotide
agaaggaugccacugggug

SEQ ID NO: 1940762 - RNA, 19 nt, Artificial Sequence
  Description of Artificial Sequence: Synthetic oligonucleotide
uuuuaggaacugcuuuccg

SEQ ID NO: 1940763 - RNA, 19 nt, Artificial Sequence
  Description of Artificial Sequence: Synthetic oligonucleotide
caaacagugagacaucuuc

SEQ ID NO: 1940764 - RNA, 19 nt, Artificial Sequence
  Description of Artificial Sequence: Synthetic oligonucleotide
ucacaacauaaucuaaaga

SEQ ID NO: 1940765 - RNA, 19 nt, Artificial Sequence
  Description of Artificial Sequence: Synthetic oligonucleotide
cuacaaaagaauucagcug

SEQ ID NO: 1940766 - RNA, 19 nt, Artificial Sequence
  Description of Artificial Sequence: Synthetic oligonucleotide
augaagucugagcaucccc

SEQ ID NO: 1940767 - RNA, 19 nt, Artificial Sequence
  Description of Artificial Sequence: Synthetic oligonucleotide
auagacuacaaccgcacug

SEQ ID NO: 1940768 - RNA, 19 nt, Artificial Sequence
  Description of Artificial Sequence: Synthetic oligonucleotide
caggcaaugaguccuaacc

SEQ ID NO: 1940769 - RNA, 19 nt, Artificial Sequence
  Description of Artificial Sequence: Synthetic oligonucleotide
aaccgcacugacucgaaag

SEQ ID NO: 1940770 - RNA, 19 nt, Artificial Sequence
  Description of Artificial Sequence: Synthetic oligonucleotide
auagaucuuagaauguuuc

SEQ ID NO: 1940771 - RNA, 19 nt, Artificial Sequence
  Description of Artificial Sequence: Synthetic oligonucleotide
agcuacaaaagaauucagc

SEQ ID NO: 1940772 - RNA, 19 nt, Artificial Sequence
  Description of Artificial Sequence: Synthetic oligonucleotide
agaggagauagacuacaac

SEQ ID NO: 1940773 - RNA, 19 nt, Artificial Sequence
  Description of Artificial Sequence: Synthetic oligonucleotide
ucaauaugauuccaccaac

SEQ ID NO: 1940774 - RNA, 19 nt, Artificial Sequence
  Description of Artificial Sequence: Synthetic oligonucleotide
uagacaauuuccagagaag

SEQ ID NO: 1940775 - RNA, 19 nt, Artificial Sequence
  Description of Artificial Sequence: Synthetic oligonucleotide
uuuaggaacugcuuuccga

SEQ ID NO: 1940776 - RNA, 19 nt, Artificial Sequence
  Description of Artificial Sequence: Synthetic oligonucleotide
accauacaggcaaugaagc

SEQ ID NO: 1940777 - RNA, 19 nt, Artificial Sequence
  Description of Artificial Sequence: Synthetic oligonucleotide
uuugguuuagucugaagua

SEQ ID NO: 1940778 - RNA, 19 nt, Artificial Sequence
  Description of Artificial Sequence: Synthetic oligonucleotide
ucuugacucagccucagaa

SEQ ID NO: 1940779 - RNA, 19 nt, Artificial Sequence
  Description of Artificial Sequence: Synthetic oligonucleotide
uuccagagaaguuaacaca

SEQ ID NO: 1940780 - RNA, 19 nt, Artificial Sequence
  Description of Artificial Sequence: Synthetic oligonucleotide
aggagauagacuacaaccg

SEQ ID NO: 1940781 - RNA, 19 nt, Artificial Sequence
  Description of Artificial Sequence: Synthetic oligonucleotide
uuuccgagauaugagguag

SEQ ID NO: 1940782 - RNA, 19 nt, Artificial Sequence
  Description of Artificial Sequence: Synthetic oligonucleotide
guauauugcuuuucuuagg

SEQ ID NO: 1940783 - RNA, 19 nt, Artificial Sequence
  Description of Artificial Sequence: Synthetic oligonucleotide
uaacacaacaccccacucu

SEQ ID NO: 1940784 - RNA, 19 nt, Artificial Sequence
  Description of Artificial Sequence: Synthetic oligonucleotide
ucuaauaaagacccuuauu

SEQ ID NO: 1940785 - RNA, 19 nt, Artificial Sequence
  Description of Artificial Sequence: Synthetic oligonucleotide
gauuccaacaaaauuuaca

SEQ ID NO: 1940786 - RNA, 19 nt, Artificial Sequence
  Description of Artificial Sequence: Synthetic oligonucleotide
augccaaguauuuaaacaa

SEQ ID NO: 1940787 - RNA, 19 nt, Artificial Sequence
  Description of Artificial Sequence: Synthetic oligonucleotide
ucaauaaauaagacauuua

SEQ ID NO: 1940788 - RNA, 19 nt, Artificial Sequence
  Description of Artificial Sequence: Synthetic oligonucleotide
auauaaaguuauacacugc

SEQ ID NO: 1940789 - RNA, 19 nt, Artificial Sequence
  Description of Artificial Sequence: Synthetic oligonucleotide
guaugauuuauaauacccc

SEQ ID NO: 1940790 - RNA, 19 nt, Artificial Sequence
  Description of Artificial Sequence: Synthetic oligonucleotide
ugagcucugaaugucaaga

SEQ ID NO: 1940791 - RNA, 19 nt, Artificial Sequence
  Description of Artificial Sequence: Synthetic oligonucleotide
guuucauaggcauuuauua

SEQ ID NO: 1940792 - RNA, 19 nt, Artificial Sequence
  Description of Artificial Sequence: Synthetic oligonucleotide
aucgucaccauacaggcaa

SEQ ID NO: 1940793 - RNA, 19 nt, Artificial Sequence
  Description of Artificial Sequence: Synthetic oligonucleotide
augaguccuaaccaaaaga

SEQ ID NO: 1940794 - RNA, 19 nt, Artificial Sequence
  Description of Artificial Sequence: Synthetic oligonucleotide
ucuaccagugacauucuuc

SEQ ID NO: 1940795 - RNA, 19 nt, Artificial Sequence
  Description of Artificial Sequence: Synthetic oligonucleotide
acacugccaagcuacacuc

SEQ ID NO: 1940796 - RNA, 19 nt, Artificial Sequence
  Description of Artificial Sequence: Synthetic oligonucleotide
uguuucauaggcauuuauu

SEQ ID NO: 1940797 - RNA, 19 nt, Artificial Sequence
  Description of Artificial Sequence: Synthetic oligonucleotide
uuaugccaaguauuuaaac

SEQ ID NO: 1940798 - RNA, 19 nt, Artificial Sequence
  Description of Artificial Sequence: Synthetic oligonucleotide
guagcuacaaaagaauuca

SEQ ID NO: 1940799 - RNA, 19 nt, Artificial Sequence
  Description of Artificial Sequence: Synthetic oligonucleotide
ucacucaugaagucugagc

SEQ ID NO: 1940800 - RNA, 19 nt, Artificial Sequence
  Description of Artificial Sequence: Synthetic oligonucleotide
uggacucaaacacccagug

SEQ ID NO: 1940801 - RNA, 19 nt, Artificial Sequence
  Description of Artificial Sequence: Synthetic oligonucleotide
aguuauacacugccaagcu

SEQ ID NO: 1940802 - RNA, 19 nt, Artificial Sequence
  Description of Artificial Sequence: Synthetic oligonucleotide
uacacugccaagcuacacu

SEQ ID NO: 1940803 - RNA, 19 nt, Artificial Sequence
  Description of Artificial Sequence: Synthetic oligonucleotide
auuggacaggcaaugaguc

SEQ ID NO: 1940804 - RNA, 19 nt, Artificial Sequence
  Description of Artificial Sequence: Synthetic oligonucleotide
uccucaucaauaugauucc

SEQ ID NO: 1940805 - RNA, 19 nt, Artificial Sequence
  Description of Artificial Sequence: Synthetic oligonucleotide
uaaccaaaagauucuugac

SEQ ID NO: 1940806 - RNA, 19 nt, Artificial Sequence
  Description of Artificial Sequence: Synthetic oligonucleotide
ugacauucuucacugccca

SEQ ID NO: 1940807 - RNA, 19 nt, Artificial Sequence
  Description of Artificial Sequence: Synthetic oligonucleotide
aagacccuuauucaauaaa

SEQ ID NO: 1940808 - RNA, 19 nt, Artificial Sequence
  Description of Artificial Sequence: Synthetic oligonucleotide
uucuuaggaaauauccuua

SEQ ID NO: 1940809 - RNA, 19 nt, Artificial Sequence
  Description of Artificial Sequence: Synthetic oligonucleotide
aaauagaucuuagaauguu

SEQ ID NO: 1940810 - RNA, 19 nt, Artificial Sequence
  Description of Artificial Sequence: Synthetic oligonucleotide
uggucuauugguugucucc

SEQ ID NO: 1940811 - RNA, 19 nt, Artificial Sequence
  Description of Artificial Sequence: Synthetic oligonucleotide
acugcuuuccgagauauga

SEQ ID NO: 1940812 - RNA, 19 nt, Artificial Sequence
  Description of Artificial Sequence: Synthetic oligonucleotide
aaacaauuacucccauuau

SEQ ID NO: 1940813 - RNA, 19 nt, Artificial Sequence
  Description of Artificial Sequence: Synthetic oligonucleotide
auuacucccauuauuacau

SEQ ID NO: 1940814 - RNA, 19 nt, Artificial Sequence
  Description of Artificial Sequence: Synthetic oligonucleotide
gauggaagaaggaugccac

SEQ ID NO: 1940815 - RNA, 19 nt, Artificial Sequence
  Description of Artificial Sequence: Synthetic oligonucleotide
agauagacuacaaccgcac

SEQ ID NO: 1940816 - RNA, 19 nt, Artificial Sequence
  Description of Artificial Sequence: Synthetic oligonucleotide
ucugcgucaaacagugaga

SEQ ID NO: 1940817 - RNA, 19 nt, Artificial Sequence
  Description of Artificial Sequence: Synthetic oligonucleotide
agacaauuuccagagaagu

SEQ ID NO: 1940818 - RNA, 19 nt, Artificial Sequence
  Description of Artificial Sequence: Synthetic oligonucleotide
ucuuaggaaauauccuuaa

SEQ ID NO: 1940819 - RNA, 19 nt, Artificial Sequence
  Description of Artificial Sequence: Synthetic oligonucleotide
cacucaugaagucugagca

SEQ ID NO: 1940820 - RNA, 19 nt, Artificial Sequence
  Description of Artificial Sequence: Synthetic oligonucleotide
ucaugaagucugagcaucc

SEQ ID NO: 1940821 - RNA, 19 nt, Artificial Sequence
  Description of Artificial Sequence: Synthetic oligonucleotide
aggaguugacuuucuggac

SEQ ID NO: 1940822 - RNA, 19 nt, Artificial Sequence
  Description of Artificial Sequence: Synthetic oligonucleotide
accuugcagcaccacaccc

SEQ ID NO: 1940823 - RNA, 19 nt, Artificial Sequence
  Description of Artificial Sequence: Synthetic oligonucleotide
aguucuucuuacugcccac

SEQ ID NO: 1940824 - RNA, 19 nt, Artificial Sequence
  Description of Artificial Sequence: Synthetic oligonucleotide
ucuuacugcccacuuuaca

SEQ ID NO: 1940825 - RNA, 19 nt, Artificial Sequence
  Description of Artificial Sequence: Synthetic oligonucleotide
cuaccagugacauucuuca

SEQ ID NO: 1940826 - RNA, 19 nt, Artificial Sequence
  Description of Artificial Sequence: Synthetic oligonucleotide
cacuaagagauuuuagaca

SEQ ID NO: 1940827 - RNA, 19 nt, Artificial Sequence
  Description of Artificial Sequence: Synthetic oligonucleotide
ucacucugaaggagaagag

SEQ ID NO: 1940828 - RNA, 19 nt, Artificial Sequence
  Description of Artificial Sequence: Synthetic oligonucleotide
acauaaucuaaagauucca

SEQ ID NO: 1940829 - RNA, 19 nt, Artificial Sequence
  Description of Artificial Sequence: Synthetic oligonucleotide
acaaaagaauucagcugcc

SEQ ID NO: 1940830 - RNA, 19 nt, Artificial Sequence
  Description of Artificial Sequence: Synthetic oligonucleotide
uaaguucuucuuacugccc

SEQ ID NO: 1940831 - RNA, 19 nt, Artificial Sequence
  Description of Artificial Sequence: Synthetic oligonucleotide
cccuuauucaauaaauaag

SEQ ID NO: 1940832 - RNA, 19 nt, Artificial Sequence
  Description of Artificial Sequence: Synthetic oligonucleotide
uuuaaacaauuacucccau

SEQ ID NO: 1940833 - RNA, 19 nt, Artificial Sequence
  Description of Artificial Sequence: Synthetic oligonucleotide
aaccauuagucuaccagug

SEQ ID NO: 1940834 - RNA, 19 nt, Artificial Sequence
  Description of Artificial Sequence: Synthetic oligonucleotide
aauuuccagagaaguuaac

SEQ ID NO: 1940835 - RNA, 19 nt, Artificial Sequence
  Description of Artificial Sequence: Synthetic oligonucleotide
uggacaggcaaugaguccu

SEQ ID NO: 1940836 - RNA, 19 nt, Artificial Sequence
  Description of Artificial Sequence: Synthetic oligonucleotide
acaauuacucccauuauua

SEQ ID NO: 1940837 - RNA, 19 nt, Artificial Sequence
  Description of Artificial Sequence: Synthetic oligonucleotide
ucauuaacccaaugagcac

SEQ ID NO: 1940838 - RNA, 19 nt, Artificial Sequence
  Description of Artificial Sequence: Synthetic oligonucleotide
uuuagacaauuuccagaga

SEQ ID NO: 1940839 - RNA, 19 nt, Artificial Sequence
  Description of Artificial Sequence: Synthetic oligonucleotide
ucaaacacccaguggcucu

SEQ ID NO: 1940840 - RNA, 19 nt, Artificial Sequence
  Description of Artificial Sequence: Synthetic oligonucleotide
aauagaucuuagaauguuu

SEQ ID NO: 1940841 - RNA, 19 nt, Artificial Sequence
  Description of Artificial Sequence: Synthetic oligonucleotide
ugacucgaaagaacagaug

SEQ ID NO: 1940842 - RNA, 19 nt, Artificial Sequence
  Description of Artificial Sequence: Synthetic oligonucleotide
ccgaauauacccauacagg

SEQ ID NO: 1940843 - RNA, 19 nt, Artificial Sequence
  Description of Artificial Sequence: Synthetic oligonucleotide
auaugauuccaccaacgua

SEQ ID NO: 1940844 - RNA, 19 nt, Artificial Sequence
  Description of Artificial Sequence: Synthetic oligonucleotide
gaagucugagcauccccag

SEQ ID NO: 1940845 - RNA, 19 nt, Artificial Sequence
  Description of Artificial Sequence: Synthetic oligonucleotide
auccuuaauacaaauguau

SEQ ID NO: 1940846 - RNA, 19 nt, Artificial Sequence
  Description of Artificial Sequence: Synthetic oligonucleotide
uaggccaaccauuagucua

SEQ ID NO: 1940847 - RNA, 19 nt, Artificial Sequence
  Description of Artificial Sequence: Synthetic oligonucleotide
gcacuaagagauuuuagac

SEQ ID NO: 1940848 - RNA, 19 nt, Artificial Sequence
  Description of Artificial Sequence: Synthetic oligonucleotide
aggcaaugaguccuaacca

SEQ ID NO: 1940849 - RNA, 19 nt, Artificial Sequence
  Description of Artificial Sequence: Synthetic oligonucleotide
uugguugucuccucuucug

SEQ ID NO: 1940850 - RNA, 19 nt, Artificial Sequence
  Description of Artificial Sequence: Synthetic oligonucleotide
auuagucuaccagugacau

SEQ ID NO: 1940851 - RNA, 19 nt, Artificial Sequence
  Description of Artificial Sequence: Synthetic oligonucleotide
cauaaucuaaagauuccaa

SEQ ID NO: 1940852 - RNA, 19 nt, Artificial Sequence
  Description of Artificial Sequence: Synthetic oligonucleotide
acaggcaaugaguccuaac

SEQ ID NO: 1940853 - RNA, 19 nt, Artificial Sequence
  Description of Artificial Sequence: Synthetic oligonucleotide
gcacuaaaggcaaagauca

SEQ ID NO: 1940854 - RNA, 19 nt, Artificial Sequence
  Description of Artificial Sequence: Synthetic oligonucleotide
caucaauaugauuccacca

SEQ ID NO: 1940855 - RNA, 19 nt, Artificial Sequence
  Description of Artificial Sequence: Synthetic oligonucleotide
ugccaaguauuuaaacaau

SEQ ID NO: 1940856 - RNA, 19 nt, Artificial Sequence
  Description of Artificial Sequence: Synthetic oligonucleotide
uuaaacaauuacucccauu

SEQ ID NO: 1940857 - RNA, 19 nt, Artificial Sequence
  Description of Artificial Sequence: Synthetic oligonucleotide
uaguuuacauuugguuuag

SEQ ID NO: 1940858 - RNA, 19 nt, Artificial Sequence
  Description of Artificial Sequence: Synthetic oligonucleotide
ggagauagacuacaaccgc

SEQ ID NO: 1940859 - RNA, 19 nt, Artificial Sequence
  Description of Artificial Sequence: Synthetic oligonucleotide
auucuuauuaaaagguaau

SEQ ID NO: 1940860 - RNA, 19 nt, Artificial Sequence
  Description of Artificial Sequence: Synthetic oligonucleotide
acguaggccaaccauuagu

SEQ ID NO: 1940861 - RNA, 19 nt, Artificial Sequence
  Description of Artificial Sequence: Synthetic oligonucleotide
caacaagauaaucgucacc

SEQ ID NO: 1940862 - RNA, 19 nt, Artificial Sequence
  Description of Artificial Sequence: Synthetic oligonucleotide
agauggaagaaggaugcca

SEQ ID NO: 1940863 - RNA, 19 nt, Artificial Sequence
  Description of Artificial Sequence: Synthetic oligonucleotide
ugguugucuccucuucugc

SEQ ID NO: 1940864 - RNA, 19 nt, Artificial Sequence
  Description of Artificial Sequence: Synthetic oligonucleotide
aguuaacacaacaccccac

SEQ ID NO: 1940865 - RNA, 19 nt, Artificial Sequence
  Description of Artificial Sequence: Synthetic oligonucleotide
gaguugacuuucuggacuc

SEQ ID NO: 1940866 - RNA, 19 nt, Artificial Sequence
  Description of Artificial Sequence: Synthetic oligonucleotide
caacaccccacucugcagc

SEQ ID NO: 1940867 - RNA, 19 nt, Artificial Sequence
  Description of Artificial Sequence: Synthetic oligonucleotide
agauaaucgucaccauaca

SEQ ID NO: 1940868 - RNA, 19 nt, Artificial Sequence
  Description of Artificial Sequence: Synthetic oligonucleotide
cauaggcauuuauuaugcc

SEQ ID NO: 1940869 - RNA, 19 nt, Artificial Sequence
  Description of Artificial Sequence: Synthetic oligonucleotide
agauuccaacaaaauuuac

SEQ ID NO: 1940870 - RNA, 19 nt, Artificial Sequence
  Description of Artificial Sequence: Synthetic oligonucleotide
ucugaaguauauugcuuuu

SEQ ID NO: 1940871 - RNA, 19 nt, Artificial Sequence
  Description of Artificial Sequence: Synthetic oligonucleotide
cagucuuguugucuugagg

SEQ ID NO: 1940872 - RNA, 19 nt, Artificial Sequence
  Description of Artificial Sequence: Synthetic oligonucleotide
ugucaagaaucuuucuguu

SEQ ID NO: 1940873 - RNA, 19 nt, Artificial Sequence
  Description of Artificial Sequence: Synthetic oligonucleotide
agucacaugacagcaacaa

SEQ ID NO: 1940874 - RNA, 19 nt, Artificial Sequence
  Description of Artificial Sequence: Synthetic oligonucleotide
cagagaaguuaacacaaca

SEQ ID NO: 1940875 - RNA, 19 nt, Artificial Sequence
  Description of Artificial Sequence: Synthetic oligonucleotide
ccaaccauuagucuaccag

SEQ ID NO: 1940876 - RNA, 19 nt, Artificial Sequence
  Description of Artificial Sequence: Synthetic oligonucleotide
ugguuuagucugaaguaua

SEQ ID NO: 1940877 - RNA, 19 nt, Artificial Sequence
  Description of Artificial Sequence: Synthetic oligonucleotide
auaaagacccuuauucaau

SEQ ID NO: 1940878 - RNA, 19 nt, Artificial Sequence
  Description of Artificial Sequence: Synthetic oligonucleotide
guuuuguuuuaggaacugc

SEQ ID NO: 1940879 - RNA, 19 nt, Artificial Sequence
  Description of Artificial Sequence: Synthetic oligonucleotide
agacuacaaccgcacugac

SEQ ID NO: 1940880 - RNA, 19 nt, Artificial Sequence
  Description of Artificial Sequence: Synthetic oligonucleotide
uccgagauaugagguagcc

SEQ ID NO: 1940881 - RNA, 19 nt, Artificial Sequence
  Description of Artificial Sequence: Synthetic oligonucleotide
gguugucuccucuucugcg

SEQ ID NO: 1940882 - RNA, 19 nt, Artificial Sequence
  Description of Artificial Sequence: Synthetic oligonucleotide
ugauuccaccaacguaggc

SEQ ID NO: 1940883 - RNA, 19 nt, Artificial Sequence
  Description of Artificial Sequence: Synthetic oligonucleotide
aacaccccacucugcagca

SEQ ID NO: 1940884 - RNA, 19 nt, Artificial Sequence
  Description of Artificial Sequence: Synthetic oligonucleotide
aagucugagcauccccagu

SEQ ID NO: 1940885 - RNA, 19 nt, Artificial Sequence
  Description of Artificial Sequence: Synthetic oligonucleotide
guuaacacaacaccccacu

SEQ ID NO: 1940886 - RNA, 19 nt, Artificial Sequence
  Description of Artificial Sequence: Synthetic oligonucleotide
auauucuuauuaaaaggua

SEQ ID NO: 1940887 - RNA, 19 nt, Artificial Sequence
  Description of Artificial Sequence: Synthetic oligonucleotide
uucacucaugaagucugag

SEQ ID NO: 1940888 - RNA, 19 nt, Artificial Sequence
  Description of Artificial Sequence: Synthetic oligonucleotide
cauuagucuaccagugaca

SEQ ID NO: 1940889 - RNA, 19 nt, Artificial Sequence
  Description of Artificial Sequence: Synthetic oligonucleotide
aggccaaccauuagucuac

SEQ ID NO: 1940890 - RNA, 19 nt, Artificial Sequence
  Description of Artificial Sequence: Synthetic oligonucleotide
uuacaccgaauauacccau

SEQ ID NO: 1940891 - RNA, 19 nt, Artificial Sequence
  Description of Artificial Sequence: Synthetic oligonucleotide
cacucugaaggagaagagc

SEQ ID NO: 1940892 - RNA, 19 nt, Artificial Sequence
  Description of Artificial Sequence: Synthetic oligonucleotide
aggaacugcuuuccgagau

SEQ ID NO: 1940893 - RNA, 19 nt, Artificial Sequence
  Description of Artificial Sequence: Synthetic oligonucleotide
gagcacuaagagauuuuag

SEQ ID NO: 1940894 - RNA, 19 nt, Artificial Sequence
  Description of Artificial Sequence: Synthetic oligonucleotide
accaacguaggccaaccau

SEQ ID NO: 1940895 - RNA, 19 nt, Artificial Sequence
  Description of Artificial Sequence: Synthetic oligonucleotide
uuccgagauaugagguagc

SEQ ID NO: 1940896 - RNA, 19 nt, Artificial Sequence
  Description of Artificial Sequence: Synthetic oligonucleotide
accgcacugacucgaaaga

SEQ ID NO: 1940897 - RNA, 19 nt, Artificial Sequence
  Description of Artificial Sequence: Synthetic oligonucleotide
ugccaagcuacacucuaau

SEQ ID NO: 1940898 - RNA, 19 nt, Artificial Sequence
  Description of Artificial Sequence: Synthetic oligonucleotide
aagagcgcacuaaaggcaa

SEQ ID NO: 1940899 - RNA, 19 nt, Artificial Sequence
  Description of Artificial Sequence: Synthetic oligonucleotide
uucuuacugcccacuuuac

SEQ ID NO: 1940900 - RNA, 19 nt, Artificial Sequence
  Description of Artificial Sequence: Synthetic oligonucleotide
uacaaccgcacugacucga

SEQ ID NO: 1940901 - RNA, 19 nt, Artificial Sequence
  Description of Artificial Sequence: Synthetic oligonucleotide
aucacccacaggauuggac

SEQ ID NO: 1940902 - RNA, 19 nt, Artificial Sequence
  Description of Artificial Sequence: Synthetic oligonucleotide
ccuacaauaguuuacauuu

SEQ ID NO: 1940903 - RNA, 19 nt, Artificial Sequence
  Description of Artificial Sequence: Synthetic oligonucleotide
gauuggacaggcaaugagu

SEQ ID NO: 1940904 - RNA, 19 nt, Artificial Sequence
  Description of Artificial Sequence: Synthetic oligonucleotide
cugcgucaaacagugagac

SEQ ID NO: 1940905 - RNA, 19 nt, Artificial Sequence
  Description of Artificial Sequence: Synthetic oligonucleotide
agcuacacucuaauaaaga

SEQ ID NO: 1940906 - RNA, 19 nt, Artificial Sequence
  Description of Artificial Sequence: Synthetic oligonucleotide
aagaaggaugccacugggu

SEQ ID NO: 1940907 - RNA, 19 nt, Artificial Sequence
  Description of Artificial Sequence: Synthetic oligonucleotide
ccauuagucuaccagugac

SEQ ID NO: 1940908 - RNA, 19 nt, Artificial Sequence
  Description of Artificial Sequence: Synthetic oligonucleotide
agaucacccacaggauugg

SEQ ID NO: 1940909 - RNA, 19 nt, Artificial Sequence
  Description of Artificial Sequence: Synthetic oligonucleotide
cauuuauuaugccaaguau

SEQ ID NO: 1940910 - RNA, 19 nt, Artificial Sequence
  Description of Artificial Sequence: Synthetic oligonucleotide
auauacccauacagguugg

SEQ ID NO: 1940911 - RNA, 19 nt, Artificial Sequence
  Description of Artificial Sequence: Synthetic oligonucleotide
caggauuggacaggcaaug

SEQ ID NO: 1940912 - RNA, 19 nt, Artificial Sequence
  Description of Artificial Sequence: Synthetic oligonucleotide
auuauuucauuaacccaau

SEQ ID NO: 1940913 - RNA, 19 nt, Artificial Sequence
  Description of Artificial Sequence: Synthetic oligonucleotide
uauacccauacagguuggc

SEQ ID NO: 1940914 - RNA, 19 nt, Artificial Sequence
  Description of Artificial Sequence: Synthetic oligonucleotide
ucaaacagugagacaucuu

SEQ ID NO: 1940915 - RNA, 19 nt, Artificial Sequence
  Description of Artificial Sequence: Synthetic oligonucleotide
ggacucaaacacccagugg

SEQ ID NO: 1940916 - RNA, 19 nt, Artificial Sequence
  Description of Artificial Sequence: Synthetic oligonucleotide
gagauaugagguagccaug

SEQ ID NO: 1940917 - RNA, 19 nt, Artificial Sequence
  Description of Artificial Sequence: Synthetic oligonucleotide
ccaagcuacacucuaauaa

SEQ ID NO: 1940918 - RNA, 19 nt, Artificial Sequence
  Description of Artificial Sequence: Synthetic oligonucleotide
uuggucuauugguugucuc

SEQ ID NO: 1940919 - RNA, 19 nt, Artificial Sequence
  Description of Artificial Sequence: Synthetic oligonucleotide
caugaucaccacagccagc

SEQ ID NO: 1940920 - RNA, 19 nt, Artificial Sequence
  Description of Artificial Sequence: Synthetic oligonucleotide
acaagauaaucgucaccau

SEQ ID NO: 1940921 - RNA, 19 nt, Artificial Sequence
  Description of Artificial Sequence: Synthetic oligonucleotide
gagcgcacuaaaggcaaag

SEQ ID NO: 1940922 - RNA, 19 nt, Artificial Sequence
  Description of Artificial Sequence: Synthetic oligonucleotide
cuacaaccgcacugacucg

SEQ ID NO: 1940923 - RNA, 19 nt, Artificial Sequence
  Description of Artificial Sequence: Synthetic oligonucleotide
caaccauuagucuaccagu

SEQ ID NO: 1940924 - RNA, 19 nt, Artificial Sequence
  Description of Artificial Sequence: Synthetic oligonucleotide
ucauugcuguccugcgaca

SEQ ID NO: 1940925 - RNA, 19 nt, Artificial Sequence
  Description of Artificial Sequence: Synthetic oligonucleotide
caaugaguccuaaccaaaa

SEQ ID NO: 1940926 - RNA, 19 nt, Artificial Sequence
  Description of Artificial Sequence: Synthetic oligonucleotide
ccccauuauaacaagaaaa

SEQ ID NO: 1940927 - RNA, 19 nt, Artificial Sequence
  Description of Artificial Sequence: Synthetic oligonucleotide
ugcgucaaacagugagaca

SEQ ID NO: 1940928 - RNA, 19 nt, Artificial Sequence
  Description of Artificial Sequence: Synthetic oligonucleotide
uaggcuccaucuucacuca

SEQ ID NO: 1940929 - RNA, 19 nt, Artificial Sequence
  Description of Artificial Sequence: Synthetic oligonucleotide
gcauuuauuaugccaagua

SEQ ID NO: 1940930 - RNA, 19 nt, Artificial Sequence
  Description of Artificial Sequence: Synthetic oligonucleotide
cacuucacucugaaggaga

SEQ ID NO: 1940931 - RNA, 19 nt, Artificial Sequence
  Description of Artificial Sequence: Synthetic oligonucleotide
agguuggcaccuugcagca

SEQ ID NO: 1940932 - RNA, 19 nt, Artificial Sequence
  Description of Artificial Sequence: Synthetic oligonucleotide
gauucuugacucagccuca

SEQ ID NO: 1940933 - RNA, 19 nt, Artificial Sequence
  Description of Artificial Sequence: Synthetic oligonucleotide
aggcaaugaagcugcugcu

SEQ ID NO: 1940934 - RNA, 19 nt, Artificial Sequence
  Description of Artificial Sequence: Synthetic oligonucleotide
acugcccaaaagucacaug

SEQ ID NO: 1940935 - RNA, 19 nt, Artificial Sequence
  Description of Artificial Sequence: Synthetic oligonucleotide
auacccauacagguuggca

SEQ ID NO: 1940936 - RNA, 19 nt, Artificial Sequence
  Description of Artificial Sequence: Synthetic oligonucleotide
acucgaaagaacagaugga

SEQ ID NO: 1940937 - RNA, 19 nt, Artificial Sequence
  Description of Artificial Sequence: Synthetic oligonucleotide
uacaccgaauauacccaua

SEQ ID NO: 1940938 - RNA, 19 nt, Artificial Sequence
  Description of Artificial Sequence: Synthetic oligonucleotide
ccuaaccaaaagauucuug

SEQ ID NO: 1940939 - RNA, 19 nt, Artificial Sequence
  Description of Artificial Sequence: Synthetic oligonucleotide
ccaugaucaccacagccag

SEQ ID NO: 1940940 - RNA, 19 nt, Artificial Sequence
  Description of Artificial Sequence: Synthetic oligonucleotide
ugacagcaacaagauaauc

SEQ ID NO: 1940941 - RNA, 19 nt, Artificial Sequence
  Description of Artificial Sequence: Synthetic oligonucleotide
acucuaauaaagacccuua

SEQ ID NO: 1940942 - RNA, 19 nt, Artificial Sequence
  Description of Artificial Sequence: Synthetic oligonucleotide
cugccuacaauaguuuaca

SEQ ID NO: 1940943 - RNA, 19 nt, Artificial Sequence
  Description of Artificial Sequence: Synthetic oligonucleotide
gacccuuauucaauaaaua

SEQ ID NO: 1940944 - RNA, 19 nt, Artificial Sequence
  Description of Artificial Sequence: Synthetic oligonucleotide
agcugccuacaauaguuua

SEQ ID NO: 1940945 - RNA, 19 nt, Artificial Sequence
  Description of Artificial Sequence: Synthetic oligonucleotide
uagccaugcugguuaaguu

SEQ ID NO: 1940946 - RNA, 19 nt, Artificial Sequence
  Description of Artificial Sequence: Synthetic oligonucleotide
aaucgucaccauacaggca

SEQ ID NO: 1940947 - RNA, 19 nt, Artificial Sequence
  Description of Artificial Sequence: Synthetic oligonucleotide
gauagacuacaaccgcacu

SEQ ID NO: 1940948 - RNA, 19 nt, Artificial Sequence
  Description of Artificial Sequence: Synthetic oligonucleotide
ugccuacaauaguuuacau

SEQ ID NO: 1940949 - RNA, 19 nt, Artificial Sequence
  Description of Artificial Sequence: Synthetic oligonucleotide
cauuaacccaaugagcacu

SEQ ID NO: 1940950 - RNA, 19 nt, Artificial Sequence
  Description of Artificial Sequence: Synthetic oligonucleotide
caccuugcagcaccacacc

SEQ ID NO: 1940951 - RNA, 19 nt, Artificial Sequence
  Description of Artificial Sequence: Synthetic oligonucleotide
uccuaaccaaaagauucuu

SEQ ID NO: 1940952 - RNA, 19 nt, Artificial Sequence
  Description of Artificial Sequence: Synthetic oligonucleotide
cuuuccgagauaugaggua

SEQ ID NO: 1940953 - RNA, 19 nt, Artificial Sequence
  Description of Artificial Sequence: Synthetic oligonucleotide
uaccagugacauucuucac

SEQ ID NO: 1940954 - RNA, 19 nt, Artificial Sequence
  Description of Artificial Sequence: Synthetic oligonucleotide
ggaguugacuuucuggacu

SEQ ID NO: 1940955 - RNA, 19 nt, Artificial Sequence
  Description of Artificial Sequence: Synthetic oligonucleotide
cucaaacacccaguggcuc

SEQ ID NO: 1940956 - RNA, 19 nt, Artificial Sequence
  Description of Artificial Sequence: Synthetic oligonucleotide
agcauccccaguguuuugu

SEQ ID NO: 1940957 - RNA, 19 nt, Artificial Sequence
  Description of Artificial Sequence: Synthetic oligonucleotide
gaauauacccauacagguu

SEQ ID NO: 1940958 - RNA, 19 nt, Artificial Sequence
  Description of Artificial Sequence: Synthetic oligonucleotide
agucugaaguauauugcuu

SEQ ID NO: 1940959 - RNA, 19 nt, Artificial Sequence
  Description of Artificial Sequence: Synthetic oligonucleotide
gaauucagcugccuacaau

SEQ ID NO: 1940960 - RNA, 19 nt, Artificial Sequence
  Description of Artificial Sequence: Synthetic oligonucleotide
gauaugagguagccaugcu

SEQ ID NO: 1940961 - RNA, 19 nt, Artificial Sequence
  Description of Artificial Sequence: Synthetic oligonucleotide
uuacucccauuauuacaua

SEQ ID NO: 1940962 - RNA, 19 nt, Artificial Sequence
  Description of Artificial Sequence: Synthetic oligonucleotide
cugacucgaaagaacagau

SEQ ID NO: 1940963 - RNA, 19 nt, Artificial Sequence
  Description of Artificial Sequence: Synthetic oligonucleotide
cacaugacagcaacaagau

SEQ ID NO: 1940964 - RNA, 19 nt, Artificial Sequence
  Description of Artificial Sequence: Synthetic oligonucleotide
cagaaacagucuuguuguc

SEQ ID NO: 1940965 - RNA, 19 nt, Artificial Sequence
  Description of Artificial Sequence: Synthetic oligonucleotide
uccaccaacguaggccaac

SEQ ID NO: 1940966 - RNA, 19 nt, Artificial Sequence
  Description of Artificial Sequence: Synthetic oligonucleotide
caacguaggccaaccauua

SEQ ID NO: 1940967 - RNA, 19 nt, Artificial Sequence
  Description of Artificial Sequence: Synthetic oligonucleotide
auuaacccaaugagcacua

SEQ ID NO: 1940968 - RNA, 19 nt, Artificial Sequence
  Description of Artificial Sequence: Synthetic oligonucleotide
agcgcacuaaaggcaaaga

SEQ ID NO: 1940969 - RNA, 19 nt, Artificial Sequence
  Description of Artificial Sequence: Synthetic oligonucleotide
gcccaaaagucacaugaca

SEQ ID NO: 1940970 - RNA, 19 nt, Artificial Sequence
  Description of Artificial Sequence: Synthetic oligonucleotide
agaauguuucauaggcauu

SEQ ID NO: 1940971 - RNA, 19 nt, Artificial Sequence
  Description of Artificial Sequence: Synthetic oligonucleotide
aacugcuuuccgagauaug

SEQ ID NO: 1940972 - RNA, 19 nt, Artificial Sequence
  Description of Artificial Sequence: Synthetic oligonucleotide
guagccaugcugguuaagu

SEQ ID NO: 1940973 - RNA, 19 nt, Artificial Sequence
  Description of Artificial Sequence: Synthetic oligonucleotide
guugucuccucuucugcgu

SEQ ID NO: 1940974 - RNA, 19 nt, Artificial Sequence
  Description of Artificial Sequence: Synthetic oligonucleotide
gucaaacagugagacaucu

SEQ ID NO: 1940975 - RNA, 19 nt, Artificial Sequence
  Description of Artificial Sequence: Synthetic oligonucleotide
cagacugagcucugaaugu

SEQ ID NO: 1940976 - RNA, 19 nt, Artificial Sequence
  Description of Artificial Sequence: Synthetic oligonucleotide
gcugccuacaauaguuuac

SEQ ID NO: 1940977 - RNA, 19 nt, Artificial Sequence
  Description of Artificial Sequence: Synthetic oligonucleotide
uacaggcaaugaagcugcu

SEQ ID NO: 1940978 - RNA, 19 nt, Artificial Sequence
  Description of Artificial Sequence: Synthetic oligonucleotide
gcgucaaacagugagacau

SEQ ID NO: 1940979 - RNA, 19 nt, Artificial Sequence
  Description of Artificial Sequence: Synthetic oligonucleotide
acauuugguuuagucugaa

SEQ ID NO: 1940980 - RNA, 19 nt, Artificial Sequence
  Description of Artificial Sequence: Synthetic oligonucleotide
cacccaugaucaccacagc

SEQ ID NO: 1940981 - RNA, 19 nt, Artificial Sequence
  Description of Artificial Sequence: Synthetic oligonucleotide
cgaauauacccauacaggu

SEQ ID NO: 1940982 - RNA, 19 nt, Artificial Sequence
  Description of Artificial Sequence: Synthetic oligonucleotide
uuaacccaaugagcacuaa

SEQ ID NO: 1940983 - RNA, 19 nt, Artificial Sequence
  Description of Artificial Sequence: Synthetic oligonucleotide
caccgaauauacccauaca

SEQ ID NO: 1940984 - RNA, 19 nt, Artificial Sequence
  Description of Artificial Sequence: Synthetic oligonucleotide
cucuaauaaagacccuuau

SEQ ID NO: 1940985 - RNA, 19 nt, Artificial Sequence
  Description of Artificial Sequence: Synthetic oligonucleotide
guugacuuucuggacucaa

SEQ ID NO: 1940986 - RNA, 19 nt, Artificial Sequence
  Description of Artificial Sequence: Synthetic oligonucleotide
cagaggagauagacuacaa

SEQ ID NO: 1940987 - RNA, 19 nt, Artificial Sequence
  Description of Artificial Sequence: Synthetic oligonucleotide
ucgucaccauacaggcaau

SEQ ID NO: 1940988 - RNA, 19 nt, Artificial Sequence
  Description of Artificial Sequence: Synthetic oligonucleotide
cuuaggaaauauccuuaau

SEQ ID NO: 1940989 - RNA, 19 nt, Artificial Sequence
  Description of Artificial Sequence: Synthetic oligonucleotide
guccuaaccaaaagauucu

SEQ ID NO: 1940990 - RNA, 19 nt, Artificial Sequence
  Description of Artificial Sequence: Synthetic oligonucleotide
gagacaucuucagugucau

SEQ ID NO: 1940991 - RNA, 19 nt, Artificial Sequence
  Description of Artificial Sequence: Synthetic oligonucleotide
cgagauaugagguagccau

SEQ ID NO: 1940992 - RNA, 19 nt, Artificial Sequence
  Description of Artificial Sequence: Synthetic oligonucleotide
cgcacugacucgaaagaac

SEQ ID NO: 1940993 - RNA, 19 nt, Artificial Sequence
  Description of Artificial Sequence: Synthetic oligonucleotide
cuggacucaaacacccagu

SEQ ID NO: 1940994 - RNA, 19 nt, Artificial Sequence
  Description of Artificial Sequence: Synthetic oligonucleotide
gacuacaaccgcacugacu

SEQ ID NO: 1940995 - RNA, 19 nt, Artificial Sequence
  Description of Artificial Sequence: Synthetic oligonucleotide
augagcacuaagagauuuu

SEQ ID NO: 1940996 - RNA, 19 nt, Artificial Sequence
  Description of Artificial Sequence: Synthetic oligonucleotide
acccaguggcucuucccau

SEQ ID NO: 1940997 - RNA, 19 nt, Artificial Sequence
  Description of Artificial Sequence: Synthetic oligonucleotide
gcccacuuuacaccgaaua

SEQ ID NO: 1940998 - RNA, 19 nt, Artificial Sequence
  Description of Artificial Sequence: Synthetic oligonucleotide
gaguccuaaccaaaagauu

SEQ ID NO: 1940999 - RNA, 19 nt, Artificial Sequence
  Description of Artificial Sequence: Synthetic oligonucleotide
acacucuaauaaagacccu

SEQ ID NO: 1941000 - RNA, 19 nt, Artificial Sequence
  Description of Artificial Sequence: Synthetic oligonucleotide
cuugcagcaccacacccau

SEQ ID NO: 1941001 - RNA, 19 nt, Artificial Sequence
  Description of Artificial Sequence: Synthetic oligonucleotide
cacucuaauaaagacccuu

SEQ ID NO: 1941002 - RNA, 19 nt, Artificial Sequence
  Description of Artificial Sequence: Synthetic oligonucleotide
cugccaagcuacacucuaa

SEQ ID NO: 1941003 - RNA, 19 nt, Artificial Sequence
  Description of Artificial Sequence: Synthetic oligonucleotide
gaucacccacaggauugga

SEQ ID NO: 1941004 - RNA, 19 nt, Artificial Sequence
  Description of Artificial Sequence: Synthetic oligonucleotide
cauugcuguccugcgacaa

SEQ ID NO: 1941005 - RNA, 19 nt, Artificial Sequence
  Description of Artificial Sequence: Synthetic oligonucleotide
agucuaccagugacauucu

SEQ ID NO: 1941006 - RNA, 19 nt, Artificial Sequence
  Description of Artificial Sequence: Synthetic oligonucleotide
cugcccacuuuacaccgaa

SEQ ID NO: 1941007 - RNA, 19 nt, Artificial Sequence
  Description of Artificial Sequence: Synthetic oligonucleotide
gguuuagucugaaguauau

SEQ ID NO: 1941008 - RNA, 19 nt, Artificial Sequence
  Description of Artificial Sequence: Synthetic oligonucleotide
gccuacaauaguuuacauu

SEQ ID NO: 1941009 - RNA, 19 nt, Artificial Sequence
  Description of Artificial Sequence: Synthetic oligonucleotide
gcuuuccgagauaugaggu

SEQ ID NO: 1941010 - RNA, 19 nt, Artificial Sequence
  Description of Artificial Sequence: Synthetic oligonucleotide
gccacugggugucugauuu

SEQ ID NO: 1941011 - RNA, 19 nt, Artificial Sequence
  Description of Artificial Sequence: Synthetic oligonucleotide
cuuggucuauugguugucu

SEQ ID NO: 1941012 - RNA, 19 nt, Artificial Sequence
  Description of Artificial Sequence: Synthetic oligonucleotide
ccaccaacguaggccaacc

SEQ ID NO: 1941013 - RNA, 19 nt, Artificial Sequence
  Description of Artificial Sequence: Synthetic oligonucleotide
ggcauuuauuaugccaagu

SEQ ID NO: 1941014 - RNA, 19 nt, Artificial Sequence
  Description of Artificial Sequence: Synthetic oligonucleotide
ggaacugcuuuccgagaua

SEQ ID NO: 1941015 - RNA, 19 nt, Artificial Sequence
  Description of Artificial Sequence: Synthetic oligonucleotide
gcgcacuaaaggcaaagau

SEQ ID NO: 1941016 - RNA, 19 nt, Artificial Sequence
  Description of Artificial Sequence: Synthetic oligonucleotide
gguagccaugcugguuaag

SEQ ID NO: 1941017 - RNA, 19 nt, Artificial Sequence
  Description of Artificial Sequence: Synthetic oligonucleotide
cuucugcgucaaacaguga

SEQ ID NO: 1941018 - RNA, 19 nt, Artificial Sequence
  Description of Artificial Sequence: Synthetic oligonucleotide
caccaacguaggccaacca

SEQ ID NO: 1941019 - RNA, 19 nt, Artificial Sequence
  Description of Artificial Sequence: Synthetic oligonucleotide
agcucacagaggagauaga

SEQ ID NO: 1941020 - RNA, 19 nt, Artificial Sequence
  Description of Artificial Sequence: Synthetic oligonucleotide
gccaagcuacacucuaaua

SEQ ID NO: 1941021 - RNA, 19 nt, Artificial Sequence
  Description of Artificial Sequence: Synthetic oligonucleotide
cagccucagaaacagucuu

SEQ ID NO: 1941022 - RNA, 19 nt, Artificial Sequence
  Description of Artificial Sequence: Synthetic oligonucleotide
cgucaaacagugagacauc

SEQ ID NO: 1941023 - RNA, 19 nt, Artificial Sequence
  Description of Artificial Sequence: Synthetic oligonucleotide
agagcgcacuaaaggcaaa

SEQ ID NO: 1941024 - RNA, 19 nt, Artificial Sequence
  Description of Artificial Sequence: Synthetic oligonucleotide
ccauacaggcaaugaagcu

SEQ ID NO: 1941025 - RNA, 19 nt, Artificial Sequence
  Description of Artificial Sequence: Synthetic oligonucleotide
gccaaccauuagucuacca

SEQ ID NO: 1941026 - RNA, 19 nt, Artificial Sequence
  Description of Artificial Sequence: Synthetic oligonucleotide
ggccaaccauuagucuacc

SEQ ID NO: 1941027 - RNA, 19 nt, Artificial Sequence
  Description of Artificial Sequence: Synthetic oligonucleotide
ccaacguaggccaaccauu

SEQ ID NO: 1941028 - RNA, 19 nt, Artificial Sequence
  Description of Artificial Sequence: Synthetic oligonucleotide
cccacuuuacaccgaauau

SEQ ID NO: 1941029 - RNA, 19 nt, Artificial Sequence
  Description of Artificial Sequence: Synthetic oligonucleotide
cacugccaagcuacacucu

SEQ ID NO: 1941030 - RNA, 19 nt, Artificial Sequence
  Description of Artificial Sequence: Synthetic oligonucleotide
cacugcccaaaagucacau

SEQ ID NO: 1941031 - RNA, 19 nt, Artificial Sequence
  Description of Artificial Sequence: Synthetic oligonucleotide
gucuaccagugacauucuu

SEQ ID NO: 1941032 - RNA, 19 nt, Artificial Sequence
  Description of Artificial Sequence: Synthetic oligonucleotide
cagcugccuacaauaguuu

SEQ ID NO: 1941033 - RNA, 19 nt, Artificial Sequence
  Description of Artificial Sequence: Synthetic oligonucleotide
cacagccagccacuucacu

SEQ ID NO: 1941034 - RNA, 19 nt, Artificial Sequence
  Description of Artificial Sequence: Synthetic oligonucleotide
ccgagauaugagguagcca

SEQ ID NO: 1941035 - RNA, 19 nt, Artificial Sequence
  Description of Artificial Sequence: Synthetic oligonucleotide
ggacaggcaaugaguccua

SEQ ID NO: 1941036 - RNA, 19 nt, Artificial Sequence
  Description of Artificial Sequence: Synthetic oligonucleotide
ccgcacugacucgaaagaa

SEQ ID NO: 1941037 - RNA, 19 nt, Artificial Sequence
  Description of Artificial Sequence: Synthetic oligonucleotide
ccauggcacauaggcucca

SEQ ID NO: 1941038 - RNA, 19 nt, Artificial Sequence
  Description of Artificial Sequence: Synthetic oligonucleotide
ccacugggugucugauuuu

SEQ ID NO: 1941039 - RNA, 19 nt, Artificial Sequence
  Description of Artificial Sequence: Synthetic oligonucleotide
aaaacauuaggucagcugc

SEQ ID NO: 1941040 - RNA, 19 nt, Artificial Sequence
  Description of Artificial Sequence: Synthetic oligonucleotide
aauucuaucauuaaauucc

SEQ ID NO: 1941041 - RNA, 19 nt, Artificial Sequence
  Description of Artificial Sequence: Synthetic oligonucleotide
ucaaacagaagucugaugc

SEQ ID NO: 1941042 - RNA, 19 nt, Artificial Sequence
  Description of Artificial Sequence: Synthetic oligonucleotide
uguuuuauaaaucuucugc

SEQ ID NO: 1941043 - RNA, 19 nt, Artificial Sequence
  Description of Artificial Sequence: Synthetic oligonucleotide
ucuuguaucacaauguacc

SEQ ID NO: 1941044 - RNA, 19 nt, Artificial Sequence
  Description of Artificial Sequence: Synthetic oligonucleotide
auuauucuuauauagauca

SEQ ID NO: 1941045 - RNA, 19 nt, Artificial Sequence
  Description of Artificial Sequence: Synthetic oligonucleotide
cauuaaaagaugaugaagc

SEQ ID NO: 1941046 - RNA, 19 nt, Artificial Sequence
  Description of Artificial Sequence: Synthetic oligonucleotide
cauuugauaacucuggucg

SEQ ID NO: 1941047 - RNA, 19 nt, Artificial Sequence
  Description of Artificial Sequence: Synthetic oligonucleotide
uaugagagaaaccagccgg

SEQ ID NO: 1941048 - RNA, 19 nt, Artificial Sequence
  Description of Artificial Sequence: Synthetic oligonucleotide
auuuucacaaaauauagca

SEQ ID NO: 1941049 - RNA, 19 nt, Artificial Sequence
  Description of Artificial Sequence: Synthetic oligonucleotide
aacuuggaaaacuaacucg

SEQ ID NO: 1941050 - RNA, 19 nt, Artificial Sequence
  Description of Artificial Sequence: Synthetic oligonucleotide
uauaccaguguuuacaucc

SEQ ID NO: 1941051 - RNA, 19 nt, Artificial Sequence
  Description of Artificial Sequence: Synthetic oligonucleotide
acuaacucguccuacauac

SEQ ID NO: 1941052 - RNA, 19 nt, Artificial Sequence
  Description of Artificial Sequence: Synthetic oligonucleotide
aaucuaauuuugucaauac

SEQ ID NO: 1941053 - RNA, 19 nt, Artificial Sequence
  Description of Artificial Sequence: Synthetic oligonucleotide
aagucugaugcucucauac

SEQ ID NO: 1941054 - RNA, 19 nt, Artificial Sequence
  Description of Artificial Sequence: Synthetic oligonucleotide
aaugauugacaguaucugg

SEQ ID NO: 1941055 - RNA, 19 nt, Artificial Sequence
  Description of Artificial Sequence: Synthetic oligonucleotide
uacacuucuauuauacugg

SEQ ID NO: 1941056 - RNA, 19 nt, Artificial Sequence
  Description of Artificial Sequence: Synthetic oligonucleotide
uuuaauucuaacuucagua

SEQ ID NO: 1941057 - RNA, 19 nt, Artificial Sequence
  Description of Artificial Sequence: Synthetic oligonucleotide
auagacuccauccacaguc

SEQ ID NO: 1941058 - RNA, 19 nt, Artificial Sequence
  Description of Artificial Sequence: Synthetic oligonucleotide
aauauagcaucucugagaa

SEQ ID NO: 1941059 - RNA, 19 nt, Artificial Sequence
  Description of Artificial Sequence: Synthetic oligonucleotide
aaucauagacuccauccac

SEQ ID NO: 1941060 - RNA, 19 nt, Artificial Sequence
  Description of Artificial Sequence: Synthetic oligonucleotide
uauagcaucucugagaagc

SEQ ID NO: 1941061 - RNA, 19 nt, Artificial Sequence
  Description of Artificial Sequence: Synthetic oligonucleotide
gaugauaagcaaaugauug

SEQ ID NO: 1941062 - RNA, 19 nt, Artificial Sequence
  Description of Artificial Sequence: Synthetic oligonucleotide
aaauauagcaucucugaga

SEQ ID NO: 1941063 - RNA, 19 nt, Artificial Sequence
  Description of Artificial Sequence: Synthetic oligonucleotide
ucuuauauagaucauugaa

SEQ ID NO: 1941064 - RNA, 19 nt, Artificial Sequence
  Description of Artificial Sequence: Synthetic oligonucleotide
uucagaaaguucauaaacc

SEQ ID NO: 1941065 - RNA, 19 nt, Artificial Sequence
  Description of Artificial Sequence: Synthetic oligonucleotide
accaacaaaacauuagguc

SEQ ID NO: 1941066 - RNA, 19 nt, Artificial Sequence
  Description of Artificial Sequence: Synthetic oligonucleotide
uguaccaacaaaacauuag

SEQ ID NO: 1941067 - RNA, 19 nt, Artificial Sequence
  Description of Artificial Sequence: Synthetic oligonucleotide
aucagguaaucauagacuc

SEQ ID NO: 1941068 - RNA, 19 nt, Artificial Sequence
  Description of Artificial Sequence: Synthetic oligonucleotide
uugcauuauucuuauauag

SEQ ID NO: 1941069 - RNA, 19 nt, Artificial Sequence
  Description of Artificial Sequence: Synthetic oligonucleotide
auauagaucauugaaaagu

SEQ ID NO: 1941070 - RNA, 19 nt, Artificial Sequence
  Description of Artificial Sequence: Synthetic oligonucleotide
ucgacagucagacaaaacu

SEQ ID NO: 1941071 - RNA, 19 nt, Artificial Sequence
  Description of Artificial Sequence: Synthetic oligonucleotide
acuucuauuauacugguau

SEQ ID NO: 1941072 - RNA, 19 nt, Artificial Sequence
  Description of Artificial Sequence: Synthetic oligonucleotide
aaguacacuucuauuauac

SEQ ID NO: 1941073 - RNA, 19 nt, Artificial Sequence
  Description of Artificial Sequence: Synthetic oligonucleotide
ucugauuugcuuuaauucu

SEQ ID NO: 1941074 - RNA, 19 nt, Artificial Sequence
  Description of Artificial Sequence: Synthetic oligonucleotide
cugagaagcguuaugagag

SEQ ID NO: 1941075 - RNA, 19 nt, Artificial Sequence
  Description of Artificial Sequence: Synthetic oligonucleotide
uuaauucuaacuucaguac

SEQ ID NO: 1941076 - RNA, 19 nt, Artificial Sequence
  Description of Artificial Sequence: Synthetic oligonucleotide
guaccaacaaaacauuagg

SEQ ID NO: 1941077 - RNA, 19 nt, Artificial Sequence
  Description of Artificial Sequence: Synthetic oligonucleotide
aacugcaggacaugcacgg

SEQ ID NO: 1941078 - RNA, 19 nt, Artificial Sequence
  Description of Artificial Sequence: Synthetic oligonucleotide
uauuuucacaaaauauagc

SEQ ID NO: 1941079 - RNA, 19 nt, Artificial Sequence
  Description of Artificial Sequence: Synthetic oligonucleotide
aauacacuugacuaucaga

SEQ ID NO: 1941080 - RNA, 19 nt, Artificial Sequence
  Description of Artificial Sequence: Synthetic oligonucleotide
uaaaccgaaauaaaagauc

SEQ ID NO: 1941081 - RNA, 19 nt, Artificial Sequence
  Description of Artificial Sequence: Synthetic oligonucleotide
uuaugagagaaaccagccg

SEQ ID NO: 1941082 - RNA, 19 nt, Artificial Sequence
  Description of Artificial Sequence: Synthetic oligonucleotide
aacacuaaaguacaugaua

SEQ ID NO: 1941083 - RNA, 19 nt, Artificial Sequence
  Description of Artificial Sequence: Synthetic oligonucleotide
uucuuaaagaggauucgag

SEQ ID NO: 1941084 - RNA, 19 nt, Artificial Sequence
  Description of Artificial Sequence: Synthetic oligonucleotide
uucgaguucccauuaaaag

SEQ ID NO: 1941085 - RNA, 19 nt, Artificial Sequence
  Description of Artificial Sequence: Synthetic oligonucleotide
uuugcuuccgcucuguagu

SEQ ID NO: 1941086 - RNA, 19 nt, Artificial Sequence
  Description of Artificial Sequence: Synthetic oligonucleotide
uuuauaaaucuucugcaau

SEQ ID NO: 1941087 - RNA, 19 nt, Artificial Sequence
  Description of Artificial Sequence: Synthetic oligonucleotide
ugguauguuauucuauacc

SEQ ID NO: 1941088 - RNA, 19 nt, Artificial Sequence
  Description of Artificial Sequence: Synthetic oligonucleotide
uauguuauucuauaccagu

SEQ ID NO: 1941089 - RNA, 19 nt, Artificial Sequence
  Description of Artificial Sequence: Synthetic oligonucleotide
uuggaaaacuaacucgucc

SEQ ID NO: 1941090 - RNA, 19 nt, Artificial Sequence
  Description of Artificial Sequence: Synthetic oligonucleotide
agcaguauguuuuauaaau

SEQ ID NO: 1941091 - RNA, 19 nt, Artificial Sequence
  Description of Artificial Sequence: Synthetic oligonucleotide
aaaugauugacaguaucug

SEQ ID NO: 1941092 - RNA, 19 nt, Artificial Sequence
  Description of Artificial Sequence: Synthetic oligonucleotide
uagagauagcauuucauca

SEQ ID NO: 1941093 - RNA, 19 nt, Artificial Sequence
  Description of Artificial Sequence: Synthetic oligonucleotide
uaugaagaugauaagcaaa

SEQ ID NO: 1941094 - RNA, 19 nt, Artificial Sequence
  Description of Artificial Sequence: Synthetic oligonucleotide
ucaguguacauuuccaaug

SEQ ID NO: 1941095 - RNA, 19 nt, Artificial Sequence
  Description of Artificial Sequence: Synthetic oligonucleotide
uuuacauccaggaugucau

SEQ ID NO: 1941096 - RNA, 19 nt, Artificial Sequence
  Description of Artificial Sequence: Synthetic oligonucleotide
ucccucuuguuucagaaag

SEQ ID NO: 1941097 - RNA, 19 nt, Artificial Sequence
  Description of Artificial Sequence: Synthetic oligonucleotide
auuugauaacucuggucgc

SEQ ID NO: 1941098 - RNA, 19 nt, Artificial Sequence
  Description of Artificial Sequence: Synthetic oligonucleotide
ugcuuuaauucuaacuuca

SEQ ID NO: 1941099 - RNA, 19 nt, Artificial Sequence
  Description of Artificial Sequence: Synthetic oligonucleotide
caaacgucuguuuugcucc

SEQ ID NO: 1941100 - RNA, 19 nt, Artificial Sequence
  Description of Artificial Sequence: Synthetic oligonucleotide
guacacuucuauuauacug

SEQ ID NO: 1941101 - RNA, 19 nt, Artificial Sequence
  Description of Artificial Sequence: Synthetic oligonucleotide
aguggggauucuuugaauc

SEQ ID NO: 1941102 - RNA, 19 nt, Artificial Sequence
  Description of Artificial Sequence: Synthetic oligonucleotide
ucgaguucccauuaaaaga

SEQ ID NO: 1941103 - RNA, 19 nt, Artificial Sequence
  Description of Artificial Sequence: Synthetic oligonucleotide
ugcauuauucuuauauaga

SEQ ID NO: 1941104 - RNA, 19 nt, Artificial Sequence
  Description of Artificial Sequence: Synthetic oligonucleotide
uccuacauacaucagguaa

SEQ ID NO: 1941105 - RNA, 19 nt, Artificial Sequence
  Description of Artificial Sequence: Synthetic oligonucleotide
uguuauucuauaccagugu

SEQ ID NO: 1941106 - RNA, 19 nt, Artificial Sequence
  Description of Artificial Sequence: Synthetic oligonucleotide
augucauggagguagcuuc

SEQ ID NO: 1941107 - RNA, 19 nt, Artificial Sequence
  Description of Artificial Sequence: Synthetic oligonucleotide
uauacugguauguuauucu

SEQ ID NO: 1941108 - RNA, 19 nt, Artificial Sequence
  Description of Artificial Sequence: Synthetic oligonucleotide
uaaucauagacuccaucca

SEQ ID NO: 1941109 - RNA, 19 nt, Artificial Sequence
  Description of Artificial Sequence: Synthetic oligonucleotide
uugacuaucagaucuggaa

SEQ ID NO: 1941110 - RNA, 19 nt, Artificial Sequence
  Description of Artificial Sequence: Synthetic oligonucleotide
cauaaaccgaaauaaaaga

SEQ ID NO: 1941111 - RNA, 19 nt, Artificial Sequence
  Description of Artificial Sequence: Synthetic oligonucleotide
ucuuaaagaggauucgagu

SEQ ID NO: 1941112 - RNA, 19 nt, Artificial Sequence
  Description of Artificial Sequence: Synthetic oligonucleotide
ugcaauuccucauguagag

SEQ ID NO: 1941113 - RNA, 19 nt, Artificial Sequence
  Description of Artificial Sequence: Synthetic oligonucleotide
uaauucaucauuucuucaa

SEQ ID NO: 1941114 - RNA, 19 nt, Artificial Sequence
  Description of Artificial Sequence: Synthetic oligonucleotide
aagauaguagucaguguac

SEQ ID NO: 1941115 - RNA, 19 nt, Artificial Sequence
  Description of Artificial Sequence: Synthetic oligonucleotide
uaucauuaaauuccucgac

SEQ ID NO: 1941116 - RNA, 19 nt, Artificial Sequence
  Description of Artificial Sequence: Synthetic oligonucleotide
cuuucauccaagcaguaug

SEQ ID NO: 1941117 - RNA, 19 nt, Artificial Sequence
  Description of Artificial Sequence: Synthetic oligonucleotide
caacaaaacauuaggucag

SEQ ID NO: 1941118 - RNA, 19 nt, Artificial Sequence
  Description of Artificial Sequence: Synthetic oligonucleotide
uucaucauuugauaacucu

SEQ ID NO: 1941119 - RNA, 19 nt, Artificial Sequence
  Description of Artificial Sequence: Synthetic oligonucleotide
aacaaaacauuaggucagc

SEQ ID NO: 1941120 - RNA, 19 nt, Artificial Sequence
  Description of Artificial Sequence: Synthetic oligonucleotide
auggaaccaaaggagaagc

SEQ ID NO: 1941121 - RNA, 19 nt, Artificial Sequence
  Description of Artificial Sequence: Synthetic oligonucleotide
aagaugauaagcaaaugau

SEQ ID NO: 1941122 - RNA, 19 nt, Artificial Sequence
  Description of Artificial Sequence: Synthetic oligonucleotide
ucugagaagcguuaugaga

SEQ ID NO: 1941123 - RNA, 19 nt, Artificial Sequence
  Description of Artificial Sequence: Synthetic oligonucleotide
caaacacuaaaguacauga

SEQ ID NO: 1941124 - RNA, 19 nt, Artificial Sequence
  Description of Artificial Sequence: Synthetic oligonucleotide
aaguucauaaaccgaaaua

SEQ ID NO: 1941125 - RNA, 19 nt, Artificial Sequence
  Description of Artificial Sequence: Synthetic oligonucleotide
acaaaacugcaggacaugc

SEQ ID NO: 1941126 - RNA, 19 nt, Artificial Sequence
  Description of Artificial Sequence: Synthetic oligonucleotide
ugaaucucuucuacaauga

SEQ ID NO: 1941127 - RNA, 19 nt, Artificial Sequence
  Description of Artificial Sequence: Synthetic oligonucleotide
aauggaaccaaaggagaag

SEQ ID NO: 1941128 - RNA, 19 nt, Artificial Sequence
  Description of Artificial Sequence: Synthetic oligonucleotide
uguuuucuaguaagugggg

SEQ ID NO: 1941129 - RNA, 19 nt, Artificial Sequence
  Description of Artificial Sequence: Synthetic oligonucleotide
gaagauaguagucagugua

SEQ ID NO: 1941130 - RNA, 19 nt, Artificial Sequence
  Description of Artificial Sequence: Synthetic oligonucleotide
uuguaccuuauuuagcucu

SEQ ID NO: 1941131 - RNA, 19 nt, Artificial Sequence
  Description of Artificial Sequence: Synthetic oligonucleotide
uggaaaacuaacucguccu

SEQ ID NO: 1941132 - RNA, 19 nt, Artificial Sequence
  Description of Artificial Sequence: Synthetic oligonucleotide
agcguuaugagagaaacca

SEQ ID NO: 1941133 - RNA, 19 nt, Artificial Sequence
  Description of Artificial Sequence: Synthetic oligonucleotide
uggaacuuggaaaacuaac

SEQ ID NO: 1941134 - RNA, 19 nt, Artificial Sequence
  Description of Artificial Sequence: Synthetic oligonucleotide
uuauaaaucuucugcaauu

SEQ ID NO: 1941135 - RNA, 19 nt, Artificial Sequence
  Description of Artificial Sequence: Synthetic oligonucleotide
uguucuuaaagaggauucg

SEQ ID NO: 1941136 - RNA, 19 nt, Artificial Sequence
  Description of Artificial Sequence: Synthetic oligonucleotide
cuuauauagaucauugaaa

SEQ ID NO: 1941137 - RNA, 19 nt, Artificial Sequence
  Description of Artificial Sequence: Synthetic oligonucleotide
gacuaucagaucuggaaug

SEQ ID NO: 1941138 - RNA, 19 nt, Artificial Sequence
  Description of Artificial Sequence: Synthetic oligonucleotide
uuaucuuggagggagcgag

SEQ ID NO: 1941139 - RNA, 19 nt, Artificial Sequence
  Description of Artificial Sequence: Synthetic oligonucleotide
agaucuggaauguaauuca

SEQ ID NO: 1941140 - RNA, 19 nt, Artificial Sequence
  Description of Artificial Sequence: Synthetic oligonucleotide
auucuuauauagaucauug

SEQ ID NO: 1941141 - RNA, 19 nt, Artificial Sequence
  Description of Artificial Sequence: Synthetic oligonucleotide
uuccucgacagucagacaa

SEQ ID NO: 1941142 - RNA, 19 nt, Artificial Sequence
  Description of Artificial Sequence: Synthetic oligonucleotide
caagaauggaaccaaagga

SEQ ID NO: 1941143 - RNA, 19 nt, Artificial Sequence
  Description of Artificial Sequence: Synthetic oligonucleotide
augauugacaguaucuggg

SEQ ID NO: 1941144 - RNA, 19 nt, Artificial Sequence
  Description of Artificial Sequence: Synthetic oligonucleotide
accgaaauaaaagaucuug

SEQ ID NO: 1941145 - RNA, 19 nt, Artificial Sequence
  Description of Artificial Sequence: Synthetic oligonucleotide
ucaaacacuaaaguacaug

SEQ ID NO: 1941146 - RNA, 19 nt, Artificial Sequence
  Description of Artificial Sequence: Synthetic oligonucleotide
ugauaagcaaaugauugac

SEQ ID NO: 1941147 - RNA, 19 nt, Artificial Sequence
  Description of Artificial Sequence: Synthetic oligonucleotide
uacaaugaagggaucaaau

SEQ ID NO: 1941148 - RNA, 19 nt, Artificial Sequence
  Description of Artificial Sequence: Synthetic oligonucleotide
cuugcacugaagauaguag

SEQ ID NO: 1941149 - RNA, 19 nt, Artificial Sequence
  Description of Artificial Sequence: Synthetic oligonucleotide
uagcauuucaucauuugau

SEQ ID NO: 1941150 - RNA, 19 nt, Artificial Sequence
  Description of Artificial Sequence: Synthetic oligonucleotide
aaaucuaauuuugucaaua

SEQ ID NO: 1941151 - RNA, 19 nt, Artificial Sequence
  Description of Artificial Sequence: Synthetic oligonucleotide
aguaaguggggauucuuug

SEQ ID NO: 1941152 - RNA, 19 nt, Artificial Sequence
  Description of Artificial Sequence: Synthetic oligonucleotide
aacucuggucgcaaaauuc

SEQ ID NO: 1941153 - RNA, 19 nt, Artificial Sequence
  Description of Artificial Sequence: Synthetic oligonucleotide
cuuuuguaccuuauuuagc

SEQ ID NO: 1941154 - RNA, 19 nt, Artificial Sequence
  Description of Artificial Sequence: Synthetic oligonucleotide
uaucagaucuggaauguaa

SEQ ID NO: 1941155 - RNA, 19 nt, Artificial Sequence
  Description of Artificial Sequence: Synthetic oligonucleotide
auaaaagaucuuguuguuc

SEQ ID NO: 1941156 - RNA, 19 nt, Artificial Sequence
  Description of Artificial Sequence: Synthetic oligonucleotide
gaagcguuaugagagaaac

SEQ ID NO: 1941157 - RNA, 19 nt, Artificial Sequence
  Description of Artificial Sequence: Synthetic oligonucleotide
cauacuugguuucuucacc

SEQ ID NO: 1941158 - RNA, 19 nt, Artificial Sequence
  Description of Artificial Sequence: Synthetic oligonucleotide
uuugcauuauucuuauaua

SEQ ID NO: 1941159 - RNA, 19 nt, Artificial Sequence
  Description of Artificial Sequence: Synthetic oligonucleotide
gguauguuauucuauacca

SEQ ID NO: 1941160 - RNA, 19 nt, Artificial Sequence
  Description of Artificial Sequence: Synthetic oligonucleotide
caaaacauuaggucagcug

SEQ ID NO: 1941161 - RNA, 19 nt, Artificial Sequence
  Description of Artificial Sequence: Synthetic oligonucleotide
guagagauagcauuucauc

SEQ ID NO: 1941162 - RNA, 19 nt, Artificial Sequence
  Description of Artificial Sequence: Synthetic oligonucleotide
uguagagauagcauuucau

SEQ ID NO: 1941163 - RNA, 19 nt, Artificial Sequence
  Description of Artificial Sequence: Synthetic oligonucleotide
uucuauuauacugguaugu

SEQ ID NO: 1941164 - RNA, 19 nt, Artificial Sequence
  Description of Artificial Sequence: Synthetic oligonucleotide
augauaagcaaaugauuga

SEQ ID NO: 1941165 - RNA, 19 nt, Artificial Sequence
  Description of Artificial Sequence: Synthetic oligonucleotide
ucugcaaauuucugcaaga

SEQ ID NO: 1941166 - RNA, 19 nt, Artificial Sequence
  Description of Artificial Sequence: Synthetic oligonucleotide
acucguccuacauacauca

SEQ ID NO: 1941167 - RNA, 19 nt, Artificial Sequence
  Description of Artificial Sequence: Synthetic oligonucleotide
ugacuaucagaucuggaau

SEQ ID NO: 1941168 - RNA, 19 nt, Artificial Sequence
  Description of Artificial Sequence: Synthetic oligonucleotide
caagccaucaaacagaagu

SEQ ID NO: 1941169 - RNA, 19 nt, Artificial Sequence
  Description of Artificial Sequence: Synthetic oligonucleotide
ucucugagaagcguuauga

SEQ ID NO: 1941170 - RNA, 19 nt, Artificial Sequence
  Description of Artificial Sequence: Synthetic oligonucleotide
uuuucuaguaaguggggau

SEQ ID NO: 1941171 - RNA, 19 nt, Artificial Sequence
  Description of Artificial Sequence: Synthetic oligonucleotide
uucuuguaucacaauguac

SEQ ID NO: 1941172 - RNA, 19 nt, Artificial Sequence
  Description of Artificial Sequence: Synthetic oligonucleotide
ucaaacgucuguuuugcuc

SEQ ID NO: 1941173 - RNA, 19 nt, Artificial Sequence
  Description of Artificial Sequence: Synthetic oligonucleotide
aagccaaucuggaacuugg

SEQ ID NO: 1941174 - RNA, 19 nt, Artificial Sequence
  Description of Artificial Sequence: Synthetic oligonucleotide
guuaugagagaaaccagcc

SEQ ID NO: 1941175 - RNA, 19 nt, Artificial Sequence
  Description of Artificial Sequence: Synthetic oligonucleotide
agagauagcauuucaucau

SEQ ID NO: 1941176 - RNA, 19 nt, Artificial Sequence
  Description of Artificial Sequence: Synthetic oligonucleotide
aucuaauuuugucaauacu

SEQ ID NO: 1941177 - RNA, 19 nt, Artificial Sequence
  Description of Artificial Sequence: Synthetic oligonucleotide
ucagguaaucauagacucc

SEQ ID NO: 1941178 - RNA, 19 nt, Artificial Sequence
  Description of Artificial Sequence: Synthetic oligonucleotide
uguaccuuauuuagcucug

SEQ ID NO: 1941179 - RNA, 19 nt, Artificial Sequence
  Description of Artificial Sequence: Synthetic oligonucleotide
aauuucugcaagaauggaa

SEQ ID NO: 1941180 - RNA, 19 nt, Artificial Sequence
  Description of Artificial Sequence: Synthetic oligonucleotide
accaauacacuugacuauc

SEQ ID NO: 1941181 - RNA, 19 nt, Artificial Sequence
  Description of Artificial Sequence: Synthetic oligonucleotide
agaaaguucauaaaccgaa

SEQ ID NO: 1941182 - RNA, 19 nt, Artificial Sequence
  Description of Artificial Sequence: Synthetic oligonucleotide
agaucauugaaaagucuuc

SEQ ID NO: 1941183 - RNA, 19 nt, Artificial Sequence
  Description of Artificial Sequence: Synthetic oligonucleotide
uauucuagguucugcaaau

SEQ ID NO: 1941184 - RNA, 19 nt, Artificial Sequence
  Description of Artificial Sequence: Synthetic oligonucleotide
uguagucucagcacgguuu

SEQ ID NO: 1941185 - RNA, 19 nt, Artificial Sequence
  Description of Artificial Sequence: Synthetic oligonucleotide
ucgcaaaauucuaucauua

SEQ ID NO: 1941186 - RNA, 19 nt, Artificial Sequence
  Description of Artificial Sequence: Synthetic oligonucleotide
caguucuuguaucacaaug

SEQ ID NO: 1941187 - RNA, 19 nt, Artificial Sequence
  Description of Artificial Sequence: Synthetic oligonucleotide
ucauacuugguuucuucac

SEQ ID NO: 1941188 - RNA, 19 nt, Artificial Sequence
  Description of Artificial Sequence: Synthetic oligonucleotide
aaugaagggaucaaaucua

SEQ ID NO: 1941189 - RNA, 19 nt, Artificial Sequence
  Description of Artificial Sequence: Synthetic oligonucleotide
cuaucauuaaauuccucga

SEQ ID NO: 1941190 - RNA, 19 nt, Artificial Sequence
  Description of Artificial Sequence: Synthetic oligonucleotide
uaacucguccuacauacau

SEQ ID NO: 1941191 - RNA, 19 nt, Artificial Sequence
  Description of Artificial Sequence: Synthetic oligonucleotide
uuucugcaagaauggaacc

SEQ ID NO: 1941192 - RNA, 19 nt, Artificial Sequence
  Description of Artificial Sequence: Synthetic oligonucleotide
guuugcauuauucuuauau

SEQ ID NO: 1941193 - RNA, 19 nt, Artificial Sequence
  Description of Artificial Sequence: Synthetic oligonucleotide
uaagcaaaugauugacagu

SEQ ID NO: 1941194 - RNA, 19 nt, Artificial Sequence
  Description of Artificial Sequence: Synthetic oligonucleotide
ucuggaacuuggaaaacua

SEQ ID NO: 1941195 - RNA, 19 nt, Artificial Sequence
  Description of Artificial Sequence: Synthetic oligonucleotide
ugcuuguuaagcacuggcu

SEQ ID NO: 1941196 - RNA, 19 nt, Artificial Sequence
  Description of Artificial Sequence: Synthetic oligonucleotide
uuauacugguauguuauuc

SEQ ID NO: 1941197 - RNA, 19 nt, Artificial Sequence
  Description of Artificial Sequence: Synthetic oligonucleotide
augaagccaaucuggaacu

SEQ ID NO: 1941198 - RNA, 19 nt, Artificial Sequence
  Description of Artificial Sequence: Synthetic oligonucleotide
aagcguuaugagagaaacc

SEQ ID NO: 1941199 - RNA, 19 nt, Artificial Sequence
  Description of Artificial Sequence: Synthetic oligonucleotide
auucuauaccaguguuuac

SEQ ID NO: 1941200 - RNA, 19 nt, Artificial Sequence
  Description of Artificial Sequence: Synthetic oligonucleotide
auaaaccgaaauaaaagau

SEQ ID NO: 1941201 - RNA, 19 nt, Artificial Sequence
  Description of Artificial Sequence: Synthetic oligonucleotide
ugauuugcuuuaauucuaa

SEQ ID NO: 1941202 - RNA, 19 nt, Artificial Sequence
  Description of Artificial Sequence: Synthetic oligonucleotide
auacaucagguaaucauag

SEQ ID NO: 1941203 - RNA, 19 nt, Artificial Sequence
  Description of Artificial Sequence: Synthetic oligonucleotide
uuauucuauaccaguguuu

SEQ ID NO: 1941204 - RNA, 19 nt, Artificial Sequence
  Description of Artificial Sequence: Synthetic oligonucleotide
aaacugcaggacaugcacg

SEQ ID NO: 1941205 - RNA, 19 nt, Artificial Sequence
  Description of Artificial Sequence: Synthetic oligonucleotide
cuucuauuauacugguaug

SEQ ID NO: 1941206 - RNA, 19 nt, Artificial Sequence
  Description of Artificial Sequence: Synthetic oligonucleotide
cacugaagauaguagucag

SEQ ID NO: 1941207 - RNA, 19 nt, Artificial Sequence
  Description of Artificial Sequence: Synthetic oligonucleotide
uuugauaacucuggucgca

SEQ ID NO: 1941208 - RNA, 19 nt, Artificial Sequence
  Description of Artificial Sequence: Synthetic oligonucleotide
ccuuuuguaccuuauuuag

SEQ ID NO: 1941209 - RNA, 19 nt, Artificial Sequence
  Description of Artificial Sequence: Synthetic oligonucleotide
ucucugauuugcuuuaauu

SEQ ID NO: 1941210 - RNA, 19 nt, Artificial Sequence
  Description of Artificial Sequence: Synthetic oligonucleotide
aguucuuguaucacaaugu

SEQ ID NO: 1941211 - RNA, 19 nt, Artificial Sequence
  Description of Artificial Sequence: Synthetic oligonucleotide
aaauuucugcaagaaugga

SEQ ID NO: 1941212 - RNA, 19 nt, Artificial Sequence
  Description of Artificial Sequence: Synthetic oligonucleotide
uggucgcaaaauucuauca

SEQ ID NO: 1941213 - RNA, 19 nt, Artificial Sequence
  Description of Artificial Sequence: Synthetic oligonucleotide
gaaaacuaacucguccuac

SEQ ID NO: 1941214 - RNA, 19 nt, Artificial Sequence
  Description of Artificial Sequence: Synthetic oligonucleotide
ugcaagccaucaaacagaa

SEQ ID NO: 1941215 - RNA, 19 nt, Artificial Sequence
  Description of Artificial Sequence: Synthetic oligonucleotide
ugucauggagguagcuucc

SEQ ID NO: 1941216 - RNA, 19 nt, Artificial Sequence
  Description of Artificial Sequence: Synthetic oligonucleotide
aauguaccaacaaaacauu

SEQ ID NO: 1941217 - RNA, 19 nt, Artificial Sequence
  Description of Artificial Sequence: Synthetic oligonucleotide
guauguuauucuauaccag

SEQ ID NO: 1941218 - RNA, 19 nt, Artificial Sequence
  Description of Artificial Sequence: Synthetic oligonucleotide
agcgagguucaguauuuuc

SEQ ID NO: 1941219 - RNA, 19 nt, Artificial Sequence
  Description of Artificial Sequence: Synthetic oligonucleotide
uaccuuauuuagcucugga

SEQ ID NO: 1941220 - RNA, 19 nt, Artificial Sequence
  Description of Artificial Sequence: Synthetic oligonucleotide
aguacacuucuauuauacu

SEQ ID NO: 1941221 - RNA, 19 nt, Artificial Sequence
  Description of Artificial Sequence: Synthetic oligonucleotide
cagaucuggaauguaauuc

SEQ ID NO: 1941222 - RNA, 19 nt, Artificial Sequence
  Description of Artificial Sequence: Synthetic oligonucleotide
aacucguccuacauacauc

SEQ ID NO: 1941223 - RNA, 19 nt, Artificial Sequence
  Description of Artificial Sequence: Synthetic oligonucleotide
uaucuuggagggagcgagg

SEQ ID NO: 1941224 - RNA, 19 nt, Artificial Sequence
  Description of Artificial Sequence: Synthetic oligonucleotide
agcauuucaucauuugaua

SEQ ID NO: 1941225 - RNA, 19 nt, Artificial Sequence
  Description of Artificial Sequence: Synthetic oligonucleotide
uuucaucauuugauaacuc

SEQ ID NO: 1941226 - RNA, 19 nt, Artificial Sequence
  Description of Artificial Sequence: Synthetic oligonucleotide
agcacgguuugcauuauuc

SEQ ID NO: 1941227 - RNA, 19 nt, Artificial Sequence
  Description of Artificial Sequence: Synthetic oligonucleotide
ucuggucgcaaaauucuau

SEQ ID NO: 1941228 - RNA, 19 nt, Artificial Sequence
  Description of Artificial Sequence: Synthetic oligonucleotide
cugcuuguuaagcacuggc

SEQ ID NO: 1941229 - RNA, 19 nt, Artificial Sequence
  Description of Artificial Sequence: Synthetic oligonucleotide
cagucagacaaaacugcag

SEQ ID NO: 1941230 - RNA, 19 nt, Artificial Sequence
  Description of Artificial Sequence: Synthetic oligonucleotide
gauugacaguaucuggguc

SEQ ID NO: 1941231 - RNA, 19 nt, Artificial Sequence
  Description of Artificial Sequence: Synthetic oligonucleotide
ucauccaagcaguauguuu

SEQ ID NO: 1941232 - RNA, 19 nt, Artificial Sequence
  Description of Artificial Sequence: Synthetic oligonucleotide
gauaacucuggucgcaaaa

SEQ ID NO: 1941233 - RNA, 19 nt, Artificial Sequence
  Description of Artificial Sequence: Synthetic oligonucleotide
cucuguagucucagcacgg

SEQ ID NO: 1941234 - RNA, 19 nt, Artificial Sequence
  Description of Artificial Sequence: Synthetic oligonucleotide
aaagaggauucgaguuccc

SEQ ID NO: 1941235 - RNA, 19 nt, Artificial Sequence
  Description of Artificial Sequence: Synthetic oligonucleotide
auguuauucuauaccagug

SEQ ID NO: 1941236 - RNA, 19 nt, Artificial Sequence
  Description of Artificial Sequence: Synthetic oligonucleotide
aacuaacucguccuacaua

SEQ ID NO: 1941237 - RNA, 19 nt, Artificial Sequence
  Description of Artificial Sequence: Synthetic oligonucleotide
ucuauuauacugguauguu

SEQ ID NO: 1941238 - RNA, 19 nt, Artificial Sequence
  Description of Artificial Sequence: Synthetic oligonucleotide
ugauuuugcuuccgcucug

SEQ ID NO: 1941239 - RNA, 19 nt, Artificial Sequence
  Description of Artificial Sequence: Synthetic oligonucleotide
cucugagaagcguuaugag

SEQ ID NO: 1941240 - RNA, 19 nt, Artificial Sequence
  Description of Artificial Sequence: Synthetic oligonucleotide
cuuguaucacaauguacca

SEQ ID NO: 1941241 - RNA, 19 nt, Artificial Sequence
  Description of Artificial Sequence: Synthetic oligonucleotide
aguguacauuuccaaugug

SEQ ID NO: 1941242 - RNA, 19 nt, Artificial Sequence
  Description of Artificial Sequence: Synthetic oligonucleotide
accuuauuuagcucuggaa

SEQ ID NO: 1941243 - RNA, 19 nt, Artificial Sequence
  Description of Artificial Sequence: Synthetic oligonucleotide
agaggauucgaguucccau

SEQ ID NO: 1941244 - RNA, 19 nt, Artificial Sequence
  Description of Artificial Sequence: Synthetic oligonucleotide
uacaucagguaaucauaga

SEQ ID NO: 1941245 - RNA, 19 nt, Artificial Sequence
  Description of Artificial Sequence: Synthetic oligonucleotide
caguauguuuuauaaaucu

SEQ ID NO: 1941246 - RNA, 19 nt, Artificial Sequence
  Description of Artificial Sequence: Synthetic oligonucleotide
ugagaagcguuaugagaga

SEQ ID NO: 1941247 - RNA, 19 nt, Artificial Sequence
  Description of Artificial Sequence: Synthetic oligonucleotide
guagucucagcacgguuug

SEQ ID NO: 1941248 - RNA, 19 nt, Artificial Sequence
  Description of Artificial Sequence: Synthetic oligonucleotide
aaacacuaaaguacaugau

SEQ ID NO: 1941249 - RNA, 19 nt, Artificial Sequence
  Description of Artificial Sequence: Synthetic oligonucleotide
acuaucagaucuggaaugu

SEQ ID NO: 1941250 - RNA, 19 nt, Artificial Sequence
  Description of Artificial Sequence: Synthetic oligonucleotide
agucaguguacauuuccaa

SEQ ID NO: 1941251 - RNA, 19 nt, Artificial Sequence
  Description of Artificial Sequence: Synthetic oligonucleotide
cuaugaagaugauaagcaa

SEQ ID NO: 1941252 - RNA, 19 nt, Artificial Sequence
  Description of Artificial Sequence: Synthetic oligonucleotide
gauucgaguucccauuaaa

SEQ ID NO: 1941253 - RNA, 19 nt, Artificial Sequence
  Description of Artificial Sequence: Synthetic oligonucleotide
uaguaaguggggauucuuu

SEQ ID NO: 1941254 - RNA, 19 nt, Artificial Sequence
  Description of Artificial Sequence: Synthetic oligonucleotide
cuuaaagaggauucgaguu

SEQ ID NO: 1941255 - RNA, 19 nt, Artificial Sequence
  Description of Artificial Sequence: Synthetic oligonucleotide
cuggucgcaaaauucuauc

SEQ ID NO: 1941256 - RNA, 19 nt, Artificial Sequence
  Description of Artificial Sequence: Synthetic oligonucleotide
gcucuguagucucagcacg

SEQ ID NO: 1941257 - RNA, 19 nt, Artificial Sequence
  Description of Artificial Sequence: Synthetic oligonucleotide
cagaaaguucauaaaccga

SEQ ID NO: 1941258 - RNA, 19 nt, Artificial Sequence
  Description of Artificial Sequence: Synthetic oligonucleotide
cguuaugagagaaaccagc

SEQ ID NO: 1941259 - RNA, 19 nt, Artificial Sequence
  Description of Artificial Sequence: Synthetic oligonucleotide
cagguaaucauagacucca

SEQ ID NO: 1941260 - RNA, 19 nt, Artificial Sequence
  Description of Artificial Sequence: Synthetic oligonucleotide
ccauuaaaagaugaugaag

SEQ ID NO: 1941261 - RNA, 19 nt, Artificial Sequence
  Description of Artificial Sequence: Synthetic oligonucleotide
agauaguagucaguguaca

SEQ ID NO: 1941262 - RNA, 19 nt, Artificial Sequence
  Description of Artificial Sequence: Synthetic oligonucleotide
ggaaacaguucuuguauca

SEQ ID NO: 1941263 - RNA, 19 nt, Artificial Sequence
  Description of Artificial Sequence: Synthetic oligonucleotide
aaacgucuguuuugcuccu

SEQ ID NO: 1941264 - RNA, 19 nt, Artificial Sequence
  Description of Artificial Sequence: Synthetic oligonucleotide
guucugauuuugcuuccgc

SEQ ID NO: 1941265 - RNA, 19 nt, Artificial Sequence
  Description of Artificial Sequence: Synthetic oligonucleotide
cuauuauacugguauguua

SEQ ID NO: 1941266 - RNA, 19 nt, Artificial Sequence
  Description of Artificial Sequence: Synthetic oligonucleotide
aagaggauucgaguuccca

SEQ ID NO: 1941267 - RNA, 19 nt, Artificial Sequence
  Description of Artificial Sequence: Synthetic oligonucleotide
gaagccaaucuggaacuug

SEQ ID NO: 1941268 - RNA, 19 nt, Artificial Sequence
  Description of Artificial Sequence: Synthetic oligonucleotide
ugaagggaucaaaucuaau

SEQ ID NO: 1941269 - RNA, 19 nt, Artificial Sequence
  Description of Artificial Sequence: Synthetic oligonucleotide
auacugguauguuauucua

SEQ ID NO: 1941270 - RNA, 19 nt, Artificial Sequence
  Description of Artificial Sequence: Synthetic oligonucleotide
gggaucaaaucuaauuuug

SEQ ID NO: 1941271 - RNA, 19 nt, Artificial Sequence
  Description of Artificial Sequence: Synthetic oligonucleotide
uuucuaguaaguggggauu

SEQ ID NO: 1941272 - RNA, 19 nt, Artificial Sequence
  Description of Artificial Sequence: Synthetic oligonucleotide
agaugauaagcaaaugauu

SEQ ID NO: 1941273 - RNA, 19 nt, Artificial Sequence
  Description of Artificial Sequence: Synthetic oligonucleotide
gaucauugaaaagucuucu

SEQ ID NO: 1941274 - RNA, 19 nt, Artificial Sequence
  Description of Artificial Sequence: Synthetic oligonucleotide
auagaucauugaaaagucu

SEQ ID NO: 1941275 - RNA, 19 nt, Artificial Sequence
  Description of Artificial Sequence: Synthetic oligonucleotide
aguucugauuuugcuuccg

SEQ ID NO: 1941276 - RNA, 19 nt, Artificial Sequence
  Description of Artificial Sequence: Synthetic oligonucleotide
uucuaucauuaaauuccuc

SEQ ID NO: 1941277 - RNA, 19 nt, Artificial Sequence
  Description of Artificial Sequence: Synthetic oligonucleotide
gaauggaaccaaaggagaa

SEQ ID NO: 1941278 - RNA, 19 nt, Artificial Sequence
  Description of Artificial Sequence: Synthetic oligonucleotide
auuauacugguauguuauu

SEQ ID NO: 1941279 - RNA, 19 nt, Artificial Sequence
  Description of Artificial Sequence: Synthetic oligonucleotide
uucuaguaaguggggauuc

SEQ ID NO: 1941280 - RNA, 19 nt, Artificial Sequence
  Description of Artificial Sequence: Synthetic oligonucleotide
cacuugacuaucagaucug

SEQ ID NO: 1941281 - RNA, 19 nt, Artificial Sequence
  Description of Artificial Sequence: Synthetic oligonucleotide
cugcaauuccucauguaga

SEQ ID NO: 1941282 - RNA, 19 nt, Artificial Sequence
  Description of Artificial Sequence: Synthetic oligonucleotide
gaaucucuucuacaaugaa

SEQ ID NO: 1941283 - RNA, 19 nt, Artificial Sequence
  Description of Artificial Sequence: Synthetic oligonucleotide
caucagguaaucauagacu

SEQ ID NO: 1941284 - RNA, 19 nt, Artificial Sequence
  Description of Artificial Sequence: Synthetic oligonucleotide
guucuuaaagaggauucga

SEQ ID NO: 1941285 - RNA, 19 nt, Artificial Sequence
  Description of Artificial Sequence: Synthetic oligonucleotide
guucuuguaucacaaugua

SEQ ID NO: 1941286 - RNA, 19 nt, Artificial Sequence
  Description of Artificial Sequence: Synthetic oligonucleotide
auauagcaucucugagaag

SEQ ID NO: 1941287 - RNA, 19 nt, Artificial Sequence
  Description of Artificial Sequence: Synthetic oligonucleotide
gagggagcgagguucagua

SEQ ID NO: 1941288 - RNA, 19 nt, Artificial Sequence
  Description of Artificial Sequence: Synthetic oligonucleotide
cuagcuugcacugaagaua

SEQ ID NO: 1941289 - RNA, 19 nt, Artificial Sequence
  Description of Artificial Sequence: Synthetic oligonucleotide
ucuaguaaguggggauucu

SEQ ID NO: 1941290 - RNA, 19 nt, Artificial Sequence
  Description of Artificial Sequence: Synthetic oligonucleotide
cuauaccaguguuuacauc

SEQ ID NO: 1941291 - RNA, 19 nt, Artificial Sequence
  Description of Artificial Sequence: Synthetic oligonucleotide
auucgaguucccauuaaaa

SEQ ID NO: 1941292 - RNA, 19 nt, Artificial Sequence
  Description of Artificial Sequence: Synthetic oligonucleotide
gacaguaucugggucagcu

SEQ ID NO: 1941293 - RNA, 19 nt, Artificial Sequence
  Description of Artificial Sequence: Synthetic oligonucleotide
gguaaucauagacuccauc

SEQ ID NO: 1941294 - RNA, 19 nt, Artificial Sequence
  Description of Artificial Sequence: Synthetic oligonucleotide
cugauuugcuuuaauucua

SEQ ID NO: 1941295 - RNA, 19 nt, Artificial Sequence
  Description of Artificial Sequence: Synthetic oligonucleotide
cugcugcaagccaucaaac

SEQ ID NO: 1941296 - RNA, 19 nt, Artificial Sequence
  Description of Artificial Sequence: Synthetic oligonucleotide
ccaaaggagaagcugguuc

SEQ ID NO: 1941297 - RNA, 19 nt, Artificial Sequence
  Description of Artificial Sequence: Synthetic oligonucleotide
aacauuaggucagcugcuu

SEQ ID NO: 1941298 - RNA, 19 nt, Artificial Sequence
  Description of Artificial Sequence: Synthetic oligonucleotide
acaaaacauuaggucagcu

SEQ ID NO: 1941299 - RNA, 19 nt, Artificial Sequence
  Description of Artificial Sequence: Synthetic oligonucleotide
guuauucuauaccaguguu

SEQ ID NO: 1941300 - RNA, 19 nt, Artificial Sequence
  Description of Artificial Sequence: Synthetic oligonucleotide
uggggauucuuugaaucuc

SEQ ID NO: 1941301 - RNA, 19 nt, Artificial Sequence
  Description of Artificial Sequence: Synthetic oligonucleotide
ugauaacucuggucgcaaa

SEQ ID NO: 1941302 - RNA, 19 nt, Artificial Sequence
  Description of Artificial Sequence: Synthetic oligonucleotide
cacggcucccucuuguuuc

SEQ ID NO: 1941303 - RNA, 19 nt, Artificial Sequence
  Description of Artificial Sequence: Synthetic oligonucleotide
uucaaacgucuguuuugcu

SEQ ID NO: 1941304 - RNA, 19 nt, Artificial Sequence
  Description of Artificial Sequence: Synthetic oligonucleotide
guaccuuauuuagcucugg

SEQ ID NO: 1941305 - RNA, 19 nt, Artificial Sequence
  Description of Artificial Sequence: Synthetic oligonucleotide
cucgacagucagacaaaac

SEQ ID NO: 1941306 - RNA, 19 nt, Artificial Sequence
  Description of Artificial Sequence: Synthetic oligonucleotide
uccucgacagucagacaaa

SEQ ID NO: 1941307 - RNA, 19 nt, Artificial Sequence
  Description of Artificial Sequence: Synthetic oligonucleotide
acuucaguacagaugguuu

SEQ ID NO: 1941308 - RNA, 19 nt, Artificial Sequence
  Description of Artificial Sequence: Synthetic oligonucleotide
agucucagcacgguuugca

SEQ ID NO: 1941309 - RNA, 19 nt, Artificial Sequence
  Description of Artificial Sequence: Synthetic oligonucleotide
ucuguagucucagcacggu

SEQ ID NO: 1941310 - RNA, 19 nt, Artificial Sequence
  Description of Artificial Sequence: Synthetic oligonucleotide
gcugcucuagcuugcacug

SEQ ID NO: 1941311 - RNA, 19 nt, Artificial Sequence
  Description of Artificial Sequence: Synthetic oligonucleotide
gcuuaucuuggagggagcg

SEQ ID NO: 1941312 - RNA, 19 nt, Artificial Sequence
  Description of Artificial Sequence: Synthetic oligonucleotide
cuugacuaucagaucugga

SEQ ID NO: 1941313 - RNA, 19 nt, Artificial Sequence
  Description of Artificial Sequence: Synthetic oligonucleotide
uaacuucaguacagauggu

SEQ ID NO: 1941314 - RNA, 19 nt, Artificial Sequence
  Description of Artificial Sequence: Synthetic oligonucleotide
gaguucccauuaaaagaug

SEQ ID NO: 1941315 - RNA, 19 nt, Artificial Sequence
  Description of Artificial Sequence: Synthetic oligonucleotide
aggauucgaguucccauua

SEQ ID NO: 1941316 - RNA, 19 nt, Artificial Sequence
  Description of Artificial Sequence: Synthetic oligonucleotide
guguuuacauccaggaugu

SEQ ID NO: 1941317 - RNA, 19 nt, Artificial Sequence
  Description of Artificial Sequence: Synthetic oligonucleotide
acaguucuuguaucacaau

SEQ ID NO: 1941318 - RNA, 19 nt, Artificial Sequence
  Description of Artificial Sequence: Synthetic oligonucleotide
uguuaagcacuggcugcug

SEQ ID NO: 1941319 - RNA, 19 nt, Artificial Sequence
  Description of Artificial Sequence: Synthetic oligonucleotide
ccaaucuggaacuuggaaa

SEQ ID NO: 1941320 - RNA, 19 nt, Artificial Sequence
  Description of Artificial Sequence: Synthetic oligonucleotide
ggacugucaucuaugaaga

SEQ ID NO: 1941321 - RNA, 19 nt, Artificial Sequence
  Description of Artificial Sequence: Synthetic oligonucleotide
uacuuucauccaagcagua

SEQ ID NO: 1941322 - RNA, 19 nt, Artificial Sequence
  Description of Artificial Sequence: Synthetic oligonucleotide
cgacagucagacaaaacug

SEQ ID NO: 1941323 - RNA, 19 nt, Artificial Sequence
  Description of Artificial Sequence: Synthetic oligonucleotide
gagaagcguuaugagagaa

SEQ ID NO: 1941324 - RNA, 19 nt, Artificial Sequence
  Description of Artificial Sequence: Synthetic oligonucleotide
augaagggaucaaaucuaa

SEQ ID NO: 1941325 - RNA, 19 nt, Artificial Sequence
  Description of Artificial Sequence: Synthetic oligonucleotide
cauuaggucagcugcuugu

SEQ ID NO: 1941326 - RNA, 19 nt, Artificial Sequence
  Description of Artificial Sequence: Synthetic oligonucleotide
aaccgaaauaaaagaucuu

SEQ ID NO: 1941327 - RNA, 19 nt, Artificial Sequence
  Description of Artificial Sequence: Synthetic oligonucleotide
gagauagcauuucaucauu

SEQ ID NO: 1941328 - RNA, 19 nt, Artificial Sequence
  Description of Artificial Sequence: Synthetic oligonucleotide
uagcaucucugagaagcgu

SEQ ID NO: 1941329 - RNA, 19 nt, Artificial Sequence
  Description of Artificial Sequence: Synthetic oligonucleotide
cucguccuacauacaucag

SEQ ID NO: 1941330 - RNA, 19 nt, Artificial Sequence
  Description of Artificial Sequence: Synthetic oligonucleotide
auaccaguguuuacaucca

SEQ ID NO: 1941331 - RNA, 19 nt, Artificial Sequence
  Description of Artificial Sequence: Synthetic oligonucleotide
gcaguauguuuuauaaauc

SEQ ID NO: 1941332 - RNA, 19 nt, Artificial Sequence
  Description of Artificial Sequence: Synthetic oligonucleotide
uccgcucuguagucucagc

SEQ ID NO: 1941333 - RNA, 19 nt, Artificial Sequence
  Description of Artificial Sequence: Synthetic oligonucleotide
gucgcaaaauucuaucauu

SEQ ID NO: 1941334 - RNA, 19 nt, Artificial Sequence
  Description of Artificial Sequence: Synthetic oligonucleotide
acaugcacggcucccucuu

SEQ ID NO: 1941335 - RNA, 19 nt, Artificial Sequence
  Description of Artificial Sequence: Synthetic oligonucleotide
gcgagguucaguauuuuca

SEQ ID NO: 1941336 - RNA, 19 nt, Artificial Sequence
  Description of Artificial Sequence: Synthetic oligonucleotide
augcacggcucccucuugu

SEQ ID NO: 1941337 - RNA, 19 nt, Artificial Sequence
  Description of Artificial Sequence: Synthetic oligonucleotide
acaguaucugggucagcua

SEQ ID NO: 1941338 - RNA, 19 nt, Artificial Sequence
  Description of Artificial Sequence: Synthetic oligonucleotide
caguguacauuuccaaugu

SEQ ID NO: 1941339 - RNA, 19 nt, Artificial Sequence
  Description of Artificial Sequence: Synthetic oligonucleotide
gaggacugucaucuaugaa

SEQ ID NO: 1941340 - RNA, 19 nt, Artificial Sequence
  Description of Artificial Sequence: Synthetic oligonucleotide
auguaccaacaaaacauua

SEQ ID NO: 1941341 - RNA, 19 nt, Artificial Sequence
  Description of Artificial Sequence: Synthetic oligonucleotide
agauagcauuucaucauuu

SEQ ID NO: 1941342 - RNA, 19 nt, Artificial Sequence
  Description of Artificial Sequence: Synthetic oligonucleotide
gacuccauccacagucauc

SEQ ID NO: 1941343 - RNA, 19 nt, Artificial Sequence
  Description of Artificial Sequence: Synthetic oligonucleotide
uugcuuccgcucuguaguc

SEQ ID NO: 1941344 - RNA, 19 nt, Artificial Sequence
  Description of Artificial Sequence: Synthetic oligonucleotide
cuaacucguccuacauaca

SEQ ID NO: 1941345 - RNA, 19 nt, Artificial Sequence
  Description of Artificial Sequence: Synthetic oligonucleotide
agaagcguuaugagagaaa

SEQ ID NO: 1941346 - RNA, 19 nt, Artificial Sequence
  Description of Artificial Sequence: Synthetic oligonucleotide
acgucuguuuugcuccuuu

SEQ ID NO: 1941347 - RNA, 19 nt, Artificial Sequence
  Description of Artificial Sequence: Synthetic oligonucleotide
uccaagcaguauguuuuau

SEQ ID NO: 1941348 - RNA, 19 nt, Artificial Sequence
  Description of Artificial Sequence: Synthetic oligonucleotide
cuuaucuuggagggagcga

SEQ ID NO: 1941349 - RNA, 19 nt, Artificial Sequence
  Description of Artificial Sequence: Synthetic oligonucleotide
auuccucgacagucagaca

SEQ ID NO: 1941350 - RNA, 19 nt, Artificial Sequence
  Description of Artificial Sequence: Synthetic oligonucleotide
ggaaaacuaacucguccua

SEQ ID NO: 1941351 - RNA, 19 nt, Artificial Sequence
  Description of Artificial Sequence: Synthetic oligonucleotide
gaugucauggagguagcuu

SEQ ID NO: 1941352 - RNA, 19 nt, Artificial Sequence
  Description of Artificial Sequence: Synthetic oligonucleotide
ggucagcugcuuguuaagc

SEQ ID NO: 1941353 - RNA, 19 nt, Artificial Sequence
  Description of Artificial Sequence: Synthetic oligonucleotide
cugcaaauuucugcaagaa

SEQ ID NO: 1941354 - RNA, 19 nt, Artificial Sequence
  Description of Artificial Sequence: Synthetic oligonucleotide
caggacaugcacggcuccc

SEQ ID NO: 1941355 - RNA, 19 nt, Artificial Sequence
  Description of Artificial Sequence: Synthetic oligonucleotide
aggacaugcacggcucccu

SEQ ID NO: 1941356 - RNA, 19 nt, Artificial Sequence
  Description of Artificial Sequence: Synthetic oligonucleotide
gcguuaugagagaaaccag

SEQ ID NO: 1941357 - RNA, 19 nt, Artificial Sequence
  Description of Artificial Sequence: Synthetic oligonucleotide
ggagguagcuuccuuuugu

SEQ ID NO: 1941358 - RNA, 19 nt, Artificial Sequence
  Description of Artificial Sequence: Synthetic oligonucleotide
ugcuuccgcucuguagucu

SEQ ID NO: 1941359 - RNA, 19 nt, Artificial Sequence
  Description of Artificial Sequence: Synthetic oligonucleotide
uagucucagcacgguuugc

SEQ ID NO: 1941360 - RNA, 19 nt, Artificial Sequence
  Description of Artificial Sequence: Synthetic oligonucleotide
gccaaucuggaacuuggaa

SEQ ID NO: 1941361 - RNA, 19 nt, Artificial Sequence
  Description of Artificial Sequence: Synthetic oligonucleotide
cacgguuugcauuauucuu

SEQ ID NO: 1941362 - RNA, 19 nt, Artificial Sequence
  Description of Artificial Sequence: Synthetic oligonucleotide
caccaauacacuugacuau

SEQ ID NO: 1941363 - RNA, 19 nt, Artificial Sequence
  Description of Artificial Sequence: Synthetic oligonucleotide
ggucgcaaaauucuaucau

SEQ ID NO: 1941364 - RNA, 19 nt, Artificial Sequence
  Description of Artificial Sequence: Synthetic oligonucleotide
ugaagccaaucuggaacuu

SEQ ID NO: 1941365 - RNA, 19 nt, Artificial Sequence
  Description of Artificial Sequence: Synthetic oligonucleotide
cucuggucgcaaaauucua

SEQ ID NO: 1941366 - RNA, 19 nt, Artificial Sequence
  Description of Artificial Sequence: Synthetic oligonucleotide
agagcugcucuagcuugca

SEQ ID NO: 1941367 - RNA, 19 nt, Artificial Sequence
  Description of Artificial Sequence: Synthetic oligonucleotide
ccgaaauaaaagaucuugu

SEQ ID NO: 1941368 - RNA, 19 nt, Artificial Sequence
  Description of Artificial Sequence: Synthetic oligonucleotide
cauggagguagcuuccuuu

SEQ ID NO: 1941369 - RNA, 19 nt, Artificial Sequence
  Description of Artificial Sequence: Synthetic oligonucleotide
gacaugcacggcucccucu

SEQ ID NO: 1941370 - RNA, 19 nt, Artificial Sequence
  Description of Artificial Sequence: Synthetic oligonucleotide
caucaaacagaagucugau

SEQ ID NO: 1941371 - RNA, 19 nt, Artificial Sequence
  Description of Artificial Sequence: Synthetic oligonucleotide
ugacaguaucugggucagc

SEQ ID NO: 1941372 - RNA, 19 nt, Artificial Sequence
  Description of Artificial Sequence: Synthetic oligonucleotide
uguuuacauccaggauguc

SEQ ID NO: 1941373 - RNA, 19 nt, Artificial Sequence
  Description of Artificial Sequence: Synthetic oligonucleotide
ccuacauacaucagguaau

SEQ ID NO: 1941374 - RNA, 19 nt, Artificial Sequence
  Description of Artificial Sequence: Synthetic oligonucleotide
cuccauccacagucaucac

SEQ ID NO: 1941375 - RNA, 19 nt, Artificial Sequence
  Description of Artificial Sequence: Synthetic oligonucleotide
guccuacauacaucaggua

SEQ ID NO: 1941376 - RNA, 19 nt, Artificial Sequence
  Description of Artificial Sequence: Synthetic oligonucleotide
cgcucuguagucucagcac

SEQ ID NO: 1941377 - RNA, 19 nt, Artificial Sequence
  Description of Artificial Sequence: Synthetic oligonucleotide
aacgucuguuuugcuccuu

SEQ ID NO: 1941378 - RNA, 19 nt, Artificial Sequence
  Description of Artificial Sequence: Synthetic oligonucleotide
cagcugcuuguuaagcacu

SEQ ID NO: 1941379 - RNA, 19 nt, Artificial Sequence
  Description of Artificial Sequence: Synthetic oligonucleotide
cgaguucccauuaaaagau

SEQ ID NO: 1941380 - RNA, 19 nt, Artificial Sequence
  Description of Artificial Sequence: Synthetic oligonucleotide
cuaucagaucuggaaugua

SEQ ID NO: 1941381 - RNA, 19 nt, Artificial Sequence
  Description of Artificial Sequence: Synthetic oligonucleotide
ggauucgaguucccauuaa

SEQ ID NO: 1941382 - RNA, 19 nt, Artificial Sequence
  Description of Artificial Sequence: Synthetic oligonucleotide
cauagacuccauccacagu

SEQ ID NO: 1941383 - RNA, 19 nt, Artificial Sequence
  Description of Artificial Sequence: Synthetic oligonucleotide
cguccuacauacaucaggu

SEQ ID NO: 1941384 - RNA, 19 nt, Artificial Sequence
  Description of Artificial Sequence: Synthetic oligonucleotide
caguguuuacauccaggau

SEQ ID NO: 1941385 - RNA, 19 nt, Artificial Sequence
  Description of Artificial Sequence: Synthetic oligonucleotide
ggacaugcacggcucccuc

SEQ ID NO: 1941386 - RNA, 19 nt, Artificial Sequence
  Description of Artificial Sequence: Synthetic oligonucleotide
ccgcucuguagucucagca

SEQ ID NO: 1941387 - RNA, 19 nt, Artificial Sequence
  Description of Artificial Sequence: Synthetic oligonucleotide
gggagcgagguucaguauu

SEQ ID NO: 1941388 - RNA, 19 nt, Artificial Sequence
  Description of Artificial Sequence: Synthetic oligonucleotide
cuaguaaguggggauucuu

SEQ ID NO: 1941389 - RNA, 19 nt, Artificial Sequence
  Description of Artificial Sequence: Synthetic oligonucleotide
ccucauguagagauagcau

SEQ ID NO: 1941390 - RNA, 19 nt, Artificial Sequence
  Description of Artificial Sequence: Synthetic oligonucleotide
cugcucuagcuugcacuga

SEQ ID NO: 1941391 - RNA, 19 nt, Artificial Sequence
  Description of Artificial Sequence: Synthetic oligonucleotide
ccaugaaguaguucugauu

SEQ ID NO: 1941392 - RNA, 19 nt, Artificial Sequence
  Description of Artificial Sequence: Synthetic oligonucleotide
caucucugagaagcguuau

SEQ ID NO: 1941393 - RNA, 19 nt, Artificial Sequence
  Description of Artificial Sequence: Synthetic oligonucleotide
ggcugcugcaagccaucaa

SEQ ID NO: 1941394 - RNA, 19 nt, Artificial Sequence
  Description of Artificial Sequence: Synthetic oligonucleotide
ggagcgagguucaguauuu

SEQ ID NO: 1941395 - RNA, 19 nt, Artificial Sequence
  Description of Artificial Sequence: Synthetic oligonucleotide
ggagggagcgagguucagu

SEQ ID NO: 1941396 - RNA, 19 nt, Artificial Sequence
  Description of Artificial Sequence: Synthetic oligonucleotide
cucucauacuugguuucuu

SEQ ID NO: 1941397 - RNA, 19 nt, Artificial Sequence
  Description of Artificial Sequence: Synthetic oligonucleotide
cccucuuguuucagaaagu

SEQ ID NO: 1941398 - RNA, 19 nt, Artificial Sequence
  Description of Artificial Sequence: Synthetic oligonucleotide
ccucgacagucagacaaaa

SEQ ID NO: 1941399 - RNA, 19 nt, Artificial Sequence
  Description of Artificial Sequence: Synthetic oligonucleotide
gcacggcucccucuuguuu

SEQ ID NO: 1941400 - RNA, 19 nt, Artificial Sequence
  Description of Artificial Sequence: Synthetic oligonucleotide
cagcacgguuugcauuauu

SEQ ID NO: 1941401 - RNA, 19 nt, Artificial Sequence
  Description of Artificial Sequence: Synthetic oligonucleotide
uuuugagacagucuugggg

SEQ ID NO: 1941402 - RNA, 19 nt, Artificial Sequence
  Description of Artificial Sequence: Synthetic oligonucleotide
uagaacuccacuuugcagg

SEQ ID NO: 1941403 - RNA, 19 nt, Artificial Sequence
  Description of Artificial Sequence: Synthetic oligonucleotide
ucagagucagacaacgugg

SEQ ID NO: 1941404 - RNA, 19 nt, Artificial Sequence
  Description of Artificial Sequence: Synthetic oligonucleotide
uuugagacagucuugggga

SEQ ID NO: 1941405 - RNA, 19 nt, Artificial Sequence
  Description of Artificial Sequence: Synthetic oligonucleotide
gaagguagggaucagugug

SEQ ID NO: 1941406 - RNA, 19 nt, Artificial Sequence
  Description of Artificial Sequence: Synthetic oligonucleotide
ugcgcaaacucacaagggg

SEQ ID NO: 1941407 - RNA, 19 nt, Artificial Sequence
  Description of Artificial Sequence: Synthetic oligonucleotide
cucacuacccacaucgucg

SEQ ID NO: 1941408 - RNA, 19 nt, Artificial Sequence
  Description of Artificial Sequence: Synthetic oligonucleotide
ugacauagcagagugcacg

SEQ ID NO: 1941409 - RNA, 19 nt, Artificial Sequence
  Description of Artificial Sequence: Synthetic oligonucleotide
agugcauccaacacggccc

SEQ ID NO: 1941410 - RNA, 19 nt, Artificial Sequence
  Description of Artificial Sequence: Synthetic oligonucleotide
gagugcacguacucgaagg

SEQ ID NO: 1941411 - RNA, 19 nt, Artificial Sequence
  Description of Artificial Sequence: Synthetic oligonucleotide
ucuaccucaguggagugcg

SEQ ID NO: 1941412 - RNA, 19 nt, Artificial Sequence
  Description of Artificial Sequence: Synthetic oligonucleotide
ucgaagguagggaucagug

SEQ ID NO: 1941413 - RNA, 19 nt, Artificial Sequence
  Description of Artificial Sequence: Synthetic oligonucleotide
cugaugacauagcagagug

SEQ ID NO: 1941414 - RNA, 19 nt, Artificial Sequence
  Description of Artificial Sequence: Synthetic oligonucleotide
ugugcaucaccgcugaguc

SEQ ID NO: 1941415 - RNA, 19 nt, Artificial Sequence
  Description of Artificial Sequence: Synthetic oligonucleotide
cauguggggauguggagcg

SEQ ID NO: 1941416 - RNA, 19 nt, Artificial Sequence
  Description of Artificial Sequence: Synthetic oligonucleotide
agaacccugaugcccagcg

SEQ ID NO: 1941417 - RNA, 19 nt, Artificial Sequence
  Description of Artificial Sequence: Synthetic oligonucleotide
acaacgugggcagugacuc

SEQ ID NO: 1941418 - RNA, 19 nt, Artificial Sequence
  Description of Artificial Sequence: Synthetic oligonucleotide
ggugcgcaaacucacaagg

SEQ ID NO: 1941419 - RNA, 19 nt, Artificial Sequence
  Description of Artificial Sequence: Synthetic oligonucleotide
gacucacucacugacguag

SEQ ID NO: 1941420 - RNA, 19 nt, Artificial Sequence
  Description of Artificial Sequence: Synthetic oligonucleotide
cuugcaggggccuugcggc

SEQ ID NO: 1941421 - RNA, 19 nt, Artificial Sequence
  Description of Artificial Sequence: Synthetic oligonucleotide
uccaacacggcccgcaggc

SEQ ID NO: 1941422 - RNA, 19 nt, Artificial Sequence
  Description of Artificial Sequence: Synthetic oligonucleotide
ugcccggagaugcaggagg

SEQ ID NO: 1941423 - RNA, 19 nt, Artificial Sequence
  Description of Artificial Sequence: Synthetic oligonucleotide
uguggagcggcgagcaagg

SEQ ID NO: 1941424 - RNA, 19 nt, Artificial Sequence
  Description of Artificial Sequence: Synthetic oligonucleotide
aacgugggcagugacucac

SEQ ID NO: 1941425 - RNA, 19 nt, Artificial Sequence
  Description of Artificial Sequence: Synthetic oligonucleotide
agcagugcauccaacacgg

SEQ ID NO: 1941426 - RNA, 19 nt, Artificial Sequence
  Description of Artificial Sequence: Synthetic oligonucleotide
aucaccgcugagucgaagg

SEQ ID NO: 1941427 - RNA, 19 nt, Artificial Sequence
  Description of Artificial Sequence: Synthetic oligonucleotide
gauuggugggguugggcgg

SEQ ID NO: 1941428 - RNA, 19 nt, Artificial Sequence
  Description of Artificial Sequence: Synthetic oligonucleotide
caggggaaggcuaagcccc

SEQ ID NO: 1941429 - RNA, 19 nt, Artificial Sequence
  Description of Artificial Sequence: Synthetic oligonucleotide
ucaucuaccucaguggagu

SEQ ID NO: 1941430 - RNA, 19 nt, Artificial Sequence
  Description of Artificial Sequence: Synthetic oligonucleotide
cuagaacuccacuuugcag

SEQ ID NO: 1941431 - RNA, 19 nt, Artificial Sequence
  Description of Artificial Sequence: Synthetic oligonucleotide
agucuuggggacugagggc

SEQ ID NO: 1941432 - RNA, 19 nt, Artificial Sequence
  Description of Artificial Sequence: Synthetic oligonucleotide
cacaggaucagagucagac

SEQ ID NO: 1941433 - RNA, 19 nt, Artificial Sequence
  Description of Artificial Sequence: Synthetic oligonucleotide
cauagcagagugcacguac

SEQ ID NO: 1941434 - RNA, 19 nt, Artificial Sequence
  Description of Artificial Sequence: Synthetic oligonucleotide
agagucagacaacgugggc

SEQ ID NO: 1941435 - RNA, 19 nt, Artificial Sequence
  Description of Artificial Sequence: Synthetic oligonucleotide
ugcaucaccgcugagucga

SEQ ID NO: 1941436 - RNA, 19 nt, Artificial Sequence
  Description of Artificial Sequence: Synthetic oligonucleotide
gaaggcuaagccccgaguc

SEQ ID NO: 1941437 - RNA, 19 nt, Artificial Sequence
  Description of Artificial Sequence: Synthetic oligonucleotide
ugcacucucacuacccaca

SEQ ID NO: 1941438 - RNA, 19 nt, Artificial Sequence
  Description of Artificial Sequence: Synthetic oligonucleotide
ucgggguccaccaugcaga

SEQ ID NO: 1941439 - RNA, 19 nt, Artificial Sequence
  Description of Artificial Sequence: Synthetic oligonucleotide
agacacuuuugagacaguc

SEQ ID NO: 1941440 - RNA, 19 nt, Artificial Sequence
  Description of Artificial Sequence: Synthetic oligonucleotide
ugcacguacucgaaggaaa

SEQ ID NO: 1941441 - RNA, 19 nt, Artificial Sequence
  Description of Artificial Sequence: Synthetic oligonucleotide
agugcggugagcccagcuc

SEQ ID NO: 1941442 - RNA, 19 nt, Artificial Sequence
  Description of Artificial Sequence: Synthetic oligonucleotide
gacucgguccccugcaggg

SEQ ID NO: 1941443 - RNA, 19 nt, Artificial Sequence
  Description of Artificial Sequence: Synthetic oligonucleotide
cagagucagacaacguggg

SEQ ID NO: 1941444 - RNA, 19 nt, Artificial Sequence
  Description of Artificial Sequence: Synthetic oligonucleotide
ggauuggugggguugggcg

SEQ ID NO: 1941445 - RNA, 19 nt, Artificial Sequence
  Description of Artificial Sequence: Synthetic oligonucleotide
ugcgucuccucauaccacc

SEQ ID NO: 1941446 - RNA, 19 nt, Artificial Sequence
  Description of Artificial Sequence: Synthetic oligonucleotide
ggagacacuuuugagacag

SEQ ID NO: 1941447 - RNA, 19 nt, Artificial Sequence
  Description of Artificial Sequence: Synthetic oligonucleotide
acagcgacucaucuaccuc

SEQ ID NO: 1941448 - RNA, 19 nt, Artificial Sequence
  Description of Artificial Sequence: Synthetic oligonucleotide
cagugcauccaacacggcc

SEQ ID NO: 1941449 - RNA, 19 nt, Artificial Sequence
  Description of Artificial Sequence: Synthetic oligonucleotide
uggcaggagacacuuuuga

SEQ ID NO: 1941450 - RNA, 19 nt, Artificial Sequence
  Description of Artificial Sequence: Synthetic oligonucleotide
gcucaaaggacacggacag

SEQ ID NO: 1941451 - RNA, 19 nt, Artificial Sequence
  Description of Artificial Sequence: Synthetic oligonucleotide
ucugcaaccggcacaggau

SEQ ID NO: 1941452 - RNA, 19 nt, Artificial Sequence
  Description of Artificial Sequence: Synthetic oligonucleotide
gagggcuuccuggugaggg

SEQ ID NO: 1941453 - RNA, 19 nt, Artificial Sequence
  Description of Artificial Sequence: Synthetic oligonucleotide
caggcauagguccacauca

SEQ ID NO: 1941454 - RNA, 19 nt, Artificial Sequence
  Description of Artificial Sequence: Synthetic oligonucleotide
gaacgagcgcugcuguccg

SEQ ID NO: 1941455 - RNA, 19 nt, Artificial Sequence
  Description of Artificial Sequence: Synthetic oligonucleotide
guagggaucagugugaccu

SEQ ID NO: 1941456 - RNA, 19 nt, Artificial Sequence
  Description of Artificial Sequence: Synthetic oligonucleotide
gaaggccucguccugcaug

SEQ ID NO: 1941457 - RNA, 19 nt, Artificial Sequence
  Description of Artificial Sequence: Synthetic oligonucleotide
acugagggcuuccugguga

SEQ ID NO: 1941458 - RNA, 19 nt, Artificial Sequence
  Description of Artificial Sequence: Synthetic oligonucleotide
uggcuagaacuccacuuug

SEQ ID NO: 1941459 - RNA, 19 nt, Artificial Sequence
  Description of Artificial Sequence: Synthetic oligonucleotide
gagucagacaacgugggca

SEQ ID NO: 1941460 - RNA, 19 nt, Artificial Sequence
  Description of Artificial Sequence: Synthetic oligonucleotide
uuaguggccggacucgguc

SEQ ID NO: 1941461 - RNA, 19 nt, Artificial Sequence
  Description of Artificial Sequence: Synthetic oligonucleotide
ugugaccugcaggucaagg

SEQ ID NO: 1941462 - RNA, 19 nt, Artificial Sequence
  Description of Artificial Sequence: Synthetic oligonucleotide
aguggccggacucgguccc

SEQ ID NO: 1941463 - RNA, 19 nt, Artificial Sequence
  Description of Artificial Sequence: Synthetic oligonucleotide
agcagagugcacguacucg

SEQ ID NO: 1941464 - RNA, 19 nt, Artificial Sequence
  Description of Artificial Sequence: Synthetic oligonucleotide
aucuaccucaguggagugc

SEQ ID NO: 1941465 - RNA, 19 nt, Artificial Sequence
  Description of Artificial Sequence: Synthetic oligonucleotide
agagugcacguacucgaag

SEQ ID NO: 1941466 - RNA, 19 nt, Artificial Sequence
  Description of Artificial Sequence: Synthetic oligonucleotide
ugagucgaagguagggauc

SEQ ID NO: 1941467 - RNA, 19 nt, Artificial Sequence
  Description of Artificial Sequence: Synthetic oligonucleotide
agacaacgugggcagugac

SEQ ID NO: 1941468 - RNA, 19 nt, Artificial Sequence
  Description of Artificial Sequence: Synthetic oligonucleotide
aaggggacaccaggcauag

SEQ ID NO: 1941469 - RNA, 19 nt, Artificial Sequence
  Description of Artificial Sequence: Synthetic oligonucleotide
cacuuugcaggcagggaag

SEQ ID NO: 1941470 - RNA, 19 nt, Artificial Sequence
  Description of Artificial Sequence: Synthetic oligonucleotide
aggucaaggucccacugcu

SEQ ID NO: 1941471 - RNA, 19 nt, Artificial Sequence
  Description of Artificial Sequence: Synthetic oligonucleotide
ucacugcgggcacuuagug

SEQ ID NO: 1941472 - RNA, 19 nt, Artificial Sequence
  Description of Artificial Sequence: Synthetic oligonucleotide
caggaucagagucagacaa

SEQ ID NO: 1941473 - RNA, 19 nt, Artificial Sequence
  Description of Artificial Sequence: Synthetic oligonucleotide
cuacccacaucgucgucgg

SEQ ID NO: 1941474 - RNA, 19 nt, Artificial Sequence
  Description of Artificial Sequence: Synthetic oligonucleotide
gacaccaugcugccacugc

SEQ ID NO: 1941475 - RNA, 19 nt, Artificial Sequence
  Description of Artificial Sequence: Synthetic oligonucleotide
ucguccugcauggacacca

SEQ ID NO: 1941476 - RNA, 19 nt, Artificial Sequence
  Description of Artificial Sequence: Synthetic oligonucleotide
cagaaccugcucaaaggac

SEQ ID NO: 1941477 - RNA, 19 nt, Artificial Sequence
  Description of Artificial Sequence: Synthetic oligonucleotide
ugcgaccaggauugguggg

SEQ ID NO: 1941478 - RNA, 19 nt, Artificial Sequence
  Description of Artificial Sequence: Synthetic oligonucleotide
agugacucacucacugacg

SEQ ID NO: 1941479 - RNA, 19 nt, Artificial Sequence
  Description of Artificial Sequence: Synthetic oligonucleotide
agugcacguacucgaagga

SEQ ID NO: 1941480 - RNA, 19 nt, Artificial Sequence
  Description of Artificial Sequence: Synthetic oligonucleotide
cucaucuaccucaguggag

SEQ ID NO: 1941481 - RNA, 19 nt, Artificial Sequence
  Description of Artificial Sequence: Synthetic oligonucleotide
ucacuacccacaucgucgu

SEQ ID NO: 1941482 - RNA, 19 nt, Artificial Sequence
  Description of Artificial Sequence: Synthetic oligonucleotide
aggcuaagccccgagucac

SEQ ID NO: 1941483 - RNA, 19 nt, Artificial Sequence
  Description of Artificial Sequence: Synthetic oligonucleotide
ugcaaccggcacaggauca

SEQ ID NO: 1941484 - RNA, 19 nt, Artificial Sequence
  Description of Artificial Sequence: Synthetic oligonucleotide
acaggaucagagucagaca

SEQ ID NO: 1941485 - RNA, 19 nt, Artificial Sequence
  Description of Artificial Sequence: Synthetic oligonucleotide
ggacaccaggcauaggucc

SEQ ID NO: 1941486 - RNA, 19 nt, Artificial Sequence
  Description of Artificial Sequence: Synthetic oligonucleotide
aagguagggaucaguguga

SEQ ID NO: 1941487 - RNA, 19 nt, Artificial Sequence
  Description of Artificial Sequence: Synthetic oligonucleotide
cacuuuugagacagucuug

SEQ ID NO: 1941488 - RNA, 19 nt, Artificial Sequence
  Description of Artificial Sequence: Synthetic oligonucleotide
accgcugagucgaagguag

SEQ ID NO: 1941489 - RNA, 19 nt, Artificial Sequence
  Description of Artificial Sequence: Synthetic oligonucleotide
uccggguccagguggcccg

SEQ ID NO: 1941490 - RNA, 19 nt, Artificial Sequence
  Description of Artificial Sequence: Synthetic oligonucleotide
ucaccgcugagucgaaggu

SEQ ID NO: 1941491 - RNA, 19 nt, Artificial Sequence
  Description of Artificial Sequence: Synthetic oligonucleotide
cuugcggugcgcaaacuca

SEQ ID NO: 1941492 - RNA, 19 nt, Artificial Sequence
  Description of Artificial Sequence: Synthetic oligonucleotide
ggcagugacucacucacug

SEQ ID NO: 1941493 - RNA, 19 nt, Artificial Sequence
  Description of Artificial Sequence: Synthetic oligonucleotide
acuuugcaggcagggaagg

SEQ ID NO: 1941494 - RNA, 19 nt, Artificial Sequence
  Description of Artificial Sequence: Synthetic oligonucleotide
cacugcgggcacuuagugg

SEQ ID NO: 1941495 - RNA, 19 nt, Artificial Sequence
  Description of Artificial Sequence: Synthetic oligonucleotide
cagaggagguccucguggc

SEQ ID NO: 1941496 - RNA, 19 nt, Artificial Sequence
  Description of Artificial Sequence: Synthetic oligonucleotide
uagacaggggagccagccc

SEQ ID NO: 1941497 - RNA, 19 nt, Artificial Sequence
  Description of Artificial Sequence: Synthetic oligonucleotide
ugggcggcugccuggcucg

SEQ ID NO: 1941498 - RNA, 19 nt, Artificial Sequence
  Description of Artificial Sequence: Synthetic oligonucleotide
aggacacggacagcgacuc

SEQ ID NO: 1941499 - RNA, 19 nt, Artificial Sequence
  Description of Artificial Sequence: Synthetic oligonucleotide
ugcggugagcccagcuccg

SEQ ID NO: 1941500 - RNA, 19 nt, Artificial Sequence
  Description of Artificial Sequence: Synthetic oligonucleotide
aaggucccacugcugcuug

SEQ ID NO: 1941501 - RNA, 19 nt, Artificial Sequence
  Description of Artificial Sequence: Synthetic oligonucleotide
auguggagcggcgagcaag

SEQ ID NO: 1941502 - RNA, 19 nt, Artificial Sequence
  Description of Artificial Sequence: Synthetic oligonucleotide
uugcggugcgcaaacucac

SEQ ID NO: 1941503 - RNA, 19 nt, Artificial Sequence
  Description of Artificial Sequence: Synthetic oligonucleotide
ucgucggagucugcaaccg

SEQ ID NO: 1941504 - RNA, 19 nt, Artificial Sequence
  Description of Artificial Sequence: Synthetic oligonucleotide
aaccggcacaggaucagag

SEQ ID NO: 1941505 - RNA, 19 nt, Artificial Sequence
  Description of Artificial Sequence: Synthetic oligonucleotide
ucggagucugcaaccggca

SEQ ID NO: 1941506 - RNA, 19 nt, Artificial Sequence
  Description of Artificial Sequence: Synthetic oligonucleotide
gucgucggagucugcaacc

SEQ ID NO: 1941507 - RNA, 19 nt, Artificial Sequence
  Description of Artificial Sequence: Synthetic oligonucleotide
aggaucagagucagacaac

SEQ ID NO: 1941508 - RNA, 19 nt, Artificial Sequence
  Description of Artificial Sequence: Synthetic oligonucleotide
agcuccgcaggcaacgagg

SEQ ID NO: 1941509 - RNA, 19 nt, Artificial Sequence
  Description of Artificial Sequence: Synthetic oligonucleotide
ugcggcugcgaccaggauu

SEQ ID NO: 1941510 - RNA, 19 nt, Artificial Sequence
  Description of Artificial Sequence: Synthetic oligonucleotide
cucacugacguaggcggcg

SEQ ID NO: 1941511 - RNA, 19 nt, Artificial Sequence
  Description of Artificial Sequence: Synthetic oligonucleotide
ugguacacggggugugggc

SEQ ID NO: 1941512 - RNA, 19 nt, Artificial Sequence
  Description of Artificial Sequence: Synthetic oligonucleotide
gaaccugcucaaaggacac

SEQ ID NO: 1941513 - RNA, 19 nt, Artificial Sequence
  Description of Artificial Sequence: Synthetic oligonucleotide
caguggagugcggugagcc

SEQ ID NO: 1941514 - RNA, 19 nt, Artificial Sequence
  Description of Artificial Sequence: Synthetic oligonucleotide
ugcuguccgagcugcccgg

SEQ ID NO: 1941515 - RNA, 19 nt, Artificial Sequence
  Description of Artificial Sequence: Synthetic oligonucleotide
ugcgaacgagcgcugcugu

SEQ ID NO: 1941516 - RNA, 19 nt, Artificial Sequence
  Description of Artificial Sequence: Synthetic oligonucleotide
uaguggccggacucggucc

SEQ ID NO: 1941517 - RNA, 19 nt, Artificial Sequence
  Description of Artificial Sequence: Synthetic oligonucleotide
ucgugcgucuccucauacc

SEQ ID NO: 1941518 - RNA, 19 nt, Artificial Sequence
  Description of Artificial Sequence: Synthetic oligonucleotide
auccaacacggcccgcagg

SEQ ID NO: 1941519 - RNA, 19 nt, Artificial Sequence
  Description of Artificial Sequence: Synthetic oligonucleotide
ccuggugaggggcacacgg

SEQ ID NO: 1941520 - RNA, 19 nt, Artificial Sequence
  Description of Artificial Sequence: Synthetic oligonucleotide
uggagugcggugagcccag

SEQ ID NO: 1941521 - RNA, 19 nt, Artificial Sequence
  Description of Artificial Sequence: Synthetic oligonucleotide
ggcaggagacacuuuugag

SEQ ID NO: 1941522 - RNA, 19 nt, Artificial Sequence
  Description of Artificial Sequence: Synthetic oligonucleotide
cacuuaguggccggacucg

SEQ ID NO: 1941523 - RNA, 19 nt, Artificial Sequence
  Description of Artificial Sequence: Synthetic oligonucleotide
caccaugcugccacugccc

SEQ ID NO: 1941524 - RNA, 19 nt, Artificial Sequence
  Description of Artificial Sequence: Synthetic oligonucleotide
gggcccuuggucuuggcag

SEQ ID NO: 1941525 - RNA, 19 nt, Artificial Sequence
  Description of Artificial Sequence: Synthetic oligonucleotide
cagcgguggugguacacgg

SEQ ID NO: 1941526 - RNA, 19 nt, Artificial Sequence
  Description of Artificial Sequence: Synthetic oligonucleotide
gucugcaaccggcacagga

SEQ ID NO: 1941527 - RNA, 19 nt, Artificial Sequence
  Description of Artificial Sequence: Synthetic oligonucleotide
gugcgcaaacucacaaggg

SEQ ID NO: 1941528 - RNA, 19 nt, Artificial Sequence
  Description of Artificial Sequence: Synthetic oligonucleotide
accaggauuggugggguug

SEQ ID NO: 1941529 - RNA, 19 nt, Artificial Sequence
  Description of Artificial Sequence: Synthetic oligonucleotide
uagggaucagugugaccug

SEQ ID NO: 1941530 - RNA, 19 nt, Artificial Sequence
  Description of Artificial Sequence: Synthetic oligonucleotide
acucacugacguaggcggc

SEQ ID NO: 1941531 - RNA, 19 nt, Artificial Sequence
  Description of Artificial Sequence: Synthetic oligonucleotide
gucggagucugcaaccggc

SEQ ID NO: 1941532 - RNA, 19 nt, Artificial Sequence
  Description of Artificial Sequence: Synthetic oligonucleotide
uccucguggcaggagacac

SEQ ID NO: 1941533 - RNA, 19 nt, Artificial Sequence
  Description of Artificial Sequence: Synthetic oligonucleotide
gacauagcagagugcacgu

SEQ ID NO: 1941534 - RNA, 19 nt, Artificial Sequence
  Description of Artificial Sequence: Synthetic oligonucleotide
caggcaacgaggggugugg

SEQ ID NO: 1941535 - RNA, 19 nt, Artificial Sequence
  Description of Artificial Sequence: Synthetic oligonucleotide
gcgguggugguacacgggg

SEQ ID NO: 1941536 - RNA, 19 nt, Artificial Sequence
  Description of Artificial Sequence: Synthetic oligonucleotide
agcaaggcgcaggggaagg

SEQ ID NO: 1941537 - RNA, 19 nt, Artificial Sequence
  Description of Artificial Sequence: Synthetic oligonucleotide
ugggcagcgggucccuggc

SEQ ID NO: 1941538 - RNA, 19 nt, Artificial Sequence
  Description of Artificial Sequence: Synthetic oligonucleotide
ucuuccuggcgcuggcccu

SEQ ID NO: 1941539 - RNA, 19 nt, Artificial Sequence
  Description of Artificial Sequence: Synthetic oligonucleotide
gguggugguacacggggug

SEQ ID NO: 1941540 - RNA, 19 nt, Artificial Sequence
  Description of Artificial Sequence: Synthetic oligonucleotide
gugagcccagcuccgcagg

SEQ ID NO: 1941541 - RNA, 19 nt, Artificial Sequence
  Description of Artificial Sequence: Synthetic oligonucleotide
ugcggugcgcaaacucaca

SEQ ID NO: 1941542 - RNA, 19 nt, Artificial Sequence
  Description of Artificial Sequence: Synthetic oligonucleotide
cugcaaccggcacaggauc

SEQ ID NO: 1941543 - RNA, 19 nt, Artificial Sequence
  Description of Artificial Sequence: Synthetic oligonucleotide
ggaucagugugaccugcag

SEQ ID NO: 1941544 - RNA, 19 nt, Artificial Sequence
  Description of Artificial Sequence: Synthetic oligonucleotide
gaacccugaugcccagcgc

SEQ ID NO: 1941545 - RNA, 19 nt, Artificial Sequence
  Description of Artificial Sequence: Synthetic oligonucleotide
cucgguccccugcagggcc

SEQ ID NO: 1941546 - RNA, 19 nt, Artificial Sequence
  Description of Artificial Sequence: Synthetic oligonucleotide
acguaggcggcgucuccgg

SEQ ID NO: 1941547 - RNA, 19 nt, Artificial Sequence
  Description of Artificial Sequence: Synthetic oligonucleotide
gacagcgacucaucuaccu

SEQ ID NO: 1941548 - RNA, 19 nt, Artificial Sequence
  Description of Artificial Sequence: Synthetic oligonucleotide
ggucuuggcagcuacagau

SEQ ID NO: 1941549 - RNA, 19 nt, Artificial Sequence
  Description of Artificial Sequence: Synthetic oligonucleotide
guacacggggugugggcag

SEQ ID NO: 1941550 - RNA, 19 nt, Artificial Sequence
  Description of Artificial Sequence: Synthetic oligonucleotide
acaccaggcauagguccac

SEQ ID NO: 1941551 - RNA, 19 nt, Artificial Sequence
  Description of Artificial Sequence: Synthetic oligonucleotide
ggagcucggccuugcaggg

SEQ ID NO: 1941552 - RNA, 19 nt, Artificial Sequence
  Description of Artificial Sequence: Synthetic oligonucleotide
acucacucacugacguagg

SEQ ID NO: 1941553 - RNA, 19 nt, Artificial Sequence
  Description of Artificial Sequence: Synthetic oligonucleotide
acucgguccccugcagggc

SEQ ID NO: 1941554 - RNA, 19 nt, Artificial Sequence
  Description of Artificial Sequence: Synthetic oligonucleotide
cacugggcggccacugagc

SEQ ID NO: 1941555 - RNA, 19 nt, Artificial Sequence
  Description of Artificial Sequence: Synthetic oligonucleotide
gcagagugcacguacucga

SEQ ID NO: 1941556 - RNA, 19 nt, Artificial Sequence
  Description of Artificial Sequence: Synthetic oligonucleotide
caucuaccucaguggagug

SEQ ID NO: 1941557 - RNA, 19 nt, Artificial Sequence
  Description of Artificial Sequence: Synthetic oligonucleotide
uugggcggcugccuggcuc

SEQ ID NO: 1941558 - RNA, 19 nt, Artificial Sequence
  Description of Artificial Sequence: Synthetic oligonucleotide
caccaugcagaugccgggg

SEQ ID NO: 1941559 - RNA, 19 nt, Artificial Sequence
  Description of Artificial Sequence: Synthetic oligonucleotide
gcuacagaugcagcucugg

SEQ ID NO: 1941560 - RNA, 19 nt, Artificial Sequence
  Description of Artificial Sequence: Synthetic oligonucleotide
acugacguaggcggcgucu

SEQ ID NO: 1941561 - RNA, 19 nt, Artificial Sequence
  Description of Artificial Sequence: Synthetic oligonucleotide
gacaccaggcauaggucca

SEQ ID NO: 1941562 - RNA, 19 nt, Artificial Sequence
  Description of Artificial Sequence: Synthetic oligonucleotide
ggcauagguccacaucaug

SEQ ID NO: 1941563 - RNA, 19 nt, Artificial Sequence
  Description of Artificial Sequence: Synthetic oligonucleotide
ccuugcaggggccuugcgg

SEQ ID NO: 1941564 - RNA, 19 nt, Artificial Sequence
  Description of Artificial Sequence: Synthetic oligonucleotide
caacgagggguguggucag

SEQ ID NO: 1941565 - RNA, 19 nt, Artificial Sequence
  Description of Artificial Sequence: Synthetic oligonucleotide
ggugagcccagcuccgcag

SEQ ID NO: 1941566 - RNA, 19 nt, Artificial Sequence
  Description of Artificial Sequence: Synthetic oligonucleotide
guggucagagugggugucg

SEQ ID NO: 1941567 - RNA, 19 nt, Artificial Sequence
  Description of Artificial Sequence: Synthetic oligonucleotide
cagugaggagcugcugucc

SEQ ID NO: 1941568 - RNA, 19 nt, Artificial Sequence
  Description of Artificial Sequence: Synthetic oligonucleotide
cuugcggcugcgaccagga

SEQ ID NO: 1941569 - RNA, 19 nt, Artificial Sequence
  Description of Artificial Sequence: Synthetic oligonucleotide
gcaacgaggggugugguca

SEQ ID NO: 1941570 - RNA, 19 nt, Artificial Sequence
  Description of Artificial Sequence: Synthetic oligonucleotide
cucgugcgucuccucauac

SEQ ID NO: 1941571 - RNA, 19 nt, Artificial Sequence
  Description of Artificial Sequence: Synthetic oligonucleotide
cggacagcgacucaucuac

SEQ ID NO: 1941572 - RNA, 19 nt, Artificial Sequence
  Description of Artificial Sequence: Synthetic oligonucleotide
gcagcggaggcggagcucg

SEQ ID NO: 1941573 - RNA, 19 nt, Artificial Sequence
  Description of Artificial Sequence: Synthetic oligonucleotide
guccaccaugcagaugccg

SEQ ID NO: 1941574 - RNA, 19 nt, Artificial Sequence
  Description of Artificial Sequence: Synthetic oligonucleotide
cuaccucaguggagugcgg

SEQ ID NO: 1941575 - RNA, 19 nt, Artificial Sequence
  Description of Artificial Sequence: Synthetic oligonucleotide
uguggcccguggcuagaac

SEQ ID NO: 1941576 - RNA, 19 nt, Artificial Sequence
  Description of Artificial Sequence: Synthetic oligonucleotide
agcgacucaucuaccucag

SEQ ID NO: 1941577 - RNA, 19 nt, Artificial Sequence
  Description of Artificial Sequence: Synthetic oligonucleotide
acgagggguguggucagag

SEQ ID NO: 1941578 - RNA, 19 nt, Artificial Sequence
  Description of Artificial Sequence: Synthetic oligonucleotide
caaaggacacggacagcga

SEQ ID NO: 1941579 - RNA, 19 nt, Artificial Sequence
  Description of Artificial Sequence: Synthetic oligonucleotide
ccccagguggcacugggcg

SEQ ID NO: 1941580 - RNA, 19 nt, Artificial Sequence
  Description of Artificial Sequence: Synthetic oligonucleotide
cuaagccccgagucaccug

SEQ ID NO: 1941581 - RNA, 19 nt, Artificial Sequence
  Description of Artificial Sequence: Synthetic oligonucleotide
ggcuagaacuccacuuugc

SEQ ID NO: 1941582 - RNA, 19 nt, Artificial Sequence
  Description of Artificial Sequence: Synthetic oligonucleotide
ggggauguggagcggcgag

SEQ ID NO: 1941583 - RNA, 19 nt, Artificial Sequence
  Description of Artificial Sequence: Synthetic oligonucleotide
ugacucacucacugacgua

SEQ ID NO: 1941584 - RNA, 19 nt, Artificial Sequence
  Description of Artificial Sequence: Synthetic oligonucleotide
guggagugcggugagccca

SEQ ID NO: 1941585 - RNA, 19 nt, Artificial Sequence
  Description of Artificial Sequence: Synthetic oligonucleotide
aacacggcccgcaggcccu

SEQ ID NO: 1941586 - RNA, 19 nt, Artificial Sequence
  Description of Artificial Sequence: Synthetic oligonucleotide
guggcaggagacacuuuug

SEQ ID NO: 1941587 - RNA, 19 nt, Artificial Sequence
  Description of Artificial Sequence: Synthetic oligonucleotide
gcgagcaaggcgcagggga

SEQ ID NO: 1941588 - RNA, 19 nt, Artificial Sequence
  Description of Artificial Sequence: Synthetic oligonucleotide
cuguccucagggugugcug

SEQ ID NO: 1941589 - RNA, 19 nt, Artificial Sequence
  Description of Artificial Sequence: Synthetic oligonucleotide
cggagcucggccuugcagg

SEQ ID NO: 1941590 - RNA, 19 nt, Artificial Sequence
  Description of Artificial Sequence: Synthetic oligonucleotide
acggacagcgacucaucua

SEQ ID NO: 1941591 - RNA, 19 nt, Artificial Sequence
  Description of Artificial Sequence: Synthetic oligonucleotide
caaggggacaccaggcaua

SEQ ID NO: 1941592 - RNA, 19 nt, Artificial Sequence
  Description of Artificial Sequence: Synthetic oligonucleotide
cugcaggucaaggucccac

SEQ ID NO: 1941593 - RNA, 19 nt, Artificial Sequence
  Description of Artificial Sequence: Synthetic oligonucleotide
uggucagagugggugucgu

SEQ ID NO: 1941594 - RNA, 19 nt, Artificial Sequence
  Description of Artificial Sequence: Synthetic oligonucleotide
acacggacagcgacucauc

SEQ ID NO: 1941595 - RNA, 19 nt, Artificial Sequence
  Description of Artificial Sequence: Synthetic oligonucleotide
gcacuuaguggccggacuc

SEQ ID NO: 1941596 - RNA, 19 nt, Artificial Sequence
  Description of Artificial Sequence: Synthetic oligonucleotide
guggggauguggagcggcg

SEQ ID NO: 1941597 - RNA, 19 nt, Artificial Sequence
  Description of Artificial Sequence: Synthetic oligonucleotide
ucacugacguaggcggcgu

SEQ ID NO: 1941598 - RNA, 19 nt, Artificial Sequence
  Description of Artificial Sequence: Synthetic oligonucleotide
aacgagcgcugcuguccga

SEQ ID NO: 1941599 - RNA, 19 nt, Artificial Sequence
  Description of Artificial Sequence: Synthetic oligonucleotide
gggcacacggccuggcuug

SEQ ID NO: 1941600 - RNA, 19 nt, Artificial Sequence
  Description of Artificial Sequence: Synthetic oligonucleotide
agugugaccugcaggucaa

SEQ ID NO: 1941601 - RNA, 19 nt, Artificial Sequence
  Description of Artificial Sequence: Synthetic oligonucleotide
cugcgaacgagcgcugcug

SEQ ID NO: 1941602 - RNA, 19 nt, Artificial Sequence
  Description of Artificial Sequence: Synthetic oligonucleotide
cgcaaacucacaaggggac

SEQ ID NO: 1941603 - RNA, 19 nt, Artificial Sequence
  Description of Artificial Sequence: Synthetic oligonucleotide
uacacggggugugggcagc

SEQ ID NO: 1941604 - RNA, 19 nt, Artificial Sequence
  Description of Artificial Sequence: Synthetic oligonucleotide
gguagggaucagugugacc

SEQ ID NO: 1941605 - RNA, 19 nt, Artificial Sequence
  Description of Artificial Sequence: Synthetic oligonucleotide
guggcuagaacuccacuuu

SEQ ID NO: 1941606 - RNA, 19 nt, Artificial Sequence
  Description of Artificial Sequence: Synthetic oligonucleotide
cugagucgaagguagggau

SEQ ID NO: 1941607 - RNA, 19 nt, Artificial Sequence
  Description of Artificial Sequence: Synthetic oligonucleotide
gagcugcccggagaugcag

SEQ ID NO: 1941608 - RNA, 19 nt, Artificial Sequence
  Description of Artificial Sequence: Synthetic oligonucleotide
gacacggacagcgacucau

SEQ ID NO: 1941609 - RNA, 19 nt, Artificial Sequence
  Description of Artificial Sequence: Synthetic oligonucleotide
cuccgcaggcaacgagggg

SEQ ID NO: 1941610 - RNA, 19 nt, Artificial Sequence
  Description of Artificial Sequence: Synthetic oligonucleotide
cugcgggcacuuaguggcc

SEQ ID NO: 1941611 - RNA, 19 nt, Artificial Sequence
  Description of Artificial Sequence: Synthetic oligonucleotide
gacaacgugggcagugacu

SEQ ID NO: 1941612 - RNA, 19 nt, Artificial Sequence
  Description of Artificial Sequence: Synthetic oligonucleotide
uccugcgaacgagcgcugc

SEQ ID NO: 1941613 - RNA, 19 nt, Artificial Sequence
  Description of Artificial Sequence: Synthetic oligonucleotide
ggcagcgggucccuggcug

SEQ ID NO: 1941614 - RNA, 19 nt, Artificial Sequence
  Description of Artificial Sequence: Synthetic oligonucleotide
aguccggguccagguggcc

SEQ ID NO: 1941615 - RNA, 19 nt, Artificial Sequence
  Description of Artificial Sequence: Synthetic oligonucleotide
gcagcgguggugguacacg

SEQ ID NO: 1941616 - RNA, 19 nt, Artificial Sequence
  Description of Artificial Sequence: Synthetic oligonucleotide
gcuugcggugcgcaaacuc

SEQ ID NO: 1941617 - RNA, 19 nt, Artificial Sequence
  Description of Artificial Sequence: Synthetic oligonucleotide
aaggcgcaggggaaggcua

SEQ ID NO: 1941618 - RNA, 19 nt, Artificial Sequence
  Description of Artificial Sequence: Synthetic oligonucleotide
agucaccugcuggcagaac

SEQ ID NO: 1941619 - RNA, 19 nt, Artificial Sequence
  Description of Artificial Sequence: Synthetic oligonucleotide
gcuccgcaggcaacgaggg

SEQ ID NO: 1941620 - RNA, 19 nt, Artificial Sequence
  Description of Artificial Sequence: Synthetic oligonucleotide
ccaggauuggugggguugg

SEQ ID NO: 1941621 - RNA, 19 nt, Artificial Sequence
  Description of Artificial Sequence: Synthetic oligonucleotide
agucgaagguagggaucag

SEQ ID NO: 1941622 - RNA, 19 nt, Artificial Sequence
  Description of Artificial Sequence: Synthetic oligonucleotide
gguacacggggugugggca

SEQ ID NO: 1941623 - RNA, 19 nt, Artificial Sequence
  Description of Artificial Sequence: Synthetic oligonucleotide
cagcuccgcaggcaacgag

SEQ ID NO: 1941624 - RNA, 19 nt, Artificial Sequence
  Description of Artificial Sequence: Synthetic oligonucleotide
agccccgagucaccugcug

SEQ ID NO: 1941625 - RNA, 19 nt, Artificial Sequence
  Description of Artificial Sequence: Synthetic oligonucleotide
aacgagggguguggucaga

SEQ ID NO: 1941626 - RNA, 19 nt, Artificial Sequence
  Description of Artificial Sequence: Synthetic oligonucleotide
ccagguagacaggggagcc

SEQ ID NO: 1941627 - RNA, 19 nt, Artificial Sequence
  Description of Artificial Sequence: Synthetic oligonucleotide
ccgagcugcccggagaugc

SEQ ID NO: 1941628 - RNA, 19 nt, Artificial Sequence
  Description of Artificial Sequence: Synthetic oligonucleotide
ugcugccacugcccagaac

SEQ ID NO: 1941629 - RNA, 19 nt, Artificial Sequence
  Description of Artificial Sequence: Synthetic oligonucleotide
gaucagagucagacaacgu

SEQ ID NO: 1941630 - RNA, 19 nt, Artificial Sequence
  Description of Artificial Sequence: Synthetic oligonucleotide
cugacguaggcggcgucuc

SEQ ID NO: 1941631 - RNA, 19 nt, Artificial Sequence
  Description of Artificial Sequence: Synthetic oligonucleotide
ggguugggcggcugccugg

SEQ ID NO: 1941632 - RNA, 19 nt, Artificial Sequence
  Description of Artificial Sequence: Synthetic oligonucleotide
ggauguggagcggcgagca

SEQ ID NO: 1941633 - RNA, 19 nt, Artificial Sequence
  Description of Artificial Sequence: Synthetic oligonucleotide
caggauuggugggguuggg

SEQ ID NO: 1941634 - RNA, 19 nt, Artificial Sequence
  Description of Artificial Sequence: Synthetic oligonucleotide
aggggcacacggccuggcu

SEQ ID NO: 1941635 - RNA, 19 nt, Artificial Sequence
  Description of Artificial Sequence: Synthetic oligonucleotide
cagagugcacguacucgaa

SEQ ID NO: 1941636 - RNA, 19 nt, Artificial Sequence
  Description of Artificial Sequence: Synthetic oligonucleotide
cuuccuggcgcuggcccug

SEQ ID NO: 1941637 - RNA, 19 nt, Artificial Sequence
  Description of Artificial Sequence: Synthetic oligonucleotide
cacucucacuacccacauc

SEQ ID NO: 1941638 - RNA, 19 nt, Artificial Sequence
  Description of Artificial Sequence: Synthetic oligonucleotide
gauguggagcggcgagcaa

SEQ ID NO: 1941639 - RNA, 19 nt, Artificial Sequence
  Description of Artificial Sequence: Synthetic oligonucleotide
caucaccgcugagucgaag

SEQ ID NO: 1941640 - RNA, 19 nt, Artificial Sequence
  Description of Artificial Sequence: Synthetic oligonucleotide
aggcggagcucggccuugc

SEQ ID NO: 1941641 - RNA, 19 nt, Artificial Sequence
  Description of Artificial Sequence: Synthetic oligonucleotide
acacggggugugggcagcg

SEQ ID NO: 1941642 - RNA, 19 nt, Artificial Sequence
  Description of Artificial Sequence: Synthetic oligonucleotide
ggugugggcagcggguccc

SEQ ID NO: 1941643 - RNA, 19 nt, Artificial Sequence
  Description of Artificial Sequence: Synthetic oligonucleotide
gcaaccggcacaggaucag

SEQ ID NO: 1941644 - RNA, 19 nt, Artificial Sequence
  Description of Artificial Sequence: Synthetic oligonucleotide
cgaacgagcgcugcugucc

SEQ ID NO: 1941645 - RNA, 19 nt, Artificial Sequence
  Description of Artificial Sequence: Synthetic oligonucleotide
ggucccacugcugcuugcc

SEQ ID NO: 1941646 - RNA, 19 nt, Artificial Sequence
  Description of Artificial Sequence: Synthetic oligonucleotide
guccagguggcccgcgcca

SEQ ID NO: 1941647 - RNA, 19 nt, Artificial Sequence
  Description of Artificial Sequence: Synthetic oligonucleotide
gugcacguacucgaaggaa

SEQ ID NO: 1941648 - RNA, 19 nt, Artificial Sequence
  Description of Artificial Sequence: Synthetic oligonucleotide
uacccacaucgucgucgga

SEQ ID NO: 1941649 - RNA, 19 nt, Artificial Sequence
  Description of Artificial Sequence: Synthetic oligonucleotide
uggccgcuccugcgaacga

SEQ ID NO: 1941650 - RNA, 19 nt, Artificial Sequence
  Description of Artificial Sequence: Synthetic oligonucleotide
cagacaacgugggcaguga

SEQ ID NO: 1941651 - RNA, 19 nt, Artificial Sequence
  Description of Artificial Sequence: Synthetic oligonucleotide
agcgggucccuggcugcac

SEQ ID NO: 1941652 - RNA, 19 nt, Artificial Sequence
  Description of Artificial Sequence: Synthetic oligonucleotide
ggccucguccugcauggac

SEQ ID NO: 1941653 - RNA, 19 nt, Artificial Sequence
  Description of Artificial Sequence: Synthetic oligonucleotide
aggcauagguccacaucau

SEQ ID NO: 1941654 - RNA, 19 nt, Artificial Sequence
  Description of Artificial Sequence: Synthetic oligonucleotide
gugcgucuccucauaccac

SEQ ID NO: 1941655 - RNA, 19 nt, Artificial Sequence
  Description of Artificial Sequence: Synthetic oligonucleotide
cuggugcugcucgugcguc

SEQ ID NO: 1941656 - RNA, 19 nt, Artificial Sequence
  Description of Artificial Sequence: Synthetic oligonucleotide
uggggacugagggcuuccu

SEQ ID NO: 1941657 - RNA, 19 nt, Artificial Sequence
  Description of Artificial Sequence: Synthetic oligonucleotide
acggccuggcuugucugca

SEQ ID NO: 1941658 - RNA, 19 nt, Artificial Sequence
  Description of Artificial Sequence: Synthetic oligonucleotide
ggccucgggguccaccaug

SEQ ID NO: 1941659 - RNA, 19 nt, Artificial Sequence
  Description of Artificial Sequence: Synthetic oligonucleotide
gcccggagaugcaggaggg

SEQ ID NO: 1941660 - RNA, 19 nt, Artificial Sequence
  Description of Artificial Sequence: Synthetic oligonucleotide
ugcauccaacacggcccgc

SEQ ID NO: 1941661 - RNA, 19 nt, Artificial Sequence
  Description of Artificial Sequence: Synthetic oligonucleotide
gcggaggcggagcucggcc

SEQ ID NO: 1941662 - RNA, 19 nt, Artificial Sequence
  Description of Artificial Sequence: Synthetic oligonucleotide
gcuccugcgaacgagcgcu

SEQ ID NO: 1941663 - RNA, 19 nt, Artificial Sequence
  Description of Artificial Sequence: Synthetic oligonucleotide
ggccuugcggcugcgacca

SEQ ID NO: 1941664 - RNA, 19 nt, Artificial Sequence
  Description of Artificial Sequence: Synthetic oligonucleotide
cuccugcgaacgagcgcug

SEQ ID NO: 1941665 - RNA, 19 nt, Artificial Sequence
  Description of Artificial Sequence: Synthetic oligonucleotide
cucguccugcauggacacc

SEQ ID NO: 1941666 - RNA, 19 nt, Artificial Sequence
  Description of Artificial Sequence: Synthetic oligonucleotide
gaggcggagcucggccuug

SEQ ID NO: 1941667 - RNA, 19 nt, Artificial Sequence
  Description of Artificial Sequence: Synthetic oligonucleotide
agucugcaaccggcacagg

SEQ ID NO: 1941668 - RNA, 19 nt, Artificial Sequence
  Description of Artificial Sequence: Synthetic oligonucleotide
caacgugggcagugacuca

SEQ ID NO: 1941669 - RNA, 19 nt, Artificial Sequence
  Description of Artificial Sequence: Synthetic oligonucleotide
ggcaacgaggggugugguc

SEQ ID NO: 1941670 - RNA, 19 nt, Artificial Sequence
  Description of Artificial Sequence: Synthetic oligonucleotide
ccgcuccugcgaacgagcg

SEQ ID NO: 1941671 - RNA, 19 nt, Artificial Sequence
  Description of Artificial Sequence: Synthetic oligonucleotide
gggugugggcagcgggucc

SEQ ID NO: 1941672 - RNA, 19 nt, Artificial Sequence
  Description of Artificial Sequence: Synthetic oligonucleotide
gcugcccggagaugcagga

SEQ ID NO: 1941673 - RNA, 19 nt, Artificial Sequence
  Description of Artificial Sequence: Synthetic oligonucleotide
gucgaagguagggaucagu

SEQ ID NO: 1941674 - RNA, 19 nt, Artificial Sequence
  Description of Artificial Sequence: Synthetic oligonucleotide
cgcugagucgaagguaggg

SEQ ID NO: 1941675 - RNA, 19 nt, Artificial Sequence
  Description of Artificial Sequence: Synthetic oligonucleotide
cacggacagcgacucaucu

SEQ ID NO: 1941676 - RNA, 19 nt, Artificial Sequence
  Description of Artificial Sequence: Synthetic oligonucleotide
ggucaaggucccacugcug

SEQ ID NO: 1941677 - RNA, 19 nt, Artificial Sequence
  Description of Artificial Sequence: Synthetic oligonucleotide
ggaaggcuaagccccgagu

SEQ ID NO: 1941678 - RNA, 19 nt, Artificial Sequence
  Description of Artificial Sequence: Synthetic oligonucleotide
gagugcggugagcccagcu

SEQ ID NO: 1941679 - RNA, 19 nt, Artificial Sequence
  Description of Artificial Sequence: Synthetic oligonucleotide
gguaagccagguccaggua

SEQ ID NO: 1941680 - RNA, 19 nt, Artificial Sequence
  Description of Artificial Sequence: Synthetic oligonucleotide
cacggggugugggcagcgg

SEQ ID NO: 1941681 - RNA, 19 nt, Artificial Sequence
  Description of Artificial Sequence: Synthetic oligonucleotide
cagcggaggcggagcucgg

SEQ ID NO: 1941682 - RNA, 19 nt, Artificial Sequence
  Description of Artificial Sequence: Synthetic oligonucleotide
aagccccgagucaccugcu

SEQ ID NO: 1941683 - RNA, 19 nt, Artificial Sequence
  Description of Artificial Sequence: Synthetic oligonucleotide
ucguggcaggagacacuuu

SEQ ID NO: 1941684 - RNA, 19 nt, Artificial Sequence
  Description of Artificial Sequence: Synthetic oligonucleotide
cacuacccacaucgucguc

SEQ ID NO: 1941685 - RNA, 19 nt, Artificial Sequence
  Description of Artificial Sequence: Synthetic oligonucleotide
ggcacuuaguggccggacu

SEQ ID NO: 1941686 - RNA, 19 nt, Artificial Sequence
  Description of Artificial Sequence: Synthetic oligonucleotide
ugcuguccucagggugugc

SEQ ID NO: 1941687 - RNA, 19 nt, Artificial Sequence
  Description of Artificial Sequence: Synthetic oligonucleotide
gcaggcaacgaggggugug

SEQ ID NO: 1941688 - RNA, 19 nt, Artificial Sequence
  Description of Artificial Sequence: Synthetic oligonucleotide
gcggugcgcaaacucacaa

SEQ ID NO: 1941689 - RNA, 19 nt, Artificial Sequence
  Description of Artificial Sequence: Synthetic oligonucleotide
cgucgucggagucugcaac

SEQ ID NO: 1941690 - RNA, 19 nt, Artificial Sequence
  Description of Artificial Sequence: Synthetic oligonucleotide
gcacguacucgaaggaaaa

SEQ ID NO: 1941691 - RNA, 19 nt, Artificial Sequence
  Description of Artificial Sequence: Synthetic oligonucleotide
uuccuggcgcuggcccugc

SEQ ID NO: 1941692 - RNA, 19 nt, Artificial Sequence
  Description of Artificial Sequence: Synthetic oligonucleotide
ucgggcagcggugguggua

SEQ ID NO: 1941693 - RNA, 19 nt, Artificial Sequence
  Description of Artificial Sequence: Synthetic oligonucleotide
cggugcgcaaacucacaag

SEQ ID NO: 1941694 - RNA, 19 nt, Artificial Sequence
  Description of Artificial Sequence: Synthetic oligonucleotide
aggcaacgagggguguggu

SEQ ID NO: 1941695 - RNA, 19 nt, Artificial Sequence
  Description of Artificial Sequence: Synthetic oligonucleotide
cacugacguaggcggcguc

SEQ ID NO: 1941696 - RNA, 19 nt, Artificial Sequence
  Description of Artificial Sequence: Synthetic oligonucleotide
agcggcgagcaaggcgcag

SEQ ID NO: 1941697 - RNA, 19 nt, Artificial Sequence
  Description of Artificial Sequence: Synthetic oligonucleotide
ggcccguggcuagaacucc

SEQ ID NO: 1941698 - RNA, 19 nt, Artificial Sequence
  Description of Artificial Sequence: Synthetic oligonucleotide
gccggacucgguccccugc

SEQ ID NO: 1941699 - RNA, 19 nt, Artificial Sequence
  Description of Artificial Sequence: Synthetic oligonucleotide
agacagucuuggggacuga

SEQ ID NO: 1941700 - RNA, 19 nt, Artificial Sequence
  Description of Artificial Sequence: Synthetic oligonucleotide
gcggcgucuccgguggccg

SEQ ID NO: 1941701 - RNA, 19 nt, Artificial Sequence
  Description of Artificial Sequence: Synthetic oligonucleotide
guggagcggcgagcaaggc

SEQ ID NO: 1941702 - RNA, 19 nt, Artificial Sequence
  Description of Artificial Sequence: Synthetic oligonucleotide
ccgcaggcaacgaggggug

SEQ ID NO: 1941703 - RNA, 19 nt, Artificial Sequence
  Description of Artificial Sequence: Synthetic oligonucleotide
caaccggcacaggaucaga

SEQ ID NO: 1941704 - RNA, 19 nt, Artificial Sequence
  Description of Artificial Sequence: Synthetic oligonucleotide
cccguggcuagaacuccac

SEQ ID NO: 1941705 - RNA, 19 nt, Artificial Sequence
  Description of Artificial Sequence: Synthetic oligonucleotide
gccgcuccugcgaacgagc

SEQ ID NO: 1941706 - RNA, 19 nt, Artificial Sequence
  Description of Artificial Sequence: Synthetic oligonucleotide
cucggggcagcagggccuc

SEQ ID NO: 1941707 - RNA, 19 nt, Artificial Sequence
  Description of Artificial Sequence: Synthetic oligonucleotide
ggccgcuccugcgaacgag

SEQ ID NO: 1941708 - RNA, 19 nt, Artificial Sequence
  Description of Artificial Sequence: Synthetic oligonucleotide
ggcgagcaaggcgcagggg

SEQ ID NO: 1941709 - RNA, 19 nt, Artificial Sequence
  Description of Artificial Sequence: Synthetic oligonucleotide
ccgcugagucgaagguagg

SEQ ID NO: 1941710 - RNA, 19 nt, Artificial Sequence
  Description of Artificial Sequence: Synthetic oligonucleotide
cagggcccuuggucuuggc

SEQ ID NO: 1941711 - RNA, 19 nt, Artificial Sequence
  Description of Artificial Sequence: Synthetic oligonucleotide
gcaaggcgcaggggaaggc

SEQ ID NO: 1941712 - RNA, 19 nt, Artificial Sequence
  Description of Artificial Sequence: Synthetic oligonucleotide
acgugggcagugacucacu

SEQ ID NO: 1941713 - RNA, 19 nt, Artificial Sequence
  Description of Artificial Sequence: Synthetic oligonucleotide
cucguggcaggagacacuu

SEQ ID NO: 1941714 - RNA, 19 nt, Artificial Sequence
  Description of Artificial Sequence: Synthetic oligonucleotide
cgucggagucugcaaccgg

SEQ ID NO: 1941715 - RNA, 19 nt, Artificial Sequence
  Description of Artificial Sequence: Synthetic oligonucleotide
ccucaguggagugcgguga

SEQ ID NO: 1941716 - RNA, 19 nt, Artificial Sequence
  Description of Artificial Sequence: Synthetic oligonucleotide
cccgcaggcccucuuccug

SEQ ID NO: 1941717 - RNA, 19 nt, Artificial Sequence
  Description of Artificial Sequence: Synthetic oligonucleotide
caaggcgcaggggaaggcu

SEQ ID NO: 1941718 - RNA, 19 nt, Artificial Sequence
  Description of Artificial Sequence: Synthetic oligonucleotide
aggcgcaggggaaggcuaa

SEQ ID NO: 1941719 - RNA, 19 nt, Artificial Sequence
  Description of Artificial Sequence: Synthetic oligonucleotide
gccuugcaggggccuugcg

SEQ ID NO: 1941720 - RNA, 19 nt, Artificial Sequence
  Description of Artificial Sequence: Synthetic oligonucleotide
gguggccgcuccugcgaac

SEQ ID NO: 1941721 - RNA, 19 nt, Artificial Sequence
  Description of Artificial Sequence: Synthetic oligonucleotide
ggcgcaggggaaggcuaag

SEQ ID NO: 1941722 - RNA, 19 nt, Artificial Sequence
  Description of Artificial Sequence: Synthetic oligonucleotide
gcgcaggggaaggcuaagc

SEQ ID NO: 1941723 - RNA, 19 nt, Artificial Sequence
  Description of Artificial Sequence: Synthetic oligonucleotide
ggcagcgguggugguacac

SEQ ID NO: 1941724 - RNA, 19 nt, Artificial Sequence
  Description of Artificial Sequence: Synthetic oligonucleotide
cggcgagcaaggcgcaggg

SEQ ID NO: 1941725 - RNA, 19 nt, Artificial Sequence
  Description of Artificial Sequence: Synthetic oligonucleotide
ccugcuggcagaaccugcu

SEQ ID NO: 1941726 - RNA, 19 nt, Artificial Sequence
  Description of Artificial Sequence: Synthetic oligonucleotide
gcuuccuggugaggggcac

SEQ ID NO: 1941727 - RNA, 19 nt, Artificial Sequence
  Description of Artificial Sequence: Synthetic oligonucleotide
ggcacugggcggccacuga

SEQ ID NO: 1941728 - RNA, 19 nt, Artificial Sequence
  Description of Artificial Sequence: Synthetic oligonucleotide
gggcacuuaguggccggac

SEQ ID NO: 1941729 - RNA, 19 nt, Artificial Sequence
  Description of Artificial Sequence: Synthetic oligonucleotide
guggccggacucggucccc

SEQ ID NO: 1941730 - RNA, 19 nt, Artificial Sequence
  Description of Artificial Sequence: Synthetic oligonucleotide
cccggagaugcaggagggg

SEQ ID NO: 1941731 - RNA, 19 nt, Artificial Sequence
  Description of Artificial Sequence: Synthetic oligonucleotide
caccaggcauagguccaca

SEQ ID NO: 1941732 - RNA, 19 nt, Artificial Sequence
  Description of Artificial Sequence: Synthetic oligonucleotide
gcuaagccccgagucaccu

SEQ ID NO: 1941733 - RNA, 19 nt, Artificial Sequence
  Description of Artificial Sequence: Synthetic oligonucleotide
gcuugccagccagcagugc

SEQ ID NO: 1941734 - RNA, 19 nt, Artificial Sequence
  Description of Artificial Sequence: Synthetic oligonucleotide
ccaacacggcccgcaggcc

SEQ ID NO: 1941735 - RNA, 19 nt, Artificial Sequence
  Description of Artificial Sequence: Synthetic oligonucleotide
gagcggcgagcaaggcgca

SEQ ID NO: 1941736 - RNA, 19 nt, Artificial Sequence
  Description of Artificial Sequence: Synthetic oligonucleotide
ggacacggacagcgacuca

SEQ ID NO: 1941737 - RNA, 19 nt, Artificial Sequence
  Description of Artificial Sequence: Synthetic oligonucleotide
gcagugcauccaacacggc

SEQ ID NO: 1941738 - RNA, 19 nt, Artificial Sequence
  Description of Artificial Sequence: Synthetic oligonucleotide
cgggcagcgguggugguac

SEQ ID NO: 1941739 - RNA, 19 nt, Artificial Sequence
  Description of Artificial Sequence: Synthetic oligonucleotide
cgaagguagggaucagugu

SEQ ID NO: 1941740 - RNA, 19 nt, Artificial Sequence
  Description of Artificial Sequence: Synthetic oligonucleotide
ccugugcaucaccgcugag

SEQ ID NO: 1941741 - RNA, 19 nt, Artificial Sequence
  Description of Artificial Sequence: Synthetic oligonucleotide
gcucgugcgucuccucaua

SEQ ID NO: 1941742 - RNA, 19 nt, Artificial Sequence
  Description of Artificial Sequence: Synthetic oligonucleotide
cccacaucgucgucggagu

SEQ ID NO: 1941743 - RNA, 19 nt, Artificial Sequence
  Description of Artificial Sequence: Synthetic oligonucleotide
cgagcaaggcgcaggggaa

SEQ ID NO: 1941744 - RNA, 19 nt, Artificial Sequence
  Description of Artificial Sequence: Synthetic oligonucleotide
gcggugagcccagcuccgc

SEQ ID NO: 1941745 - RNA, 19 nt, Artificial Sequence
  Description of Artificial Sequence: Synthetic oligonucleotide
ggccggacucgguccccug

SEQ ID NO: 1941746 - RNA, 19 nt, Artificial Sequence
  Description of Artificial Sequence: Synthetic oligonucleotide
cgcaggcccucuuccuggc

SEQ ID NO: 1941747 - RNA, 19 nt, Artificial Sequence
  Description of Artificial Sequence: Synthetic oligonucleotide
cggcuugcggugcgcaaac

SEQ ID NO: 1941748 - RNA, 19 nt, Artificial Sequence
  Description of Artificial Sequence: Synthetic oligonucleotide
ccggacucgguccccugca

SEQ ID NO: 1941749 - RNA, 19 nt, Artificial Sequence
  Description of Artificial Sequence: Synthetic oligonucleotide
gcggcuugcggugcgcaaa

SEQ ID NO: 1941750 - RNA, 19 nt, Artificial Sequence
  Description of Artificial Sequence: Synthetic oligonucleotide
aggccucguccugcaugga

SEQ ID NO: 1941751 - RNA, 19 nt, Artificial Sequence
  Description of Artificial Sequence: Synthetic oligonucleotide
gcccguggcuagaacucca

SEQ ID NO: 1941752 - RNA, 19 nt, Artificial Sequence
  Description of Artificial Sequence: Synthetic oligonucleotide
ggggcacacggccuggcuu

SEQ ID NO: 1941753 - RNA, 19 nt, Artificial Sequence
  Description of Artificial Sequence: Synthetic oligonucleotide
ggcggcuugcggugcgcaa

SEQ ID NO: 1941754 - RNA, 19 nt, Artificial Sequence
  Description of Artificial Sequence: Synthetic oligonucleotide
cggacucgguccccugcag

SEQ ID NO: 1941755 - RNA, 19 nt, Artificial Sequence
  Description of Artificial Sequence: Synthetic oligonucleotide
ggagugcggugagcccagc

SEQ ID NO: 1941756 - RNA, 19 nt, Artificial Sequence
  Description of Artificial Sequence: Synthetic oligonucleotide
gcccagaggagguccucgu

SEQ ID NO: 1941757 - RNA, 19 nt, Artificial Sequence
  Description of Artificial Sequence: Synthetic oligonucleotide
ggcggagcucggccuugca

SEQ ID NO: 1941758 - RNA, 19 nt, Artificial Sequence
  Description of Artificial Sequence: Synthetic oligonucleotide
cagcgggucccuggcugca

SEQ ID NO: 1941759 - RNA, 19 nt, Artificial Sequence
  Description of Artificial Sequence: Synthetic oligonucleotide
gcgccuggugcugcucgug

SEQ ID NO: 1941760 - RNA, 19 nt, Artificial Sequence
  Description of Artificial Sequence: Synthetic oligonucleotide
ccgguggccgcuccugcga

SEQ ID NO: 1941761 - RNA, 19 nt, Artificial Sequence
  Description of Artificial Sequence: Synthetic oligonucleotide
cugcagggcccuuggucuu

SEQ ID NO: 1941762 - RNA, 19 nt, Artificial Sequence
  Description of Artificial Sequence: Synthetic oligonucleotide
ggaggcggagcucggccuu

SEQ ID NO: 1941763 - RNA, 19 nt, Artificial Sequence
  Description of Artificial Sequence: Synthetic oligonucleotide
ccugcgaacgagcgcugcu

SEQ ID NO: 1941764 - RNA, 19 nt, Artificial Sequence
  Description of Artificial Sequence: Synthetic oligonucleotide
gcuguccgagcugcccgga

SEQ ID NO: 1941765 - RNA, 19 nt, Artificial Sequence
  Description of Artificial Sequence: Synthetic oligonucleotide
gcgacucaucuaccucagu

SEQ ID NO: 1941766 - RNA, 19 nt, Artificial Sequence
  Description of Artificial Sequence: Synthetic oligonucleotide
ggcugcgaccaggauuggu

SEQ ID NO: 1941767 - RNA, 19 nt, Artificial Sequence
  Description of Artificial Sequence: Synthetic oligonucleotide
cgggucccuggcugcacuc

SEQ ID NO: 1941768 - RNA, 19 nt, Artificial Sequence
  Description of Artificial Sequence: Synthetic oligonucleotide
gggcggcuugcggugcgca

SEQ ID NO: 1941769 - RNA, 19 nt, Artificial Sequence
  Description of Artificial Sequence: Synthetic oligonucleotide
ggaaggccucguccugcau

SEQ ID NO: 1941770 - RNA, 19 nt, Artificial Sequence
  Description of Artificial Sequence: Synthetic oligonucleotide
ccagcuccgcaggcaacga

SEQ ID NO: 1941771 - RNA, 19 nt, Artificial Sequence
  Description of Artificial Sequence: Synthetic oligonucleotide
ccacaucauguggggaugu

SEQ ID NO: 1941772 - RNA, 19 nt, Artificial Sequence
  Description of Artificial Sequence: Synthetic oligonucleotide
gugugggcagcgggucccu

SEQ ID NO: 1941773 - RNA, 19 nt, Artificial Sequence
  Description of Artificial Sequence: Synthetic oligonucleotide
gggcagcgguggugguaca

SEQ ID NO: 1941774 - RNA, 19 nt, Artificial Sequence
  Description of Artificial Sequence: Synthetic oligonucleotide
ccguggcuagaacuccacu

SEQ ID NO: 1941775 - RNA, 19 nt, Artificial Sequence
  Description of Artificial Sequence: Synthetic oligonucleotide
gggcagugacucacucacu

SEQ ID NO: 1941776 - RNA, 19 nt, Artificial Sequence
  Description of Artificial Sequence: Synthetic oligonucleotide
ccggguccagguggcccgc

SEQ ID NO: 1941777 - RNA, 19 nt, Artificial Sequence
  Description of Artificial Sequence: Synthetic oligonucleotide
cggcgucuccgguggccgc

SEQ ID NO: 1941778 - RNA, 19 nt, Artificial Sequence
  Description of Artificial Sequence: Synthetic oligonucleotide
ccugcaggucaagguccca

SEQ ID NO: 1941779 - RNA, 19 nt, Artificial Sequence
  Description of Artificial Sequence: Synthetic oligonucleotide
gcuugucugcaggcucacu

SEQ ID NO: 1941780 - RNA, 19 nt, Artificial Sequence
  Description of Artificial Sequence: Synthetic oligonucleotide
gcaucaccgcugagucgaa

SEQ ID NO: 1941781 - RNA, 19 nt, Artificial Sequence
  Description of Artificial Sequence: Synthetic oligonucleotide
gcgucuccgguggccgcuc

SEQ ID NO: 1941782 - RNA, 19 nt, Artificial Sequence
  Description of Artificial Sequence: Synthetic oligonucleotide
ggcuugcggugcgcaaacu

SEQ ID NO: 1941783 - RNA, 19 nt, Artificial Sequence
  Description of Artificial Sequence: Synthetic oligonucleotide
gggcagcgggucccuggcu

SEQ ID NO: 1941784 - RNA, 19 nt, Artificial Sequence
  Description of Artificial Sequence: Synthetic oligonucleotide
cgagggguguggucagagu

SEQ ID NO: 1941785 - RNA, 19 nt, Artificial Sequence
  Description of Artificial Sequence: Synthetic oligonucleotide
cggguccagguggcccgcg

SEQ ID NO: 1941786 - RNA, 19 nt, Artificial Sequence
  Description of Artificial Sequence: Synthetic oligonucleotide
cgggcacuuaguggccgga

SEQ ID NO: 1941787 - RNA, 19 nt, Artificial Sequence
  Description of Artificial Sequence: Synthetic oligonucleotide
cccuuggucuuggcagcua

SEQ ID NO: 1941788 - RNA, 19 nt, Artificial Sequence
  Description of Artificial Sequence: Synthetic oligonucleotide
cgguggccgcuccugcgaa

SEQ ID NO: 1941789 - RNA, 19 nt, Artificial Sequence
  Description of Artificial Sequence: Synthetic oligonucleotide
cguaggcggcgucuccggu

SEQ ID NO: 1941790 - RNA, 19 nt, Artificial Sequence
  Description of Artificial Sequence: Synthetic oligonucleotide
cggcugcgaccaggauugg

SEQ ID NO: 1941791 - RNA, 19 nt, Artificial Sequence
  Description of Artificial Sequence: Synthetic oligonucleotide
cguccugcauggacaccau

SEQ ID NO: 1941792 - RNA, 19 nt, Artificial Sequence
  Description of Artificial Sequence: Synthetic oligonucleotide
cacggcccgcaggcccucu

SEQ ID NO: 1941793 - RNA, 19 nt, Artificial Sequence
  Description of Artificial Sequence: Synthetic oligonucleotide
gguccccugcagggcccuu

SEQ ID NO: 1941794 - RNA, 19 nt, Artificial Sequence
  Description of Artificial Sequence: Synthetic oligonucleotide
aacaauucugaaaagaugc

SEQ ID NO: 1941795 - RNA, 19 nt, Artificial Sequence
  Description of Artificial Sequence: Synthetic oligonucleotide
acaacaaagaauuuguugg

SEQ ID NO: 1941796 - RNA, 19 nt, Artificial Sequence
  Description of Artificial Sequence: Synthetic oligonucleotide
ucuaaagaugaacauaagg

SEQ ID NO: 1941797 - RNA, 19 nt, Artificial Sequence
  Description of Artificial Sequence: Synthetic oligonucleotide
aauucuucaaugugguccc

SEQ ID NO: 1941798 - RNA, 19 nt, Artificial Sequence
  Description of Artificial Sequence: Synthetic oligonucleotide
acaauaaacaaguuguaac

SEQ ID NO: 1941799 - RNA, 19 nt, Artificial Sequence
  Description of Artificial Sequence: Synthetic oligonucleotide
uuugcuguggaaaauauca

SEQ ID NO: 1941800 - RNA, 19 nt, Artificial Sequence
  Description of Artificial Sequence: Synthetic oligonucleotide
auaugcagcauccacaugg

SEQ ID NO: 1941801 - RNA, 19 nt, Artificial Sequence
  Description of Artificial Sequence: Synthetic oligonucleotide
uuaauaauuauguuuacuc

SEQ ID NO: 1941802 - RNA, 19 nt, Artificial Sequence
  Description of Artificial Sequence: Synthetic oligonucleotide
uuuaucaccgauuccaggg

SEQ ID NO: 1941803 - RNA, 19 nt, Artificial Sequence
  Description of Artificial Sequence: Synthetic oligonucleotide
uuacucucaucacagaugg

SEQ ID NO: 1941804 - RNA, 19 nt, Artificial Sequence
  Description of Artificial Sequence: Synthetic oligonucleotide
gaagauagcuuccugaacc

SEQ ID NO: 1941805 - RNA, 19 nt, Artificial Sequence
  Description of Artificial Sequence: Synthetic oligonucleotide
aaguuguaaccuuuggaac

SEQ ID NO: 1941806 - RNA, 19 nt, Artificial Sequence
  Description of Artificial Sequence: Synthetic oligonucleotide
aauuuguuggcaugacucg

SEQ ID NO: 1941807 - RNA, 19 nt, Artificial Sequence
  Description of Artificial Sequence: Synthetic oligonucleotide
auagucuuuguccauaguc

SEQ ID NO: 1941808 - RNA, 19 nt, Artificial Sequence
  Description of Artificial Sequence: Synthetic oligonucleotide
uuuuggaaaucccagguca

SEQ ID NO: 1941809 - RNA, 19 nt, Artificial Sequence
  Description of Artificial Sequence: Synthetic oligonucleotide
acuguauucaaacuguaug

SEQ ID NO: 1941810 - RNA, 19 nt, Artificial Sequence
  Description of Artificial Sequence: Synthetic oligonucleotide
ucuacuuuaucaccgauuc

SEQ ID NO: 1941811 - RNA, 19 nt, Artificial Sequence
  Description of Artificial Sequence: Synthetic oligonucleotide
cuguauucaaacuguaugg

SEQ ID NO: 1941812 - RNA, 19 nt, Artificial Sequence
  Description of Artificial Sequence: Synthetic oligonucleotide
aaugucauaaccauugaga

SEQ ID NO: 1941813 - RNA, 19 nt, Artificial Sequence
  Description of Artificial Sequence: Synthetic oligonucleotide
augcgauuacuccagauac

SEQ ID NO: 1941814 - RNA, 19 nt, Artificial Sequence
  Description of Artificial Sequence: Synthetic oligonucleotide
uuagauaacaauucugaaa

SEQ ID NO: 1941815 - RNA, 19 nt, Artificial Sequence
  Description of Artificial Sequence: Synthetic oligonucleotide
ugaacauaaggucauggga

SEQ ID NO: 1941816 - RNA, 19 nt, Artificial Sequence
  Description of Artificial Sequence: Synthetic oligonucleotide
aagaucaugguuucuccuc

SEQ ID NO: 1941817 - RNA, 19 nt, Artificial Sequence
  Description of Artificial Sequence: Synthetic oligonucleotide
aggauggaaauuguuaucc

SEQ ID NO: 1941818 - RNA, 19 nt, Artificial Sequence
  Description of Artificial Sequence: Synthetic oligonucleotide
uccuugaacaucgucaucg

SEQ ID NO: 1941819 - RNA, 19 nt, Artificial Sequence
  Description of Artificial Sequence: Synthetic oligonucleotide
uauguuuacucucaucaca

SEQ ID NO: 1941820 - RNA, 19 nt, Artificial Sequence
  Description of Artificial Sequence: Synthetic oligonucleotide
uaauaauuauguuuacucu

SEQ ID NO: 1941821 - RNA, 19 nt, Artificial Sequence
  Description of Artificial Sequence: Synthetic oligonucleotide
aacaaguuguaaccuuugg

SEQ ID NO: 1941822 - RNA, 19 nt, Artificial Sequence
  Description of Artificial Sequence: Synthetic oligonucleotide
gaaaagaugcuuaacacca

SEQ ID NO: 1941823 - RNA, 19 nt, Artificial Sequence
  Description of Artificial Sequence: Synthetic oligonucleotide
uaacaauucugaaaagaug

SEQ ID NO: 1941824 - RNA, 19 nt, Artificial Sequence
  Description of Artificial Sequence: Synthetic oligonucleotide
uguauucaaacuguauggg

SEQ ID NO: 1941825 - RNA, 19 nt, Artificial Sequence
  Description of Artificial Sequence: Synthetic oligonucleotide
aauuguuauccugaugcuc

SEQ ID NO: 1941826 - RNA, 19 nt, Artificial Sequence
  Description of Artificial Sequence: Synthetic oligonucleotide
uacuuuaucaccgauucca

SEQ ID NO: 1941827 - RNA, 19 nt, Artificial Sequence
  Description of Artificial Sequence: Synthetic oligonucleotide
gaugcuuaacaccacaaca

SEQ ID NO: 1941828 - RNA, 19 nt, Artificial Sequence
  Description of Artificial Sequence: Synthetic oligonucleotide
augaacauaaggucauggg

SEQ ID NO: 1941829 - RNA, 19 nt, Artificial Sequence
  Description of Artificial Sequence: Synthetic oligonucleotide
aacauaaggucaugggaug

SEQ ID NO: 1941830 - RNA, 19 nt, Artificial Sequence
  Description of Artificial Sequence: Synthetic oligonucleotide
ugggcagcaacaauaaaca

SEQ ID NO: 1941831 - RNA, 19 nt, Artificial Sequence
  Description of Artificial Sequence: Synthetic oligonucleotide
uauagaugggaaacauuag

SEQ ID NO: 1941832 - RNA, 19 nt, Artificial Sequence
  Description of Artificial Sequence: Synthetic oligonucleotide
uucugcugaauaaauauau

SEQ ID NO: 1941833 - RNA, 19 nt, Artificial Sequence
  Description of Artificial Sequence: Synthetic oligonucleotide
aaagaugcuuaacaccaca

SEQ ID NO: 1941834 - RNA, 19 nt, Artificial Sequence
  Description of Artificial Sequence: Synthetic oligonucleotide
ucaucauaucuccacaccu

SEQ ID NO: 1941835 - RNA, 19 nt, Artificial Sequence
  Description of Artificial Sequence: Synthetic oligonucleotide
uuuugggauaaccuuccag

SEQ ID NO: 1941836 - RNA, 19 nt, Artificial Sequence
  Description of Artificial Sequence: Synthetic oligonucleotide
cugaaaagaugcuuaacac

SEQ ID NO: 1941837 - RNA, 19 nt, Artificial Sequence
  Description of Artificial Sequence: Synthetic oligonucleotide
gaaucagucgauccuuggg

SEQ ID NO: 1941838 - RNA, 19 nt, Artificial Sequence
  Description of Artificial Sequence: Synthetic oligonucleotide
uaugaaucggggauagucu

SEQ ID NO: 1941839 - RNA, 19 nt, Artificial Sequence
  Description of Artificial Sequence: Synthetic oligonucleotide
aaagaauuuguuggcauga

SEQ ID NO: 1941840 - RNA, 19 nt, Artificial Sequence
  Description of Artificial Sequence: Synthetic oligonucleotide
gccacaaauagucacauag

SEQ ID NO: 1941841 - RNA, 19 nt, Artificial Sequence
  Description of Artificial Sequence: Synthetic oligonucleotide
gaagaagagggucuugccc

SEQ ID NO: 1941842 - RNA, 19 nt, Artificial Sequence
  Description of Artificial Sequence: Synthetic oligonucleotide
agauggaucccauguuugc

SEQ ID NO: 1941843 - RNA, 19 nt, Artificial Sequence
  Description of Artificial Sequence: Synthetic oligonucleotide
uaaagaucaugguuucucc

SEQ ID NO: 1941844 - RNA, 19 nt, Artificial Sequence
  Description of Artificial Sequence: Synthetic oligonucleotide
gaauuuguuggcaugacuc

SEQ ID NO: 1941845 - RNA, 19 nt, Artificial Sequence
  Description of Artificial Sequence: Synthetic oligonucleotide
aaugcgauuacuccagaua

SEQ ID NO: 1941846 - RNA, 19 nt, Artificial Sequence
  Description of Artificial Sequence: Synthetic oligonucleotide
agcaugaaauggcuuuugc

SEQ ID NO: 1941847 - RNA, 19 nt, Artificial Sequence
  Description of Artificial Sequence: Synthetic oligonucleotide
uuuguccauagucugauua

SEQ ID NO: 1941848 - RNA, 19 nt, Artificial Sequence
  Description of Artificial Sequence: Synthetic oligonucleotide
agagcccagaauuuucuac

SEQ ID NO: 1941849 - RNA, 19 nt, Artificial Sequence
  Description of Artificial Sequence: Synthetic oligonucleotide
aguuagauaacaauucuga

SEQ ID NO: 1941850 - RNA, 19 nt, Artificial Sequence
  Description of Artificial Sequence: Synthetic oligonucleotide
ucaucgggaagcaugaaau

SEQ ID NO: 1941851 - RNA, 19 nt, Artificial Sequence
  Description of Artificial Sequence: Synthetic oligonucleotide
agaucaugguuucuccucg

SEQ ID NO: 1941852 - RNA, 19 nt, Artificial Sequence
  Description of Artificial Sequence: Synthetic oligonucleotide
ucggggauagucuuugucc

SEQ ID NO: 1941853 - RNA, 19 nt, Artificial Sequence
  Description of Artificial Sequence: Synthetic oligonucleotide
gauuccuugaacaucguca

SEQ ID NO: 1941854 - RNA, 19 nt, Artificial Sequence
  Description of Artificial Sequence: Synthetic oligonucleotide
ccaguguagguauagaugg

SEQ ID NO: 1941855 - RNA, 19 nt, Artificial Sequence
  Description of Artificial Sequence: Synthetic oligonucleotide
uuuggaaaucccaggucag

SEQ ID NO: 1941856 - RNA, 19 nt, Artificial Sequence
  Description of Artificial Sequence: Synthetic oligonucleotide
uguaugggcccauugaaaa

SEQ ID NO: 1941857 - RNA, 19 nt, Artificial Sequence
  Description of Artificial Sequence: Synthetic oligonucleotide
aacaauaaacaaguuguaa

SEQ ID NO: 1941858 - RNA, 19 nt, Artificial Sequence
  Description of Artificial Sequence: Synthetic oligonucleotide
aggauuggggucuucaucu

SEQ ID NO: 1941859 - RNA, 19 nt, Artificial Sequence
  Description of Artificial Sequence: Synthetic oligonucleotide
uuaaagaucaugguuucuc

SEQ ID NO: 1941860 - RNA, 19 nt, Artificial Sequence
  Description of Artificial Sequence: Synthetic oligonucleotide
auaucuccacaccugguuc

SEQ ID NO: 1941861 - RNA, 19 nt, Artificial Sequence
  Description of Artificial Sequence: Synthetic oligonucleotide
aacaaugcgauuacuccag

SEQ ID NO: 1941862 - RNA, 19 nt, Artificial Sequence
  Description of Artificial Sequence: Synthetic oligonucleotide
aggaguuagauaacaauuc

SEQ ID NO: 1941863 - RNA, 19 nt, Artificial Sequence
  Description of Artificial Sequence: Synthetic oligonucleotide
augguuucuccucggagac

SEQ ID NO: 1941864 - RNA, 19 nt, Artificial Sequence
  Description of Artificial Sequence: Synthetic oligonucleotide
auuaauaauuauguuuacu

SEQ ID NO: 1941865 - RNA, 19 nt, Artificial Sequence
  Description of Artificial Sequence: Synthetic oligonucleotide
caacaaagaauuuguuggc

SEQ ID NO: 1941866 - RNA, 19 nt, Artificial Sequence
  Description of Artificial Sequence: Synthetic oligonucleotide
aauagucacauaggcacug

SEQ ID NO: 1941867 - RNA, 19 nt, Artificial Sequence
  Description of Artificial Sequence: Synthetic oligonucleotide
gggauaaccuuccagaaug

SEQ ID NO: 1941868 - RNA, 19 nt, Artificial Sequence
  Description of Artificial Sequence: Synthetic oligonucleotide
ugucauaaccauugagagc

SEQ ID NO: 1941869 - RNA, 19 nt, Artificial Sequence
  Description of Artificial Sequence: Synthetic oligonucleotide
aucaaucuuguuucuucac

SEQ ID NO: 1941870 - RNA, 19 nt, Artificial Sequence
  Description of Artificial Sequence: Synthetic oligonucleotide
cucuccaggaguuagauaa

SEQ ID NO: 1941871 - RNA, 19 nt, Artificial Sequence
  Description of Artificial Sequence: Synthetic oligonucleotide
caaucuuguuucuucacug

SEQ ID NO: 1941872 - RNA, 19 nt, Artificial Sequence
  Description of Artificial Sequence: Synthetic oligonucleotide
ucgaacaaugcgauuacuc

SEQ ID NO: 1941873 - RNA, 19 nt, Artificial Sequence
  Description of Artificial Sequence: Synthetic oligonucleotide
aagggauaaggcuggguca

SEQ ID NO: 1941874 - RNA, 19 nt, Artificial Sequence
  Description of Artificial Sequence: Synthetic oligonucleotide
ucugauuagcaucaucaua

SEQ ID NO: 1941875 - RNA, 19 nt, Artificial Sequence
  Description of Artificial Sequence: Synthetic oligonucleotide
agcaucuacuuuaucaccg

SEQ ID NO: 1941876 - RNA, 19 nt, Artificial Sequence
  Description of Artificial Sequence: Synthetic oligonucleotide
aagaauuuguuggcaugac

SEQ ID NO: 1941877 - RNA, 19 nt, Artificial Sequence
  Description of Artificial Sequence: Synthetic oligonucleotide
gaacaaugcgauuacucca

SEQ ID NO: 1941878 - RNA, 19 nt, Artificial Sequence
  Description of Artificial Sequence: Synthetic oligonucleotide
gaaucugucuuuaaagauc

SEQ ID NO: 1941879 - RNA, 19 nt, Artificial Sequence
  Description of Artificial Sequence: Synthetic oligonucleotide
caaguuguaaccuuuggaa

SEQ ID NO: 1941880 - RNA, 19 nt, Artificial Sequence
  Description of Artificial Sequence: Synthetic oligonucleotide
aaaagaugcuuaacaccac

SEQ ID NO: 1941881 - RNA, 19 nt, Artificial Sequence
  Description of Artificial Sequence: Synthetic oligonucleotide
gauuacuccagauacugua

SEQ ID NO: 1941882 - RNA, 19 nt, Artificial Sequence
  Description of Artificial Sequence: Synthetic oligonucleotide
ucaugguuucuccucggag

SEQ ID NO: 1941883 - RNA, 19 nt, Artificial Sequence
  Description of Artificial Sequence: Synthetic oligonucleotide
ucggagacugguaauggca

SEQ ID NO: 1941884 - RNA, 19 nt, Artificial Sequence
  Description of Artificial Sequence: Synthetic oligonucleotide
cuuuaaagaucaugguuuc

SEQ ID NO: 1941885 - RNA, 19 nt, Artificial Sequence
  Description of Artificial Sequence: Synthetic oligonucleotide
ugucuuuaaagaucauggu

SEQ ID NO: 1941886 - RNA, 19 nt, Artificial Sequence
  Description of Artificial Sequence: Synthetic oligonucleotide
cauagucugauuagcauca

SEQ ID NO: 1941887 - RNA, 19 nt, Artificial Sequence
  Description of Artificial Sequence: Synthetic oligonucleotide
caugacucgaacaaugcga

SEQ ID NO: 1941888 - RNA, 19 nt, Artificial Sequence
  Description of Artificial Sequence: Synthetic oligonucleotide
gaugggaaacauuagggcu

SEQ ID NO: 1941889 - RNA, 19 nt, Artificial Sequence
  Description of Artificial Sequence: Synthetic oligonucleotide
acucgaacaaugcgauuac

SEQ ID NO: 1941890 - RNA, 19 nt, Artificial Sequence
  Description of Artificial Sequence: Synthetic oligonucleotide
aaacuguaugggcccauug

SEQ ID NO: 1941891 - RNA, 19 nt, Artificial Sequence
  Description of Artificial Sequence: Synthetic oligonucleotide
ugcacggcagcacuuauuc

SEQ ID NO: 1941892 - RNA, 19 nt, Artificial Sequence
  Description of Artificial Sequence: Synthetic oligonucleotide
gaguuagauaacaauucug

SEQ ID NO: 1941893 - RNA, 19 nt, Artificial Sequence
  Description of Artificial Sequence: Synthetic oligonucleotide
cuaugaaucggggauaguc

SEQ ID NO: 1941894 - RNA, 19 nt, Artificial Sequence
  Description of Artificial Sequence: Synthetic oligonucleotide
ugguaauggcaucaaggga

SEQ ID NO: 1941895 - RNA, 19 nt, Artificial Sequence
  Description of Artificial Sequence: Synthetic oligonucleotide
cuucuucuaugaaucgggg

SEQ ID NO: 1941896 - RNA, 19 nt, Artificial Sequence
  Description of Artificial Sequence: Synthetic oligonucleotide
acaaagaauuuguuggcau

SEQ ID NO: 1941897 - RNA, 19 nt, Artificial Sequence
  Description of Artificial Sequence: Synthetic oligonucleotide
caagggauaaggcuggguc

SEQ ID NO: 1941898 - RNA, 19 nt, Artificial Sequence
  Description of Artificial Sequence: Synthetic oligonucleotide
agacuggauuccuugaaca

SEQ ID NO: 1941899 - RNA, 19 nt, Artificial Sequence
  Description of Artificial Sequence: Synthetic oligonucleotide
guauagaugggaaacauua

SEQ ID NO: 1941900 - RNA, 19 nt, Artificial Sequence
  Description of Artificial Sequence: Synthetic oligonucleotide
uuucugcugaauaaauaua

SEQ ID NO: 1941901 - RNA, 19 nt, Artificial Sequence
  Description of Artificial Sequence: Synthetic oligonucleotide
auguccucaaggugcacgg

SEQ ID NO: 1941902 - RNA, 19 nt, Artificial Sequence
  Description of Artificial Sequence: Synthetic oligonucleotide
aaaguagauauagccauuu

SEQ ID NO: 1941903 - RNA, 19 nt, Artificial Sequence
  Description of Artificial Sequence: Synthetic oligonucleotide
auguuuacucucaucacag

SEQ ID NO: 1941904 - RNA, 19 nt, Artificial Sequence
  Description of Artificial Sequence: Synthetic oligonucleotide
ugaagauagcuuccugaac

SEQ ID NO: 1941905 - RNA, 19 nt, Artificial Sequence
  Description of Artificial Sequence: Synthetic oligonucleotide
auaaacaaguuguaaccuu

SEQ ID NO: 1941906 - RNA, 19 nt, Artificial Sequence
  Description of Artificial Sequence: Synthetic oligonucleotide
uuaucaccgauuccaggga

SEQ ID NO: 1941907 - RNA, 19 nt, Artificial Sequence
  Description of Artificial Sequence: Synthetic oligonucleotide
ucugccucgaccugcugag

SEQ ID NO: 1941908 - RNA, 19 nt, Artificial Sequence
  Description of Artificial Sequence: Synthetic oligonucleotide
ugcuuaacaccacaacaaa

SEQ ID NO: 1941909 - RNA, 19 nt, Artificial Sequence
  Description of Artificial Sequence: Synthetic oligonucleotide
gugguccagaccuagggag

SEQ ID NO: 1941910 - RNA, 19 nt, Artificial Sequence
  Description of Artificial Sequence: Synthetic oligonucleotide
augggauggauguucauau

SEQ ID NO: 1941911 - RNA, 19 nt, Artificial Sequence
  Description of Artificial Sequence: Synthetic oligonucleotide
agaauuuguuggcaugacu

SEQ ID NO: 1941912 - RNA, 19 nt, Artificial Sequence
  Description of Artificial Sequence: Synthetic oligonucleotide
uucuaugaaucggggauag

SEQ ID NO: 1941913 - RNA, 19 nt, Artificial Sequence
  Description of Artificial Sequence: Synthetic oligonucleotide
augggaaacauuagggcuc

SEQ ID NO: 1941914 - RNA, 19 nt, Artificial Sequence
  Description of Artificial Sequence: Synthetic oligonucleotide
cugauuagcaucaucauau

SEQ ID NO: 1941915 - RNA, 19 nt, Artificial Sequence
  Description of Artificial Sequence: Synthetic oligonucleotide
acuggauuccuugaacauc

SEQ ID NO: 1941916 - RNA, 19 nt, Artificial Sequence
  Description of Artificial Sequence: Synthetic oligonucleotide
uggucccagccacaaauag

SEQ ID NO: 1941917 - RNA, 19 nt, Artificial Sequence
  Description of Artificial Sequence: Synthetic oligonucleotide
uucuucuaugaaucgggga

SEQ ID NO: 1941918 - RNA, 19 nt, Artificial Sequence
  Description of Artificial Sequence: Synthetic oligonucleotide
gaucccauguuugcugugg

SEQ ID NO: 1941919 - RNA, 19 nt, Artificial Sequence
  Description of Artificial Sequence: Synthetic oligonucleotide
uguuugcuguggaaaauau

SEQ ID NO: 1941920 - RNA, 19 nt, Artificial Sequence
  Description of Artificial Sequence: Synthetic oligonucleotide
uucucugguguuuugggau

SEQ ID NO: 1941921 - RNA, 19 nt, Artificial Sequence
  Description of Artificial Sequence: Synthetic oligonucleotide
cuucaauguggucccagcc

SEQ ID NO: 1941922 - RNA, 19 nt, Artificial Sequence
  Description of Artificial Sequence: Synthetic oligonucleotide
caucaucauaucuccacac

SEQ ID NO: 1941923 - RNA, 19 nt, Artificial Sequence
  Description of Artificial Sequence: Synthetic oligonucleotide
gauacuguauucaaacugu

SEQ ID NO: 1941924 - RNA, 19 nt, Artificial Sequence
  Description of Artificial Sequence: Synthetic oligonucleotide
aucggggauagucuuuguc

SEQ ID NO: 1941925 - RNA, 19 nt, Artificial Sequence
  Description of Artificial Sequence: Synthetic oligonucleotide
uggcuuuugccaguguagg

SEQ ID NO: 1941926 - RNA, 19 nt, Artificial Sequence
  Description of Artificial Sequence: Synthetic oligonucleotide
uuuguuggcaugacucgaa

SEQ ID NO: 1941927 - RNA, 19 nt, Artificial Sequence
  Description of Artificial Sequence: Synthetic oligonucleotide
auggaaauuguuauccuga

SEQ ID NO: 1941928 - RNA, 19 nt, Artificial Sequence
  Description of Artificial Sequence: Synthetic oligonucleotide
uguccauagucugauuagc

SEQ ID NO: 1941929 - RNA, 19 nt, Artificial Sequence
  Description of Artificial Sequence: Synthetic oligonucleotide
gaucaugguuucuccucgg

SEQ ID NO: 1941930 - RNA, 19 nt, Artificial Sequence
  Description of Artificial Sequence: Synthetic oligonucleotide
cuugaacaucgucaucggg

SEQ ID NO: 1941931 - RNA, 19 nt, Artificial Sequence
  Description of Artificial Sequence: Synthetic oligonucleotide
uccauagucugauuagcau

SEQ ID NO: 1941932 - RNA, 19 nt, Artificial Sequence
  Description of Artificial Sequence: Synthetic oligonucleotide
ucgucaucgggaagcauga

SEQ ID NO: 1941933 - RNA, 19 nt, Artificial Sequence
  Description of Artificial Sequence: Synthetic oligonucleotide
gaacuacuuguccauguuc

SEQ ID NO: 1941934 - RNA, 19 nt, Artificial Sequence
  Description of Artificial Sequence: Synthetic oligonucleotide
acuguaugggcccauugaa

SEQ ID NO: 1941935 - RNA, 19 nt, Artificial Sequence
  Description of Artificial Sequence: Synthetic oligonucleotide
uguuggcaugacucgaaca

SEQ ID NO: 1941936 - RNA, 19 nt, Artificial Sequence
  Description of Artificial Sequence: Synthetic oligonucleotide
gagacuggauuccuugaac

SEQ ID NO: 1941937 - RNA, 19 nt, Artificial Sequence
  Description of Artificial Sequence: Synthetic oligonucleotide
gguguuuugggauguuuag

SEQ ID NO: 1941938 - RNA, 19 nt, Artificial Sequence
  Description of Artificial Sequence: Synthetic oligonucleotide
agggauaaggcugggucac

SEQ ID NO: 1941939 - RNA, 19 nt, Artificial Sequence
  Description of Artificial Sequence: Synthetic oligonucleotide
auaaggcugggucacacuu

SEQ ID NO: 1941940 - RNA, 19 nt, Artificial Sequence
  Description of Artificial Sequence: Synthetic oligonucleotide
guuagauaacaauucugaa

SEQ ID NO: 1941941 - RNA, 19 nt, Artificial Sequence
  Description of Artificial Sequence: Synthetic oligonucleotide
ucuccucggagacugguaa

SEQ ID NO: 1941942 - RNA, 19 nt, Artificial Sequence
  Description of Artificial Sequence: Synthetic oligonucleotide
cugggucacacuucucugg

SEQ ID NO: 1941943 - RNA, 19 nt, Artificial Sequence
  Description of Artificial Sequence: Synthetic oligonucleotide
aaauagucacauaggcacu

SEQ ID NO: 1941944 - RNA, 19 nt, Artificial Sequence
  Description of Artificial Sequence: Synthetic oligonucleotide
uuauccugaugcucuccag

SEQ ID NO: 1941945 - RNA, 19 nt, Artificial Sequence
  Description of Artificial Sequence: Synthetic oligonucleotide
acagauggaucccauguuu

SEQ ID NO: 1941946 - RNA, 19 nt, Artificial Sequence
  Description of Artificial Sequence: Synthetic oligonucleotide
caugguuucuccucggaga

SEQ ID NO: 1941947 - RNA, 19 nt, Artificial Sequence
  Description of Artificial Sequence: Synthetic oligonucleotide
gaaucggggauagucuuug

SEQ ID NO: 1941948 - RNA, 19 nt, Artificial Sequence
  Description of Artificial Sequence: Synthetic oligonucleotide
cauguccucaaggugcacg

SEQ ID NO: 1941949 - RNA, 19 nt, Artificial Sequence
  Description of Artificial Sequence: Synthetic oligonucleotide
caccacaacaaagaauuug

SEQ ID NO: 1941950 - RNA, 19 nt, Artificial Sequence
  Description of Artificial Sequence: Synthetic oligonucleotide
ugcucccaagaaucagucg

SEQ ID NO: 1941951 - RNA, 19 nt, Artificial Sequence
  Description of Artificial Sequence: Synthetic oligonucleotide
cagauggaucccauguuug

SEQ ID NO: 1941952 - RNA, 19 nt, Artificial Sequence
  Description of Artificial Sequence: Synthetic oligonucleotide
uuuaaagaucaugguuucu

SEQ ID NO: 1941953 - RNA, 19 nt, Artificial Sequence
  Description of Artificial Sequence: Synthetic oligonucleotide
uagguauagaugggaaaca

SEQ ID NO: 1941954 - RNA, 19 nt, Artificial Sequence
  Description of Artificial Sequence: Synthetic oligonucleotide
gacucgaacaaugcgauua

SEQ ID NO: 1941955 - RNA, 19 nt, Artificial Sequence
  Description of Artificial Sequence: Synthetic oligonucleotide
uggaaauuguuauccugau

SEQ ID NO: 1941956 - RNA, 19 nt, Artificial Sequence
  Description of Artificial Sequence: Synthetic oligonucleotide
aucagucgauccuuggggu

SEQ ID NO: 1941957 - RNA, 19 nt, Artificial Sequence
  Description of Artificial Sequence: Synthetic oligonucleotide
ugcgauuacuccagauacu

SEQ ID NO: 1941958 - RNA, 19 nt, Artificial Sequence
  Description of Artificial Sequence: Synthetic oligonucleotide
uguuuacucucaucacaga

SEQ ID NO: 1941959 - RNA, 19 nt, Artificial Sequence
  Description of Artificial Sequence: Synthetic oligonucleotide
aaguagauauagccauuuu

SEQ ID NO: 1941960 - RNA, 19 nt, Artificial Sequence
  Description of Artificial Sequence: Synthetic oligonucleotide
ugcaugcuugaagauagcu

SEQ ID NO: 1941961 - RNA, 19 nt, Artificial Sequence
  Description of Artificial Sequence: Synthetic oligonucleotide
ugggauaaccuuccagaau

SEQ ID NO: 1941962 - RNA, 19 nt, Artificial Sequence
  Description of Artificial Sequence: Synthetic oligonucleotide
ucccaggucaguauauuuu

SEQ ID NO: 1941963 - RNA, 19 nt, Artificial Sequence
  Description of Artificial Sequence: Synthetic oligonucleotide
gcaugaaauggcuuuugcc

SEQ ID NO: 1941964 - RNA, 19 nt, Artificial Sequence
  Description of Artificial Sequence: Synthetic oligonucleotide
aguuuccuggugauucccc

SEQ ID NO: 1941965 - RNA, 19 nt, Artificial Sequence
  Description of Artificial Sequence: Synthetic oligonucleotide
ugccaguguagguauagau

SEQ ID NO: 1941966 - RNA, 19 nt, Artificial Sequence
  Description of Artificial Sequence: Synthetic oligonucleotide
ugaggaugcagacgccaga

SEQ ID NO: 1941967 - RNA, 19 nt, Artificial Sequence
  Description of Artificial Sequence: Synthetic oligonucleotide
gaacauaaggucaugggau

SEQ ID NO: 1941968 - RNA, 19 nt, Artificial Sequence
  Description of Artificial Sequence: Synthetic oligonucleotide
ugcagacgccagaagaauc

SEQ ID NO: 1941969 - RNA, 19 nt, Artificial Sequence
  Description of Artificial Sequence: Synthetic oligonucleotide
ugggucacacuucucuggu

SEQ ID NO: 1941970 - RNA, 19 nt, Artificial Sequence
  Description of Artificial Sequence: Synthetic oligonucleotide
ugauuagcaucaucauauc

SEQ ID NO: 1941971 - RNA, 19 nt, Artificial Sequence
  Description of Artificial Sequence: Synthetic oligonucleotide
aagcaugaaauggcuuuug

SEQ ID NO: 1941972 - RNA, 19 nt, Artificial Sequence
  Description of Artificial Sequence: Synthetic oligonucleotide
ugcccauguccucaaggug

SEQ ID NO: 1941973 - RNA, 19 nt, Artificial Sequence
  Description of Artificial Sequence: Synthetic oligonucleotide
cgaacaaugcgauuacucc

SEQ ID NO: 1941974 - RNA, 19 nt, Artificial Sequence
  Description of Artificial Sequence: Synthetic oligonucleotide
augcuuaacaccacaacaa

SEQ ID NO: 1941975 - RNA, 19 nt, Artificial Sequence
  Description of Artificial Sequence: Synthetic oligonucleotide
gucccagccacaaauaguc

SEQ ID NO: 1941976 - RNA, 19 nt, Artificial Sequence
  Description of Artificial Sequence: Synthetic oligonucleotide
uaucaccgauuccagggaa

SEQ ID NO: 1941977 - RNA, 19 nt, Artificial Sequence
  Description of Artificial Sequence: Synthetic oligonucleotide
ccacaaauagucacauagg

SEQ ID NO: 1941978 - RNA, 19 nt, Artificial Sequence
  Description of Artificial Sequence: Synthetic oligonucleotide
cucaugggcagcaacaaua

SEQ ID NO: 1941979 - RNA, 19 nt, Artificial Sequence
  Description of Artificial Sequence: Synthetic oligonucleotide
cuacuuuaucaccgauucc

SEQ ID NO: 1941980 - RNA, 19 nt, Artificial Sequence
  Description of Artificial Sequence: Synthetic oligonucleotide
ggcacugcaugcuugaaga

SEQ ID NO: 1941981 - RNA, 19 nt, Artificial Sequence
  Description of Artificial Sequence: Synthetic oligonucleotide
gcaugacucgaacaaugcg

SEQ ID NO: 1941982 - RNA, 19 nt, Artificial Sequence
  Description of Artificial Sequence: Synthetic oligonucleotide
uuguuggcaugacucgaac

SEQ ID NO: 1941983 - RNA, 19 nt, Artificial Sequence
  Description of Artificial Sequence: Synthetic oligonucleotide
ugggaaacauuagggcucc

SEQ ID NO: 1941984 - RNA, 19 nt, Artificial Sequence
  Description of Artificial Sequence: Synthetic oligonucleotide
accgauuccagggaauucu

SEQ ID NO: 1941985 - RNA, 19 nt, Artificial Sequence
  Description of Artificial Sequence: Synthetic oligonucleotide
uuaggauuggggucuucau

SEQ ID NO: 1941986 - RNA, 19 nt, Artificial Sequence
  Description of Artificial Sequence: Synthetic oligonucleotide
aaaaguagauauagccauu

SEQ ID NO: 1941987 - RNA, 19 nt, Artificial Sequence
  Description of Artificial Sequence: Synthetic oligonucleotide
cucggagacugguaauggc

SEQ ID NO: 1941988 - RNA, 19 nt, Artificial Sequence
  Description of Artificial Sequence: Synthetic oligonucleotide
agagacuggauuccuugaa

SEQ ID NO: 1941989 - RNA, 19 nt, Artificial Sequence
  Description of Artificial Sequence: Synthetic oligonucleotide
augaaucggggauagucuu

SEQ ID NO: 1941990 - RNA, 19 nt, Artificial Sequence
  Description of Artificial Sequence: Synthetic oligonucleotide
auggcuuuugccaguguag

SEQ ID NO: 1941991 - RNA, 19 nt, Artificial Sequence
  Description of Artificial Sequence: Synthetic oligonucleotide
acuuuaucaccgauuccag

SEQ ID NO: 1941992 - RNA, 19 nt, Artificial Sequence
  Description of Artificial Sequence: Synthetic oligonucleotide
accuuuggaacuacuuguc

SEQ ID NO: 1941993 - RNA, 19 nt, Artificial Sequence
  Description of Artificial Sequence: Synthetic oligonucleotide
caucgggaagcaugaaaug

SEQ ID NO: 1941994 - RNA, 19 nt, Artificial Sequence
  Description of Artificial Sequence: Synthetic oligonucleotide
ugccucgaccugcugagga

SEQ ID NO: 1941995 - RNA, 19 nt, Artificial Sequence
  Description of Artificial Sequence: Synthetic oligonucleotide
uagucugauuagcaucauc

SEQ ID NO: 1941996 - RNA, 19 nt, Artificial Sequence
  Description of Artificial Sequence: Synthetic oligonucleotide
uguucauaugcagcaucca

SEQ ID NO: 1941997 - RNA, 19 nt, Artificial Sequence
  Description of Artificial Sequence: Synthetic oligonucleotide
caggauggaaauuguuauc

SEQ ID NO: 1941998 - RNA, 19 nt, Artificial Sequence
  Description of Artificial Sequence: Synthetic oligonucleotide
auaaccauugagagcccag

SEQ ID NO: 1941999 - RNA, 19 nt, Artificial Sequence
  Description of Artificial Sequence: Synthetic oligonucleotide
uccucggagacugguaaug

SEQ ID NO: 1942000 - RNA, 19 nt, Artificial Sequence
  Description of Artificial Sequence: Synthetic oligonucleotide
gauuccccaccccacccgc

SEQ ID NO: 1942001 - RNA, 19 nt, Artificial Sequence
  Description of Artificial Sequence: Synthetic oligonucleotide
aacccuguucccaggagga

SEQ ID NO: 1942002 - RNA, 19 nt, Artificial Sequence
  Description of Artificial Sequence: Synthetic oligonucleotide
ccucuaaagaugaacauaa

SEQ ID NO: 1942003 - RNA, 19 nt, Artificial Sequence
  Description of Artificial Sequence: Synthetic oligonucleotide
acaauucugaaaagaugcu

SEQ ID NO: 1942004 - RNA, 19 nt, Artificial Sequence
  Description of Artificial Sequence: Synthetic oligonucleotide
ugguccagaccuagggagu

SEQ ID NO: 1942005 - RNA, 19 nt, Artificial Sequence
  Description of Artificial Sequence: Synthetic oligonucleotide
uggagugguccagaccuag

SEQ ID NO: 1942006 - RNA, 19 nt, Artificial Sequence
  Description of Artificial Sequence: Synthetic oligonucleotide
gauaaccuuccagaauguc

SEQ ID NO: 1942007 - RNA, 19 nt, Artificial Sequence
  Description of Artificial Sequence: Synthetic oligonucleotide
cccaagaaucagucgaucc

SEQ ID NO: 1942008 - RNA, 19 nt, Artificial Sequence
  Description of Artificial Sequence: Synthetic oligonucleotide
ccauagucugauuagcauc

SEQ ID NO: 1942009 - RNA, 19 nt, Artificial Sequence
  Description of Artificial Sequence: Synthetic oligonucleotide
gaacaucgucaucgggaag

SEQ ID NO: 1942010 - RNA, 19 nt, Artificial Sequence
  Description of Artificial Sequence: Synthetic oligonucleotide
uggugauuccccaccccac

SEQ ID NO: 1942011 - RNA, 19 nt, Artificial Sequence
  Description of Artificial Sequence: Synthetic oligonucleotide
uggaaaucccaggucagua

SEQ ID NO: 1942012 - RNA, 19 nt, Artificial Sequence
  Description of Artificial Sequence: Synthetic oligonucleotide
accucuaaagaugaacaua

SEQ ID NO: 1942013 - RNA, 19 nt, Artificial Sequence
  Description of Artificial Sequence: Synthetic oligonucleotide
aaucggggauagucuuugu

SEQ ID NO: 1942014 - RNA, 19 nt, Artificial Sequence
  Description of Artificial Sequence: Synthetic oligonucleotide
aucaugguuucuccucgga

SEQ ID NO: 1942015 - RNA, 19 nt, Artificial Sequence
  Description of Artificial Sequence: Synthetic oligonucleotide
agguauagaugggaaacau

SEQ ID NO: 1942016 - RNA, 19 nt, Artificial Sequence
  Description of Artificial Sequence: Synthetic oligonucleotide
auagagagacuggauuccu

SEQ ID NO: 1942017 - RNA, 19 nt, Artificial Sequence
  Description of Artificial Sequence: Synthetic oligonucleotide
uccagaccuagggaguggc

SEQ ID NO: 1942018 - RNA, 19 nt, Artificial Sequence
  Description of Artificial Sequence: Synthetic oligonucleotide
gugauuccccaccccaccc

SEQ ID NO: 1942019 - RNA, 19 nt, Artificial Sequence
  Description of Artificial Sequence: Synthetic oligonucleotide
gguaauggcaucaagggau

SEQ ID NO: 1942020 - RNA, 19 nt, Artificial Sequence
  Description of Artificial Sequence: Synthetic oligonucleotide
cugcucccaagaaucaguc

SEQ ID NO: 1942021 - RNA, 19 nt, Artificial Sequence
  Description of Artificial Sequence: Synthetic oligonucleotide
augacucgaacaaugcgau

SEQ ID NO: 1942022 - RNA, 19 nt, Artificial Sequence
  Description of Artificial Sequence: Synthetic oligonucleotide
caggaguuagauaacaauu

SEQ ID NO: 1942023 - RNA, 19 nt, Artificial Sequence
  Description of Artificial Sequence: Synthetic oligonucleotide
uccccgagaagaagagggu

SEQ ID NO: 1942024 - RNA, 19 nt, Artificial Sequence
  Description of Artificial Sequence: Synthetic oligonucleotide
guuuccuggugauucccca

SEQ ID NO: 1942025 - RNA, 19 nt, Artificial Sequence
  Description of Artificial Sequence: Synthetic oligonucleotide
acgccagaagaaucugucu

SEQ ID NO: 1942026 - RNA, 19 nt, Artificial Sequence
  Description of Artificial Sequence: Synthetic oligonucleotide
ggaguuagauaacaauucu

SEQ ID NO: 1942027 - RNA, 19 nt, Artificial Sequence
  Description of Artificial Sequence: Synthetic oligonucleotide
uuucuccucggagacuggu

SEQ ID NO: 1942028 - RNA, 19 nt, Artificial Sequence
  Description of Artificial Sequence: Synthetic oligonucleotide
ggugauuccccaccccacc

SEQ ID NO: 1942029 - RNA, 19 nt, Artificial Sequence
  Description of Artificial Sequence: Synthetic oligonucleotide
acaccugguuccccgagaa

SEQ ID NO: 1942030 - RNA, 19 nt, Artificial Sequence
  Description of Artificial Sequence: Synthetic oligonucleotide
agaugaacauaaggucaug

SEQ ID NO: 1942031 - RNA, 19 nt, Artificial Sequence
  Description of Artificial Sequence: Synthetic oligonucleotide
acaaugcgauuacuccaga

SEQ ID NO: 1942032 - RNA, 19 nt, Artificial Sequence
  Description of Artificial Sequence: Synthetic oligonucleotide
uccuuggagugguccagac

SEQ ID NO: 1942033 - RNA, 19 nt, Artificial Sequence
  Description of Artificial Sequence: Synthetic oligonucleotide
cagcacuuauucucuucac

SEQ ID NO: 1942034 - RNA, 19 nt, Artificial Sequence
  Description of Artificial Sequence: Synthetic oligonucleotide
cuggccaaaaugauuuugu

SEQ ID NO: 1942035 - RNA, 19 nt, Artificial Sequence
  Description of Artificial Sequence: Synthetic oligonucleotide
gcacuuauucucuucaccu

SEQ ID NO: 1942036 - RNA, 19 nt, Artificial Sequence
  Description of Artificial Sequence: Synthetic oligonucleotide
cucguagacagcaucuacu

SEQ ID NO: 1942037 - RNA, 19 nt, Artificial Sequence
  Description of Artificial Sequence: Synthetic oligonucleotide
guuccccgagaagaagagg

SEQ ID NO: 1942038 - RNA, 19 nt, Artificial Sequence
  Description of Artificial Sequence: Synthetic oligonucleotide
ucagucgauccuugggguu

SEQ ID NO: 1942039 - RNA, 19 nt, Artificial Sequence
  Description of Artificial Sequence: Synthetic oligonucleotide
guccauagucugauuagca

SEQ ID NO: 1942040 - RNA, 19 nt, Artificial Sequence
  Description of Artificial Sequence: Synthetic oligonucleotide
ccuugaacaucgucaucgg

SEQ ID NO: 1942041 - RNA, 19 nt, Artificial Sequence
  Description of Artificial Sequence: Synthetic oligonucleotide
uccuugggguucucaauuu

SEQ ID NO: 1942042 - RNA, 19 nt, Artificial Sequence
  Description of Artificial Sequence: Synthetic oligonucleotide
uucuccucggagacuggua

SEQ ID NO: 1942043 - RNA, 19 nt, Artificial Sequence
  Description of Artificial Sequence: Synthetic oligonucleotide
guuguaaccuuuggaacua

SEQ ID NO: 1942044 - RNA, 19 nt, Artificial Sequence
  Description of Artificial Sequence: Synthetic oligonucleotide
uuggcaugacucgaacaau

SEQ ID NO: 1942045 - RNA, 19 nt, Artificial Sequence
  Description of Artificial Sequence: Synthetic oligonucleotide
uacucucaucacagaugga

SEQ ID NO: 1942046 - RNA, 19 nt, Artificial Sequence
  Description of Artificial Sequence: Synthetic oligonucleotide
cuguaugggcccauugaaa

SEQ ID NO: 1942047 - RNA, 19 nt, Artificial Sequence
  Description of Artificial Sequence: Synthetic oligonucleotide
gcaucaucauaucuccaca

SEQ ID NO: 1942048 - RNA, 19 nt, Artificial Sequence
  Description of Artificial Sequence: Synthetic oligonucleotide
ggcaugacucgaacaaugc

SEQ ID NO: 1942049 - RNA, 19 nt, Artificial Sequence
  Description of Artificial Sequence: Synthetic oligonucleotide
cccagccacaaauagucac

SEQ ID NO: 1942050 - RNA, 19 nt, Artificial Sequence
  Description of Artificial Sequence: Synthetic oligonucleotide
ucaccgauuccagggaauu

SEQ ID NO: 1942051 - RNA, 19 nt, Artificial Sequence
  Description of Artificial Sequence: Synthetic oligonucleotide
uggauuccuugaacaucgu

SEQ ID NO: 1942052 - RNA, 19 nt, Artificial Sequence
  Description of Artificial Sequence: Synthetic oligonucleotide
cauaaggucaugggaugga

SEQ ID NO: 1942053 - RNA, 19 nt, Artificial Sequence
  Description of Artificial Sequence: Synthetic oligonucleotide
gauaaggcugggucacacu

SEQ ID NO: 1942054 - RNA, 19 nt, Artificial Sequence
  Description of Artificial Sequence: Synthetic oligonucleotide
uuguaaccuuuggaacuac

SEQ ID NO: 1942055 - RNA, 19 nt, Artificial Sequence
  Description of Artificial Sequence: Synthetic oligonucleotide
uugccaguguagguauaga

SEQ ID NO: 1942056 - RNA, 19 nt, Artificial Sequence
  Description of Artificial Sequence: Synthetic oligonucleotide
ucuaugaaucggggauagu

SEQ ID NO: 1942057 - RNA, 19 nt, Artificial Sequence
  Description of Artificial Sequence: Synthetic oligonucleotide
cagucgauccuugggguuc

SEQ ID NO: 1942058 - RNA, 19 nt, Artificial Sequence
  Description of Artificial Sequence: Synthetic oligonucleotide
ucaugggauggauguucau

SEQ ID NO: 1942059 - RNA, 19 nt, Artificial Sequence
  Description of Artificial Sequence: Synthetic oligonucleotide
cuuuugccaguguagguau

SEQ ID NO: 1942060 - RNA, 19 nt, Artificial Sequence
  Description of Artificial Sequence: Synthetic oligonucleotide
acggcagcacuuauucucu

SEQ ID NO: 1942061 - RNA, 19 nt, Artificial Sequence
  Description of Artificial Sequence: Synthetic oligonucleotide
cagaccuagggaguggcca

SEQ ID NO: 1942062 - RNA, 19 nt, Artificial Sequence
  Description of Artificial Sequence: Synthetic oligonucleotide
auacuguauucaaacugua

SEQ ID NO: 1942063 - RNA, 19 nt, Artificial Sequence
  Description of Artificial Sequence: Synthetic oligonucleotide
guuuugggauguuuaggau

SEQ ID NO: 1942064 - RNA, 19 nt, Artificial Sequence
  Description of Artificial Sequence: Synthetic oligonucleotide
gguuccccgagaagaagag

SEQ ID NO: 1942065 - RNA, 19 nt, Artificial Sequence
  Description of Artificial Sequence: Synthetic oligonucleotide
gaccuagggaguggccaag

SEQ ID NO: 1942066 - RNA, 19 nt, Artificial Sequence
  Description of Artificial Sequence: Synthetic oligonucleotide
acaucgucaucgggaagca

SEQ ID NO: 1942067 - RNA, 19 nt, Artificial Sequence
  Description of Artificial Sequence: Synthetic oligonucleotide
cauaaccauugagagccca

SEQ ID NO: 1942068 - RNA, 19 nt, Artificial Sequence
  Description of Artificial Sequence: Synthetic oligonucleotide
ucaaacuguaugggcccau

SEQ ID NO: 1942069 - RNA, 19 nt, Artificial Sequence
  Description of Artificial Sequence: Synthetic oligonucleotide
augcagacgccagaagaau

SEQ ID NO: 1942070 - RNA, 19 nt, Artificial Sequence
  Description of Artificial Sequence: Synthetic oligonucleotide
auuagggcuccuggguccu

SEQ ID NO: 1942071 - RNA, 19 nt, Artificial Sequence
  Description of Artificial Sequence: Synthetic oligonucleotide
gaggaaguuuccuggugau

SEQ ID NO: 1942072 - RNA, 19 nt, Artificial Sequence
  Description of Artificial Sequence: Synthetic oligonucleotide
uuggagugguccagaccua

SEQ ID NO: 1942073 - RNA, 19 nt, Artificial Sequence
  Description of Artificial Sequence: Synthetic oligonucleotide
agcucaugggcagcaacaa

SEQ ID NO: 1942074 - RNA, 19 nt, Artificial Sequence
  Description of Artificial Sequence: Synthetic oligonucleotide
cauaucuccacaccugguu

SEQ ID NO: 1942075 - RNA, 19 nt, Artificial Sequence
  Description of Artificial Sequence: Synthetic oligonucleotide
cccgccaggauggaaauug

SEQ ID NO: 1942076 - RNA, 19 nt, Artificial Sequence
  Description of Artificial Sequence: Synthetic oligonucleotide
ugacucgaacaaugcgauu

SEQ ID NO: 1942077 - RNA, 19 nt, Artificial Sequence
  Description of Artificial Sequence: Synthetic oligonucleotide
gucugauuagcaucaucau

SEQ ID NO: 1942078 - RNA, 19 nt, Artificial Sequence
  Description of Artificial Sequence: Synthetic oligonucleotide
cugaacccuguucccagga

SEQ ID NO: 1942079 - RNA, 19 nt, Artificial Sequence
  Description of Artificial Sequence: Synthetic oligonucleotide
cuucuaugaaucggggaua

SEQ ID NO: 1942080 - RNA, 19 nt, Artificial Sequence
  Description of Artificial Sequence: Synthetic oligonucleotide
guaaccuuuggaacuacuu

SEQ ID NO: 1942081 - RNA, 19 nt, Artificial Sequence
  Description of Artificial Sequence: Synthetic oligonucleotide
guuucuccucggagacugg

SEQ ID NO: 1942082 - RNA, 19 nt, Artificial Sequence
  Description of Artificial Sequence: Synthetic oligonucleotide
gguucucaauuucauuacu

SEQ ID NO: 1942083 - RNA, 19 nt, Artificial Sequence
  Description of Artificial Sequence: Synthetic oligonucleotide
ggagacugguaauggcauc

SEQ ID NO: 1942084 - RNA, 19 nt, Artificial Sequence
  Description of Artificial Sequence: Synthetic oligonucleotide
gaagcaugaaauggcuuuu

SEQ ID NO: 1942085 - RNA, 19 nt, Artificial Sequence
  Description of Artificial Sequence: Synthetic oligonucleotide
agucgauccuugggguucu

SEQ ID NO: 1942086 - RNA, 19 nt, Artificial Sequence
  Description of Artificial Sequence: Synthetic oligonucleotide
ugguuucuccucggagacu

SEQ ID NO: 1942087 - RNA, 19 nt, Artificial Sequence
  Description of Artificial Sequence: Synthetic oligonucleotide
agccacaaauagucacaua

SEQ ID NO: 1942088 - RNA, 19 nt, Artificial Sequence
  Description of Artificial Sequence: Synthetic oligonucleotide
ggauggaaauuguuauccu

SEQ ID NO: 1942089 - RNA, 19 nt, Artificial Sequence
  Description of Artificial Sequence: Synthetic oligonucleotide
ccucggagacugguaaugg

SEQ ID NO: 1942090 - RNA, 19 nt, Artificial Sequence
  Description of Artificial Sequence: Synthetic oligonucleotide
cacugcaugcuugaagaua

SEQ ID NO: 1942091 - RNA, 19 nt, Artificial Sequence
  Description of Artificial Sequence: Synthetic oligonucleotide
caauucugaaaagaugcuu

SEQ ID NO: 1942092 - RNA, 19 nt, Artificial Sequence
  Description of Artificial Sequence: Synthetic oligonucleotide
ccugaacccuguucccagg

SEQ ID NO: 1942093 - RNA, 19 nt, Artificial Sequence
  Description of Artificial Sequence: Synthetic oligonucleotide
ggcugggucacacuucucu

SEQ ID NO: 1942094 - RNA, 19 nt, Artificial Sequence
  Description of Artificial Sequence: Synthetic oligonucleotide
agacugguaauggcaucaa

SEQ ID NO: 1942095 - RNA, 19 nt, Artificial Sequence
  Description of Artificial Sequence: Synthetic oligonucleotide
aucaccgauuccagggaau

SEQ ID NO: 1942096 - RNA, 19 nt, Artificial Sequence
  Description of Artificial Sequence: Synthetic oligonucleotide
ccauguuugcuguggaaaa

SEQ ID NO: 1942097 - RNA, 19 nt, Artificial Sequence
  Description of Artificial Sequence: Synthetic oligonucleotide
caccugguuccccgagaag

SEQ ID NO: 1942098 - RNA, 19 nt, Artificial Sequence
  Description of Artificial Sequence: Synthetic oligonucleotide
gccaggauggaaauuguua

SEQ ID NO: 1942099 - RNA, 19 nt, Artificial Sequence
  Description of Artificial Sequence: Synthetic oligonucleotide
ccaggauggaaauuguuau

SEQ ID NO: 1942100 - RNA, 19 nt, Artificial Sequence
  Description of Artificial Sequence: Synthetic oligonucleotide
ugaugcucuccaggaguua

SEQ ID NO: 1942101 - RNA, 19 nt, Artificial Sequence
  Description of Artificial Sequence: Synthetic oligonucleotide
caccgauuccagggaauuc

SEQ ID NO: 1942102 - RNA, 19 nt, Artificial Sequence
  Description of Artificial Sequence: Synthetic oligonucleotide
caagaaucagucgauccuu

SEQ ID NO: 1942103 - RNA, 19 nt, Artificial Sequence
  Description of Artificial Sequence: Synthetic oligonucleotide
ucgaccugcugaggaugca

SEQ ID NO: 1942104 - RNA, 19 nt, Artificial Sequence
  Description of Artificial Sequence: Synthetic oligonucleotide
aaggugcacggcagcacuu

SEQ ID NO: 1942105 - RNA, 19 nt, Artificial Sequence
  Description of Artificial Sequence: Synthetic oligonucleotide
ccaagaaucagucgauccu

SEQ ID NO: 1942106 - RNA, 19 nt, Artificial Sequence
  Description of Artificial Sequence: Synthetic oligonucleotide
ggaaaucccaggucaguau

SEQ ID NO: 1942107 - RNA, 19 nt, Artificial Sequence
  Description of Artificial Sequence: Synthetic oligonucleotide
caaugcgauuacuccagau

SEQ ID NO: 1942108 - RNA, 19 nt, Artificial Sequence
  Description of Artificial Sequence: Synthetic oligonucleotide
uagcuuccugaacccuguu

SEQ ID NO: 1942109 - RNA, 19 nt, Artificial Sequence
  Description of Artificial Sequence: Synthetic oligonucleotide
ucugguguuuugggauguu

SEQ ID NO: 1942110 - RNA, 19 nt, Artificial Sequence
  Description of Artificial Sequence: Synthetic oligonucleotide
cuccuggaccauagagaga

SEQ ID NO: 1942111 - RNA, 19 nt, Artificial Sequence
  Description of Artificial Sequence: Synthetic oligonucleotide
ccucaaggugcacggcagc

SEQ ID NO: 1942112 - RNA, 19 nt, Artificial Sequence
  Description of Artificial Sequence: Synthetic oligonucleotide
cacauaggcacugcaugcu

SEQ ID NO: 1942113 - RNA, 19 nt, Artificial Sequence
  Description of Artificial Sequence: Synthetic oligonucleotide
augcucuccaggaguuaga

SEQ ID NO: 1942114 - RNA, 19 nt, Artificial Sequence
  Description of Artificial Sequence: Synthetic oligonucleotide
cucccaagaaucagucgau

SEQ ID NO: 1942115 - RNA, 19 nt, Artificial Sequence
  Description of Artificial Sequence: Synthetic oligonucleotide
gcagacgccagaagaaucu

SEQ ID NO: 1942116 - RNA, 19 nt, Artificial Sequence
  Description of Artificial Sequence: Synthetic oligonucleotide
acaccacaacaaagaauuu

SEQ ID NO: 1942117 - RNA, 19 nt, Artificial Sequence
  Description of Artificial Sequence: Synthetic oligonucleotide
cauguuugcuguggaaaau

SEQ ID NO: 1942118 - RNA, 19 nt, Artificial Sequence
  Description of Artificial Sequence: Synthetic oligonucleotide
cugccucgaccugcugagg

SEQ ID NO: 1942119 - RNA, 19 nt, Artificial Sequence
  Description of Artificial Sequence: Synthetic oligonucleotide
ggaacuacuuguccauguu

SEQ ID NO: 1942120 - RNA, 19 nt, Artificial Sequence
  Description of Artificial Sequence: Synthetic oligonucleotide
aggugcacggcagcacuua

SEQ ID NO: 1942121 - RNA, 19 nt, Artificial Sequence
  Description of Artificial Sequence: Synthetic oligonucleotide
cggggauagucuuugucca

SEQ ID NO: 1942122 - RNA, 19 nt, Artificial Sequence
  Description of Artificial Sequence: Synthetic oligonucleotide
cacagauggaucccauguu

SEQ ID NO: 1942123 - RNA, 19 nt, Artificial Sequence
  Description of Artificial Sequence: Synthetic oligonucleotide
ggcuuuugccaguguaggu

SEQ ID NO: 1942124 - RNA, 19 nt, Artificial Sequence
  Description of Artificial Sequence: Synthetic oligonucleotide
gguauagaugggaaacauu

SEQ ID NO: 1942125 - RNA, 19 nt, Artificial Sequence
  Description of Artificial Sequence: Synthetic oligonucleotide
ccccgagaagaagaggguc

SEQ ID NO: 1942126 - RNA, 19 nt, Artificial Sequence
  Description of Artificial Sequence: Synthetic oligonucleotide
cccgagaagaagagggucu

SEQ ID NO: 1942127 - RNA, 19 nt, Artificial Sequence
  Description of Artificial Sequence: Synthetic oligonucleotide
ccacccgccaggauggaaa

SEQ ID NO: 1942128 - RNA, 19 nt, Artificial Sequence
  Description of Artificial Sequence: Synthetic oligonucleotide
ggucccagccacaaauagu

SEQ ID NO: 1942129 - RNA, 19 nt, Artificial Sequence
  Description of Artificial Sequence: Synthetic oligonucleotide
cucgaacaaugcgauuacu

SEQ ID NO: 1942130 - RNA, 19 nt, Artificial Sequence
  Description of Artificial Sequence: Synthetic oligonucleotide
cucugguguuuugggaugu

SEQ ID NO: 1942131 - RNA, 19 nt, Artificial Sequence
  Description of Artificial Sequence: Synthetic oligonucleotide
cagccacaaauagucacau

SEQ ID NO: 1942132 - RNA, 19 nt, Artificial Sequence
  Description of Artificial Sequence: Synthetic oligonucleotide
cacacuucucugguguuuu

SEQ ID NO: 1942133 - RNA, 19 nt, Artificial Sequence
  Description of Artificial Sequence: Synthetic oligonucleotide
cagcaacaauaaacaaguu

SEQ ID NO: 1942134 - RNA, 19 nt, Artificial Sequence
  Description of Artificial Sequence: Synthetic oligonucleotide
gcucuccaggaguuagaua

SEQ ID NO: 1942135 - RNA, 19 nt, Artificial Sequence
  Description of Artificial Sequence: Synthetic oligonucleotide
ggggauagucuuuguccau

SEQ ID NO: 1942136 - RNA, 19 nt, Artificial Sequence
  Description of Artificial Sequence: Synthetic oligonucleotide
cuccucggagacugguaau

SEQ ID NO: 1942137 - RNA, 19 nt, Artificial Sequence
  Description of Artificial Sequence: Synthetic oligonucleotide
uuagggcuccuggguccuu

SEQ ID NO: 1942138 - RNA, 19 nt, Artificial Sequence
  Description of Artificial Sequence: Synthetic oligonucleotide
caaacuguaugggcccauu

SEQ ID NO: 1942139 - RNA, 19 nt, Artificial Sequence
  Description of Artificial Sequence: Synthetic oligonucleotide
gcucaugggcagcaacaau

SEQ ID NO: 1942140 - RNA, 19 nt, Artificial Sequence
  Description of Artificial Sequence: Synthetic oligonucleotide
ccacaacaaagaauuuguu

SEQ ID NO: 1942141 - RNA, 19 nt, Artificial Sequence
  Description of Artificial Sequence: Synthetic oligonucleotide
cacccgccaggauggaaau

SEQ ID NO: 1942142 - RNA, 19 nt, Artificial Sequence
  Description of Artificial Sequence: Synthetic oligonucleotide
ggugcacggcagcacuuau

SEQ ID NO: 1942143 - RNA, 19 nt, Artificial Sequence
  Description of Artificial Sequence: Synthetic oligonucleotide
gcacugcaugcuugaagau

SEQ ID NO: 1942144 - RNA, 19 nt, Artificial Sequence
  Description of Artificial Sequence: Synthetic oligonucleotide
gucgauccuugggguucuc

SEQ ID NO: 1942145 - RNA, 19 nt, Artificial Sequence
  Description of Artificial Sequence: Synthetic oligonucleotide
cggagacugguaauggcau

SEQ ID NO: 1942146 - RNA, 19 nt, Artificial Sequence
  Description of Artificial Sequence: Synthetic oligonucleotide
caucgucaucgggaagcau

SEQ ID NO: 1942147 - RNA, 19 nt, Artificial Sequence
  Description of Artificial Sequence: Synthetic oligonucleotide
ccgccaggauggaaauugu

SEQ ID NO: 1942148 - RNA, 19 nt, Artificial Sequence
  Description of Artificial Sequence: Synthetic oligonucleotide
ccgagaagaagagggucuu

SEQ ID NO: 1942149 - RNA, 19 nt, Artificial Sequence
  Description of Artificial Sequence: Synthetic oligonucleotide
cccacccgccaggauggaa

SEQ ID NO: 1942150 - RNA, 19 nt, Artificial Sequence
  Description of Artificial Sequence: Synthetic oligonucleotide
cgucaucgggaagcaugaa

SEQ ID NO: 1942151 - RNA, 19 nt, Artificial Sequence
  Description of Artificial Sequence: Synthetic oligonucleotide
ccccacccgccaggaugga

SEQ ID NO: 1942152 - RNA, 19 nt, Artificial Sequence
  Description of Artificial Sequence: Synthetic oligonucleotide
aaaugagacaaccaguuca

SEQ ID NO: 1942153 - RNA, 19 nt, Artificial Sequence
  Description of Artificial Sequence: Synthetic oligonucleotide
aauccaaucuugcaacugg

SEQ ID NO: 1942154 - RNA, 19 nt, Artificial Sequence
  Description of Artificial Sequence: Synthetic oligonucleotide
cauagcaccgcaaagagag

SEQ ID NO: 1942155 - RNA, 19 nt, Artificial Sequence
  Description of Artificial Sequence: Synthetic oligonucleotide
aucaaaaugagacaaccag

SEQ ID NO: 1942156 - RNA, 19 nt, Artificial Sequence
  Description of Artificial Sequence: Synthetic oligonucleotide
uuccuuaacaucuucucgg

SEQ ID NO: 1942157 - RNA, 19 nt, Artificial Sequence
  Description of Artificial Sequence: Synthetic oligonucleotide
gauggacagauuaacaugg

SEQ ID NO: 1942158 - RNA, 19 nt, Artificial Sequence
  Description of Artificial Sequence: Synthetic oligonucleotide
cuuagaacuaagaggaagc

SEQ ID NO: 1942159 - RNA, 19 nt, Artificial Sequence
  Description of Artificial Sequence: Synthetic oligonucleotide
ugaaguaauggcagaaugc

SEQ ID NO: 1942160 - RNA, 19 nt, Artificial Sequence
  Description of Artificial Sequence: Synthetic oligonucleotide
auaaguaccguaaaggaag

SEQ ID NO: 1942161 - RNA, 19 nt, Artificial Sequence
  Description of Artificial Sequence: Synthetic oligonucleotide
agagggauuggacagcagc

SEQ ID NO: 1942162 - RNA, 19 nt, Artificial Sequence
  Description of Artificial Sequence: Synthetic oligonucleotide
uccccuuagaacuaagagg

SEQ ID NO: 1942163 - RNA, 19 nt, Artificial Sequence
  Description of Artificial Sequence: Synthetic oligonucleotide
uuaucaaaaugagacaacc

SEQ ID NO: 1942164 - RNA, 19 nt, Artificial Sequence
  Description of Artificial Sequence: Synthetic oligonucleotide
guuguaacucuucauacag

SEQ ID NO: 1942165 - RNA, 19 nt, Artificial Sequence
  Description of Artificial Sequence: Synthetic oligonucleotide
aagcccauagaugauuugc

SEQ ID NO: 1942166 - RNA, 19 nt, Artificial Sequence
  Description of Artificial Sequence: Synthetic oligonucleotide
uuaucuagugcuucggcag

SEQ ID NO: 1942167 - RNA, 19 nt, Artificial Sequence
  Description of Artificial Sequence: Synthetic oligonucleotide
acugaguuaggucuggcuc

SEQ ID NO: 1942168 - RNA, 19 nt, Artificial Sequence
  Description of Artificial Sequence: Synthetic oligonucleotide
ugauggggaauucaaaaga

SEQ ID NO: 1942169 - RNA, 19 nt, Artificial Sequence
  Description of Artificial Sequence: Synthetic oligonucleotide
gagacaaccaguucagaag

SEQ ID NO: 1942170 - RNA, 19 nt, Artificial Sequence
  Description of Artificial Sequence: Synthetic oligonucleotide
uuuggcuaaagcuacuagu

SEQ ID NO: 1942171 - RNA, 19 nt, Artificial Sequence
  Description of Artificial Sequence: Synthetic oligonucleotide
accguaaaggaagaagucc

SEQ ID NO: 1942172 - RNA, 19 nt, Artificial Sequence
  Description of Artificial Sequence: Synthetic oligonucleotide
ggggagauacuucagaacg

SEQ ID NO: 1942173 - RNA, 19 nt, Artificial Sequence
  Description of Artificial Sequence: Synthetic oligonucleotide
aacagagauuuguucaugu

SEQ ID NO: 1942174 - RNA, 19 nt, Artificial Sequence
  Description of Artificial Sequence: Synthetic oligonucleotide
uauucugugggcauuuggu

SEQ ID NO: 1942175 - RNA, 19 nt, Artificial Sequence
  Description of Artificial Sequence: Synthetic oligonucleotide
gcuuaagucagaaugaucc

SEQ ID NO: 1942176 - RNA, 19 nt, Artificial Sequence
  Description of Artificial Sequence: Synthetic oligonucleotide
uuuggaguaccaaagcguc

SEQ ID NO: 1942177 - RNA, 19 nt, Artificial Sequence
  Description of Artificial Sequence: Synthetic oligonucleotide
aacucggugauaucuccuc

SEQ ID NO: 1942178 - RNA, 19 nt, Artificial Sequence
  Description of Artificial Sequence: Synthetic oligonucleotide
acuaauccuuuccacuucg

SEQ ID NO: 1942179 - RNA, 19 nt, Artificial Sequence
  Description of Artificial Sequence: Synthetic oligonucleotide
gaaggcacugcauuccggg

SEQ ID NO: 1942180 - RNA, 19 nt, Artificial Sequence
  Description of Artificial Sequence: Synthetic oligonucleotide
uucagaacguuaucuagug

SEQ ID NO: 1942181 - RNA, 19 nt, Artificial Sequence
  Description of Artificial Sequence: Synthetic oligonucleotide
uaaacaacugauguuuuga

SEQ ID NO: 1942182 - RNA, 19 nt, Artificial Sequence
  Description of Artificial Sequence: Synthetic oligonucleotide
cugguugagauacagcccc

SEQ ID NO: 1942183 - RNA, 19 nt, Artificial Sequence
  Description of Artificial Sequence: Synthetic oligonucleotide
uuugcuuaggauuguuucu

SEQ ID NO: 1942184 - RNA, 19 nt, Artificial Sequence
  Description of Artificial Sequence: Synthetic oligonucleotide
accaaagcgucacugauga

SEQ ID NO: 1942185 - RNA, 19 nt, Artificial Sequence
  Description of Artificial Sequence: Synthetic oligonucleotide
guuguugaaguaauggcag

SEQ ID NO: 1942186 - RNA, 19 nt, Artificial Sequence
  Description of Artificial Sequence: Synthetic oligonucleotide
cuuaggauuguuucuauga

SEQ ID NO: 1942187 - RNA, 19 nt, Artificial Sequence
  Description of Artificial Sequence: Synthetic oligonucleotide
cuuugcuuaggauuguuuc

SEQ ID NO: 1942188 - RNA, 19 nt, Artificial Sequence
  Description of Artificial Sequence: Synthetic oligonucleotide
uuccacuucguugaaagcc

SEQ ID NO: 1942189 - RNA, 19 nt, Artificial Sequence
  Description of Artificial Sequence: Synthetic oligonucleotide
agacauaaguaccguaaag

SEQ ID NO: 1942190 - RNA, 19 nt, Artificial Sequence
  Description of Artificial Sequence: Synthetic oligonucleotide
uguacaacugaguuagguc

SEQ ID NO: 1942191 - RNA, 19 nt, Artificial Sequence
  Description of Artificial Sequence: Synthetic oligonucleotide
acuucguugaaagccagac

SEQ ID NO: 1942192 - RNA, 19 nt, Artificial Sequence
  Description of Artificial Sequence: Synthetic oligonucleotide
gauuguuucuaugauggac

SEQ ID NO: 1942193 - RNA, 19 nt, Artificial Sequence
  Description of Artificial Sequence: Synthetic oligonucleotide
ucuaugauggacagauuaa

SEQ ID NO: 1942194 - RNA, 19 nt, Artificial Sequence
  Description of Artificial Sequence: Synthetic oligonucleotide
gaugaacggugguagcugg

SEQ ID NO: 1942195 - RNA, 19 nt, Artificial Sequence
  Description of Artificial Sequence: Synthetic oligonucleotide
cuugcaacuggccgcaugg

SEQ ID NO: 1942196 - RNA, 19 nt, Artificial Sequence
  Description of Artificial Sequence: Synthetic oligonucleotide
uaucuagugcuucggcagg

SEQ ID NO: 1942197 - RNA, 19 nt, Artificial Sequence
  Description of Artificial Sequence: Synthetic oligonucleotide
aguaccguaaaggaagaag

SEQ ID NO: 1942198 - RNA, 19 nt, Artificial Sequence
  Description of Artificial Sequence: Synthetic oligonucleotide
ugugucuaaauccaaucuu

SEQ ID NO: 1942199 - RNA, 19 nt, Artificial Sequence
  Description of Artificial Sequence: Synthetic oligonucleotide
cuuccauggaacaguagag

SEQ ID NO: 1942200 - RNA, 19 nt, Artificial Sequence
  Description of Artificial Sequence: Synthetic oligonucleotide
agaaguaucugccgccuag

SEQ ID NO: 1942201 - RNA, 19 nt, Artificial Sequence
  Description of Artificial Sequence: Synthetic oligonucleotide
agacaaccaguucagaagu

SEQ ID NO: 1942202 - RNA, 19 nt, Artificial Sequence
  Description of Artificial Sequence: Synthetic oligonucleotide
gaugauuugccggaugggc

SEQ ID NO: 1942203 - RNA, 19 nt, Artificial Sequence
  Description of Artificial Sequence: Synthetic oligonucleotide
aaacaacugauguuuugau

SEQ ID NO: 1942204 - RNA, 19 nt, Artificial Sequence
  Description of Artificial Sequence: Synthetic oligonucleotide
uuaggauuguuucuaugau

SEQ ID NO: 1942205 - RNA, 19 nt, Artificial Sequence
  Description of Artificial Sequence: Synthetic oligonucleotide
uugaaagccagacgcugag

SEQ ID NO: 1942206 - RNA, 19 nt, Artificial Sequence
  Description of Artificial Sequence: Synthetic oligonucleotide
auuguuucuaugauggaca

SEQ ID NO: 1942207 - RNA, 19 nt, Artificial Sequence
  Description of Artificial Sequence: Synthetic oligonucleotide
agauuaacauggucauuuc

SEQ ID NO: 1942208 - RNA, 19 nt, Artificial Sequence
  Description of Artificial Sequence: Synthetic oligonucleotide
ucguuguaacucuucauac

SEQ ID NO: 1942209 - RNA, 19 nt, Artificial Sequence
  Description of Artificial Sequence: Synthetic oligonucleotide
aaagcuacuaguacccacu

SEQ ID NO: 1942210 - RNA, 19 nt, Artificial Sequence
  Description of Artificial Sequence: Synthetic oligonucleotide
ugcauauuuucuacuugug

SEQ ID NO: 1942211 - RNA, 19 nt, Artificial Sequence
  Description of Artificial Sequence: Synthetic oligonucleotide
gguaagcccagauucaaag

SEQ ID NO: 1942212 - RNA, 19 nt, Artificial Sequence
  Description of Artificial Sequence: Synthetic oligonucleotide
agagauuuguucauguugu

SEQ ID NO: 1942213 - RNA, 19 nt, Artificial Sequence
  Description of Artificial Sequence: Synthetic oligonucleotide
uuacuaauccuuuccacuu

SEQ ID NO: 1942214 - RNA, 19 nt, Artificial Sequence
  Description of Artificial Sequence: Synthetic oligonucleotide
aaauccaaucuugcaacug

SEQ ID NO: 1942215 - RNA, 19 nt, Artificial Sequence
  Description of Artificial Sequence: Synthetic oligonucleotide
uaaagcuacuaguacccac

SEQ ID NO: 1942216 - RNA, 19 nt, Artificial Sequence
  Description of Artificial Sequence: Synthetic oligonucleotide
aacaacugauguuuugaua

SEQ ID NO: 1942217 - RNA, 19 nt, Artificial Sequence
  Description of Artificial Sequence: Synthetic oligonucleotide
acucggugauaucuccucc

SEQ ID NO: 1942218 - RNA, 19 nt, Artificial Sequence
  Description of Artificial Sequence: Synthetic oligonucleotide
uccuuuggaguaccaaagc

SEQ ID NO: 1942219 - RNA, 19 nt, Artificial Sequence
  Description of Artificial Sequence: Synthetic oligonucleotide
ugcaaccaguaacagguga

SEQ ID NO: 1942220 - RNA, 19 nt, Artificial Sequence
  Description of Artificial Sequence: Synthetic oligonucleotide
ucugugggcauuuggucgc

SEQ ID NO: 1942221 - RNA, 19 nt, Artificial Sequence
  Description of Artificial Sequence: Synthetic oligonucleotide
ugauaucuccuccccuuag

SEQ ID NO: 1942222 - RNA, 19 nt, Artificial Sequence
  Description of Artificial Sequence: Synthetic oligonucleotide
uaaguaccguaaaggaaga

SEQ ID NO: 1942223 - RNA, 19 nt, Artificial Sequence
  Description of Artificial Sequence: Synthetic oligonucleotide
gauacuucagaacguuauc

SEQ ID NO: 1942224 - RNA, 19 nt, Artificial Sequence
  Description of Artificial Sequence: Synthetic oligonucleotide
gcuacuaguacccacucug

SEQ ID NO: 1942225 - RNA, 19 nt, Artificial Sequence
  Description of Artificial Sequence: Synthetic oligonucleotide
uccaaucuugcaacuggcc

SEQ ID NO: 1942226 - RNA, 19 nt, Artificial Sequence
  Description of Artificial Sequence: Synthetic oligonucleotide
cuccccuuagaacuaagag

SEQ ID NO: 1942227 - RNA, 19 nt, Artificial Sequence
  Description of Artificial Sequence: Synthetic oligonucleotide
uccuuaacaucuucucggc

SEQ ID NO: 1942228 - RNA, 19 nt, Artificial Sequence
  Description of Artificial Sequence: Synthetic oligonucleotide
aaccaguaacaggugacag

SEQ ID NO: 1942229 - RNA, 19 nt, Artificial Sequence
  Description of Artificial Sequence: Synthetic oligonucleotide
ggcuaaagcuacuaguacc

SEQ ID NO: 1942230 - RNA, 19 nt, Artificial Sequence
  Description of Artificial Sequence: Synthetic oligonucleotide
auacuucagaacguuaucu

SEQ ID NO: 1942231 - RNA, 19 nt, Artificial Sequence
  Description of Artificial Sequence: Synthetic oligonucleotide
guggacugcaaccaguaac

SEQ ID NO: 1942232 - RNA, 19 nt, Artificial Sequence
  Description of Artificial Sequence: Synthetic oligonucleotide
ugguacucuuccauggaac

SEQ ID NO: 1942233 - RNA, 19 nt, Artificial Sequence
  Description of Artificial Sequence: Synthetic oligonucleotide
uguuagcaguugcuggcag

SEQ ID NO: 1942234 - RNA, 19 nt, Artificial Sequence
  Description of Artificial Sequence: Synthetic oligonucleotide
guacaacugaguuaggucu

SEQ ID NO: 1942235 - RNA, 19 nt, Artificial Sequence
  Description of Artificial Sequence: Synthetic oligonucleotide
aaagcagggauggacucca

SEQ ID NO: 1942236 - RNA, 19 nt, Artificial Sequence
  Description of Artificial Sequence: Synthetic oligonucleotide
cuucguugaaagccagacg

SEQ ID NO: 1942237 - RNA, 19 nt, Artificial Sequence
  Description of Artificial Sequence: Synthetic oligonucleotide
agcccauagaugauuugcc

SEQ ID NO: 1942238 - RNA, 19 nt, Artificial Sequence
  Description of Artificial Sequence: Synthetic oligonucleotide
gaagccgugcuuugcuuag

SEQ ID NO: 1942239 - RNA, 19 nt, Artificial Sequence
  Description of Artificial Sequence: Synthetic oligonucleotide
uaccguaaaggaagaaguc

SEQ ID NO: 1942240 - RNA, 19 nt, Artificial Sequence
  Description of Artificial Sequence: Synthetic oligonucleotide
uacagccccaucuggagac

SEQ ID NO: 1942241 - RNA, 19 nt, Artificial Sequence
  Description of Artificial Sequence: Synthetic oligonucleotide
ucggugauaucuccucccc

SEQ ID NO: 1942242 - RNA, 19 nt, Artificial Sequence
  Description of Artificial Sequence: Synthetic oligonucleotide
uacuaguacccacucuggu

SEQ ID NO: 1942243 - RNA, 19 nt, Artificial Sequence
  Description of Artificial Sequence: Synthetic oligonucleotide
aaucuugcaacuggccgca

SEQ ID NO: 1942244 - RNA, 19 nt, Artificial Sequence
  Description of Artificial Sequence: Synthetic oligonucleotide
agagcaguugaugauggca

SEQ ID NO: 1942245 - RNA, 19 nt, Artificial Sequence
  Description of Artificial Sequence: Synthetic oligonucleotide
caggacaaccugauugacc

SEQ ID NO: 1942246 - RNA, 19 nt, Artificial Sequence
  Description of Artificial Sequence: Synthetic oligonucleotide
agggauggacuccaggaca

SEQ ID NO: 1942247 - RNA, 19 nt, Artificial Sequence
  Description of Artificial Sequence: Synthetic oligonucleotide
ugaugaacggugguagcug

SEQ ID NO: 1942248 - RNA, 19 nt, Artificial Sequence
  Description of Artificial Sequence: Synthetic oligonucleotide
ggcugagcuauucuguggg

SEQ ID NO: 1942249 - RNA, 19 nt, Artificial Sequence
  Description of Artificial Sequence: Synthetic oligonucleotide
auuuggucgcugcauauuu

SEQ ID NO: 1942250 - RNA, 19 nt, Artificial Sequence
  Description of Artificial Sequence: Synthetic oligonucleotide
uuuccacuucguugaaagc

SEQ ID NO: 1942251 - RNA, 19 nt, Artificial Sequence
  Description of Artificial Sequence: Synthetic oligonucleotide
aguaucugccgccuagcca

SEQ ID NO: 1942252 - RNA, 19 nt, Artificial Sequence
  Description of Artificial Sequence: Synthetic oligonucleotide
aaguuccuuaacaucuucu

SEQ ID NO: 1942253 - RNA, 19 nt, Artificial Sequence
  Description of Artificial Sequence: Synthetic oligonucleotide
aguacccacucugguaagc

SEQ ID NO: 1942254 - RNA, 19 nt, Artificial Sequence
  Description of Artificial Sequence: Synthetic oligonucleotide
cucggugauaucuccuccc

SEQ ID NO: 1942255 - RNA, 19 nt, Artificial Sequence
  Description of Artificial Sequence: Synthetic oligonucleotide
uacuaauccuuuccacuuc

SEQ ID NO: 1942256 - RNA, 19 nt, Artificial Sequence
  Description of Artificial Sequence: Synthetic oligonucleotide
acagacauaaguaccguaa

SEQ ID NO: 1942257 - RNA, 19 nt, Artificial Sequence
  Description of Artificial Sequence: Synthetic oligonucleotide
uuggucgcugcauauuuuc

SEQ ID NO: 1942258 - RNA, 19 nt, Artificial Sequence
  Description of Artificial Sequence: Synthetic oligonucleotide
agccaaggggagcucaguc

SEQ ID NO: 1942259 - RNA, 19 nt, Artificial Sequence
  Description of Artificial Sequence: Synthetic oligonucleotide
gcuaaagcuacuaguaccc

SEQ ID NO: 1942260 - RNA, 19 nt, Artificial Sequence
  Description of Artificial Sequence: Synthetic oligonucleotide
cuaguacccacucugguaa

SEQ ID NO: 1942261 - RNA, 19 nt, Artificial Sequence
  Description of Artificial Sequence: Synthetic oligonucleotide
cacugaugaacggugguag

SEQ ID NO: 1942262 - RNA, 19 nt, Artificial Sequence
  Description of Artificial Sequence: Synthetic oligonucleotide
uccucaccagagcaguuga

SEQ ID NO: 1942263 - RNA, 19 nt, Artificial Sequence
  Description of Artificial Sequence: Synthetic oligonucleotide
gucgcugcauauuuucuac

SEQ ID NO: 1942264 - RNA, 19 nt, Artificial Sequence
  Description of Artificial Sequence: Synthetic oligonucleotide
acuaguacccacucuggua

SEQ ID NO: 1942265 - RNA, 19 nt, Artificial Sequence
  Description of Artificial Sequence: Synthetic oligonucleotide
uggggagauacuucagaac

SEQ ID NO: 1942266 - RNA, 19 nt, Artificial Sequence
  Description of Artificial Sequence: Synthetic oligonucleotide
gaaguuccuuaacaucuuc

SEQ ID NO: 1942267 - RNA, 19 nt, Artificial Sequence
  Description of Artificial Sequence: Synthetic oligonucleotide
uuggaguaccaaagcguca

SEQ ID NO: 1942268 - RNA, 19 nt, Artificial Sequence
  Description of Artificial Sequence: Synthetic oligonucleotide
cagaaugauccuugagcag

SEQ ID NO: 1942269 - RNA, 19 nt, Artificial Sequence
  Description of Artificial Sequence: Synthetic oligonucleotide
gauaucuccuccccuuaga

SEQ ID NO: 1942270 - RNA, 19 nt, Artificial Sequence
  Description of Artificial Sequence: Synthetic oligonucleotide
ugaacggugguagcuggcc

SEQ ID NO: 1942271 - RNA, 19 nt, Artificial Sequence
  Description of Artificial Sequence: Synthetic oligonucleotide
ccccuuagaacuaagagga

SEQ ID NO: 1942272 - RNA, 19 nt, Artificial Sequence
  Description of Artificial Sequence: Synthetic oligonucleotide
gaguaccaaagcgucacug

SEQ ID NO: 1942273 - RNA, 19 nt, Artificial Sequence
  Description of Artificial Sequence: Synthetic oligonucleotide
agaugauuugccggauggg

SEQ ID NO: 1942274 - RNA, 19 nt, Artificial Sequence
  Description of Artificial Sequence: Synthetic oligonucleotide
gggauuggacagcagcugg

SEQ ID NO: 1942275 - RNA, 19 nt, Artificial Sequence
  Description of Artificial Sequence: Synthetic oligonucleotide
uuccacuguacaacugagu

SEQ ID NO: 1942276 - RNA, 19 nt, Artificial Sequence
  Description of Artificial Sequence: Synthetic oligonucleotide
ggcugguacucuuccaugg

SEQ ID NO: 1942277 - RNA, 19 nt, Artificial Sequence
  Description of Artificial Sequence: Synthetic oligonucleotide
acaacugaguuaggucugg

SEQ ID NO: 1942278 - RNA, 19 nt, Artificial Sequence
  Description of Artificial Sequence: Synthetic oligonucleotide
cugccacugacagaagacg

SEQ ID NO: 1942279 - RNA, 19 nt, Artificial Sequence
  Description of Artificial Sequence: Synthetic oligonucleotide
caaaaugagacaaccaguu

SEQ ID NO: 1942280 - RNA, 19 nt, Artificial Sequence
  Description of Artificial Sequence: Synthetic oligonucleotide
gaagcccauagaugauuug

SEQ ID NO: 1942281 - RNA, 19 nt, Artificial Sequence
  Description of Artificial Sequence: Synthetic oligonucleotide
cuuuggaguaccaaagcgu

SEQ ID NO: 1942282 - RNA, 19 nt, Artificial Sequence
  Description of Artificial Sequence: Synthetic oligonucleotide
aagaagcccauagaugauu

SEQ ID NO: 1942283 - RNA, 19 nt, Artificial Sequence
  Description of Artificial Sequence: Synthetic oligonucleotide
aaggcacugcauuccgggu

SEQ ID NO: 1942284 - RNA, 19 nt, Artificial Sequence
  Description of Artificial Sequence: Synthetic oligonucleotide
ugccgccuagccaagggga

SEQ ID NO: 1942285 - RNA, 19 nt, Artificial Sequence
  Description of Artificial Sequence: Synthetic oligonucleotide
gaaguaucugccgccuagc

SEQ ID NO: 1942286 - RNA, 19 nt, Artificial Sequence
  Description of Artificial Sequence: Synthetic oligonucleotide
ugggcauuuggucgcugca

SEQ ID NO: 1942287 - RNA, 19 nt, Artificial Sequence
  Description of Artificial Sequence: Synthetic oligonucleotide
uugcuuaagucagaaugau

SEQ ID NO: 1942288 - RNA, 19 nt, Artificial Sequence
  Description of Artificial Sequence: Synthetic oligonucleotide
agcaaagcagggauggacu

SEQ ID NO: 1942289 - RNA, 19 nt, Artificial Sequence
  Description of Artificial Sequence: Synthetic oligonucleotide
uacccacucugguaagccc

SEQ ID NO: 1942290 - RNA, 19 nt, Artificial Sequence
  Description of Artificial Sequence: Synthetic oligonucleotide
gcccauagaugauuugccg

SEQ ID NO: 1942291 - RNA, 19 nt, Artificial Sequence
  Description of Artificial Sequence: Synthetic oligonucleotide
ccuuagaacuaagaggaag

SEQ ID NO: 1942292 - RNA, 19 nt, Artificial Sequence
  Description of Artificial Sequence: Synthetic oligonucleotide
uggucgcugcauauuuucu

SEQ ID NO: 1942293 - RNA, 19 nt, Artificial Sequence
  Description of Artificial Sequence: Synthetic oligonucleotide
aaccaguucagaagucccu

SEQ ID NO: 1942294 - RNA, 19 nt, Artificial Sequence
  Description of Artificial Sequence: Synthetic oligonucleotide
guaccguaaaggaagaagu

SEQ ID NO: 1942295 - RNA, 19 nt, Artificial Sequence
  Description of Artificial Sequence: Synthetic oligonucleotide
accgcaaagagaggcaaca

SEQ ID NO: 1942296 - RNA, 19 nt, Artificial Sequence
  Description of Artificial Sequence: Synthetic oligonucleotide
auacagccccaucuggaga

SEQ ID NO: 1942297 - RNA, 19 nt, Artificial Sequence
  Description of Artificial Sequence: Synthetic oligonucleotide
cuagccaaggggagcucag

SEQ ID NO: 1942298 - RNA, 19 nt, Artificial Sequence
  Description of Artificial Sequence: Synthetic oligonucleotide
accaguucagaagucccug

SEQ ID NO: 1942299 - RNA, 19 nt, Artificial Sequence
  Description of Artificial Sequence: Synthetic oligonucleotide
aucuagugcuucggcaggg

SEQ ID NO: 1942300 - RNA, 19 nt, Artificial Sequence
  Description of Artificial Sequence: Synthetic oligonucleotide
uuuggucgcugcauauuuu

SEQ ID NO: 1942301 - RNA, 19 nt, Artificial Sequence
  Description of Artificial Sequence: Synthetic oligonucleotide
augauuugccggaugggcu

SEQ ID NO: 1942302 - RNA, 19 nt, Artificial Sequence
  Description of Artificial Sequence: Synthetic oligonucleotide
gcaugggugccuucgcucg

SEQ ID NO: 1942303 - RNA, 19 nt, Artificial Sequence
  Description of Artificial Sequence: Synthetic oligonucleotide
cgugcuuugcuuaggauug

SEQ ID NO: 1942304 - RNA, 19 nt, Artificial Sequence
  Description of Artificial Sequence: Synthetic oligonucleotide
uguggacugcaaccaguaa

SEQ ID NO: 1942305 - RNA, 19 nt, Artificial Sequence
  Description of Artificial Sequence: Synthetic oligonucleotide
caggguuaucaaaaugaga

SEQ ID NO: 1942306 - RNA, 19 nt, Artificial Sequence
  Description of Artificial Sequence: Synthetic oligonucleotide
cuucagaacguuaucuagu

SEQ ID NO: 1942307 - RNA, 19 nt, Artificial Sequence
  Description of Artificial Sequence: Synthetic oligonucleotide
ucccugaacucggugauau

SEQ ID NO: 1942308 - RNA, 19 nt, Artificial Sequence
  Description of Artificial Sequence: Synthetic oligonucleotide
agauacagccccaucugga

SEQ ID NO: 1942309 - RNA, 19 nt, Artificial Sequence
  Description of Artificial Sequence: Synthetic oligonucleotide
cagggauggacuccaggac

SEQ ID NO: 1942310 - RNA, 19 nt, Artificial Sequence
  Description of Artificial Sequence: Synthetic oligonucleotide
agcccagauucaaagcauc

SEQ ID NO: 1942311 - RNA, 19 nt, Artificial Sequence
  Description of Artificial Sequence: Synthetic oligonucleotide
cuggccuuuggcuaaagcu

SEQ ID NO: 1942312 - RNA, 19 nt, Artificial Sequence
  Description of Artificial Sequence: Synthetic oligonucleotide
uucaaagcaucuggacaga

SEQ ID NO: 1942313 - RNA, 19 nt, Artificial Sequence
  Description of Artificial Sequence: Synthetic oligonucleotide
aggcuuccacuguacaacu

SEQ ID NO: 1942314 - RNA, 19 nt, Artificial Sequence
  Description of Artificial Sequence: Synthetic oligonucleotide
uguuucuaugauggacaga

SEQ ID NO: 1942315 - RNA, 19 nt, Artificial Sequence
  Description of Artificial Sequence: Synthetic oligonucleotide
agcuacuaguacccacucu

SEQ ID NO: 1942316 - RNA, 19 nt, Artificial Sequence
  Description of Artificial Sequence: Synthetic oligonucleotide
uaguacccacucugguaag

SEQ ID NO: 1942317 - RNA, 19 nt, Artificial Sequence
  Description of Artificial Sequence: Synthetic oligonucleotide
ggggagcucagucaauuug

SEQ ID NO: 1942318 - RNA, 19 nt, Artificial Sequence
  Description of Artificial Sequence: Synthetic oligonucleotide
ucacugaugaacgguggua

SEQ ID NO: 1942319 - RNA, 19 nt, Artificial Sequence
  Description of Artificial Sequence: Synthetic oligonucleotide
ucgcugcauauuuucuacu

SEQ ID NO: 1942320 - RNA, 19 nt, Artificial Sequence
  Description of Artificial Sequence: Synthetic oligonucleotide
agggauuggacagcagcug

SEQ ID NO: 1942321 - RNA, 19 nt, Artificial Sequence
  Description of Artificial Sequence: Synthetic oligonucleotide
guacccacucugguaagcc

SEQ ID NO: 1942322 - RNA, 19 nt, Artificial Sequence
  Description of Artificial Sequence: Synthetic oligonucleotide
guuagcaguugcuggcaga

SEQ ID NO: 1942323 - RNA, 19 nt, Artificial Sequence
  Description of Artificial Sequence: Synthetic oligonucleotide
cagcaguaaagccugcaga

SEQ ID NO: 1942324 - RNA, 19 nt, Artificial Sequence
  Description of Artificial Sequence: Synthetic oligonucleotide
aacuggccgcaugggugcc

SEQ ID NO: 1942325 - RNA, 19 nt, Artificial Sequence
  Description of Artificial Sequence: Synthetic oligonucleotide
caguagagaaguuccuuaa

SEQ ID NO: 1942326 - RNA, 19 nt, Artificial Sequence
  Description of Artificial Sequence: Synthetic oligonucleotide
gggagcucagucaauuugc

SEQ ID NO: 1942327 - RNA, 19 nt, Artificial Sequence
  Description of Artificial Sequence: Synthetic oligonucleotide
gugggcauuuggucgcugc

SEQ ID NO: 1942328 - RNA, 19 nt, Artificial Sequence
  Description of Artificial Sequence: Synthetic oligonucleotide
cuuugccuuggccucugug

SEQ ID NO: 1942329 - RNA, 19 nt, Artificial Sequence
  Description of Artificial Sequence: Synthetic oligonucleotide
ggguuaucaaaaugagaca

SEQ ID NO: 1942330 - RNA, 19 nt, Artificial Sequence
  Description of Artificial Sequence: Synthetic oligonucleotide
uccuccccuuagaacuaag

SEQ ID NO: 1942331 - RNA, 19 nt, Artificial Sequence
  Description of Artificial Sequence: Synthetic oligonucleotide
cugacagaagacgugagcu

SEQ ID NO: 1942332 - RNA, 19 nt, Artificial Sequence
  Description of Artificial Sequence: Synthetic oligonucleotide
gcuuccacuguacaacuga

SEQ ID NO: 1942333 - RNA, 19 nt, Artificial Sequence
  Description of Artificial Sequence: Synthetic oligonucleotide
ucggcaggguuaucaaaau

SEQ ID NO: 1942334 - RNA, 19 nt, Artificial Sequence
  Description of Artificial Sequence: Synthetic oligonucleotide
agugcuucggcaggguuau

SEQ ID NO: 1942335 - RNA, 19 nt, Artificial Sequence
  Description of Artificial Sequence: Synthetic oligonucleotide
cuuaagucagaaugauccu

SEQ ID NO: 1942336 - RNA, 19 nt, Artificial Sequence
  Description of Artificial Sequence: Synthetic oligonucleotide
cagauuaacauggucauuu

SEQ ID NO: 1942337 - RNA, 19 nt, Artificial Sequence
  Description of Artificial Sequence: Synthetic oligonucleotide
cagggcuucuaacagaagu

SEQ ID NO: 1942338 - RNA, 19 nt, Artificial Sequence
  Description of Artificial Sequence: Synthetic oligonucleotide
aagccgugcuuugcuuagg

SEQ ID NO: 1942339 - RNA, 19 nt, Artificial Sequence
  Description of Artificial Sequence: Synthetic oligonucleotide
cugugucuaaauccaaucu

SEQ ID NO: 1942340 - RNA, 19 nt, Artificial Sequence
  Description of Artificial Sequence: Synthetic oligonucleotide
caauuugcuuaagucagaa

SEQ ID NO: 1942341 - RNA, 19 nt, Artificial Sequence
  Description of Artificial Sequence: Synthetic oligonucleotide
agccgugcuuugcuuagga

SEQ ID NO: 1942342 - RNA, 19 nt, Artificial Sequence
  Description of Artificial Sequence: Synthetic oligonucleotide
cagacauaaguaccguaaa

SEQ ID NO: 1942343 - RNA, 19 nt, Artificial Sequence
  Description of Artificial Sequence: Synthetic oligonucleotide
ucuccuccccuuagaacua

SEQ ID NO: 1942344 - RNA, 19 nt, Artificial Sequence
  Description of Artificial Sequence: Synthetic oligonucleotide
auagcaccgcaaagagagg

SEQ ID NO: 1942345 - RNA, 19 nt, Artificial Sequence
  Description of Artificial Sequence: Synthetic oligonucleotide
aaguaccguaaaggaagaa

SEQ ID NO: 1942346 - RNA, 19 nt, Artificial Sequence
  Description of Artificial Sequence: Synthetic oligonucleotide
gcauauuuucuacuugugu

SEQ ID NO: 1942347 - RNA, 19 nt, Artificial Sequence
  Description of Artificial Sequence: Synthetic oligonucleotide
agaacguuaucuagugcuu

SEQ ID NO: 1942348 - RNA, 19 nt, Artificial Sequence
  Description of Artificial Sequence: Synthetic oligonucleotide
ugccuucgcucguuguaac

SEQ ID NO: 1942349 - RNA, 19 nt, Artificial Sequence
  Description of Artificial Sequence: Synthetic oligonucleotide
gagggauuggacagcagcu

SEQ ID NO: 1942350 - RNA, 19 nt, Artificial Sequence
  Description of Artificial Sequence: Synthetic oligonucleotide
gcaacuggccgcaugggug

SEQ ID NO: 1942351 - RNA, 19 nt, Artificial Sequence
  Description of Artificial Sequence: Synthetic oligonucleotide
acgugagcugugucuaaau

SEQ ID NO: 1942352 - RNA, 19 nt, Artificial Sequence
  Description of Artificial Sequence: Synthetic oligonucleotide
ucgcucguuguaacucuuc

SEQ ID NO: 1942353 - RNA, 19 nt, Artificial Sequence
  Description of Artificial Sequence: Synthetic oligonucleotide
ucuagugcuucggcagggu

SEQ ID NO: 1942354 - RNA, 19 nt, Artificial Sequence
  Description of Artificial Sequence: Synthetic oligonucleotide
uucgcucguuguaacucuu

SEQ ID NO: 1942355 - RNA, 19 nt, Artificial Sequence
  Description of Artificial Sequence: Synthetic oligonucleotide
acauagcaccgcaaagaga

SEQ ID NO: 1942356 - RNA, 19 nt, Artificial Sequence
  Description of Artificial Sequence: Synthetic oligonucleotide
gcaaccaguaacaggugac

SEQ ID NO: 1942357 - RNA, 19 nt, Artificial Sequence
  Description of Artificial Sequence: Synthetic oligonucleotide
caaccaguaacaggugaca

SEQ ID NO: 1942358 - RNA, 19 nt, Artificial Sequence
  Description of Artificial Sequence: Synthetic oligonucleotide
acagaagacgugagcugug

SEQ ID NO: 1942359 - RNA, 19 nt, Artificial Sequence
  Description of Artificial Sequence: Synthetic oligonucleotide
caccgcaaagagaggcaac

SEQ ID NO: 1942360 - RNA, 19 nt, Artificial Sequence
  Description of Artificial Sequence: Synthetic oligonucleotide
cugcaaccaguaacaggug

SEQ ID NO: 1942361 - RNA, 19 nt, Artificial Sequence
  Description of Artificial Sequence: Synthetic oligonucleotide
guaccaaagcgucacugau

SEQ ID NO: 1942362 - RNA, 19 nt, Artificial Sequence
  Description of Artificial Sequence: Synthetic oligonucleotide
aguaaagccugcagaugau

SEQ ID NO: 1942363 - RNA, 19 nt, Artificial Sequence
  Description of Artificial Sequence: Synthetic oligonucleotide
gcugguugagauacagccc

SEQ ID NO: 1942364 - RNA, 19 nt, Artificial Sequence
  Description of Artificial Sequence: Synthetic oligonucleotide
agcugugucuaaauccaau

SEQ ID NO: 1942365 - RNA, 19 nt, Artificial Sequence
  Description of Artificial Sequence: Synthetic oligonucleotide
gaaugauccuugagcagcu

SEQ ID NO: 1942366 - RNA, 19 nt, Artificial Sequence
  Description of Artificial Sequence: Synthetic oligonucleotide
caacugaguuaggucuggc

SEQ ID NO: 1942367 - RNA, 19 nt, Artificial Sequence
  Description of Artificial Sequence: Synthetic oligonucleotide
acuguacaacugaguuagg

SEQ ID NO: 1942368 - RNA, 19 nt, Artificial Sequence
  Description of Artificial Sequence: Synthetic oligonucleotide
auggacagauuaacauggu

SEQ ID NO: 1942369 - RNA, 19 nt, Artificial Sequence
  Description of Artificial Sequence: Synthetic oligonucleotide
ggccuuuggcuaaagcuac

SEQ ID NO: 1942370 - RNA, 19 nt, Artificial Sequence
  Description of Artificial Sequence: Synthetic oligonucleotide
acagauuaacauggucauu

SEQ ID NO: 1942371 - RNA, 19 nt, Artificial Sequence
  Description of Artificial Sequence: Synthetic oligonucleotide
aggaagccgugcuuugcuu

SEQ ID NO: 1942372 - RNA, 19 nt, Artificial Sequence
  Description of Artificial Sequence: Synthetic oligonucleotide
ggauuguuucuaugaugga

SEQ ID NO: 1942373 - RNA, 19 nt, Artificial Sequence
  Description of Artificial Sequence: Synthetic oligonucleotide
gugauaucuccuccccuua

SEQ ID NO: 1942374 - RNA, 19 nt, Artificial Sequence
  Description of Artificial Sequence: Synthetic oligonucleotide
gaacggugguagcuggccu

SEQ ID NO: 1942375 - RNA, 19 nt, Artificial Sequence
  Description of Artificial Sequence: Synthetic oligonucleotide
cuucgcucguuguaacucu

SEQ ID NO: 1942376 - RNA, 19 nt, Artificial Sequence
  Description of Artificial Sequence: Synthetic oligonucleotide
cacuucguugaaagccaga

SEQ ID NO: 1942377 - RNA, 19 nt, Artificial Sequence
  Description of Artificial Sequence: Synthetic oligonucleotide
gccuguagaucuuccucac

SEQ ID NO: 1942378 - RNA, 19 nt, Artificial Sequence
  Description of Artificial Sequence: Synthetic oligonucleotide
gcaguugcuggcagagucc

SEQ ID NO: 1942379 - RNA, 19 nt, Artificial Sequence
  Description of Artificial Sequence: Synthetic oligonucleotide
ggucgcugcauauuuucua

SEQ ID NO: 1942380 - RNA, 19 nt, Artificial Sequence
  Description of Artificial Sequence: Synthetic oligonucleotide
cugguaagcccagauucaa

SEQ ID NO: 1942381 - RNA, 19 nt, Artificial Sequence
  Description of Artificial Sequence: Synthetic oligonucleotide
ggugauaucuccuccccuu

SEQ ID NO: 1942382 - RNA, 19 nt, Artificial Sequence
  Description of Artificial Sequence: Synthetic oligonucleotide
agguccuuuggaguaccaa

SEQ ID NO: 1942383 - RNA, 19 nt, Artificial Sequence
  Description of Artificial Sequence: Synthetic oligonucleotide
caugcaccaggcuuccacu

SEQ ID NO: 1942384 - RNA, 19 nt, Artificial Sequence
  Description of Artificial Sequence: Synthetic oligonucleotide
ccguaaaggaagaaguccu

SEQ ID NO: 1942385 - RNA, 19 nt, Artificial Sequence
  Description of Artificial Sequence: Synthetic oligonucleotide
ugugggcauuuggucgcug

SEQ ID NO: 1942386 - RNA, 19 nt, Artificial Sequence
  Description of Artificial Sequence: Synthetic oligonucleotide
aucugccgccuagccaagg

SEQ ID NO: 1942387 - RNA, 19 nt, Artificial Sequence
  Description of Artificial Sequence: Synthetic oligonucleotide
gaacucggugauaucuccu

SEQ ID NO: 1942388 - RNA, 19 nt, Artificial Sequence
  Description of Artificial Sequence: Synthetic oligonucleotide
ggcauuuggucgcugcaua

SEQ ID NO: 1942389 - RNA, 19 nt, Artificial Sequence
  Description of Artificial Sequence: Synthetic oligonucleotide
ggccgcaugggugccuucg

SEQ ID NO: 1942390 - RNA, 19 nt, Artificial Sequence
  Description of Artificial Sequence: Synthetic oligonucleotide
ccuucgcucguuguaacuc

SEQ ID NO: 1942391 - RNA, 19 nt, Artificial Sequence
  Description of Artificial Sequence: Synthetic oligonucleotide
ggugccuucgcucguugua

SEQ ID NO: 1942392 - RNA, 19 nt, Artificial Sequence
  Description of Artificial Sequence: Synthetic oligonucleotide
cuaauccuuuccacuucgu

SEQ ID NO: 1942393 - RNA, 19 nt, Artificial Sequence
  Description of Artificial Sequence: Synthetic oligonucleotide
ccaaggggagcucagucaa

SEQ ID NO: 1942394 - RNA, 19 nt, Artificial Sequence
  Description of Artificial Sequence: Synthetic oligonucleotide
gugugugaagaaagguccu

SEQ ID NO: 1942395 - RNA, 19 nt, Artificial Sequence
  Description of Artificial Sequence: Synthetic oligonucleotide
ccugaacucggugauaucu

SEQ ID NO: 1942396 - RNA, 19 nt, Artificial Sequence
  Description of Artificial Sequence: Synthetic oligonucleotide
gggauggacuccaggacaa

SEQ ID NO: 1942397 - RNA, 19 nt, Artificial Sequence
  Description of Artificial Sequence: Synthetic oligonucleotide
caguaacaggugacagcaa

SEQ ID NO: 1942398 - RNA, 19 nt, Artificial Sequence
  Description of Artificial Sequence: Synthetic oligonucleotide
ggagauacuucagaacguu

SEQ ID NO: 1942399 - RNA, 19 nt, Artificial Sequence
  Description of Artificial Sequence: Synthetic oligonucleotide
ccaguucagaagucccuga

SEQ ID NO: 1942400 - RNA, 19 nt, Artificial Sequence
  Description of Artificial Sequence: Synthetic oligonucleotide
ggcuuccacuguacaacug

SEQ ID NO: 1942401 - RNA, 19 nt, Artificial Sequence
  Description of Artificial Sequence: Synthetic oligonucleotide
ccuccccuuagaacuaaga

SEQ ID NO: 1942402 - RNA, 19 nt, Artificial Sequence
  Description of Artificial Sequence: Synthetic oligonucleotide
gccgccuagccaaggggag

SEQ ID NO: 1942403 - RNA, 19 nt, Artificial Sequence
  Description of Artificial Sequence: Synthetic oligonucleotide
gggagauacuucagaacgu

SEQ ID NO: 1942404 - RNA, 19 nt, Artificial Sequence
  Description of Artificial Sequence: Synthetic oligonucleotide
cagaaguaucugccgccua

SEQ ID NO: 1942405 - RNA, 19 nt, Artificial Sequence
  Description of Artificial Sequence: Synthetic oligonucleotide
cagaagacgugagcugugu

SEQ ID NO: 1942406 - RNA, 19 nt, Artificial Sequence
  Description of Artificial Sequence: Synthetic oligonucleotide
uagcuggccuuuggcuaaa

SEQ ID NO: 1942407 - RNA, 19 nt, Artificial Sequence
  Description of Artificial Sequence: Synthetic oligonucleotide
cggcaggguuaucaaaaug

SEQ ID NO: 1942408 - RNA, 19 nt, Artificial Sequence
  Description of Artificial Sequence: Synthetic oligonucleotide
gccgcaugggugccuucgc

SEQ ID NO: 1942409 - RNA, 19 nt, Artificial Sequence
  Description of Artificial Sequence: Synthetic oligonucleotide
cgcaugggugccuucgcuc

SEQ ID NO: 1942410 - RNA, 19 nt, Artificial Sequence
  Description of Artificial Sequence: Synthetic oligonucleotide
gcauuuggucgcugcauau

SEQ ID NO: 1942411 - RNA, 19 nt, Artificial Sequence
  Description of Artificial Sequence: Synthetic oligonucleotide
acuggccgcaugggugccu

SEQ ID NO: 1942412 - RNA, 19 nt, Artificial Sequence
  Description of Artificial Sequence: Synthetic oligonucleotide
augggugccuucgcucguu

SEQ ID NO: 1942413 - RNA, 19 nt, Artificial Sequence
  Description of Artificial Sequence: Synthetic oligonucleotide
gcaccgcaaagagaggcaa

SEQ ID NO: 1942414 - RNA, 19 nt, Artificial Sequence
  Description of Artificial Sequence: Synthetic oligonucleotide
ggauggacuccaggacaac

SEQ ID NO: 1942415 - RNA, 19 nt, Artificial Sequence
  Description of Artificial Sequence: Synthetic oligonucleotide
ggauuggacagcagcuggu

SEQ ID NO: 1942416 - RNA, 19 nt, Artificial Sequence
  Description of Artificial Sequence: Synthetic oligonucleotide
ccgugcuuugcuuaggauu

SEQ ID NO: 1942417 - RNA, 19 nt, Artificial Sequence
  Description of Artificial Sequence: Synthetic oligonucleotide
cuagugcuucggcaggguu

SEQ ID NO: 1942418 - RNA, 19 nt, Artificial Sequence
  Description of Artificial Sequence: Synthetic oligonucleotide
ccuagccaaggggagcuca

SEQ ID NO: 1942419 - RNA, 19 nt, Artificial Sequence
  Description of Artificial Sequence: Synthetic oligonucleotide
ccuuuggcuaaagcuacua

SEQ ID NO: 1942420 - RNA, 19 nt, Artificial Sequence
  Description of Artificial Sequence: Synthetic oligonucleotide
ccgccuagccaaggggagc

SEQ ID NO: 1942421 - RNA, 19 nt, Artificial Sequence
  Description of Artificial Sequence: Synthetic oligonucleotide
cuccuccccuuagaacuaa

SEQ ID NO: 1942422 - RNA, 19 nt, Artificial Sequence
  Description of Artificial Sequence: Synthetic oligonucleotide
uggccgcaugggugccuuc

SEQ ID NO: 1942423 - RNA, 19 nt, Artificial Sequence
  Description of Artificial Sequence: Synthetic oligonucleotide
gccggaugggcugagcuau

SEQ ID NO: 1942424 - RNA, 19 nt, Artificial Sequence
  Description of Artificial Sequence: Synthetic oligonucleotide
cccugaacucggugauauc

SEQ ID NO: 1942425 - RNA, 19 nt, Artificial Sequence
  Description of Artificial Sequence: Synthetic oligonucleotide
gccuucgcucguuguaacu

SEQ ID NO: 1942426 - RNA, 19 nt, Artificial Sequence
  Description of Artificial Sequence: Synthetic oligonucleotide
cccagcaguaaagccugca

SEQ ID NO: 1942427 - RNA, 19 nt, Artificial Sequence
  Description of Artificial Sequence: Synthetic oligonucleotide
gccgugcuuugcuuaggau

SEQ ID NO: 1942428 - RNA, 19 nt, Artificial Sequence
  Description of Artificial Sequence: Synthetic oligonucleotide
ggacaaccugauugaccuu

SEQ ID NO: 1942429 - RNA, 19 nt, Artificial Sequence
  Description of Artificial Sequence: Synthetic oligonucleotide
ccaaagcgucacugaugaa

SEQ ID NO: 1942430 - RNA, 19 nt, Artificial Sequence
  Description of Artificial Sequence: Synthetic oligonucleotide
gccuuuggcuaaagcuacu

SEQ ID NO: 1942431 - RNA, 19 nt, Artificial Sequence
  Description of Artificial Sequence: Synthetic oligonucleotide
gccuagccaaggggagcuc

SEQ ID NO: 1942432 - RNA, 19 nt, Artificial Sequence
  Description of Artificial Sequence: Synthetic oligonucleotide
ccccgccugccuguagauc

SEQ ID NO: 1942433 - RNA, 19 nt, Artificial Sequence
  Description of Artificial Sequence: Synthetic oligonucleotide
ccgcaugggugccuucgcu

SEQ ID NO: 1942434 - RNA, 19 nt, Artificial Sequence
  Description of Artificial Sequence: Synthetic oligonucleotide
ccacucugguaagcccaga

SEQ ID NO: 1942435 - RNA, 19 nt, Artificial Sequence
  Description of Artificial Sequence: Synthetic oligonucleotide
cgccugccuguagaucuuc

SEQ ID NO: 1942436 - RNA, 19 nt, Artificial Sequence
  Description of Artificial Sequence: Synthetic oligonucleotide
cgccuagccaaggggagcu

SEQ ID NO: 1942437 - RNA, 19 nt, Artificial Sequence
  Description of Artificial Sequence: Synthetic oligonucleotide
gccccgccugccuguagau

SEQ ID NO: 1942438 - RNA, 19 nt, Artificial Sequence
  Description of Artificial Sequence: Synthetic oligonucleotide
ccgccugccuguagaucuu

SEQ ID NO: 1942439 - RNA, 19 nt, Artificial Sequence
  Description of Artificial Sequence: Synthetic oligonucleotide
ccggaugggcugagcuauu

SEQ ID NO: 1942440 - RNA, 19 nt, Artificial Sequence
  Description of Artificial Sequence: Synthetic oligonucleotide
aaaaguacucuguugggcc

SEQ ID NO: 1942441 - RNA, 19 nt, Artificial Sequence
  Description of Artificial Sequence: Synthetic oligonucleotide
aagacguuuacuuaaaccu

SEQ ID NO: 1942442 - RNA, 19 nt, Artificial Sequence
  Description of Artificial Sequence: Synthetic oligonucleotide
guaggaagcauauuuaucg

SEQ ID NO: 1942443 - RNA, 19 nt, Artificial Sequence
  Description of Artificial Sequence: Synthetic oligonucleotide
cauaauaccacgcauauuc

SEQ ID NO: 1942444 - RNA, 19 nt, Artificial Sequence
  Description of Artificial Sequence: Synthetic oligonucleotide
ugguauaucuauuauaucu

SEQ ID NO: 1942445 - RNA, 19 nt, Artificial Sequence
  Description of Artificial Sequence: Synthetic oligonucleotide
aauaccacgcauauucacc

SEQ ID NO: 1942446 - RNA, 19 nt, Artificial Sequence
  Description of Artificial Sequence: Synthetic oligonucleotide
auuagugucacaguccagc

SEQ ID NO: 1942447 - RNA, 19 nt, Artificial Sequence
  Description of Artificial Sequence: Synthetic oligonucleotide
uaucgagugaucaauuuca

SEQ ID NO: 1942448 - RNA, 19 nt, Artificial Sequence
  Description of Artificial Sequence: Synthetic oligonucleotide
gaagacguuuacuuaaacc

SEQ ID NO: 1942449 - RNA, 19 nt, Artificial Sequence
  Description of Artificial Sequence: Synthetic oligonucleotide
agauuuacaguauuagugu

SEQ ID NO: 1942450 - RNA, 19 nt, Artificial Sequence
  Description of Artificial Sequence: Synthetic oligonucleotide
ucucuugucgacaaagagc

SEQ ID NO: 1942451 - RNA, 19 nt, Artificial Sequence
  Description of Artificial Sequence: Synthetic oligonucleotide
ugaagcgccuuuuacacag

SEQ ID NO: 1942452 - RNA, 19 nt, Artificial Sequence
  Description of Artificial Sequence: Synthetic oligonucleotide
gucgacaaagagcacaucg

SEQ ID NO: 1942453 - RNA, 19 nt, Artificial Sequence
  Description of Artificial Sequence: Synthetic oligonucleotide
ucccggaucggucugaccg

SEQ ID NO: 1942454 - RNA, 19 nt, Artificial Sequence
  Description of Artificial Sequence: Synthetic oligonucleotide
ugggcagaaauuuacaggu

SEQ ID NO: 1942455 - RNA, 19 nt, Artificial Sequence
  Description of Artificial Sequence: Synthetic oligonucleotide
auuuguaggaagcauauuu

SEQ ID NO: 1942456 - RNA, 19 nt, Artificial Sequence
  Description of Artificial Sequence: Synthetic oligonucleotide
auaucuauuauaucucgcu

SEQ ID NO: 1942457 - RNA, 19 nt, Artificial Sequence
  Description of Artificial Sequence: Synthetic oligonucleotide
uuacuuaaaccucugucac

SEQ ID NO: 1942458 - RNA, 19 nt, Artificial Sequence
  Description of Artificial Sequence: Synthetic oligonucleotide
uauaucuauuauaucucgc

SEQ ID NO: 1942459 - RNA, 19 nt, Artificial Sequence
  Description of Artificial Sequence: Synthetic oligonucleotide
aaauggcacacucgggaac

SEQ ID NO: 1942460 - RNA, 19 nt, Artificial Sequence
  Description of Artificial Sequence: Synthetic oligonucleotide
aguauuagugucacagucc

SEQ ID NO: 1942461 - RNA, 19 nt, Artificial Sequence
  Description of Artificial Sequence: Synthetic oligonucleotide
auuggaacaggacucgcuc

SEQ ID NO: 1942462 - RNA, 19 nt, Artificial Sequence
  Description of Artificial Sequence: Synthetic oligonucleotide
gaagcauauuuaucgagug

SEQ ID NO: 1942463 - RNA, 19 nt, Artificial Sequence
  Description of Artificial Sequence: Synthetic oligonucleotide
uguccaucaggccuucucg

SEQ ID NO: 1942464 - RNA, 19 nt, Artificial Sequence
  Description of Artificial Sequence: Synthetic oligonucleotide
ucuauuauaucucgcuuaa

SEQ ID NO: 1942465 - RNA, 19 nt, Artificial Sequence
  Description of Artificial Sequence: Synthetic oligonucleotide
ucuacuugccgccuuaagu

SEQ ID NO: 1942466 - RNA, 19 nt, Artificial Sequence
  Description of Artificial Sequence: Synthetic oligonucleotide
ucucgcuuaaucuuccugc

SEQ ID NO: 1942467 - RNA, 19 nt, Artificial Sequence
  Description of Artificial Sequence: Synthetic oligonucleotide
uaugugggcagaaauuuac

SEQ ID NO: 1942468 - RNA, 19 nt, Artificial Sequence
  Description of Artificial Sequence: Synthetic oligonucleotide
uauaucucgcuuaaucuuc

SEQ ID NO: 1942469 - RNA, 19 nt, Artificial Sequence
  Description of Artificial Sequence: Synthetic oligonucleotide
gaaggugcagcauuggaac

SEQ ID NO: 1942470 - RNA, 19 nt, Artificial Sequence
  Description of Artificial Sequence: Synthetic oligonucleotide
ugcugaucggucaaucccg

SEQ ID NO: 1942471 - RNA, 19 nt, Artificial Sequence
  Description of Artificial Sequence: Synthetic oligonucleotide
uucauaauaccacgcauau

SEQ ID NO: 1942472 - RNA, 19 nt, Artificial Sequence
  Description of Artificial Sequence: Synthetic oligonucleotide
cucuugucgacaaagagca

SEQ ID NO: 1942473 - RNA, 19 nt, Artificial Sequence
  Description of Artificial Sequence: Synthetic oligonucleotide
uuagcugaccaucaacgga

SEQ ID NO: 1942474 - RNA, 19 nt, Artificial Sequence
  Description of Artificial Sequence: Synthetic oligonucleotide
caugaagcgccuuuuacac

SEQ ID NO: 1942475 - RNA, 19 nt, Artificial Sequence
  Description of Artificial Sequence: Synthetic oligonucleotide
acugacuggaugaacacac

SEQ ID NO: 1942476 - RNA, 19 nt, Artificial Sequence
  Description of Artificial Sequence: Synthetic oligonucleotide
acuagugcgcucaucauac

SEQ ID NO: 1942477 - RNA, 19 nt, Artificial Sequence
  Description of Artificial Sequence: Synthetic oligonucleotide
auuaacauuuccguguucu

SEQ ID NO: 1942478 - RNA, 19 nt, Artificial Sequence
  Description of Artificial Sequence: Synthetic oligonucleotide
uuaucgagugaucaauuuc

SEQ ID NO: 1942479 - RNA, 19 nt, Artificial Sequence
  Description of Artificial Sequence: Synthetic oligonucleotide
aacaagguuggcuugucaa

SEQ ID NO: 1942480 - RNA, 19 nt, Artificial Sequence
  Description of Artificial Sequence: Synthetic oligonucleotide
agcaauuaacauuuccgug

SEQ ID NO: 1942481 - RNA, 19 nt, Artificial Sequence
  Description of Artificial Sequence: Synthetic oligonucleotide
cucgccuucuauuuguagg

SEQ ID NO: 1942482 - RNA, 19 nt, Artificial Sequence
  Description of Artificial Sequence: Synthetic oligonucleotide
gaaucucuugucgacaaag

SEQ ID NO: 1942483 - RNA, 19 nt, Artificial Sequence
  Description of Artificial Sequence: Synthetic oligonucleotide
cucgaccugacauugacac

SEQ ID NO: 1942484 - RNA, 19 nt, Artificial Sequence
  Description of Artificial Sequence: Synthetic oligonucleotide
acuuaaaccucugucacug

SEQ ID NO: 1942485 - RNA, 19 nt, Artificial Sequence
  Description of Artificial Sequence: Synthetic oligonucleotide
ugauagagaaggugcagca

SEQ ID NO: 1942486 - RNA, 19 nt, Artificial Sequence
  Description of Artificial Sequence: Synthetic oligonucleotide
acugaagacguuuacuuaa

SEQ ID NO: 1942487 - RNA, 19 nt, Artificial Sequence
  Description of Artificial Sequence: Synthetic oligonucleotide
uuauaucucgcuuaaucuu

SEQ ID NO: 1942488 - RNA, 19 nt, Artificial Sequence
  Description of Artificial Sequence: Synthetic oligonucleotide
guuagcugaccaucaacgg

SEQ ID NO: 1942489 - RNA, 19 nt, Artificial Sequence
  Description of Artificial Sequence: Synthetic oligonucleotide
ucccaagccaugaagcgcc

SEQ ID NO: 1942490 - RNA, 19 nt, Artificial Sequence
  Description of Artificial Sequence: Synthetic oligonucleotide
cugugcaaccaccacaggg

SEQ ID NO: 1942491 - RNA, 19 nt, Artificial Sequence
  Description of Artificial Sequence: Synthetic oligonucleotide
uccuucauaauaccacgca

SEQ ID NO: 1942492 - RNA, 19 nt, Artificial Sequence
  Description of Artificial Sequence: Synthetic oligonucleotide
aagcauauuuaucgaguga

SEQ ID NO: 1942493 - RNA, 19 nt, Artificial Sequence
  Description of Artificial Sequence: Synthetic oligonucleotide
aggaagcauauuuaucgag

SEQ ID NO: 1942494 - RNA, 19 nt, Artificial Sequence
  Description of Artificial Sequence: Synthetic oligonucleotide
aaaguacucuguugggcca

SEQ ID NO: 1942495 - RNA, 19 nt, Artificial Sequence
  Description of Artificial Sequence: Synthetic oligonucleotide
aucaacggaugugaggggc

SEQ ID NO: 1942496 - RNA, 19 nt, Artificial Sequence
  Description of Artificial Sequence: Synthetic oligonucleotide
uuggaacaggacucgcucg

SEQ ID NO: 1942497 - RNA, 19 nt, Artificial Sequence
  Description of Artificial Sequence: Synthetic oligonucleotide
uguuaugugggcagaaauu

SEQ ID NO: 1942498 - RNA, 19 nt, Artificial Sequence
  Description of Artificial Sequence: Synthetic oligonucleotide
cuucccaagccaugaagcg

SEQ ID NO: 1942499 - RNA, 19 nt, Artificial Sequence
  Description of Artificial Sequence: Synthetic oligonucleotide
aagagucuuccagagaagu

SEQ ID NO: 1942500 - RNA, 19 nt, Artificial Sequence
  Description of Artificial Sequence: Synthetic oligonucleotide
aaguucuucuggugacaac

SEQ ID NO: 1942501 - RNA, 19 nt, Artificial Sequence
  Description of Artificial Sequence: Synthetic oligonucleotide
uaucuauuauaucucgcuu

SEQ ID NO: 1942502 - RNA, 19 nt, Artificial Sequence
  Description of Artificial Sequence: Synthetic oligonucleotide
uaauaccacgcauauucac

SEQ ID NO: 1942503 - RNA, 19 nt, Artificial Sequence
  Description of Artificial Sequence: Synthetic oligonucleotide
ugacuggaugaacacacgu

SEQ ID NO: 1942504 - RNA, 19 nt, Artificial Sequence
  Description of Artificial Sequence: Synthetic oligonucleotide
cacacucgggaacugauag

SEQ ID NO: 1942505 - RNA, 19 nt, Artificial Sequence
  Description of Artificial Sequence: Synthetic oligonucleotide
uuccuucauaauaccacgc

SEQ ID NO: 1942506 - RNA, 19 nt, Artificial Sequence
  Description of Artificial Sequence: Synthetic oligonucleotide
auaccacgcauauucacca

SEQ ID NO: 1942507 - RNA, 19 nt, Artificial Sequence
  Description of Artificial Sequence: Synthetic oligonucleotide
uagcugaccaucaacggau

SEQ ID NO: 1942508 - RNA, 19 nt, Artificial Sequence
  Description of Artificial Sequence: Synthetic oligonucleotide
ugaacacacguuugcagac

SEQ ID NO: 1942509 - RNA, 19 nt, Artificial Sequence
  Description of Artificial Sequence: Synthetic oligonucleotide
aucuauuauaucucgcuua

SEQ ID NO: 1942510 - RNA, 19 nt, Artificial Sequence
  Description of Artificial Sequence: Synthetic oligonucleotide
caaaaguacucuguugggc

SEQ ID NO: 1942511 - RNA, 19 nt, Artificial Sequence
  Description of Artificial Sequence: Synthetic oligonucleotide
ugagcaaaagagucuucca

SEQ ID NO: 1942512 - RNA, 19 nt, Artificial Sequence
  Description of Artificial Sequence: Synthetic oligonucleotide
ucaacagaagugucuggca

SEQ ID NO: 1942513 - RNA, 19 nt, Artificial Sequence
  Description of Artificial Sequence: Synthetic oligonucleotide
aucggucaaucccggaucg

SEQ ID NO: 1942514 - RNA, 19 nt, Artificial Sequence
  Description of Artificial Sequence: Synthetic oligonucleotide
uuuaucgagugaucaauuu

SEQ ID NO: 1942515 - RNA, 19 nt, Artificial Sequence
  Description of Artificial Sequence: Synthetic oligonucleotide
cucgcuuaaucuuccugcg

SEQ ID NO: 1942516 - RNA, 19 nt, Artificial Sequence
  Description of Artificial Sequence: Synthetic oligonucleotide
auauuuaucgagugaucaa

SEQ ID NO: 1942517 - RNA, 19 nt, Artificial Sequence
  Description of Artificial Sequence: Synthetic oligonucleotide
ucaggaaucucuugucgac

SEQ ID NO: 1942518 - RNA, 19 nt, Artificial Sequence
  Description of Artificial Sequence: Synthetic oligonucleotide
ugguuugcauuugaaacca

SEQ ID NO: 1942519 - RNA, 19 nt, Artificial Sequence
  Description of Artificial Sequence: Synthetic oligonucleotide
cagaaacccagcaauuaac

SEQ ID NO: 1942520 - RNA, 19 nt, Artificial Sequence
  Description of Artificial Sequence: Synthetic oligonucleotide
ugaccaucaacggauguga

SEQ ID NO: 1942521 - RNA, 19 nt, Artificial Sequence
  Description of Artificial Sequence: Synthetic oligonucleotide
aauggcacacucgggaacu

SEQ ID NO: 1942522 - RNA, 19 nt, Artificial Sequence
  Description of Artificial Sequence: Synthetic oligonucleotide
uucucgaccugacauugac

SEQ ID NO: 1942523 - RNA, 19 nt, Artificial Sequence
  Description of Artificial Sequence: Synthetic oligonucleotide
ugaagacguuuacuuaaac

SEQ ID NO: 1942524 - RNA, 19 nt, Artificial Sequence
  Description of Artificial Sequence: Synthetic oligonucleotide
aagcgccuuuuacacagag

SEQ ID NO: 1942525 - RNA, 19 nt, Artificial Sequence
  Description of Artificial Sequence: Synthetic oligonucleotide
agugaucaauuucaccaca

SEQ ID NO: 1942526 - RNA, 19 nt, Artificial Sequence
  Description of Artificial Sequence: Synthetic oligonucleotide
auaucucgcuuaaucuucc

SEQ ID NO: 1942527 - RNA, 19 nt, Artificial Sequence
  Description of Artificial Sequence: Synthetic oligonucleotide
ucgccuucuauuuguagga

SEQ ID NO: 1942528 - RNA, 19 nt, Artificial Sequence
  Description of Artificial Sequence: Synthetic oligonucleotide
ucgagugaucaauuucacc

SEQ ID NO: 1942529 - RNA, 19 nt, Artificial Sequence
  Description of Artificial Sequence: Synthetic oligonucleotide
uuuucacccuugagugugg

SEQ ID NO: 1942530 - RNA, 19 nt, Artificial Sequence
  Description of Artificial Sequence: Synthetic oligonucleotide
ugaccggucagcuacuguc

SEQ ID NO: 1942531 - RNA, 19 nt, Artificial Sequence
  Description of Artificial Sequence: Synthetic oligonucleotide
agacguuuacuuaaaccuc

SEQ ID NO: 1942532 - RNA, 19 nt, Artificial Sequence
  Description of Artificial Sequence: Synthetic oligonucleotide
aacacacguuugcagacaa

SEQ ID NO: 1942533 - RNA, 19 nt, Artificial Sequence
  Description of Artificial Sequence: Synthetic oligonucleotide
ugaucggucaaucccggau

SEQ ID NO: 1942534 - RNA, 19 nt, Artificial Sequence
  Description of Artificial Sequence: Synthetic oligonucleotide
auguuaugugggcagaaau

SEQ ID NO: 1942535 - RNA, 19 nt, Artificial Sequence
  Description of Artificial Sequence: Synthetic oligonucleotide
ucgggaacugauagagaag

SEQ ID NO: 1942536 - RNA, 19 nt, Artificial Sequence
  Description of Artificial Sequence: Synthetic oligonucleotide
ccaucaacggaugugaggg

SEQ ID NO: 1942537 - RNA, 19 nt, Artificial Sequence
  Description of Artificial Sequence: Synthetic oligonucleotide
ucacccuugaguguggcac

SEQ ID NO: 1942538 - RNA, 19 nt, Artificial Sequence
  Description of Artificial Sequence: Synthetic oligonucleotide
cugauagagaaggugcagc

SEQ ID NO: 1942539 - RNA, 19 nt, Artificial Sequence
  Description of Artificial Sequence: Synthetic oligonucleotide
ucaacggaugugaggggcc

SEQ ID NO: 1942540 - RNA, 19 nt, Artificial Sequence
  Description of Artificial Sequence: Synthetic oligonucleotide
cacucgggaacugauagag

SEQ ID NO: 1942541 - RNA, 19 nt, Artificial Sequence
  Description of Artificial Sequence: Synthetic oligonucleotide
ugguuagcugaccaucaac

SEQ ID NO: 1942542 - RNA, 19 nt, Artificial Sequence
  Description of Artificial Sequence: Synthetic oligonucleotide
ucauacugccaccacccgu

SEQ ID NO: 1942543 - RNA, 19 nt, Artificial Sequence
  Description of Artificial Sequence: Synthetic oligonucleotide
cuuuuacacagagauaaca

SEQ ID NO: 1942544 - RNA, 19 nt, Artificial Sequence
  Description of Artificial Sequence: Synthetic oligonucleotide
uauuagugucacaguccag

SEQ ID NO: 1942545 - RNA, 19 nt, Artificial Sequence
  Description of Artificial Sequence: Synthetic oligonucleotide
cagcauuggaacaggacuc

SEQ ID NO: 1942546 - RNA, 19 nt, Artificial Sequence
  Description of Artificial Sequence: Synthetic oligonucleotide
aaagagucuuccagagaag

SEQ ID NO: 1942547 - RNA, 19 nt, Artificial Sequence
  Description of Artificial Sequence: Synthetic oligonucleotide
ugcaaccaccacaggggcg

SEQ ID NO: 1942548 - RNA, 19 nt, Artificial Sequence
  Description of Artificial Sequence: Synthetic oligonucleotide
ucagcuaugcugucuccac

SEQ ID NO: 1942549 - RNA, 19 nt, Artificial Sequence
  Description of Artificial Sequence: Synthetic oligonucleotide
caaggagugcugugcaacc

SEQ ID NO: 1942550 - RNA, 19 nt, Artificial Sequence
  Description of Artificial Sequence: Synthetic oligonucleotide
uacuuaaaccucugucacu

SEQ ID NO: 1942551 - RNA, 19 nt, Artificial Sequence
  Description of Artificial Sequence: Synthetic oligonucleotide
uuaugugggcagaaauuua

SEQ ID NO: 1942552 - RNA, 19 nt, Artificial Sequence
  Description of Artificial Sequence: Synthetic oligonucleotide
agcauuggaacaggacucg

SEQ ID NO: 1942553 - RNA, 19 nt, Artificial Sequence
  Description of Artificial Sequence: Synthetic oligonucleotide
uugacacucaugguuccag

SEQ ID NO: 1942554 - RNA, 19 nt, Artificial Sequence
  Description of Artificial Sequence: Synthetic oligonucleotide
agaaacccagcaauuaaca

SEQ ID NO: 1942555 - RNA, 19 nt, Artificial Sequence
  Description of Artificial Sequence: Synthetic oligonucleotide
aauguuaugugggcagaaa

SEQ ID NO: 1942556 - RNA, 19 nt, Artificial Sequence
  Description of Artificial Sequence: Synthetic oligonucleotide
uuucuccuauacugaacca

SEQ ID NO: 1942557 - RNA, 19 nt, Artificial Sequence
  Description of Artificial Sequence: Synthetic oligonucleotide
aaucucuugucgacaaaga

SEQ ID NO: 1942558 - RNA, 19 nt, Artificial Sequence
  Description of Artificial Sequence: Synthetic oligonucleotide
cuucauaauaccacgcaua

SEQ ID NO: 1942559 - RNA, 19 nt, Artificial Sequence
  Description of Artificial Sequence: Synthetic oligonucleotide
gaucggucaaucccggauc

SEQ ID NO: 1942560 - RNA, 19 nt, Artificial Sequence
  Description of Artificial Sequence: Synthetic oligonucleotide
cucgggaacugauagagaa

SEQ ID NO: 1942561 - RNA, 19 nt, Artificial Sequence
  Description of Artificial Sequence: Synthetic oligonucleotide
cauugacacucaugguucc

SEQ ID NO: 1942562 - RNA, 19 nt, Artificial Sequence
  Description of Artificial Sequence: Synthetic oligonucleotide
uuaaguucuucuggugaca

SEQ ID NO: 1942563 - RNA, 19 nt, Artificial Sequence
  Description of Artificial Sequence: Synthetic oligonucleotide
aucauacugccaccacccg

SEQ ID NO: 1942564 - RNA, 19 nt, Artificial Sequence
  Description of Artificial Sequence: Synthetic oligonucleotide
ucucucuugcuagauuuac

SEQ ID NO: 1942565 - RNA, 19 nt, Artificial Sequence
  Description of Artificial Sequence: Synthetic oligonucleotide
cugacuggaugaacacacg

SEQ ID NO: 1942566 - RNA, 19 nt, Artificial Sequence
  Description of Artificial Sequence: Synthetic oligonucleotide
gcaauuaacauuuccgugu

SEQ ID NO: 1942567 - RNA, 19 nt, Artificial Sequence
  Description of Artificial Sequence: Synthetic oligonucleotide
ucaaucccggaucggucug

SEQ ID NO: 1942568 - RNA, 19 nt, Artificial Sequence
  Description of Artificial Sequence: Synthetic oligonucleotide
aguccagccuaaguccagc

SEQ ID NO: 1942569 - RNA, 19 nt, Artificial Sequence
  Description of Artificial Sequence: Synthetic oligonucleotide
ugacacucaugguuccagc

SEQ ID NO: 1942570 - RNA, 19 nt, Artificial Sequence
  Description of Artificial Sequence: Synthetic oligonucleotide
uucccaagccaugaagcgc

SEQ ID NO: 1942571 - RNA, 19 nt, Artificial Sequence
  Description of Artificial Sequence: Synthetic oligonucleotide
uguuacagggcugguuagc

SEQ ID NO: 1942572 - RNA, 19 nt, Artificial Sequence
  Description of Artificial Sequence: Synthetic oligonucleotide
aucgagugaucaauuucac

SEQ ID NO: 1942573 - RNA, 19 nt, Artificial Sequence
  Description of Artificial Sequence: Synthetic oligonucleotide
ucucgaccugacauugaca

SEQ ID NO: 1942574 - RNA, 19 nt, Artificial Sequence
  Description of Artificial Sequence: Synthetic oligonucleotide
uucagcuaugcugucucca

SEQ ID NO: 1942575 - RNA, 19 nt, Artificial Sequence
  Description of Artificial Sequence: Synthetic oligonucleotide
agcaacauacagaaaccca

SEQ ID NO: 1942576 - RNA, 19 nt, Artificial Sequence
  Description of Artificial Sequence: Synthetic oligonucleotide
aaucccggaucggucugac

SEQ ID NO: 1942577 - RNA, 19 nt, Artificial Sequence
  Description of Artificial Sequence: Synthetic oligonucleotide
acaggacucgcucgccuuc

SEQ ID NO: 1942578 - RNA, 19 nt, Artificial Sequence
  Description of Artificial Sequence: Synthetic oligonucleotide
auaauguuaugugggcaga

SEQ ID NO: 1942579 - RNA, 19 nt, Artificial Sequence
  Description of Artificial Sequence: Synthetic oligonucleotide
gcuuaaucuuccugcgacg

SEQ ID NO: 1942580 - RNA, 19 nt, Artificial Sequence
  Description of Artificial Sequence: Synthetic oligonucleotide
uuaacauuuccguguucuu

SEQ ID NO: 1942581 - RNA, 19 nt, Artificial Sequence
  Description of Artificial Sequence: Synthetic oligonucleotide
ucgcuuaaucuuccugcga

SEQ ID NO: 1942582 - RNA, 19 nt, Artificial Sequence
  Description of Artificial Sequence: Synthetic oligonucleotide
uacuugccgccuuaaguuc

SEQ ID NO: 1942583 - RNA, 19 nt, Artificial Sequence
  Description of Artificial Sequence: Synthetic oligonucleotide
ucuuccugcgacguccgug

SEQ ID NO: 1942584 - RNA, 19 nt, Artificial Sequence
  Description of Artificial Sequence: Synthetic oligonucleotide
aggugcagcauuggaacag

SEQ ID NO: 1942585 - RNA, 19 nt, Artificial Sequence
  Description of Artificial Sequence: Synthetic oligonucleotide
uccaucaggccuucucgac

SEQ ID NO: 1942586 - RNA, 19 nt, Artificial Sequence
  Description of Artificial Sequence: Synthetic oligonucleotide
aucggucugaccggucagc

SEQ ID NO: 1942587 - RNA, 19 nt, Artificial Sequence
  Description of Artificial Sequence: Synthetic oligonucleotide
uccagcuacucccuucuuu

SEQ ID NO: 1942588 - RNA, 19 nt, Artificial Sequence
  Description of Artificial Sequence: Synthetic oligonucleotide
auaauaccacgcauauuca

SEQ ID NO: 1942589 - RNA, 19 nt, Artificial Sequence
  Description of Artificial Sequence: Synthetic oligonucleotide
gacuagugcgcucaucaua

SEQ ID NO: 1942590 - RNA, 19 nt, Artificial Sequence
  Description of Artificial Sequence: Synthetic oligonucleotide
guguuacagggcugguuag

SEQ ID NO: 1942591 - RNA, 19 nt, Artificial Sequence
  Description of Artificial Sequence: Synthetic oligonucleotide
aaggagugcugugcaacca

SEQ ID NO: 1942592 - RNA, 19 nt, Artificial Sequence
  Description of Artificial Sequence: Synthetic oligonucleotide
gacguuuacuuaaaccucu

SEQ ID NO: 1942593 - RNA, 19 nt, Artificial Sequence
  Description of Artificial Sequence: Synthetic oligonucleotide
cugauacacuguccgcacc

SEQ ID NO: 1942594 - RNA, 19 nt, Artificial Sequence
  Description of Artificial Sequence: Synthetic oligonucleotide
uuacaguauuagugucaca

SEQ ID NO: 1942595 - RNA, 19 nt, Artificial Sequence
  Description of Artificial Sequence: Synthetic oligonucleotide
acaacaagguuggcuuguc

SEQ ID NO: 1942596 - RNA, 19 nt, Artificial Sequence
  Description of Artificial Sequence: Synthetic oligonucleotide
gguguuacagggcugguua

SEQ ID NO: 1942597 - RNA, 19 nt, Artificial Sequence
  Description of Artificial Sequence: Synthetic oligonucleotide
cagcaauuaacauuuccgu

SEQ ID NO: 1942598 - RNA, 19 nt, Artificial Sequence
  Description of Artificial Sequence: Synthetic oligonucleotide
augaagcgccuuuuacaca

SEQ ID NO: 1942599 - RNA, 19 nt, Artificial Sequence
  Description of Artificial Sequence: Synthetic oligonucleotide
ucacugugcacuguccauc

SEQ ID NO: 1942600 - RNA, 19 nt, Artificial Sequence
  Description of Artificial Sequence: Synthetic oligonucleotide
agagucuuccagagaagug

SEQ ID NO: 1942601 - RNA, 19 nt, Artificial Sequence
  Description of Artificial Sequence: Synthetic oligonucleotide
gccuucuauuuguaggaag

SEQ ID NO: 1942602 - RNA, 19 nt, Artificial Sequence
  Description of Artificial Sequence: Synthetic oligonucleotide
accacccguuucuuccuuc

SEQ ID NO: 1942603 - RNA, 19 nt, Artificial Sequence
  Description of Artificial Sequence: Synthetic oligonucleotide
auuuaucgagugaucaauu

SEQ ID NO: 1942604 - RNA, 19 nt, Artificial Sequence
  Description of Artificial Sequence: Synthetic oligonucleotide
caaaagagucuuccagaga

SEQ ID NO: 1942605 - RNA, 19 nt, Artificial Sequence
  Description of Artificial Sequence: Synthetic oligonucleotide
guuaugugggcagaaauuu

SEQ ID NO: 1942606 - RNA, 19 nt, Artificial Sequence
  Description of Artificial Sequence: Synthetic oligonucleotide
cccagcaauuaacauuucc

SEQ ID NO: 1942607 - RNA, 19 nt, Artificial Sequence
  Description of Artificial Sequence: Synthetic oligonucleotide
acacucgggaacugauaga

SEQ ID NO: 1942608 - RNA, 19 nt, Artificial Sequence
  Description of Artificial Sequence: Synthetic oligonucleotide
cucuacuugccgccuuaag

SEQ ID NO: 1942609 - RNA, 19 nt, Artificial Sequence
  Description of Artificial Sequence: Synthetic oligonucleotide
aucggcagagcucucucuu

SEQ ID NO: 1942610 - RNA, 19 nt, Artificial Sequence
  Description of Artificial Sequence: Synthetic oligonucleotide
aucccggaucggucugacc

SEQ ID NO: 1942611 - RNA, 19 nt, Artificial Sequence
  Description of Artificial Sequence: Synthetic oligonucleotide
ucgaccugacauugacacu

SEQ ID NO: 1942612 - RNA, 19 nt, Artificial Sequence
  Description of Artificial Sequence: Synthetic oligonucleotide
gaccaucaacggaugugag

SEQ ID NO: 1942613 - RNA, 19 nt, Artificial Sequence
  Description of Artificial Sequence: Synthetic oligonucleotide
acguccguguucauuucuc

SEQ ID NO: 1942614 - RNA, 19 nt, Artificial Sequence
  Description of Artificial Sequence: Synthetic oligonucleotide
cuacuugccgccuuaaguu

SEQ ID NO: 1942615 - RNA, 19 nt, Artificial Sequence
  Description of Artificial Sequence: Synthetic oligonucleotide
gcugcugaucggucaaucc

SEQ ID NO: 1942616 - RNA, 19 nt, Artificial Sequence
  Description of Artificial Sequence: Synthetic oligonucleotide
accggucagcuacugucug

SEQ ID NO: 1942617 - RNA, 19 nt, Artificial Sequence
  Description of Artificial Sequence: Synthetic oligonucleotide
uauuuguaggaagcauauu

SEQ ID NO: 1942618 - RNA, 19 nt, Artificial Sequence
  Description of Artificial Sequence: Synthetic oligonucleotide
gcaaccaccacaggggcgc

SEQ ID NO: 1942619 - RNA, 19 nt, Artificial Sequence
  Description of Artificial Sequence: Synthetic oligonucleotide
gaacacacguuugcagaca

SEQ ID NO: 1942620 - RNA, 19 nt, Artificial Sequence
  Description of Artificial Sequence: Synthetic oligonucleotide
agccuaaguccagcuacuc

SEQ ID NO: 1942621 - RNA, 19 nt, Artificial Sequence
  Description of Artificial Sequence: Synthetic oligonucleotide
agguauccauuuucacccu

SEQ ID NO: 1942622 - RNA, 19 nt, Artificial Sequence
  Description of Artificial Sequence: Synthetic oligonucleotide
ccgccuuaaguucuucugg

SEQ ID NO: 1942623 - RNA, 19 nt, Artificial Sequence
  Description of Artificial Sequence: Synthetic oligonucleotide
aaguacucuguugggccaa

SEQ ID NO: 1942624 - RNA, 19 nt, Artificial Sequence
  Description of Artificial Sequence: Synthetic oligonucleotide
cugaagacguuuacuuaaa

SEQ ID NO: 1942625 - RNA, 19 nt, Artificial Sequence
  Description of Artificial Sequence: Synthetic oligonucleotide
cugcgcugauacacugucc

SEQ ID NO: 1942626 - RNA, 19 nt, Artificial Sequence
  Description of Artificial Sequence: Synthetic oligonucleotide
ggugcagcauuggaacagg

SEQ ID NO: 1942627 - RNA, 19 nt, Artificial Sequence
  Description of Artificial Sequence: Synthetic oligonucleotide
cacaucgcuucccaagcca

SEQ ID NO: 1942628 - RNA, 19 nt, Artificial Sequence
  Description of Artificial Sequence: Synthetic oligonucleotide
caucgcuucccaagccaug

SEQ ID NO: 1942629 - RNA, 19 nt, Artificial Sequence
  Description of Artificial Sequence: Synthetic oligonucleotide
gcugauacacuguccgcac

SEQ ID NO: 1942630 - RNA, 19 nt, Artificial Sequence
  Description of Artificial Sequence: Synthetic oligonucleotide
ucggucaaucccggaucgg

SEQ ID NO: 1942631 - RNA, 19 nt, Artificial Sequence
  Description of Artificial Sequence: Synthetic oligonucleotide
uccugcgacguccguguuc

SEQ ID NO: 1942632 - RNA, 19 nt, Artificial Sequence
  Description of Artificial Sequence: Synthetic oligonucleotide
uuuccucuacuugccgccu

SEQ ID NO: 1942633 - RNA, 19 nt, Artificial Sequence
  Description of Artificial Sequence: Synthetic oligonucleotide
gcgccuuuuacacagagau

SEQ ID NO: 1942634 - RNA, 19 nt, Artificial Sequence
  Description of Artificial Sequence: Synthetic oligonucleotide
gucaaucccggaucggucu

SEQ ID NO: 1942635 - RNA, 19 nt, Artificial Sequence
  Description of Artificial Sequence: Synthetic oligonucleotide
ugucuggcacucugccaga

SEQ ID NO: 1942636 - RNA, 19 nt, Artificial Sequence
  Description of Artificial Sequence: Synthetic oligonucleotide
acuugccgccuuaaguucu

SEQ ID NO: 1942637 - RNA, 19 nt, Artificial Sequence
  Description of Artificial Sequence: Synthetic oligonucleotide
ggcagaaauuuacagguau

SEQ ID NO: 1942638 - RNA, 19 nt, Artificial Sequence
  Description of Artificial Sequence: Synthetic oligonucleotide
cacugaagacguuuacuua

SEQ ID NO: 1942639 - RNA, 19 nt, Artificial Sequence
  Description of Artificial Sequence: Synthetic oligonucleotide
ccaugaagcgccuuuuaca

SEQ ID NO: 1942640 - RNA, 19 nt, Artificial Sequence
  Description of Artificial Sequence: Synthetic oligonucleotide
caguccagccuaaguccag

SEQ ID NO: 1942641 - RNA, 19 nt, Artificial Sequence
  Description of Artificial Sequence: Synthetic oligonucleotide
cgcuuaaucuuccugcgac

SEQ ID NO: 1942642 - RNA, 19 nt, Artificial Sequence
  Description of Artificial Sequence: Synthetic oligonucleotide
gcuuacagggcagacugac

SEQ ID NO: 1942643 - RNA, 19 nt, Artificial Sequence
  Description of Artificial Sequence: Synthetic oligonucleotide
ggaagcauauuuaucgagu

SEQ ID NO: 1942644 - RNA, 19 nt, Artificial Sequence
  Description of Artificial Sequence: Synthetic oligonucleotide
gccuuaaguucuucuggug

SEQ ID NO: 1942645 - RNA, 19 nt, Artificial Sequence
  Description of Artificial Sequence: Synthetic oligonucleotide
agagcacaucgcuucccaa

SEQ ID NO: 1942646 - RNA, 19 nt, Artificial Sequence
  Description of Artificial Sequence: Synthetic oligonucleotide
aguacucuguugggccaag

SEQ ID NO: 1942647 - RNA, 19 nt, Artificial Sequence
  Description of Artificial Sequence: Synthetic oligonucleotide
gacaacaagguuggcuugu

SEQ ID NO: 1942648 - RNA, 19 nt, Artificial Sequence
  Description of Artificial Sequence: Synthetic oligonucleotide
caugguuccagccccggcu

SEQ ID NO: 1942649 - RNA, 19 nt, Artificial Sequence
  Description of Artificial Sequence: Synthetic oligonucleotide
cauuggaacaggacucgcu

SEQ ID NO: 1942650 - RNA, 19 nt, Artificial Sequence
  Description of Artificial Sequence: Synthetic oligonucleotide
ggaucggucugaccgguca

SEQ ID NO: 1942651 - RNA, 19 nt, Artificial Sequence
  Description of Artificial Sequence: Synthetic oligonucleotide
caucaggccuucucgaccu

SEQ ID NO: 1942652 - RNA, 19 nt, Artificial Sequence
  Description of Artificial Sequence: Synthetic oligonucleotide
guacucuguugggccaagg

SEQ ID NO: 1942653 - RNA, 19 nt, Artificial Sequence
  Description of Artificial Sequence: Synthetic oligonucleotide
guuacagggcugguuagcu

SEQ ID NO: 1942654 - RNA, 19 nt, Artificial Sequence
  Description of Artificial Sequence: Synthetic oligonucleotide
cuuccugcgacguccgugu

SEQ ID NO: 1942655 - RNA, 19 nt, Artificial Sequence
  Description of Artificial Sequence: Synthetic oligonucleotide
ccgacuagugcgcucauca

SEQ ID NO: 1942656 - RNA, 19 nt, Artificial Sequence
  Description of Artificial Sequence: Synthetic oligonucleotide
ggugacaacaagguuggcu

SEQ ID NO: 1942657 - RNA, 19 nt, Artificial Sequence
  Description of Artificial Sequence: Synthetic oligonucleotide
gaacaggacucgcucgccu

SEQ ID NO: 1942658 - RNA, 19 nt, Artificial Sequence
  Description of Artificial Sequence: Synthetic oligonucleotide
caacaagguuggcuuguca

SEQ ID NO: 1942659 - RNA, 19 nt, Artificial Sequence
  Description of Artificial Sequence: Synthetic oligonucleotide
gauagagaaggugcagcau

SEQ ID NO: 1942660 - RNA, 19 nt, Artificial Sequence
  Description of Artificial Sequence: Synthetic oligonucleotide
cacacguuugcagacaaau

SEQ ID NO: 1942661 - RNA, 19 nt, Artificial Sequence
  Description of Artificial Sequence: Synthetic oligonucleotide
gcugaucggucaaucccgg

SEQ ID NO: 1942662 - RNA, 19 nt, Artificial Sequence
  Description of Artificial Sequence: Synthetic oligonucleotide
acaggggcgcccucacuau

SEQ ID NO: 1942663 - RNA, 19 nt, Artificial Sequence
  Description of Artificial Sequence: Synthetic oligonucleotide
ucgcuucccaagccaugaa

SEQ ID NO: 1942664 - RNA, 19 nt, Artificial Sequence
  Description of Artificial Sequence: Synthetic oligonucleotide
ugguguuacagggcugguu

SEQ ID NO: 1942665 - RNA, 19 nt, Artificial Sequence
  Description of Artificial Sequence: Synthetic oligonucleotide
gcucgccuucuauuuguag

SEQ ID NO: 1942666 - RNA, 19 nt, Artificial Sequence
  Description of Artificial Sequence: Synthetic oligonucleotide
caggaaucucuugucgaca

SEQ ID NO: 1942667 - RNA, 19 nt, Artificial Sequence
  Description of Artificial Sequence: Synthetic oligonucleotide
ggagugcugugcaaccacc

SEQ ID NO: 1942668 - RNA, 19 nt, Artificial Sequence
  Description of Artificial Sequence: Synthetic oligonucleotide
gacguccguguucauuucu

SEQ ID NO: 1942669 - RNA, 19 nt, Artificial Sequence
  Description of Artificial Sequence: Synthetic oligonucleotide
ucgccucugugacuccuuu

SEQ ID NO: 1942670 - RNA, 19 nt, Artificial Sequence
  Description of Artificial Sequence: Synthetic oligonucleotide
uuccucuacuugccgccuu

SEQ ID NO: 1942671 - RNA, 19 nt, Artificial Sequence
  Description of Artificial Sequence: Synthetic oligonucleotide
gcauauuuaucgagugauc

SEQ ID NO: 1942672 - RNA, 19 nt, Artificial Sequence
  Description of Artificial Sequence: Synthetic oligonucleotide
cacaggggcgcccucacua

SEQ ID NO: 1942673 - RNA, 19 nt, Artificial Sequence
  Description of Artificial Sequence: Synthetic oligonucleotide
gcacaucgcuucccaagcc

SEQ ID NO: 1942674 - RNA, 19 nt, Artificial Sequence
  Description of Artificial Sequence: Synthetic oligonucleotide
agcgccuuuuacacagaga

SEQ ID NO: 1942675 - RNA, 19 nt, Artificial Sequence
  Description of Artificial Sequence: Synthetic oligonucleotide
cuucucgaccugacauuga

SEQ ID NO: 1942676 - RNA, 19 nt, Artificial Sequence
  Description of Artificial Sequence: Synthetic oligonucleotide
gcuacucccuucuuuggua

SEQ ID NO: 1942677 - RNA, 19 nt, Artificial Sequence
  Description of Artificial Sequence: Synthetic oligonucleotide
ggcugguuagcugaccauc

SEQ ID NO: 1942678 - RNA, 19 nt, Artificial Sequence
  Description of Artificial Sequence: Synthetic oligonucleotide
agcugaccaucaacggaug

SEQ ID NO: 1942679 - RNA, 19 nt, Artificial Sequence
  Description of Artificial Sequence: Synthetic oligonucleotide
gggccaaggagugcugugc

SEQ ID NO: 1942680 - RNA, 19 nt, Artificial Sequence
  Description of Artificial Sequence: Synthetic oligonucleotide
aggggcgcccucacuauca

SEQ ID NO: 1942681 - RNA, 19 nt, Artificial Sequence
  Description of Artificial Sequence: Synthetic oligonucleotide
cucccgacuagugcgcuca

SEQ ID NO: 1942682 - RNA, 19 nt, Artificial Sequence
  Description of Artificial Sequence: Synthetic oligonucleotide
ggggaugguguuacagggc

SEQ ID NO: 1942683 - RNA, 19 nt, Artificial Sequence
  Description of Artificial Sequence: Synthetic oligonucleotide
acucgggaacugauagaga

SEQ ID NO: 1942684 - RNA, 19 nt, Artificial Sequence
  Description of Artificial Sequence: Synthetic oligonucleotide
gacucgcucgccuucuauu

SEQ ID NO: 1942685 - RNA, 19 nt, Artificial Sequence
  Description of Artificial Sequence: Synthetic oligonucleotide
agcuacugucugguuugca

SEQ ID NO: 1942686 - RNA, 19 nt, Artificial Sequence
  Description of Artificial Sequence: Synthetic oligonucleotide
cccggaucggucugaccgg

SEQ ID NO: 1942687 - RNA, 19 nt, Artificial Sequence
  Description of Artificial Sequence: Synthetic oligonucleotide
aucuuccugcgacguccgu

SEQ ID NO: 1942688 - RNA, 19 nt, Artificial Sequence
  Description of Artificial Sequence: Synthetic oligonucleotide
gcauuggaacaggacucgc

SEQ ID NO: 1942689 - RNA, 19 nt, Artificial Sequence
  Description of Artificial Sequence: Synthetic oligonucleotide
cuuaaaccucugucacugu

SEQ ID NO: 1942690 - RNA, 19 nt, Artificial Sequence
  Description of Artificial Sequence: Synthetic oligonucleotide
ccucacuaucacugcuggc

SEQ ID NO: 1942691 - RNA, 19 nt, Artificial Sequence
  Description of Artificial Sequence: Synthetic oligonucleotide
ggucaaucccggaucgguc

SEQ ID NO: 1942692 - RNA, 19 nt, Artificial Sequence
  Description of Artificial Sequence: Synthetic oligonucleotide
cugaucggucaaucccgga

SEQ ID NO: 1942693 - RNA, 19 nt, Artificial Sequence
  Description of Artificial Sequence: Synthetic oligonucleotide
gcgcugauacacuguccgc

SEQ ID NO: 1942694 - RNA, 19 nt, Artificial Sequence
  Description of Artificial Sequence: Synthetic oligonucleotide
acccagcaauuaacauuuc

SEQ ID NO: 1942695 - RNA, 19 nt, Artificial Sequence
  Description of Artificial Sequence: Synthetic oligonucleotide
gaagcgccuuuuacacaga

SEQ ID NO: 1942696 - RNA, 19 nt, Artificial Sequence
  Description of Artificial Sequence: Synthetic oligonucleotide
ggccuucucgaccugacau

SEQ ID NO: 1942697 - RNA, 19 nt, Artificial Sequence
  Description of Artificial Sequence: Synthetic oligonucleotide
gaccggucagcuacugucu

SEQ ID NO: 1942698 - RNA, 19 nt, Artificial Sequence
  Description of Artificial Sequence: Synthetic oligonucleotide
caagccaugaagcgccuuu

SEQ ID NO: 1942699 - RNA, 19 nt, Artificial Sequence
  Description of Artificial Sequence: Synthetic oligonucleotide
ccugcgacguccguguuca

SEQ ID NO: 1942700 - RNA, 19 nt, Artificial Sequence
  Description of Artificial Sequence: Synthetic oligonucleotide
cugugacuccuuucagcua

SEQ ID NO: 1942701 - RNA, 19 nt, Artificial Sequence
  Description of Artificial Sequence: Synthetic oligonucleotide
caggggcgcccucacuauc

SEQ ID NO: 1942702 - RNA, 19 nt, Artificial Sequence
  Description of Artificial Sequence: Synthetic oligonucleotide
cagccuaaguccagcuacu

SEQ ID NO: 1942703 - RNA, 19 nt, Artificial Sequence
  Description of Artificial Sequence: Synthetic oligonucleotide
agcucccgacuagugcgcu

SEQ ID NO: 1942704 - RNA, 19 nt, Artificial Sequence
  Description of Artificial Sequence: Synthetic oligonucleotide
ccuucauaauaccacgcau

SEQ ID NO: 1942705 - RNA, 19 nt, Artificial Sequence
  Description of Artificial Sequence: Synthetic oligonucleotide
ucccgacuagugcgcucau

SEQ ID NO: 1942706 - RNA, 19 nt, Artificial Sequence
  Description of Artificial Sequence: Synthetic oligonucleotide
uuccugcgacguccguguu

SEQ ID NO: 1942707 - RNA, 19 nt, Artificial Sequence
  Description of Artificial Sequence: Synthetic oligonucleotide
caucggcagagcucucucu

SEQ ID NO: 1942708 - RNA, 19 nt, Artificial Sequence
  Description of Artificial Sequence: Synthetic oligonucleotide
caaccaccacaggggcgcc

SEQ ID NO: 1942709 - RNA, 19 nt, Artificial Sequence
  Description of Artificial Sequence: Synthetic oligonucleotide
acacacguuugcagacaaa

SEQ ID NO: 1942710 - RNA, 19 nt, Artificial Sequence
  Description of Artificial Sequence: Synthetic oligonucleotide
ggcugcugaucggucaauc

SEQ ID NO: 1942711 - RNA, 19 nt, Artificial Sequence
  Description of Artificial Sequence: Synthetic oligonucleotide
cagcuaugcugucuccacu

SEQ ID NO: 1942712 - RNA, 19 nt, Artificial Sequence
  Description of Artificial Sequence: Synthetic oligonucleotide
caaucccggaucggucuga

SEQ ID NO: 1942713 - RNA, 19 nt, Artificial Sequence
  Description of Artificial Sequence: Synthetic oligonucleotide
cuuccagcucccgacuagu

SEQ ID NO: 1942714 - RNA, 19 nt, Artificial Sequence
  Description of Artificial Sequence: Synthetic oligonucleotide
cuauuauaucucgcuuaau

SEQ ID NO: 1942715 - RNA, 19 nt, Artificial Sequence
  Description of Artificial Sequence: Synthetic oligonucleotide
gcugaccaucaacggaugu

SEQ ID NO: 1942716 - RNA, 19 nt, Artificial Sequence
  Description of Artificial Sequence: Synthetic oligonucleotide
gguuugcauuugaaaccaa

SEQ ID NO: 1942717 - RNA, 19 nt, Artificial Sequence
  Description of Artificial Sequence: Synthetic oligonucleotide
caacggaugugaggggccu

SEQ ID NO: 1942718 - RNA, 19 nt, Artificial Sequence
  Description of Artificial Sequence: Synthetic oligonucleotide
cugaccggucagcuacugu

SEQ ID NO: 1942719 - RNA, 19 nt, Artificial Sequence
  Description of Artificial Sequence: Synthetic oligonucleotide
gggcagaaauuuacaggua

SEQ ID NO: 1942720 - RNA, 19 nt, Artificial Sequence
  Description of Artificial Sequence: Synthetic oligonucleotide
cuugccgccuuaaguucuu

SEQ ID NO: 1942721 - RNA, 19 nt, Artificial Sequence
  Description of Artificial Sequence: Synthetic oligonucleotide
caccaucggcagagcucuc

SEQ ID NO: 1942722 - RNA, 19 nt, Artificial Sequence
  Description of Artificial Sequence: Synthetic oligonucleotide
ccacgcauauucaccauuu

SEQ ID NO: 1942723 - RNA, 19 nt, Artificial Sequence
  Description of Artificial Sequence: Synthetic oligonucleotide
cccggcugcugaucgguca

SEQ ID NO: 1942724 - RNA, 19 nt, Artificial Sequence
  Description of Artificial Sequence: Synthetic oligonucleotide
gcucccgacuagugcgcuc

SEQ ID NO: 1942725 - RNA, 19 nt, Artificial Sequence
  Description of Artificial Sequence: Synthetic oligonucleotide
ggcacacucgggaacugau

SEQ ID NO: 1942726 - RNA, 19 nt, Artificial Sequence
  Description of Artificial Sequence: Synthetic oligonucleotide
gcacacucgggaacugaua

SEQ ID NO: 1942727 - RNA, 19 nt, Artificial Sequence
  Description of Artificial Sequence: Synthetic oligonucleotide
ggacucgcucgccuucuau

SEQ ID NO: 1942728 - RNA, 19 nt, Artificial Sequence
  Description of Artificial Sequence: Synthetic oligonucleotide
ccguguucauuucuccuau

SEQ ID NO: 1942729 - RNA, 19 nt, Artificial Sequence
  Description of Artificial Sequence: Synthetic oligonucleotide
cgacguccguguucauuuc

SEQ ID NO: 1942730 - RNA, 19 nt, Artificial Sequence
  Description of Artificial Sequence: Synthetic oligonucleotide
cacccguuucuuccuucau

SEQ ID NO: 1942731 - RNA, 19 nt, Artificial Sequence
  Description of Artificial Sequence: Synthetic oligonucleotide
gggcugguuagcugaccau

SEQ ID NO: 1942732 - RNA, 19 nt, Artificial Sequence
  Description of Artificial Sequence: Synthetic oligonucleotide
ccggcugcugaucggucaa

SEQ ID NO: 1942733 - RNA, 19 nt, Artificial Sequence
  Description of Artificial Sequence: Synthetic oligonucleotide
cgccuuuuacacagagaua

SEQ ID NO: 1942734 - RNA, 19 nt, Artificial Sequence
  Description of Artificial Sequence: Synthetic oligonucleotide
cccgacuagugcgcucauc

SEQ ID NO: 1942735 - RNA, 19 nt, Artificial Sequence
  Description of Artificial Sequence: Synthetic oligonucleotide
ccagccccggcugcugauc

SEQ ID NO: 1942736 - RNA, 19 nt, Artificial Sequence
  Description of Artificial Sequence: Synthetic oligonucleotide
guccagcuacucccuucuu

SEQ ID NO: 1942737 - RNA, 19 nt, Artificial Sequence
  Description of Artificial Sequence: Synthetic oligonucleotide
ccccggcugcugaucgguc

SEQ ID NO: 1942738 - RNA, 19 nt, Artificial Sequence
  Description of Artificial Sequence: Synthetic oligonucleotide
caccacccguuucuuccuu

SEQ ID NO: 1942739 - RNA, 19 nt, Artificial Sequence
  Description of Artificial Sequence: Synthetic oligonucleotide
ccucuacuugccgccuuaa

SEQ ID NO: 1942740 - RNA, 19 nt, Artificial Sequence
  Description of Artificial Sequence: Synthetic oligonucleotide
cggaucggucugaccgguc

SEQ ID NO: 1942741 - RNA, 19 nt, Artificial Sequence
  Description of Artificial Sequence: Synthetic oligonucleotide
cggucaaucccggaucggu

SEQ ID NO: 1942742 - RNA, 19 nt, Artificial Sequence
  Description of Artificial Sequence: Synthetic oligonucleotide
gccccggcugcugaucggu

SEQ ID NO: 1942743 - RNA, 19 nt, Artificial Sequence
  Description of Artificial Sequence: Synthetic oligonucleotide
ccgcaccaucggcagagcu

SEQ ID NO: 1942744 - RNA, 19 nt, Artificial Sequence
  Description of Artificial Sequence: Synthetic oligonucleotide
cgacuagugcgcucaucau

SEQ ID NO: 1942745 - RNA, 19 nt, Artificial Sequence
  Description of Artificial Sequence: Synthetic oligonucleotide
ccggaucggucugaccggu

SEQ ID NO: 1942746 - RNA, 19 nt, Artificial Sequence
  Description of Artificial Sequence: Synthetic oligonucleotide
cugcgacguccguguucau

SEQ ID NO: 1942747 - RNA, 19 nt, Artificial Sequence
  Description of Artificial Sequence: Synthetic oligonucleotide
ccacaggggcgcccucacu

SEQ ID NO: 1942748 - RNA, 19 nt, Artificial Sequence
  Description of Artificial Sequence: Synthetic oligonucleotide
ccaagccaugaagcgccuu

SEQ ID NO: 1942749 - RNA, 19 nt, Artificial Sequence
  Description of Artificial Sequence: Synthetic oligonucleotide
cggcugcugaucggucaau

SEQ ID NO: 1942750 - RNA, 19 nt, Artificial Sequence
  Description of Artificial Sequence: Synthetic oligonucleotide
uagaagaucucacagaugg

SEQ ID NO: 1942751 - RNA, 19 nt, Artificial Sequence
  Description of Artificial Sequence: Synthetic oligonucleotide
ucaaacauuaauuggcuag

SEQ ID NO: 1942752 - RNA, 19 nt, Artificial Sequence
  Description of Artificial Sequence: Synthetic oligonucleotide
gugagaauaaugcagacag

SEQ ID NO: 1942753 - RNA, 19 nt, Artificial Sequence
  Description of Artificial Sequence: Synthetic oligonucleotide
agcucagcuaaguagaccc

SEQ ID NO: 1942754 - RNA, 19 nt, Artificial Sequence
  Description of Artificial Sequence: Synthetic oligonucleotide
gagaauaaugcagacagcg

SEQ ID NO: 1942755 - RNA, 19 nt, Artificial Sequence
  Description of Artificial Sequence: Synthetic oligonucleotide
uagcuuggcacacugaucc

SEQ ID NO: 1942756 - RNA, 19 nt, Artificial Sequence
  Description of Artificial Sequence: Synthetic oligonucleotide
gauaggaaagaaguugucg

SEQ ID NO: 1942757 - RNA, 19 nt, Artificial Sequence
  Description of Artificial Sequence: Synthetic oligonucleotide
acgaagaugagcugcaggg

SEQ ID NO: 1942758 - RNA, 19 nt, Artificial Sequence
  Description of Artificial Sequence: Synthetic oligonucleotide
gauguagcaauccacggug

SEQ ID NO: 1942759 - RNA, 19 nt, Artificial Sequence
  Description of Artificial Sequence: Synthetic oligonucleotide
gauggugagaauaaugcag

SEQ ID NO: 1942760 - RNA, 19 nt, Artificial Sequence
  Description of Artificial Sequence: Synthetic oligonucleotide
gaagcuugugaugacagcg

SEQ ID NO: 1942761 - RNA, 19 nt, Artificial Sequence
  Description of Artificial Sequence: Synthetic oligonucleotide
aagaaguugucguagcaca

SEQ ID NO: 1942762 - RNA, 19 nt, Artificial Sequence
  Description of Artificial Sequence: Synthetic oligonucleotide
accuauaccagguagccag

SEQ ID NO: 1942763 - RNA, 19 nt, Artificial Sequence
  Description of Artificial Sequence: Synthetic oligonucleotide
uuaaucuaaauaucuuucu

SEQ ID NO: 1942764 - RNA, 19 nt, Artificial Sequence
  Description of Artificial Sequence: Synthetic oligonucleotide
agcacccacaaauaucugc

SEQ ID NO: 1942765 - RNA, 19 nt, Artificial Sequence
  Description of Artificial Sequence: Synthetic oligonucleotide
aggaagaccaauucaauga

SEQ ID NO: 1942766 - RNA, 19 nt, Artificial Sequence
  Description of Artificial Sequence: Synthetic oligonucleotide
auaggaaagaaguugucgu

SEQ ID NO: 1942767 - RNA, 19 nt, Artificial Sequence
  Description of Artificial Sequence: Synthetic oligonucleotide
guaaagacuuucuucuccg

SEQ ID NO: 1942768 - RNA, 19 nt, Artificial Sequence
  Description of Artificial Sequence: Synthetic oligonucleotide
augaccaacaucgaaggac

SEQ ID NO: 1942769 - RNA, 19 nt, Artificial Sequence
  Description of Artificial Sequence: Synthetic oligonucleotide
ucuaaauaucuuucugaag

SEQ ID NO: 1942770 - RNA, 19 nt, Artificial Sequence
  Description of Artificial Sequence: Synthetic oligonucleotide
uguuaaucuaaauaucuuu

SEQ ID NO: 1942771 - RNA, 19 nt, Artificial Sequence
  Description of Artificial Sequence: Synthetic oligonucleotide
agugaauucaaagugggca

SEQ ID NO: 1942772 - RNA, 19 nt, Artificial Sequence
  Description of Artificial Sequence: Synthetic oligonucleotide
aagaccaauucaaugauga

SEQ ID NO: 1942773 - RNA, 19 nt, Artificial Sequence
  Description of Artificial Sequence: Synthetic oligonucleotide
aauuggcuagcuuagugaa

SEQ ID NO: 1942774 - RNA, 19 nt, Artificial Sequence
  Description of Artificial Sequence: Synthetic oligonucleotide
uacaggaagaccaauucaa

SEQ ID NO: 1942775 - RNA, 19 nt, Artificial Sequence
  Description of Artificial Sequence: Synthetic oligonucleotide
aacaucgaaggacacguga

SEQ ID NO: 1942776 - RNA, 19 nt, Artificial Sequence
  Description of Artificial Sequence: Synthetic oligonucleotide
cuaaguagacccuugcaug

SEQ ID NO: 1942777 - RNA, 19 nt, Artificial Sequence
  Description of Artificial Sequence: Synthetic oligonucleotide
acauuaauuggcuagcuua

SEQ ID NO: 1942778 - RNA, 19 nt, Artificial Sequence
  Description of Artificial Sequence: Synthetic oligonucleotide
uguauagcuuggcacacug

SEQ ID NO: 1942779 - RNA, 19 nt, Artificial Sequence
  Description of Artificial Sequence: Synthetic oligonucleotide
uagaagcuugugaugacag

SEQ ID NO: 1942780 - RNA, 19 nt, Artificial Sequence
  Description of Artificial Sequence: Synthetic oligonucleotide
uaauuggcuagcuuaguga

SEQ ID NO: 1942781 - RNA, 19 nt, Artificial Sequence
  Description of Artificial Sequence: Synthetic oligonucleotide
cauuaauuggcuagcuuag

SEQ ID NO: 1942782 - RNA, 19 nt, Artificial Sequence
  Description of Artificial Sequence: Synthetic oligonucleotide
guucacaccgcucaacagg

SEQ ID NO: 1942783 - RNA, 19 nt, Artificial Sequence
  Description of Artificial Sequence: Synthetic oligonucleotide
ugaccaacaucgaaggaca

SEQ ID NO: 1942784 - RNA, 19 nt, Artificial Sequence
  Description of Artificial Sequence: Synthetic oligonucleotide
agcuuagugaauucaaagu

SEQ ID NO: 1942785 - RNA, 19 nt, Artificial Sequence
  Description of Artificial Sequence: Synthetic oligonucleotide
aaugcagacagcggaggcg

SEQ ID NO: 1942786 - RNA, 19 nt, Artificial Sequence
  Description of Artificial Sequence: Synthetic oligonucleotide
uguaguuaauuuguuaauc

SEQ ID NO: 1942787 - RNA, 19 nt, Artificial Sequence
  Description of Artificial Sequence: Synthetic oligonucleotide
aucuaaauaucuuucugaa

SEQ ID NO: 1942788 - RNA, 19 nt, Artificial Sequence
  Description of Artificial Sequence: Synthetic oligonucleotide
agaagcccuguuuaccagc

SEQ ID NO: 1942789 - RNA, 19 nt, Artificial Sequence
  Description of Artificial Sequence: Synthetic oligonucleotide
guagguaaagacuuucuuc

SEQ ID NO: 1942790 - RNA, 19 nt, Artificial Sequence
  Description of Artificial Sequence: Synthetic oligonucleotide
aauucaaagugggcacccc

SEQ ID NO: 1942791 - RNA, 19 nt, Artificial Sequence
  Description of Artificial Sequence: Synthetic oligonucleotide
uguuuaccagcucagcuaa

SEQ ID NO: 1942792 - RNA, 19 nt, Artificial Sequence
  Description of Artificial Sequence: Synthetic oligonucleotide
guuaaucuaaauaucuuuc

SEQ ID NO: 1942793 - RNA, 19 nt, Artificial Sequence
  Description of Artificial Sequence: Synthetic oligonucleotide
caauccacgguguuggggc

SEQ ID NO: 1942794 - RNA, 19 nt, Artificial Sequence
  Description of Artificial Sequence: Synthetic oligonucleotide
uaggcuacgugcaggauga

SEQ ID NO: 1942795 - RNA, 19 nt, Artificial Sequence
  Description of Artificial Sequence: Synthetic oligonucleotide
uuugccguguuaccuauac

SEQ ID NO: 1942796 - RNA, 19 nt, Artificial Sequence
  Description of Artificial Sequence: Synthetic oligonucleotide
agcuugugaugacagcggc

SEQ ID NO: 1942797 - RNA, 19 nt, Artificial Sequence
  Description of Artificial Sequence: Synthetic oligonucleotide
uagcaauccacgguguugg

SEQ ID NO: 1942798 - RNA, 19 nt, Artificial Sequence
  Description of Artificial Sequence: Synthetic oligonucleotide
aaguugucguagcacacgu

SEQ ID NO: 1942799 - RNA, 19 nt, Artificial Sequence
  Description of Artificial Sequence: Synthetic oligonucleotide
uugucguagcacacguugg

SEQ ID NO: 1942800 - RNA, 19 nt, Artificial Sequence
  Description of Artificial Sequence: Synthetic oligonucleotide
uuaccuauaccagguagcc

SEQ ID NO: 1942801 - RNA, 19 nt, Artificial Sequence
  Description of Artificial Sequence: Synthetic oligonucleotide
cuugugaugacagcggcag

SEQ ID NO: 1942802 - RNA, 19 nt, Artificial Sequence
  Description of Artificial Sequence: Synthetic oligonucleotide
cacacguugguacagccag

SEQ ID NO: 1942803 - RNA, 19 nt, Artificial Sequence
  Description of Artificial Sequence: Synthetic oligonucleotide
uguaccagacguggcaugg

SEQ ID NO: 1942804 - RNA, 19 nt, Artificial Sequence
  Description of Artificial Sequence: Synthetic oligonucleotide
aggauggcuguauagcuug

SEQ ID NO: 1942805 - RNA, 19 nt, Artificial Sequence
  Description of Artificial Sequence: Synthetic oligonucleotide
gcuucaaacauuaauuggc

SEQ ID NO: 1942806 - RNA, 19 nt, Artificial Sequence
  Description of Artificial Sequence: Synthetic oligonucleotide
ggaugaccaacaucgaagg

SEQ ID NO: 1942807 - RNA, 19 nt, Artificial Sequence
  Description of Artificial Sequence: Synthetic oligonucleotide
aggaugaccaacaucgaag

SEQ ID NO: 1942808 - RNA, 19 nt, Artificial Sequence
  Description of Artificial Sequence: Synthetic oligonucleotide
gaaguugucguagcacacg

SEQ ID NO: 1942809 - RNA, 19 nt, Artificial Sequence
  Description of Artificial Sequence: Synthetic oligonucleotide
uuguuaaucuaaauaucuu

SEQ ID NO: 1942810 - RNA, 19 nt, Artificial Sequence
  Description of Artificial Sequence: Synthetic oligonucleotide
uaacccuguggaaaaugag

SEQ ID NO: 1942811 - RNA, 19 nt, Artificial Sequence
  Description of Artificial Sequence: Synthetic oligonucleotide
cuugcaugcauguaguuaa

SEQ ID NO: 1942812 - RNA, 19 nt, Artificial Sequence
  Description of Artificial Sequence: Synthetic oligonucleotide
uuuguagacuugaccuugc

SEQ ID NO: 1942813 - RNA, 19 nt, Artificial Sequence
  Description of Artificial Sequence: Synthetic oligonucleotide
gugaauucaaagugggcac

SEQ ID NO: 1942814 - RNA, 19 nt, Artificial Sequence
  Description of Artificial Sequence: Synthetic oligonucleotide
acacgugacgaagaugagc

SEQ ID NO: 1942815 - RNA, 19 nt, Artificial Sequence
  Description of Artificial Sequence: Synthetic oligonucleotide
uaaugcagacagcggaggc

SEQ ID NO: 1942816 - RNA, 19 nt, Artificial Sequence
  Description of Artificial Sequence: Synthetic oligonucleotide
cucgcgguaggcuacgugc

SEQ ID NO: 1942817 - RNA, 19 nt, Artificial Sequence
  Description of Artificial Sequence: Synthetic oligonucleotide
ggagauaggaaagaaguug

SEQ ID NO: 1942818 - RNA, 19 nt, Artificial Sequence
  Description of Artificial Sequence: Synthetic oligonucleotide
aucugcuucaaacauuaau

SEQ ID NO: 1942819 - RNA, 19 nt, Artificial Sequence
  Description of Artificial Sequence: Synthetic oligonucleotide
ucagcuaaguagacccuug

SEQ ID NO: 1942820 - RNA, 19 nt, Artificial Sequence
  Description of Artificial Sequence: Synthetic oligonucleotide
agaauaaugcagacagcgg

SEQ ID NO: 1942821 - RNA, 19 nt, Artificial Sequence
  Description of Artificial Sequence: Synthetic oligonucleotide
agauggugagaauaaugca

SEQ ID NO: 1942822 - RNA, 19 nt, Artificial Sequence
  Description of Artificial Sequence: Synthetic oligonucleotide
cauggugccugcuugcggc

SEQ ID NO: 1942823 - RNA, 19 nt, Artificial Sequence
  Description of Artificial Sequence: Synthetic oligonucleotide
ucgugcuguucaaaugggg

SEQ ID NO: 1942824 - RNA, 19 nt, Artificial Sequence
  Description of Artificial Sequence: Synthetic oligonucleotide
ucuuccaauccauggugcc

SEQ ID NO: 1942825 - RNA, 19 nt, Artificial Sequence
  Description of Artificial Sequence: Synthetic oligonucleotide
caggaagaccaauucaaug

SEQ ID NO: 1942826 - RNA, 19 nt, Artificial Sequence
  Description of Artificial Sequence: Synthetic oligonucleotide
agcgauguagcaauccacg

SEQ ID NO: 1942827 - RNA, 19 nt, Artificial Sequence
  Description of Artificial Sequence: Synthetic oligonucleotide
auaccagguagccagcaca

SEQ ID NO: 1942828 - RNA, 19 nt, Artificial Sequence
  Description of Artificial Sequence: Synthetic oligonucleotide
ugguucacaccgcucaaca

SEQ ID NO: 1942829 - RNA, 19 nt, Artificial Sequence
  Description of Artificial Sequence: Synthetic oligonucleotide
cacaccggcacacuguacc

SEQ ID NO: 1942830 - RNA, 19 nt, Artificial Sequence
  Description of Artificial Sequence: Synthetic oligonucleotide
ugcucgucaccccacacac

SEQ ID NO: 1942831 - RNA, 19 nt, Artificial Sequence
  Description of Artificial Sequence: Synthetic oligonucleotide
aagcuugugaugacagcgg

SEQ ID NO: 1942832 - RNA, 19 nt, Artificial Sequence
  Description of Artificial Sequence: Synthetic oligonucleotide
uguagacuugaccuugcuc

SEQ ID NO: 1942833 - RNA, 19 nt, Artificial Sequence
  Description of Artificial Sequence: Synthetic oligonucleotide
caucgaaggacacgugacg

SEQ ID NO: 1942834 - RNA, 19 nt, Artificial Sequence
  Description of Artificial Sequence: Synthetic oligonucleotide
guuggagauaggaaagaag

SEQ ID NO: 1942835 - RNA, 19 nt, Artificial Sequence
  Description of Artificial Sequence: Synthetic oligonucleotide
guuaccuauaccagguagc

SEQ ID NO: 1942836 - RNA, 19 nt, Artificial Sequence
  Description of Artificial Sequence: Synthetic oligonucleotide
cugcuugcggcuuucgggg

SEQ ID NO: 1942837 - RNA, 19 nt, Artificial Sequence
  Description of Artificial Sequence: Synthetic oligonucleotide
guaggcuacgugcaggaug

SEQ ID NO: 1942838 - RNA, 19 nt, Artificial Sequence
  Description of Artificial Sequence: Synthetic oligonucleotide
ugugaugacagcggcaggu

SEQ ID NO: 1942839 - RNA, 19 nt, Artificial Sequence
  Description of Artificial Sequence: Synthetic oligonucleotide
gugaagccaugccagagcc

SEQ ID NO: 1942840 - RNA, 19 nt, Artificial Sequence
  Description of Artificial Sequence: Synthetic oligonucleotide
acucucuagaagcuuguga

SEQ ID NO: 1942841 - RNA, 19 nt, Artificial Sequence
  Description of Artificial Sequence: Synthetic oligonucleotide
cuuggcacacugauccccg

SEQ ID NO: 1942842 - RNA, 19 nt, Artificial Sequence
  Description of Artificial Sequence: Synthetic oligonucleotide
aagacgaacacgacugaca

SEQ ID NO: 1942843 - RNA, 19 nt, Artificial Sequence
  Description of Artificial Sequence: Synthetic oligonucleotide
acaucgaaggacacgugac

SEQ ID NO: 1942844 - RNA, 19 nt, Artificial Sequence
  Description of Artificial Sequence: Synthetic oligonucleotide
ugucguagcacacguuggu

SEQ ID NO: 1942845 - RNA, 19 nt, Artificial Sequence
  Description of Artificial Sequence: Synthetic oligonucleotide
ucguagcacacguugguac

SEQ ID NO: 1942846 - RNA, 19 nt, Artificial Sequence
  Description of Artificial Sequence: Synthetic oligonucleotide
uggcuguauagcuuggcac

SEQ ID NO: 1942847 - RNA, 19 nt, Artificial Sequence
  Description of Artificial Sequence: Synthetic oligonucleotide
agguagaagaucucacaga

SEQ ID NO: 1942848 - RNA, 19 nt, Artificial Sequence
  Description of Artificial Sequence: Synthetic oligonucleotide
ucuuucugaagcuggguuu

SEQ ID NO: 1942849 - RNA, 19 nt, Artificial Sequence
  Description of Artificial Sequence: Synthetic oligonucleotide
cacaccgcucaacaggucc

SEQ ID NO: 1942850 - RNA, 19 nt, Artificial Sequence
  Description of Artificial Sequence: Synthetic oligonucleotide
acccgcagcaccucccugc

SEQ ID NO: 1942851 - RNA, 19 nt, Artificial Sequence
  Description of Artificial Sequence: Synthetic oligonucleotide
ugauccccgugcuucaggc

SEQ ID NO: 1942852 - RNA, 19 nt, Artificial Sequence
  Description of Artificial Sequence: Synthetic oligonucleotide
uuuggggagcugcugcucu

SEQ ID NO: 1942853 - RNA, 19 nt, Artificial Sequence
  Description of Artificial Sequence: Synthetic oligonucleotide
uucaaacauuaauuggcua

SEQ ID NO: 1942854 - RNA, 19 nt, Artificial Sequence
  Description of Artificial Sequence: Synthetic oligonucleotide
aaggacacgugacgaagau

SEQ ID NO: 1942855 - RNA, 19 nt, Artificial Sequence
  Description of Artificial Sequence: Synthetic oligonucleotide
augcauguaguuaauuugu

SEQ ID NO: 1942856 - RNA, 19 nt, Artificial Sequence
  Description of Artificial Sequence: Synthetic oligonucleotide
gaugcguccgaaugcugug

SEQ ID NO: 1942857 - RNA, 19 nt, Artificial Sequence
  Description of Artificial Sequence: Synthetic oligonucleotide
gaaugcuguggaguacugg

SEQ ID NO: 1942858 - RNA, 19 nt, Artificial Sequence
  Description of Artificial Sequence: Synthetic oligonucleotide
uggagauaggaaagaaguu

SEQ ID NO: 1942859 - RNA, 19 nt, Artificial Sequence
  Description of Artificial Sequence: Synthetic oligonucleotide
uccaucgugcuguucaaau

SEQ ID NO: 1942860 - RNA, 19 nt, Artificial Sequence
  Description of Artificial Sequence: Synthetic oligonucleotide
uagaagcccuguuuaccag

SEQ ID NO: 1942861 - RNA, 19 nt, Artificial Sequence
  Description of Artificial Sequence: Synthetic oligonucleotide
accaacaucgaaggacacg

SEQ ID NO: 1942862 - RNA, 19 nt, Artificial Sequence
  Description of Artificial Sequence: Synthetic oligonucleotide
uaccagacguggcauggug

SEQ ID NO: 1942863 - RNA, 19 nt, Artificial Sequence
  Description of Artificial Sequence: Synthetic oligonucleotide
uuggcuagcuuagugaauu

SEQ ID NO: 1942864 - RNA, 19 nt, Artificial Sequence
  Description of Artificial Sequence: Synthetic oligonucleotide
aggcggauguuggagauag

SEQ ID NO: 1942865 - RNA, 19 nt, Artificial Sequence
  Description of Artificial Sequence: Synthetic oligonucleotide
auggcuguauagcuuggca

SEQ ID NO: 1942866 - RNA, 19 nt, Artificial Sequence
  Description of Artificial Sequence: Synthetic oligonucleotide
uuuugcucgucaccccaca

SEQ ID NO: 1942867 - RNA, 19 nt, Artificial Sequence
  Description of Artificial Sequence: Synthetic oligonucleotide
guagccagcacagagccca

SEQ ID NO: 1942868 - RNA, 19 nt, Artificial Sequence
  Description of Artificial Sequence: Synthetic oligonucleotide
uaaagacuuucuucuccgu

SEQ ID NO: 1942869 - RNA, 19 nt, Artificial Sequence
  Description of Artificial Sequence: Synthetic oligonucleotide
ggacacgugacgaagauga

SEQ ID NO: 1942870 - RNA, 19 nt, Artificial Sequence
  Description of Artificial Sequence: Synthetic oligonucleotide
caacagguccugaagcuuc

SEQ ID NO: 1942871 - RNA, 19 nt, Artificial Sequence
  Description of Artificial Sequence: Synthetic oligonucleotide
ggaaagaaguugucguagc

SEQ ID NO: 1942872 - RNA, 19 nt, Artificial Sequence
  Description of Artificial Sequence: Synthetic oligonucleotide
uugcucgucaccccacaca

SEQ ID NO: 1942873 - RNA, 19 nt, Artificial Sequence
  Description of Artificial Sequence: Synthetic oligonucleotide
uugugaugacagcggcagg

SEQ ID NO: 1942874 - RNA, 19 nt, Artificial Sequence
  Description of Artificial Sequence: Synthetic oligonucleotide
caggcgaugcuuccguucc

SEQ ID NO: 1942875 - RNA, 19 nt, Artificial Sequence
  Description of Artificial Sequence: Synthetic oligonucleotide
agcuuggcacacugauccc

SEQ ID NO: 1942876 - RNA, 19 nt, Artificial Sequence
  Description of Artificial Sequence: Synthetic oligonucleotide
uagacccuugcaugcaugu

SEQ ID NO: 1942877 - RNA, 19 nt, Artificial Sequence
  Description of Artificial Sequence: Synthetic oligonucleotide
uggugagaauaaugcagac

SEQ ID NO: 1942878 - RNA, 19 nt, Artificial Sequence
  Description of Artificial Sequence: Synthetic oligonucleotide
ugcauguaguuaauuuguu

SEQ ID NO: 1942879 - RNA, 19 nt, Artificial Sequence
  Description of Artificial Sequence: Synthetic oligonucleotide
acugacagccagaugcguc

SEQ ID NO: 1942880 - RNA, 19 nt, Artificial Sequence
  Description of Artificial Sequence: Synthetic oligonucleotide
uuggcauugccugguuccg

SEQ ID NO: 1942881 - RNA, 19 nt, Artificial Sequence
  Description of Artificial Sequence: Synthetic oligonucleotide
ucgcauaacccuguggaaa

SEQ ID NO: 1942882 - RNA, 19 nt, Artificial Sequence
  Description of Artificial Sequence: Synthetic oligonucleotide
cacgugacgaagaugagcu

SEQ ID NO: 1942883 - RNA, 19 nt, Artificial Sequence
  Description of Artificial Sequence: Synthetic oligonucleotide
uguggaaaaugagguagaa

SEQ ID NO: 1942884 - RNA, 19 nt, Artificial Sequence
  Description of Artificial Sequence: Synthetic oligonucleotide
gaagacgaacacgacugac

SEQ ID NO: 1942885 - RNA, 19 nt, Artificial Sequence
  Description of Artificial Sequence: Synthetic oligonucleotide
uuaccagcucagcuaagua

SEQ ID NO: 1942886 - RNA, 19 nt, Artificial Sequence
  Description of Artificial Sequence: Synthetic oligonucleotide
agcggaggcgccuaccaug

SEQ ID NO: 1942887 - RNA, 19 nt, Artificial Sequence
  Description of Artificial Sequence: Synthetic oligonucleotide
ggggcagggguccacaccg

SEQ ID NO: 1942888 - RNA, 19 nt, Artificial Sequence
  Description of Artificial Sequence: Synthetic oligonucleotide
accagcucagcuaaguaga

SEQ ID NO: 1942889 - RNA, 19 nt, Artificial Sequence
  Description of Artificial Sequence: Synthetic oligonucleotide
aauccacgguguuggggca

SEQ ID NO: 1942890 - RNA, 19 nt, Artificial Sequence
  Description of Artificial Sequence: Synthetic oligonucleotide
uggugaagccaugccagag

SEQ ID NO: 1942891 - RNA, 19 nt, Artificial Sequence
  Description of Artificial Sequence: Synthetic oligonucleotide
aucgaaggacacgugacga

SEQ ID NO: 1942892 - RNA, 19 nt, Artificial Sequence
  Description of Artificial Sequence: Synthetic oligonucleotide
guagcaauccacgguguug

SEQ ID NO: 1942893 - RNA, 19 nt, Artificial Sequence
  Description of Artificial Sequence: Synthetic oligonucleotide
auagcuuggcacacugauc

SEQ ID NO: 1942894 - RNA, 19 nt, Artificial Sequence
  Description of Artificial Sequence: Synthetic oligonucleotide
cuucaaacauuaauuggcu

SEQ ID NO: 1942895 - RNA, 19 nt, Artificial Sequence
  Description of Artificial Sequence: Synthetic oligonucleotide
uggguuugccguguuaccu

SEQ ID NO: 1942896 - RNA, 19 nt, Artificial Sequence
  Description of Artificial Sequence: Synthetic oligonucleotide
uuugcucgucaccccacac

SEQ ID NO: 1942897 - RNA, 19 nt, Artificial Sequence
  Description of Artificial Sequence: Synthetic oligonucleotide
gcucuuuguagacuugacc

SEQ ID NO: 1942898 - RNA, 19 nt, Artificial Sequence
  Description of Artificial Sequence: Synthetic oligonucleotide
auccccgugcuucaggcga

SEQ ID NO: 1942899 - RNA, 19 nt, Artificial Sequence
  Description of Artificial Sequence: Synthetic oligonucleotide
uccauggugccugcuugcg

SEQ ID NO: 1942900 - RNA, 19 nt, Artificial Sequence
  Description of Artificial Sequence: Synthetic oligonucleotide
uuguagacuugaccuugcu

SEQ ID NO: 1942901 - RNA, 19 nt, Artificial Sequence
  Description of Artificial Sequence: Synthetic oligonucleotide
auuaauuggcuagcuuagu

SEQ ID NO: 1942902 - RNA, 19 nt, Artificial Sequence
  Description of Artificial Sequence: Synthetic oligonucleotide
cuagcuuagugaauucaaa

SEQ ID NO: 1942903 - RNA, 19 nt, Artificial Sequence
  Description of Artificial Sequence: Synthetic oligonucleotide
gcgccuaccaugaaguagg

SEQ ID NO: 1942904 - RNA, 19 nt, Artificial Sequence
  Description of Artificial Sequence: Synthetic oligonucleotide
gaugaccaacaucgaagga

SEQ ID NO: 1942905 - RNA, 19 nt, Artificial Sequence
  Description of Artificial Sequence: Synthetic oligonucleotide
cucucuagaagcuugugau

SEQ ID NO: 1942906 - RNA, 19 nt, Artificial Sequence
  Description of Artificial Sequence: Synthetic oligonucleotide
uugccguguuaccuauacc

SEQ ID NO: 1942907 - RNA, 19 nt, Artificial Sequence
  Description of Artificial Sequence: Synthetic oligonucleotide
aaguagacccuugcaugca

SEQ ID NO: 1942908 - RNA, 19 nt, Artificial Sequence
  Description of Artificial Sequence: Synthetic oligonucleotide
aagcccuguuuaccagcuc

SEQ ID NO: 1942909 - RNA, 19 nt, Artificial Sequence
  Description of Artificial Sequence: Synthetic oligonucleotide
gguagaagcccuguuuacc

SEQ ID NO: 1942910 - RNA, 19 nt, Artificial Sequence
  Description of Artificial Sequence: Synthetic oligonucleotide
gauggcuguauagcuuggc

SEQ ID NO: 1942911 - RNA, 19 nt, Artificial Sequence
  Description of Artificial Sequence: Synthetic oligonucleotide
ugcguccgaaugcugugga

SEQ ID NO: 1942912 - RNA, 19 nt, Artificial Sequence
  Description of Artificial Sequence: Synthetic oligonucleotide
ggugaagccaugccagagc

SEQ ID NO: 1942913 - RNA, 19 nt, Artificial Sequence
  Description of Artificial Sequence: Synthetic oligonucleotide
cucggcuggaggacuuugg

SEQ ID NO: 1942914 - RNA, 19 nt, Artificial Sequence
  Description of Artificial Sequence: Synthetic oligonucleotide
uugcucaggccucgcauaa

SEQ ID NO: 1942915 - RNA, 19 nt, Artificial Sequence
  Description of Artificial Sequence: Synthetic oligonucleotide
cuucuccgugggucgagcg

SEQ ID NO: 1942916 - RNA, 19 nt, Artificial Sequence
  Description of Artificial Sequence: Synthetic oligonucleotide
gcgauguagcaauccacgg

SEQ ID NO: 1942917 - RNA, 19 nt, Artificial Sequence
  Description of Artificial Sequence: Synthetic oligonucleotide
aucucacagauggugagaa

SEQ ID NO: 1942918 - RNA, 19 nt, Artificial Sequence
  Description of Artificial Sequence: Synthetic oligonucleotide
cuggguuugccguguuacc

SEQ ID NO: 1942919 - RNA, 19 nt, Artificial Sequence
  Description of Artificial Sequence: Synthetic oligonucleotide
ugaccuugcucaggccucg

SEQ ID NO: 1942920 - RNA, 19 nt, Artificial Sequence
  Description of Artificial Sequence: Synthetic oligonucleotide
ucgaaggacacgugacgaa

SEQ ID NO: 1942921 - RNA, 19 nt, Artificial Sequence
  Description of Artificial Sequence: Synthetic oligonucleotide
acccggaagacgaacacga

SEQ ID NO: 1942922 - RNA, 19 nt, Artificial Sequence
  Description of Artificial Sequence: Synthetic oligonucleotide
ggcauugccugguuccggg

SEQ ID NO: 1942923 - RNA, 19 nt, Artificial Sequence
  Description of Artificial Sequence: Synthetic oligonucleotide
ucgcgguaggcuacgugca

SEQ ID NO: 1942924 - RNA, 19 nt, Artificial Sequence
  Description of Artificial Sequence: Synthetic oligonucleotide
cggaagacgaacacgacug

SEQ ID NO: 1942925 - RNA, 19 nt, Artificial Sequence
  Description of Artificial Sequence: Synthetic oligonucleotide
gagcgauguagcaauccac

SEQ ID NO: 1942926 - RNA, 19 nt, Artificial Sequence
  Description of Artificial Sequence: Synthetic oligonucleotide
acagcggaggcgccuacca

SEQ ID NO: 1942927 - RNA, 19 nt, Artificial Sequence
  Description of Artificial Sequence: Synthetic oligonucleotide
gcuacgugcaggaugacca

SEQ ID NO: 1942928 - RNA, 19 nt, Artificial Sequence
  Description of Artificial Sequence: Synthetic oligonucleotide
caggccucgcauaacccug

SEQ ID NO: 1942929 - RNA, 19 nt, Artificial Sequence
  Description of Artificial Sequence: Synthetic oligonucleotide
agaugcguccgaaugcugu

SEQ ID NO: 1942930 - RNA, 19 nt, Artificial Sequence
  Description of Artificial Sequence: Synthetic oligonucleotide
auguuggagauaggaaaga

SEQ ID NO: 1942931 - RNA, 19 nt, Artificial Sequence
  Description of Artificial Sequence: Synthetic oligonucleotide
ugaagccaugccagagccu

SEQ ID NO: 1942932 - RNA, 19 nt, Artificial Sequence
  Description of Artificial Sequence: Synthetic oligonucleotide
gaaggacacgugacgaaga

SEQ ID NO: 1942933 - RNA, 19 nt, Artificial Sequence
  Description of Artificial Sequence: Synthetic oligonucleotide
ggaggcgccuaccaugaag

SEQ ID NO: 1942934 - RNA, 19 nt, Artificial Sequence
  Description of Artificial Sequence: Synthetic oligonucleotide
ugguuccggguccucacuc

SEQ ID NO: 1942935 - RNA, 19 nt, Artificial Sequence
  Description of Artificial Sequence: Synthetic oligonucleotide
gguccucacucucuagaag

SEQ ID NO: 1942936 - RNA, 19 nt, Artificial Sequence
  Description of Artificial Sequence: Synthetic oligonucleotide
gaucucacagauggugaga

SEQ ID NO: 1942937 - RNA, 19 nt, Artificial Sequence
  Description of Artificial Sequence: Synthetic oligonucleotide
gcucaggccucgcauaacc

SEQ ID NO: 1942938 - RNA, 19 nt, Artificial Sequence
  Description of Artificial Sequence: Synthetic oligonucleotide
uucacuccuccuccaucgu

SEQ ID NO: 1942939 - RNA, 19 nt, Artificial Sequence
  Description of Artificial Sequence: Synthetic oligonucleotide
augacagcggcagguggag

SEQ ID NO: 1942940 - RNA, 19 nt, Artificial Sequence
  Description of Artificial Sequence: Synthetic oligonucleotide
uaccuauaccagguagcca

SEQ ID NO: 1942941 - RNA, 19 nt, Artificial Sequence
  Description of Artificial Sequence: Synthetic oligonucleotide
uggcauugccugguuccgg

SEQ ID NO: 1942942 - RNA, 19 nt, Artificial Sequence
  Description of Artificial Sequence: Synthetic oligonucleotide
augcguccgaaugcugugg

SEQ ID NO: 1942943 - RNA, 19 nt, Artificial Sequence
  Description of Artificial Sequence: Synthetic oligonucleotide
uugcaugcauguaguuaau

SEQ ID NO: 1942944 - RNA, 19 nt, Artificial Sequence
  Description of Artificial Sequence: Synthetic oligonucleotide
ggugagaauaaugcagaca

SEQ ID NO: 1942945 - RNA, 19 nt, Artificial Sequence
  Description of Artificial Sequence: Synthetic oligonucleotide
cuguaccagacguggcaug

SEQ ID NO: 1942946 - RNA, 19 nt, Artificial Sequence
  Description of Artificial Sequence: Synthetic oligonucleotide
acuguaccagacguggcau

SEQ ID NO: 1942947 - RNA, 19 nt, Artificial Sequence
  Description of Artificial Sequence: Synthetic oligonucleotide
caacaucgaaggacacgug

SEQ ID NO: 1942948 - RNA, 19 nt, Artificial Sequence
  Description of Artificial Sequence: Synthetic oligonucleotide
gacacgugacgaagaugag

SEQ ID NO: 1942949 - RNA, 19 nt, Artificial Sequence
  Description of Artificial Sequence: Synthetic oligonucleotide
uacgugcaggaugaccaac

SEQ ID NO: 1942950 - RNA, 19 nt, Artificial Sequence
  Description of Artificial Sequence: Synthetic oligonucleotide
gcuaaguagacccuugcau

SEQ ID NO: 1942951 - RNA, 19 nt, Artificial Sequence
  Description of Artificial Sequence: Synthetic oligonucleotide
ccucgcauaacccugugga

SEQ ID NO: 1942952 - RNA, 19 nt, Artificial Sequence
  Description of Artificial Sequence: Synthetic oligonucleotide
cagcucagcuaaguagacc

SEQ ID NO: 1942953 - RNA, 19 nt, Artificial Sequence
  Description of Artificial Sequence: Synthetic oligonucleotide
aggacacgugacgaagaug

SEQ ID NO: 1942954 - RNA, 19 nt, Artificial Sequence
  Description of Artificial Sequence: Synthetic oligonucleotide
uggcuagcuuagugaauuc

SEQ ID NO: 1942955 - RNA, 19 nt, Artificial Sequence
  Description of Artificial Sequence: Synthetic oligonucleotide
agacagcggaggcgccuac

SEQ ID NO: 1942956 - RNA, 19 nt, Artificial Sequence
  Description of Artificial Sequence: Synthetic oligonucleotide
guagacccuugcaugcaug

SEQ ID NO: 1942957 - RNA, 19 nt, Artificial Sequence
  Description of Artificial Sequence: Synthetic oligonucleotide
acgugacgaagaugagcug

SEQ ID NO: 1942958 - RNA, 19 nt, Artificial Sequence
  Description of Artificial Sequence: Synthetic oligonucleotide
ugcaugcauguaguuaauu

SEQ ID NO: 1942959 - RNA, 19 nt, Artificial Sequence
  Description of Artificial Sequence: Synthetic oligonucleotide
ggcgccuaccaugaaguag

SEQ ID NO: 1942960 - RNA, 19 nt, Artificial Sequence
  Description of Artificial Sequence: Synthetic oligonucleotide
cgugacgaagaugagcugc

SEQ ID NO: 1942961 - RNA, 19 nt, Artificial Sequence
  Description of Artificial Sequence: Synthetic oligonucleotide
gaggcgccuaccaugaagu

SEQ ID NO: 1942962 - RNA, 19 nt, Artificial Sequence
  Description of Artificial Sequence: Synthetic oligonucleotide
gcaauccacgguguugggg

SEQ ID NO: 1942963 - RNA, 19 nt, Artificial Sequence
  Description of Artificial Sequence: Synthetic oligonucleotide
uccgaaugcuguggaguac

SEQ ID NO: 1942964 - RNA, 19 nt, Artificial Sequence
  Description of Artificial Sequence: Synthetic oligonucleotide
gugacgaagaugagcugca

SEQ ID NO: 1942965 - RNA, 19 nt, Artificial Sequence
  Description of Artificial Sequence: Synthetic oligonucleotide
ggcacacuguaccagacgu

SEQ ID NO: 1942966 - RNA, 19 nt, Artificial Sequence
  Description of Artificial Sequence: Synthetic oligonucleotide
gcuggguuugccguguuac

SEQ ID NO: 1942967 - RNA, 19 nt, Artificial Sequence
  Description of Artificial Sequence: Synthetic oligonucleotide
acacguugguacagccagg

SEQ ID NO: 1942968 - RNA, 19 nt, Artificial Sequence
  Description of Artificial Sequence: Synthetic oligonucleotide
agcacccggaagacgaaca

SEQ ID NO: 1942969 - RNA, 19 nt, Artificial Sequence
  Description of Artificial Sequence: Synthetic oligonucleotide
acacgacugacagccagau

SEQ ID NO: 1942970 - RNA, 19 nt, Artificial Sequence
  Description of Artificial Sequence: Synthetic oligonucleotide
cuugcucaggccucgcaua

SEQ ID NO: 1942971 - RNA, 19 nt, Artificial Sequence
  Description of Artificial Sequence: Synthetic oligonucleotide
gcggauguuggagauagga

SEQ ID NO: 1942972 - RNA, 19 nt, Artificial Sequence
  Description of Artificial Sequence: Synthetic oligonucleotide
ggcgaugcuuccguucccg

SEQ ID NO: 1942973 - RNA, 19 nt, Artificial Sequence
  Description of Artificial Sequence: Synthetic oligonucleotide
agccaugccagagccugug

SEQ ID NO: 1942974 - RNA, 19 nt, Artificial Sequence
  Description of Artificial Sequence: Synthetic oligonucleotide
accagacguggcaugguga

SEQ ID NO: 1942975 - RNA, 19 nt, Artificial Sequence
  Description of Artificial Sequence: Synthetic oligonucleotide
gccguguuaccuauaccag

SEQ ID NO: 1942976 - RNA, 19 nt, Artificial Sequence
  Description of Artificial Sequence: Synthetic oligonucleotide
cagaugcguccgaaugcug

SEQ ID NO: 1942977 - RNA, 19 nt, Artificial Sequence
  Description of Artificial Sequence: Synthetic oligonucleotide
gcuuggcacacugaucccc

SEQ ID NO: 1942978 - RNA, 19 nt, Artificial Sequence
  Description of Artificial Sequence: Synthetic oligonucleotide
cucgcauaacccuguggaa

SEQ ID NO: 1942979 - RNA, 19 nt, Artificial Sequence
  Description of Artificial Sequence: Synthetic oligonucleotide
gugggucgagcgauguagc

SEQ ID NO: 1942980 - RNA, 19 nt, Artificial Sequence
  Description of Artificial Sequence: Synthetic oligonucleotide
guuccggguccucacucuc

SEQ ID NO: 1942981 - RNA, 19 nt, Artificial Sequence
  Description of Artificial Sequence: Synthetic oligonucleotide
uuggcacacugauccccgu

SEQ ID NO: 1942982 - RNA, 19 nt, Artificial Sequence
  Description of Artificial Sequence: Synthetic oligonucleotide
auuggcuagcuuagugaau

SEQ ID NO: 1942983 - RNA, 19 nt, Artificial Sequence
  Description of Artificial Sequence: Synthetic oligonucleotide
ccuauaccagguagccagc

SEQ ID NO: 1942984 - RNA, 19 nt, Artificial Sequence
  Description of Artificial Sequence: Synthetic oligonucleotide
auggugccugcuugcggcu

SEQ ID NO: 1942985 - RNA, 19 nt, Artificial Sequence
  Description of Artificial Sequence: Synthetic oligonucleotide
accuugcucaggccucgca

SEQ ID NO: 1942986 - RNA, 19 nt, Artificial Sequence
  Description of Artificial Sequence: Synthetic oligonucleotide
gacagcggaggcgccuacc

SEQ ID NO: 1942987 - RNA, 19 nt, Artificial Sequence
  Description of Artificial Sequence: Synthetic oligonucleotide
cacucucuagaagcuugug

SEQ ID NO: 1942988 - RNA, 19 nt, Artificial Sequence
  Description of Artificial Sequence: Synthetic oligonucleotide
gcaugcauguaguuaauuu

SEQ ID NO: 1942989 - RNA, 19 nt, Artificial Sequence
  Description of Artificial Sequence: Synthetic oligonucleotide
gccucgcauaacccugugg

SEQ ID NO: 1942990 - RNA, 19 nt, Artificial Sequence
  Description of Artificial Sequence: Synthetic oligonucleotide
guauagcuuggcacacuga

SEQ ID NO: 1942991 - RNA, 19 nt, Artificial Sequence
  Description of Artificial Sequence: Synthetic oligonucleotide
acaccgcucaacagguccu

SEQ ID NO: 1942992 - RNA, 19 nt, Artificial Sequence
  Description of Artificial Sequence: Synthetic oligonucleotide
cagcacccacaaauaucug

SEQ ID NO: 1942993 - RNA, 19 nt, Artificial Sequence
  Description of Artificial Sequence: Synthetic oligonucleotide
ggcuacgugcaggaugacc

SEQ ID NO: 1942994 - RNA, 19 nt, Artificial Sequence
  Description of Artificial Sequence: Synthetic oligonucleotide
ggcuagcuuagugaauuca

SEQ ID NO: 1942995 - RNA, 19 nt, Artificial Sequence
  Description of Artificial Sequence: Synthetic oligonucleotide
ugccgcucucugcucugac

SEQ ID NO: 1942996 - RNA, 19 nt, Artificial Sequence
  Description of Artificial Sequence: Synthetic oligonucleotide
cgacugacagccagaugcg

SEQ ID NO: 1942997 - RNA, 19 nt, Artificial Sequence
  Description of Artificial Sequence: Synthetic oligonucleotide
cuugcggcuuucggggcug

SEQ ID NO: 1942998 - RNA, 19 nt, Artificial Sequence
  Description of Artificial Sequence: Synthetic oligonucleotide
auccacgguguuggggcag

SEQ ID NO: 1942999 - RNA, 19 nt, Artificial Sequence
  Description of Artificial Sequence: Synthetic oligonucleotide
ggucgagcgauguagcaau

SEQ ID NO: 1943000 - RNA, 19 nt, Artificial Sequence
  Description of Artificial Sequence: Synthetic oligonucleotide
cagacguggcauggugaag

SEQ ID NO: 1943001 - RNA, 19 nt, Artificial Sequence
  Description of Artificial Sequence: Synthetic oligonucleotide
ugccugcuugcggcuuucg

SEQ ID NO: 1943002 - RNA, 19 nt, Artificial Sequence
  Description of Artificial Sequence: Synthetic oligonucleotide
cgaaggacacgugacgaag

SEQ ID NO: 1943003 - RNA, 19 nt, Artificial Sequence
  Description of Artificial Sequence: Synthetic oligonucleotide
uccccgugcuucaggcgau

SEQ ID NO: 1943004 - RNA, 19 nt, Artificial Sequence
  Description of Artificial Sequence: Synthetic oligonucleotide
cuacgugcaggaugaccaa

SEQ ID NO: 1943005 - RNA, 19 nt, Artificial Sequence
  Description of Artificial Sequence: Synthetic oligonucleotide
cuucaggcgaugcuuccgu

SEQ ID NO: 1943006 - RNA, 19 nt, Artificial Sequence
  Description of Artificial Sequence: Synthetic oligonucleotide
cuggacaguccccuggggu

SEQ ID NO: 1943007 - RNA, 19 nt, Artificial Sequence
  Description of Artificial Sequence: Synthetic oligonucleotide
ggcuuucggggcugggccc

SEQ ID NO: 1943008 - RNA, 19 nt, Artificial Sequence
  Description of Artificial Sequence: Synthetic oligonucleotide
gcuucacuccuccuccauc

SEQ ID NO: 1943009 - RNA, 19 nt, Artificial Sequence
  Description of Artificial Sequence: Synthetic oligonucleotide
ccaacaucgaaggacacgu

SEQ ID NO: 1943010 - RNA, 19 nt, Artificial Sequence
  Description of Artificial Sequence: Synthetic oligonucleotide
ccauggugccugcuugcgg

SEQ ID NO: 1943011 - RNA, 19 nt, Artificial Sequence
  Description of Artificial Sequence: Synthetic oligonucleotide
guguuaccuauaccaggua

SEQ ID NO: 1943012 - RNA, 19 nt, Artificial Sequence
  Description of Artificial Sequence: Synthetic oligonucleotide
gcacccggaagacgaacac

SEQ ID NO: 1943013 - RNA, 19 nt, Artificial Sequence
  Description of Artificial Sequence: Synthetic oligonucleotide
ugcggcuuucggggcuggg

SEQ ID NO: 1943014 - RNA, 19 nt, Artificial Sequence
  Description of Artificial Sequence: Synthetic oligonucleotide
cgcucaacagguccugaag

SEQ ID NO: 1943015 - RNA, 19 nt, Artificial Sequence
  Description of Artificial Sequence: Synthetic oligonucleotide
aagcuggguuugccguguu

SEQ ID NO: 1943016 - RNA, 19 nt, Artificial Sequence
  Description of Artificial Sequence: Synthetic oligonucleotide
cuccucgcgguaggcuacg

SEQ ID NO: 1943017 - RNA, 19 nt, Artificial Sequence
  Description of Artificial Sequence: Synthetic oligonucleotide
gccgcucucugcucugacc

SEQ ID NO: 1943018 - RNA, 19 nt, Artificial Sequence
  Description of Artificial Sequence: Synthetic oligonucleotide
caccuugccgcucucugcu

SEQ ID NO: 1943019 - RNA, 19 nt, Artificial Sequence
  Description of Artificial Sequence: Synthetic oligonucleotide
ccugguuccggguccucac

SEQ ID NO: 1943020 - RNA, 19 nt, Artificial Sequence
  Description of Artificial Sequence: Synthetic oligonucleotide
cccgggaucccuccacccg

SEQ ID NO: 1943021 - RNA, 19 nt, Artificial Sequence
  Description of Artificial Sequence: Synthetic oligonucleotide
agcuggguuugccguguua

SEQ ID NO: 1943022 - RNA, 19 nt, Artificial Sequence
  Description of Artificial Sequence: Synthetic oligonucleotide
ccuguuuaccagcucagcu

SEQ ID NO: 1943023 - RNA, 19 nt, Artificial Sequence
  Description of Artificial Sequence: Synthetic oligonucleotide
cuuccaauccauggugccu

SEQ ID NO: 1943024 - RNA, 19 nt, Artificial Sequence
  Description of Artificial Sequence: Synthetic oligonucleotide
guggcauggugaagccaug

SEQ ID NO: 1943025 - RNA, 19 nt, Artificial Sequence
  Description of Artificial Sequence: Synthetic oligonucleotide
agagcccagcacccacaaa

SEQ ID NO: 1943026 - RNA, 19 nt, Artificial Sequence
  Description of Artificial Sequence: Synthetic oligonucleotide
acguggcauggugaagcca

SEQ ID NO: 1943027 - RNA, 19 nt, Artificial Sequence
  Description of Artificial Sequence: Synthetic oligonucleotide
ccgggaucccuccacccgc

SEQ ID NO: 1943028 - RNA, 19 nt, Artificial Sequence
  Description of Artificial Sequence: Synthetic oligonucleotide
uugccgcucucugcucuga

SEQ ID NO: 1943029 - RNA, 19 nt, Artificial Sequence
  Description of Artificial Sequence: Synthetic oligonucleotide
cguguuaccuauaccaggu

SEQ ID NO: 1943030 - RNA, 19 nt, Artificial Sequence
  Description of Artificial Sequence: Synthetic oligonucleotide
uugcggcuuucggggcugg

SEQ ID NO: 1943031 - RNA, 19 nt, Artificial Sequence
  Description of Artificial Sequence: Synthetic oligonucleotide
ggguuugccguguuaccua

SEQ ID NO: 1943032 - RNA, 19 nt, Artificial Sequence
  Description of Artificial Sequence: Synthetic oligonucleotide
gcguccgaaugcuguggag

SEQ ID NO: 1943033 - RNA, 19 nt, Artificial Sequence
  Description of Artificial Sequence: Synthetic oligonucleotide
aguugucguagcacacguu

SEQ ID NO: 1943034 - RNA, 19 nt, Artificial Sequence
  Description of Artificial Sequence: Synthetic oligonucleotide
agacccuugcaugcaugua

SEQ ID NO: 1943035 - RNA, 19 nt, Artificial Sequence
  Description of Artificial Sequence: Synthetic oligonucleotide
gcuugugaugacagcggca

SEQ ID NO: 1943036 - RNA, 19 nt, Artificial Sequence
  Description of Artificial Sequence: Synthetic oligonucleotide
accgcucaacagguccuga

SEQ ID NO: 1943037 - RNA, 19 nt, Artificial Sequence
  Description of Artificial Sequence: Synthetic oligonucleotide
aggcgccuaccaugaagua

SEQ ID NO: 1943038 - RNA, 19 nt, Artificial Sequence
  Description of Artificial Sequence: Synthetic oligonucleotide
ccgccgugcuucuugccag

SEQ ID NO: 1943039 - RNA, 19 nt, Artificial Sequence
  Description of Artificial Sequence: Synthetic oligonucleotide
ccagacguggcauggugaa

SEQ ID NO: 1943040 - RNA, 19 nt, Artificial Sequence
  Description of Artificial Sequence: Synthetic oligonucleotide
gaccuugcucaggccucgc

SEQ ID NO: 1943041 - RNA, 19 nt, Artificial Sequence
  Description of Artificial Sequence: Synthetic oligonucleotide
cagagcccagcacccacaa

SEQ ID NO: 1943042 - RNA, 19 nt, Artificial Sequence
  Description of Artificial Sequence: Synthetic oligonucleotide
cguagcacacguugguaca

SEQ ID NO: 1943043 - RNA, 19 nt, Artificial Sequence
  Description of Artificial Sequence: Synthetic oligonucleotide
aggccucgcauaacccugu

SEQ ID NO: 1943044 - RNA, 19 nt, Artificial Sequence
  Description of Artificial Sequence: Synthetic oligonucleotide
aggcuacgugcaggaugac

SEQ ID NO: 1943045 - RNA, 19 nt, Artificial Sequence
  Description of Artificial Sequence: Synthetic oligonucleotide
cgagcgauguagcaaucca

SEQ ID NO: 1943046 - RNA, 19 nt, Artificial Sequence
  Description of Artificial Sequence: Synthetic oligonucleotide
cccuguuuaccagcucagc

SEQ ID NO: 1943047 - RNA, 19 nt, Artificial Sequence
  Description of Artificial Sequence: Synthetic oligonucleotide
gucgagcgauguagcaauc

SEQ ID NO: 1943048 - RNA, 19 nt, Artificial Sequence
  Description of Artificial Sequence: Synthetic oligonucleotide
ggaggcucggcuggaggac

SEQ ID NO: 1943049 - RNA, 19 nt, Artificial Sequence
  Description of Artificial Sequence: Synthetic oligonucleotide
ccggcacacuguaccagac

SEQ ID NO: 1943050 - RNA, 19 nt, Artificial Sequence
  Description of Artificial Sequence: Synthetic oligonucleotide
gggucgagcgauguagcaa

SEQ ID NO: 1943051 - RNA, 19 nt, Artificial Sequence
  Description of Artificial Sequence: Synthetic oligonucleotide
gguuugccguguuaccuau

SEQ ID NO: 1943052 - RNA, 19 nt, Artificial Sequence
  Description of Artificial Sequence: Synthetic oligonucleotide
cacgcucagccgccaccac

SEQ ID NO: 1943053 - RNA, 19 nt, Artificial Sequence
  Description of Artificial Sequence: Synthetic oligonucleotide
cacccgcagcaccucccug

SEQ ID NO: 1943054 - RNA, 19 nt, Artificial Sequence
  Description of Artificial Sequence: Synthetic oligonucleotide
cgaaugcuguggaguacug

SEQ ID NO: 1943055 - RNA, 19 nt, Artificial Sequence
  Description of Artificial Sequence: Synthetic oligonucleotide
cccggaagacgaacacgac

SEQ ID NO: 1943056 - RNA, 19 nt, Artificial Sequence
  Description of Artificial Sequence: Synthetic oligonucleotide
cggauguuggagauaggaa

SEQ ID NO: 1943057 - RNA, 19 nt, Artificial Sequence
  Description of Artificial Sequence: Synthetic oligonucleotide
cucagcuaaguagacccuu

SEQ ID NO: 1943058 - RNA, 19 nt, Artificial Sequence
  Description of Artificial Sequence: Synthetic oligonucleotide
gcacacguugguacagcca

SEQ ID NO: 1943059 - RNA, 19 nt, Artificial Sequence
  Description of Artificial Sequence: Synthetic oligonucleotide
cccguggcuuggcauugcc

SEQ ID NO: 1943060 - RNA, 19 nt, Artificial Sequence
  Description of Artificial Sequence: Synthetic oligonucleotide
gguuccggguccucacucu

SEQ ID NO: 1943061 - RNA, 19 nt, Artificial Sequence
  Description of Artificial Sequence: Synthetic oligonucleotide
ggccucgcauaacccugug

SEQ ID NO: 1943062 - RNA, 19 nt, Artificial Sequence
  Description of Artificial Sequence: Synthetic oligonucleotide
ccggaagacgaacacgacu

SEQ ID NO: 1943063 - RNA, 19 nt, Artificial Sequence
  Description of Artificial Sequence: Synthetic oligonucleotide
uccucgcgguaggcuacgu

SEQ ID NO: 1943064 - RNA, 19 nt, Artificial Sequence
  Description of Artificial Sequence: Synthetic oligonucleotide
ggcggauguuggagauagg

SEQ ID NO: 1943065 - RNA, 19 nt, Artificial Sequence
  Description of Artificial Sequence: Synthetic oligonucleotide
ccaggcugccugguguuac

SEQ ID NO: 1943066 - RNA, 19 nt, Artificial Sequence
  Description of Artificial Sequence: Synthetic oligonucleotide
gcggaggcgccuaccauga

SEQ ID NO: 1943067 - RNA, 19 nt, Artificial Sequence
  Description of Artificial Sequence: Synthetic oligonucleotide
gcaggaugaccaacaucga

SEQ ID NO: 1943068 - RNA, 19 nt, Artificial Sequence
  Description of Artificial Sequence: Synthetic oligonucleotide
cuuucggggcugggcccac

SEQ ID NO: 1943069 - RNA, 19 nt, Artificial Sequence
  Description of Artificial Sequence: Synthetic oligonucleotide
guucccgcuccucgcggua

SEQ ID NO: 1943070 - RNA, 19 nt, Artificial Sequence
  Description of Artificial Sequence: Synthetic oligonucleotide
cuguauagcuuggcacacu

SEQ ID NO: 1943071 - RNA, 19 nt, Artificial Sequence
  Description of Artificial Sequence: Synthetic oligonucleotide
cuccaucgugcuguucaaa

SEQ ID NO: 1943072 - RNA, 19 nt, Artificial Sequence
  Description of Artificial Sequence: Synthetic oligonucleotide
ccucgcgguaggcuacgug

SEQ ID NO: 1943073 - RNA, 19 nt, Artificial Sequence
  Description of Artificial Sequence: Synthetic oligonucleotide
cgauguagcaauccacggu

SEQ ID NO: 1943074 - RNA, 19 nt, Artificial Sequence
  Description of Artificial Sequence: Synthetic oligonucleotide
gcuccucgcgguaggcuac

SEQ ID NO: 1943075 - RNA, 19 nt, Artificial Sequence
  Description of Artificial Sequence: Synthetic oligonucleotide
cccuguggaaaaugaggua

SEQ ID NO: 1943076 - RNA, 19 nt, Artificial Sequence
  Description of Artificial Sequence: Synthetic oligonucleotide
ccgcucucugcucugaccu

SEQ ID NO: 1943077 - RNA, 19 nt, Artificial Sequence
  Description of Artificial Sequence: Synthetic oligonucleotide
gggucaggcugggugcuga

SEQ ID NO: 1943078 - RNA, 19 nt, Artificial Sequence
  Description of Artificial Sequence: Synthetic oligonucleotide
gcuuucggggcugggccca

SEQ ID NO: 1943079 - RNA, 19 nt, Artificial Sequence
  Description of Artificial Sequence: Synthetic oligonucleotide
guaccagacguggcauggu

SEQ ID NO: 1943080 - RNA, 19 nt, Artificial Sequence
  Description of Artificial Sequence: Synthetic oligonucleotide
cugguuccggguccucacu

SEQ ID NO: 1943081 - RNA, 19 nt, Artificial Sequence
  Description of Artificial Sequence: Synthetic oligonucleotide
cagacagcggaggcgccua

SEQ ID NO: 1943082 - RNA, 19 nt, Artificial Sequence
  Description of Artificial Sequence: Synthetic oligonucleotide
ccacaccggcacacuguac

SEQ ID NO: 1943083 - RNA, 19 nt, Artificial Sequence
  Description of Artificial Sequence: Synthetic oligonucleotide
ccagaugcguccgaaugcu

SEQ ID NO: 1943084 - RNA, 19 nt, Artificial Sequence
  Description of Artificial Sequence: Synthetic oligonucleotide
cgguaggcuacgugcagga

SEQ ID NO: 1943085 - RNA, 19 nt, Artificial Sequence
  Description of Artificial Sequence: Synthetic oligonucleotide
cccgugcuucaggcgaugc

SEQ ID NO: 1943086 - RNA, 19 nt, Artificial Sequence
  Description of Artificial Sequence: Synthetic oligonucleotide
ggccgccgugcuucuugcc

SEQ ID NO: 1943087 - RNA, 19 nt, Artificial Sequence
  Description of Artificial Sequence: Synthetic oligonucleotide
gcuugcggcuuucggggcu

SEQ ID NO: 1943088 - RNA, 19 nt, Artificial Sequence
  Description of Artificial Sequence: Synthetic oligonucleotide
cgccgugcuucuugccagg

SEQ ID NO: 1943089 - RNA, 19 nt, Artificial Sequence
  Description of Artificial Sequence: Synthetic oligonucleotide
ccgaaugcuguggaguacu

SEQ ID NO: 1943090 - RNA, 19 nt, Artificial Sequence
  Description of Artificial Sequence: Synthetic oligonucleotide
ccgcucaacagguccugaa

SEQ ID NO: 1943091 - RNA, 19 nt, Artificial Sequence
  Description of Artificial Sequence: Synthetic oligonucleotide
ccuccaucgugcuguucaa

SEQ ID NO: 1943092 - RNA, 19 nt, Artificial Sequence
  Description of Artificial Sequence: Synthetic oligonucleotide
aggcucggcuggaggacuu

SEQ ID NO: 1943093 - RNA, 19 nt, Artificial Sequence
  Description of Artificial Sequence: Synthetic oligonucleotide
cagccagaugcguccgaau

SEQ ID NO: 1943094 - RNA, 19 nt, Artificial Sequence
  Description of Artificial Sequence: Synthetic oligonucleotide
ccgccaccacauacaccag

SEQ ID NO: 1943095 - RNA, 19 nt, Artificial Sequence
  Description of Artificial Sequence: Synthetic oligonucleotide
ccuugcucaggccucgcau

SEQ ID NO: 1943096 - RNA, 19 nt, Artificial Sequence
  Description of Artificial Sequence: Synthetic oligonucleotide
gcucagcuaaguagacccu

SEQ ID NO: 1943097 - RNA, 19 nt, Artificial Sequence
  Description of Artificial Sequence: Synthetic oligonucleotide
cguccgaaugcuguggagu

SEQ ID NO: 1943098 - RNA, 19 nt, Artificial Sequence
  Description of Artificial Sequence: Synthetic oligonucleotide
cagcggaggcgccuaccau

SEQ ID NO: 1943099 - RNA, 19 nt, Artificial Sequence
  Description of Artificial Sequence: Synthetic oligonucleotide
gcccguggcuuggcauugc

SEQ ID NO: 1943100 - RNA, 19 nt, Artificial Sequence
  Description of Artificial Sequence: Synthetic oligonucleotide
gguaggcuacgugcaggau

SEQ ID NO: 1943101 - RNA, 19 nt, Artificial Sequence
  Description of Artificial Sequence: Synthetic oligonucleotide
ccguggcuuggcauugccu

SEQ ID NO: 1943102 - RNA, 19 nt, Artificial Sequence
  Description of Artificial Sequence: Synthetic oligonucleotide
ccgugcuucaggcgaugcu

SEQ ID NO: 1943103 - RNA, 19 nt, Artificial Sequence
  Description of Artificial Sequence: Synthetic oligonucleotide
ggcuuggcauugccugguu

SEQ ID NO: 1943104 - RNA, 19 nt, Artificial Sequence
  Description of Artificial Sequence: Synthetic oligonucleotide
gcucagccgccaccacaua

SEQ ID NO: 1943105 - RNA, 19 nt, Artificial Sequence
  Description of Artificial Sequence: Synthetic oligonucleotide
ccccgugcuucaggcgaug

SEQ ID NO: 1943106 - RNA, 19 nt, Artificial Sequence
  Description of Artificial Sequence: Synthetic oligonucleotide
cccuugcaugcauguaguu

SEQ ID NO: 1943107 - RNA, 19 nt, Artificial Sequence
  Description of Artificial Sequence: Synthetic oligonucleotide
ccgugcuucuugccaggau

SEQ ID NO: 1943108 - RNA, 19 nt, Artificial Sequence
  Description of Artificial Sequence: Synthetic oligonucleotide
cguucccgcuccucgcggu

SEQ ID NO: 1943109 - RNA, 19 nt, Artificial Sequence
  Description of Artificial Sequence: Synthetic oligonucleotide
cgccuaccaugaaguaggu

SEQ ID NO: 1943110 - RNA, 19 nt, Artificial Sequence
  Description of Artificial Sequence: Synthetic oligonucleotide
ccgcuccucgcgguaggcu

SEQ ID NO: 1943111 - RNA, 19 nt, Artificial Sequence
  Description of Artificial Sequence: Synthetic oligonucleotide
cggaggcgccuaccaugaa

SEQ ID NO: 1943112 - RNA, 19 nt, Artificial Sequence
  Description of Artificial Sequence: Synthetic oligonucleotide
aauaaguucacuuauaaac

SEQ ID NO: 1943113 - RNA, 19 nt, Artificial Sequence
  Description of Artificial Sequence: Synthetic oligonucleotide
acuacaagccaucagaacc

SEQ ID NO: 1943114 - RNA, 19 nt, Artificial Sequence
  Description of Artificial Sequence: Synthetic oligonucleotide
aauuauugcacacaggacu

SEQ ID NO: 1943115 - RNA, 19 nt, Artificial Sequence
  Description of Artificial Sequence: Synthetic oligonucleotide
aauguuuuguaaguaaagc

SEQ ID NO: 1943116 - RNA, 19 nt, Artificial Sequence
  Description of Artificial Sequence: Synthetic oligonucleotide
ucaauuauugcacacagga

SEQ ID NO: 1943117 - RNA, 19 nt, Artificial Sequence
  Description of Artificial Sequence: Synthetic oligonucleotide
uuaguauuggcauagcagg

SEQ ID NO: 1943118 - RNA, 19 nt, Artificial Sequence
  Description of Artificial Sequence: Synthetic oligonucleotide
uuaauuaaguacuauaccu

SEQ ID NO: 1943119 - RNA, 19 nt, Artificial Sequence
  Description of Artificial Sequence: Synthetic oligonucleotide
gaaaauggccuuuuaaacg

SEQ ID NO: 1943120 - RNA, 19 nt, Artificial Sequence
  Description of Artificial Sequence: Synthetic oligonucleotide
aaugguaacauugugagga

SEQ ID NO: 1943121 - RNA, 19 nt, Artificial Sequence
  Description of Artificial Sequence: Synthetic oligonucleotide
ucuaagaaagacuuggugc

SEQ ID NO: 1943122 - RNA, 19 nt, Artificial Sequence
  Description of Artificial Sequence: Synthetic oligonucleotide
aacuaaacagaaaauggcc

SEQ ID NO: 1943123 - RNA, 19 nt, Artificial Sequence
  Description of Artificial Sequence: Synthetic oligonucleotide
uguaaguaaagcauggagc

SEQ ID NO: 1943124 - RNA, 19 nt, Artificial Sequence
  Description of Artificial Sequence: Synthetic oligonucleotide
aaucaauuauugcacacag

SEQ ID NO: 1943125 - RNA, 19 nt, Artificial Sequence
  Description of Artificial Sequence: Synthetic oligonucleotide
uuaugaaagacacuuguca

SEQ ID NO: 1943126 - RNA, 19 nt, Artificial Sequence
  Description of Artificial Sequence: Synthetic oligonucleotide
aaagcauggagcuuuaaga

SEQ ID NO: 1943127 - RNA, 19 nt, Artificial Sequence
  Description of Artificial Sequence: Synthetic oligonucleotide
ucaacauuacauuuacagg

SEQ ID NO: 1943128 - RNA, 19 nt, Artificial Sequence
  Description of Artificial Sequence: Synthetic oligonucleotide
auauguucaagacuugaac

SEQ ID NO: 1943129 - RNA, 19 nt, Artificial Sequence
  Description of Artificial Sequence: Synthetic oligonucleotide
acuauaccuaacuaaacag

SEQ ID NO: 1943130 - RNA, 19 nt, Artificial Sequence
  Description of Artificial Sequence: Synthetic oligonucleotide
ucaaaucguacucugucgg

SEQ ID NO: 1943131 - RNA, 19 nt, Artificial Sequence
  Description of Artificial Sequence: Synthetic oligonucleotide
acuauuuaaauuauuauga

SEQ ID NO: 1943132 - RNA, 19 nt, Artificial Sequence
  Description of Artificial Sequence: Synthetic oligonucleotide
uguuuuguaaguaaagcau

SEQ ID NO: 1943133 - RNA, 19 nt, Artificial Sequence
  Description of Artificial Sequence: Synthetic oligonucleotide
cuuaauuaaguacuauacc

SEQ ID NO: 1943134 - RNA, 19 nt, Artificial Sequence
  Description of Artificial Sequence: Synthetic oligonucleotide
aauuaaguacuauaccuaa

SEQ ID NO: 1943135 - RNA, 19 nt, Artificial Sequence
  Description of Artificial Sequence: Synthetic oligonucleotide
auuauuaugaaagacacuu

SEQ ID NO: 1943136 - RNA, 19 nt, Artificial Sequence
  Description of Artificial Sequence: Synthetic oligonucleotide
uacuauaccuaacuaaaca

SEQ ID NO: 1943137 - RNA, 19 nt, Artificial Sequence
  Description of Artificial Sequence: Synthetic oligonucleotide
acacaggacuaacagaagc

SEQ ID NO: 1943138 - RNA, 19 nt, Artificial Sequence
  Description of Artificial Sequence: Synthetic oligonucleotide
agacccagaacagagaccc

SEQ ID NO: 1943139 - RNA, 19 nt, Artificial Sequence
  Description of Artificial Sequence: Synthetic oligonucleotide
ugcaaaucaauuauugcac

SEQ ID NO: 1943140 - RNA, 19 nt, Artificial Sequence
  Description of Artificial Sequence: Synthetic oligonucleotide
uauguucaagacuugaacu

SEQ ID NO: 1943141 - RNA, 19 nt, Artificial Sequence
  Description of Artificial Sequence: Synthetic oligonucleotide
uaccuaacuaaacagaaaa

SEQ ID NO: 1943142 - RNA, 19 nt, Artificial Sequence
  Description of Artificial Sequence: Synthetic oligonucleotide
auuucagccagaaaugggc

SEQ ID NO: 1943143 - RNA, 19 nt, Artificial Sequence
  Description of Artificial Sequence: Synthetic oligonucleotide
aaucguacucugucggagc

SEQ ID NO: 1943144 - RNA, 19 nt, Artificial Sequence
  Description of Artificial Sequence: Synthetic oligonucleotide
uaaagcauggagcuuuaag

SEQ ID NO: 1943145 - RNA, 19 nt, Artificial Sequence
  Description of Artificial Sequence: Synthetic oligonucleotide
uauugaugcaguccacugg

SEQ ID NO: 1943146 - RNA, 19 nt, Artificial Sequence
  Description of Artificial Sequence: Synthetic oligonucleotide
ugacaaagcacauuucagc

SEQ ID NO: 1943147 - RNA, 19 nt, Artificial Sequence
  Description of Artificial Sequence: Synthetic oligonucleotide
gcacagaacaccuugaagg

SEQ ID NO: 1943148 - RNA, 19 nt, Artificial Sequence
  Description of Artificial Sequence: Synthetic oligonucleotide
acuaacagaagcgaugcac

SEQ ID NO: 1943149 - RNA, 19 nt, Artificial Sequence
  Description of Artificial Sequence: Synthetic oligonucleotide
guuaaugucaagaaguuga

SEQ ID NO: 1943150 - RNA, 19 nt, Artificial Sequence
  Description of Artificial Sequence: Synthetic oligonucleotide
uaucccgacacucaugccc

SEQ ID NO: 1943151 - RNA, 19 nt, Artificial Sequence
  Description of Artificial Sequence: Synthetic oligonucleotide
uuacacaaggucauccaag

SEQ ID NO: 1943152 - RNA, 19 nt, Artificial Sequence
  Description of Artificial Sequence: Synthetic oligonucleotide
caagagcucucuaagaaag

SEQ ID NO: 1943153 - RNA, 19 nt, Artificial Sequence
  Description of Artificial Sequence: Synthetic oligonucleotide
agaaaugcccugcaaauca

SEQ ID NO: 1943154 - RNA, 19 nt, Artificial Sequence
  Description of Artificial Sequence: Synthetic oligonucleotide
ucaacaaguccccuaggag

SEQ ID NO: 1943155 - RNA, 19 nt, Artificial Sequence
  Description of Artificial Sequence: Synthetic oligonucleotide
auuaguauuggcauagcag

SEQ ID NO: 1943156 - RNA, 19 nt, Artificial Sequence
  Description of Artificial Sequence: Synthetic oligonucleotide
cucuagaagacccagaaca

SEQ ID NO: 1943157 - RNA, 19 nt, Artificial Sequence
  Description of Artificial Sequence: Synthetic oligonucleotide
uaauuaaguacuauaccua

SEQ ID NO: 1943158 - RNA, 19 nt, Artificial Sequence
  Description of Artificial Sequence: Synthetic oligonucleotide
ucacucacagcauacuucc

SEQ ID NO: 1943159 - RNA, 19 nt, Artificial Sequence
  Description of Artificial Sequence: Synthetic oligonucleotide
agaagcgaugcacagaaca

SEQ ID NO: 1943160 - RNA, 19 nt, Artificial Sequence
  Description of Artificial Sequence: Synthetic oligonucleotide
gaccuuauccucuauacuc

SEQ ID NO: 1943161 - RNA, 19 nt, Artificial Sequence
  Description of Artificial Sequence: Synthetic oligonucleotide
gacacuacaagccaucaga

SEQ ID NO: 1943162 - RNA, 19 nt, Artificial Sequence
  Description of Artificial Sequence: Synthetic oligonucleotide
uuauuaugaaagacacuug

SEQ ID NO: 1943163 - RNA, 19 nt, Artificial Sequence
  Description of Artificial Sequence: Synthetic oligonucleotide
ugaccaucagaccacaggu

SEQ ID NO: 1943164 - RNA, 19 nt, Artificial Sequence
  Description of Artificial Sequence: Synthetic oligonucleotide
auguucaagacuugaacug

SEQ ID NO: 1943165 - RNA, 19 nt, Artificial Sequence
  Description of Artificial Sequence: Synthetic oligonucleotide
cucauauggagauauguuc

SEQ ID NO: 1943166 - RNA, 19 nt, Artificial Sequence
  Description of Artificial Sequence: Synthetic oligonucleotide
uaguauuggcauagcaggg

SEQ ID NO: 1943167 - RNA, 19 nt, Artificial Sequence
  Description of Artificial Sequence: Synthetic oligonucleotide
aagcgaugcacagaacacc

SEQ ID NO: 1943168 - RNA, 19 nt, Artificial Sequence
  Description of Artificial Sequence: Synthetic oligonucleotide
agucugaucaucauaguag

SEQ ID NO: 1943169 - RNA, 19 nt, Artificial Sequence
  Description of Artificial Sequence: Synthetic oligonucleotide
aucagauuaguauuggcau

SEQ ID NO: 1943170 - RNA, 19 nt, Artificial Sequence
  Description of Artificial Sequence: Synthetic oligonucleotide
cacaggacuaacagaagcg

SEQ ID NO: 1943171 - RNA, 19 nt, Artificial Sequence
  Description of Artificial Sequence: Synthetic oligonucleotide
cuuggugcaaggcaguacc

SEQ ID NO: 1943172 - RNA, 19 nt, Artificial Sequence
  Description of Artificial Sequence: Synthetic oligonucleotide
auagcagggagagucgucc

SEQ ID NO: 1943173 - RNA, 19 nt, Artificial Sequence
  Description of Artificial Sequence: Synthetic oligonucleotide
aucacaucugcuuggcaac

SEQ ID NO: 1943174 - RNA, 19 nt, Artificial Sequence
  Description of Artificial Sequence: Synthetic oligonucleotide
uuacuuuaauguuuuguaa

SEQ ID NO: 1943175 - RNA, 19 nt, Artificial Sequence
  Description of Artificial Sequence: Synthetic oligonucleotide
aguucacuuauaaacuuac

SEQ ID NO: 1943176 - RNA, 19 nt, Artificial Sequence
  Description of Artificial Sequence: Synthetic oligonucleotide
uguguuuacacaaggucau

SEQ ID NO: 1943177 - RNA, 19 nt, Artificial Sequence
  Description of Artificial Sequence: Synthetic oligonucleotide
uuacuaucuucaaaagaac

SEQ ID NO: 1943178 - RNA, 19 nt, Artificial Sequence
  Description of Artificial Sequence: Synthetic oligonucleotide
aaucaucagauuacuaucu

SEQ ID NO: 1943179 - RNA, 19 nt, Artificial Sequence
  Description of Artificial Sequence: Synthetic oligonucleotide
ucauaguagaucaggugac

SEQ ID NO: 1943180 - RNA, 19 nt, Artificial Sequence
  Description of Artificial Sequence: Synthetic oligonucleotide
uuuacagggugacacuaca

SEQ ID NO: 1943181 - RNA, 19 nt, Artificial Sequence
  Description of Artificial Sequence: Synthetic oligonucleotide
ugucacacauccaucuacc

SEQ ID NO: 1943182 - RNA, 19 nt, Artificial Sequence
  Description of Artificial Sequence: Synthetic oligonucleotide
uguuuacacaaggucaucc

SEQ ID NO: 1943183 - RNA, 19 nt, Artificial Sequence
  Description of Artificial Sequence: Synthetic oligonucleotide
auaaguucacuuauaaacu

SEQ ID NO: 1943184 - RNA, 19 nt, Artificial Sequence
  Description of Artificial Sequence: Synthetic oligonucleotide
caaucaucagauuacuauc

SEQ ID NO: 1943185 - RNA, 19 nt, Artificial Sequence
  Description of Artificial Sequence: Synthetic oligonucleotide
aaaucguacucugucggag

SEQ ID NO: 1943186 - RNA, 19 nt, Artificial Sequence
  Description of Artificial Sequence: Synthetic oligonucleotide
gacgaucugcagcagacag

SEQ ID NO: 1943187 - RNA, 19 nt, Artificial Sequence
  Description of Artificial Sequence: Synthetic oligonucleotide
ccuuaauuaaguacuauac

SEQ ID NO: 1943188 - RNA, 19 nt, Artificial Sequence
  Description of Artificial Sequence: Synthetic oligonucleotide
caucagauuacuaucuuca

SEQ ID NO: 1943189 - RNA, 19 nt, Artificial Sequence
  Description of Artificial Sequence: Synthetic oligonucleotide
auauugaugcaguccacug

SEQ ID NO: 1943190 - RNA, 19 nt, Artificial Sequence
  Description of Artificial Sequence: Synthetic oligonucleotide
acagcauacuuccaggccu

SEQ ID NO: 1943191 - RNA, 19 nt, Artificial Sequence
  Description of Artificial Sequence: Synthetic oligonucleotide
caaaucaauuauugcacac

SEQ ID NO: 1943192 - RNA, 19 nt, Artificial Sequence
  Description of Artificial Sequence: Synthetic oligonucleotide
gaaugguaacauugugagg

SEQ ID NO: 1943193 - RNA, 19 nt, Artificial Sequence
  Description of Artificial Sequence: Synthetic oligonucleotide
aacggguguguuuacacaa

SEQ ID NO: 1943194 - RNA, 19 nt, Artificial Sequence
  Description of Artificial Sequence: Synthetic oligonucleotide
guaaguaaagcauggagcu

SEQ ID NO: 1943195 - RNA, 19 nt, Artificial Sequence
  Description of Artificial Sequence: Synthetic oligonucleotide
gauuaguauuggcauagca

SEQ ID NO: 1943196 - RNA, 19 nt, Artificial Sequence
  Description of Artificial Sequence: Synthetic oligonucleotide
uggaccuuauccucuauac

SEQ ID NO: 1943197 - RNA, 19 nt, Artificial Sequence
  Description of Artificial Sequence: Synthetic oligonucleotide
caucagauuaguauuggca

SEQ ID NO: 1943198 - RNA, 19 nt, Artificial Sequence
  Description of Artificial Sequence: Synthetic oligonucleotide
uaaacggguguguuuacac

SEQ ID NO: 1943199 - RNA, 19 nt, Artificial Sequence
  Description of Artificial Sequence: Synthetic oligonucleotide
cuaccagagaugacaaagc

SEQ ID NO: 1943200 - RNA, 19 nt, Artificial Sequence
  Description of Artificial Sequence: Synthetic oligonucleotide
uaacagaagcgaugcacag

SEQ ID NO: 1943201 - RNA, 19 nt, Artificial Sequence
  Description of Artificial Sequence: Synthetic oligonucleotide
aagaaagacuuggugcaag

SEQ ID NO: 1943202 - RNA, 19 nt, Artificial Sequence
  Description of Artificial Sequence: Synthetic oligonucleotide
aggaaaacgccgugggcac

SEQ ID NO: 1943203 - RNA, 19 nt, Artificial Sequence
  Description of Artificial Sequence: Synthetic oligonucleotide
aaguaaagcauggagcuuu

SEQ ID NO: 1943204 - RNA, 19 nt, Artificial Sequence
  Description of Artificial Sequence: Synthetic oligonucleotide
cucuaagaaagacuuggug

SEQ ID NO: 1943205 - RNA, 19 nt, Artificial Sequence
  Description of Artificial Sequence: Synthetic oligonucleotide
acacuugucacaaacagaa

SEQ ID NO: 1943206 - RNA, 19 nt, Artificial Sequence
  Description of Artificial Sequence: Synthetic oligonucleotide
uauccucuauacucugccg

SEQ ID NO: 1943207 - RNA, 19 nt, Artificial Sequence
  Description of Artificial Sequence: Synthetic oligonucleotide
ucggcagacgaucugcagc

SEQ ID NO: 1943208 - RNA, 19 nt, Artificial Sequence
  Description of Artificial Sequence: Synthetic oligonucleotide
ugcaggucggucacaauca

SEQ ID NO: 1943209 - RNA, 19 nt, Artificial Sequence
  Description of Artificial Sequence: Synthetic oligonucleotide
acuuacuuuaauguuuugu

SEQ ID NO: 1943210 - RNA, 19 nt, Artificial Sequence
  Description of Artificial Sequence: Synthetic oligonucleotide
cacaggauguaaaaucaac

SEQ ID NO: 1943211 - RNA, 19 nt, Artificial Sequence
  Description of Artificial Sequence: Synthetic oligonucleotide
cauggagcuuuaagaaugg

SEQ ID NO: 1943212 - RNA, 19 nt, Artificial Sequence
  Description of Artificial Sequence: Synthetic oligonucleotide
ucaucagauuacuaucuuc

SEQ ID NO: 1943213 - RNA, 19 nt, Artificial Sequence
  Description of Artificial Sequence: Synthetic oligonucleotide
caucauaguagaucaggug

SEQ ID NO: 1943214 - RNA, 19 nt, Artificial Sequence
  Description of Artificial Sequence: Synthetic oligonucleotide
uagagugagauuucacagu

SEQ ID NO: 1943215 - RNA, 19 nt, Artificial Sequence
  Description of Artificial Sequence: Synthetic oligonucleotide
aaacggguguguuuacaca

SEQ ID NO: 1943216 - RNA, 19 nt, Artificial Sequence
  Description of Artificial Sequence: Synthetic oligonucleotide
aacaccuugaaggcucuag

SEQ ID NO: 1943217 - RNA, 19 nt, Artificial Sequence
  Description of Artificial Sequence: Synthetic oligonucleotide
uccacuggcauguggaccu

SEQ ID NO: 1943218 - RNA, 19 nt, Artificial Sequence
  Description of Artificial Sequence: Synthetic oligonucleotide
ucgucccuuaauuaaguac

SEQ ID NO: 1943219 - RNA, 19 nt, Artificial Sequence
  Description of Artificial Sequence: Synthetic oligonucleotide
ugaaucuucuuaccacacu

SEQ ID NO: 1943220 - RNA, 19 nt, Artificial Sequence
  Description of Artificial Sequence: Synthetic oligonucleotide
guauuggcauagcagggag

SEQ ID NO: 1943221 - RNA, 19 nt, Artificial Sequence
  Description of Artificial Sequence: Synthetic oligonucleotide
caauuauugcacacaggac

SEQ ID NO: 1943222 - RNA, 19 nt, Artificial Sequence
  Description of Artificial Sequence: Synthetic oligonucleotide
uccucuauacucugccgag

SEQ ID NO: 1943223 - RNA, 19 nt, Artificial Sequence
  Description of Artificial Sequence: Synthetic oligonucleotide
agagucgucccuuaauuaa

SEQ ID NO: 1943224 - RNA, 19 nt, Artificial Sequence
  Description of Artificial Sequence: Synthetic oligonucleotide
cugaucaucauaguagauc

SEQ ID NO: 1943225 - RNA, 19 nt, Artificial Sequence
  Description of Artificial Sequence: Synthetic oligonucleotide
uuuguaaguaaagcaugga

SEQ ID NO: 1943226 - RNA, 19 nt, Artificial Sequence
  Description of Artificial Sequence: Synthetic oligonucleotide
cuaacagaagcgaugcaca

SEQ ID NO: 1943227 - RNA, 19 nt, Artificial Sequence
  Description of Artificial Sequence: Synthetic oligonucleotide
uggccuuuuaaacgggugu

SEQ ID NO: 1943228 - RNA, 19 nt, Artificial Sequence
  Description of Artificial Sequence: Synthetic oligonucleotide
ugacacuacaagccaucag

SEQ ID NO: 1943229 - RNA, 19 nt, Artificial Sequence
  Description of Artificial Sequence: Synthetic oligonucleotide
aaacuuacuuuaauguuuu

SEQ ID NO: 1943230 - RNA, 19 nt, Artificial Sequence
  Description of Artificial Sequence: Synthetic oligonucleotide
uucucugugguaccaugca

SEQ ID NO: 1943231 - RNA, 19 nt, Artificial Sequence
  Description of Artificial Sequence: Synthetic oligonucleotide
ugguuuucccgucucggca

SEQ ID NO: 1943232 - RNA, 19 nt, Artificial Sequence
  Description of Artificial Sequence: Synthetic oligonucleotide
acuugauuggcaggcugcc

SEQ ID NO: 1943233 - RNA, 19 nt, Artificial Sequence
  Description of Artificial Sequence: Synthetic oligonucleotide
cagaccacaggucaaacca

SEQ ID NO: 1943234 - RNA, 19 nt, Artificial Sequence
  Description of Artificial Sequence: Synthetic oligonucleotide
caugcggauauugaugcag

SEQ ID NO: 1943235 - RNA, 19 nt, Artificial Sequence
  Description of Artificial Sequence: Synthetic oligonucleotide
aguuaaugucaagaaguug

SEQ ID NO: 1943236 - RNA, 19 nt, Artificial Sequence
  Description of Artificial Sequence: Synthetic oligonucleotide
aguacccugaggaacuccg

SEQ ID NO: 1943237 - RNA, 19 nt, Artificial Sequence
  Description of Artificial Sequence: Synthetic oligonucleotide
auccucuauacucugccga

SEQ ID NO: 1943238 - RNA, 19 nt, Artificial Sequence
  Description of Artificial Sequence: Synthetic oligonucleotide
ucagauuaguauuggcaua

SEQ ID NO: 1943239 - RNA, 19 nt, Artificial Sequence
  Description of Artificial Sequence: Synthetic oligonucleotide
aacuuacuuuaauguuuug

SEQ ID NO: 1943240 - RNA, 19 nt, Artificial Sequence
  Description of Artificial Sequence: Synthetic oligonucleotide
ucuauacucugccgagucu

SEQ ID NO: 1943241 - RNA, 19 nt, Artificial Sequence
  Description of Artificial Sequence: Synthetic oligonucleotide
auuuacagggugacacuac

SEQ ID NO: 1943242 - RNA, 19 nt, Artificial Sequence
  Description of Artificial Sequence: Synthetic oligonucleotide
uaccgcucacggaugauga

SEQ ID NO: 1943243 - RNA, 19 nt, Artificial Sequence
  Description of Artificial Sequence: Synthetic oligonucleotide
aacugaggucuagagugag

SEQ ID NO: 1943244 - RNA, 19 nt, Artificial Sequence
  Description of Artificial Sequence: Synthetic oligonucleotide
guuuacacaaggucaucca

SEQ ID NO: 1943245 - RNA, 19 nt, Artificial Sequence
  Description of Artificial Sequence: Synthetic oligonucleotide
gacacucaugccccaugcg

SEQ ID NO: 1943246 - RNA, 19 nt, Artificial Sequence
  Description of Artificial Sequence: Synthetic oligonucleotide
ugucauugucucgguaccg

SEQ ID NO: 1943247 - RNA, 19 nt, Artificial Sequence
  Description of Artificial Sequence: Synthetic oligonucleotide
ggaguagccaggaaaacgc

SEQ ID NO: 1943248 - RNA, 19 nt, Artificial Sequence
  Description of Artificial Sequence: Synthetic oligonucleotide
cacagcauacuuccaggcc

SEQ ID NO: 1943249 - RNA, 19 nt, Artificial Sequence
  Description of Artificial Sequence: Synthetic oligonucleotide
ggagcuuuaagaaugguaa

SEQ ID NO: 1943250 - RNA, 19 nt, Artificial Sequence
  Description of Artificial Sequence: Synthetic oligonucleotide
cuaggaguagccaggaaaa

SEQ ID NO: 1943251 - RNA, 19 nt, Artificial Sequence
  Description of Artificial Sequence: Synthetic oligonucleotide
cauccaucuaccagagaug

SEQ ID NO: 1943252 - RNA, 19 nt, Artificial Sequence
  Description of Artificial Sequence: Synthetic oligonucleotide
auaucccgacacucaugcc

SEQ ID NO: 1943253 - RNA, 19 nt, Artificial Sequence
  Description of Artificial Sequence: Synthetic oligonucleotide
gagucgucccuuaauuaag

SEQ ID NO: 1943254 - RNA, 19 nt, Artificial Sequence
  Description of Artificial Sequence: Synthetic oligonucleotide
gauauguucaagacuugaa

SEQ ID NO: 1943255 - RNA, 19 nt, Artificial Sequence
  Description of Artificial Sequence: Synthetic oligonucleotide
aucaauuauugcacacagg

SEQ ID NO: 1943256 - RNA, 19 nt, Artificial Sequence
  Description of Artificial Sequence: Synthetic oligonucleotide
auauggagauauguucaag

SEQ ID NO: 1943257 - RNA, 19 nt, Artificial Sequence
  Description of Artificial Sequence: Synthetic oligonucleotide
gacuugauuggcaggcugc

SEQ ID NO: 1943258 - RNA, 19 nt, Artificial Sequence
  Description of Artificial Sequence: Synthetic oligonucleotide
auaguagaucaggugacca

SEQ ID NO: 1943259 - RNA, 19 nt, Artificial Sequence
  Description of Artificial Sequence: Synthetic oligonucleotide
aucccgacacucaugcccc

SEQ ID NO: 1943260 - RNA, 19 nt, Artificial Sequence
  Description of Artificial Sequence: Synthetic oligonucleotide
gucaacaaguccccuagga

SEQ ID NO: 1943261 - RNA, 19 nt, Artificial Sequence
  Description of Artificial Sequence: Synthetic oligonucleotide
uggauaucccgacacucau

SEQ ID NO: 1943262 - RNA, 19 nt, Artificial Sequence
  Description of Artificial Sequence: Synthetic oligonucleotide
gagucugaucaucauagua

SEQ ID NO: 1943263 - RNA, 19 nt, Artificial Sequence
  Description of Artificial Sequence: Synthetic oligonucleotide
cauaguagaucaggugacc

SEQ ID NO: 1943264 - RNA, 19 nt, Artificial Sequence
  Description of Artificial Sequence: Synthetic oligonucleotide
uacucugucggagcaacca

SEQ ID NO: 1943265 - RNA, 19 nt, Artificial Sequence
  Description of Artificial Sequence: Synthetic oligonucleotide
aggacuaacagaagcgaug

SEQ ID NO: 1943266 - RNA, 19 nt, Artificial Sequence
  Description of Artificial Sequence: Synthetic oligonucleotide
caucacaucugcuuggcaa

SEQ ID NO: 1943267 - RNA, 19 nt, Artificial Sequence
  Description of Artificial Sequence: Synthetic oligonucleotide
aguauuggcauagcaggga

SEQ ID NO: 1943268 - RNA, 19 nt, Artificial Sequence
  Description of Artificial Sequence: Synthetic oligonucleotide
aaguccccuaggaguagcc

SEQ ID NO: 1943269 - RNA, 19 nt, Artificial Sequence
  Description of Artificial Sequence: Synthetic oligonucleotide
uuacagggugacacuacaa

SEQ ID NO: 1943270 - RNA, 19 nt, Artificial Sequence
  Description of Artificial Sequence: Synthetic oligonucleotide
ugucucauauggagauaug

SEQ ID NO: 1943271 - RNA, 19 nt, Artificial Sequence
  Description of Artificial Sequence: Synthetic oligonucleotide
ugggcaccaucacaucugc

SEQ ID NO: 1943272 - RNA, 19 nt, Artificial Sequence
  Description of Artificial Sequence: Synthetic oligonucleotide
uucccgucucggcagacga

SEQ ID NO: 1943273 - RNA, 19 nt, Artificial Sequence
  Description of Artificial Sequence: Synthetic oligonucleotide
aacgccgugggcaccauca

SEQ ID NO: 1943274 - RNA, 19 nt, Artificial Sequence
  Description of Artificial Sequence: Synthetic oligonucleotide
gcauggagcuuuaagaaug

SEQ ID NO: 1943275 - RNA, 19 nt, Artificial Sequence
  Description of Artificial Sequence: Synthetic oligonucleotide
ggacuaacagaagcgaugc

SEQ ID NO: 1943276 - RNA, 19 nt, Artificial Sequence
  Description of Artificial Sequence: Synthetic oligonucleotide
uaguagaucaggugaccau

SEQ ID NO: 1943277 - RNA, 19 nt, Artificial Sequence
  Description of Artificial Sequence: Synthetic oligonucleotide
aucguacucugucggagca

SEQ ID NO: 1943278 - RNA, 19 nt, Artificial Sequence
  Description of Artificial Sequence: Synthetic oligonucleotide
uacccugaggaacuccggu

SEQ ID NO: 1943279 - RNA, 19 nt, Artificial Sequence
  Description of Artificial Sequence: Synthetic oligonucleotide
ucauugucucgguaccgcu

SEQ ID NO: 1943280 - RNA, 19 nt, Artificial Sequence
  Description of Artificial Sequence: Synthetic oligonucleotide
uuggugcaaggcaguaccc

SEQ ID NO: 1943281 - RNA, 19 nt, Artificial Sequence
  Description of Artificial Sequence: Synthetic oligonucleotide
gaucaucauaguagaucag

SEQ ID NO: 1943282 - RNA, 19 nt, Artificial Sequence
  Description of Artificial Sequence: Synthetic oligonucleotide
caggcaaucgucugugcuc

SEQ ID NO: 1943283 - RNA, 19 nt, Artificial Sequence
  Description of Artificial Sequence: Synthetic oligonucleotide
acuuggugcaaggcaguac

SEQ ID NO: 1943284 - RNA, 19 nt, Artificial Sequence
  Description of Artificial Sequence: Synthetic oligonucleotide
guaccaugcaggucgguca

SEQ ID NO: 1943285 - RNA, 19 nt, Artificial Sequence
  Description of Artificial Sequence: Synthetic oligonucleotide
ggguuucccaucuggaggc

SEQ ID NO: 1943286 - RNA, 19 nt, Artificial Sequence
  Description of Artificial Sequence: Synthetic oligonucleotide
aaugcccugcaaaucaauu

SEQ ID NO: 1943287 - RNA, 19 nt, Artificial Sequence
  Description of Artificial Sequence: Synthetic oligonucleotide
aucgucugugcucucugca

SEQ ID NO: 1943288 - RNA, 19 nt, Artificial Sequence
  Description of Artificial Sequence: Synthetic oligonucleotide
aucagaccacaggucaaac

SEQ ID NO: 1943289 - RNA, 19 nt, Artificial Sequence
  Description of Artificial Sequence: Synthetic oligonucleotide
uuacauuuacagggugaca

SEQ ID NO: 1943290 - RNA, 19 nt, Artificial Sequence
  Description of Artificial Sequence: Synthetic oligonucleotide
cuuaccacacucauucaua

SEQ ID NO: 1943291 - RNA, 19 nt, Artificial Sequence
  Description of Artificial Sequence: Synthetic oligonucleotide
aacagagaccccagggcca

SEQ ID NO: 1943292 - RNA, 19 nt, Artificial Sequence
  Description of Artificial Sequence: Synthetic oligonucleotide
gaggucuagagugagauuu

SEQ ID NO: 1943293 - RNA, 19 nt, Artificial Sequence
  Description of Artificial Sequence: Synthetic oligonucleotide
ugccccaugcggauauuga

SEQ ID NO: 1943294 - RNA, 19 nt, Artificial Sequence
  Description of Artificial Sequence: Synthetic oligonucleotide
aucaucagauuacuaucuu

SEQ ID NO: 1943295 - RNA, 19 nt, Artificial Sequence
  Description of Artificial Sequence: Synthetic oligonucleotide
cagagacugaugguuuucc

SEQ ID NO: 1943296 - RNA, 19 nt, Artificial Sequence
  Description of Artificial Sequence: Synthetic oligonucleotide
ggaacuccgguucucacuc

SEQ ID NO: 1943297 - RNA, 19 nt, Artificial Sequence
  Description of Artificial Sequence: Synthetic oligonucleotide
agcgaugcacagaacaccu

SEQ ID NO: 1943298 - RNA, 19 nt, Artificial Sequence
  Description of Artificial Sequence: Synthetic oligonucleotide
uucagccagaaaugggcau

SEQ ID NO: 1943299 - RNA, 19 nt, Artificial Sequence
  Description of Artificial Sequence: Synthetic oligonucleotide
aagcacauuucagccagaa

SEQ ID NO: 1943300 - RNA, 19 nt, Artificial Sequence
  Description of Artificial Sequence: Synthetic oligonucleotide
gaugcacagaacaccuuga

SEQ ID NO: 1943301 - RNA, 19 nt, Artificial Sequence
  Description of Artificial Sequence: Synthetic oligonucleotide
gcaaaucaauuauugcaca

SEQ ID NO: 1943302 - RNA, 19 nt, Artificial Sequence
  Description of Artificial Sequence: Synthetic oligonucleotide
caugcugucacacauccau

SEQ ID NO: 1943303 - RNA, 19 nt, Artificial Sequence
  Description of Artificial Sequence: Synthetic oligonucleotide
cauauggagauauguucaa

SEQ ID NO: 1943304 - RNA, 19 nt, Artificial Sequence
  Description of Artificial Sequence: Synthetic oligonucleotide
aaacgccgugggcaccauc

SEQ ID NO: 1943305 - RNA, 19 nt, Artificial Sequence
  Description of Artificial Sequence: Synthetic oligonucleotide
uuucccgucucggcagacg

SEQ ID NO: 1943306 - RNA, 19 nt, Artificial Sequence
  Description of Artificial Sequence: Synthetic oligonucleotide
gucauugucucgguaccgc

SEQ ID NO: 1943307 - RNA, 19 nt, Artificial Sequence
  Description of Artificial Sequence: Synthetic oligonucleotide
uacucugccgagucugauc

SEQ ID NO: 1943308 - RNA, 19 nt, Artificial Sequence
  Description of Artificial Sequence: Synthetic oligonucleotide
uccgguucucacucacagc

SEQ ID NO: 1943309 - RNA, 19 nt, Artificial Sequence
  Description of Artificial Sequence: Synthetic oligonucleotide
cucugucggagcaaccauc

SEQ ID NO: 1943310 - RNA, 19 nt, Artificial Sequence
  Description of Artificial Sequence: Synthetic oligonucleotide
ugcggauauugaugcaguc

SEQ ID NO: 1943311 - RNA, 19 nt, Artificial Sequence
  Description of Artificial Sequence: Synthetic oligonucleotide
accgcucacggaugaugac

SEQ ID NO: 1943312 - RNA, 19 nt, Artificial Sequence
  Description of Artificial Sequence: Synthetic oligonucleotide
gagagucgucccuuaauua

SEQ ID NO: 1943313 - RNA, 19 nt, Artificial Sequence
  Description of Artificial Sequence: Synthetic oligonucleotide
caaucgucugugcucucug

SEQ ID NO: 1943314 - RNA, 19 nt, Artificial Sequence
  Description of Artificial Sequence: Synthetic oligonucleotide
cagaaaugcccugcaaauc

SEQ ID NO: 1943315 - RNA, 19 nt, Artificial Sequence
  Description of Artificial Sequence: Synthetic oligonucleotide
caaaucguacucugucgga

SEQ ID NO: 1943316 - RNA, 19 nt, Artificial Sequence
  Description of Artificial Sequence: Synthetic oligonucleotide
gaaaacgccgugggcacca

SEQ ID NO: 1943317 - RNA, 19 nt, Artificial Sequence
  Description of Artificial Sequence: Synthetic oligonucleotide
uggugcaaggcaguacccu

SEQ ID NO: 1943318 - RNA, 19 nt, Artificial Sequence
  Description of Artificial Sequence: Synthetic oligonucleotide
gucucggcagacgaucugc

SEQ ID NO: 1943319 - RNA, 19 nt, Artificial Sequence
  Description of Artificial Sequence: Synthetic oligonucleotide
cuagaagacccagaacaga

SEQ ID NO: 1943320 - RNA, 19 nt, Artificial Sequence
  Description of Artificial Sequence: Synthetic oligonucleotide
ucgguaccgcucacggaug

SEQ ID NO: 1943321 - RNA, 19 nt, Artificial Sequence
  Description of Artificial Sequence: Synthetic oligonucleotide
uaggaguagccaggaaaac

SEQ ID NO: 1943322 - RNA, 19 nt, Artificial Sequence
  Description of Artificial Sequence: Synthetic oligonucleotide
acucugucggagcaaccau

SEQ ID NO: 1943323 - RNA, 19 nt, Artificial Sequence
  Description of Artificial Sequence: Synthetic oligonucleotide
ucccuuaauuaaguacuau

SEQ ID NO: 1943324 - RNA, 19 nt, Artificial Sequence
  Description of Artificial Sequence: Synthetic oligonucleotide
gucucauauggagauaugu

SEQ ID NO: 1943325 - RNA, 19 nt, Artificial Sequence
  Description of Artificial Sequence: Synthetic oligonucleotide
acaggucaaaccaauucuu

SEQ ID NO: 1943326 - RNA, 19 nt, Artificial Sequence
  Description of Artificial Sequence: Synthetic oligonucleotide
uuauugcacacaggacuaa

SEQ ID NO: 1943327 - RNA, 19 nt, Artificial Sequence
  Description of Artificial Sequence: Synthetic oligonucleotide
ugguaacauugugaggaaa

SEQ ID NO: 1943328 - RNA, 19 nt, Artificial Sequence
  Description of Artificial Sequence: Synthetic oligonucleotide
agccagaaaugggcauugc

SEQ ID NO: 1943329 - RNA, 19 nt, Artificial Sequence
  Description of Artificial Sequence: Synthetic oligonucleotide
agucgucccuuaauuaagu

SEQ ID NO: 1943330 - RNA, 19 nt, Artificial Sequence
  Description of Artificial Sequence: Synthetic oligonucleotide
guaccgcucacggaugaug

SEQ ID NO: 1943331 - RNA, 19 nt, Artificial Sequence
  Description of Artificial Sequence: Synthetic oligonucleotide
gacuaacagaagcgaugca

SEQ ID NO: 1943332 - RNA, 19 nt, Artificial Sequence
  Description of Artificial Sequence: Synthetic oligonucleotide
auggccuuuuaaacgggug

SEQ ID NO: 1943333 - RNA, 19 nt, Artificial Sequence
  Description of Artificial Sequence: Synthetic oligonucleotide
uuccagcgcuucaaaucgu

SEQ ID NO: 1943334 - RNA, 19 nt, Artificial Sequence
  Description of Artificial Sequence: Synthetic oligonucleotide
ucucgguaccgcucacgga

SEQ ID NO: 1943335 - RNA, 19 nt, Artificial Sequence
  Description of Artificial Sequence: Synthetic oligonucleotide
ugaggucuagagugagauu

SEQ ID NO: 1943336 - RNA, 19 nt, Artificial Sequence
  Description of Artificial Sequence: Synthetic oligonucleotide
gaccaucagaccacagguc

SEQ ID NO: 1943337 - RNA, 19 nt, Artificial Sequence
  Description of Artificial Sequence: Synthetic oligonucleotide
cucacggaugaugacuuga

SEQ ID NO: 1943338 - RNA, 19 nt, Artificial Sequence
  Description of Artificial Sequence: Synthetic oligonucleotide
uguggaccuuauccucuau

SEQ ID NO: 1943339 - RNA, 19 nt, Artificial Sequence
  Description of Artificial Sequence: Synthetic oligonucleotide
guacccugaggaacuccgg

SEQ ID NO: 1943340 - RNA, 19 nt, Artificial Sequence
  Description of Artificial Sequence: Synthetic oligonucleotide
ggccuuuuaaacgggugug

SEQ ID NO: 1943341 - RNA, 19 nt, Artificial Sequence
  Description of Artificial Sequence: Synthetic oligonucleotide
ccuaggaguagccaggaaa

SEQ ID NO: 1943342 - RNA, 19 nt, Artificial Sequence
  Description of Artificial Sequence: Synthetic oligonucleotide
augcggauauugaugcagu

SEQ ID NO: 1943343 - RNA, 19 nt, Artificial Sequence
  Description of Artificial Sequence: Synthetic oligonucleotide
acgccgugggcaccaucac

SEQ ID NO: 1943344 - RNA, 19 nt, Artificial Sequence
  Description of Artificial Sequence: Synthetic oligonucleotide
acggguguguuuacacaag

SEQ ID NO: 1943345 - RNA, 19 nt, Artificial Sequence
  Description of Artificial Sequence: Synthetic oligonucleotide
cucgguaccgcucacggau

SEQ ID NO: 1943346 - RNA, 19 nt, Artificial Sequence
  Description of Artificial Sequence: Synthetic oligonucleotide
aaagcacauuucagccaga

SEQ ID NO: 1943347 - RNA, 19 nt, Artificial Sequence
  Description of Artificial Sequence: Synthetic oligonucleotide
caggucggucacaaucauc

SEQ ID NO: 1943348 - RNA, 19 nt, Artificial Sequence
  Description of Artificial Sequence: Synthetic oligonucleotide
gugacacuacaagccauca

SEQ ID NO: 1943349 - RNA, 19 nt, Artificial Sequence
  Description of Artificial Sequence: Synthetic oligonucleotide
caucagaaccaugcuguca

SEQ ID NO: 1943350 - RNA, 19 nt, Artificial Sequence
  Description of Artificial Sequence: Synthetic oligonucleotide
caguuaaugucaagaaguu

SEQ ID NO: 1943351 - RNA, 19 nt, Artificial Sequence
  Description of Artificial Sequence: Synthetic oligonucleotide
ccccaugcggauauugaug

SEQ ID NO: 1943352 - RNA, 19 nt, Artificial Sequence
  Description of Artificial Sequence: Synthetic oligonucleotide
gguaccaugcaggucgguc

SEQ ID NO: 1943353 - RNA, 19 nt, Artificial Sequence
  Description of Artificial Sequence: Synthetic oligonucleotide
cccuuaauuaaguacuaua

SEQ ID NO: 1943354 - RNA, 19 nt, Artificial Sequence
  Description of Artificial Sequence: Synthetic oligonucleotide
ggugacacuacaagccauc

SEQ ID NO: 1943355 - RNA, 19 nt, Artificial Sequence
  Description of Artificial Sequence: Synthetic oligonucleotide
gcucuagaagacccagaac

SEQ ID NO: 1943356 - RNA, 19 nt, Artificial Sequence
  Description of Artificial Sequence: Synthetic oligonucleotide
ggucggucacaaucaucag

SEQ ID NO: 1943357 - RNA, 19 nt, Artificial Sequence
  Description of Artificial Sequence: Synthetic oligonucleotide
acugaggucuagagugaga

SEQ ID NO: 1943358 - RNA, 19 nt, Artificial Sequence
  Description of Artificial Sequence: Synthetic oligonucleotide
uugucucgguaccgcucac

SEQ ID NO: 1943359 - RNA, 19 nt, Artificial Sequence
  Description of Artificial Sequence: Synthetic oligonucleotide
guggaccuuauccucuaua

SEQ ID NO: 1943360 - RNA, 19 nt, Artificial Sequence
  Description of Artificial Sequence: Synthetic oligonucleotide
aguccccuaggaguagcca

SEQ ID NO: 1943361 - RNA, 19 nt, Artificial Sequence
  Description of Artificial Sequence: Synthetic oligonucleotide
caguacccugaggaacucc

SEQ ID NO: 1943362 - RNA, 19 nt, Artificial Sequence
  Description of Artificial Sequence: Synthetic oligonucleotide
gugguaccaugcaggucgg

SEQ ID NO: 1943363 - RNA, 19 nt, Artificial Sequence
  Description of Artificial Sequence: Synthetic oligonucleotide
gaacuccgguucucacuca

SEQ ID NO: 1943364 - RNA, 19 nt, Artificial Sequence
  Description of Artificial Sequence: Synthetic oligonucleotide
gucgucccuuaauuaagua

SEQ ID NO: 1943365 - RNA, 19 nt, Artificial Sequence
  Description of Artificial Sequence: Synthetic oligonucleotide
agaccacaggucaaaccaa

SEQ ID NO: 1943366 - RNA, 19 nt, Artificial Sequence
  Description of Artificial Sequence: Synthetic oligonucleotide
agggagagucgucccuuaa

SEQ ID NO: 1943367 - RNA, 19 nt, Artificial Sequence
  Description of Artificial Sequence: Synthetic oligonucleotide
ggauaucccgacacucaug

SEQ ID NO: 1943368 - RNA, 19 nt, Artificial Sequence
  Description of Artificial Sequence: Synthetic oligonucleotide
guguuuacacaaggucauc

SEQ ID NO: 1943369 - RNA, 19 nt, Artificial Sequence
  Description of Artificial Sequence: Synthetic oligonucleotide
cggguguguuuacacaagg

SEQ ID NO: 1943370 - RNA, 19 nt, Artificial Sequence
  Description of Artificial Sequence: Synthetic oligonucleotide
ggucuagagugagauuuca

SEQ ID NO: 1943371 - RNA, 19 nt, Artificial Sequence
  Description of Artificial Sequence: Synthetic oligonucleotide
cgucccuuaauuaaguacu

SEQ ID NO: 1943372 - RNA, 19 nt, Artificial Sequence
  Description of Artificial Sequence: Synthetic oligonucleotide
guacucugucggagcaacc

SEQ ID NO: 1943373 - RNA, 19 nt, Artificial Sequence
  Description of Artificial Sequence: Synthetic oligonucleotide
ccaagagcucucuaagaaa

SEQ ID NO: 1943374 - RNA, 19 nt, Artificial Sequence
  Description of Artificial Sequence: Synthetic oligonucleotide
ucguacucugucggagcaa

SEQ ID NO: 1943375 - RNA, 19 nt, Artificial Sequence
  Description of Artificial Sequence: Synthetic oligonucleotide
ggagagucgucccuuaauu

SEQ ID NO: 1943376 - RNA, 19 nt, Artificial Sequence
  Description of Artificial Sequence: Synthetic oligonucleotide
caugccuguggcugcccca

SEQ ID NO: 1943377 - RNA, 19 nt, Artificial Sequence
  Description of Artificial Sequence: Synthetic oligonucleotide
acugucucauauggagaua

SEQ ID NO: 1943378 - RNA, 19 nt, Artificial Sequence
  Description of Artificial Sequence: Synthetic oligonucleotide
ccagcgcuucaaaucguac

SEQ ID NO: 1943379 - RNA, 19 nt, Artificial Sequence
  Description of Artificial Sequence: Synthetic oligonucleotide
auacucugccgagucugau

SEQ ID NO: 1943380 - RNA, 19 nt, Artificial Sequence
  Description of Artificial Sequence: Synthetic oligonucleotide
ggaccuuauccucuauacu

SEQ ID NO: 1943381 - RNA, 19 nt, Artificial Sequence
  Description of Artificial Sequence: Synthetic oligonucleotide
gucccuuaauuaaguacua

SEQ ID NO: 1943382 - RNA, 19 nt, Artificial Sequence
  Description of Artificial Sequence: Synthetic oligonucleotide
ucccgucucggcagacgau

SEQ ID NO: 1943383 - RNA, 19 nt, Artificial Sequence
  Description of Artificial Sequence: Synthetic oligonucleotide
cgacacucaugccccaugc

SEQ ID NO: 1943384 - RNA, 19 nt, Artificial Sequence
  Description of Artificial Sequence: Synthetic oligonucleotide
cacucacagcauacuucca

SEQ ID NO: 1943385 - RNA, 19 nt, Artificial Sequence
  Description of Artificial Sequence: Synthetic oligonucleotide
ucccgacacucaugcccca

SEQ ID NO: 1943386 - RNA, 19 nt, Artificial Sequence
  Description of Artificial Sequence: Synthetic oligonucleotide
ccaucagaaccaugcuguc

SEQ ID NO: 1943387 - RNA, 19 nt, Artificial Sequence
  Description of Artificial Sequence: Synthetic oligonucleotide
aaaacgccgugggcaccau

SEQ ID NO: 1943388 - RNA, 19 nt, Artificial Sequence
  Description of Artificial Sequence: Synthetic oligonucleotide
ggaaaacgccgugggcacc

SEQ ID NO: 1943389 - RNA, 19 nt, Artificial Sequence
  Description of Artificial Sequence: Synthetic oligonucleotide
cguacucugucggagcaac

SEQ ID NO: 1943390 - RNA, 19 nt, Artificial Sequence
  Description of Artificial Sequence: Synthetic oligonucleotide
gcucacggaugaugacuug

SEQ ID NO: 1943391 - RNA, 19 nt, Artificial Sequence
  Description of Artificial Sequence: Synthetic oligonucleotide
gccgagucugaucaucaua

SEQ ID NO: 1943392 - RNA, 19 nt, Artificial Sequence
  Description of Artificial Sequence: Synthetic oligonucleotide
ccuccaucagauuaguauu

SEQ ID NO: 1943393 - RNA, 19 nt, Artificial Sequence
  Description of Artificial Sequence: Synthetic oligonucleotide
agacuugaacugaggucua

SEQ ID NO: 1943394 - RNA, 19 nt, Artificial Sequence
  Description of Artificial Sequence: Synthetic oligonucleotide
cugucggagcaaccaucca

SEQ ID NO: 1943395 - RNA, 19 nt, Artificial Sequence
  Description of Artificial Sequence: Synthetic oligonucleotide
cugcacagagacugauggu

SEQ ID NO: 1943396 - RNA, 19 nt, Artificial Sequence
  Description of Artificial Sequence: Synthetic oligonucleotide
ugguaccaugcaggucggu

SEQ ID NO: 1943397 - RNA, 19 nt, Artificial Sequence
  Description of Artificial Sequence: Synthetic oligonucleotide
cacugucauugucucggua

SEQ ID NO: 1943398 - RNA, 19 nt, Artificial Sequence
  Description of Artificial Sequence: Synthetic oligonucleotide
cggcagacgaucugcagca

SEQ ID NO: 1943399 - RNA, 19 nt, Artificial Sequence
  Description of Artificial Sequence: Synthetic oligonucleotide
cccgucucggcagacgauc

SEQ ID NO: 1943400 - RNA, 19 nt, Artificial Sequence
  Description of Artificial Sequence: Synthetic oligonucleotide
cagggagagucgucccuua

SEQ ID NO: 1943401 - RNA, 19 nt, Artificial Sequence
  Description of Artificial Sequence: Synthetic oligonucleotide
gggagagucgucccuuaau

SEQ ID NO: 1943402 - RNA, 19 nt, Artificial Sequence
  Description of Artificial Sequence: Synthetic oligonucleotide
cagcauacuuccaggccuu

SEQ ID NO: 1943403 - RNA, 19 nt, Artificial Sequence
  Description of Artificial Sequence: Synthetic oligonucleotide
ccaggcaaucgucugugcu

SEQ ID NO: 1943404 - RNA, 19 nt, Artificial Sequence
  Description of Artificial Sequence: Synthetic oligonucleotide
gccccaugcggauauugau

SEQ ID NO: 1943405 - RNA, 19 nt, Artificial Sequence
  Description of Artificial Sequence: Synthetic oligonucleotide
cucaugccccaugcggaua

SEQ ID NO: 1943406 - RNA, 19 nt, Artificial Sequence
  Description of Artificial Sequence: Synthetic oligonucleotide
ccaugcaggucggucacaa

SEQ ID NO: 1943407 - RNA, 19 nt, Artificial Sequence
  Description of Artificial Sequence: Synthetic oligonucleotide
cugugucaacaaguccccu

SEQ ID NO: 1943408 - RNA, 19 nt, Artificial Sequence
  Description of Artificial Sequence: Synthetic oligonucleotide
cgucucggcagacgaucug

SEQ ID NO: 1943409 - RNA, 19 nt, Artificial Sequence
  Description of Artificial Sequence: Synthetic oligonucleotide
ccgugggcaccaucacauc

SEQ ID NO: 1943410 - RNA, 19 nt, Artificial Sequence
  Description of Artificial Sequence: Synthetic oligonucleotide
cgugggcaccaucacaucu

SEQ ID NO: 1943411 - RNA, 19 nt, Artificial Sequence
  Description of Artificial Sequence: Synthetic oligonucleotide
gggugacacuacaagccau

SEQ ID NO: 1943412 - RNA, 19 nt, Artificial Sequence
  Description of Artificial Sequence: Synthetic oligonucleotide
ccgcucacggaugaugacu

SEQ ID NO: 1943413 - RNA, 19 nt, Artificial Sequence
  Description of Artificial Sequence: Synthetic oligonucleotide
ccccuaggaguagccagga

SEQ ID NO: 1943414 - RNA, 19 nt, Artificial Sequence
  Description of Artificial Sequence: Synthetic oligonucleotide
ccucuauacucugccgagu

SEQ ID NO: 1943415 - RNA, 19 nt, Artificial Sequence
  Description of Artificial Sequence: Synthetic oligonucleotide
cgguaccgcucacggauga

SEQ ID NO: 1943416 - RNA, 19 nt, Artificial Sequence
  Description of Artificial Sequence: Synthetic oligonucleotide
cgcucacggaugaugacuu

SEQ ID NO: 1943417 - RNA, 19 nt, Artificial Sequence
  Description of Artificial Sequence: Synthetic oligonucleotide
ccgucucggcagacgaucu

SEQ ID NO: 1943418 - RNA, 19 nt, Artificial Sequence
  Description of Artificial Sequence: Synthetic oligonucleotide
gguaccgcucacggaugau

SEQ ID NO: 1943419 - RNA, 19 nt, Artificial Sequence
  Description of Artificial Sequence: Synthetic oligonucleotide
cccgacacucaugccccau

SEQ ID NO: 1943420 - RNA, 19 nt, Artificial Sequence
  Description of Artificial Sequence: Synthetic oligonucleotide
aauucaucaacuuuuaucu

SEQ ID NO: 1943421 - RNA, 19 nt, Artificial Sequence
  Description of Artificial Sequence: Synthetic oligonucleotide
caugaaauggaaaagaggc

SEQ ID NO: 1943422 - RNA, 19 nt, Artificial Sequence
  Description of Artificial Sequence: Synthetic oligonucleotide
uuuaucuuuauugaugucg

SEQ ID NO: 1943423 - RNA, 19 nt, Artificial Sequence
  Description of Artificial Sequence: Synthetic oligonucleotide
aauuuaucuuuauugaugu

SEQ ID NO: 1943424 - RNA, 19 nt, Artificial Sequence
  Description of Artificial Sequence: Synthetic oligonucleotide
aaugaucuuaauucgaacu

SEQ ID NO: 1943425 - RNA, 19 nt, Artificial Sequence
  Description of Artificial Sequence: Synthetic oligonucleotide
aacgccacaaccgagaagg

SEQ ID NO: 1943426 - RNA, 19 nt, Artificial Sequence
  Description of Artificial Sequence: Synthetic oligonucleotide
uuuguuuuaggauucagac

SEQ ID NO: 1943427 - RNA, 19 nt, Artificial Sequence
  Description of Artificial Sequence: Synthetic oligonucleotide
uuuagaacaguucgaaugc

SEQ ID NO: 1943428 - RNA, 19 nt, Artificial Sequence
  Description of Artificial Sequence: Synthetic oligonucleotide
ugcgaauuuaucuuuauug

SEQ ID NO: 1943429 - RNA, 19 nt, Artificial Sequence
  Description of Artificial Sequence: Synthetic oligonucleotide
ugaacuuacagcuuuagaa

SEQ ID NO: 1943430 - RNA, 19 nt, Artificial Sequence
  Description of Artificial Sequence: Synthetic oligonucleotide
aauccaacuccucccaagc

SEQ ID NO: 1943431 - RNA, 19 nt, Artificial Sequence
  Description of Artificial Sequence: Synthetic oligonucleotide
cuuuagaacaguucgaaug

SEQ ID NO: 1943432 - RNA, 19 nt, Artificial Sequence
  Description of Artificial Sequence: Synthetic oligonucleotide
uugcaggugaaucuggucg

SEQ ID NO: 1943433 - RNA, 19 nt, Artificial Sequence
  Description of Artificial Sequence: Synthetic oligonucleotide
cauugugggacguaaagcg

SEQ ID NO: 1943434 - RNA, 19 nt, Artificial Sequence
  Description of Artificial Sequence: Synthetic oligonucleotide
aguucgaaugcuuuucccc

SEQ ID NO: 1943435 - RNA, 19 nt, Artificial Sequence
  Description of Artificial Sequence: Synthetic oligonucleotide
uuaauuuggucgaaggaca

SEQ ID NO: 1943436 - RNA, 19 nt, Artificial Sequence
  Description of Artificial Sequence: Synthetic oligonucleotide
aaaagaggcuuuccuuugc

SEQ ID NO: 1943437 - RNA, 19 nt, Artificial Sequence
  Description of Artificial Sequence: Synthetic oligonucleotide
agacagcacagguagaacc

SEQ ID NO: 1943438 - RNA, 19 nt, Artificial Sequence
  Description of Artificial Sequence: Synthetic oligonucleotide
auuuuagcaacagagaugu

SEQ ID NO: 1943439 - RNA, 19 nt, Artificial Sequence
  Description of Artificial Sequence: Synthetic oligonucleotide
uauccaaaggugccgaagg

SEQ ID NO: 1943440 - RNA, 19 nt, Artificial Sequence
  Description of Artificial Sequence: Synthetic oligonucleotide
augaguacuuccuggaugg

SEQ ID NO: 1943441 - RNA, 19 nt, Artificial Sequence
  Description of Artificial Sequence: Synthetic oligonucleotide
augucgaugccaaugaucc

SEQ ID NO: 1943442 - RNA, 19 nt, Artificial Sequence
  Description of Artificial Sequence: Synthetic oligonucleotide
aguaucaccugccuucacc

SEQ ID NO: 1943443 - RNA, 19 nt, Artificial Sequence
  Description of Artificial Sequence: Synthetic oligonucleotide
uuguuaauuuggucgaagg

SEQ ID NO: 1943444 - RNA, 19 nt, Artificial Sequence
  Description of Artificial Sequence: Synthetic oligonucleotide
ucaugucccaagaucaccg

SEQ ID NO: 1943445 - RNA, 19 nt, Artificial Sequence
  Description of Artificial Sequence: Synthetic oligonucleotide
aagggucaauuuuagcaac

SEQ ID NO: 1943446 - RNA, 19 nt, Artificial Sequence
  Description of Artificial Sequence: Synthetic oligonucleotide
uguacucagaaaaugugcu

SEQ ID NO: 1943447 - RNA, 19 nt, Artificial Sequence
  Description of Artificial Sequence: Synthetic oligonucleotide
uuggucgaaggacagauug

SEQ ID NO: 1943448 - RNA, 19 nt, Artificial Sequence
  Description of Artificial Sequence: Synthetic oligonucleotide
gguuaauacauucaguggc

SEQ ID NO: 1943449 - RNA, 19 nt, Artificial Sequence
  Description of Artificial Sequence: Synthetic oligonucleotide
uauggagagaggcuuuccg

SEQ ID NO: 1943450 - RNA, 19 nt, Artificial Sequence
  Description of Artificial Sequence: Synthetic oligonucleotide
uguuaauuuggucgaagga

SEQ ID NO: 1943451 - RNA, 19 nt, Artificial Sequence
  Description of Artificial Sequence: Synthetic oligonucleotide
acaaaauuugcauucucca

SEQ ID NO: 1943452 - RNA, 19 nt, Artificial Sequence
  Description of Artificial Sequence: Synthetic oligonucleotide
uuaauucgaacuucaugag

SEQ ID NO: 1943453 - RNA, 19 nt, Artificial Sequence
  Description of Artificial Sequence: Synthetic oligonucleotide
aaagcgggaugacaguauc

SEQ ID NO: 1943454 - RNA, 19 nt, Artificial Sequence
  Description of Artificial Sequence: Synthetic oligonucleotide
agacuuuauccaaaggugc

SEQ ID NO: 1943455 - RNA, 19 nt, Artificial Sequence
  Description of Artificial Sequence: Synthetic oligonucleotide
uuuggacauauauucagac

SEQ ID NO: 1943456 - RNA, 19 nt, Artificial Sequence
  Description of Artificial Sequence: Synthetic oligonucleotide
ucagaaaaugugcugguuc

SEQ ID NO: 1943457 - RNA, 19 nt, Artificial Sequence
  Description of Artificial Sequence: Synthetic oligonucleotide
uugugggacguaaagcggg

SEQ ID NO: 1943458 - RNA, 19 nt, Artificial Sequence
  Description of Artificial Sequence: Synthetic oligonucleotide
cacauugccaauacacucg

SEQ ID NO: 1943459 - RNA, 19 nt, Artificial Sequence
  Description of Artificial Sequence: Synthetic oligonucleotide
aacaguucgaaugcuuuuc

SEQ ID NO: 1943460 - RNA, 19 nt, Artificial Sequence
  Description of Artificial Sequence: Synthetic oligonucleotide
uuugugggccgccucaagg

SEQ ID NO: 1943461 - RNA, 19 nt, Artificial Sequence
  Description of Artificial Sequence: Synthetic oligonucleotide
uauauucagacacaagcuu

SEQ ID NO: 1943462 - RNA, 19 nt, Artificial Sequence
  Description of Artificial Sequence: Synthetic oligonucleotide
acaguucgaaugcuuuucc

SEQ ID NO: 1943463 - RNA, 19 nt, Artificial Sequence
  Description of Artificial Sequence: Synthetic oligonucleotide
gcuuauugaacucuugggg

SEQ ID NO: 1943464 - RNA, 19 nt, Artificial Sequence
  Description of Artificial Sequence: Synthetic oligonucleotide
cagacuuuauccaaaggug

SEQ ID NO: 1943465 - RNA, 19 nt, Artificial Sequence
  Description of Artificial Sequence: Synthetic oligonucleotide
guucgaaugcuuuuccccg

SEQ ID NO: 1943466 - RNA, 19 nt, Artificial Sequence
  Description of Artificial Sequence: Synthetic oligonucleotide
aauacauucaguggcucca

SEQ ID NO: 1943467 - RNA, 19 nt, Artificial Sequence
  Description of Artificial Sequence: Synthetic oligonucleotide
cagaaaaugugcugguucc

SEQ ID NO: 1943468 - RNA, 19 nt, Artificial Sequence
  Description of Artificial Sequence: Synthetic oligonucleotide
uucacauugccaauacacu

SEQ ID NO: 1943469 - RNA, 19 nt, Artificial Sequence
  Description of Artificial Sequence: Synthetic oligonucleotide
uuauugaugucgaugccaa

SEQ ID NO: 1943470 - RNA, 19 nt, Artificial Sequence
  Description of Artificial Sequence: Synthetic oligonucleotide
agcagcuacaccaaccacc

SEQ ID NO: 1943471 - RNA, 19 nt, Artificial Sequence
  Description of Artificial Sequence: Synthetic oligonucleotide
accauagccgguugaaacg

SEQ ID NO: 1943472 - RNA, 19 nt, Artificial Sequence
  Description of Artificial Sequence: Synthetic oligonucleotide
aaugugcugguucccauga

SEQ ID NO: 1943473 - RNA, 19 nt, Artificial Sequence
  Description of Artificial Sequence: Synthetic oligonucleotide
uaauuuggucgaaggacag

SEQ ID NO: 1943474 - RNA, 19 nt, Artificial Sequence
  Description of Artificial Sequence: Synthetic oligonucleotide
gggguuaauacauucagug

SEQ ID NO: 1943475 - RNA, 19 nt, Artificial Sequence
  Description of Artificial Sequence: Synthetic oligonucleotide
ugaaacgccacaaccgaga

SEQ ID NO: 1943476 - RNA, 19 nt, Artificial Sequence
  Description of Artificial Sequence: Synthetic oligonucleotide
gauugucaguaacaaauuc

SEQ ID NO: 1943477 - RNA, 19 nt, Artificial Sequence
  Description of Artificial Sequence: Synthetic oligonucleotide
aaugauccgggaugcacca

SEQ ID NO: 1943478 - RNA, 19 nt, Artificial Sequence
  Description of Artificial Sequence: Synthetic oligonucleotide
uccagcaccuucauguccc

SEQ ID NO: 1943479 - RNA, 19 nt, Artificial Sequence
  Description of Artificial Sequence: Synthetic oligonucleotide
uuuguuaauuuggucgaag

SEQ ID NO: 1943480 - RNA, 19 nt, Artificial Sequence
  Description of Artificial Sequence: Synthetic oligonucleotide
ugucaucucaaugaguacu

SEQ ID NO: 1943481 - RNA, 19 nt, Artificial Sequence
  Description of Artificial Sequence: Synthetic oligonucleotide
uaacccuuuccccugaguc

SEQ ID NO: 1943482 - RNA, 19 nt, Artificial Sequence
  Description of Artificial Sequence: Synthetic oligonucleotide
auugaugucgaugccaaug

SEQ ID NO: 1943483 - RNA, 19 nt, Artificial Sequence
  Description of Artificial Sequence: Synthetic oligonucleotide
agaucaccgggaaacaccc

SEQ ID NO: 1943484 - RNA, 19 nt, Artificial Sequence
  Description of Artificial Sequence: Synthetic oligonucleotide
agcuacaccaaccaccaca

SEQ ID NO: 1943485 - RNA, 19 nt, Artificial Sequence
  Description of Artificial Sequence: Synthetic oligonucleotide
gauucagacaaaauuugca

SEQ ID NO: 1943486 - RNA, 19 nt, Artificial Sequence
  Description of Artificial Sequence: Synthetic oligonucleotide
auaggcaucgguguggcag

SEQ ID NO: 1943487 - RNA, 19 nt, Artificial Sequence
  Description of Artificial Sequence: Synthetic oligonucleotide
auauauucagacacaagcu

SEQ ID NO: 1943488 - RNA, 19 nt, Artificial Sequence
  Description of Artificial Sequence: Synthetic oligonucleotide
aaagaggcuuuccuuugca

SEQ ID NO: 1943489 - RNA, 19 nt, Artificial Sequence
  Description of Artificial Sequence: Synthetic oligonucleotide
aaucuggucgugccaucgg

SEQ ID NO: 1943490 - RNA, 19 nt, Artificial Sequence
  Description of Artificial Sequence: Synthetic oligonucleotide
caaugauccgggaugcacc

SEQ ID NO: 1943491 - RNA, 19 nt, Artificial Sequence
  Description of Artificial Sequence: Synthetic oligonucleotide
auuuaucuuuauugauguc

SEQ ID NO: 1943492 - RNA, 19 nt, Artificial Sequence
  Description of Artificial Sequence: Synthetic oligonucleotide
gaagggucaauuuuagcaa

SEQ ID NO: 1943493 - RNA, 19 nt, Artificial Sequence
  Description of Artificial Sequence: Synthetic oligonucleotide
auacacucgaaggagaagu

SEQ ID NO: 1943494 - RNA, 19 nt, Artificial Sequence
  Description of Artificial Sequence: Synthetic oligonucleotide
gucgaugccaaugauccgg

SEQ ID NO: 1943495 - RNA, 19 nt, Artificial Sequence
  Description of Artificial Sequence: Synthetic oligonucleotide
uuugggacacucuccacac

SEQ ID NO: 1943496 - RNA, 19 nt, Artificial Sequence
  Description of Artificial Sequence: Synthetic oligonucleotide
guaucaccugccuucaccc

SEQ ID NO: 1943497 - RNA, 19 nt, Artificial Sequence
  Description of Artificial Sequence: Synthetic oligonucleotide
uugugggccgccucaaggg

SEQ ID NO: 1943498 - RNA, 19 nt, Artificial Sequence
  Description of Artificial Sequence: Synthetic oligonucleotide
caggguauaggcaucggug

SEQ ID NO: 1943499 - RNA, 19 nt, Artificial Sequence
  Description of Artificial Sequence: Synthetic oligonucleotide
ugugcguccugucaccagc

SEQ ID NO: 1943500 - RNA, 19 nt, Artificial Sequence
  Description of Artificial Sequence: Synthetic oligonucleotide
aagcuuugggacacucucc

SEQ ID NO: 1943501 - RNA, 19 nt, Artificial Sequence
  Description of Artificial Sequence: Synthetic oligonucleotide
auucuccacauugugggac

SEQ ID NO: 1943502 - RNA, 19 nt, Artificial Sequence
  Description of Artificial Sequence: Synthetic oligonucleotide
augaucuuaauucgaacuu

SEQ ID NO: 1943503 - RNA, 19 nt, Artificial Sequence
  Description of Artificial Sequence: Synthetic oligonucleotide
uugaaacgccacaaccgag

SEQ ID NO: 1943504 - RNA, 19 nt, Artificial Sequence
  Description of Artificial Sequence: Synthetic oligonucleotide
aguggcaaugaucuuaauu

SEQ ID NO: 1943505 - RNA, 19 nt, Artificial Sequence
  Description of Artificial Sequence: Synthetic oligonucleotide
gaugacaguaucaccugcc

SEQ ID NO: 1943506 - RNA, 19 nt, Artificial Sequence
  Description of Artificial Sequence: Synthetic oligonucleotide
ggguuaauacauucagugg

SEQ ID NO: 1943507 - RNA, 19 nt, Artificial Sequence
  Description of Artificial Sequence: Synthetic oligonucleotide
gguugaaacgccacaaccg

SEQ ID NO: 1943508 - RNA, 19 nt, Artificial Sequence
  Description of Artificial Sequence: Synthetic oligonucleotide
cacauugugggacguaaag

SEQ ID NO: 1943509 - RNA, 19 nt, Artificial Sequence
  Description of Artificial Sequence: Synthetic oligonucleotide
agaaggcagacuuuaucca

SEQ ID NO: 1943510 - RNA, 19 nt, Artificial Sequence
  Description of Artificial Sequence: Synthetic oligonucleotide
ugauccgggaugcaccagc

SEQ ID NO: 1943511 - RNA, 19 nt, Artificial Sequence
  Description of Artificial Sequence: Synthetic oligonucleotide
uuuccggccucccaggcga

SEQ ID NO: 1943512 - RNA, 19 nt, Artificial Sequence
  Description of Artificial Sequence: Synthetic oligonucleotide
agcgggaugacaguaucac

SEQ ID NO: 1943513 - RNA, 19 nt, Artificial Sequence
  Description of Artificial Sequence: Synthetic oligonucleotide
uuauccaaaggugccgaag

SEQ ID NO: 1943514 - RNA, 19 nt, Artificial Sequence
  Description of Artificial Sequence: Synthetic oligonucleotide
acacuuuccacaauuccag

SEQ ID NO: 1943515 - RNA, 19 nt, Artificial Sequence
  Description of Artificial Sequence: Synthetic oligonucleotide
uccaugugcguccugucac

SEQ ID NO: 1943516 - RNA, 19 nt, Artificial Sequence
  Description of Artificial Sequence: Synthetic oligonucleotide
agcaccuucaugucccaag

SEQ ID NO: 1943517 - RNA, 19 nt, Artificial Sequence
  Description of Artificial Sequence: Synthetic oligonucleotide
uuccuuugcaggugaaucu

SEQ ID NO: 1943518 - RNA, 19 nt, Artificial Sequence
  Description of Artificial Sequence: Synthetic oligonucleotide
ugaucuuaauucgaacuuc

SEQ ID NO: 1943519 - RNA, 19 nt, Artificial Sequence
  Description of Artificial Sequence: Synthetic oligonucleotide
guugaaacgccacaaccga

SEQ ID NO: 1943520 - RNA, 19 nt, Artificial Sequence
  Description of Artificial Sequence: Synthetic oligonucleotide
acguaaagcgggaugacag

SEQ ID NO: 1943521 - RNA, 19 nt, Artificial Sequence
  Description of Artificial Sequence: Synthetic oligonucleotide
caccauagccgguugaaac

SEQ ID NO: 1943522 - RNA, 19 nt, Artificial Sequence
  Description of Artificial Sequence: Synthetic oligonucleotide
gacgaguggagauuucuuc

SEQ ID NO: 1943523 - RNA, 19 nt, Artificial Sequence
  Description of Artificial Sequence: Synthetic oligonucleotide
uguucucuucugaacuuac

SEQ ID NO: 1943524 - RNA, 19 nt, Artificial Sequence
  Description of Artificial Sequence: Synthetic oligonucleotide
ccaaccaccacacugacuc

SEQ ID NO: 1943525 - RNA, 19 nt, Artificial Sequence
  Description of Artificial Sequence: Synthetic oligonucleotide
cuuuauugaugucgaugcc

SEQ ID NO: 1943526 - RNA, 19 nt, Artificial Sequence
  Description of Artificial Sequence: Synthetic oligonucleotide
gguagaaccaggcuccacc

SEQ ID NO: 1943527 - RNA, 19 nt, Artificial Sequence
  Description of Artificial Sequence: Synthetic oligonucleotide
acgaguggagauuucuuca

SEQ ID NO: 1943528 - RNA, 19 nt, Artificial Sequence
  Description of Artificial Sequence: Synthetic oligonucleotide
gaaucuggucgugccaucg

SEQ ID NO: 1943529 - RNA, 19 nt, Artificial Sequence
  Description of Artificial Sequence: Synthetic oligonucleotide
aggguauaggcaucggugu

SEQ ID NO: 1943530 - RNA, 19 nt, Artificial Sequence
  Description of Artificial Sequence: Synthetic oligonucleotide
ucugaacuuacagcuuuag

SEQ ID NO: 1943531 - RNA, 19 nt, Artificial Sequence
  Description of Artificial Sequence: Synthetic oligonucleotide
acccuagucaccccuucac

SEQ ID NO: 1943532 - RNA, 19 nt, Artificial Sequence
  Description of Artificial Sequence: Synthetic oligonucleotide
ucaggguauaggcaucggu

SEQ ID NO: 1943533 - RNA, 19 nt, Artificial Sequence
  Description of Artificial Sequence: Synthetic oligonucleotide
ggaaacaccccucaggauc

SEQ ID NO: 1943534 - RNA, 19 nt, Artificial Sequence
  Description of Artificial Sequence: Synthetic oligonucleotide
uccgggaugcaccagccac

SEQ ID NO: 1943535 - RNA, 19 nt, Artificial Sequence
  Description of Artificial Sequence: Synthetic oligonucleotide
aggauucagacaaaauuug

SEQ ID NO: 1943536 - RNA, 19 nt, Artificial Sequence
  Description of Artificial Sequence: Synthetic oligonucleotide
uccucuauggagagaggcu

SEQ ID NO: 1943537 - RNA, 19 nt, Artificial Sequence
  Description of Artificial Sequence: Synthetic oligonucleotide
gcugguucccaugaaaugg

SEQ ID NO: 1943538 - RNA, 19 nt, Artificial Sequence
  Description of Artificial Sequence: Synthetic oligonucleotide
ugccaucgggcauuaaccc

SEQ ID NO: 1943539 - RNA, 19 nt, Artificial Sequence
  Description of Artificial Sequence: Synthetic oligonucleotide
ucaugaccuucacauugcc

SEQ ID NO: 1943540 - RNA, 19 nt, Artificial Sequence
  Description of Artificial Sequence: Synthetic oligonucleotide
aggggccacuucuacuucc

SEQ ID NO: 1943541 - RNA, 19 nt, Artificial Sequence
  Description of Artificial Sequence: Synthetic oligonucleotide
ucgaaggagaagucuacuc

SEQ ID NO: 1943542 - RNA, 19 nt, Artificial Sequence
  Description of Artificial Sequence: Synthetic oligonucleotide
aaacgccacaaccgagaag

SEQ ID NO: 1943543 - RNA, 19 nt, Artificial Sequence
  Description of Artificial Sequence: Synthetic oligonucleotide
gggcuuauugaacucuugg

SEQ ID NO: 1943544 - RNA, 19 nt, Artificial Sequence
  Description of Artificial Sequence: Synthetic oligonucleotide
uucaugucccaagaucacc

SEQ ID NO: 1943545 - RNA, 19 nt, Artificial Sequence
  Description of Artificial Sequence: Synthetic oligonucleotide
augucccaagaucaccggg

SEQ ID NO: 1943546 - RNA, 19 nt, Artificial Sequence
  Description of Artificial Sequence: Synthetic oligonucleotide
acuuuacagcccaugauca

SEQ ID NO: 1943547 - RNA, 19 nt, Artificial Sequence
  Description of Artificial Sequence: Synthetic oligonucleotide
aucuggucgugccaucggg

SEQ ID NO: 1943548 - RNA, 19 nt, Artificial Sequence
  Description of Artificial Sequence: Synthetic oligonucleotide
uuggccuuugcgaauuuau

SEQ ID NO: 1943549 - RNA, 19 nt, Artificial Sequence
  Description of Artificial Sequence: Synthetic oligonucleotide
caauccaacuccucccaag

SEQ ID NO: 1943550 - RNA, 19 nt, Artificial Sequence
  Description of Artificial Sequence: Synthetic oligonucleotide
ucgaaugcuuuuccccgag

SEQ ID NO: 1943551 - RNA, 19 nt, Artificial Sequence
  Description of Artificial Sequence: Synthetic oligonucleotide
auugugggacguaaagcgg

SEQ ID NO: 1943552 - RNA, 19 nt, Artificial Sequence
  Description of Artificial Sequence: Synthetic oligonucleotide
ucuuaucuucuggcaaagg

SEQ ID NO: 1943553 - RNA, 19 nt, Artificial Sequence
  Description of Artificial Sequence: Synthetic oligonucleotide
gaugucgaugccaaugauc

SEQ ID NO: 1943554 - RNA, 19 nt, Artificial Sequence
  Description of Artificial Sequence: Synthetic oligonucleotide
ugcugguucccaugaaaug

SEQ ID NO: 1943555 - RNA, 19 nt, Artificial Sequence
  Description of Artificial Sequence: Synthetic oligonucleotide
agccuugcaucugaucacc

SEQ ID NO: 1943556 - RNA, 19 nt, Artificial Sequence
  Description of Artificial Sequence: Synthetic oligonucleotide
uuugcgaauuuaucuuuau

SEQ ID NO: 1943557 - RNA, 19 nt, Artificial Sequence
  Description of Artificial Sequence: Synthetic oligonucleotide
ucuggucgugccaucgggc

SEQ ID NO: 1943558 - RNA, 19 nt, Artificial Sequence
  Description of Artificial Sequence: Synthetic oligonucleotide
gacacaagcuuugggacac

SEQ ID NO: 1943559 - RNA, 19 nt, Artificial Sequence
  Description of Artificial Sequence: Synthetic oligonucleotide
agacacaagcuuugggaca

SEQ ID NO: 1943560 - RNA, 19 nt, Artificial Sequence
  Description of Artificial Sequence: Synthetic oligonucleotide
uuccaugugcguccuguca

SEQ ID NO: 1943561 - RNA, 19 nt, Artificial Sequence
  Description of Artificial Sequence: Synthetic oligonucleotide
acuuacagcuuuagaacag

SEQ ID NO: 1943562 - RNA, 19 nt, Artificial Sequence
  Description of Artificial Sequence: Synthetic oligonucleotide
agccaaagacagcacaggu

SEQ ID NO: 1943563 - RNA, 19 nt, Artificial Sequence
  Description of Artificial Sequence: Synthetic oligonucleotide
uuuccccgagugcaucagg

SEQ ID NO: 1943564 - RNA, 19 nt, Artificial Sequence
  Description of Artificial Sequence: Synthetic oligonucleotide
acauugccaauacacucga

SEQ ID NO: 1943565 - RNA, 19 nt, Artificial Sequence
  Description of Artificial Sequence: Synthetic oligonucleotide
gacagauugucaguaacaa

SEQ ID NO: 1943566 - RNA, 19 nt, Artificial Sequence
  Description of Artificial Sequence: Synthetic oligonucleotide
ugucgaugccaaugauccg

SEQ ID NO: 1943567 - RNA, 19 nt, Artificial Sequence
  Description of Artificial Sequence: Synthetic oligonucleotide
gcaucgguguggcagacgg

SEQ ID NO: 1943568 - RNA, 19 nt, Artificial Sequence
  Description of Artificial Sequence: Synthetic oligonucleotide
gcgaauuuaucuuuauuga

SEQ ID NO: 1943569 - RNA, 19 nt, Artificial Sequence
  Description of Artificial Sequence: Synthetic oligonucleotide
acucagaaaaugugcuggu

SEQ ID NO: 1943570 - RNA, 19 nt, Artificial Sequence
  Description of Artificial Sequence: Synthetic oligonucleotide
uuugcaggugaaucugguc

SEQ ID NO: 1943571 - RNA, 19 nt, Artificial Sequence
  Description of Artificial Sequence: Synthetic oligonucleotide
cuggaauggacgaguggag

SEQ ID NO: 1943572 - RNA, 19 nt, Artificial Sequence
  Description of Artificial Sequence: Synthetic oligonucleotide
cuucacccgaagcagcuac

SEQ ID NO: 1943573 - RNA, 19 nt, Artificial Sequence
  Description of Artificial Sequence: Synthetic oligonucleotide
aauuuggucgaaggacaga

SEQ ID NO: 1943574 - RNA, 19 nt, Artificial Sequence
  Description of Artificial Sequence: Synthetic oligonucleotide
caugucccaagaucaccgg

SEQ ID NO: 1943575 - RNA, 19 nt, Artificial Sequence
  Description of Artificial Sequence: Synthetic oligonucleotide
cuuugggacacucuccaca

SEQ ID NO: 1943576 - RNA, 19 nt, Artificial Sequence
  Description of Artificial Sequence: Synthetic oligonucleotide
uuagaacaguucgaaugcu

SEQ ID NO: 1943577 - RNA, 19 nt, Artificial Sequence
  Description of Artificial Sequence: Synthetic oligonucleotide
ugccgaagggucaauuuua

SEQ ID NO: 1943578 - RNA, 19 nt, Artificial Sequence
  Description of Artificial Sequence: Synthetic oligonucleotide
ugugggacguaaagcggga

SEQ ID NO: 1943579 - RNA, 19 nt, Artificial Sequence
  Description of Artificial Sequence: Synthetic oligonucleotide
acugcagccuugcaucuga

SEQ ID NO: 1943580 - RNA, 19 nt, Artificial Sequence
  Description of Artificial Sequence: Synthetic oligonucleotide
uucgaaugcuuuuccccga

SEQ ID NO: 1943581 - RNA, 19 nt, Artificial Sequence
  Description of Artificial Sequence: Synthetic oligonucleotide
caguucgaaugcuuuuccc

SEQ ID NO: 1943582 - RNA, 19 nt, Artificial Sequence
  Description of Artificial Sequence: Synthetic oligonucleotide
gcaaagguuuguuuuagga

SEQ ID NO: 1943583 - RNA, 19 nt, Artificial Sequence
  Description of Artificial Sequence: Synthetic oligonucleotide
acucaggguauaggcaucg

SEQ ID NO: 1943584 - RNA, 19 nt, Artificial Sequence
  Description of Artificial Sequence: Synthetic oligonucleotide
acucgaaggagaagucuac

SEQ ID NO: 1943585 - RNA, 19 nt, Artificial Sequence
  Description of Artificial Sequence: Synthetic oligonucleotide
cuacuuccucuauggagag

SEQ ID NO: 1943586 - RNA, 19 nt, Artificial Sequence
  Description of Artificial Sequence: Synthetic oligonucleotide
uuccccgagugcaucaggu

SEQ ID NO: 1943587 - RNA, 19 nt, Artificial Sequence
  Description of Artificial Sequence: Synthetic oligonucleotide
gaaacaccccucaggauca

SEQ ID NO: 1943588 - RNA, 19 nt, Artificial Sequence
  Description of Artificial Sequence: Synthetic oligonucleotide
uggucgaaggacagauugu

SEQ ID NO: 1943589 - RNA, 19 nt, Artificial Sequence
  Description of Artificial Sequence: Synthetic oligonucleotide
ugggcuuauugaacucuug

SEQ ID NO: 1943590 - RNA, 19 nt, Artificial Sequence
  Description of Artificial Sequence: Synthetic oligonucleotide
uacacucgaaggagaaguc

SEQ ID NO: 1943591 - RNA, 19 nt, Artificial Sequence
  Description of Artificial Sequence: Synthetic oligonucleotide
acagauugucaguaacaaa

SEQ ID NO: 1943592 - RNA, 19 nt, Artificial Sequence
  Description of Artificial Sequence: Synthetic oligonucleotide
ugugggccgccucaagggc

SEQ ID NO: 1943593 - RNA, 19 nt, Artificial Sequence
  Description of Artificial Sequence: Synthetic oligonucleotide
auauucagacacaagcuuu

SEQ ID NO: 1943594 - RNA, 19 nt, Artificial Sequence
  Description of Artificial Sequence: Synthetic oligonucleotide
gguauaggcaucggugugg

SEQ ID NO: 1943595 - RNA, 19 nt, Artificial Sequence
  Description of Artificial Sequence: Synthetic oligonucleotide
uuacagcuuuagaacaguu

SEQ ID NO: 1943596 - RNA, 19 nt, Artificial Sequence
  Description of Artificial Sequence: Synthetic oligonucleotide
uggaauggacgaguggaga

SEQ ID NO: 1943597 - RNA, 19 nt, Artificial Sequence
  Description of Artificial Sequence: Synthetic oligonucleotide
uugcgaauuuaucuuuauu

SEQ ID NO: 1943598 - RNA, 19 nt, Artificial Sequence
  Description of Artificial Sequence: Synthetic oligonucleotide
gugccaucgggcauuaacc

SEQ ID NO: 1943599 - RNA, 19 nt, Artificial Sequence
  Description of Artificial Sequence: Synthetic oligonucleotide
aacaccccucaggaucagc

SEQ ID NO: 1943600 - RNA, 19 nt, Artificial Sequence
  Description of Artificial Sequence: Synthetic oligonucleotide
aggcuuuccggccucccag

SEQ ID NO: 1943601 - RNA, 19 nt, Artificial Sequence
  Description of Artificial Sequence: Synthetic oligonucleotide
ugccaaugauccgggaugc

SEQ ID NO: 1943602 - RNA, 19 nt, Artificial Sequence
  Description of Artificial Sequence: Synthetic oligonucleotide
ggauucagacaaaauuugc

SEQ ID NO: 1943603 - RNA, 19 nt, Artificial Sequence
  Description of Artificial Sequence: Synthetic oligonucleotide
uccacauugugggacguaa

SEQ ID NO: 1943604 - RNA, 19 nt, Artificial Sequence
  Description of Artificial Sequence: Synthetic oligonucleotide
aucgguguggcagacggca

SEQ ID NO: 1943605 - RNA, 19 nt, Artificial Sequence
  Description of Artificial Sequence: Synthetic oligonucleotide
uggccuuugcgaauuuauc

SEQ ID NO: 1943606 - RNA, 19 nt, Artificial Sequence
  Description of Artificial Sequence: Synthetic oligonucleotide
cacuuuccacaauuccagc

SEQ ID NO: 1943607 - RNA, 19 nt, Artificial Sequence
  Description of Artificial Sequence: Synthetic oligonucleotide
gcaccagccacuuuacagc

SEQ ID NO: 1943608 - RNA, 19 nt, Artificial Sequence
  Description of Artificial Sequence: Synthetic oligonucleotide
cagcacagguagaaccagg

SEQ ID NO: 1943609 - RNA, 19 nt, Artificial Sequence
  Description of Artificial Sequence: Synthetic oligonucleotide
uggacgaguggagauuucu

SEQ ID NO: 1943610 - RNA, 19 nt, Artificial Sequence
  Description of Artificial Sequence: Synthetic oligonucleotide
gccaauacacucgaaggag

SEQ ID NO: 1943611 - RNA, 19 nt, Artificial Sequence
  Description of Artificial Sequence: Synthetic oligonucleotide
uuggaggggccacuucuac

SEQ ID NO: 1943612 - RNA, 19 nt, Artificial Sequence
  Description of Artificial Sequence: Synthetic oligonucleotide
agagaggcuuuccggccuc

SEQ ID NO: 1943613 - RNA, 19 nt, Artificial Sequence
  Description of Artificial Sequence: Synthetic oligonucleotide
agugccuuuccaugugcgu

SEQ ID NO: 1943614 - RNA, 19 nt, Artificial Sequence
  Description of Artificial Sequence: Synthetic oligonucleotide
aucugaucaccugguucgc

SEQ ID NO: 1943615 - RNA, 19 nt, Artificial Sequence
  Description of Artificial Sequence: Synthetic oligonucleotide
cauagccgguugaaacgcc

SEQ ID NO: 1943616 - RNA, 19 nt, Artificial Sequence
  Description of Artificial Sequence: Synthetic oligonucleotide
caauacacucgaaggagaa

SEQ ID NO: 1943617 - RNA, 19 nt, Artificial Sequence
  Description of Artificial Sequence: Synthetic oligonucleotide
uuuggaggggccacuucua

SEQ ID NO: 1943618 - RNA, 19 nt, Artificial Sequence
  Description of Artificial Sequence: Synthetic oligonucleotide
augaucacugccaauccaa

SEQ ID NO: 1943619 - RNA, 19 nt, Artificial Sequence
  Description of Artificial Sequence: Synthetic oligonucleotide
gaaacgccacaaccgagaa

SEQ ID NO: 1943620 - RNA, 19 nt, Artificial Sequence
  Description of Artificial Sequence: Synthetic oligonucleotide
cgaaggagaagucuacucc

SEQ ID NO: 1943621 - RNA, 19 nt, Artificial Sequence
  Description of Artificial Sequence: Synthetic oligonucleotide
guuaauacauucaguggcu

SEQ ID NO: 1943622 - RNA, 19 nt, Artificial Sequence
  Description of Artificial Sequence: Synthetic oligonucleotide
agaacaguucgaaugcuuu

SEQ ID NO: 1943623 - RNA, 19 nt, Artificial Sequence
  Description of Artificial Sequence: Synthetic oligonucleotide
ggcagacuuuauccaaagg

SEQ ID NO: 1943624 - RNA, 19 nt, Artificial Sequence
  Description of Artificial Sequence: Synthetic oligonucleotide
guauaggcaucgguguggc

SEQ ID NO: 1943625 - RNA, 19 nt, Artificial Sequence
  Description of Artificial Sequence: Synthetic oligonucleotide
caagaucaccgggaaacac

SEQ ID NO: 1943626 - RNA, 19 nt, Artificial Sequence
  Description of Artificial Sequence: Synthetic oligonucleotide
ucagcuccacucaggguau

SEQ ID NO: 1943627 - RNA, 19 nt, Artificial Sequence
  Description of Artificial Sequence: Synthetic oligonucleotide
gaugccaaugauccgggau

SEQ ID NO: 1943628 - RNA, 19 nt, Artificial Sequence
  Description of Artificial Sequence: Synthetic oligonucleotide
gacguaaagcgggaugaca

SEQ ID NO: 1943629 - RNA, 19 nt, Artificial Sequence
  Description of Artificial Sequence: Synthetic oligonucleotide
caaagguuuguuuuaggau

SEQ ID NO: 1943630 - RNA, 19 nt, Artificial Sequence
  Description of Artificial Sequence: Synthetic oligonucleotide
ucugaucaccugguucgcc

SEQ ID NO: 1943631 - RNA, 19 nt, Artificial Sequence
  Description of Artificial Sequence: Synthetic oligonucleotide
gaugcaccagccacuuuac

SEQ ID NO: 1943632 - RNA, 19 nt, Artificial Sequence
  Description of Artificial Sequence: Synthetic oligonucleotide
gggcauuaacccuuucccc

SEQ ID NO: 1943633 - RNA, 19 nt, Artificial Sequence
  Description of Artificial Sequence: Synthetic oligonucleotide
caugaucacugccaaucca

SEQ ID NO: 1943634 - RNA, 19 nt, Artificial Sequence
  Description of Artificial Sequence: Synthetic oligonucleotide
gcuggaauggacgagugga

SEQ ID NO: 1943635 - RNA, 19 nt, Artificial Sequence
  Description of Artificial Sequence: Synthetic oligonucleotide
cagccuugcaucugaucac

SEQ ID NO: 1943636 - RNA, 19 nt, Artificial Sequence
  Description of Artificial Sequence: Synthetic oligonucleotide
uggaggggccacuucuacu

SEQ ID NO: 1943637 - RNA, 19 nt, Artificial Sequence
  Description of Artificial Sequence: Synthetic oligonucleotide
cugaacuuacagcuuuaga

SEQ ID NO: 1943638 - RNA, 19 nt, Artificial Sequence
  Description of Artificial Sequence: Synthetic oligonucleotide
ucgguguggcagacggcag

SEQ ID NO: 1943639 - RNA, 19 nt, Artificial Sequence
  Description of Artificial Sequence: Synthetic oligonucleotide
ccaaaggugccgaaggguc

SEQ ID NO: 1943640 - RNA, 19 nt, Artificial Sequence
  Description of Artificial Sequence: Synthetic oligonucleotide
cuauggagagaggcuuucc

SEQ ID NO: 1943641 - RNA, 19 nt, Artificial Sequence
  Description of Artificial Sequence: Synthetic oligonucleotide
gaucacugccaauccaacu

SEQ ID NO: 1943642 - RNA, 19 nt, Artificial Sequence
  Description of Artificial Sequence: Synthetic oligonucleotide
ugguucccaugaaauggaa

SEQ ID NO: 1943643 - RNA, 19 nt, Artificial Sequence
  Description of Artificial Sequence: Synthetic oligonucleotide
uuuccaugugcguccuguc

SEQ ID NO: 1943644 - RNA, 19 nt, Artificial Sequence
  Description of Artificial Sequence: Synthetic oligonucleotide
cuuugcgaauuuaucuuua

SEQ ID NO: 1943645 - RNA, 19 nt, Artificial Sequence
  Description of Artificial Sequence: Synthetic oligonucleotide
aucaccugccuucacccua

SEQ ID NO: 1943646 - RNA, 19 nt, Artificial Sequence
  Description of Artificial Sequence: Synthetic oligonucleotide
caugaccuucacauugcca

SEQ ID NO: 1943647 - RNA, 19 nt, Artificial Sequence
  Description of Artificial Sequence: Synthetic oligonucleotide
gcaucugaucaccugguuc

SEQ ID NO: 1943648 - RNA, 19 nt, Artificial Sequence
  Description of Artificial Sequence: Synthetic oligonucleotide
ucacccgaagcagcuacac

SEQ ID NO: 1943649 - RNA, 19 nt, Artificial Sequence
  Description of Artificial Sequence: Synthetic oligonucleotide
gguuuguuuuaggauucag

SEQ ID NO: 1943650 - RNA, 19 nt, Artificial Sequence
  Description of Artificial Sequence: Synthetic oligonucleotide
accgggaaacaccccucag

SEQ ID NO: 1943651 - RNA, 19 nt, Artificial Sequence
  Description of Artificial Sequence: Synthetic oligonucleotide
acaaccgagaaggcagacu

SEQ ID NO: 1943652 - RNA, 19 nt, Artificial Sequence
  Description of Artificial Sequence: Synthetic oligonucleotide
gggucaauuuuagcaacag

SEQ ID NO: 1943653 - RNA, 19 nt, Artificial Sequence
  Description of Artificial Sequence: Synthetic oligonucleotide
ugaaucuggucgugccauc

SEQ ID NO: 1943654 - RNA, 19 nt, Artificial Sequence
  Description of Artificial Sequence: Synthetic oligonucleotide
cacucgaaggagaagucua

SEQ ID NO: 1943655 - RNA, 19 nt, Artificial Sequence
  Description of Artificial Sequence: Synthetic oligonucleotide
cucccaagccaaagacagc

SEQ ID NO: 1943656 - RNA, 19 nt, Artificial Sequence
  Description of Artificial Sequence: Synthetic oligonucleotide
ucacccuagucaccccuuc

SEQ ID NO: 1943657 - RNA, 19 nt, Artificial Sequence
  Description of Artificial Sequence: Synthetic oligonucleotide
uauugaugucgaugccaau

SEQ ID NO: 1943658 - RNA, 19 nt, Artificial Sequence
  Description of Artificial Sequence: Synthetic oligonucleotide
ggucaauuuuagcaacaga

SEQ ID NO: 1943659 - RNA, 19 nt, Artificial Sequence
  Description of Artificial Sequence: Synthetic oligonucleotide
cuuuuccccgagugcauca

SEQ ID NO: 1943660 - RNA, 19 nt, Artificial Sequence
  Description of Artificial Sequence: Synthetic oligonucleotide
cgggcauuaacccuuuccc

SEQ ID NO: 1943661 - RNA, 19 nt, Artificial Sequence
  Description of Artificial Sequence: Synthetic oligonucleotide
ggcauuaacccuuuccccu

SEQ ID NO: 1943662 - RNA, 19 nt, Artificial Sequence
  Description of Artificial Sequence: Synthetic oligonucleotide
cagcuuuagaacaguucga

SEQ ID NO: 1943663 - RNA, 19 nt, Artificial Sequence
  Description of Artificial Sequence: Synthetic oligonucleotide
ugcaucugaucaccugguu

SEQ ID NO: 1943664 - RNA, 19 nt, Artificial Sequence
  Description of Artificial Sequence: Synthetic oligonucleotide
uuuuagcaacagagauguc

SEQ ID NO: 1943665 - RNA, 19 nt, Artificial Sequence
  Description of Artificial Sequence: Synthetic oligonucleotide
augugcguccugucaccag

SEQ ID NO: 1943666 - RNA, 19 nt, Artificial Sequence
  Description of Artificial Sequence: Synthetic oligonucleotide
acaccccucaggaucagcu

SEQ ID NO: 1943667 - RNA, 19 nt, Artificial Sequence
  Description of Artificial Sequence: Synthetic oligonucleotide
agggucaauuuuagcaaca

SEQ ID NO: 1943668 - RNA, 19 nt, Artificial Sequence
  Description of Artificial Sequence: Synthetic oligonucleotide
guaaagcgggaugacagua

SEQ ID NO: 1943669 - RNA, 19 nt, Artificial Sequence
  Description of Artificial Sequence: Synthetic oligonucleotide
gcuacaccaaccaccacac

SEQ ID NO: 1943670 - RNA, 19 nt, Artificial Sequence
  Description of Artificial Sequence: Synthetic oligonucleotide
caaccaccacacugacucc

SEQ ID NO: 1943671 - RNA, 19 nt, Artificial Sequence
  Description of Artificial Sequence: Synthetic oligonucleotide
ggaaaagaggcuuuccuuu

SEQ ID NO: 1943672 - RNA, 19 nt, Artificial Sequence
  Description of Artificial Sequence: Synthetic oligonucleotide
agccuuugugggccgccuc

SEQ ID NO: 1943673 - RNA, 19 nt, Artificial Sequence
  Description of Artificial Sequence: Synthetic oligonucleotide
ggguauaggcaucggugug

SEQ ID NO: 1943674 - RNA, 19 nt, Artificial Sequence
  Description of Artificial Sequence: Synthetic oligonucleotide
cuuugugggccgccucaag

SEQ ID NO: 1943675 - RNA, 19 nt, Artificial Sequence
  Description of Artificial Sequence: Synthetic oligonucleotide
cacccgaagcagcuacacc

SEQ ID NO: 1943676 - RNA, 19 nt, Artificial Sequence
  Description of Artificial Sequence: Synthetic oligonucleotide
uugggacacucuccacacu

SEQ ID NO: 1943677 - RNA, 19 nt, Artificial Sequence
  Description of Artificial Sequence: Synthetic oligonucleotide
caggugaaucuggucgugc

SEQ ID NO: 1943678 - RNA, 19 nt, Artificial Sequence
  Description of Artificial Sequence: Synthetic oligonucleotide
ggccuuugcgaauuuaucu

SEQ ID NO: 1943679 - RNA, 19 nt, Artificial Sequence
  Description of Artificial Sequence: Synthetic oligonucleotide
ugcguccugucaccagcug

SEQ ID NO: 1943680 - RNA, 19 nt, Artificial Sequence
  Description of Artificial Sequence: Synthetic oligonucleotide
cuggcaaagguuuguuuua

SEQ ID NO: 1943681 - RNA, 19 nt, Artificial Sequence
  Description of Artificial Sequence: Synthetic oligonucleotide
gcguccugucaccagcugg

SEQ ID NO: 1943682 - RNA, 19 nt, Artificial Sequence
  Description of Artificial Sequence: Synthetic oligonucleotide
ccaugaucacugccaaucc

SEQ ID NO: 1943683 - RNA, 19 nt, Artificial Sequence
  Description of Artificial Sequence: Synthetic oligonucleotide
ccgggaaacaccccucagg

SEQ ID NO: 1943684 - RNA, 19 nt, Artificial Sequence
  Description of Artificial Sequence: Synthetic oligonucleotide
uucacccuagucaccccuu

SEQ ID NO: 1943685 - RNA, 19 nt, Artificial Sequence
  Description of Artificial Sequence: Synthetic oligonucleotide
ggacagauugucaguaaca

SEQ ID NO: 1943686 - RNA, 19 nt, Artificial Sequence
  Description of Artificial Sequence: Synthetic oligonucleotide
gugccuuuccaugugcguc

SEQ ID NO: 1943687 - RNA, 19 nt, Artificial Sequence
  Description of Artificial Sequence: Synthetic oligonucleotide
agguagaaccaggcuccac

SEQ ID NO: 1943688 - RNA, 19 nt, Artificial Sequence
  Description of Artificial Sequence: Synthetic oligonucleotide
gggacguaaagcgggauga

SEQ ID NO: 1943689 - RNA, 19 nt, Artificial Sequence
  Description of Artificial Sequence: Synthetic oligonucleotide
cuggucgugccaucgggca

SEQ ID NO: 1943690 - RNA, 19 nt, Artificial Sequence
  Description of Artificial Sequence: Synthetic oligonucleotide
cacucaggguauaggcauc

SEQ ID NO: 1943691 - RNA, 19 nt, Artificial Sequence
  Description of Artificial Sequence: Synthetic oligonucleotide
gcaaugaucuuaauucgaa

SEQ ID NO: 1943692 - RNA, 19 nt, Artificial Sequence
  Description of Artificial Sequence: Synthetic oligonucleotide
cauucuccacauuguggga

SEQ ID NO: 1943693 - RNA, 19 nt, Artificial Sequence
  Description of Artificial Sequence: Synthetic oligonucleotide
ccacacucuuccauccucc

SEQ ID NO: 1943694 - RNA, 19 nt, Artificial Sequence
  Description of Artificial Sequence: Synthetic oligonucleotide
cauucaguggcuccaaauu

SEQ ID NO: 1943695 - RNA, 19 nt, Artificial Sequence
  Description of Artificial Sequence: Synthetic oligonucleotide
agccacuuuacagcccaug

SEQ ID NO: 1943696 - RNA, 19 nt, Artificial Sequence
  Description of Artificial Sequence: Synthetic oligonucleotide
caaagacagcacagguaga

SEQ ID NO: 1943697 - RNA, 19 nt, Artificial Sequence
  Description of Artificial Sequence: Synthetic oligonucleotide
caaccgagaaggcagacuu

SEQ ID NO: 1943698 - RNA, 19 nt, Artificial Sequence
  Description of Artificial Sequence: Synthetic oligonucleotide
agcaccauagccgguugaa

SEQ ID NO: 1943699 - RNA, 19 nt, Artificial Sequence
  Description of Artificial Sequence: Synthetic oligonucleotide
ggugaaucuggucgugcca

SEQ ID NO: 1943700 - RNA, 19 nt, Artificial Sequence
  Description of Artificial Sequence: Synthetic oligonucleotide
ccuagucaccccuucacca

SEQ ID NO: 1943701 - RNA, 19 nt, Artificial Sequence
  Description of Artificial Sequence: Synthetic oligonucleotide
caucgguguggcagacggc

SEQ ID NO: 1943702 - RNA, 19 nt, Artificial Sequence
  Description of Artificial Sequence: Synthetic oligonucleotide
ccauagccgguugaaacgc

SEQ ID NO: 1943703 - RNA, 19 nt, Artificial Sequence
  Description of Artificial Sequence: Synthetic oligonucleotide
uggucgugccaucgggcau

SEQ ID NO: 1943704 - RNA, 19 nt, Artificial Sequence
  Description of Artificial Sequence: Synthetic oligonucleotide
uccccgagugcaucagguc

SEQ ID NO: 1943705 - RNA, 19 nt, Artificial Sequence
  Description of Artificial Sequence: Synthetic oligonucleotide
gcagcuacaccaaccacca

SEQ ID NO: 1943706 - RNA, 19 nt, Artificial Sequence
  Description of Artificial Sequence: Synthetic oligonucleotide
cucaggguauaggcaucgg

SEQ ID NO: 1943707 - RNA, 19 nt, Artificial Sequence
  Description of Artificial Sequence: Synthetic oligonucleotide
ucuccacauugugggacgu

SEQ ID NO: 1943708 - RNA, 19 nt, Artificial Sequence
  Description of Artificial Sequence: Synthetic oligonucleotide
cacaagcuuugggacacuc

SEQ ID NO: 1943709 - RNA, 19 nt, Artificial Sequence
  Description of Artificial Sequence: Synthetic oligonucleotide
ccaaugauccgggaugcac

SEQ ID NO: 1943710 - RNA, 19 nt, Artificial Sequence
  Description of Artificial Sequence: Synthetic oligonucleotide
agcagcaccauagccgguu

SEQ ID NO: 1943711 - RNA, 19 nt, Artificial Sequence
  Description of Artificial Sequence: Synthetic oligonucleotide
augcaccagccacuuuaca

SEQ ID NO: 1943712 - RNA, 19 nt, Artificial Sequence
  Description of Artificial Sequence: Synthetic oligonucleotide
gaucaccgggaaacacccc

SEQ ID NO: 1943713 - RNA, 19 nt, Artificial Sequence
  Description of Artificial Sequence: Synthetic oligonucleotide
gaccuucacauugccaaua

SEQ ID NO: 1943714 - RNA, 19 nt, Artificial Sequence
  Description of Artificial Sequence: Synthetic oligonucleotide
cgugccaucgggcauuaac

SEQ ID NO: 1943715 - RNA, 19 nt, Artificial Sequence
  Description of Artificial Sequence: Synthetic oligonucleotide
gccgaagggucaauuuuag

SEQ ID NO: 1943716 - RNA, 19 nt, Artificial Sequence
  Description of Artificial Sequence: Synthetic oligonucleotide
cuuacagcuuuagaacagu

SEQ ID NO: 1943717 - RNA, 19 nt, Artificial Sequence
  Description of Artificial Sequence: Synthetic oligonucleotide
caaaggcagugccuuucca

SEQ ID NO: 1943718 - RNA, 19 nt, Artificial Sequence
  Description of Artificial Sequence: Synthetic oligonucleotide
caccccucaggaucagcuc

SEQ ID NO: 1943719 - RNA, 19 nt, Artificial Sequence
  Description of Artificial Sequence: Synthetic oligonucleotide
auccgggaugcaccagcca

SEQ ID NO: 1943720 - RNA, 19 nt, Artificial Sequence
  Description of Artificial Sequence: Synthetic oligonucleotide
ccaugugcguccugucacc

SEQ ID NO: 1943721 - RNA, 19 nt, Artificial Sequence
  Description of Artificial Sequence: Synthetic oligonucleotide
ggagauuucuucacccgaa

SEQ ID NO: 1943722 - RNA, 19 nt, Artificial Sequence
  Description of Artificial Sequence: Synthetic oligonucleotide
ggaauggacgaguggagau

SEQ ID NO: 1943723 - RNA, 19 nt, Artificial Sequence
  Description of Artificial Sequence: Synthetic oligonucleotide
acgccacaaccgagaaggc

SEQ ID NO: 1943724 - RNA, 19 nt, Artificial Sequence
  Description of Artificial Sequence: Synthetic oligonucleotide
ggcaguggcaaugaucuua

SEQ ID NO: 1943725 - RNA, 19 nt, Artificial Sequence
  Description of Artificial Sequence: Synthetic oligonucleotide
ccgaagggucaauuuuagc

SEQ ID NO: 1943726 - RNA, 19 nt, Artificial Sequence
  Description of Artificial Sequence: Synthetic oligonucleotide
cacaaccgagaaggcagac

SEQ ID NO: 1943727 - RNA, 19 nt, Artificial Sequence
  Description of Artificial Sequence: Synthetic oligonucleotide
aggcaucgguguggcagac

SEQ ID NO: 1943728 - RNA, 19 nt, Artificial Sequence
  Description of Artificial Sequence: Synthetic oligonucleotide
cagagaugucagccacaac

SEQ ID NO: 1943729 - RNA, 19 nt, Artificial Sequence
  Description of Artificial Sequence: Synthetic oligonucleotide
augugcugguucccaugaa

SEQ ID NO: 1943730 - RNA, 19 nt, Artificial Sequence
  Description of Artificial Sequence: Synthetic oligonucleotide
ccacacugacuccccagcc

SEQ ID NO: 1943731 - RNA, 19 nt, Artificial Sequence
  Description of Artificial Sequence: Synthetic oligonucleotide
augauccgggaugcaccag

SEQ ID NO: 1943732 - RNA, 19 nt, Artificial Sequence
  Description of Artificial Sequence: Synthetic oligonucleotide
gaauggacgaguggagauu

SEQ ID NO: 1943733 - RNA, 19 nt, Artificial Sequence
  Description of Artificial Sequence: Synthetic oligonucleotide
gugccgaagggucaauuuu

SEQ ID NO: 1943734 - RNA, 19 nt, Artificial Sequence
  Description of Artificial Sequence: Synthetic oligonucleotide
caccgggaaacaccccuca

SEQ ID NO: 1943735 - RNA, 19 nt, Artificial Sequence
  Description of Artificial Sequence: Synthetic oligonucleotide
caugugcguccugucacca

SEQ ID NO: 1943736 - RNA, 19 nt, Artificial Sequence
  Description of Artificial Sequence: Synthetic oligonucleotide
gcuuuccggccucccaggc

SEQ ID NO: 1943737 - RNA, 19 nt, Artificial Sequence
  Description of Artificial Sequence: Synthetic oligonucleotide
ggaggggccacuucuacuu

SEQ ID NO: 1943738 - RNA, 19 nt, Artificial Sequence
  Description of Artificial Sequence: Synthetic oligonucleotide
cacccuagucaccccuuca

SEQ ID NO: 1943739 - RNA, 19 nt, Artificial Sequence
  Description of Artificial Sequence: Synthetic oligonucleotide
gguucccaugaaauggaaa

SEQ ID NO: 1943740 - RNA, 19 nt, Artificial Sequence
  Description of Artificial Sequence: Synthetic oligonucleotide
gcagcaccauagccgguug

SEQ ID NO: 1943741 - RNA, 19 nt, Artificial Sequence
  Description of Artificial Sequence: Synthetic oligonucleotide
agacggcaguggcaaugau

SEQ ID NO: 1943742 - RNA, 19 nt, Artificial Sequence
  Description of Artificial Sequence: Synthetic oligonucleotide
gcuuuagaacaguucgaau

SEQ ID NO: 1943743 - RNA, 19 nt, Artificial Sequence
  Description of Artificial Sequence: Synthetic oligonucleotide
gccuuugugggccgccuca

SEQ ID NO: 1943744 - RNA, 19 nt, Artificial Sequence
  Description of Artificial Sequence: Synthetic oligonucleotide
ggacguaaagcgggaugac

SEQ ID NO: 1943745 - RNA, 19 nt, Artificial Sequence
  Description of Artificial Sequence: Synthetic oligonucleotide
cucgaaggagaagucuacu

SEQ ID NO: 1943746 - RNA, 19 nt, Artificial Sequence
  Description of Artificial Sequence: Synthetic oligonucleotide
ggcaucgguguggcagacg

SEQ ID NO: 1943747 - RNA, 19 nt, Artificial Sequence
  Description of Artificial Sequence: Synthetic oligonucleotide
cagcuacaccaaccaccac

SEQ ID NO: 1943748 - RNA, 19 nt, Artificial Sequence
  Description of Artificial Sequence: Synthetic oligonucleotide
cagcaccauagccgguuga

SEQ ID NO: 1943749 - RNA, 19 nt, Artificial Sequence
  Description of Artificial Sequence: Synthetic oligonucleotide
cucuauggagagaggcuuu

SEQ ID NO: 1943750 - RNA, 19 nt, Artificial Sequence
  Description of Artificial Sequence: Synthetic oligonucleotide
acacaagcuuugggacacu

SEQ ID NO: 1943751 - RNA, 19 nt, Artificial Sequence
  Description of Artificial Sequence: Synthetic oligonucleotide
cguccugucaccagcugga

SEQ ID NO: 1943752 - RNA, 19 nt, Artificial Sequence
  Description of Artificial Sequence: Synthetic oligonucleotide
gccgguugaaacgccacaa

SEQ ID NO: 1943753 - RNA, 19 nt, Artificial Sequence
  Description of Artificial Sequence: Synthetic oligonucleotide
aggugccgaagggucaauu

SEQ ID NO: 1943754 - RNA, 19 nt, Artificial Sequence
  Description of Artificial Sequence: Synthetic oligonucleotide
ggugccgaagggucaauuu

SEQ ID NO: 1943755 - RNA, 19 nt, Artificial Sequence
  Description of Artificial Sequence: Synthetic oligonucleotide
gccaucgggcauuaacccu

SEQ ID NO: 1943756 - RNA, 19 nt, Artificial Sequence
  Description of Artificial Sequence: Synthetic oligonucleotide
aggcuccaccuuggcagug

SEQ ID NO: 1943757 - RNA, 19 nt, Artificial Sequence
  Description of Artificial Sequence: Synthetic oligonucleotide
cuuuccccugagucacucu

SEQ ID NO: 1943758 - RNA, 19 nt, Artificial Sequence
  Description of Artificial Sequence: Synthetic oligonucleotide
ccaggcgacugcagccuug

SEQ ID NO: 1943759 - RNA, 19 nt, Artificial Sequence
  Description of Artificial Sequence: Synthetic oligonucleotide
cagguagaaccaggcucca

SEQ ID NO: 1943760 - RNA, 19 nt, Artificial Sequence
  Description of Artificial Sequence: Synthetic oligonucleotide
uccggccucccaggcgacu

SEQ ID NO: 1943761 - RNA, 19 nt, Artificial Sequence
  Description of Artificial Sequence: Synthetic oligonucleotide
cuucuggcaaagguuuguu

SEQ ID NO: 1943762 - RNA, 19 nt, Artificial Sequence
  Description of Artificial Sequence: Synthetic oligonucleotide
ccaucgggcauuaacccuu

SEQ ID NO: 1943763 - RNA, 19 nt, Artificial Sequence
  Description of Artificial Sequence: Synthetic oligonucleotide
caccuucaugucccaagau

SEQ ID NO: 1943764 - RNA, 19 nt, Artificial Sequence
  Description of Artificial Sequence: Synthetic oligonucleotide
guccugucaccagcuggaa

SEQ ID NO: 1943765 - RNA, 19 nt, Artificial Sequence
  Description of Artificial Sequence: Synthetic oligonucleotide
ggacacucuccacacucuu

SEQ ID NO: 1943766 - RNA, 19 nt, Artificial Sequence
  Description of Artificial Sequence: Synthetic oligonucleotide
gugggccgccucaagggcu

SEQ ID NO: 1943767 - RNA, 19 nt, Artificial Sequence
  Description of Artificial Sequence: Synthetic oligonucleotide
cugacuccccagccuuugu

SEQ ID NO: 1943768 - RNA, 19 nt, Artificial Sequence
  Description of Artificial Sequence: Synthetic oligonucleotide
caucgggcauuaacccuuu

SEQ ID NO: 1943769 - RNA, 19 nt, Artificial Sequence
  Description of Artificial Sequence: Synthetic oligonucleotide
cguaaagcgggaugacagu

SEQ ID NO: 1943770 - RNA, 19 nt, Artificial Sequence
  Description of Artificial Sequence: Synthetic oligonucleotide
ggacgaguggagauuucuu

SEQ ID NO: 1943771 - RNA, 19 nt, Artificial Sequence
  Description of Artificial Sequence: Synthetic oligonucleotide
gugggacguaaagcgggau

SEQ ID NO: 1943772 - RNA, 19 nt, Artificial Sequence
  Description of Artificial Sequence: Synthetic oligonucleotide
gucgugccaucgggcauua

SEQ ID NO: 1943773 - RNA, 19 nt, Artificial Sequence
  Description of Artificial Sequence: Synthetic oligonucleotide
ucgugccaucgggcauuaa

SEQ ID NO: 1943774 - RNA, 19 nt, Artificial Sequence
  Description of Artificial Sequence: Synthetic oligonucleotide
cacugacuccccagccuuu

SEQ ID NO: 1943775 - RNA, 19 nt, Artificial Sequence
  Description of Artificial Sequence: Synthetic oligonucleotide
caccaacacuuuccacaau

SEQ ID NO: 1943776 - RNA, 19 nt, Artificial Sequence
  Description of Artificial Sequence: Synthetic oligonucleotide
cgccacaaccgagaaggca

SEQ ID NO: 1943777 - RNA, 19 nt, Artificial Sequence
  Description of Artificial Sequence: Synthetic oligonucleotide
ccgggaugcaccagccacu

SEQ ID NO: 1943778 - RNA, 19 nt, Artificial Sequence
  Description of Artificial Sequence: Synthetic oligonucleotide
cugcagccuugcaucugau

SEQ ID NO: 1943779 - RNA, 19 nt, Artificial Sequence
  Description of Artificial Sequence: Synthetic oligonucleotide
caguggcaaugaucuuaau

SEQ ID NO: 1943780 - RNA, 19 nt, Artificial Sequence
  Description of Artificial Sequence: Synthetic oligonucleotide
ccuuugugggccgccucaa

SEQ ID NO: 1943781 - RNA, 19 nt, Artificial Sequence
  Description of Artificial Sequence: Synthetic oligonucleotide
cagcagcaccauagccggu

SEQ ID NO: 1943782 - RNA, 19 nt, Artificial Sequence
  Description of Artificial Sequence: Synthetic oligonucleotide
ccgagaaggcagacuuuau

SEQ ID NO: 1943783 - RNA, 19 nt, Artificial Sequence
  Description of Artificial Sequence: Synthetic oligonucleotide
cagccacuuuacagcccau

SEQ ID NO: 1943784 - RNA, 19 nt, Artificial Sequence
  Description of Artificial Sequence: Synthetic oligonucleotide
cagcuccacucaggguaua

SEQ ID NO: 1943785 - RNA, 19 nt, Artificial Sequence
  Description of Artificial Sequence: Synthetic oligonucleotide
gggccgccucaagggcugc

SEQ ID NO: 1943786 - RNA, 19 nt, Artificial Sequence
  Description of Artificial Sequence: Synthetic oligonucleotide
ccgccucaagggcugcucu

SEQ ID NO: 1943787 - RNA, 19 nt, Artificial Sequence
  Description of Artificial Sequence: Synthetic oligonucleotide
cccuuuccccugagucacu

SEQ ID NO: 1943788 - RNA, 19 nt, Artificial Sequence
  Description of Artificial Sequence: Synthetic oligonucleotide
ggccgccucaagggcugcu

SEQ ID NO: 1943789 - RNA, 19 nt, Artificial Sequence
  Description of Artificial Sequence: Synthetic oligonucleotide
cgggaugcaccagccacuu

SEQ ID NO: 1943790 - RNA, 19 nt, Artificial Sequence
  Description of Artificial Sequence: Synthetic oligonucleotide
cccaggcgacugcagccuu

SEQ ID NO: 1943791 - RNA, 19 nt, Artificial Sequence
  Description of Artificial Sequence: Synthetic oligonucleotide
cggcaguggcaaugaucuu

SEQ ID NO: 1943792 - RNA, 19 nt, Artificial Sequence
  Description of Artificial Sequence: Synthetic oligonucleotide
auaucuagcagcucgaggc

SEQ ID NO: 1943793 - RNA, 19 nt, Artificial Sequence
  Description of Artificial Sequence: Synthetic oligonucleotide
cuuaucagggccaagaugg

SEQ ID NO: 1943794 - RNA, 19 nt, Artificial Sequence
  Description of Artificial Sequence: Synthetic oligonucleotide
uucaggauuuucaugacgg

SEQ ID NO: 1943795 - RNA, 19 nt, Artificial Sequence
  Description of Artificial Sequence: Synthetic oligonucleotide
auguuaucaggguugaugc

SEQ ID NO: 1943796 - RNA, 19 nt, Artificial Sequence
  Description of Artificial Sequence: Synthetic oligonucleotide
acuacacacacacacacac

SEQ ID NO: 1943797 - RNA, 19 nt, Artificial Sequence
  Description of Artificial Sequence: Synthetic oligonucleotide
aggauuaucaccuggaaca

SEQ ID NO: 1943798 - RNA, 19 nt, Artificial Sequence
  Description of Artificial Sequence: Synthetic oligonucleotide
gucauuagaauuccuaggg

SEQ ID NO: 1943799 - RNA, 19 nt, Artificial Sequence
  Description of Artificial Sequence: Synthetic oligonucleotide
uuagaaaugguucugcuua

SEQ ID NO: 1943800 - RNA, 19 nt, Artificial Sequence
  Description of Artificial Sequence: Synthetic oligonucleotide
auuaucaccuggaacaugc

SEQ ID NO: 1943801 - RNA, 19 nt, Artificial Sequence
  Description of Artificial Sequence: Synthetic oligonucleotide
ugcuuggcaaugaagaucc

SEQ ID NO: 1943802 - RNA, 19 nt, Artificial Sequence
  Description of Artificial Sequence: Synthetic oligonucleotide
aagaaaggcagugaugacg

SEQ ID NO: 1943803 - RNA, 19 nt, Artificial Sequence
  Description of Artificial Sequence: Synthetic oligonucleotide
cauuagaauuccuagggcc

SEQ ID NO: 1943804 - RNA, 19 nt, Artificial Sequence
  Description of Artificial Sequence: Synthetic oligonucleotide
ugagggaaaagucccacgg

SEQ ID NO: 1943805 - RNA, 19 nt, Artificial Sequence
  Description of Artificial Sequence: Synthetic oligonucleotide
ugcaaaaucagcucugccc

SEQ ID NO: 1943806 - RNA, 19 nt, Artificial Sequence
  Description of Artificial Sequence: Synthetic oligonucleotide
uguggcgauguuaucaggg

SEQ ID NO: 1943807 - RNA, 19 nt, Artificial Sequence
  Description of Artificial Sequence: Synthetic oligonucleotide
uaugacgggagucaggaca

SEQ ID NO: 1943808 - RNA, 19 nt, Artificial Sequence
  Description of Artificial Sequence: Synthetic oligonucleotide
aaaugguucugcuuaagau

SEQ ID NO: 1943809 - RNA, 19 nt, Artificial Sequence
  Description of Artificial Sequence: Synthetic oligonucleotide
agaaaggcagugaugacgc

SEQ ID NO: 1943810 - RNA, 19 nt, Artificial Sequence
  Description of Artificial Sequence: Synthetic oligonucleotide
accaacuucagaaucaagg

SEQ ID NO: 1943811 - RNA, 19 nt, Artificial Sequence
  Description of Artificial Sequence: Synthetic oligonucleotide
aguggugucagauaccaug

SEQ ID NO: 1943812 - RNA, 19 nt, Artificial Sequence
  Description of Artificial Sequence: Synthetic oligonucleotide
uacacacacacacacacac

SEQ ID NO: 1943813 - RNA, 19 nt, Artificial Sequence
  Description of Artificial Sequence: Synthetic oligonucleotide
uggagcauggguuaggcca

SEQ ID NO: 1943814 - RNA, 19 nt, Artificial Sequence
  Description of Artificial Sequence: Synthetic oligonucleotide
gauguuaucaggguugaug

SEQ ID NO: 1943815 - RNA, 19 nt, Artificial Sequence
  Description of Artificial Sequence: Synthetic oligonucleotide
agaaaaucagauguccugg

SEQ ID NO: 1943816 - RNA, 19 nt, Artificial Sequence
  Description of Artificial Sequence: Synthetic oligonucleotide
gauaccaugugucucugug

SEQ ID NO: 1943817 - RNA, 19 nt, Artificial Sequence
  Description of Artificial Sequence: Synthetic oligonucleotide
gaaaaucagauguccuggg

SEQ ID NO: 1943818 - RNA, 19 nt, Artificial Sequence
  Description of Artificial Sequence: Synthetic oligonucleotide
aaaucagauguccugggau

SEQ ID NO: 1943819 - RNA, 19 nt, Artificial Sequence
  Description of Artificial Sequence: Synthetic oligonucleotide
agaaucuuuucaucuggac

SEQ ID NO: 1943820 - RNA, 19 nt, Artificial Sequence
  Description of Artificial Sequence: Synthetic oligonucleotide
aaacuuccgagcaccaacc

SEQ ID NO: 1943821 - RNA, 19 nt, Artificial Sequence
  Description of Artificial Sequence: Synthetic oligonucleotide
uuucaucuggacagggagg

SEQ ID NO: 1943822 - RNA, 19 nt, Artificial Sequence
  Description of Artificial Sequence: Synthetic oligonucleotide
gauaucuagcagcucgagg

SEQ ID NO: 1943823 - RNA, 19 nt, Artificial Sequence
  Description of Artificial Sequence: Synthetic oligonucleotide
auuccuagggccaaggccg

SEQ ID NO: 1943824 - RNA, 19 nt, Artificial Sequence
  Description of Artificial Sequence: Synthetic oligonucleotide
agcagacugcacuacacac

SEQ ID NO: 1943825 - RNA, 19 nt, Artificial Sequence
  Description of Artificial Sequence: Synthetic oligonucleotide
aggucauuagaauuccuag

SEQ ID NO: 1943826 - RNA, 19 nt, Artificial Sequence
  Description of Artificial Sequence: Synthetic oligonucleotide
ucugcuuaagaugaggccu

SEQ ID NO: 1943827 - RNA, 19 nt, Artificial Sequence
  Description of Artificial Sequence: Synthetic oligonucleotide
aaccagaucugcaaaauca

SEQ ID NO: 1943828 - RNA, 19 nt, Artificial Sequence
  Description of Artificial Sequence: Synthetic oligonucleotide
agaaaccagcucugaaacc

SEQ ID NO: 1943829 - RNA, 19 nt, Artificial Sequence
  Description of Artificial Sequence: Synthetic oligonucleotide
cauggguuaggccagaauc

SEQ ID NO: 1943830 - RNA, 19 nt, Artificial Sequence
  Description of Artificial Sequence: Synthetic oligonucleotide
gaugcggcuggucugaaug

SEQ ID NO: 1943831 - RNA, 19 nt, Artificial Sequence
  Description of Artificial Sequence: Synthetic oligonucleotide
gauacagugguugucagga

SEQ ID NO: 1943832 - RNA, 19 nt, Artificial Sequence
  Description of Artificial Sequence: Synthetic oligonucleotide
aaaaucagauguccuggga

SEQ ID NO: 1943833 - RNA, 19 nt, Artificial Sequence
  Description of Artificial Sequence: Synthetic oligonucleotide
cacacacacacacacacgc

SEQ ID NO: 1943834 - RNA, 19 nt, Artificial Sequence
  Description of Artificial Sequence: Synthetic oligonucleotide
agacugaugaggccacugc

SEQ ID NO: 1943835 - RNA, 19 nt, Artificial Sequence
  Description of Artificial Sequence: Synthetic oligonucleotide
cuuggcagacugaugaggc

SEQ ID NO: 1943836 - RNA, 19 nt, Artificial Sequence
  Description of Artificial Sequence: Synthetic oligonucleotide
uggggaaccacccauacuu

SEQ ID NO: 1943837 - RNA, 19 nt, Artificial Sequence
  Description of Artificial Sequence: Synthetic oligonucleotide
aagaucuugcugcuuguca

SEQ ID NO: 1943838 - RNA, 19 nt, Artificial Sequence
  Description of Artificial Sequence: Synthetic oligonucleotide
aggauuuucaugacgggcg

SEQ ID NO: 1943839 - RNA, 19 nt, Artificial Sequence
  Description of Artificial Sequence: Synthetic oligonucleotide
aaaagucccacggaggccu

SEQ ID NO: 1943840 - RNA, 19 nt, Artificial Sequence
  Description of Artificial Sequence: Synthetic oligonucleotide
uaugcaggucauuagaauu

SEQ ID NO: 1943841 - RNA, 19 nt, Artificial Sequence
  Description of Artificial Sequence: Synthetic oligonucleotide
uacggaguugauuucugag

SEQ ID NO: 1943842 - RNA, 19 nt, Artificial Sequence
  Description of Artificial Sequence: Synthetic oligonucleotide
uccaaacugcugaugacca

SEQ ID NO: 1943843 - RNA, 19 nt, Artificial Sequence
  Description of Artificial Sequence: Synthetic oligonucleotide
augaagccaaugcagacca

SEQ ID NO: 1943844 - RNA, 19 nt, Artificial Sequence
  Description of Artificial Sequence: Synthetic oligonucleotide
aaggccgcaagaaaggcag

SEQ ID NO: 1943845 - RNA, 19 nt, Artificial Sequence
  Description of Artificial Sequence: Synthetic oligonucleotide
ugugcuagucuccuuggca

SEQ ID NO: 1943846 - RNA, 19 nt, Artificial Sequence
  Description of Artificial Sequence: Synthetic oligonucleotide
aggugugcuccacaugugc

SEQ ID NO: 1943847 - RNA, 19 nt, Artificial Sequence
  Description of Artificial Sequence: Synthetic oligonucleotide
gaaccaucacuucugccag

SEQ ID NO: 1943848 - RNA, 19 nt, Artificial Sequence
  Description of Artificial Sequence: Synthetic oligonucleotide
gaaaccagcucugaaacca

SEQ ID NO: 1943849 - RNA, 19 nt, Artificial Sequence
  Description of Artificial Sequence: Synthetic oligonucleotide
aggugcagaaaccagcucu

SEQ ID NO: 1943850 - RNA, 19 nt, Artificial Sequence
  Description of Artificial Sequence: Synthetic oligonucleotide
gaguugauuucugaggagc

SEQ ID NO: 1943851 - RNA, 19 nt, Artificial Sequence
  Description of Artificial Sequence: Synthetic oligonucleotide
uggacaugagggaaaaguc

SEQ ID NO: 1943852 - RNA, 19 nt, Artificial Sequence
  Description of Artificial Sequence: Synthetic oligonucleotide
cacacacacacacacacac

SEQ ID NO: 1943853 - RNA, 19 nt, Artificial Sequence
  Description of Artificial Sequence: Synthetic oligonucleotide
uucugcuuaagaugaggcc

SEQ ID NO: 1943854 - RNA, 19 nt, Artificial Sequence
  Description of Artificial Sequence: Synthetic oligonucleotide
aggggugagagccaugaag

SEQ ID NO: 1943855 - RNA, 19 nt, Artificial Sequence
  Description of Artificial Sequence: Synthetic oligonucleotide
caucacuucugccagguac

SEQ ID NO: 1943856 - RNA, 19 nt, Artificial Sequence
  Description of Artificial Sequence: Synthetic oligonucleotide
ggucauuagaauuccuagg

SEQ ID NO: 1943857 - RNA, 19 nt, Artificial Sequence
  Description of Artificial Sequence: Synthetic oligonucleotide
cagaaaccagcucugaaac

SEQ ID NO: 1943858 - RNA, 19 nt, Artificial Sequence
  Description of Artificial Sequence: Synthetic oligonucleotide
gaaucaaggcgugugcuag

SEQ ID NO: 1943859 - RNA, 19 nt, Artificial Sequence
  Description of Artificial Sequence: Synthetic oligonucleotide
cugcacuacacacacacac

SEQ ID NO: 1943860 - RNA, 19 nt, Artificial Sequence
  Description of Artificial Sequence: Synthetic oligonucleotide
aggaugauggggaaccacc

SEQ ID NO: 1943861 - RNA, 19 nt, Artificial Sequence
  Description of Artificial Sequence: Synthetic oligonucleotide
ucagggccaagauggauag

SEQ ID NO: 1943862 - RNA, 19 nt, Artificial Sequence
  Description of Artificial Sequence: Synthetic oligonucleotide
gaugacgcugcucaugcac

SEQ ID NO: 1943863 - RNA, 19 nt, Artificial Sequence
  Description of Artificial Sequence: Synthetic oligonucleotide
ugugucuguagaagaagcu

SEQ ID NO: 1943864 - RNA, 19 nt, Artificial Sequence
  Description of Artificial Sequence: Synthetic oligonucleotide
gaucaccagaaagagcagg

SEQ ID NO: 1943865 - RNA, 19 nt, Artificial Sequence
  Description of Artificial Sequence: Synthetic oligonucleotide
aacaccacauaugacggga

SEQ ID NO: 1943866 - RNA, 19 nt, Artificial Sequence
  Description of Artificial Sequence: Synthetic oligonucleotide
cuucaggauuuucaugacg

SEQ ID NO: 1943867 - RNA, 19 nt, Artificial Sequence
  Description of Artificial Sequence: Synthetic oligonucleotide
gacucgagcugauacggag

SEQ ID NO: 1943868 - RNA, 19 nt, Artificial Sequence
  Description of Artificial Sequence: Synthetic oligonucleotide
uuuagaaaugguucugcuu

SEQ ID NO: 1943869 - RNA, 19 nt, Artificial Sequence
  Description of Artificial Sequence: Synthetic oligonucleotide
gaccaguggugucagauac

SEQ ID NO: 1943870 - RNA, 19 nt, Artificial Sequence
  Description of Artificial Sequence: Synthetic oligonucleotide
gaaaugguucugcuuaaga

SEQ ID NO: 1943871 - RNA, 19 nt, Artificial Sequence
  Description of Artificial Sequence: Synthetic oligonucleotide
guugaugccaaacuuccga

SEQ ID NO: 1943872 - RNA, 19 nt, Artificial Sequence
  Description of Artificial Sequence: Synthetic oligonucleotide
accagguugccaccaacac

SEQ ID NO: 1943873 - RNA, 19 nt, Artificial Sequence
  Description of Artificial Sequence: Synthetic oligonucleotide
augaccauagccaggauga

SEQ ID NO: 1943874 - RNA, 19 nt, Artificial Sequence
  Description of Artificial Sequence: Synthetic oligonucleotide
ugacuggccuuccaccagg

SEQ ID NO: 1943875 - RNA, 19 nt, Artificial Sequence
  Description of Artificial Sequence: Synthetic oligonucleotide
aggaauagccugcuggaca

SEQ ID NO: 1943876 - RNA, 19 nt, Artificial Sequence
  Description of Artificial Sequence: Synthetic oligonucleotide
ugcacuacacacacacaca

SEQ ID NO: 1943877 - RNA, 19 nt, Artificial Sequence
  Description of Artificial Sequence: Synthetic oligonucleotide
ugucagauaccaugugucu

SEQ ID NO: 1943878 - RNA, 19 nt, Artificial Sequence
  Description of Artificial Sequence: Synthetic oligonucleotide
ugcucaugcacagcaaugc

SEQ ID NO: 1943879 - RNA, 19 nt, Artificial Sequence
  Description of Artificial Sequence: Synthetic oligonucleotide
ggaaaagucccacggaggc

SEQ ID NO: 1943880 - RNA, 19 nt, Artificial Sequence
  Description of Artificial Sequence: Synthetic oligonucleotide
cagacugcacuacacacac

SEQ ID NO: 1943881 - RNA, 19 nt, Artificial Sequence
  Description of Artificial Sequence: Synthetic oligonucleotide
aguggagcauggguuaggc

SEQ ID NO: 1943882 - RNA, 19 nt, Artificial Sequence
  Description of Artificial Sequence: Synthetic oligonucleotide
ugauuucugaggagcagaa

SEQ ID NO: 1943883 - RNA, 19 nt, Artificial Sequence
  Description of Artificial Sequence: Synthetic oligonucleotide
augagggaaaagucccacg

SEQ ID NO: 1943884 - RNA, 19 nt, Artificial Sequence
  Description of Artificial Sequence: Synthetic oligonucleotide
gugcuagucuccuuggcag

SEQ ID NO: 1943885 - RNA, 19 nt, Artificial Sequence
  Description of Artificial Sequence: Synthetic oligonucleotide
agccaaugcagaccagugg

SEQ ID NO: 1943886 - RNA, 19 nt, Artificial Sequence
  Description of Artificial Sequence: Synthetic oligonucleotide
uaugggauacagugguugu

SEQ ID NO: 1943887 - RNA, 19 nt, Artificial Sequence
  Description of Artificial Sequence: Synthetic oligonucleotide
aggacucgagcugauacgg

SEQ ID NO: 1943888 - RNA, 19 nt, Artificial Sequence
  Description of Artificial Sequence: Synthetic oligonucleotide
uguuaucaggguugaugcc

SEQ ID NO: 1943889 - RNA, 19 nt, Artificial Sequence
  Description of Artificial Sequence: Synthetic oligonucleotide
ucagcucugccccucauua

SEQ ID NO: 1943890 - RNA, 19 nt, Artificial Sequence
  Description of Artificial Sequence: Synthetic oligonucleotide
gagguaugggauacagugg

SEQ ID NO: 1943891 - RNA, 19 nt, Artificial Sequence
  Description of Artificial Sequence: Synthetic oligonucleotide
gaggccuccaaacugcuga

SEQ ID NO: 1943892 - RNA, 19 nt, Artificial Sequence
  Description of Artificial Sequence: Synthetic oligonucleotide
gcaccaaccacuaugcagg

SEQ ID NO: 1943893 - RNA, 19 nt, Artificial Sequence
  Description of Artificial Sequence: Synthetic oligonucleotide
gggaucaccagaaagagca

SEQ ID NO: 1943894 - RNA, 19 nt, Artificial Sequence
  Description of Artificial Sequence: Synthetic oligonucleotide
gauagugugaugaggucuc

SEQ ID NO: 1943895 - RNA, 19 nt, Artificial Sequence
  Description of Artificial Sequence: Synthetic oligonucleotide
gacagccaugccuuuaaac

SEQ ID NO: 1943896 - RNA, 19 nt, Artificial Sequence
  Description of Artificial Sequence: Synthetic oligonucleotide
auggauagugugaugaggu

SEQ ID NO: 1943897 - RNA, 19 nt, Artificial Sequence
  Description of Artificial Sequence: Synthetic oligonucleotide
gucagggaggugcagaaac

SEQ ID NO: 1943898 - RNA, 19 nt, Artificial Sequence
  Description of Artificial Sequence: Synthetic oligonucleotide
ugaugccaaacuuccgagc

SEQ ID NO: 1943899 - RNA, 19 nt, Artificial Sequence
  Description of Artificial Sequence: Synthetic oligonucleotide
aaccacccauacuucagga

SEQ ID NO: 1943900 - RNA, 19 nt, Artificial Sequence
  Description of Artificial Sequence: Synthetic oligonucleotide
ugccaggucagucgaacca

SEQ ID NO: 1943901 - RNA, 19 nt, Artificial Sequence
  Description of Artificial Sequence: Synthetic oligonucleotide
guaugggauacagugguug

SEQ ID NO: 1943902 - RNA, 19 nt, Artificial Sequence
  Description of Artificial Sequence: Synthetic oligonucleotide
agggccaagauggauagug

SEQ ID NO: 1943903 - RNA, 19 nt, Artificial Sequence
  Description of Artificial Sequence: Synthetic oligonucleotide
aaaguggagcauggguuag

SEQ ID NO: 1943904 - RNA, 19 nt, Artificial Sequence
  Description of Artificial Sequence: Synthetic oligonucleotide
ugauacggaguugauuucu

SEQ ID NO: 1943905 - RNA, 19 nt, Artificial Sequence
  Description of Artificial Sequence: Synthetic oligonucleotide
aucaggguugaugccaaac

SEQ ID NO: 1943906 - RNA, 19 nt, Artificial Sequence
  Description of Artificial Sequence: Synthetic oligonucleotide
aucuggacagggaggaccc

SEQ ID NO: 1943907 - RNA, 19 nt, Artificial Sequence
  Description of Artificial Sequence: Synthetic oligonucleotide
ccaacaccacauaugacgg

SEQ ID NO: 1943908 - RNA, 19 nt, Artificial Sequence
  Description of Artificial Sequence: Synthetic oligonucleotide
ugccuuuaaacugauguuu

SEQ ID NO: 1943909 - RNA, 19 nt, Artificial Sequence
  Description of Artificial Sequence: Synthetic oligonucleotide
ucuagcagcucgaggcccc

SEQ ID NO: 1943910 - RNA, 19 nt, Artificial Sequence
  Description of Artificial Sequence: Synthetic oligonucleotide
gauggggaaccacccauac

SEQ ID NO: 1943911 - RNA, 19 nt, Artificial Sequence
  Description of Artificial Sequence: Synthetic oligonucleotide
aaggcgugugcuagucucc

SEQ ID NO: 1943912 - RNA, 19 nt, Artificial Sequence
  Description of Artificial Sequence: Synthetic oligonucleotide
gaauuccuagggccaaggc

SEQ ID NO: 1943913 - RNA, 19 nt, Artificial Sequence
  Description of Artificial Sequence: Synthetic oligonucleotide
aggguugaugccaaacuuc

SEQ ID NO: 1943914 - RNA, 19 nt, Artificial Sequence
  Description of Artificial Sequence: Synthetic oligonucleotide
gaaaguggagcauggguua

SEQ ID NO: 1943915 - RNA, 19 nt, Artificial Sequence
  Description of Artificial Sequence: Synthetic oligonucleotide
uuucaugacgggcggguuc

SEQ ID NO: 1943916 - RNA, 19 nt, Artificial Sequence
  Description of Artificial Sequence: Synthetic oligonucleotide
ugccaaacuuccgagcacc

SEQ ID NO: 1943917 - RNA, 19 nt, Artificial Sequence
  Description of Artificial Sequence: Synthetic oligonucleotide
acugacuggccuuccacca

SEQ ID NO: 1943918 - RNA, 19 nt, Artificial Sequence
  Description of Artificial Sequence: Synthetic oligonucleotide
ugggaucaccagaaagagc

SEQ ID NO: 1943919 - RNA, 19 nt, Artificial Sequence
  Description of Artificial Sequence: Synthetic oligonucleotide
uggccuuccaccaggcaga

SEQ ID NO: 1943920 - RNA, 19 nt, Artificial Sequence
  Description of Artificial Sequence: Synthetic oligonucleotide
aucuagcagcucgaggccc

SEQ ID NO: 1943921 - RNA, 19 nt, Artificial Sequence
  Description of Artificial Sequence: Synthetic oligonucleotide
ucccacggaggccugcagg

SEQ ID NO: 1943922 - RNA, 19 nt, Artificial Sequence
  Description of Artificial Sequence: Synthetic oligonucleotide
caaggcgugugcuagucuc

SEQ ID NO: 1943923 - RNA, 19 nt, Artificial Sequence
  Description of Artificial Sequence: Synthetic oligonucleotide
gagccaugaagccaaugca

SEQ ID NO: 1943924 - RNA, 19 nt, Artificial Sequence
  Description of Artificial Sequence: Synthetic oligonucleotide
caucuggacagggaggacc

SEQ ID NO: 1943925 - RNA, 19 nt, Artificial Sequence
  Description of Artificial Sequence: Synthetic oligonucleotide
aaucaaggcgugugcuagu

SEQ ID NO: 1943926 - RNA, 19 nt, Artificial Sequence
  Description of Artificial Sequence: Synthetic oligonucleotide
cauaugacgggagucagga

SEQ ID NO: 1943927 - RNA, 19 nt, Artificial Sequence
  Description of Artificial Sequence: Synthetic oligonucleotide
agaaaguggagcauggguu

SEQ ID NO: 1943928 - RNA, 19 nt, Artificial Sequence
  Description of Artificial Sequence: Synthetic oligonucleotide
cuuuaaacugauguuuaga

SEQ ID NO: 1943929 - RNA, 19 nt, Artificial Sequence
  Description of Artificial Sequence: Synthetic oligonucleotide
gauuuucaugacgggcggg

SEQ ID NO: 1943930 - RNA, 19 nt, Artificial Sequence
  Description of Artificial Sequence: Synthetic oligonucleotide
ggauuuucaugacgggcgg

SEQ ID NO: 1943931 - RNA, 19 nt, Artificial Sequence
  Description of Artificial Sequence: Synthetic oligonucleotide
agaaagagcaggacucgag

SEQ ID NO: 1943932 - RNA, 19 nt, Artificial Sequence
  Description of Artificial Sequence: Synthetic oligonucleotide
auaccaugugucucugugu

SEQ ID NO: 1943933 - RNA, 19 nt, Artificial Sequence
  Description of Artificial Sequence: Synthetic oligonucleotide
auaugacgggagucaggac

SEQ ID NO: 1943934 - RNA, 19 nt, Artificial Sequence
  Description of Artificial Sequence: Synthetic oligonucleotide
gauacggaguugauuucug

SEQ ID NO: 1943935 - RNA, 19 nt, Artificial Sequence
  Description of Artificial Sequence: Synthetic oligonucleotide
augauggggaaccacccau

SEQ ID NO: 1943936 - RNA, 19 nt, Artificial Sequence
  Description of Artificial Sequence: Synthetic oligonucleotide
aacuuccgagcaccaacca

SEQ ID NO: 1943937 - RNA, 19 nt, Artificial Sequence
  Description of Artificial Sequence: Synthetic oligonucleotide
ggucugaauggccaccagg

SEQ ID NO: 1943938 - RNA, 19 nt, Artificial Sequence
  Description of Artificial Sequence: Synthetic oligonucleotide
ccagaaucuuuucaucugg

SEQ ID NO: 1943939 - RNA, 19 nt, Artificial Sequence
  Description of Artificial Sequence: Synthetic oligonucleotide
guugauuucugaggagcag

SEQ ID NO: 1943940 - RNA, 19 nt, Artificial Sequence
  Description of Artificial Sequence: Synthetic oligonucleotide
acacacacacacacgcuac

SEQ ID NO: 1943941 - RNA, 19 nt, Artificial Sequence
  Description of Artificial Sequence: Synthetic oligonucleotide
auguuuagaaaugguucug

SEQ ID NO: 1943942 - RNA, 19 nt, Artificial Sequence
  Description of Artificial Sequence: Synthetic oligonucleotide
ucgaggccccagcaggagg

SEQ ID NO: 1943943 - RNA, 19 nt, Artificial Sequence
  Description of Artificial Sequence: Synthetic oligonucleotide
aaguggagcauggguuagg

SEQ ID NO: 1943944 - RNA, 19 nt, Artificial Sequence
  Description of Artificial Sequence: Synthetic oligonucleotide
aaaccagcucugaaaccag

SEQ ID NO: 1943945 - RNA, 19 nt, Artificial Sequence
  Description of Artificial Sequence: Synthetic oligonucleotide
uggagaugcggcuggucug

SEQ ID NO: 1943946 - RNA, 19 nt, Artificial Sequence
  Description of Artificial Sequence: Synthetic oligonucleotide
cagaucugcaaaaucagcu

SEQ ID NO: 1943947 - RNA, 19 nt, Artificial Sequence
  Description of Artificial Sequence: Synthetic oligonucleotide
uuagaauuccuagggccaa

SEQ ID NO: 1943948 - RNA, 19 nt, Artificial Sequence
  Description of Artificial Sequence: Synthetic oligonucleotide
gguguggcgauguuaucag

SEQ ID NO: 1943949 - RNA, 19 nt, Artificial Sequence
  Description of Artificial Sequence: Synthetic oligonucleotide
auguccugggaucaccaga

SEQ ID NO: 1943950 - RNA, 19 nt, Artificial Sequence
  Description of Artificial Sequence: Synthetic oligonucleotide
auagugugaugaggucucc

SEQ ID NO: 1943951 - RNA, 19 nt, Artificial Sequence
  Description of Artificial Sequence: Synthetic oligonucleotide
caacaccacauaugacggg

SEQ ID NO: 1943952 - RNA, 19 nt, Artificial Sequence
  Description of Artificial Sequence: Synthetic oligonucleotide
cucauuagccaguccagga

SEQ ID NO: 1943953 - RNA, 19 nt, Artificial Sequence
  Description of Artificial Sequence: Synthetic oligonucleotide
gauuaucaccuggaacaug

SEQ ID NO: 1943954 - RNA, 19 nt, Artificial Sequence
  Description of Artificial Sequence: Synthetic oligonucleotide
auacggaguugauuucuga

SEQ ID NO: 1943955 - RNA, 19 nt, Artificial Sequence
  Description of Artificial Sequence: Synthetic oligonucleotide
aucuuuucaucuggacagg

SEQ ID NO: 1943956 - RNA, 19 nt, Artificial Sequence
  Description of Artificial Sequence: Synthetic oligonucleotide
aucaaggcgugugcuaguc

SEQ ID NO: 1943957 - RNA, 19 nt, Artificial Sequence
  Description of Artificial Sequence: Synthetic oligonucleotide
cuuaagaugaggccuccaa

SEQ ID NO: 1943958 - RNA, 19 nt, Artificial Sequence
  Description of Artificial Sequence: Synthetic oligonucleotide
ggggugagagccaugaagc

SEQ ID NO: 1943959 - RNA, 19 nt, Artificial Sequence
  Description of Artificial Sequence: Synthetic oligonucleotide
gguucugcuuaagaugagg

SEQ ID NO: 1943960 - RNA, 19 nt, Artificial Sequence
  Description of Artificial Sequence: Synthetic oligonucleotide
agugaugacgcugcucaug

SEQ ID NO: 1943961 - RNA, 19 nt, Artificial Sequence
  Description of Artificial Sequence: Synthetic oligonucleotide
cugcuuaagaugaggccuc

SEQ ID NO: 1943962 - RNA, 19 nt, Artificial Sequence
  Description of Artificial Sequence: Synthetic oligonucleotide
uucaugacgggcggguucu

SEQ ID NO: 1943963 - RNA, 19 nt, Artificial Sequence
  Description of Artificial Sequence: Synthetic oligonucleotide
accacuaugcaggucauua

SEQ ID NO: 1943964 - RNA, 19 nt, Artificial Sequence
  Description of Artificial Sequence: Synthetic oligonucleotide
agucgaaccaucacuucug

SEQ ID NO: 1943965 - RNA, 19 nt, Artificial Sequence
  Description of Artificial Sequence: Synthetic oligonucleotide
ggauacagugguugucagg

SEQ ID NO: 1943966 - RNA, 19 nt, Artificial Sequence
  Description of Artificial Sequence: Synthetic oligonucleotide
acacacgcuaccaacuuca

SEQ ID NO: 1943967 - RNA, 19 nt, Artificial Sequence
  Description of Artificial Sequence: Synthetic oligonucleotide
cacuaugcaggucauuaga

SEQ ID NO: 1943968 - RNA, 19 nt, Artificial Sequence
  Description of Artificial Sequence: Synthetic oligonucleotide
ggacacuguggacaugagg

SEQ ID NO: 1943969 - RNA, 19 nt, Artificial Sequence
  Description of Artificial Sequence: Synthetic oligonucleotide
agauaucuagcagcucgag

SEQ ID NO: 1943970 - RNA, 19 nt, Artificial Sequence
  Description of Artificial Sequence: Synthetic oligonucleotide
uggauagugugaugagguc

SEQ ID NO: 1943971 - RNA, 19 nt, Artificial Sequence
  Description of Artificial Sequence: Synthetic oligonucleotide
aucaccagaaagagcagga

SEQ ID NO: 1943972 - RNA, 19 nt, Artificial Sequence
  Description of Artificial Sequence: Synthetic oligonucleotide
agaggggugagagccauga

SEQ ID NO: 1943973 - RNA, 19 nt, Artificial Sequence
  Description of Artificial Sequence: Synthetic oligonucleotide
augggauacagugguuguc

SEQ ID NO: 1943974 - RNA, 19 nt, Artificial Sequence
  Description of Artificial Sequence: Synthetic oligonucleotide
caugagggaaaagucccac

SEQ ID NO: 1943975 - RNA, 19 nt, Artificial Sequence
  Description of Artificial Sequence: Synthetic oligonucleotide
augacgggagucaggacag

SEQ ID NO: 1943976 - RNA, 19 nt, Artificial Sequence
  Description of Artificial Sequence: Synthetic oligonucleotide
ugguucugcuuaagaugag

SEQ ID NO: 1943977 - RNA, 19 nt, Artificial Sequence
  Description of Artificial Sequence: Synthetic oligonucleotide
gcacuacacacacacacac

SEQ ID NO: 1943978 - RNA, 19 nt, Artificial Sequence
  Description of Artificial Sequence: Synthetic oligonucleotide
augaggccacugcccaggc

SEQ ID NO: 1943979 - RNA, 19 nt, Artificial Sequence
  Description of Artificial Sequence: Synthetic oligonucleotide
ugcuugucacugacuggcc

SEQ ID NO: 1943980 - RNA, 19 nt, Artificial Sequence
  Description of Artificial Sequence: Synthetic oligonucleotide
cacacacacacacgcuacc

SEQ ID NO: 1943981 - RNA, 19 nt, Artificial Sequence
  Description of Artificial Sequence: Synthetic oligonucleotide
aucagauguccugggauca

SEQ ID NO: 1943982 - RNA, 19 nt, Artificial Sequence
  Description of Artificial Sequence: Synthetic oligonucleotide
caagauggauagugugaug

SEQ ID NO: 1943983 - RNA, 19 nt, Artificial Sequence
  Description of Artificial Sequence: Synthetic oligonucleotide
accagguaaagcaccagga

SEQ ID NO: 1943984 - RNA, 19 nt, Artificial Sequence
  Description of Artificial Sequence: Synthetic oligonucleotide
gagcagacugcacuacaca

SEQ ID NO: 1943985 - RNA, 19 nt, Artificial Sequence
  Description of Artificial Sequence: Synthetic oligonucleotide
ucagucgaaccaucacuuc

SEQ ID NO: 1943986 - RNA, 19 nt, Artificial Sequence
  Description of Artificial Sequence: Synthetic oligonucleotide
ugcuagucuccuuggcaga

SEQ ID NO: 1943987 - RNA, 19 nt, Artificial Sequence
  Description of Artificial Sequence: Synthetic oligonucleotide
ucugaauggccaccagguu

SEQ ID NO: 1943988 - RNA, 19 nt, Artificial Sequence
  Description of Artificial Sequence: Synthetic oligonucleotide
acauaugacgggagucagg

SEQ ID NO: 1943989 - RNA, 19 nt, Artificial Sequence
  Description of Artificial Sequence: Synthetic oligonucleotide
ggguugaugccaaacuucc

SEQ ID NO: 1943990 - RNA, 19 nt, Artificial Sequence
  Description of Artificial Sequence: Synthetic oligonucleotide
ucaaggcgugugcuagucu

SEQ ID NO: 1943991 - RNA, 19 nt, Artificial Sequence
  Description of Artificial Sequence: Synthetic oligonucleotide
guuuagaaaugguucugcu

SEQ ID NO: 1943992 - RNA, 19 nt, Artificial Sequence
  Description of Artificial Sequence: Synthetic oligonucleotide
cacauaugacgggagucag

SEQ ID NO: 1943993 - RNA, 19 nt, Artificial Sequence
  Description of Artificial Sequence: Synthetic oligonucleotide
gcuuaucagggccaagaug

SEQ ID NO: 1943994 - RNA, 19 nt, Artificial Sequence
  Description of Artificial Sequence: Synthetic oligonucleotide
ccaaccacuaugcagguca

SEQ ID NO: 1943995 - RNA, 19 nt, Artificial Sequence
  Description of Artificial Sequence: Synthetic oligonucleotide
ccuuuaaacugauguuuag

SEQ ID NO: 1943996 - RNA, 19 nt, Artificial Sequence
  Description of Artificial Sequence: Synthetic oligonucleotide
gcugauacggaguugauuu

SEQ ID NO: 1943997 - RNA, 19 nt, Artificial Sequence
  Description of Artificial Sequence: Synthetic oligonucleotide
ugauggggaaccacccaua

SEQ ID NO: 1943998 - RNA, 19 nt, Artificial Sequence
  Description of Artificial Sequence: Synthetic oligonucleotide
acacacacacacacacacg

SEQ ID NO: 1943999 - RNA, 19 nt, Artificial Sequence
  Description of Artificial Sequence: Synthetic oligonucleotide
agcaggauuaucaccugga

SEQ ID NO: 1944000 - RNA, 19 nt, Artificial Sequence
  Description of Artificial Sequence: Synthetic oligonucleotide
gcaggacucgagcugauac

SEQ ID NO: 1944001 - RNA, 19 nt, Artificial Sequence
  Description of Artificial Sequence: Synthetic oligonucleotide
accaguggugucagauacc

SEQ ID NO: 1944002 - RNA, 19 nt, Artificial Sequence
  Description of Artificial Sequence: Synthetic oligonucleotide
guggacaugagggaaaagu

SEQ ID NO: 1944003 - RNA, 19 nt, Artificial Sequence
  Description of Artificial Sequence: Synthetic oligonucleotide
cugauacggaguugauuuc

SEQ ID NO: 1944004 - RNA, 19 nt, Artificial Sequence
  Description of Artificial Sequence: Synthetic oligonucleotide
caugccugccaccagguaa

SEQ ID NO: 1944005 - RNA, 19 nt, Artificial Sequence
  Description of Artificial Sequence: Synthetic oligonucleotide
ccagaucugcaaaaucagc

SEQ ID NO: 1944006 - RNA, 19 nt, Artificial Sequence
  Description of Artificial Sequence: Synthetic oligonucleotide
gccagaaucuuuucaucug

SEQ ID NO: 1944007 - RNA, 19 nt, Artificial Sequence
  Description of Artificial Sequence: Synthetic oligonucleotide
gucagauaccaugugucuc

SEQ ID NO: 1944008 - RNA, 19 nt, Artificial Sequence
  Description of Artificial Sequence: Synthetic oligonucleotide
cagaaucuuuucaucugga

SEQ ID NO: 1944009 - RNA, 19 nt, Artificial Sequence
  Description of Artificial Sequence: Synthetic oligonucleotide
ugcagaccaguggugucag

SEQ ID NO: 1944010 - RNA, 19 nt, Artificial Sequence
  Description of Artificial Sequence: Synthetic oligonucleotide
agugguugucaggauccag

SEQ ID NO: 1944011 - RNA, 19 nt, Artificial Sequence
  Description of Artificial Sequence: Synthetic oligonucleotide
aagucccacggaggccugc

SEQ ID NO: 1944012 - RNA, 19 nt, Artificial Sequence
  Description of Artificial Sequence: Synthetic oligonucleotide
gacgggcggguucugcuug

SEQ ID NO: 1944013 - RNA, 19 nt, Artificial Sequence
  Description of Artificial Sequence: Synthetic oligonucleotide
augacgggcggguucugcu

SEQ ID NO: 1944014 - RNA, 19 nt, Artificial Sequence
  Description of Artificial Sequence: Synthetic oligonucleotide
caguccaggaggaagcaaa

SEQ ID NO: 1944015 - RNA, 19 nt, Artificial Sequence
  Description of Artificial Sequence: Synthetic oligonucleotide
acacgcuaccaacuucaga

SEQ ID NO: 1944016 - RNA, 19 nt, Artificial Sequence
  Description of Artificial Sequence: Synthetic oligonucleotide
agccaugccuuuaaacuga

SEQ ID NO: 1944017 - RNA, 19 nt, Artificial Sequence
  Description of Artificial Sequence: Synthetic oligonucleotide
guuaggccagaaucuuuuc

SEQ ID NO: 1944018 - RNA, 19 nt, Artificial Sequence
  Description of Artificial Sequence: Synthetic oligonucleotide
aggcagauaucuagcagcu

SEQ ID NO: 1944019 - RNA, 19 nt, Artificial Sequence
  Description of Artificial Sequence: Synthetic oligonucleotide
cagauaucuagcagcucga

SEQ ID NO: 1944020 - RNA, 19 nt, Artificial Sequence
  Description of Artificial Sequence: Synthetic oligonucleotide
ugcuuaagaugaggccucc

SEQ ID NO: 1944021 - RNA, 19 nt, Artificial Sequence
  Description of Artificial Sequence: Synthetic oligonucleotide
gaggaauagccugcuggac

SEQ ID NO: 1944022 - RNA, 19 nt, Artificial Sequence
  Description of Artificial Sequence: Synthetic oligonucleotide
accaucacuucugccaggu

SEQ ID NO: 1944023 - RNA, 19 nt, Artificial Sequence
  Description of Artificial Sequence: Synthetic oligonucleotide
guagaagaagcugcuuauc

SEQ ID NO: 1944024 - RNA, 19 nt, Artificial Sequence
  Description of Artificial Sequence: Synthetic oligonucleotide
acacacacacacgcuacca

SEQ ID NO: 1944025 - RNA, 19 nt, Artificial Sequence
  Description of Artificial Sequence: Synthetic oligonucleotide
ccgagcaccaaccacuaug

SEQ ID NO: 1944026 - RNA, 19 nt, Artificial Sequence
  Description of Artificial Sequence: Synthetic oligonucleotide
gccaggaugauggggaacc

SEQ ID NO: 1944027 - RNA, 19 nt, Artificial Sequence
  Description of Artificial Sequence: Synthetic oligonucleotide
auggggaaccacccauacu

SEQ ID NO: 1944028 - RNA, 19 nt, Artificial Sequence
  Description of Artificial Sequence: Synthetic oligonucleotide
cuacacacacacacacaca

SEQ ID NO: 1944029 - RNA, 19 nt, Artificial Sequence
  Description of Artificial Sequence: Synthetic oligonucleotide
ggaaccacccauacuucag

SEQ ID NO: 1944030 - RNA, 19 nt, Artificial Sequence
  Description of Artificial Sequence: Synthetic oligonucleotide
gcuaccaacuucagaauca

SEQ ID NO: 1944031 - RNA, 19 nt, Artificial Sequence
  Description of Artificial Sequence: Synthetic oligonucleotide
cugcuuaucagggccaaga

SEQ ID NO: 1944032 - RNA, 19 nt, Artificial Sequence
  Description of Artificial Sequence: Synthetic oligonucleotide
cgagcaccaaccacuaugc

SEQ ID NO: 1944033 - RNA, 19 nt, Artificial Sequence
  Description of Artificial Sequence: Synthetic oligonucleotide
cagaaaguggagcaugggu

SEQ ID NO: 1944034 - RNA, 19 nt, Artificial Sequence
  Description of Artificial Sequence: Synthetic oligonucleotide
ccaccaacaccacauauga

SEQ ID NO: 1944035 - RNA, 19 nt, Artificial Sequence
  Description of Artificial Sequence: Synthetic oligonucleotide
agauaccaugugucucugu

SEQ ID NO: 1944036 - RNA, 19 nt, Artificial Sequence
  Description of Artificial Sequence: Synthetic oligonucleotide
caccaacaccacauaugac

SEQ ID NO: 1944037 - RNA, 19 nt, Artificial Sequence
  Description of Artificial Sequence: Synthetic oligonucleotide
gugugcuagucuccuuggc

SEQ ID NO: 1944038 - RNA, 19 nt, Artificial Sequence
  Description of Artificial Sequence: Synthetic oligonucleotide
cacacacacacacacgcua

SEQ ID NO: 1944039 - RNA, 19 nt, Artificial Sequence
  Description of Artificial Sequence: Synthetic oligonucleotide
cacacgcuaccaacuucag

SEQ ID NO: 1944040 - RNA, 19 nt, Artificial Sequence
  Description of Artificial Sequence: Synthetic oligonucleotide
gucugaauggccaccaggu

SEQ ID NO: 1944041 - RNA, 19 nt, Artificial Sequence
  Description of Artificial Sequence: Synthetic oligonucleotide
gugccaggucagucgaacc

SEQ ID NO: 1944042 - RNA, 19 nt, Artificial Sequence
  Description of Artificial Sequence: Synthetic oligonucleotide
cagguggcagccucgguca

SEQ ID NO: 1944043 - RNA, 19 nt, Artificial Sequence
  Description of Artificial Sequence: Synthetic oligonucleotide
agaccaguggugucagaua

SEQ ID NO: 1944044 - RNA, 19 nt, Artificial Sequence
  Description of Artificial Sequence: Synthetic oligonucleotide
ggugcagaaaccagcucug

SEQ ID NO: 1944045 - RNA, 19 nt, Artificial Sequence
  Description of Artificial Sequence: Synthetic oligonucleotide
uugucacugacuggccuuc

SEQ ID NO: 1944046 - RNA, 19 nt, Artificial Sequence
  Description of Artificial Sequence: Synthetic oligonucleotide
guggagcauggguuaggcc

SEQ ID NO: 1944047 - RNA, 19 nt, Artificial Sequence
  Description of Artificial Sequence: Synthetic oligonucleotide
agauguccugggaucacca

SEQ ID NO: 1944048 - RNA, 19 nt, Artificial Sequence
  Description of Artificial Sequence: Synthetic oligonucleotide
gguugucaggauccagggc

SEQ ID NO: 1944049 - RNA, 19 nt, Artificial Sequence
  Description of Artificial Sequence: Synthetic oligonucleotide
caccagguugccaccaaca

SEQ ID NO: 1944050 - RNA, 19 nt, Artificial Sequence
  Description of Artificial Sequence: Synthetic oligonucleotide
gguugaugccaaacuuccg

SEQ ID NO: 1944051 - RNA, 19 nt, Artificial Sequence
  Description of Artificial Sequence: Synthetic oligonucleotide
gggugagagccaugaagcc

SEQ ID NO: 1944052 - RNA, 19 nt, Artificial Sequence
  Description of Artificial Sequence: Synthetic oligonucleotide
cacuacacacacacacaca

SEQ ID NO: 1944053 - RNA, 19 nt, Artificial Sequence
  Description of Artificial Sequence: Synthetic oligonucleotide
gucaggauccagggccugg

SEQ ID NO: 1944054 - RNA, 19 nt, Artificial Sequence
  Description of Artificial Sequence: Synthetic oligonucleotide
cagacugaugaggccacug

SEQ ID NO: 1944055 - RNA, 19 nt, Artificial Sequence
  Description of Artificial Sequence: Synthetic oligonucleotide
gcgugugcuagucuccuug

SEQ ID NO: 1944056 - RNA, 19 nt, Artificial Sequence
  Description of Artificial Sequence: Synthetic oligonucleotide
gaggugcagaaaccagcuc

SEQ ID NO: 1944057 - RNA, 19 nt, Artificial Sequence
  Description of Artificial Sequence: Synthetic oligonucleotide
cuagggccaaggccgcaag

SEQ ID NO: 1944058 - RNA, 19 nt, Artificial Sequence
  Description of Artificial Sequence: Synthetic oligonucleotide
acgcuaccaacuucagaau

SEQ ID NO: 1944059 - RNA, 19 nt, Artificial Sequence
  Description of Artificial Sequence: Synthetic oligonucleotide
augacgcugcucaugcaca

SEQ ID NO: 1944060 - RNA, 19 nt, Artificial Sequence
  Description of Artificial Sequence: Synthetic oligonucleotide
auacagugguugucaggau

SEQ ID NO: 1944061 - RNA, 19 nt, Artificial Sequence
  Description of Artificial Sequence: Synthetic oligonucleotide
acaugagggaaaaguccca

SEQ ID NO: 1944062 - RNA, 19 nt, Artificial Sequence
  Description of Artificial Sequence: Synthetic oligonucleotide
caggucagucgaaccauca

SEQ ID NO: 1944063 - RNA, 19 nt, Artificial Sequence
  Description of Artificial Sequence: Synthetic oligonucleotide
gugccaggaggcuggugcc

SEQ ID NO: 1944064 - RNA, 19 nt, Artificial Sequence
  Description of Artificial Sequence: Synthetic oligonucleotide
gccaaugcagaccaguggu

SEQ ID NO: 1944065 - RNA, 19 nt, Artificial Sequence
  Description of Artificial Sequence: Synthetic oligonucleotide
caggaugauggggaaccac

SEQ ID NO: 1944066 - RNA, 19 nt, Artificial Sequence
  Description of Artificial Sequence: Synthetic oligonucleotide
gccucggucagggaggugc

SEQ ID NO: 1944067 - RNA, 19 nt, Artificial Sequence
  Description of Artificial Sequence: Synthetic oligonucleotide
acgggcggguucugcuugg

SEQ ID NO: 1944068 - RNA, 19 nt, Artificial Sequence
  Description of Artificial Sequence: Synthetic oligonucleotide
acucgagcugauacggagu

SEQ ID NO: 1944069 - RNA, 19 nt, Artificial Sequence
  Description of Artificial Sequence: Synthetic oligonucleotide
ucgagcugauacggaguug

SEQ ID NO: 1944070 - RNA, 19 nt, Artificial Sequence
  Description of Artificial Sequence: Synthetic oligonucleotide
gcugcgauggguguggcga

SEQ ID NO: 1944071 - RNA, 19 nt, Artificial Sequence
  Description of Artificial Sequence: Synthetic oligonucleotide
cuaugcaggucauuagaau

SEQ ID NO: 1944072 - RNA, 19 nt, Artificial Sequence
  Description of Artificial Sequence: Synthetic oligonucleotide
ccacuaugcaggucauuag

SEQ ID NO: 1944073 - RNA, 19 nt, Artificial Sequence
  Description of Artificial Sequence: Synthetic oligonucleotide
cagucgaaccaucacuucu

SEQ ID NO: 1944074 - RNA, 19 nt, Artificial Sequence
  Description of Artificial Sequence: Synthetic oligonucleotide
ccaugugucucugugucug

SEQ ID NO: 1944075 - RNA, 19 nt, Artificial Sequence
  Description of Artificial Sequence: Synthetic oligonucleotide
gggaaccacccauacuuca

SEQ ID NO: 1944076 - RNA, 19 nt, Artificial Sequence
  Description of Artificial Sequence: Synthetic oligonucleotide
cuaccaacuucagaaucaa

SEQ ID NO: 1944077 - RNA, 19 nt, Artificial Sequence
  Description of Artificial Sequence: Synthetic oligonucleotide
acacacacacacacacaca

SEQ ID NO: 1944078 - RNA, 19 nt, Artificial Sequence
  Description of Artificial Sequence: Synthetic oligonucleotide
ugaggucucccaggcuggc

SEQ ID NO: 1944079 - RNA, 19 nt, Artificial Sequence
  Description of Artificial Sequence: Synthetic oligonucleotide
ggauagugugaugaggucu

SEQ ID NO: 1944080 - RNA, 19 nt, Artificial Sequence
  Description of Artificial Sequence: Synthetic oligonucleotide
acacacacacacacacgcu

SEQ ID NO: 1944081 - RNA, 19 nt, Artificial Sequence
  Description of Artificial Sequence: Synthetic oligonucleotide
aaagugccaggaggcuggu

SEQ ID NO: 1944082 - RNA, 19 nt, Artificial Sequence
  Description of Artificial Sequence: Synthetic oligonucleotide
uaucaggguugaugccaaa

SEQ ID NO: 1944083 - RNA, 19 nt, Artificial Sequence
  Description of Artificial Sequence: Synthetic oligonucleotide
ccaaugcagaccaguggug

SEQ ID NO: 1944084 - RNA, 19 nt, Artificial Sequence
  Description of Artificial Sequence: Synthetic oligonucleotide
ccugugagguaugggauac

SEQ ID NO: 1944085 - RNA, 19 nt, Artificial Sequence
  Description of Artificial Sequence: Synthetic oligonucleotide
ugcgauggguguggcgaug

SEQ ID NO: 1944086 - RNA, 19 nt, Artificial Sequence
  Description of Artificial Sequence: Synthetic oligonucleotide
ugucaggauccagggccug

SEQ ID NO: 1944087 - RNA, 19 nt, Artificial Sequence
  Description of Artificial Sequence: Synthetic oligonucleotide
augccugccaccagguaaa

SEQ ID NO: 1944088 - RNA, 19 nt, Artificial Sequence
  Description of Artificial Sequence: Synthetic oligonucleotide
acuggccuuccaccaggca

SEQ ID NO: 1944089 - RNA, 19 nt, Artificial Sequence
  Description of Artificial Sequence: Synthetic oligonucleotide
guggugucagauaccaugu

SEQ ID NO: 1944090 - RNA, 19 nt, Artificial Sequence
  Description of Artificial Sequence: Synthetic oligonucleotide
ucaucuggacagggaggac

SEQ ID NO: 1944091 - RNA, 19 nt, Artificial Sequence
  Description of Artificial Sequence: Synthetic oligonucleotide
guggcgauguuaucagggu

SEQ ID NO: 1944092 - RNA, 19 nt, Artificial Sequence
  Description of Artificial Sequence: Synthetic oligonucleotide
gacuggccuuccaccaggc

SEQ ID NO: 1944093 - RNA, 19 nt, Artificial Sequence
  Description of Artificial Sequence: Synthetic oligonucleotide
cagcucgaggccccagcag

SEQ ID NO: 1944094 - RNA, 19 nt, Artificial Sequence
  Description of Artificial Sequence: Synthetic oligonucleotide
gccaugaagccaaugcaga

SEQ ID NO: 1944095 - RNA, 19 nt, Artificial Sequence
  Description of Artificial Sequence: Synthetic oligonucleotide
ggcggguucugcuuggcaa

SEQ ID NO: 1944096 - RNA, 19 nt, Artificial Sequence
  Description of Artificial Sequence: Synthetic oligonucleotide
gaggaccccaggugugcuc

SEQ ID NO: 1944097 - RNA, 19 nt, Artificial Sequence
  Description of Artificial Sequence: Synthetic oligonucleotide
cagaaagagcaggacucga

SEQ ID NO: 1944098 - RNA, 19 nt, Artificial Sequence
  Description of Artificial Sequence: Synthetic oligonucleotide
ugacgggcggguucugcuu

SEQ ID NO: 1944099 - RNA, 19 nt, Artificial Sequence
  Description of Artificial Sequence: Synthetic oligonucleotide
caaugcagaccaguggugu

SEQ ID NO: 1944100 - RNA, 19 nt, Artificial Sequence
  Description of Artificial Sequence: Synthetic oligonucleotide
cggaguugauuucugagga

SEQ ID NO: 1944101 - RNA, 19 nt, Artificial Sequence
  Description of Artificial Sequence: Synthetic oligonucleotide
cgugugcuagucuccuugg

SEQ ID NO: 1944102 - RNA, 19 nt, Artificial Sequence
  Description of Artificial Sequence: Synthetic oligonucleotide
ccuccaaacugcugaugac

SEQ ID NO: 1944103 - RNA, 19 nt, Artificial Sequence
  Description of Artificial Sequence: Synthetic oligonucleotide
cuggucugaauggccacca

SEQ ID NO: 1944104 - RNA, 19 nt, Artificial Sequence
  Description of Artificial Sequence: Synthetic oligonucleotide
gguucugcuuggcaaugaa

SEQ ID NO: 1944105 - RNA, 19 nt, Artificial Sequence
  Description of Artificial Sequence: Synthetic oligonucleotide
gugcuccacaugugcagga

SEQ ID NO: 1944106 - RNA, 19 nt, Artificial Sequence
  Description of Artificial Sequence: Synthetic oligonucleotide
agaugcggcuggucugaau

SEQ ID NO: 1944107 - RNA, 19 nt, Artificial Sequence
  Description of Artificial Sequence: Synthetic oligonucleotide
ggugugcuccacaugugca

SEQ ID NO: 1944108 - RNA, 19 nt, Artificial Sequence
  Description of Artificial Sequence: Synthetic oligonucleotide
ggccgcaagaaaggcagug

SEQ ID NO: 1944109 - RNA, 19 nt, Artificial Sequence
  Description of Artificial Sequence: Synthetic oligonucleotide
ugccccucauuagccaguc

SEQ ID NO: 1944110 - RNA, 19 nt, Artificial Sequence
  Description of Artificial Sequence: Synthetic oligonucleotide
aggcgugugcuagucuccu

SEQ ID NO: 1944111 - RNA, 19 nt, Artificial Sequence
  Description of Artificial Sequence: Synthetic oligonucleotide
cuugucacugacuggccuu

SEQ ID NO: 1944112 - RNA, 19 nt, Artificial Sequence
  Description of Artificial Sequence: Synthetic oligonucleotide
ccaaggccgcaagaaaggc

SEQ ID NO: 1944113 - RNA, 19 nt, Artificial Sequence
  Description of Artificial Sequence: Synthetic oligonucleotide
ggucucccaggcuggcugc

SEQ ID NO: 1944114 - RNA, 19 nt, Artificial Sequence
  Description of Artificial Sequence: Synthetic oligonucleotide
ugacgggagucaggacagc

SEQ ID NO: 1944115 - RNA, 19 nt, Artificial Sequence
  Description of Artificial Sequence: Synthetic oligonucleotide
gccuuuaaacugauguuua

SEQ ID NO: 1944116 - RNA, 19 nt, Artificial Sequence
  Description of Artificial Sequence: Synthetic oligonucleotide
ugccugccaccagguaaag

SEQ ID NO: 1944117 - RNA, 19 nt, Artificial Sequence
  Description of Artificial Sequence: Synthetic oligonucleotide
ccacauaugacgggaguca

SEQ ID NO: 1944118 - RNA, 19 nt, Artificial Sequence
  Description of Artificial Sequence: Synthetic oligonucleotide
cacccauacuucaggauuu

SEQ ID NO: 1944119 - RNA, 19 nt, Artificial Sequence
  Description of Artificial Sequence: Synthetic oligonucleotide
ggagaugcggcuggucuga

SEQ ID NO: 1944120 - RNA, 19 nt, Artificial Sequence
  Description of Artificial Sequence: Synthetic oligonucleotide
acaugccugccaccaggua

SEQ ID NO: 1944121 - RNA, 19 nt, Artificial Sequence
  Description of Artificial Sequence: Synthetic oligonucleotide
cgcuaccaacuucagaauc

SEQ ID NO: 1944122 - RNA, 19 nt, Artificial Sequence
  Description of Artificial Sequence: Synthetic oligonucleotide
gucccacggaggccugcag

SEQ ID NO: 1944123 - RNA, 19 nt, Artificial Sequence
  Description of Artificial Sequence: Synthetic oligonucleotide
aggcagugaugacgcugcu

SEQ ID NO: 1944124 - RNA, 19 nt, Artificial Sequence
  Description of Artificial Sequence: Synthetic oligonucleotide
agcugcuuaucagggccaa

SEQ ID NO: 1944125 - RNA, 19 nt, Artificial Sequence
  Description of Artificial Sequence: Synthetic oligonucleotide
gguggcagccucggucagg

SEQ ID NO: 1944126 - RNA, 19 nt, Artificial Sequence
  Description of Artificial Sequence: Synthetic oligonucleotide
gaggggugagagccaugaa

SEQ ID NO: 1944127 - RNA, 19 nt, Artificial Sequence
  Description of Artificial Sequence: Synthetic oligonucleotide
cucgagcugauacggaguu

SEQ ID NO: 1944128 - RNA, 19 nt, Artificial Sequence
  Description of Artificial Sequence: Synthetic oligonucleotide
ggaagaucuugcugcuugu

SEQ ID NO: 1944129 - RNA, 19 nt, Artificial Sequence
  Description of Artificial Sequence: Synthetic oligonucleotide
gugcagaaaccagcucuga

SEQ ID NO: 1944130 - RNA, 19 nt, Artificial Sequence
  Description of Artificial Sequence: Synthetic oligonucleotide
cagaccaguggugucagau

SEQ ID NO: 1944131 - RNA, 19 nt, Artificial Sequence
  Description of Artificial Sequence: Synthetic oligonucleotide
cgagcugauacggaguuga

SEQ ID NO: 1944132 - RNA, 19 nt, Artificial Sequence
  Description of Artificial Sequence: Synthetic oligonucleotide
cucggucagggaggugcag

SEQ ID NO: 1944133 - RNA, 19 nt, Artificial Sequence
  Description of Artificial Sequence: Synthetic oligonucleotide
gcagcucgaggccccagca

SEQ ID NO: 1944134 - RNA, 19 nt, Artificial Sequence
  Description of Artificial Sequence: Synthetic oligonucleotide
gggaggaccccaggugugc

SEQ ID NO: 1944135 - RNA, 19 nt, Artificial Sequence
  Description of Artificial Sequence: Synthetic oligonucleotide
uccuagggccaaggccgca

SEQ ID NO: 1944136 - RNA, 19 nt, Artificial Sequence
  Description of Artificial Sequence: Synthetic oligonucleotide
ccaggucagucgaaccauc

SEQ ID NO: 1944137 - RNA, 19 nt, Artificial Sequence
  Description of Artificial Sequence: Synthetic oligonucleotide
acccauacuucaggauuuu

SEQ ID NO: 1944138 - RNA, 19 nt, Artificial Sequence
  Description of Artificial Sequence: Synthetic oligonucleotide
gcgauguuaucaggguuga

SEQ ID NO: 1944139 - RNA, 19 nt, Artificial Sequence
  Description of Artificial Sequence: Synthetic oligonucleotide
cacugcccaggcagauauc

SEQ ID NO: 1944140 - RNA, 19 nt, Artificial Sequence
  Description of Artificial Sequence: Synthetic oligonucleotide
agcauggguuaggccagaa

SEQ ID NO: 1944141 - RNA, 19 nt, Artificial Sequence
  Description of Artificial Sequence: Synthetic oligonucleotide
gccaccagguaaagcacca

SEQ ID NO: 1944142 - RNA, 19 nt, Artificial Sequence
  Description of Artificial Sequence: Synthetic oligonucleotide
agacugcacuacacacaca

SEQ ID NO: 1944143 - RNA, 19 nt, Artificial Sequence
  Description of Artificial Sequence: Synthetic oligonucleotide
gccgcaagaaaggcaguga

SEQ ID NO: 1944144 - RNA, 19 nt, Artificial Sequence
  Description of Artificial Sequence: Synthetic oligonucleotide
gugagguaugggauacagu

SEQ ID NO: 1944145 - RNA, 19 nt, Artificial Sequence
  Description of Artificial Sequence: Synthetic oligonucleotide
gccugugagguaugggaua

SEQ ID NO: 1944146 - RNA, 19 nt, Artificial Sequence
  Description of Artificial Sequence: Synthetic oligonucleotide
ggcagugaugacgcugcuc

SEQ ID NO: 1944147 - RNA, 19 nt, Artificial Sequence
  Description of Artificial Sequence: Synthetic oligonucleotide
ccaccagguugccaccaac

SEQ ID NO: 1944148 - RNA, 19 nt, Artificial Sequence
  Description of Artificial Sequence: Synthetic oligonucleotide
ggggaaccacccauacuuc

SEQ ID NO: 1944149 - RNA, 19 nt, Artificial Sequence
  Description of Artificial Sequence: Synthetic oligonucleotide
ggauuaucaccuggaacau

SEQ ID NO: 1944150 - RNA, 19 nt, Artificial Sequence
  Description of Artificial Sequence: Synthetic oligonucleotide
agcaggacucgagcugaua

SEQ ID NO: 1944151 - RNA, 19 nt, Artificial Sequence
  Description of Artificial Sequence: Synthetic oligonucleotide
gcugcuuaucagggccaag

SEQ ID NO: 1944152 - RNA, 19 nt, Artificial Sequence
  Description of Artificial Sequence: Synthetic oligonucleotide
gggagucaggacagccaug

SEQ ID NO: 1944153 - RNA, 19 nt, Artificial Sequence
  Description of Artificial Sequence: Synthetic oligonucleotide
ccaagauggauagugugau

SEQ ID NO: 1944154 - RNA, 19 nt, Artificial Sequence
  Description of Artificial Sequence: Synthetic oligonucleotide
cugcccaggcagauaucua

SEQ ID NO: 1944155 - RNA, 19 nt, Artificial Sequence
  Description of Artificial Sequence: Synthetic oligonucleotide
cagugguugucaggaucca

SEQ ID NO: 1944156 - RNA, 19 nt, Artificial Sequence
  Description of Artificial Sequence: Synthetic oligonucleotide
ggccuccaaacugcugaug

SEQ ID NO: 1944157 - RNA, 19 nt, Artificial Sequence
  Description of Artificial Sequence: Synthetic oligonucleotide
gcuuaagaugaggccucca

SEQ ID NO: 1944158 - RNA, 19 nt, Artificial Sequence
  Description of Artificial Sequence: Synthetic oligonucleotide
cugugagguaugggauaca

SEQ ID NO: 1944159 - RNA, 19 nt, Artificial Sequence
  Description of Artificial Sequence: Synthetic oligonucleotide
ccacccauacuucaggauu

SEQ ID NO: 1944160 - RNA, 19 nt, Artificial Sequence
  Description of Artificial Sequence: Synthetic oligonucleotide
ggguucugcuuggcaauga

SEQ ID NO: 1944161 - RNA, 19 nt, Artificial Sequence
  Description of Artificial Sequence: Synthetic oligonucleotide
ggacagccaugccuuuaaa

SEQ ID NO: 1944162 - RNA, 19 nt, Artificial Sequence
  Description of Artificial Sequence: Synthetic oligonucleotide
ggacucgagcugauacgga

SEQ ID NO: 1944163 - RNA, 19 nt, Artificial Sequence
  Description of Artificial Sequence: Synthetic oligonucleotide
caaccacuaugcaggucau

SEQ ID NO: 1944164 - RNA, 19 nt, Artificial Sequence
  Description of Artificial Sequence: Synthetic oligonucleotide
gccaaacuuccgagcacca

SEQ ID NO: 1944165 - RNA, 19 nt, Artificial Sequence
  Description of Artificial Sequence: Synthetic oligonucleotide
cugccccucauuagccagu

SEQ ID NO: 1944166 - RNA, 19 nt, Artificial Sequence
  Description of Artificial Sequence: Synthetic oligonucleotide
gggcggguucugcuuggca

SEQ ID NO: 1944167 - RNA, 19 nt, Artificial Sequence
  Description of Artificial Sequence: Synthetic oligonucleotide
ccacugcccaggcagauau

SEQ ID NO: 1944168 - RNA, 19 nt, Artificial Sequence
  Description of Artificial Sequence: Synthetic oligonucleotide
ggccugugagguaugggau

SEQ ID NO: 1944169 - RNA, 19 nt, Artificial Sequence
  Description of Artificial Sequence: Synthetic oligonucleotide
gggccaagauggauagugu

SEQ ID NO: 1944170 - RNA, 19 nt, Artificial Sequence
  Description of Artificial Sequence: Synthetic oligonucleotide
cccacggaggccugcaggu

SEQ ID NO: 1944171 - RNA, 19 nt, Artificial Sequence
  Description of Artificial Sequence: Synthetic oligonucleotide
ccucggucagggaggugca

SEQ ID NO: 1944172 - RNA, 19 nt, Artificial Sequence
  Description of Artificial Sequence: Synthetic oligonucleotide
cugcgauggguguggcgau

SEQ ID NO: 1944173 - RNA, 19 nt, Artificial Sequence
  Description of Artificial Sequence: Synthetic oligonucleotide
caguggugucagauaccau

SEQ ID NO: 1944174 - RNA, 19 nt, Artificial Sequence
  Description of Artificial Sequence: Synthetic oligonucleotide
gccaggucagucgaaccau

SEQ ID NO: 1944175 - RNA, 19 nt, Artificial Sequence
  Description of Artificial Sequence: Synthetic oligonucleotide
gguaugggauacagugguu

SEQ ID NO: 1944176 - RNA, 19 nt, Artificial Sequence
  Description of Artificial Sequence: Synthetic oligonucleotide
agccucggucagggaggug

SEQ ID NO: 1944177 - RNA, 19 nt, Artificial Sequence
  Description of Artificial Sequence: Synthetic oligonucleotide
gcgauggguguggcgaugu

SEQ ID NO: 1944178 - RNA, 19 nt, Artificial Sequence
  Description of Artificial Sequence: Synthetic oligonucleotide
ggaggaccccaggugugcu

SEQ ID NO: 1944179 - RNA, 19 nt, Artificial Sequence
  Description of Artificial Sequence: Synthetic oligonucleotide
gagcaggacucgagcugau

SEQ ID NO: 1944180 - RNA, 19 nt, Artificial Sequence
  Description of Artificial Sequence: Synthetic oligonucleotide
ccaguccaggaggaagcaa

SEQ ID NO: 1944181 - RNA, 19 nt, Artificial Sequence
  Description of Artificial Sequence: Synthetic oligonucleotide
ccccaggugugcuccacau

SEQ ID NO: 1944182 - RNA, 19 nt, Artificial Sequence
  Description of Artificial Sequence: Synthetic oligonucleotide
cagggccaagauggauagu

SEQ ID NO: 1944183 - RNA, 19 nt, Artificial Sequence
  Description of Artificial Sequence: Synthetic oligonucleotide
ggcgugugcuagucuccuu

SEQ ID NO: 1944184 - RNA, 19 nt, Artificial Sequence
  Description of Artificial Sequence: Synthetic oligonucleotide
ccccaggccugugagguau

SEQ ID NO: 1944185 - RNA, 19 nt, Artificial Sequence
  Description of Artificial Sequence: Synthetic oligonucleotide
aauguaauuucucucacag

SEQ ID NO: 1944186 - RNA, 19 nt, Artificial Sequence
  Description of Artificial Sequence: Synthetic oligonucleotide
aaagcuacagaacaaauga

SEQ ID NO: 1944187 - RNA, 19 nt, Artificial Sequence
  Description of Artificial Sequence: Synthetic oligonucleotide
uuaucaucacacuauaugg

SEQ ID NO: 1944188 - RNA, 19 nt, Artificial Sequence
  Description of Artificial Sequence: Synthetic oligonucleotide
aaugccguuuucuaguccc

SEQ ID NO: 1944189 - RNA, 19 nt, Artificial Sequence
  Description of Artificial Sequence: Synthetic oligonucleotide
auagagaugcaucugacuc

SEQ ID NO: 1944190 - RNA, 19 nt, Artificial Sequence
  Description of Artificial Sequence: Synthetic oligonucleotide
guauaaaugguguccaucg

SEQ ID NO: 1944191 - RNA, 19 nt, Artificial Sequence
  Description of Artificial Sequence: Synthetic oligonucleotide
uguguguccauagagaugc

SEQ ID NO: 1944192 - RNA, 19 nt, Artificial Sequence
  Description of Artificial Sequence: Synthetic oligonucleotide
uguccagagucucaggucg

SEQ ID NO: 1944193 - RNA, 19 nt, Artificial Sequence
  Description of Artificial Sequence: Synthetic oligonucleotide
uuaugauaggcuuauuuga

SEQ ID NO: 1944194 - RNA, 19 nt, Artificial Sequence
  Description of Artificial Sequence: Synthetic oligonucleotide
agauguugucagcauaucc

SEQ ID NO: 1944195 - RNA, 19 nt, Artificial Sequence
  Description of Artificial Sequence: Synthetic oligonucleotide
uggagaaagcuacagaaca

SEQ ID NO: 1944196 - RNA, 19 nt, Artificial Sequence
  Description of Artificial Sequence: Synthetic oligonucleotide
uccauuucgauuucugagg

SEQ ID NO: 1944197 - RNA, 19 nt, Artificial Sequence
  Description of Artificial Sequence: Synthetic oligonucleotide
uucuggauaaaccacagau

SEQ ID NO: 1944198 - RNA, 19 nt, Artificial Sequence
  Description of Artificial Sequence: Synthetic oligonucleotide
cuuaugauaggcuuauuug

SEQ ID NO: 1944199 - RNA, 19 nt, Artificial Sequence
  Description of Artificial Sequence: Synthetic oligonucleotide
gauagcagaccacugaaug

SEQ ID NO: 1944200 - RNA, 19 nt, Artificial Sequence
  Description of Artificial Sequence: Synthetic oligonucleotide
gucauuauuggauaucugc

SEQ ID NO: 1944201 - RNA, 19 nt, Artificial Sequence
  Description of Artificial Sequence: Synthetic oligonucleotide
uuggauaucugcuuaguca

SEQ ID NO: 1944202 - RNA, 19 nt, Artificial Sequence
  Description of Artificial Sequence: Synthetic oligonucleotide
guuggcuguguauaaaugg

SEQ ID NO: 1944203 - RNA, 19 nt, Artificial Sequence
  Description of Artificial Sequence: Synthetic oligonucleotide
acaacuggucaccuggugc

SEQ ID NO: 1944204 - RNA, 19 nt, Artificial Sequence
  Description of Artificial Sequence: Synthetic oligonucleotide
auuucgauuucugagggcg

SEQ ID NO: 1944205 - RNA, 19 nt, Artificial Sequence
  Description of Artificial Sequence: Synthetic oligonucleotide
ucauuauuggauaucugcu

SEQ ID NO: 1944206 - RNA, 19 nt, Artificial Sequence
  Description of Artificial Sequence: Synthetic oligonucleotide
gaugacaccacauuugcuc

SEQ ID NO: 1944207 - RNA, 19 nt, Artificial Sequence
  Description of Artificial Sequence: Synthetic oligonucleotide
aaaauguaaggcuuaugau

SEQ ID NO: 1944208 - RNA, 19 nt, Artificial Sequence
  Description of Artificial Sequence: Synthetic oligonucleotide
agcauagucuguuuggguc

SEQ ID NO: 1944209 - RNA, 19 nt, Artificial Sequence
  Description of Artificial Sequence: Synthetic oligonucleotide
augacauugauggauacuc

SEQ ID NO: 1944210 - RNA, 19 nt, Artificial Sequence
  Description of Artificial Sequence: Synthetic oligonucleotide
ucuguauuauucaugcuuc

SEQ ID NO: 1944211 - RNA, 19 nt, Artificial Sequence
  Description of Artificial Sequence: Synthetic oligonucleotide
gauggauacucccucaggc

SEQ ID NO: 1944212 - RNA, 19 nt, Artificial Sequence
  Description of Artificial Sequence: Synthetic oligonucleotide
gacauguccaacgaggucc

SEQ ID NO: 1944213 - RNA, 19 nt, Artificial Sequence
  Description of Artificial Sequence: Synthetic oligonucleotide
cauagcauagucuguuugg

SEQ ID NO: 1944214 - RNA, 19 nt, Artificial Sequence
  Description of Artificial Sequence: Synthetic oligonucleotide
ucuggauaaaccacagaug

SEQ ID NO: 1944215 - RNA, 19 nt, Artificial Sequence
  Description of Artificial Sequence: Synthetic oligonucleotide
auaugguuugcagacacac

SEQ ID NO: 1944216 - RNA, 19 nt, Artificial Sequence
  Description of Artificial Sequence: Synthetic oligonucleotide
aauucugucugucccucag

SEQ ID NO: 1944217 - RNA, 19 nt, Artificial Sequence
  Description of Artificial Sequence: Synthetic oligonucleotide
cuuacuuuucaaucguaag

SEQ ID NO: 1944218 - RNA, 19 nt, Artificial Sequence
  Description of Artificial Sequence: Synthetic oligonucleotide
uuuguacauagcauagucu

SEQ ID NO: 1944219 - RNA, 19 nt, Artificial Sequence
  Description of Artificial Sequence: Synthetic oligonucleotide
uuugggucccacacgaugc

SEQ ID NO: 1944220 - RNA, 19 nt, Artificial Sequence
  Description of Artificial Sequence: Synthetic oligonucleotide
cacuauaugguuugcagac

SEQ ID NO: 1944221 - RNA, 19 nt, Artificial Sequence
  Description of Artificial Sequence: Synthetic oligonucleotide
gacauugauggauacuccc

SEQ ID NO: 1944222 - RNA, 19 nt, Artificial Sequence
  Description of Artificial Sequence: Synthetic oligonucleotide
ucagcauauccccagcuca

SEQ ID NO: 1944223 - RNA, 19 nt, Artificial Sequence
  Description of Artificial Sequence: Synthetic oligonucleotide
auuggauaucugcuuaguc

SEQ ID NO: 1944224 - RNA, 19 nt, Artificial Sequence
  Description of Artificial Sequence: Synthetic oligonucleotide
aucgcaggaaaauguaagg

SEQ ID NO: 1944225 - RNA, 19 nt, Artificial Sequence
  Description of Artificial Sequence: Synthetic oligonucleotide
ugauugguggcucacucug

SEQ ID NO: 1944226 - RNA, 19 nt, Artificial Sequence
  Description of Artificial Sequence: Synthetic oligonucleotide
uaucaucacacuauauggu

SEQ ID NO: 1944227 - RNA, 19 nt, Artificial Sequence
  Description of Artificial Sequence: Synthetic oligonucleotide
uaagauguugucagcauau

SEQ ID NO: 1944228 - RNA, 19 nt, Artificial Sequence
  Description of Artificial Sequence: Synthetic oligonucleotide
uguaaggcuuaugauaggc

SEQ ID NO: 1944229 - RNA, 19 nt, Artificial Sequence
  Description of Artificial Sequence: Synthetic oligonucleotide
auaaaugguguccaucgca

SEQ ID NO: 1944230 - RNA, 19 nt, Artificial Sequence
  Description of Artificial Sequence: Synthetic oligonucleotide
aaugaucucucugcagugg

SEQ ID NO: 1944231 - RNA, 19 nt, Artificial Sequence
  Description of Artificial Sequence: Synthetic oligonucleotide
gaaagcuacagaacaaaug

SEQ ID NO: 1944232 - RNA, 19 nt, Artificial Sequence
  Description of Artificial Sequence: Synthetic oligonucleotide
ugggaaauguaauuucucu

SEQ ID NO: 1944233 - RNA, 19 nt, Artificial Sequence
  Description of Artificial Sequence: Synthetic oligonucleotide
cuuuacuuucaggacaugg

SEQ ID NO: 1944234 - RNA, 19 nt, Artificial Sequence
  Description of Artificial Sequence: Synthetic oligonucleotide
ucuguuugggucccacacg

SEQ ID NO: 1944235 - RNA, 19 nt, Artificial Sequence
  Description of Artificial Sequence: Synthetic oligonucleotide
cucacacuuaucaucacac

SEQ ID NO: 1944236 - RNA, 19 nt, Artificial Sequence
  Description of Artificial Sequence: Synthetic oligonucleotide
uguccauagagaugcaucu

SEQ ID NO: 1944237 - RNA, 19 nt, Artificial Sequence
  Description of Artificial Sequence: Synthetic oligonucleotide
guuggagaaagcuacagaa

SEQ ID NO: 1944238 - RNA, 19 nt, Artificial Sequence
  Description of Artificial Sequence: Synthetic oligonucleotide
cacacuauaugguuugcag

SEQ ID NO: 1944239 - RNA, 19 nt, Artificial Sequence
  Description of Artificial Sequence: Synthetic oligonucleotide
uauaaaugguguccaucgc

SEQ ID NO: 1944240 - RNA, 19 nt, Artificial Sequence
  Description of Artificial Sequence: Synthetic oligonucleotide
gaaauguaauuucucucac

SEQ ID NO: 1944241 - RNA, 19 nt, Artificial Sequence
  Description of Artificial Sequence: Synthetic oligonucleotide
uguguauaaauggugucca

SEQ ID NO: 1944242 - RNA, 19 nt, Artificial Sequence
  Description of Artificial Sequence: Synthetic oligonucleotide
caucgcaggaaaauguaag

SEQ ID NO: 1944243 - RNA, 19 nt, Artificial Sequence
  Description of Artificial Sequence: Synthetic oligonucleotide
uggauaucugcuuagucau

SEQ ID NO: 1944244 - RNA, 19 nt, Artificial Sequence
  Description of Artificial Sequence: Synthetic oligonucleotide
augguuugcagacacacaa

SEQ ID NO: 1944245 - RNA, 19 nt, Artificial Sequence
  Description of Artificial Sequence: Synthetic oligonucleotide
agcuacagaacaaaugauc

SEQ ID NO: 1944246 - RNA, 19 nt, Artificial Sequence
  Description of Artificial Sequence: Synthetic oligonucleotide
cuauaugguuugcagacac

SEQ ID NO: 1944247 - RNA, 19 nt, Artificial Sequence
  Description of Artificial Sequence: Synthetic oligonucleotide
uucaaucguaagauguugu

SEQ ID NO: 1944248 - RNA, 19 nt, Artificial Sequence
  Description of Artificial Sequence: Synthetic oligonucleotide
uugacuugggaaauguaau

SEQ ID NO: 1944249 - RNA, 19 nt, Artificial Sequence
  Description of Artificial Sequence: Synthetic oligonucleotide
ugccagacuuuguacauag

SEQ ID NO: 1944250 - RNA, 19 nt, Artificial Sequence
  Description of Artificial Sequence: Synthetic oligonucleotide
agggcuuuacuuucaggac

SEQ ID NO: 1944251 - RNA, 19 nt, Artificial Sequence
  Description of Artificial Sequence: Synthetic oligonucleotide
uuucaaucguaagauguug

SEQ ID NO: 1944252 - RNA, 19 nt, Artificial Sequence
  Description of Artificial Sequence: Synthetic oligonucleotide
auuauuggauaucugcuua

SEQ ID NO: 1944253 - RNA, 19 nt, Artificial Sequence
  Description of Artificial Sequence: Synthetic oligonucleotide
guugguauaggcugugaug

SEQ ID NO: 1944254 - RNA, 19 nt, Artificial Sequence
  Description of Artificial Sequence: Synthetic oligonucleotide
uguuggcuguguauaaaug

SEQ ID NO: 1944255 - RNA, 19 nt, Artificial Sequence
  Description of Artificial Sequence: Synthetic oligonucleotide
gagggaaccaaauucuguc

SEQ ID NO: 1944256 - RNA, 19 nt, Artificial Sequence
  Description of Artificial Sequence: Synthetic oligonucleotide
ugagucuguugguauaggc

SEQ ID NO: 1944257 - RNA, 19 nt, Artificial Sequence
  Description of Artificial Sequence: Synthetic oligonucleotide
uugauggauacucccucag

SEQ ID NO: 1944258 - RNA, 19 nt, Artificial Sequence
  Description of Artificial Sequence: Synthetic oligonucleotide
uuuucaaucguaagauguu

SEQ ID NO: 1944259 - RNA, 19 nt, Artificial Sequence
  Description of Artificial Sequence: Synthetic oligonucleotide
uagcaaugucaccugaugu

SEQ ID NO: 1944260 - RNA, 19 nt, Artificial Sequence
  Description of Artificial Sequence: Synthetic oligonucleotide
gagcugacaacugucaggc

SEQ ID NO: 1944261 - RNA, 19 nt, Artificial Sequence
  Description of Artificial Sequence: Synthetic oligonucleotide
uuggagaaagcuacagaac

SEQ ID NO: 1944262 - RNA, 19 nt, Artificial Sequence
  Description of Artificial Sequence: Synthetic oligonucleotide
auagcauagucuguuuggg

SEQ ID NO: 1944263 - RNA, 19 nt, Artificial Sequence
  Description of Artificial Sequence: Synthetic oligonucleotide
uccgacaccaugcaaucac

SEQ ID NO: 1944264 - RNA, 19 nt, Artificial Sequence
  Description of Artificial Sequence: Synthetic oligonucleotide
uuccacaccguuauggaau

SEQ ID NO: 1944265 - RNA, 19 nt, Artificial Sequence
  Description of Artificial Sequence: Synthetic oligonucleotide
guggacauguccaacgagg

SEQ ID NO: 1944266 - RNA, 19 nt, Artificial Sequence
  Description of Artificial Sequence: Synthetic oligonucleotide
accguuauggaauggggca

SEQ ID NO: 1944267 - RNA, 19 nt, Artificial Sequence
  Description of Artificial Sequence: Synthetic oligonucleotide
cuguaggucaucagaagac

SEQ ID NO: 1944268 - RNA, 19 nt, Artificial Sequence
  Description of Artificial Sequence: Synthetic oligonucleotide
uucaagucccaugugcucc

SEQ ID NO: 1944269 - RNA, 19 nt, Artificial Sequence
  Description of Artificial Sequence: Synthetic oligonucleotide
agacuuuguacauagcaua

SEQ ID NO: 1944270 - RNA, 19 nt, Artificial Sequence
  Description of Artificial Sequence: Synthetic oligonucleotide
uaaggcuuaugauaggcuu

SEQ ID NO: 1944271 - RNA, 19 nt, Artificial Sequence
  Description of Artificial Sequence: Synthetic oligonucleotide
accaugcaaucacuguccc

SEQ ID NO: 1944272 - RNA, 19 nt, Artificial Sequence
  Description of Artificial Sequence: Synthetic oligonucleotide
gauaggcuuauuugacuug

SEQ ID NO: 1944273 - RNA, 19 nt, Artificial Sequence
  Description of Artificial Sequence: Synthetic oligonucleotide
cuuuucaaucguaagaugu

SEQ ID NO: 1944274 - RNA, 19 nt, Artificial Sequence
  Description of Artificial Sequence: Synthetic oligonucleotide
caucacacuauaugguuug

SEQ ID NO: 1944275 - RNA, 19 nt, Artificial Sequence
  Description of Artificial Sequence: Synthetic oligonucleotide
ugguuaucucuucugugug

SEQ ID NO: 1944276 - RNA, 19 nt, Artificial Sequence
  Description of Artificial Sequence: Synthetic oligonucleotide
auaaaccacagauggcucu

SEQ ID NO: 1944277 - RNA, 19 nt, Artificial Sequence
  Description of Artificial Sequence: Synthetic oligonucleotide
uggauaaaccacagauggc

SEQ ID NO: 1944278 - RNA, 19 nt, Artificial Sequence
  Description of Artificial Sequence: Synthetic oligonucleotide
acacuauaugguuugcaga

SEQ ID NO: 1944279 - RNA, 19 nt, Artificial Sequence
  Description of Artificial Sequence: Synthetic oligonucleotide
uguauaaaugguguccauc

SEQ ID NO: 1944280 - RNA, 19 nt, Artificial Sequence
  Description of Artificial Sequence: Synthetic oligonucleotide
ucaaucguaagauguuguc

SEQ ID NO: 1944281 - RNA, 19 nt, Artificial Sequence
  Description of Artificial Sequence: Synthetic oligonucleotide
aauuucucucacaggcuuc

SEQ ID NO: 1944282 - RNA, 19 nt, Artificial Sequence
  Description of Artificial Sequence: Synthetic oligonucleotide
cuguugugaacucuguaug

SEQ ID NO: 1944283 - RNA, 19 nt, Artificial Sequence
  Description of Artificial Sequence: Synthetic oligonucleotide
ucuccauuucgauuucuga

SEQ ID NO: 1944284 - RNA, 19 nt, Artificial Sequence
  Description of Artificial Sequence: Synthetic oligonucleotide
uucucucacaggcuucaag

SEQ ID NO: 1944285 - RNA, 19 nt, Artificial Sequence
  Description of Artificial Sequence: Synthetic oligonucleotide
ggcacaacuggucaccugg

SEQ ID NO: 1944286 - RNA, 19 nt, Artificial Sequence
  Description of Artificial Sequence: Synthetic oligonucleotide
ugcucauguucucugggga

SEQ ID NO: 1944287 - RNA, 19 nt, Artificial Sequence
  Description of Artificial Sequence: Synthetic oligonucleotide
auuauucaugcuucucaca

SEQ ID NO: 1944288 - RNA, 19 nt, Artificial Sequence
  Description of Artificial Sequence: Synthetic oligonucleotide
uguaggucaucagaagaca

SEQ ID NO: 1944289 - RNA, 19 nt, Artificial Sequence
  Description of Artificial Sequence: Synthetic oligonucleotide
aagcugguuaucucuucug

SEQ ID NO: 1944290 - RNA, 19 nt, Artificial Sequence
  Description of Artificial Sequence: Synthetic oligonucleotide
ucugguaggcagugcuugg

SEQ ID NO: 1944291 - RNA, 19 nt, Artificial Sequence
  Description of Artificial Sequence: Synthetic oligonucleotide
uggacauguccaacgaggu

SEQ ID NO: 1944292 - RNA, 19 nt, Artificial Sequence
  Description of Artificial Sequence: Synthetic oligonucleotide
uguugguauaggcugugau

SEQ ID NO: 1944293 - RNA, 19 nt, Artificial Sequence
  Description of Artificial Sequence: Synthetic oligonucleotide
ucguaagauguugucagca

SEQ ID NO: 1944294 - RNA, 19 nt, Artificial Sequence
  Description of Artificial Sequence: Synthetic oligonucleotide
uauaugguuugcagacaca

SEQ ID NO: 1944295 - RNA, 19 nt, Artificial Sequence
  Description of Artificial Sequence: Synthetic oligonucleotide
ucucacaccuugcuccuug

SEQ ID NO: 1944296 - RNA, 19 nt, Artificial Sequence
  Description of Artificial Sequence: Synthetic oligonucleotide
ucaucacacuauaugguuu

SEQ ID NO: 1944297 - RNA, 19 nt, Artificial Sequence
  Description of Artificial Sequence: Synthetic oligonucleotide
aguauggugcucauguucu

SEQ ID NO: 1944298 - RNA, 19 nt, Artificial Sequence
  Description of Artificial Sequence: Synthetic oligonucleotide
uggagggaaccaaauucug

SEQ ID NO: 1944299 - RNA, 19 nt, Artificial Sequence
  Description of Artificial Sequence: Synthetic oligonucleotide
ugcuccauaaccucacaau

SEQ ID NO: 1944300 - RNA, 19 nt, Artificial Sequence
  Description of Artificial Sequence: Synthetic oligonucleotide
uauccccagcucaggauag

SEQ ID NO: 1944301 - RNA, 19 nt, Artificial Sequence
  Description of Artificial Sequence: Synthetic oligonucleotide
uuuuguguccugccagacu

SEQ ID NO: 1944302 - RNA, 19 nt, Artificial Sequence
  Description of Artificial Sequence: Synthetic oligonucleotide
caccguuauggaauggggc

SEQ ID NO: 1944303 - RNA, 19 nt, Artificial Sequence
  Description of Artificial Sequence: Synthetic oligonucleotide
uccaacgagguccccauuc

SEQ ID NO: 1944304 - RNA, 19 nt, Artificial Sequence
  Description of Artificial Sequence: Synthetic oligonucleotide
cuacagaacaaaugaucuc

SEQ ID NO: 1944305 - RNA, 19 nt, Artificial Sequence
  Description of Artificial Sequence: Synthetic oligonucleotide
agcaaugucaccugauguu

SEQ ID NO: 1944306 - RNA, 19 nt, Artificial Sequence
  Description of Artificial Sequence: Synthetic oligonucleotide
aguggacauguccaacgag

SEQ ID NO: 1944307 - RNA, 19 nt, Artificial Sequence
  Description of Artificial Sequence: Synthetic oligonucleotide
caugcuucucacaccuugc

SEQ ID NO: 1944308 - RNA, 19 nt, Artificial Sequence
  Description of Artificial Sequence: Synthetic oligonucleotide
uguccugccagacuuugua

SEQ ID NO: 1944309 - RNA, 19 nt, Artificial Sequence
  Description of Artificial Sequence: Synthetic oligonucleotide
acaggugucauuauuggau

SEQ ID NO: 1944310 - RNA, 19 nt, Artificial Sequence
  Description of Artificial Sequence: Synthetic oligonucleotide
acaguagcaaugucaccug

SEQ ID NO: 1944311 - RNA, 19 nt, Artificial Sequence
  Description of Artificial Sequence: Synthetic oligonucleotide
ugcguaguugcugaggaaa

SEQ ID NO: 1944312 - RNA, 19 nt, Artificial Sequence
  Description of Artificial Sequence: Synthetic oligonucleotide
uguccaucgcaggaaaaug

SEQ ID NO: 1944313 - RNA, 19 nt, Artificial Sequence
  Description of Artificial Sequence: Synthetic oligonucleotide
ugguccuuccgacaccaug

SEQ ID NO: 1944314 - RNA, 19 nt, Artificial Sequence
  Description of Artificial Sequence: Synthetic oligonucleotide
gucuguuugggucccacac

SEQ ID NO: 1944315 - RNA, 19 nt, Artificial Sequence
  Description of Artificial Sequence: Synthetic oligonucleotide
guugauugguggcucacuc

SEQ ID NO: 1944316 - RNA, 19 nt, Artificial Sequence
  Description of Artificial Sequence: Synthetic oligonucleotide
uuaucucuucugugugucc

SEQ ID NO: 1944317 - RNA, 19 nt, Artificial Sequence
  Description of Artificial Sequence: Synthetic oligonucleotide
ugacuugggaaauguaauu

SEQ ID NO: 1944318 - RNA, 19 nt, Artificial Sequence
  Description of Artificial Sequence: Synthetic oligonucleotide
auguucucuggggaaggcc

SEQ ID NO: 1944319 - RNA, 19 nt, Artificial Sequence
  Description of Artificial Sequence: Synthetic oligonucleotide
caguauggugcucauguuc

SEQ ID NO: 1944320 - RNA, 19 nt, Artificial Sequence
  Description of Artificial Sequence: Synthetic oligonucleotide
guauaggcugugaugacac

SEQ ID NO: 1944321 - RNA, 19 nt, Artificial Sequence
  Description of Artificial Sequence: Synthetic oligonucleotide
uccacaccguuauggaaug

SEQ ID NO: 1944322 - RNA, 19 nt, Artificial Sequence
  Description of Artificial Sequence: Synthetic oligonucleotide
cacaccguuauggaauggg

SEQ ID NO: 1944323 - RNA, 19 nt, Artificial Sequence
  Description of Artificial Sequence: Synthetic oligonucleotide
ugucagcauauccccagcu

SEQ ID NO: 1944324 - RNA, 19 nt, Artificial Sequence
  Description of Artificial Sequence: Synthetic oligonucleotide
aaccucacaaugccguuuu

SEQ ID NO: 1944325 - RNA, 19 nt, Artificial Sequence
  Description of Artificial Sequence: Synthetic oligonucleotide
agggaaccaaauucugucu

SEQ ID NO: 1944326 - RNA, 19 nt, Artificial Sequence
  Description of Artificial Sequence: Synthetic oligonucleotide
gcaguggacauguccaacg

SEQ ID NO: 1944327 - RNA, 19 nt, Artificial Sequence
  Description of Artificial Sequence: Synthetic oligonucleotide
ucacacuuaucaucacacu

SEQ ID NO: 1944328 - RNA, 19 nt, Artificial Sequence
  Description of Artificial Sequence: Synthetic oligonucleotide
uugauugguggcucacucu

SEQ ID NO: 1944329 - RNA, 19 nt, Artificial Sequence
  Description of Artificial Sequence: Synthetic oligonucleotide
gcuccauaaccucacaaug

SEQ ID NO: 1944330 - RNA, 19 nt, Artificial Sequence
  Description of Artificial Sequence: Synthetic oligonucleotide
aaaccacagauggcucugg

SEQ ID NO: 1944331 - RNA, 19 nt, Artificial Sequence
  Description of Artificial Sequence: Synthetic oligonucleotide
uauuggauaucugcuuagu

SEQ ID NO: 1944332 - RNA, 19 nt, Artificial Sequence
  Description of Artificial Sequence: Synthetic oligonucleotide
cacagauggcucugguagg

SEQ ID NO: 1944333 - RNA, 19 nt, Artificial Sequence
  Description of Artificial Sequence: Synthetic oligonucleotide
acacgaugcaagucccauc

SEQ ID NO: 1944334 - RNA, 19 nt, Artificial Sequence
  Description of Artificial Sequence: Synthetic oligonucleotide
gcugacaacugucaggcac

SEQ ID NO: 1944335 - RNA, 19 nt, Artificial Sequence
  Description of Artificial Sequence: Synthetic oligonucleotide
acacuuaucaucacacuau

SEQ ID NO: 1944336 - RNA, 19 nt, Artificial Sequence
  Description of Artificial Sequence: Synthetic oligonucleotide
caaugacauugauggauac

SEQ ID NO: 1944337 - RNA, 19 nt, Artificial Sequence
  Description of Artificial Sequence: Synthetic oligonucleotide
cugcucacacuuaucauca

SEQ ID NO: 1944338 - RNA, 19 nt, Artificial Sequence
  Description of Artificial Sequence: Synthetic oligonucleotide
augaucucucugcagugga

SEQ ID NO: 1944339 - RNA, 19 nt, Artificial Sequence
  Description of Artificial Sequence: Synthetic oligonucleotide
gauaucugcuuagucaucu

SEQ ID NO: 1944340 - RNA, 19 nt, Artificial Sequence
  Description of Artificial Sequence: Synthetic oligonucleotide
cauuucgauuucugagggc

SEQ ID NO: 1944341 - RNA, 19 nt, Artificial Sequence
  Description of Artificial Sequence: Synthetic oligonucleotide
ccauucacuguccagaguc

SEQ ID NO: 1944342 - RNA, 19 nt, Artificial Sequence
  Description of Artificial Sequence: Synthetic oligonucleotide
gguuggugcgugcugaccc

SEQ ID NO: 1944343 - RNA, 19 nt, Artificial Sequence
  Description of Artificial Sequence: Synthetic oligonucleotide
cauaaccucacaaugccgu

SEQ ID NO: 1944344 - RNA, 19 nt, Artificial Sequence
  Description of Artificial Sequence: Synthetic oligonucleotide
uagcauagucuguuugggu

SEQ ID NO: 1944345 - RNA, 19 nt, Artificial Sequence
  Description of Artificial Sequence: Synthetic oligonucleotide
ugacaccacauuugcuccc

SEQ ID NO: 1944346 - RNA, 19 nt, Artificial Sequence
  Description of Artificial Sequence: Synthetic oligonucleotide
cacaguauggugcucaugu

SEQ ID NO: 1944347 - RNA, 19 nt, Artificial Sequence
  Description of Artificial Sequence: Synthetic oligonucleotide
cuuccgacaccaugcaauc

SEQ ID NO: 1944348 - RNA, 19 nt, Artificial Sequence
  Description of Artificial Sequence: Synthetic oligonucleotide
acaccguuauggaaugggg

SEQ ID NO: 1944349 - RNA, 19 nt, Artificial Sequence
  Description of Artificial Sequence: Synthetic oligonucleotide
ugaucucucugcaguggac

SEQ ID NO: 1944350 - RNA, 19 nt, Artificial Sequence
  Description of Artificial Sequence: Synthetic oligonucleotide
accacugaaugucuguauu

SEQ ID NO: 1944351 - RNA, 19 nt, Artificial Sequence
  Description of Artificial Sequence: Synthetic oligonucleotide
caugggcugcuucaugcgc

SEQ ID NO: 1944352 - RNA, 19 nt, Artificial Sequence
  Description of Artificial Sequence: Synthetic oligonucleotide
ugcgugcugacccagccuu

SEQ ID NO: 1944353 - RNA, 19 nt, Artificial Sequence
  Description of Artificial Sequence: Synthetic oligonucleotide
cagcauauccccagcucag

SEQ ID NO: 1944354 - RNA, 19 nt, Artificial Sequence
  Description of Artificial Sequence: Synthetic oligonucleotide
gaacaugggcugcuucaug

SEQ ID NO: 1944355 - RNA, 19 nt, Artificial Sequence
  Description of Artificial Sequence: Synthetic oligonucleotide
cacacuuaucaucacacua

SEQ ID NO: 1944356 - RNA, 19 nt, Artificial Sequence
  Description of Artificial Sequence: Synthetic oligonucleotide
acacacaagcugguuaucu

SEQ ID NO: 1944357 - RNA, 19 nt, Artificial Sequence
  Description of Artificial Sequence: Synthetic oligonucleotide
gcugguuggagaaagcuac

SEQ ID NO: 1944358 - RNA, 19 nt, Artificial Sequence
  Description of Artificial Sequence: Synthetic oligonucleotide
ucacuguuggcuguguaua

SEQ ID NO: 1944359 - RNA, 19 nt, Artificial Sequence
  Description of Artificial Sequence: Synthetic oligonucleotide
guaagauguugucagcaua

SEQ ID NO: 1944360 - RNA, 19 nt, Artificial Sequence
  Description of Artificial Sequence: Synthetic oligonucleotide
uguguccugccagacuuug

SEQ ID NO: 1944361 - RNA, 19 nt, Artificial Sequence
  Description of Artificial Sequence: Synthetic oligonucleotide
caaucguaagauguuguca

SEQ ID NO: 1944362 - RNA, 19 nt, Artificial Sequence
  Description of Artificial Sequence: Synthetic oligonucleotide
gauuucugagggcgugcug

SEQ ID NO: 1944363 - RNA, 19 nt, Artificial Sequence
  Description of Artificial Sequence: Synthetic oligonucleotide
gagguccccauucacuguc

SEQ ID NO: 1944364 - RNA, 19 nt, Artificial Sequence
  Description of Artificial Sequence: Synthetic oligonucleotide
ugcuuggagggaaccaaau

SEQ ID NO: 1944365 - RNA, 19 nt, Artificial Sequence
  Description of Artificial Sequence: Synthetic oligonucleotide
cuguuugggucccacacga

SEQ ID NO: 1944366 - RNA, 19 nt, Artificial Sequence
  Description of Artificial Sequence: Synthetic oligonucleotide
acugaaugucuguauuauu

SEQ ID NO: 1944367 - RNA, 19 nt, Artificial Sequence
  Description of Artificial Sequence: Synthetic oligonucleotide
agaaagcuacagaacaaau

SEQ ID NO: 1944368 - RNA, 19 nt, Artificial Sequence
  Description of Artificial Sequence: Synthetic oligonucleotide
gcuguaggucaucagaaga

SEQ ID NO: 1944369 - RNA, 19 nt, Artificial Sequence
  Description of Artificial Sequence: Synthetic oligonucleotide
ugcuguugugaacucugua

SEQ ID NO: 1944370 - RNA, 19 nt, Artificial Sequence
  Description of Artificial Sequence: Synthetic oligonucleotide
cacaguagcaaugucaccu

SEQ ID NO: 1944371 - RNA, 19 nt, Artificial Sequence
  Description of Artificial Sequence: Synthetic oligonucleotide
uugggucccacacgaugca

SEQ ID NO: 1944372 - RNA, 19 nt, Artificial Sequence
  Description of Artificial Sequence: Synthetic oligonucleotide
acuauaugguuugcagaca

SEQ ID NO: 1944373 - RNA, 19 nt, Artificial Sequence
  Description of Artificial Sequence: Synthetic oligonucleotide
cauagucuguuuggguccc

SEQ ID NO: 1944374 - RNA, 19 nt, Artificial Sequence
  Description of Artificial Sequence: Synthetic oligonucleotide
aaggcuuaugauaggcuua

SEQ ID NO: 1944375 - RNA, 19 nt, Artificial Sequence
  Description of Artificial Sequence: Synthetic oligonucleotide
uuucugagggcgugcugcu

SEQ ID NO: 1944376 - RNA, 19 nt, Artificial Sequence
  Description of Artificial Sequence: Synthetic oligonucleotide
augcaaucacugucccauc

SEQ ID NO: 1944377 - RNA, 19 nt, Artificial Sequence
  Description of Artificial Sequence: Synthetic oligonucleotide
agcauauccccagcucagg

SEQ ID NO: 1944378 - RNA, 19 nt, Artificial Sequence
  Description of Artificial Sequence: Synthetic oligonucleotide
guguccauagagaugcauc

SEQ ID NO: 1944379 - RNA, 19 nt, Artificial Sequence
  Description of Artificial Sequence: Synthetic oligonucleotide
accuggugcuguugugaac

SEQ ID NO: 1944380 - RNA, 19 nt, Artificial Sequence
  Description of Artificial Sequence: Synthetic oligonucleotide
cucacucugcuuacuuuuc

SEQ ID NO: 1944381 - RNA, 19 nt, Artificial Sequence
  Description of Artificial Sequence: Synthetic oligonucleotide
cugguuaucucuucugugu

SEQ ID NO: 1944382 - RNA, 19 nt, Artificial Sequence
  Description of Artificial Sequence: Synthetic oligonucleotide
caaugccguuuucuagucc

SEQ ID NO: 1944383 - RNA, 19 nt, Artificial Sequence
  Description of Artificial Sequence: Synthetic oligonucleotide
ugcuucaugcgcugcuggu

SEQ ID NO: 1944384 - RNA, 19 nt, Artificial Sequence
  Description of Artificial Sequence: Synthetic oligonucleotide
ugguauaggcugugaugac

SEQ ID NO: 1944385 - RNA, 19 nt, Artificial Sequence
  Description of Artificial Sequence: Synthetic oligonucleotide
aggugucauuauuggauau

SEQ ID NO: 1944386 - RNA, 19 nt, Artificial Sequence
  Description of Artificial Sequence: Synthetic oligonucleotide
ggugagucuguugguauag

SEQ ID NO: 1944387 - RNA, 19 nt, Artificial Sequence
  Description of Artificial Sequence: Synthetic oligonucleotide
ucgauuucugagggcgugc

SEQ ID NO: 1944388 - RNA, 19 nt, Artificial Sequence
  Description of Artificial Sequence: Synthetic oligonucleotide
ccauaaccucacaaugccg

SEQ ID NO: 1944389 - RNA, 19 nt, Artificial Sequence
  Description of Artificial Sequence: Synthetic oligonucleotide
auaaccucacaaugccguu

SEQ ID NO: 1944390 - RNA, 19 nt, Artificial Sequence
  Description of Artificial Sequence: Synthetic oligonucleotide
ucacaccuugcuccuugcu

SEQ ID NO: 1944391 - RNA, 19 nt, Artificial Sequence
  Description of Artificial Sequence: Synthetic oligonucleotide
gcuacagaacaaaugaucu

SEQ ID NO: 1944392 - RNA, 19 nt, Artificial Sequence
  Description of Artificial Sequence: Synthetic oligonucleotide
acgaugcaagucccaucuc

SEQ ID NO: 1944393 - RNA, 19 nt, Artificial Sequence
  Description of Artificial Sequence: Synthetic oligonucleotide
cacgaugcaagucccaucu

SEQ ID NO: 1944394 - RNA, 19 nt, Artificial Sequence
  Description of Artificial Sequence: Synthetic oligonucleotide
cuagggacaggugucauua

SEQ ID NO: 1944395 - RNA, 19 nt, Artificial Sequence
  Description of Artificial Sequence: Synthetic oligonucleotide
augcgcugcugguccuucc

SEQ ID NO: 1944396 - RNA, 19 nt, Artificial Sequence
  Description of Artificial Sequence: Synthetic oligonucleotide
aggaaaauguaaggcuuau

SEQ ID NO: 1944397 - RNA, 19 nt, Artificial Sequence
  Description of Artificial Sequence: Synthetic oligonucleotide
gagucuguugguauaggcu

SEQ ID NO: 1944398 - RNA, 19 nt, Artificial Sequence
  Description of Artificial Sequence: Synthetic oligonucleotide
aacucuguaugaaguugau

SEQ ID NO: 1944399 - RNA, 19 nt, Artificial Sequence
  Description of Artificial Sequence: Synthetic oligonucleotide
agucuguuugggucccaca

SEQ ID NO: 1944400 - RNA, 19 nt, Artificial Sequence
  Description of Artificial Sequence: Synthetic oligonucleotide
caugcaaucacugucccau

SEQ ID NO: 1944401 - RNA, 19 nt, Artificial Sequence
  Description of Artificial Sequence: Synthetic oligonucleotide
ugcaguggacauguccaac

SEQ ID NO: 1944402 - RNA, 19 nt, Artificial Sequence
  Description of Artificial Sequence: Synthetic oligonucleotide
uggugagucuguugguaua

SEQ ID NO: 1944403 - RNA, 19 nt, Artificial Sequence
  Description of Artificial Sequence: Synthetic oligonucleotide
ucuggggaaggcccuucuc

SEQ ID NO: 1944404 - RNA, 19 nt, Artificial Sequence
  Description of Artificial Sequence: Synthetic oligonucleotide
aggcugguuggagaaagcu

SEQ ID NO: 1944405 - RNA, 19 nt, Artificial Sequence
  Description of Artificial Sequence: Synthetic oligonucleotide
cucacaccuugcuccuugc

SEQ ID NO: 1944406 - RNA, 19 nt, Artificial Sequence
  Description of Artificial Sequence: Synthetic oligonucleotide
gugagucuguugguauagg

SEQ ID NO: 1944407 - RNA, 19 nt, Artificial Sequence
  Description of Artificial Sequence: Synthetic oligonucleotide
augccguuuucuagucccc

SEQ ID NO: 1944408 - RNA, 19 nt, Artificial Sequence
  Description of Artificial Sequence: Synthetic oligonucleotide
gauguuucacuggcagaga

SEQ ID NO: 1944409 - RNA, 19 nt, Artificial Sequence
  Description of Artificial Sequence: Synthetic oligonucleotide
acaccacauuugcucccgg

SEQ ID NO: 1944410 - RNA, 19 nt, Artificial Sequence
  Description of Artificial Sequence: Synthetic oligonucleotide
cauguucucuggggaaggc

SEQ ID NO: 1944411 - RNA, 19 nt, Artificial Sequence
  Description of Artificial Sequence: Synthetic oligonucleotide
caggcuucaagucccaugu

SEQ ID NO: 1944412 - RNA, 19 nt, Artificial Sequence
  Description of Artificial Sequence: Synthetic oligonucleotide
cauuauuggauaucugcuu

SEQ ID NO: 1944413 - RNA, 19 nt, Artificial Sequence
  Description of Artificial Sequence: Synthetic oligonucleotide
aggcuuaugauaggcuuau

SEQ ID NO: 1944414 - RNA, 19 nt, Artificial Sequence
  Description of Artificial Sequence: Synthetic oligonucleotide
aguagcaaugucaccugau

SEQ ID NO: 1944415 - RNA, 19 nt, Artificial Sequence
  Description of Artificial Sequence: Synthetic oligonucleotide
caggaaaauguaaggcuua

SEQ ID NO: 1944416 - RNA, 19 nt, Artificial Sequence
  Description of Artificial Sequence: Synthetic oligonucleotide
gcugcguaguugcugagga

SEQ ID NO: 1944417 - RNA, 19 nt, Artificial Sequence
  Description of Artificial Sequence: Synthetic oligonucleotide
caacgagguccccauucac

SEQ ID NO: 1944418 - RNA, 19 nt, Artificial Sequence
  Description of Artificial Sequence: Synthetic oligonucleotide
agggcgugcugcuggugag

SEQ ID NO: 1944419 - RNA, 19 nt, Artificial Sequence
  Description of Artificial Sequence: Synthetic oligonucleotide
ccauagagaugcaucugac

SEQ ID NO: 1944420 - RNA, 19 nt, Artificial Sequence
  Description of Artificial Sequence: Synthetic oligonucleotide
ugcuggugagucuguuggu

SEQ ID NO: 1944421 - RNA, 19 nt, Artificial Sequence
  Description of Artificial Sequence: Synthetic oligonucleotide
cagacacacaagcugguua

SEQ ID NO: 1944422 - RNA, 19 nt, Artificial Sequence
  Description of Artificial Sequence: Synthetic oligonucleotide
accucacaaugccguuuuc

SEQ ID NO: 1944423 - RNA, 19 nt, Artificial Sequence
  Description of Artificial Sequence: Synthetic oligonucleotide
uggcucacucugcuuacuu

SEQ ID NO: 1944424 - RNA, 19 nt, Artificial Sequence
  Description of Artificial Sequence: Synthetic oligonucleotide
caggcugguuggagaaagc

SEQ ID NO: 1944425 - RNA, 19 nt, Artificial Sequence
  Description of Artificial Sequence: Synthetic oligonucleotide
uaaccucacaaugccguuu

SEQ ID NO: 1944426 - RNA, 19 nt, Artificial Sequence
  Description of Artificial Sequence: Synthetic oligonucleotide
guccauagagaugcaucug

SEQ ID NO: 1944427 - RNA, 19 nt, Artificial Sequence
  Description of Artificial Sequence: Synthetic oligonucleotide
acaguauggugcucauguu

SEQ ID NO: 1944428 - RNA, 19 nt, Artificial Sequence
  Description of Artificial Sequence: Synthetic oligonucleotide
uccccagcucaggauagca

SEQ ID NO: 1944429 - RNA, 19 nt, Artificial Sequence
  Description of Artificial Sequence: Synthetic oligonucleotide
agucccaucucugcucaca

SEQ ID NO: 1944430 - RNA, 19 nt, Artificial Sequence
  Description of Artificial Sequence: Synthetic oligonucleotide
uccuuccgacaccaugcaa

SEQ ID NO: 1944431 - RNA, 19 nt, Artificial Sequence
  Description of Artificial Sequence: Synthetic oligonucleotide
uguuugggucccacacgau

SEQ ID NO: 1944432 - RNA, 19 nt, Artificial Sequence
  Description of Artificial Sequence: Synthetic oligonucleotide
caggugucauuauuggaua

SEQ ID NO: 1944433 - RNA, 19 nt, Artificial Sequence
  Description of Artificial Sequence: Synthetic oligonucleotide
cuuccacaccguuauggaa

SEQ ID NO: 1944434 - RNA, 19 nt, Artificial Sequence
  Description of Artificial Sequence: Synthetic oligonucleotide
gcugaggaaagaguagaac

SEQ ID NO: 1944435 - RNA, 19 nt, Artificial Sequence
  Description of Artificial Sequence: Synthetic oligonucleotide
ugccuagggacagguguca

SEQ ID NO: 1944436 - RNA, 19 nt, Artificial Sequence
  Description of Artificial Sequence: Synthetic oligonucleotide
aucucuucuguguguccau

SEQ ID NO: 1944437 - RNA, 19 nt, Artificial Sequence
  Description of Artificial Sequence: Synthetic oligonucleotide
uccacaguauggugcucau

SEQ ID NO: 1944438 - RNA, 19 nt, Artificial Sequence
  Description of Artificial Sequence: Synthetic oligonucleotide
auccccagcucaggauagc

SEQ ID NO: 1944439 - RNA, 19 nt, Artificial Sequence
  Description of Artificial Sequence: Synthetic oligonucleotide
cauuugcucccggugaaga

SEQ ID NO: 1944440 - RNA, 19 nt, Artificial Sequence
  Description of Artificial Sequence: Synthetic oligonucleotide
uuggugcgugcugacccag

SEQ ID NO: 1944441 - RNA, 19 nt, Artificial Sequence
  Description of Artificial Sequence: Synthetic oligonucleotide
uucaugcgcugcugguccu

SEQ ID NO: 1944442 - RNA, 19 nt, Artificial Sequence
  Description of Artificial Sequence: Synthetic oligonucleotide
gcuguugugaacucuguau

SEQ ID NO: 1944443 - RNA, 19 nt, Artificial Sequence
  Description of Artificial Sequence: Synthetic oligonucleotide
guaauuucucucacaggcu

SEQ ID NO: 1944444 - RNA, 19 nt, Artificial Sequence
  Description of Artificial Sequence: Synthetic oligonucleotide
guuggugcgugcugaccca

SEQ ID NO: 1944445 - RNA, 19 nt, Artificial Sequence
  Description of Artificial Sequence: Synthetic oligonucleotide
gcuuaugauaggcuuauuu

SEQ ID NO: 1944446 - RNA, 19 nt, Artificial Sequence
  Description of Artificial Sequence: Synthetic oligonucleotide
uggugcgugcugacccagc

SEQ ID NO: 1944447 - RNA, 19 nt, Artificial Sequence
  Description of Artificial Sequence: Synthetic oligonucleotide
agaccacugaaugucugua

SEQ ID NO: 1944448 - RNA, 19 nt, Artificial Sequence
  Description of Artificial Sequence: Synthetic oligonucleotide
cucccggugaagagcugac

SEQ ID NO: 1944449 - RNA, 19 nt, Artificial Sequence
  Description of Artificial Sequence: Synthetic oligonucleotide
caguggacauguccaacga

SEQ ID NO: 1944450 - RNA, 19 nt, Artificial Sequence
  Description of Artificial Sequence: Synthetic oligonucleotide
gcaagucccaucucugcuc

SEQ ID NO: 1944451 - RNA, 19 nt, Artificial Sequence
  Description of Artificial Sequence: Synthetic oligonucleotide
cucaggucgcugccccucc

SEQ ID NO: 1944452 - RNA, 19 nt, Artificial Sequence
  Description of Artificial Sequence: Synthetic oligonucleotide
aggcacaacuggucaccug

SEQ ID NO: 1944453 - RNA, 19 nt, Artificial Sequence
  Description of Artificial Sequence: Synthetic oligonucleotide
cucaggauagcagaccacu

SEQ ID NO: 1944454 - RNA, 19 nt, Artificial Sequence
  Description of Artificial Sequence: Synthetic oligonucleotide
ucaggucgcugccccucca

SEQ ID NO: 1944455 - RNA, 19 nt, Artificial Sequence
  Description of Artificial Sequence: Synthetic oligonucleotide
aagcgugccuagggacagg

SEQ ID NO: 1944456 - RNA, 19 nt, Artificial Sequence
  Description of Artificial Sequence: Synthetic oligonucleotide
cugguuggagaaagcuaca

SEQ ID NO: 1944457 - RNA, 19 nt, Artificial Sequence
  Description of Artificial Sequence: Synthetic oligonucleotide
gcuuacuuuucaaucguaa

SEQ ID NO: 1944458 - RNA, 19 nt, Artificial Sequence
  Description of Artificial Sequence: Synthetic oligonucleotide
acucuguaugaaguugauu

SEQ ID NO: 1944459 - RNA, 19 nt, Artificial Sequence
  Description of Artificial Sequence: Synthetic oligonucleotide
gucccaugugcuccauaac

SEQ ID NO: 1944460 - RNA, 19 nt, Artificial Sequence
  Description of Artificial Sequence: Synthetic oligonucleotide
gcaucugacucuccauuuc

SEQ ID NO: 1944461 - RNA, 19 nt, Artificial Sequence
  Description of Artificial Sequence: Synthetic oligonucleotide
ggcagggcuuuacuuucag

SEQ ID NO: 1944462 - RNA, 19 nt, Artificial Sequence
  Description of Artificial Sequence: Synthetic oligonucleotide
cuguauuauucaugcuucu

SEQ ID NO: 1944463 - RNA, 19 nt, Artificial Sequence
  Description of Artificial Sequence: Synthetic oligonucleotide
cacuguuggcuguguauaa

SEQ ID NO: 1944464 - RNA, 19 nt, Artificial Sequence
  Description of Artificial Sequence: Synthetic oligonucleotide
cuguuggcuguguauaaau

SEQ ID NO: 1944465 - RNA, 19 nt, Artificial Sequence
  Description of Artificial Sequence: Synthetic oligonucleotide
uagggacaggugucauuau

SEQ ID NO: 1944466 - RNA, 19 nt, Artificial Sequence
  Description of Artificial Sequence: Synthetic oligonucleotide
uucugagggcgugcugcug

SEQ ID NO: 1944467 - RNA, 19 nt, Artificial Sequence
  Description of Artificial Sequence: Synthetic oligonucleotide
gcauauccccagcucagga

SEQ ID NO: 1944468 - RNA, 19 nt, Artificial Sequence
  Description of Artificial Sequence: Synthetic oligonucleotide
cugugaugacaccacauuu

SEQ ID NO: 1944469 - RNA, 19 nt, Artificial Sequence
  Description of Artificial Sequence: Synthetic oligonucleotide
gguggcucacucugcuuac

SEQ ID NO: 1944470 - RNA, 19 nt, Artificial Sequence
  Description of Artificial Sequence: Synthetic oligonucleotide
guccuuccgacaccaugca

SEQ ID NO: 1944471 - RNA, 19 nt, Artificial Sequence
  Description of Artificial Sequence: Synthetic oligonucleotide
accuugcuccuugcuguag

SEQ ID NO: 1944472 - RNA, 19 nt, Artificial Sequence
  Description of Artificial Sequence: Synthetic oligonucleotide
cauucacuguccagagucu

SEQ ID NO: 1944473 - RNA, 19 nt, Artificial Sequence
  Description of Artificial Sequence: Synthetic oligonucleotide
gagaugcaucugacucucc

SEQ ID NO: 1944474 - RNA, 19 nt, Artificial Sequence
  Description of Artificial Sequence: Synthetic oligonucleotide
cccagcucaggauagcaga

SEQ ID NO: 1944475 - RNA, 19 nt, Artificial Sequence
  Description of Artificial Sequence: Synthetic oligonucleotide
gggucccacacgaugcaag

SEQ ID NO: 1944476 - RNA, 19 nt, Artificial Sequence
  Description of Artificial Sequence: Synthetic oligonucleotide
ggaagcgugccuagggaca

SEQ ID NO: 1944477 - RNA, 19 nt, Artificial Sequence
  Description of Artificial Sequence: Synthetic oligonucleotide
gguuaucucuucugugugu

SEQ ID NO: 1944478 - RNA, 19 nt, Artificial Sequence
  Description of Artificial Sequence: Synthetic oligonucleotide
ccggugaagagcugacaac

SEQ ID NO: 1944479 - RNA, 19 nt, Artificial Sequence
  Description of Artificial Sequence: Synthetic oligonucleotide
uuucucucacaggcuucaa

SEQ ID NO: 1944480 - RNA, 19 nt, Artificial Sequence
  Description of Artificial Sequence: Synthetic oligonucleotide
cugacucuccauuucgauu

SEQ ID NO: 1944481 - RNA, 19 nt, Artificial Sequence
  Description of Artificial Sequence: Synthetic oligonucleotide
ccguuauggaauggggcag

SEQ ID NO: 1944482 - RNA, 19 nt, Artificial Sequence
  Description of Artificial Sequence: Synthetic oligonucleotide
cacugaaugucuguauuau

SEQ ID NO: 1944483 - RNA, 19 nt, Artificial Sequence
  Description of Artificial Sequence: Synthetic oligonucleotide
caccuggugcuguugugaa

SEQ ID NO: 1944484 - RNA, 19 nt, Artificial Sequence
  Description of Artificial Sequence: Synthetic oligonucleotide
cguuauggaauggggcagg

SEQ ID NO: 1944485 - RNA, 19 nt, Artificial Sequence
  Description of Artificial Sequence: Synthetic oligonucleotide
guguauaaaugguguccau

SEQ ID NO: 1944486 - RNA, 19 nt, Artificial Sequence
  Description of Artificial Sequence: Synthetic oligonucleotide
cuggugagucuguugguau

SEQ ID NO: 1944487 - RNA, 19 nt, Artificial Sequence
  Description of Artificial Sequence: Synthetic oligonucleotide
ggcucugguaggcagugcu

SEQ ID NO: 1944488 - RNA, 19 nt, Artificial Sequence
  Description of Artificial Sequence: Synthetic oligonucleotide
cagccuuccacaccguuau

SEQ ID NO: 1944489 - RNA, 19 nt, Artificial Sequence
  Description of Artificial Sequence: Synthetic oligonucleotide
gcugcugguccuuccgaca

SEQ ID NO: 1944490 - RNA, 19 nt, Artificial Sequence
  Description of Artificial Sequence: Synthetic oligonucleotide
gcagugcuuggagggaacc

SEQ ID NO: 1944491 - RNA, 19 nt, Artificial Sequence
  Description of Artificial Sequence: Synthetic oligonucleotide
gcugugaugacaccacauu

SEQ ID NO: 1944492 - RNA, 19 nt, Artificial Sequence
  Description of Artificial Sequence: Synthetic oligonucleotide
ccuuccgacaccaugcaau

SEQ ID NO: 1944493 - RNA, 19 nt, Artificial Sequence
  Description of Artificial Sequence: Synthetic oligonucleotide
ggagggaaccaaauucugu

SEQ ID NO: 1944494 - RNA, 19 nt, Artificial Sequence
  Description of Artificial Sequence: Synthetic oligonucleotide
cacaagcugguuaucucuu

SEQ ID NO: 1944495 - RNA, 19 nt, Artificial Sequence
  Description of Artificial Sequence: Synthetic oligonucleotide
auagucuguuuggguccca

SEQ ID NO: 1944496 - RNA, 19 nt, Artificial Sequence
  Description of Artificial Sequence: Synthetic oligonucleotide
gcugguccuuccgacacca

SEQ ID NO: 1944497 - RNA, 19 nt, Artificial Sequence
  Description of Artificial Sequence: Synthetic oligonucleotide
aggcacccaggcacaacug

SEQ ID NO: 1944498 - RNA, 19 nt, Artificial Sequence
  Description of Artificial Sequence: Synthetic oligonucleotide
gucuguugguauaggcugu

SEQ ID NO: 1944499 - RNA, 19 nt, Artificial Sequence
  Description of Artificial Sequence: Synthetic oligonucleotide
gacaacugucaggcaccca

SEQ ID NO: 1944500 - RNA, 19 nt, Artificial Sequence
  Description of Artificial Sequence: Synthetic oligonucleotide
cucugcucacacuuaucau

SEQ ID NO: 1944501 - RNA, 19 nt, Artificial Sequence
  Description of Artificial Sequence: Synthetic oligonucleotide
ccacugaaugucuguauua

SEQ ID NO: 1944502 - RNA, 19 nt, Artificial Sequence
  Description of Artificial Sequence: Synthetic oligonucleotide
gauacucccucaggcuggu

SEQ ID NO: 1944503 - RNA, 19 nt, Artificial Sequence
  Description of Artificial Sequence: Synthetic oligonucleotide
ccaacgagguccccauuca

SEQ ID NO: 1944504 - RNA, 19 nt, Artificial Sequence
  Description of Artificial Sequence: Synthetic oligonucleotide
ggcuuuacuuucaggacau

SEQ ID NO: 1944505 - RNA, 19 nt, Artificial Sequence
  Description of Artificial Sequence: Synthetic oligonucleotide
cuccuugcuguaggucauc

SEQ ID NO: 1944506 - RNA, 19 nt, Artificial Sequence
  Description of Artificial Sequence: Synthetic oligonucleotide
ggcugguuggagaaagcua

SEQ ID NO: 1944507 - RNA, 19 nt, Artificial Sequence
  Description of Artificial Sequence: Synthetic oligonucleotide
cuucauccagcugcguagu

SEQ ID NO: 1944508 - RNA, 19 nt, Artificial Sequence
  Description of Artificial Sequence: Synthetic oligonucleotide
caccacauuugcucccggu

SEQ ID NO: 1944509 - RNA, 19 nt, Artificial Sequence
  Description of Artificial Sequence: Synthetic oligonucleotide
caguggcuggagccagcuc

SEQ ID NO: 1944510 - RNA, 19 nt, Artificial Sequence
  Description of Artificial Sequence: Synthetic oligonucleotide
cacacgaugcaagucccau

SEQ ID NO: 1944511 - RNA, 19 nt, Artificial Sequence
  Description of Artificial Sequence: Synthetic oligonucleotide
gcucaggauagcagaccac

SEQ ID NO: 1944512 - RNA, 19 nt, Artificial Sequence
  Description of Artificial Sequence: Synthetic oligonucleotide
gcucccggugaagagcuga

SEQ ID NO: 1944513 - RNA, 19 nt, Artificial Sequence
  Description of Artificial Sequence: Synthetic oligonucleotide
gcuuuacuuucaggacaug

SEQ ID NO: 1944514 - RNA, 19 nt, Artificial Sequence
  Description of Artificial Sequence: Synthetic oligonucleotide
ggcgugcugcuggugaguc

SEQ ID NO: 1944515 - RNA, 19 nt, Artificial Sequence
  Description of Artificial Sequence: Synthetic oligonucleotide
ccaugcaaucacuguccca

SEQ ID NO: 1944516 - RNA, 19 nt, Artificial Sequence
  Description of Artificial Sequence: Synthetic oligonucleotide
cugccagacuuuguacaua

SEQ ID NO: 1944517 - RNA, 19 nt, Artificial Sequence
  Description of Artificial Sequence: Synthetic oligonucleotide
ccagccuuccacaccguua

SEQ ID NO: 1944518 - RNA, 19 nt, Artificial Sequence
  Description of Artificial Sequence: Synthetic oligonucleotide
ccacaccguuauggaaugg

SEQ ID NO: 1944519 - RNA, 19 nt, Artificial Sequence
  Description of Artificial Sequence: Synthetic oligonucleotide
gugcuguugugaacucugu

SEQ ID NO: 1944520 - RNA, 19 nt, Artificial Sequence
  Description of Artificial Sequence: Synthetic oligonucleotide
ggauagcagaccacugaau

SEQ ID NO: 1944521 - RNA, 19 nt, Artificial Sequence
  Description of Artificial Sequence: Synthetic oligonucleotide
ccacaguauggugcucaug

SEQ ID NO: 1944522 - RNA, 19 nt, Artificial Sequence
  Description of Artificial Sequence: Synthetic oligonucleotide
ggcucacucugcuuacuuu

SEQ ID NO: 1944523 - RNA, 19 nt, Artificial Sequence
  Description of Artificial Sequence: Synthetic oligonucleotide
ccugccagacuuuguacau

SEQ ID NO: 1944524 - RNA, 19 nt, Artificial Sequence
  Description of Artificial Sequence: Synthetic oligonucleotide
ggcugugaugacaccacau

SEQ ID NO: 1944525 - RNA, 19 nt, Artificial Sequence
  Description of Artificial Sequence: Synthetic oligonucleotide
ccucacaaugccguuuucu

SEQ ID NO: 1944526 - RNA, 19 nt, Artificial Sequence
  Description of Artificial Sequence: Synthetic oligonucleotide
ccacacgaugcaaguccca

SEQ ID NO: 1944527 - RNA, 19 nt, Artificial Sequence
  Description of Artificial Sequence: Synthetic oligonucleotide
cucccucaggcugguugga

SEQ ID NO: 1944528 - RNA, 19 nt, Artificial Sequence
  Description of Artificial Sequence: Synthetic oligonucleotide
guggcucacucugcuuacu

SEQ ID NO: 1944529 - RNA, 19 nt, Artificial Sequence
  Description of Artificial Sequence: Synthetic oligonucleotide
gggcagggcuuuacuuuca

SEQ ID NO: 1944530 - RNA, 19 nt, Artificial Sequence
  Description of Artificial Sequence: Synthetic oligonucleotide
gcgugccuagggacaggug

SEQ ID NO: 1944531 - RNA, 19 nt, Artificial Sequence
  Description of Artificial Sequence: Synthetic oligonucleotide
auacucccucaggcugguu

SEQ ID NO: 1944532 - RNA, 19 nt, Artificial Sequence
  Description of Artificial Sequence: Synthetic oligonucleotide
gcacaacuggucaccuggu

SEQ ID NO: 1944533 - RNA, 19 nt, Artificial Sequence
  Description of Artificial Sequence: Synthetic oligonucleotide
gcuccacaguauggugcuc

SEQ ID NO: 1944534 - RNA, 19 nt, Artificial Sequence
  Description of Artificial Sequence: Synthetic oligonucleotide
gcgugcugacccagccuuc

SEQ ID NO: 1944535 - RNA, 19 nt, Artificial Sequence
  Description of Artificial Sequence: Synthetic oligonucleotide
cacaggcuucaagucccau

SEQ ID NO: 1944536 - RNA, 19 nt, Artificial Sequence
  Description of Artificial Sequence: Synthetic oligonucleotide
gcucugguaggcagugcuu

SEQ ID NO: 1944537 - RNA, 19 nt, Artificial Sequence
  Description of Artificial Sequence: Synthetic oligonucleotide
cgauuucugagggcgugcu

SEQ ID NO: 1944538 - RNA, 19 nt, Artificial Sequence
  Description of Artificial Sequence: Synthetic oligonucleotide
cgagguccccauucacugu

SEQ ID NO: 1944539 - RNA, 19 nt, Artificial Sequence
  Description of Artificial Sequence: Synthetic oligonucleotide
ggcuuaugauaggcuuauu

SEQ ID NO: 1944540 - RNA, 19 nt, Artificial Sequence
  Description of Artificial Sequence: Synthetic oligonucleotide
gccuagggacaggugucau

SEQ ID NO: 1944541 - RNA, 19 nt, Artificial Sequence
  Description of Artificial Sequence: Synthetic oligonucleotide
cccagccuuccacaccguu

SEQ ID NO: 1944542 - RNA, 19 nt, Artificial Sequence
  Description of Artificial Sequence: Synthetic oligonucleotide
uauuauguuaaucaguucg

SEQ ID NO: 1944543 - RNA, 19 nt, Artificial Sequence
  Description of Artificial Sequence: Synthetic oligonucleotide
uuugcauauaacuaaagcg

SEQ ID NO: 1944544 - RNA, 19 nt, Artificial Sequence
  Description of Artificial Sequence: Synthetic oligonucleotide
uaagccaucaagcaaaucg

SEQ ID NO: 1944545 - RNA, 19 nt, Artificial Sequence
  Description of Artificial Sequence: Synthetic oligonucleotide
uuuauugucagauaguuca

SEQ ID NO: 1944546 - RNA, 19 nt, Artificial Sequence
  Description of Artificial Sequence: Synthetic oligonucleotide
ugaauuaacaucaagaauu

SEQ ID NO: 1944547 - RNA, 19 nt, Artificial Sequence
  Description of Artificial Sequence: Synthetic oligonucleotide
acuacuaagauucacaaug

SEQ ID NO: 1944548 - RNA, 19 nt, Artificial Sequence
  Description of Artificial Sequence: Synthetic oligonucleotide
ugagauauuacaagaauag

SEQ ID NO: 1944549 - RNA, 19 nt, Artificial Sequence
  Description of Artificial Sequence: Synthetic oligonucleotide
ucagcuacuacuaagauuc

SEQ ID NO: 1944550 - RNA, 19 nt, Artificial Sequence
  Description of Artificial Sequence: Synthetic oligonucleotide
auuugcauauaacuaaagc

SEQ ID NO: 1944551 - RNA, 19 nt, Artificial Sequence
  Description of Artificial Sequence: Synthetic oligonucleotide
aaugcuaaaggguuuuagg

SEQ ID NO: 1944552 - RNA, 19 nt, Artificial Sequence
  Description of Artificial Sequence: Synthetic oligonucleotide
acaagaauaguuuacaagu

SEQ ID NO: 1944553 - RNA, 19 nt, Artificial Sequence
  Description of Artificial Sequence: Synthetic oligonucleotide
ucuggauucaauucuauag

SEQ ID NO: 1944554 - RNA, 19 nt, Artificial Sequence
  Description of Artificial Sequence: Synthetic oligonucleotide
ugcgaauucagcauagucg

SEQ ID NO: 1944555 - RNA, 19 nt, Artificial Sequence
  Description of Artificial Sequence: Synthetic oligonucleotide
uaguaugucuauuacaucc

SEQ ID NO: 1944556 - RNA, 19 nt, Artificial Sequence
  Description of Artificial Sequence: Synthetic oligonucleotide
uauaguaugucuauuacau

SEQ ID NO: 1944557 - RNA, 19 nt, Artificial Sequence
  Description of Artificial Sequence: Synthetic oligonucleotide
aaucguugccaucauaauc

SEQ ID NO: 1944558 - RNA, 19 nt, Artificial Sequence
  Description of Artificial Sequence: Synthetic oligonucleotide
augcuaaaggguuuuaggc

SEQ ID NO: 1944559 - RNA, 19 nt, Artificial Sequence
  Description of Artificial Sequence: Synthetic oligonucleotide
uuacauuucagguagcaug

SEQ ID NO: 1944560 - RNA, 19 nt, Artificial Sequence
  Description of Artificial Sequence: Synthetic oligonucleotide
gauucaauucuauaguaug

SEQ ID NO: 1944561 - RNA, 19 nt, Artificial Sequence
  Description of Artificial Sequence: Synthetic oligonucleotide
aauuagaguggcaaucugc

SEQ ID NO: 1944562 - RNA, 19 nt, Artificial Sequence
  Description of Artificial Sequence: Synthetic oligonucleotide
ucuauuacauccugcaaag

SEQ ID NO: 1944563 - RNA, 19 nt, Artificial Sequence
  Description of Artificial Sequence: Synthetic oligonucleotide
ucuauuauguuaaucaguu

SEQ ID NO: 1944564 - RNA, 19 nt, Artificial Sequence
  Description of Artificial Sequence: Synthetic oligonucleotide
aacaaacugccacaggauc

SEQ ID NO: 1944565 - RNA, 19 nt, Artificial Sequence
  Description of Artificial Sequence: Synthetic oligonucleotide
uuugaaauaguggagcugc

SEQ ID NO: 1944566 - RNA, 19 nt, Artificial Sequence
  Description of Artificial Sequence: Synthetic oligonucleotide
aaugagauauuacaagaau

SEQ ID NO: 1944567 - RNA, 19 nt, Artificial Sequence
  Description of Artificial Sequence: Synthetic oligonucleotide
ucucuauacgucuuaaagc

SEQ ID NO: 1944568 - RNA, 19 nt, Artificial Sequence
  Description of Artificial Sequence: Synthetic oligonucleotide
aguguguagcaguagacgg

SEQ ID NO: 1944569 - RNA, 19 nt, Artificial Sequence
  Description of Artificial Sequence: Synthetic oligonucleotide
auggacaugagugauggcc

SEQ ID NO: 1944570 - RNA, 19 nt, Artificial Sequence
  Description of Artificial Sequence: Synthetic oligonucleotide
uuauggacaugagugaugg

SEQ ID NO: 1944571 - RNA, 19 nt, Artificial Sequence
  Description of Artificial Sequence: Synthetic oligonucleotide
aguacaagagguccagagc

SEQ ID NO: 1944572 - RNA, 19 nt, Artificial Sequence
  Description of Artificial Sequence: Synthetic oligonucleotide
aauuuauaccccaaggcug

SEQ ID NO: 1944573 - RNA, 19 nt, Artificial Sequence
  Description of Artificial Sequence: Synthetic oligonucleotide
aauucuauaguaugucuau

SEQ ID NO: 1944574 - RNA, 19 nt, Artificial Sequence
  Description of Artificial Sequence: Synthetic oligonucleotide
agcaauuuauaccccaagg

SEQ ID NO: 1944575 - RNA, 19 nt, Artificial Sequence
  Description of Artificial Sequence: Synthetic oligonucleotide
aagcaaauuugauucagcu

SEQ ID NO: 1944576 - RNA, 19 nt, Artificial Sequence
  Description of Artificial Sequence: Synthetic oligonucleotide
ugcauauaacuaaagcgcc

SEQ ID NO: 1944577 - RNA, 19 nt, Artificial Sequence
  Description of Artificial Sequence: Synthetic oligonucleotide
uguagcaguagacggaaag

SEQ ID NO: 1944578 - RNA, 19 nt, Artificial Sequence
  Description of Artificial Sequence: Synthetic oligonucleotide
aaauaagucucuauacguc

SEQ ID NO: 1944579 - RNA, 19 nt, Artificial Sequence
  Description of Artificial Sequence: Synthetic oligonucleotide
acaaauacuugacacagga

SEQ ID NO: 1944580 - RNA, 19 nt, Artificial Sequence
  Description of Artificial Sequence: Synthetic oligonucleotide
gucaucgucucucaaaacg

SEQ ID NO: 1944581 - RNA, 19 nt, Artificial Sequence
  Description of Artificial Sequence: Synthetic oligonucleotide
uauuacaagaauaguuuac

SEQ ID NO: 1944582 - RNA, 19 nt, Artificial Sequence
  Description of Artificial Sequence: Synthetic oligonucleotide
agaguuguuuugcauuacc

SEQ ID NO: 1944583 - RNA, 19 nt, Artificial Sequence
  Description of Artificial Sequence: Synthetic oligonucleotide
ucuauaguaugucuauuac

SEQ ID NO: 1944584 - RNA, 19 nt, Artificial Sequence
  Description of Artificial Sequence: Synthetic oligonucleotide
ucuugauacuguaugccag

SEQ ID NO: 1944585 - RNA, 19 nt, Artificial Sequence
  Description of Artificial Sequence: Synthetic oligonucleotide
gauacuguaugccagggga

SEQ ID NO: 1944586 - RNA, 19 nt, Artificial Sequence
  Description of Artificial Sequence: Synthetic oligonucleotide
ucuagauguuccaugauau

SEQ ID NO: 1944587 - RNA, 19 nt, Artificial Sequence
  Description of Artificial Sequence: Synthetic oligonucleotide
caugauaugcucuugguca

SEQ ID NO: 1944588 - RNA, 19 nt, Artificial Sequence
  Description of Artificial Sequence: Synthetic oligonucleotide
gaugacaccuucuagaugu

SEQ ID NO: 1944589 - RNA, 19 nt, Artificial Sequence
  Description of Artificial Sequence: Synthetic oligonucleotide
aagaauacuuuaauaaaga

SEQ ID NO: 1944590 - RNA, 19 nt, Artificial Sequence
  Description of Artificial Sequence: Synthetic oligonucleotide
uacauuucagguagcauga

SEQ ID NO: 1944591 - RNA, 19 nt, Artificial Sequence
  Description of Artificial Sequence: Synthetic oligonucleotide
uggacaugagugauggccg

SEQ ID NO: 1944592 - RNA, 19 nt, Artificial Sequence
  Description of Artificial Sequence: Synthetic oligonucleotide
caaaacgccaucuauuaug

SEQ ID NO: 1944593 - RNA, 19 nt, Artificial Sequence
  Description of Artificial Sequence: Synthetic oligonucleotide
cugaaagugguccacuugg

SEQ ID NO: 1944594 - RNA, 19 nt, Artificial Sequence
  Description of Artificial Sequence: Synthetic oligonucleotide
aaggaaaagaauucuugau

SEQ ID NO: 1944595 - RNA, 19 nt, Artificial Sequence
  Description of Artificial Sequence: Synthetic oligonucleotide
cuaagauucacaaugcuaa

SEQ ID NO: 1944596 - RNA, 19 nt, Artificial Sequence
  Description of Artificial Sequence: Synthetic oligonucleotide
uagauguuccaugauaugc

SEQ ID NO: 1944597 - RNA, 19 nt, Artificial Sequence
  Description of Artificial Sequence: Synthetic oligonucleotide
ucagguagcaugaauuaac

SEQ ID NO: 1944598 - RNA, 19 nt, Artificial Sequence
  Description of Artificial Sequence: Synthetic oligonucleotide
auuuauaccccaaggcugc

SEQ ID NO: 1944599 - RNA, 19 nt, Artificial Sequence
  Description of Artificial Sequence: Synthetic oligonucleotide
aauaaagaaauaagucucu

SEQ ID NO: 1944600 - RNA, 19 nt, Artificial Sequence
  Description of Artificial Sequence: Synthetic oligonucleotide
aacugucucacaagaauac

SEQ ID NO: 1944601 - RNA, 19 nt, Artificial Sequence
  Description of Artificial Sequence: Synthetic oligonucleotide
aaguguguagcaguagacg

SEQ ID NO: 1944602 - RNA, 19 nt, Artificial Sequence
  Description of Artificial Sequence: Synthetic oligonucleotide
aacgccaucuauuauguua

SEQ ID NO: 1944603 - RNA, 19 nt, Artificial Sequence
  Description of Artificial Sequence: Synthetic oligonucleotide
cauccugccaucauucugg

SEQ ID NO: 1944604 - RNA, 19 nt, Artificial Sequence
  Description of Artificial Sequence: Synthetic oligonucleotide
uauguuaaucaguucgucu

SEQ ID NO: 1944605 - RNA, 19 nt, Artificial Sequence
  Description of Artificial Sequence: Synthetic oligonucleotide
ugugcucuuguccaggccc

SEQ ID NO: 1944606 - RNA, 19 nt, Artificial Sequence
  Description of Artificial Sequence: Synthetic oligonucleotide
uaaugagauauuacaagaa

SEQ ID NO: 1944607 - RNA, 19 nt, Artificial Sequence
  Description of Artificial Sequence: Synthetic oligonucleotide
ucaucgucucucaaaacgc

SEQ ID NO: 1944608 - RNA, 19 nt, Artificial Sequence
  Description of Artificial Sequence: Synthetic oligonucleotide
cucuauacgucuuaaagca

SEQ ID NO: 1944609 - RNA, 19 nt, Artificial Sequence
  Description of Artificial Sequence: Synthetic oligonucleotide
uacgucuuaaagcaaauuu

SEQ ID NO: 1944610 - RNA, 19 nt, Artificial Sequence
  Description of Artificial Sequence: Synthetic oligonucleotide
uuccaugauaugcucuugg

SEQ ID NO: 1944611 - RNA, 19 nt, Artificial Sequence
  Description of Artificial Sequence: Synthetic oligonucleotide
cugcaaagcaauuuauacc

SEQ ID NO: 1944612 - RNA, 19 nt, Artificial Sequence
  Description of Artificial Sequence: Synthetic oligonucleotide
caaauaacaucuacugcag

SEQ ID NO: 1944613 - RNA, 19 nt, Artificial Sequence
  Description of Artificial Sequence: Synthetic oligonucleotide
aaagugguccacuuggcaa

SEQ ID NO: 1944614 - RNA, 19 nt, Artificial Sequence
  Description of Artificial Sequence: Synthetic oligonucleotide
uuaucaagggucacauuug

SEQ ID NO: 1944615 - RNA, 19 nt, Artificial Sequence
  Description of Artificial Sequence: Synthetic oligonucleotide
aguucuaagccaucaagca

SEQ ID NO: 1944616 - RNA, 19 nt, Artificial Sequence
  Description of Artificial Sequence: Synthetic oligonucleotide
uuugcauuaccagacacgu

SEQ ID NO: 1944617 - RNA, 19 nt, Artificial Sequence
  Description of Artificial Sequence: Synthetic oligonucleotide
aauaguggagcugcaguuc

SEQ ID NO: 1944618 - RNA, 19 nt, Artificial Sequence
  Description of Artificial Sequence: Synthetic oligonucleotide
acaguucuaagccaucaag

SEQ ID NO: 1944619 - RNA, 19 nt, Artificial Sequence
  Description of Artificial Sequence: Synthetic oligonucleotide
aagugguccacuuggcaag

SEQ ID NO: 1944620 - RNA, 19 nt, Artificial Sequence
  Description of Artificial Sequence: Synthetic oligonucleotide
gaguacaagagguccagag

SEQ ID NO: 1944621 - RNA, 19 nt, Artificial Sequence
  Description of Artificial Sequence: Synthetic oligonucleotide
ucaauucuauaguaugucu

SEQ ID NO: 1944622 - RNA, 19 nt, Artificial Sequence
  Description of Artificial Sequence: Synthetic oligonucleotide
aagcaauuuauaccccaag

SEQ ID NO: 1944623 - RNA, 19 nt, Artificial Sequence
  Description of Artificial Sequence: Synthetic oligonucleotide
cuauuacugaaaguggucc

SEQ ID NO: 1944624 - RNA, 19 nt, Artificial Sequence
  Description of Artificial Sequence: Synthetic oligonucleotide
agaguggcaaucugcaguc

SEQ ID NO: 1944625 - RNA, 19 nt, Artificial Sequence
  Description of Artificial Sequence: Synthetic oligonucleotide
ucgucuucacucauuacug

SEQ ID NO: 1944626 - RNA, 19 nt, Artificial Sequence
  Description of Artificial Sequence: Synthetic oligonucleotide
gaaauaagucucuauacgu

SEQ ID NO: 1944627 - RNA, 19 nt, Artificial Sequence
  Description of Artificial Sequence: Synthetic oligonucleotide
cuacuaagauucacaaugc

SEQ ID NO: 1944628 - RNA, 19 nt, Artificial Sequence
  Description of Artificial Sequence: Synthetic oligonucleotide
caguucuaagccaucaagc

SEQ ID NO: 1944629 - RNA, 19 nt, Artificial Sequence
  Description of Artificial Sequence: Synthetic oligonucleotide
ucuucacucauuacuggug

SEQ ID NO: 1944630 - RNA, 19 nt, Artificial Sequence
  Description of Artificial Sequence: Synthetic oligonucleotide
agcgccaaauaacaucuac

SEQ ID NO: 1944631 - RNA, 19 nt, Artificial Sequence
  Description of Artificial Sequence: Synthetic oligonucleotide
ucaagggucacauuugcau

SEQ ID NO: 1944632 - RNA, 19 nt, Artificial Sequence
  Description of Artificial Sequence: Synthetic oligonucleotide
uaucaagggucacauuugc

SEQ ID NO: 1944633 - RNA, 19 nt, Artificial Sequence
  Description of Artificial Sequence: Synthetic oligonucleotide
agaauaguuuacaagucag

SEQ ID NO: 1944634 - RNA, 19 nt, Artificial Sequence
  Description of Artificial Sequence: Synthetic oligonucleotide
ugucagauaguucauuaua

SEQ ID NO: 1944635 - RNA, 19 nt, Artificial Sequence
  Description of Artificial Sequence: Synthetic oligonucleotide
uucuugauacuguaugcca

SEQ ID NO: 1944636 - RNA, 19 nt, Artificial Sequence
  Description of Artificial Sequence: Synthetic oligonucleotide
auuacuggugccugaucac

SEQ ID NO: 1944637 - RNA, 19 nt, Artificial Sequence
  Description of Artificial Sequence: Synthetic oligonucleotide
uccagagcagggcacacag

SEQ ID NO: 1944638 - RNA, 19 nt, Artificial Sequence
  Description of Artificial Sequence: Synthetic oligonucleotide
aguguaacaaacugccaca

SEQ ID NO: 1944639 - RNA, 19 nt, Artificial Sequence
  Description of Artificial Sequence: Synthetic oligonucleotide
augucuauuacauccugca

SEQ ID NO: 1944640 - RNA, 19 nt, Artificial Sequence
  Description of Artificial Sequence: Synthetic oligonucleotide
augaauuaacaucaagaau

SEQ ID NO: 1944641 - RNA, 19 nt, Artificial Sequence
  Description of Artificial Sequence: Synthetic oligonucleotide
auaguaugucuauuacauc

SEQ ID NO: 1944642 - RNA, 19 nt, Artificial Sequence
  Description of Artificial Sequence: Synthetic oligonucleotide
uucuauaguaugucuauua

SEQ ID NO: 1944643 - RNA, 19 nt, Artificial Sequence
  Description of Artificial Sequence: Synthetic oligonucleotide
ugagugauggccguggaca

SEQ ID NO: 1944644 - RNA, 19 nt, Artificial Sequence
  Description of Artificial Sequence: Synthetic oligonucleotide
caguguaacaaacugccac

SEQ ID NO: 1944645 - RNA, 19 nt, Artificial Sequence
  Description of Artificial Sequence: Synthetic oligonucleotide
uaugcucuuggucaugcac

SEQ ID NO: 1944646 - RNA, 19 nt, Artificial Sequence
  Description of Artificial Sequence: Synthetic oligonucleotide
uuuuauccauuuuauuguc

SEQ ID NO: 1944647 - RNA, 19 nt, Artificial Sequence
  Description of Artificial Sequence: Synthetic oligonucleotide
agauauuacaagaauaguu

SEQ ID NO: 1944648 - RNA, 19 nt, Artificial Sequence
  Description of Artificial Sequence: Synthetic oligonucleotide
ucuacugcagugacuuugc

SEQ ID NO: 1944649 - RNA, 19 nt, Artificial Sequence
  Description of Artificial Sequence: Synthetic oligonucleotide
cuugacacaggaaacuguc

SEQ ID NO: 1944650 - RNA, 19 nt, Artificial Sequence
  Description of Artificial Sequence: Synthetic oligonucleotide
uugucaucgucucucaaaa

SEQ ID NO: 1944651 - RNA, 19 nt, Artificial Sequence
  Description of Artificial Sequence: Synthetic oligonucleotide
aggaaaagaauucuugaua

SEQ ID NO: 1944652 - RNA, 19 nt, Artificial Sequence
  Description of Artificial Sequence: Synthetic oligonucleotide
gacggaaagaguuguuuug

SEQ ID NO: 1944653 - RNA, 19 nt, Artificial Sequence
  Description of Artificial Sequence: Synthetic oligonucleotide
uucuagauguuccaugaua

SEQ ID NO: 1944654 - RNA, 19 nt, Artificial Sequence
  Description of Artificial Sequence: Synthetic oligonucleotide
cuucacucauuacuggugc

SEQ ID NO: 1944655 - RNA, 19 nt, Artificial Sequence
  Description of Artificial Sequence: Synthetic oligonucleotide
aaaacgccaucuauuaugu

SEQ ID NO: 1944656 - RNA, 19 nt, Artificial Sequence
  Description of Artificial Sequence: Synthetic oligonucleotide
gcaauuuauaccccaaggc

SEQ ID NO: 1944657 - RNA, 19 nt, Artificial Sequence
  Description of Artificial Sequence: Synthetic oligonucleotide
auauuacaagaauaguuua

SEQ ID NO: 1944658 - RNA, 19 nt, Artificial Sequence
  Description of Artificial Sequence: Synthetic oligonucleotide
auuuuauugucagauaguu

SEQ ID NO: 1944659 - RNA, 19 nt, Artificial Sequence
  Description of Artificial Sequence: Synthetic oligonucleotide
gaauaguuuacaagucagc

SEQ ID NO: 1944660 - RNA, 19 nt, Artificial Sequence
  Description of Artificial Sequence: Synthetic oligonucleotide
ucucaaaacgccaucuauu

SEQ ID NO: 1944661 - RNA, 19 nt, Artificial Sequence
  Description of Artificial Sequence: Synthetic oligonucleotide
ugucuuuacauuucaggua

SEQ ID NO: 1944662 - RNA, 19 nt, Artificial Sequence
  Description of Artificial Sequence: Synthetic oligonucleotide
auauugucuuuacauuuca

SEQ ID NO: 1944663 - RNA, 19 nt, Artificial Sequence
  Description of Artificial Sequence: Synthetic oligonucleotide
ccaaauaacaucuacugca

SEQ ID NO: 1944664 - RNA, 19 nt, Artificial Sequence
  Description of Artificial Sequence: Synthetic oligonucleotide
gauauuacaagaauaguuu

SEQ ID NO: 1944665 - RNA, 19 nt, Artificial Sequence
  Description of Artificial Sequence: Synthetic oligonucleotide
caaaucguugccaucauaa

SEQ ID NO: 1944666 - RNA, 19 nt, Artificial Sequence
  Description of Artificial Sequence: Synthetic oligonucleotide
ugucucacaagaauacuuu

SEQ ID NO: 1944667 - RNA, 19 nt, Artificial Sequence
  Description of Artificial Sequence: Synthetic oligonucleotide
cuuucagcuacuacuaaga

SEQ ID NO: 1944668 - RNA, 19 nt, Artificial Sequence
  Description of Artificial Sequence: Synthetic oligonucleotide
uucagcauagucgauguau

SEQ ID NO: 1944669 - RNA, 19 nt, Artificial Sequence
  Description of Artificial Sequence: Synthetic oligonucleotide
auugucagauaguucauua

SEQ ID NO: 1944670 - RNA, 19 nt, Artificial Sequence
  Description of Artificial Sequence: Synthetic oligonucleotide
cauuugcauauaacuaaag

SEQ ID NO: 1944671 - RNA, 19 nt, Artificial Sequence
  Description of Artificial Sequence: Synthetic oligonucleotide
uuucagguagcaugaauua

SEQ ID NO: 1944672 - RNA, 19 nt, Artificial Sequence
  Description of Artificial Sequence: Synthetic oligonucleotide
uggauucaauucuauagua

SEQ ID NO: 1944673 - RNA, 19 nt, Artificial Sequence
  Description of Artificial Sequence: Synthetic oligonucleotide
cagauaguucauuauauaa

SEQ ID NO: 1944674 - RNA, 19 nt, Artificial Sequence
  Description of Artificial Sequence: Synthetic oligonucleotide
uguggcuuucacacugucc

SEQ ID NO: 1944675 - RNA, 19 nt, Artificial Sequence
  Description of Artificial Sequence: Synthetic oligonucleotide
ugaaagugguccacuuggc

SEQ ID NO: 1944676 - RNA, 19 nt, Artificial Sequence
  Description of Artificial Sequence: Synthetic oligonucleotide
ucagcauagucgauguauc

SEQ ID NO: 1944677 - RNA, 19 nt, Artificial Sequence
  Description of Artificial Sequence: Synthetic oligonucleotide
gaauuagaguggcaaucug

SEQ ID NO: 1944678 - RNA, 19 nt, Artificial Sequence
  Description of Artificial Sequence: Synthetic oligonucleotide
uaacaucuacugcagugac

SEQ ID NO: 1944679 - RNA, 19 nt, Artificial Sequence
  Description of Artificial Sequence: Synthetic oligonucleotide
cuauaguaugucuauuaca

SEQ ID NO: 1944680 - RNA, 19 nt, Artificial Sequence
  Description of Artificial Sequence: Synthetic oligonucleotide
ucaagcaaaucguugccau

SEQ ID NO: 1944681 - RNA, 19 nt, Artificial Sequence
  Description of Artificial Sequence: Synthetic oligonucleotide
auaacaucuacugcaguga

SEQ ID NO: 1944682 - RNA, 19 nt, Artificial Sequence
  Description of Artificial Sequence: Synthetic oligonucleotide
agaauuagaguggcaaucu

SEQ ID NO: 1944683 - RNA, 19 nt, Artificial Sequence
  Description of Artificial Sequence: Synthetic oligonucleotide
uauaccccaaggcugcuuc

SEQ ID NO: 1944684 - RNA, 19 nt, Artificial Sequence
  Description of Artificial Sequence: Synthetic oligonucleotide
uugcgaauucagcauaguc

SEQ ID NO: 1944685 - RNA, 19 nt, Artificial Sequence
  Description of Artificial Sequence: Synthetic oligonucleotide
cuuugcgaauucagcauag

SEQ ID NO: 1944686 - RNA, 19 nt, Artificial Sequence
  Description of Artificial Sequence: Synthetic oligonucleotide
uugauacuguaugccaggg

SEQ ID NO: 1944687 - RNA, 19 nt, Artificial Sequence
  Description of Artificial Sequence: Synthetic oligonucleotide
auuagaguggcaaucugca

SEQ ID NO: 1944688 - RNA, 19 nt, Artificial Sequence
  Description of Artificial Sequence: Synthetic oligonucleotide
gauaugcucuuggucaugc

SEQ ID NO: 1944689 - RNA, 19 nt, Artificial Sequence
  Description of Artificial Sequence: Synthetic oligonucleotide
gucgaugacaccuucuaga

SEQ ID NO: 1944690 - RNA, 19 nt, Artificial Sequence
  Description of Artificial Sequence: Synthetic oligonucleotide
ugaggggacaucucugucu

SEQ ID NO: 1944691 - RNA, 19 nt, Artificial Sequence
  Description of Artificial Sequence: Synthetic oligonucleotide
auguauccaucauuguucu

SEQ ID NO: 1944692 - RNA, 19 nt, Artificial Sequence
  Description of Artificial Sequence: Synthetic oligonucleotide
aguucuugaggggacaucu

SEQ ID NO: 1944693 - RNA, 19 nt, Artificial Sequence
  Description of Artificial Sequence: Synthetic oligonucleotide
cuuauggacaugagugaug

SEQ ID NO: 1944694 - RNA, 19 nt, Artificial Sequence
  Description of Artificial Sequence: Synthetic oligonucleotide
uuacauccugcaaagcaau

SEQ ID NO: 1944695 - RNA, 19 nt, Artificial Sequence
  Description of Artificial Sequence: Synthetic oligonucleotide
guuuugcauuaccagacac

SEQ ID NO: 1944696 - RNA, 19 nt, Artificial Sequence
  Description of Artificial Sequence: Synthetic oligonucleotide
uuaggcuuccuuuucugau

SEQ ID NO: 1944697 - RNA, 19 nt, Artificial Sequence
  Description of Artificial Sequence: Synthetic oligonucleotide
uaacaaacugccacaggau

SEQ ID NO: 1944698 - RNA, 19 nt, Artificial Sequence
  Description of Artificial Sequence: Synthetic oligonucleotide
caucaagcaaaucguugcc

SEQ ID NO: 1944699 - RNA, 19 nt, Artificial Sequence
  Description of Artificial Sequence: Synthetic oligonucleotide
auuauguuaaucaguucgu

SEQ ID NO: 1944700 - RNA, 19 nt, Artificial Sequence
  Description of Artificial Sequence: Synthetic oligonucleotide
ccugcaaagcaauuuauac

SEQ ID NO: 1944701 - RNA, 19 nt, Artificial Sequence
  Description of Artificial Sequence: Synthetic oligonucleotide
cauuacuggugccugauca

SEQ ID NO: 1944702 - RNA, 19 nt, Artificial Sequence
  Description of Artificial Sequence: Synthetic oligonucleotide
ugccacaggaucuuaccca

SEQ ID NO: 1944703 - RNA, 19 nt, Artificial Sequence
  Description of Artificial Sequence: Synthetic oligonucleotide
agcauauugucuuuacauu

SEQ ID NO: 1944704 - RNA, 19 nt, Artificial Sequence
  Description of Artificial Sequence: Synthetic oligonucleotide
ucuuggucaugcacugugc

SEQ ID NO: 1944705 - RNA, 19 nt, Artificial Sequence
  Description of Artificial Sequence: Synthetic oligonucleotide
acuguccuuccacuauuac

SEQ ID NO: 1944706 - RNA, 19 nt, Artificial Sequence
  Description of Artificial Sequence: Synthetic oligonucleotide
gaccacaucuaccuggaga

SEQ ID NO: 1944707 - RNA, 19 nt, Artificial Sequence
  Description of Artificial Sequence: Synthetic oligonucleotide
aagccaucaagcaaaucgu

SEQ ID NO: 1944708 - RNA, 19 nt, Artificial Sequence
  Description of Artificial Sequence: Synthetic oligonucleotide
caaguguguagcaguagac

SEQ ID NO: 1944709 - RNA, 19 nt, Artificial Sequence
  Description of Artificial Sequence: Synthetic oligonucleotide
gaaauaguggagcugcagu

SEQ ID NO: 1944710 - RNA, 19 nt, Artificial Sequence
  Description of Artificial Sequence: Synthetic oligonucleotide
ucuauacgucuuaaagcaa

SEQ ID NO: 1944711 - RNA, 19 nt, Artificial Sequence
  Description of Artificial Sequence: Synthetic oligonucleotide
aaacugucucacaagaaua

SEQ ID NO: 1944712 - RNA, 19 nt, Artificial Sequence
  Description of Artificial Sequence: Synthetic oligonucleotide
uuucagcuacuacuaagau

SEQ ID NO: 1944713 - RNA, 19 nt, Artificial Sequence
  Description of Artificial Sequence: Synthetic oligonucleotide
uaugccaggggaacagaac

SEQ ID NO: 1944714 - RNA, 19 nt, Artificial Sequence
  Description of Artificial Sequence: Synthetic oligonucleotide
cacaaauacuugacacagg

SEQ ID NO: 1944715 - RNA, 19 nt, Artificial Sequence
  Description of Artificial Sequence: Synthetic oligonucleotide
aacauguggcuuucacacu

SEQ ID NO: 1944716 - RNA, 19 nt, Artificial Sequence
  Description of Artificial Sequence: Synthetic oligonucleotide
agugacuuugcgaauucag

SEQ ID NO: 1944717 - RNA, 19 nt, Artificial Sequence
  Description of Artificial Sequence: Synthetic oligonucleotide
uaccagacacgucccauca

SEQ ID NO: 1944718 - RNA, 19 nt, Artificial Sequence
  Description of Artificial Sequence: Synthetic oligonucleotide
aucaguucgucuucacuca

SEQ ID NO: 1944719 - RNA, 19 nt, Artificial Sequence
  Description of Artificial Sequence: Synthetic oligonucleotide
caucgucucucaaaacgcc

SEQ ID NO: 1944720 - RNA, 19 nt, Artificial Sequence
  Description of Artificial Sequence: Synthetic oligonucleotide
auuucagguagcaugaauu

SEQ ID NO: 1944721 - RNA, 19 nt, Artificial Sequence
  Description of Artificial Sequence: Synthetic oligonucleotide
uguuccaugauaugcucuu

SEQ ID NO: 1944722 - RNA, 19 nt, Artificial Sequence
  Description of Artificial Sequence: Synthetic oligonucleotide
aaggguuuuaggcuuccuu

SEQ ID NO: 1944723 - RNA, 19 nt, Artificial Sequence
  Description of Artificial Sequence: Synthetic oligonucleotide
ccaucaagcaaaucguugc

SEQ ID NO: 1944724 - RNA, 19 nt, Artificial Sequence
  Description of Artificial Sequence: Synthetic oligonucleotide
uucagcuacuacuaagauu

SEQ ID NO: 1944725 - RNA, 19 nt, Artificial Sequence
  Description of Artificial Sequence: Synthetic oligonucleotide
aggaucuuacccaagugug

SEQ ID NO: 1944726 - RNA, 19 nt, Artificial Sequence
  Description of Artificial Sequence: Synthetic oligonucleotide
uuacccaaguguguagcag

SEQ ID NO: 1944727 - RNA, 19 nt, Artificial Sequence
  Description of Artificial Sequence: Synthetic oligonucleotide
ugucuauuacauccugcaa

SEQ ID NO: 1944728 - RNA, 19 nt, Artificial Sequence
  Description of Artificial Sequence: Synthetic oligonucleotide
gucccaucacauuaucaag

SEQ ID NO: 1944729 - RNA, 19 nt, Artificial Sequence
  Description of Artificial Sequence: Synthetic oligonucleotide
aguagacggaaagaguugu

SEQ ID NO: 1944730 - RNA, 19 nt, Artificial Sequence
  Description of Artificial Sequence: Synthetic oligonucleotide
gcaugaauuaacaucaaga

SEQ ID NO: 1944731 - RNA, 19 nt, Artificial Sequence
  Description of Artificial Sequence: Synthetic oligonucleotide
guaugucuauuacauccug

SEQ ID NO: 1944732 - RNA, 19 nt, Artificial Sequence
  Description of Artificial Sequence: Synthetic oligonucleotide
aucaugcauuuugaaauag

SEQ ID NO: 1944733 - RNA, 19 nt, Artificial Sequence
  Description of Artificial Sequence: Synthetic oligonucleotide
uuauugucagauaguucau

SEQ ID NO: 1944734 - RNA, 19 nt, Artificial Sequence
  Description of Artificial Sequence: Synthetic oligonucleotide
uuauguuaaucaguucguc

SEQ ID NO: 1944735 - RNA, 19 nt, Artificial Sequence
  Description of Artificial Sequence: Synthetic oligonucleotide
cuacuacuaagauucacaa

SEQ ID NO: 1944736 - RNA, 19 nt, Artificial Sequence
  Description of Artificial Sequence: Synthetic oligonucleotide
uacccaaguguguagcagu

SEQ ID NO: 1944737 - RNA, 19 nt, Artificial Sequence
  Description of Artificial Sequence: Synthetic oligonucleotide
agcuacuacuaagauucac

SEQ ID NO: 1944738 - RNA, 19 nt, Artificial Sequence
  Description of Artificial Sequence: Synthetic oligonucleotide
ucaaaacgccaucuauuau

SEQ ID NO: 1944739 - RNA, 19 nt, Artificial Sequence
  Description of Artificial Sequence: Synthetic oligonucleotide
acaagagguccagagcagg

SEQ ID NO: 1944740 - RNA, 19 nt, Artificial Sequence
  Description of Artificial Sequence: Synthetic oligonucleotide
agcaaauuugauucagcuu

SEQ ID NO: 1944741 - RNA, 19 nt, Artificial Sequence
  Description of Artificial Sequence: Synthetic oligonucleotide
aguucgucuucacucauua

SEQ ID NO: 1944742 - RNA, 19 nt, Artificial Sequence
  Description of Artificial Sequence: Synthetic oligonucleotide
aggguuuuaggcuuccuuu

SEQ ID NO: 1944743 - RNA, 19 nt, Artificial Sequence
  Description of Artificial Sequence: Synthetic oligonucleotide
uugacacaggaaacugucu

SEQ ID NO: 1944744 - RNA, 19 nt, Artificial Sequence
  Description of Artificial Sequence: Synthetic oligonucleotide
ugcucuuggucaugcacug

SEQ ID NO: 1944745 - RNA, 19 nt, Artificial Sequence
  Description of Artificial Sequence: Synthetic oligonucleotide
uguguagcaguagacggaa

SEQ ID NO: 1944746 - RNA, 19 nt, Artificial Sequence
  Description of Artificial Sequence: Synthetic oligonucleotide
gaauuaacaucaagaauua

SEQ ID NO: 1944747 - RNA, 19 nt, Artificial Sequence
  Description of Artificial Sequence: Synthetic oligonucleotide
ucuuuacauuucagguagc

SEQ ID NO: 1944748 - RNA, 19 nt, Artificial Sequence
  Description of Artificial Sequence: Synthetic oligonucleotide
augagauauuacaagaaua

SEQ ID NO: 1944749 - RNA, 19 nt, Artificial Sequence
  Description of Artificial Sequence: Synthetic oligonucleotide
uuaaucaguucgucuucac

SEQ ID NO: 1944750 - RNA, 19 nt, Artificial Sequence
  Description of Artificial Sequence: Synthetic oligonucleotide
agauguuccaugauaugcu

SEQ ID NO: 1944751 - RNA, 19 nt, Artificial Sequence
  Description of Artificial Sequence: Synthetic oligonucleotide
uggaguacaagagguccag

SEQ ID NO: 1944752 - RNA, 19 nt, Artificial Sequence
  Description of Artificial Sequence: Synthetic oligonucleotide
cagcauagucgauguaucc

SEQ ID NO: 1944753 - RNA, 19 nt, Artificial Sequence
  Description of Artificial Sequence: Synthetic oligonucleotide
uucacucauuacuggugcc

SEQ ID NO: 1944754 - RNA, 19 nt, Artificial Sequence
  Description of Artificial Sequence: Synthetic oligonucleotide
uugaaauaguggagcugca

SEQ ID NO: 1944755 - RNA, 19 nt, Artificial Sequence
  Description of Artificial Sequence: Synthetic oligonucleotide
gugacuuugcgaauucagc

SEQ ID NO: 1944756 - RNA, 19 nt, Artificial Sequence
  Description of Artificial Sequence: Synthetic oligonucleotide
caauucuauaguaugucua

SEQ ID NO: 1944757 - RNA, 19 nt, Artificial Sequence
  Description of Artificial Sequence: Synthetic oligonucleotide
caaugcuaaaggguuuuag

SEQ ID NO: 1944758 - RNA, 19 nt, Artificial Sequence
  Description of Artificial Sequence: Synthetic oligonucleotide
cucaaaacgccaucuauua

SEQ ID NO: 1944759 - RNA, 19 nt, Artificial Sequence
  Description of Artificial Sequence: Synthetic oligonucleotide
uuguucuugucaucgucuc

SEQ ID NO: 1944760 - RNA, 19 nt, Artificial Sequence
  Description of Artificial Sequence: Synthetic oligonucleotide
gcgaauucagcauagucga

SEQ ID NO: 1944761 - RNA, 19 nt, Artificial Sequence
  Description of Artificial Sequence: Synthetic oligonucleotide
ucccauccugccaucauuc

SEQ ID NO: 1944762 - RNA, 19 nt, Artificial Sequence
  Description of Artificial Sequence: Synthetic oligonucleotide
agcauagucgauguaucca

SEQ ID NO: 1944763 - RNA, 19 nt, Artificial Sequence
  Description of Artificial Sequence: Synthetic oligonucleotide
uacuacuaagauucacaau

SEQ ID NO: 1944764 - RNA, 19 nt, Artificial Sequence
  Description of Artificial Sequence: Synthetic oligonucleotide
aguaugucuauuacauccu

SEQ ID NO: 1944765 - RNA, 19 nt, Artificial Sequence
  Description of Artificial Sequence: Synthetic oligonucleotide
acuuugcgaauucagcaua

SEQ ID NO: 1944766 - RNA, 19 nt, Artificial Sequence
  Description of Artificial Sequence: Synthetic oligonucleotide
agacggaaagaguuguuuu

SEQ ID NO: 1944767 - RNA, 19 nt, Artificial Sequence
  Description of Artificial Sequence: Synthetic oligonucleotide
uguccaggcccacacugcu

SEQ ID NO: 1944768 - RNA, 19 nt, Artificial Sequence
  Description of Artificial Sequence: Synthetic oligonucleotide
caguagacggaaagaguug

SEQ ID NO: 1944769 - RNA, 19 nt, Artificial Sequence
  Description of Artificial Sequence: Synthetic oligonucleotide
ucacucauuacuggugccu

SEQ ID NO: 1944770 - RNA, 19 nt, Artificial Sequence
  Description of Artificial Sequence: Synthetic oligonucleotide
cugccaucauucuggauuc

SEQ ID NO: 1944771 - RNA, 19 nt, Artificial Sequence
  Description of Artificial Sequence: Synthetic oligonucleotide
guguaacaaacugccacag

SEQ ID NO: 1944772 - RNA, 19 nt, Artificial Sequence
  Description of Artificial Sequence: Synthetic oligonucleotide
cuaccuggagaugggaccc

SEQ ID NO: 1944773 - RNA, 19 nt, Artificial Sequence
  Description of Artificial Sequence: Synthetic oligonucleotide
auaaaucuuccaaaauaau

SEQ ID NO: 1944774 - RNA, 19 nt, Artificial Sequence
  Description of Artificial Sequence: Synthetic oligonucleotide
uuaccagacacgucccauc

SEQ ID NO: 1944775 - RNA, 19 nt, Artificial Sequence
  Description of Artificial Sequence: Synthetic oligonucleotide
augauaugcucuuggucau

SEQ ID NO: 1944776 - RNA, 19 nt, Artificial Sequence
  Description of Artificial Sequence: Synthetic oligonucleotide
cuaaaggguuuuaggcuuc

SEQ ID NO: 1944777 - RNA, 19 nt, Artificial Sequence
  Description of Artificial Sequence: Synthetic oligonucleotide
uucagguagcaugaauuaa

SEQ ID NO: 1944778 - RNA, 19 nt, Artificial Sequence
  Description of Artificial Sequence: Synthetic oligonucleotide
ucucucaaaacgccaucua

SEQ ID NO: 1944779 - RNA, 19 nt, Artificial Sequence
  Description of Artificial Sequence: Synthetic oligonucleotide
uacuguaugccaggggaac

SEQ ID NO: 1944780 - RNA, 19 nt, Artificial Sequence
  Description of Artificial Sequence: Synthetic oligonucleotide
cagguagcaugaauuaaca

SEQ ID NO: 1944781 - RNA, 19 nt, Artificial Sequence
  Description of Artificial Sequence: Synthetic oligonucleotide
ucacaaugcuaaaggguuu

SEQ ID NO: 1944782 - RNA, 19 nt, Artificial Sequence
  Description of Artificial Sequence: Synthetic oligonucleotide
auauaacuaaagcgccaaa

SEQ ID NO: 1944783 - RNA, 19 nt, Artificial Sequence
  Description of Artificial Sequence: Synthetic oligonucleotide
uuggucaugcacugugcuc

SEQ ID NO: 1944784 - RNA, 19 nt, Artificial Sequence
  Description of Artificial Sequence: Synthetic oligonucleotide
ucgauguauccaucauugu

SEQ ID NO: 1944785 - RNA, 19 nt, Artificial Sequence
  Description of Artificial Sequence: Synthetic oligonucleotide
cauauaacuaaagcgccaa

SEQ ID NO: 1944786 - RNA, 19 nt, Artificial Sequence
  Description of Artificial Sequence: Synthetic oligonucleotide
aacaucuacugcagugacu

SEQ ID NO: 1944787 - RNA, 19 nt, Artificial Sequence
  Description of Artificial Sequence: Synthetic oligonucleotide
ugucaucgucucucaaaac

SEQ ID NO: 1944788 - RNA, 19 nt, Artificial Sequence
  Description of Artificial Sequence: Synthetic oligonucleotide
cuuggcaagcauauugucu

SEQ ID NO: 1944789 - RNA, 19 nt, Artificial Sequence
  Description of Artificial Sequence: Synthetic oligonucleotide
cacuauuacugaaaguggu

SEQ ID NO: 1944790 - RNA, 19 nt, Artificial Sequence
  Description of Artificial Sequence: Synthetic oligonucleotide
uggugccugaucacucccc

SEQ ID NO: 1944791 - RNA, 19 nt, Artificial Sequence
  Description of Artificial Sequence: Synthetic oligonucleotide
cuauuacauccugcaaagc

SEQ ID NO: 1944792 - RNA, 19 nt, Artificial Sequence
  Description of Artificial Sequence: Synthetic oligonucleotide
caagcauauugucuuuaca

SEQ ID NO: 1944793 - RNA, 19 nt, Artificial Sequence
  Description of Artificial Sequence: Synthetic oligonucleotide
cuggauucaauucuauagu

SEQ ID NO: 1944794 - RNA, 19 nt, Artificial Sequence
  Description of Artificial Sequence: Synthetic oligonucleotide
gagauauuacaagaauagu

SEQ ID NO: 1944795 - RNA, 19 nt, Artificial Sequence
  Description of Artificial Sequence: Synthetic oligonucleotide
gcuacuacuaagauucaca

SEQ ID NO: 1944796 - RNA, 19 nt, Artificial Sequence
  Description of Artificial Sequence: Synthetic oligonucleotide
caagcaaaucguugccauc

SEQ ID NO: 1944797 - RNA, 19 nt, Artificial Sequence
  Description of Artificial Sequence: Synthetic oligonucleotide
guagcaguagacggaaaga

SEQ ID NO: 1944798 - RNA, 19 nt, Artificial Sequence
  Description of Artificial Sequence: Synthetic oligonucleotide
uuugcgaauucagcauagu

SEQ ID NO: 1944799 - RNA, 19 nt, Artificial Sequence
  Description of Artificial Sequence: Synthetic oligonucleotide
ccguggacaguucuaagcc

SEQ ID NO: 1944800 - RNA, 19 nt, Artificial Sequence
  Description of Artificial Sequence: Synthetic oligonucleotide
uagcaugaauuaacaucaa

SEQ ID NO: 1944801 - RNA, 19 nt, Artificial Sequence
  Description of Artificial Sequence: Synthetic oligonucleotide
ugcagugacuuugcgaauu

SEQ ID NO: 1944802 - RNA, 19 nt, Artificial Sequence
  Description of Artificial Sequence: Synthetic oligonucleotide
agucucuauacgucuuaaa

SEQ ID NO: 1944803 - RNA, 19 nt, Artificial Sequence
  Description of Artificial Sequence: Synthetic oligonucleotide
acuugacacaggaaacugu

SEQ ID NO: 1944804 - RNA, 19 nt, Artificial Sequence
  Description of Artificial Sequence: Synthetic oligonucleotide
acucauuacuggugccuga

SEQ ID NO: 1944805 - RNA, 19 nt, Artificial Sequence
  Description of Artificial Sequence: Synthetic oligonucleotide
ccuggaguacaagaggucc

SEQ ID NO: 1944806 - RNA, 19 nt, Artificial Sequence
  Description of Artificial Sequence: Synthetic oligonucleotide
gccguggacaguucuaagc

SEQ ID NO: 1944807 - RNA, 19 nt, Artificial Sequence
  Description of Artificial Sequence: Synthetic oligonucleotide
cuacugcagugacuuugcg

SEQ ID NO: 1944808 - RNA, 19 nt, Artificial Sequence
  Description of Artificial Sequence: Synthetic oligonucleotide
cuuacccaaguguguagca

SEQ ID NO: 1944809 - RNA, 19 nt, Artificial Sequence
  Description of Artificial Sequence: Synthetic oligonucleotide
gucucugguuugucgauga

SEQ ID NO: 1944810 - RNA, 19 nt, Artificial Sequence
  Description of Artificial Sequence: Synthetic oligonucleotide
auuaccagacacgucccau

SEQ ID NO: 1944811 - RNA, 19 nt, Artificial Sequence
  Description of Artificial Sequence: Synthetic oligonucleotide
agcaguagacggaaagagu

SEQ ID NO: 1944812 - RNA, 19 nt, Artificial Sequence
  Description of Artificial Sequence: Synthetic oligonucleotide
aaauuugauucagcuucuu

SEQ ID NO: 1944813 - RNA, 19 nt, Artificial Sequence
  Description of Artificial Sequence: Synthetic oligonucleotide
cauccugcaaagcaauuua

SEQ ID NO: 1944814 - RNA, 19 nt, Artificial Sequence
  Description of Artificial Sequence: Synthetic oligonucleotide
ugauaugcucuuggucaug

SEQ ID NO: 1944815 - RNA, 19 nt, Artificial Sequence
  Description of Artificial Sequence: Synthetic oligonucleotide
acauccugcaaagcaauuu

SEQ ID NO: 1944816 - RNA, 19 nt, Artificial Sequence
  Description of Artificial Sequence: Synthetic oligonucleotide
acgccaucuauuauguuaa

SEQ ID NO: 1944817 - RNA, 19 nt, Artificial Sequence
  Description of Artificial Sequence: Synthetic oligonucleotide
ucacacuguccuuccacua

SEQ ID NO: 1944818 - RNA, 19 nt, Artificial Sequence
  Description of Artificial Sequence: Synthetic oligonucleotide
cucacaagaauacuuuaau

SEQ ID NO: 1944819 - RNA, 19 nt, Artificial Sequence
  Description of Artificial Sequence: Synthetic oligonucleotide
uacauccugcaaagcaauu

SEQ ID NO: 1944820 - RNA, 19 nt, Artificial Sequence
  Description of Artificial Sequence: Synthetic oligonucleotide
uggacaguucuaagccauc

SEQ ID NO: 1944821 - RNA, 19 nt, Artificial Sequence
  Description of Artificial Sequence: Synthetic oligonucleotide
uugcauuaccagacacguc

SEQ ID NO: 1944822 - RNA, 19 nt, Artificial Sequence
  Description of Artificial Sequence: Synthetic oligonucleotide
caucucugucucugguuug

SEQ ID NO: 1944823 - RNA, 19 nt, Artificial Sequence
  Description of Artificial Sequence: Synthetic oligonucleotide
cuggaguacaagaggucca

SEQ ID NO: 1944824 - RNA, 19 nt, Artificial Sequence
  Description of Artificial Sequence: Synthetic oligonucleotide
uuccccaccccaguguaac

SEQ ID NO: 1944825 - RNA, 19 nt, Artificial Sequence
  Description of Artificial Sequence: Synthetic oligonucleotide
ucucugguuugucgaugac

SEQ ID NO: 1944826 - RNA, 19 nt, Artificial Sequence
  Description of Artificial Sequence: Synthetic oligonucleotide
gcaagcauauugucuuuac

SEQ ID NO: 1944827 - RNA, 19 nt, Artificial Sequence
  Description of Artificial Sequence: Synthetic oligonucleotide
cuggugccugaucacuccc

SEQ ID NO: 1944828 - RNA, 19 nt, Artificial Sequence
  Description of Artificial Sequence: Synthetic oligonucleotide
cugaccacaucuaccugga

SEQ ID NO: 1944829 - RNA, 19 nt, Artificial Sequence
  Description of Artificial Sequence: Synthetic oligonucleotide
accuggaguacaagagguc

SEQ ID NO: 1944830 - RNA, 19 nt, Artificial Sequence
  Description of Artificial Sequence: Synthetic oligonucleotide
caggaucuuacccaagugu

SEQ ID NO: 1944831 - RNA, 19 nt, Artificial Sequence
  Description of Artificial Sequence: Synthetic oligonucleotide
auaugcucuuggucaugca

SEQ ID NO: 1944832 - RNA, 19 nt, Artificial Sequence
  Description of Artificial Sequence: Synthetic oligonucleotide
acacuguccuuccacuauu

SEQ ID NO: 1944833 - RNA, 19 nt, Artificial Sequence
  Description of Artificial Sequence: Synthetic oligonucleotide
caagggucacauuugcaua

SEQ ID NO: 1944834 - RNA, 19 nt, Artificial Sequence
  Description of Artificial Sequence: Synthetic oligonucleotide
gacaugagugauggccgug

SEQ ID NO: 1944835 - RNA, 19 nt, Artificial Sequence
  Description of Artificial Sequence: Synthetic oligonucleotide
aaacgccaucuauuauguu

SEQ ID NO: 1944836 - RNA, 19 nt, Artificial Sequence
  Description of Artificial Sequence: Synthetic oligonucleotide
gggaacucugagcagccac

SEQ ID NO: 1944837 - RNA, 19 nt, Artificial Sequence
  Description of Artificial Sequence: Synthetic oligonucleotide
aucgucucucaaaacgcca

SEQ ID NO: 1944838 - RNA, 19 nt, Artificial Sequence
  Description of Artificial Sequence: Synthetic oligonucleotide
ccccaguguaacaaacugc

SEQ ID NO: 1944839 - RNA, 19 nt, Artificial Sequence
  Description of Artificial Sequence: Synthetic oligonucleotide
uuuauaccccaaggcugcu

SEQ ID NO: 1944840 - RNA, 19 nt, Artificial Sequence
  Description of Artificial Sequence: Synthetic oligonucleotide
ucguugccaucauaaucau

SEQ ID NO: 1944841 - RNA, 19 nt, Artificial Sequence
  Description of Artificial Sequence: Synthetic oligonucleotide
ccaugauaugcucuugguc

SEQ ID NO: 1944842 - RNA, 19 nt, Artificial Sequence
  Description of Artificial Sequence: Synthetic oligonucleotide
auaagucucuauacgucuu

SEQ ID NO: 1944843 - RNA, 19 nt, Artificial Sequence
  Description of Artificial Sequence: Synthetic oligonucleotide
agaacacugaccacaucua

SEQ ID NO: 1944844 - RNA, 19 nt, Artificial Sequence
  Description of Artificial Sequence: Synthetic oligonucleotide
cugcugugauggcugccgg

SEQ ID NO: 1944845 - RNA, 19 nt, Artificial Sequence
  Description of Artificial Sequence: Synthetic oligonucleotide
aucaagaauuagaguggca

SEQ ID NO: 1944846 - RNA, 19 nt, Artificial Sequence
  Description of Artificial Sequence: Synthetic oligonucleotide
gcauauugucuuuacauuu

SEQ ID NO: 1944847 - RNA, 19 nt, Artificial Sequence
  Description of Artificial Sequence: Synthetic oligonucleotide
auacgucuuaaagcaaauu

SEQ ID NO: 1944848 - RNA, 19 nt, Artificial Sequence
  Description of Artificial Sequence: Synthetic oligonucleotide
aucaagggucacauuugca

SEQ ID NO: 1944849 - RNA, 19 nt, Artificial Sequence
  Description of Artificial Sequence: Synthetic oligonucleotide
guguguagcaguagacgga

SEQ ID NO: 1944850 - RNA, 19 nt, Artificial Sequence
  Description of Artificial Sequence: Synthetic oligonucleotide
auaccccaaggcugcuucu

SEQ ID NO: 1944851 - RNA, 19 nt, Artificial Sequence
  Description of Artificial Sequence: Synthetic oligonucleotide
auucuggauucaauucuau

SEQ ID NO: 1944852 - RNA, 19 nt, Artificial Sequence
  Description of Artificial Sequence: Synthetic oligonucleotide
uggccguggacaguucuaa

SEQ ID NO: 1944853 - RNA, 19 nt, Artificial Sequence
  Description of Artificial Sequence: Synthetic oligonucleotide
auacuguaugccaggggaa

SEQ ID NO: 1944854 - RNA, 19 nt, Artificial Sequence
  Description of Artificial Sequence: Synthetic oligonucleotide
ccaaguguguagcaguaga

SEQ ID NO: 1944855 - RNA, 19 nt, Artificial Sequence
  Description of Artificial Sequence: Synthetic oligonucleotide
cacaggaucuuacccaagu

SEQ ID NO: 1944856 - RNA, 19 nt, Artificial Sequence
  Description of Artificial Sequence: Synthetic oligonucleotide
gcuaaaggguuuuaggcuu

SEQ ID NO: 1944857 - RNA, 19 nt, Artificial Sequence
  Description of Artificial Sequence: Synthetic oligonucleotide
guccuuccacuauuacuga

SEQ ID NO: 1944858 - RNA, 19 nt, Artificial Sequence
  Description of Artificial Sequence: Synthetic oligonucleotide
auccugcaaagcaauuuau

SEQ ID NO: 1944859 - RNA, 19 nt, Artificial Sequence
  Description of Artificial Sequence: Synthetic oligonucleotide
gcauauaacuaaagcgcca

SEQ ID NO: 1944860 - RNA, 19 nt, Artificial Sequence
  Description of Artificial Sequence: Synthetic oligonucleotide
cacgucccaucacauuauc

SEQ ID NO: 1944861 - RNA, 19 nt, Artificial Sequence
  Description of Artificial Sequence: Synthetic oligonucleotide
gcucaugggcccugguacc

SEQ ID NO: 1944862 - RNA, 19 nt, Artificial Sequence
  Description of Artificial Sequence: Synthetic oligonucleotide
acgucccaucacauuauca

SEQ ID NO: 1944863 - RNA, 19 nt, Artificial Sequence
  Description of Artificial Sequence: Synthetic oligonucleotide
aggcucaugggcccuggua

SEQ ID NO: 1944864 - RNA, 19 nt, Artificial Sequence
  Description of Artificial Sequence: Synthetic oligonucleotide
guaugccaggggaacagaa

SEQ ID NO: 1944865 - RNA, 19 nt, Artificial Sequence
  Description of Artificial Sequence: Synthetic oligonucleotide
gccaucuauuauguuaauc

SEQ ID NO: 1944866 - RNA, 19 nt, Artificial Sequence
  Description of Artificial Sequence: Synthetic oligonucleotide
ggacaguucuaagccauca

SEQ ID NO: 1944867 - RNA, 19 nt, Artificial Sequence
  Description of Artificial Sequence: Synthetic oligonucleotide
gucucucaaaacgccaucu

SEQ ID NO: 1944868 - RNA, 19 nt, Artificial Sequence
  Description of Artificial Sequence: Synthetic oligonucleotide
cuuucacacuguccuucca

SEQ ID NO: 1944869 - RNA, 19 nt, Artificial Sequence
  Description of Artificial Sequence: Synthetic oligonucleotide
cuaagccaucaagcaaauc

SEQ ID NO: 1944870 - RNA, 19 nt, Artificial Sequence
  Description of Artificial Sequence: Synthetic oligonucleotide
uuauaccccaaggcugcuu

SEQ ID NO: 1944871 - RNA, 19 nt, Artificial Sequence
  Description of Artificial Sequence: Synthetic oligonucleotide
cauuucagguagcaugaau

SEQ ID NO: 1944872 - RNA, 19 nt, Artificial Sequence
  Description of Artificial Sequence: Synthetic oligonucleotide
caugagugauggccgugga

SEQ ID NO: 1944873 - RNA, 19 nt, Artificial Sequence
  Description of Artificial Sequence: Synthetic oligonucleotide
ugauggccguggacaguuc

SEQ ID NO: 1944874 - RNA, 19 nt, Artificial Sequence
  Description of Artificial Sequence: Synthetic oligonucleotide
acaaugcuaaaggguuuua

SEQ ID NO: 1944875 - RNA, 19 nt, Artificial Sequence
  Description of Artificial Sequence: Synthetic oligonucleotide
gcaguagacggaaagaguu

SEQ ID NO: 1944876 - RNA, 19 nt, Artificial Sequence
  Description of Artificial Sequence: Synthetic oligonucleotide
gcagugacuuugcgaauuc

SEQ ID NO: 1944877 - RNA, 19 nt, Artificial Sequence
  Description of Artificial Sequence: Synthetic oligonucleotide
ggauucaauucuauaguau

SEQ ID NO: 1944878 - RNA, 19 nt, Artificial Sequence
  Description of Artificial Sequence: Synthetic oligonucleotide
agcucugauugcacaaaua

SEQ ID NO: 1944879 - RNA, 19 nt, Artificial Sequence
  Description of Artificial Sequence: Synthetic oligonucleotide
acacgucccaucacauuau

SEQ ID NO: 1944880 - RNA, 19 nt, Artificial Sequence
  Description of Artificial Sequence: Synthetic oligonucleotide
caguucuugaggggacauc

SEQ ID NO: 1944881 - RNA, 19 nt, Artificial Sequence
  Description of Artificial Sequence: Synthetic oligonucleotide
guggacaguucuaagccau

SEQ ID NO: 1944882 - RNA, 19 nt, Artificial Sequence
  Description of Artificial Sequence: Synthetic oligonucleotide
caucuaccuggagauggga

SEQ ID NO: 1944883 - RNA, 19 nt, Artificial Sequence
  Description of Artificial Sequence: Synthetic oligonucleotide
ggccguggacaguucuaag

SEQ ID NO: 1944884 - RNA, 19 nt, Artificial Sequence
  Description of Artificial Sequence: Synthetic oligonucleotide
ugggacccaccagggagaa

SEQ ID NO: 1944885 - RNA, 19 nt, Artificial Sequence
  Description of Artificial Sequence: Synthetic oligonucleotide
acccaaguguguagcagua

SEQ ID NO: 1944886 - RNA, 19 nt, Artificial Sequence
  Description of Artificial Sequence: Synthetic oligonucleotide
cacacuguccuuccacuau

SEQ ID NO: 1944887 - RNA, 19 nt, Artificial Sequence
  Description of Artificial Sequence: Synthetic oligonucleotide
gugccugaucacuccccuc

SEQ ID NO: 1944888 - RNA, 19 nt, Artificial Sequence
  Description of Artificial Sequence: Synthetic oligonucleotide
cagcuacuacuaagauuca

SEQ ID NO: 1944889 - RNA, 19 nt, Artificial Sequence
  Description of Artificial Sequence: Synthetic oligonucleotide
agggaacucugagcagcca

SEQ ID NO: 1944890 - RNA, 19 nt, Artificial Sequence
  Description of Artificial Sequence: Synthetic oligonucleotide
ugauggcugccggccccag

SEQ ID NO: 1944891 - RNA, 19 nt, Artificial Sequence
  Description of Artificial Sequence: Synthetic oligonucleotide
aagcgccaaauaacaucua

SEQ ID NO: 1944892 - RNA, 19 nt, Artificial Sequence
  Description of Artificial Sequence: Synthetic oligonucleotide
ccaguguaacaaacugcca

SEQ ID NO: 1944893 - RNA, 19 nt, Artificial Sequence
  Description of Artificial Sequence: Synthetic oligonucleotide
ggaucuuacccaagugugu

SEQ ID NO: 1944894 - RNA, 19 nt, Artificial Sequence
  Description of Artificial Sequence: Synthetic oligonucleotide
gcaaaucguugccaucaua

SEQ ID NO: 1944895 - RNA, 19 nt, Artificial Sequence
  Description of Artificial Sequence: Synthetic oligonucleotide
ccacaggaucuuacccaag

SEQ ID NO: 1944896 - RNA, 19 nt, Artificial Sequence
  Description of Artificial Sequence: Synthetic oligonucleotide
ccugguaccuggaguacaa

SEQ ID NO: 1944897 - RNA, 19 nt, Artificial Sequence
  Description of Artificial Sequence: Synthetic oligonucleotide
gggagaacauguggcuuuc

SEQ ID NO: 1944898 - RNA, 19 nt, Artificial Sequence
  Description of Artificial Sequence: Synthetic oligonucleotide
cccaaguguguagcaguag

SEQ ID NO: 1944899 - RNA, 19 nt, Artificial Sequence
  Description of Artificial Sequence: Synthetic oligonucleotide
gguccacuuggcaagcaua

SEQ ID NO: 1944900 - RNA, 19 nt, Artificial Sequence
  Description of Artificial Sequence: Synthetic oligonucleotide
cucauuacuggugccugau

SEQ ID NO: 1944901 - RNA, 19 nt, Artificial Sequence
  Description of Artificial Sequence: Synthetic oligonucleotide
cacuccccuccuccuuaug

SEQ ID NO: 1944902 - RNA, 19 nt, Artificial Sequence
  Description of Artificial Sequence: Synthetic oligonucleotide
gcgccaaauaacaucuacu

SEQ ID NO: 1944903 - RNA, 19 nt, Artificial Sequence
  Description of Artificial Sequence: Synthetic oligonucleotide
ggcaagcauauugucuuua

SEQ ID NO: 1944904 - RNA, 19 nt, Artificial Sequence
  Description of Artificial Sequence: Synthetic oligonucleotide
ggacaugagugauggccgu

SEQ ID NO: 1944905 - RNA, 19 nt, Artificial Sequence
  Description of Artificial Sequence: Synthetic oligonucleotide
ggaguacaagagguccaga

SEQ ID NO: 1944906 - RNA, 19 nt, Artificial Sequence
  Description of Artificial Sequence: Synthetic oligonucleotide
cguggacaguucuaagcca

SEQ ID NO: 1944907 - RNA, 19 nt, Artificial Sequence
  Description of Artificial Sequence: Synthetic oligonucleotide
cauuaucaagggucacauu

SEQ ID NO: 1944908 - RNA, 19 nt, Artificial Sequence
  Description of Artificial Sequence: Synthetic oligonucleotide
gccaucauucuggauucaa

SEQ ID NO: 1944909 - RNA, 19 nt, Artificial Sequence
  Description of Artificial Sequence: Synthetic oligonucleotide
cgucucucaaaacgccauc

SEQ ID NO: 1944910 - RNA, 19 nt, Artificial Sequence
  Description of Artificial Sequence: Synthetic oligonucleotide
cgauguauccaucauuguu

SEQ ID NO: 1944911 - RNA, 19 nt, Artificial Sequence
  Description of Artificial Sequence: Synthetic oligonucleotide
guagacggaaagaguuguu

SEQ ID NO: 1944912 - RNA, 19 nt, Artificial Sequence
  Description of Artificial Sequence: Synthetic oligonucleotide
ccuuauggacaugagugau

SEQ ID NO: 1944913 - RNA, 19 nt, Artificial Sequence
  Description of Artificial Sequence: Synthetic oligonucleotide
caguucgucuucacucauu

SEQ ID NO: 1944914 - RNA, 19 nt, Artificial Sequence
  Description of Artificial Sequence: Synthetic oligonucleotide
cugcagugacuuugcgaau

SEQ ID NO: 1944915 - RNA, 19 nt, Artificial Sequence
  Description of Artificial Sequence: Synthetic oligonucleotide
gguuugucgaugacaccuu

SEQ ID NO: 1944916 - RNA, 19 nt, Artificial Sequence
  Description of Artificial Sequence: Synthetic oligonucleotide
ggucaugcacugugcucuu

SEQ ID NO: 1944917 - RNA, 19 nt, Artificial Sequence
  Description of Artificial Sequence: Synthetic oligonucleotide
cccauccugccaucauucu

SEQ ID NO: 1944918 - RNA, 19 nt, Artificial Sequence
  Description of Artificial Sequence: Synthetic oligonucleotide
cgaauucagcauagucgau

SEQ ID NO: 1944919 - RNA, 19 nt, Artificial Sequence
  Description of Artificial Sequence: Synthetic oligonucleotide
cugccggccccaggcucau

SEQ ID NO: 1944920 - RNA, 19 nt, Artificial Sequence
  Description of Artificial Sequence: Synthetic oligonucleotide
acagauguaauauagaucc

SEQ ID NO: 1944921 - RNA, 19 nt, Artificial Sequence
  Description of Artificial Sequence: Synthetic oligonucleotide
ucuaucauaauauagagcc

SEQ ID NO: 1944922 - RNA, 19 nt, Artificial Sequence
  Description of Artificial Sequence: Synthetic oligonucleotide
aauuuaaaagcucuguugg

SEQ ID NO: 1944923 - RNA, 19 nt, Artificial Sequence
  Description of Artificial Sequence: Synthetic oligonucleotide
aaauuucugaaacagauag

SEQ ID NO: 1944924 - RNA, 19 nt, Artificial Sequence
  Description of Artificial Sequence: Synthetic oligonucleotide
auuaguauugucuaaauuc

SEQ ID NO: 1944925 - RNA, 19 nt, Artificial Sequence
  Description of Artificial Sequence: Synthetic oligonucleotide
aaaauuagugguuaagaac

SEQ ID NO: 1944926 - RNA, 19 nt, Artificial Sequence
  Description of Artificial Sequence: Synthetic oligonucleotide
aaaacaauacaucauuggg

SEQ ID NO: 1944927 - RNA, 19 nt, Artificial Sequence
  Description of Artificial Sequence: Synthetic oligonucleotide
aagaguggaaauuaucugc

SEQ ID NO: 1944928 - RNA, 19 nt, Artificial Sequence
  Description of Artificial Sequence: Synthetic oligonucleotide
uaauauagauccaagacag

SEQ ID NO: 1944929 - RNA, 19 nt, Artificial Sequence
  Description of Artificial Sequence: Synthetic oligonucleotide
aauaucguuauucauaaca

SEQ ID NO: 1944930 - RNA, 19 nt, Artificial Sequence
  Description of Artificial Sequence: Synthetic oligonucleotide
aauaagauuacuuuaguaa

SEQ ID NO: 1944931 - RNA, 19 nt, Artificial Sequence
  Description of Artificial Sequence: Synthetic oligonucleotide
aguaucauucuucagagac

SEQ ID NO: 1944932 - RNA, 19 nt, Artificial Sequence
  Description of Artificial Sequence: Synthetic oligonucleotide
auauauaucccugauaagc

SEQ ID NO: 1944933 - RNA, 19 nt, Artificial Sequence
  Description of Artificial Sequence: Synthetic oligonucleotide
auaaauucaaaucauccuc

SEQ ID NO: 1944934 - RNA, 19 nt, Artificial Sequence
  Description of Artificial Sequence: Synthetic oligonucleotide
auaagauuacuuuaguaac

SEQ ID NO: 1944935 - RNA, 19 nt, Artificial Sequence
  Description of Artificial Sequence: Synthetic oligonucleotide
aauggagauccccagaaac

SEQ ID NO: 1944936 - RNA, 19 nt, Artificial Sequence
  Description of Artificial Sequence: Synthetic oligonucleotide
uaucauaccaguaauuucc

SEQ ID NO: 1944937 - RNA, 19 nt, Artificial Sequence
  Description of Artificial Sequence: Synthetic oligonucleotide
aacuuaaauuaacaguuac

SEQ ID NO: 1944938 - RNA, 19 nt, Artificial Sequence
  Description of Artificial Sequence: Synthetic oligonucleotide
aaauuaucugcuuagacau

SEQ ID NO: 1944939 - RNA, 19 nt, Artificial Sequence
  Description of Artificial Sequence: Synthetic oligonucleotide
uguaauauagauccaagac

SEQ ID NO: 1944940 - RNA, 19 nt, Artificial Sequence
  Description of Artificial Sequence: Synthetic oligonucleotide
ucaacuauguguaaauucc

SEQ ID NO: 1944941 - RNA, 19 nt, Artificial Sequence
  Description of Artificial Sequence: Synthetic oligonucleotide
aagaacuuaaauuaacagu

SEQ ID NO: 1944942 - RNA, 19 nt, Artificial Sequence
  Description of Artificial Sequence: Synthetic oligonucleotide
uguguuaucucuuacaagu

SEQ ID NO: 1944943 - RNA, 19 nt, Artificial Sequence
  Description of Artificial Sequence: Synthetic oligonucleotide
aaacagauagcuguguacc

SEQ ID NO: 1944944 - RNA, 19 nt, Artificial Sequence
  Description of Artificial Sequence: Synthetic oligonucleotide
uuaguauugucuaaauucc

SEQ ID NO: 1944945 - RNA, 19 nt, Artificial Sequence
  Description of Artificial Sequence: Synthetic oligonucleotide
aaaggauacauuucuccac

SEQ ID NO: 1944946 - RNA, 19 nt, Artificial Sequence
  Description of Artificial Sequence: Synthetic oligonucleotide
aaauuagugguuaagaacu

SEQ ID NO: 1944947 - RNA, 19 nt, Artificial Sequence
  Description of Artificial Sequence: Synthetic oligonucleotide
acagcacagacuuauauac

SEQ ID NO: 1944948 - RNA, 19 nt, Artificial Sequence
  Description of Artificial Sequence: Synthetic oligonucleotide
uaaagaguggaaauuaucu

SEQ ID NO: 1944949 - RNA, 19 nt, Artificial Sequence
  Description of Artificial Sequence: Synthetic oligonucleotide
aaccuacugaauuauacag

SEQ ID NO: 1944950 - RNA, 19 nt, Artificial Sequence
  Description of Artificial Sequence: Synthetic oligonucleotide
aaaccuuagcacuugcaac

SEQ ID NO: 1944951 - RNA, 19 nt, Artificial Sequence
  Description of Artificial Sequence: Synthetic oligonucleotide
uauucauaacauuauaaga

SEQ ID NO: 1944952 - RNA, 19 nt, Artificial Sequence
  Description of Artificial Sequence: Synthetic oligonucleotide
aagacaauguguuaucucu

SEQ ID NO: 1944953 - RNA, 19 nt, Artificial Sequence
  Description of Artificial Sequence: Synthetic oligonucleotide
aauggugcuauauaagaca

SEQ ID NO: 1944954 - RNA, 19 nt, Artificial Sequence
  Description of Artificial Sequence: Synthetic oligonucleotide
auuauaagaacugaaaccu

SEQ ID NO: 1944955 - RNA, 19 nt, Artificial Sequence
  Description of Artificial Sequence: Synthetic oligonucleotide
uguguauugaagcuguuug

SEQ ID NO: 1944956 - RNA, 19 nt, Artificial Sequence
  Description of Artificial Sequence: Synthetic oligonucleotide
gaauuuaaaagcucuguug

SEQ ID NO: 1944957 - RNA, 19 nt, Artificial Sequence
  Description of Artificial Sequence: Synthetic oligonucleotide
acauauauaucccugauaa

SEQ ID NO: 1944958 - RNA, 19 nt, Artificial Sequence
  Description of Artificial Sequence: Synthetic oligonucleotide
aauuuccaaaauuaguggu

SEQ ID NO: 1944959 - RNA, 19 nt, Artificial Sequence
  Description of Artificial Sequence: Synthetic oligonucleotide
gaauuauacagacacagca

SEQ ID NO: 1944960 - RNA, 19 nt, Artificial Sequence
  Description of Artificial Sequence: Synthetic oligonucleotide
agguuugugauucuuugcc

SEQ ID NO: 1944961 - RNA, 19 nt, Artificial Sequence
  Description of Artificial Sequence: Synthetic oligonucleotide
uuagcaguuccacagagug

SEQ ID NO: 1944962 - RNA, 19 nt, Artificial Sequence
  Description of Artificial Sequence: Synthetic oligonucleotide
uuaaaagcucuguuggugg

SEQ ID NO: 1944963 - RNA, 19 nt, Artificial Sequence
  Description of Artificial Sequence: Synthetic oligonucleotide
ucaaaguguguauugaagc

SEQ ID NO: 1944964 - RNA, 19 nt, Artificial Sequence
  Description of Artificial Sequence: Synthetic oligonucleotide
aauuauacagacacagcac

SEQ ID NO: 1944965 - RNA, 19 nt, Artificial Sequence
  Description of Artificial Sequence: Synthetic oligonucleotide
gauguaugcucaaagaucc

SEQ ID NO: 1944966 - RNA, 19 nt, Artificial Sequence
  Description of Artificial Sequence: Synthetic oligonucleotide
guaauggugagaaucaugg

SEQ ID NO: 1944967 - RNA, 19 nt, Artificial Sequence
  Description of Artificial Sequence: Synthetic oligonucleotide
uaagcuuaagacaaugugu

SEQ ID NO: 1944968 - RNA, 19 nt, Artificial Sequence
  Description of Artificial Sequence: Synthetic oligonucleotide
ugcugaaucaacuaugugu

SEQ ID NO: 1944969 - RNA, 19 nt, Artificial Sequence
  Description of Artificial Sequence: Synthetic oligonucleotide
aaagaguggaaauuaucug

SEQ ID NO: 1944970 - RNA, 19 nt, Artificial Sequence
  Description of Artificial Sequence: Synthetic oligonucleotide
gaaauuaucugcuuagaca

SEQ ID NO: 1944971 - RNA, 19 nt, Artificial Sequence
  Description of Artificial Sequence: Synthetic oligonucleotide
acagcauuuggucuguccc

SEQ ID NO: 1944972 - RNA, 19 nt, Artificial Sequence
  Description of Artificial Sequence: Synthetic oligonucleotide
uucugaaacagauagcugu

SEQ ID NO: 1944973 - RNA, 19 nt, Artificial Sequence
  Description of Artificial Sequence: Synthetic oligonucleotide
aacagauagcuguguaccc

SEQ ID NO: 1944974 - RNA, 19 nt, Artificial Sequence
  Description of Artificial Sequence: Synthetic oligonucleotide
ugguuaagaacuuaaauua

SEQ ID NO: 1944975 - RNA, 19 nt, Artificial Sequence
  Description of Artificial Sequence: Synthetic oligonucleotide
aauaaagaucauuaguauu

SEQ ID NO: 1944976 - RNA, 19 nt, Artificial Sequence
  Description of Artificial Sequence: Synthetic oligonucleotide
auaaagaucauuaguauug

SEQ ID NO: 1944977 - RNA, 19 nt, Artificial Sequence
  Description of Artificial Sequence: Synthetic oligonucleotide
uucacaguagcuccaaugc

SEQ ID NO: 1944978 - RNA, 19 nt, Artificial Sequence
  Description of Artificial Sequence: Synthetic oligonucleotide
auucuuacauaucauacca

SEQ ID NO: 1944979 - RNA, 19 nt, Artificial Sequence
  Description of Artificial Sequence: Synthetic oligonucleotide
gauucuuacauaucauacc

SEQ ID NO: 1944980 - RNA, 19 nt, Artificial Sequence
  Description of Artificial Sequence: Synthetic oligonucleotide
auaagcuuaagacaaugug

SEQ ID NO: 1944981 - RNA, 19 nt, Artificial Sequence
  Description of Artificial Sequence: Synthetic oligonucleotide
uauauaucccugauaagcu

SEQ ID NO: 1944982 - RNA, 19 nt, Artificial Sequence
  Description of Artificial Sequence: Synthetic oligonucleotide
cauuggguaauaaagauca

SEQ ID NO: 1944983 - RNA, 19 nt, Artificial Sequence
  Description of Artificial Sequence: Synthetic oligonucleotide
ucuuacaaguguuaauaag

SEQ ID NO: 1944984 - RNA, 19 nt, Artificial Sequence
  Description of Artificial Sequence: Synthetic oligonucleotide
guuaauacuucuugcagcc

SEQ ID NO: 1944985 - RNA, 19 nt, Artificial Sequence
  Description of Artificial Sequence: Synthetic oligonucleotide
auaagacaaauucaucauc

SEQ ID NO: 1944986 - RNA, 19 nt, Artificial Sequence
  Description of Artificial Sequence: Synthetic oligonucleotide
uuacauaucauaccaguaa

SEQ ID NO: 1944987 - RNA, 19 nt, Artificial Sequence
  Description of Artificial Sequence: Synthetic oligonucleotide
uucauaacauuauaagaac

SEQ ID NO: 1944988 - RNA, 19 nt, Artificial Sequence
  Description of Artificial Sequence: Synthetic oligonucleotide
aaccuuagcacuugcaacu

SEQ ID NO: 1944989 - RNA, 19 nt, Artificial Sequence
  Description of Artificial Sequence: Synthetic oligonucleotide
uggguaauaaagaucauua

SEQ ID NO: 1944990 - RNA, 19 nt, Artificial Sequence
  Description of Artificial Sequence: Synthetic oligonucleotide
guaauauagauccaagaca

SEQ ID NO: 1944991 - RNA, 19 nt, Artificial Sequence
  Description of Artificial Sequence: Synthetic oligonucleotide
uaucauaauauagagccca

SEQ ID NO: 1944992 - RNA, 19 nt, Artificial Sequence
  Description of Artificial Sequence: Synthetic oligonucleotide
aagaacugaaaccuacuga

SEQ ID NO: 1944993 - RNA, 19 nt, Artificial Sequence
  Description of Artificial Sequence: Synthetic oligonucleotide
uuacagauguaauauagau

SEQ ID NO: 1944994 - RNA, 19 nt, Artificial Sequence
  Description of Artificial Sequence: Synthetic oligonucleotide
auugucuaaauuccuaugu

SEQ ID NO: 1944995 - RNA, 19 nt, Artificial Sequence
  Description of Artificial Sequence: Synthetic oligonucleotide
cugaauuauacagacacag

SEQ ID NO: 1944996 - RNA, 19 nt, Artificial Sequence
  Description of Artificial Sequence: Synthetic oligonucleotide
uguuaauaagauuacuuua

SEQ ID NO: 1944997 - RNA, 19 nt, Artificial Sequence
  Description of Artificial Sequence: Synthetic oligonucleotide
uuuuagcaguuccacagag

SEQ ID NO: 1944998 - RNA, 19 nt, Artificial Sequence
  Description of Artificial Sequence: Synthetic oligonucleotide
uuaauaagauuacuuuagu

SEQ ID NO: 1944999 - RNA, 19 nt, Artificial Sequence
  Description of Artificial Sequence: Synthetic oligonucleotide
ucuuacauaucauaccagu

SEQ ID NO: 1945000 - RNA, 19 nt, Artificial Sequence
  Description of Artificial Sequence: Synthetic oligonucleotide
agaacugaaaccuacugaa

SEQ ID NO: 1945001 - RNA, 19 nt, Artificial Sequence
  Description of Artificial Sequence: Synthetic oligonucleotide
aaacucaugagugccacag

SEQ ID NO: 1945002 - RNA, 19 nt, Artificial Sequence
  Description of Artificial Sequence: Synthetic oligonucleotide
uuuaaaagcucuguuggug

SEQ ID NO: 1945003 - RNA, 19 nt, Artificial Sequence
  Description of Artificial Sequence: Synthetic oligonucleotide
auacauuucuccacaaccc

SEQ ID NO: 1945004 - RNA, 19 nt, Artificial Sequence
  Description of Artificial Sequence: Synthetic oligonucleotide
cuauguguaaauucccuag

SEQ ID NO: 1945005 - RNA, 19 nt, Artificial Sequence
  Description of Artificial Sequence: Synthetic oligonucleotide
acaaguguuaauaagauua

SEQ ID NO: 1945006 - RNA, 19 nt, Artificial Sequence
  Description of Artificial Sequence: Synthetic oligonucleotide
uugugucacaccaauggag

SEQ ID NO: 1945007 - RNA, 19 nt, Artificial Sequence
  Description of Artificial Sequence: Synthetic oligonucleotide
uccaagacagaauuuaaaa

SEQ ID NO: 1945008 - RNA, 19 nt, Artificial Sequence
  Description of Artificial Sequence: Synthetic oligonucleotide
ucccugauaagcuuaagac

SEQ ID NO: 1945009 - RNA, 19 nt, Artificial Sequence
  Description of Artificial Sequence: Synthetic oligonucleotide
ugaauuauacagacacagc

SEQ ID NO: 1945010 - RNA, 19 nt, Artificial Sequence
  Description of Artificial Sequence: Synthetic oligonucleotide
agaacuuaaauuaacaguu

SEQ ID NO: 1945011 - RNA, 19 nt, Artificial Sequence
  Description of Artificial Sequence: Synthetic oligonucleotide
aacugaaaccuacugaauu

SEQ ID NO: 1945012 - RNA, 19 nt, Artificial Sequence
  Description of Artificial Sequence: Synthetic oligonucleotide
ugugucacaccaauggaga

SEQ ID NO: 1945013 - RNA, 19 nt, Artificial Sequence
  Description of Artificial Sequence: Synthetic oligonucleotide
aaauucccuaguuaauacu

SEQ ID NO: 1945014 - RNA, 19 nt, Artificial Sequence
  Description of Artificial Sequence: Synthetic oligonucleotide
uccuccaucucaaagugug

SEQ ID NO: 1945015 - RNA, 19 nt, Artificial Sequence
  Description of Artificial Sequence: Synthetic oligonucleotide
ugguaaaggucacugaggu

SEQ ID NO: 1945016 - RNA, 19 nt, Artificial Sequence
  Description of Artificial Sequence: Synthetic oligonucleotide
uuaaagaguggaaauuauc

SEQ ID NO: 1945017 - RNA, 19 nt, Artificial Sequence
  Description of Artificial Sequence: Synthetic oligonucleotide
gauuacuuuaguaaccaac

SEQ ID NO: 1945018 - RNA, 19 nt, Artificial Sequence
  Description of Artificial Sequence: Synthetic oligonucleotide
uuuagguagucaccaaucu

SEQ ID NO: 1945019 - RNA, 19 nt, Artificial Sequence
  Description of Artificial Sequence: Synthetic oligonucleotide
aagauuacuuuaguaacca

SEQ ID NO: 1945020 - RNA, 19 nt, Artificial Sequence
  Description of Artificial Sequence: Synthetic oligonucleotide
cuugcaacuguuugguucc

SEQ ID NO: 1945021 - RNA, 19 nt, Artificial Sequence
  Description of Artificial Sequence: Synthetic oligonucleotide
uucaaaucauccucaaaac

SEQ ID NO: 1945022 - RNA, 19 nt, Artificial Sequence
  Description of Artificial Sequence: Synthetic oligonucleotide
uguuaucucuuacaagugu

SEQ ID NO: 1945023 - RNA, 19 nt, Artificial Sequence
  Description of Artificial Sequence: Synthetic oligonucleotide
ucuaaauuccuauguuagc

SEQ ID NO: 1945024 - RNA, 19 nt, Artificial Sequence
  Description of Artificial Sequence: Synthetic oligonucleotide
aaaguaauggugcuauaua

SEQ ID NO: 1945025 - RNA, 19 nt, Artificial Sequence
  Description of Artificial Sequence: Synthetic oligonucleotide
aaauaucguuauucauaac

SEQ ID NO: 1945026 - RNA, 19 nt, Artificial Sequence
  Description of Artificial Sequence: Synthetic oligonucleotide
aaaaguaauggugcuauau

SEQ ID NO: 1945027 - RNA, 19 nt, Artificial Sequence
  Description of Artificial Sequence: Synthetic oligonucleotide
uaauggugcuauauaagac

SEQ ID NO: 1945028 - RNA, 19 nt, Artificial Sequence
  Description of Artificial Sequence: Synthetic oligonucleotide
acuuuaguaaccaacaaaa

SEQ ID NO: 1945029 - RNA, 19 nt, Artificial Sequence
  Description of Artificial Sequence: Synthetic oligonucleotide
uuagugguuaagaacuuaa

SEQ ID NO: 1945030 - RNA, 19 nt, Artificial Sequence
  Description of Artificial Sequence: Synthetic oligonucleotide
aaaguguguauugaagcug

SEQ ID NO: 1945031 - RNA, 19 nt, Artificial Sequence
  Description of Artificial Sequence: Synthetic oligonucleotide
ucugaaacagauagcugug

SEQ ID NO: 1945032 - RNA, 19 nt, Artificial Sequence
  Description of Artificial Sequence: Synthetic oligonucleotide
uaauaagauuacuuuagua

SEQ ID NO: 1945033 - RNA, 19 nt, Artificial Sequence
  Description of Artificial Sequence: Synthetic oligonucleotide
gaaaccuacugaauuauac

SEQ ID NO: 1945034 - RNA, 19 nt, Artificial Sequence
  Description of Artificial Sequence: Synthetic oligonucleotide
guaauggugcuauauaaga

SEQ ID NO: 1945035 - RNA, 19 nt, Artificial Sequence
  Description of Artificial Sequence: Synthetic oligonucleotide
aagcuaccuucacaguagc

SEQ ID NO: 1945036 - RNA, 19 nt, Artificial Sequence
  Description of Artificial Sequence: Synthetic oligonucleotide
uauugucuaaauuccuaug

SEQ ID NO: 1945037 - RNA, 19 nt, Artificial Sequence
  Description of Artificial Sequence: Synthetic oligonucleotide
acaauguguuaucucuuac

SEQ ID NO: 1945038 - RNA, 19 nt, Artificial Sequence
  Description of Artificial Sequence: Synthetic oligonucleotide
uacagauguaauauagauc

SEQ ID NO: 1945039 - RNA, 19 nt, Artificial Sequence
  Description of Artificial Sequence: Synthetic oligonucleotide
uacauaucauaccaguaau

SEQ ID NO: 1945040 - RNA, 19 nt, Artificial Sequence
  Description of Artificial Sequence: Synthetic oligonucleotide
caaguuguugcuucauccg

SEQ ID NO: 1945041 - RNA, 19 nt, Artificial Sequence
  Description of Artificial Sequence: Synthetic oligonucleotide
cauugauguaugcucaaag

SEQ ID NO: 1945042 - RNA, 19 nt, Artificial Sequence
  Description of Artificial Sequence: Synthetic oligonucleotide
uccacaacccucuugguaa

SEQ ID NO: 1945043 - RNA, 19 nt, Artificial Sequence
  Description of Artificial Sequence: Synthetic oligonucleotide
uugccauucuucauaauuc

SEQ ID NO: 1945044 - RNA, 19 nt, Artificial Sequence
  Description of Artificial Sequence: Synthetic oligonucleotide
caguaauuuccaaaauuag

SEQ ID NO: 1945045 - RNA, 19 nt, Artificial Sequence
  Description of Artificial Sequence: Synthetic oligonucleotide
cuaccuucacaguagcucc

SEQ ID NO: 1945046 - RNA, 19 nt, Artificial Sequence
  Description of Artificial Sequence: Synthetic oligonucleotide
cagcugagaguuuauaggc

SEQ ID NO: 1945047 - RNA, 19 nt, Artificial Sequence
  Description of Artificial Sequence: Synthetic oligonucleotide
uauguguaaauucccuagu

SEQ ID NO: 1945048 - RNA, 19 nt, Artificial Sequence
  Description of Artificial Sequence: Synthetic oligonucleotide
uucuuacauaucauaccag

SEQ ID NO: 1945049 - RNA, 19 nt, Artificial Sequence
  Description of Artificial Sequence: Synthetic oligonucleotide
aguaauuuccaaaauuagu

SEQ ID NO: 1945050 - RNA, 19 nt, Artificial Sequence
  Description of Artificial Sequence: Synthetic oligonucleotide
uauuuagguagucaccaau

SEQ ID NO: 1945051 - RNA, 19 nt, Artificial Sequence
  Description of Artificial Sequence: Synthetic oligonucleotide
aaaaccauauuuagguagu

SEQ ID NO: 1945052 - RNA, 19 nt, Artificial Sequence
  Description of Artificial Sequence: Synthetic oligonucleotide
ucucuuacaaguguuaaua

SEQ ID NO: 1945053 - RNA, 19 nt, Artificial Sequence
  Description of Artificial Sequence: Synthetic oligonucleotide
auaacauuauaagaacuga

SEQ ID NO: 1945054 - RNA, 19 nt, Artificial Sequence
  Description of Artificial Sequence: Synthetic oligonucleotide
uguuugguuccucucaaaa

SEQ ID NO: 1945055 - RNA, 19 nt, Artificial Sequence
  Description of Artificial Sequence: Synthetic oligonucleotide
uauagagcccagagcagag

SEQ ID NO: 1945056 - RNA, 19 nt, Artificial Sequence
  Description of Artificial Sequence: Synthetic oligonucleotide
ugucuaaauuccuauguua

SEQ ID NO: 1945057 - RNA, 19 nt, Artificial Sequence
  Description of Artificial Sequence: Synthetic oligonucleotide
auuuagguagucaccaauc

SEQ ID NO: 1945058 - RNA, 19 nt, Artificial Sequence
  Description of Artificial Sequence: Synthetic oligonucleotide
cuaguuaauacuucuugca

SEQ ID NO: 1945059 - RNA, 19 nt, Artificial Sequence
  Description of Artificial Sequence: Synthetic oligonucleotide
uguugcuucauccgaauuu

SEQ ID NO: 1945060 - RNA, 19 nt, Artificial Sequence
  Description of Artificial Sequence: Synthetic oligonucleotide
ugauaagcuuaagacaaug

SEQ ID NO: 1945061 - RNA, 19 nt, Artificial Sequence
  Description of Artificial Sequence: Synthetic oligonucleotide
aucauccucaaaacaauac

SEQ ID NO: 1945062 - RNA, 19 nt, Artificial Sequence
  Description of Artificial Sequence: Synthetic oligonucleotide
caaauaucguuauucauaa

SEQ ID NO: 1945063 - RNA, 19 nt, Artificial Sequence
  Description of Artificial Sequence: Synthetic oligonucleotide
uguaaauucccuaguuaau

SEQ ID NO: 1945064 - RNA, 19 nt, Artificial Sequence
  Description of Artificial Sequence: Synthetic oligonucleotide
uccaaaauuagugguuaag

SEQ ID NO: 1945065 - RNA, 19 nt, Artificial Sequence
  Description of Artificial Sequence: Synthetic oligonucleotide
uauugaagcuguuugccau

SEQ ID NO: 1945066 - RNA, 19 nt, Artificial Sequence
  Description of Artificial Sequence: Synthetic oligonucleotide
agaguuuauaggcuagcca

SEQ ID NO: 1945067 - RNA, 19 nt, Artificial Sequence
  Description of Artificial Sequence: Synthetic oligonucleotide
cuaucauaauauagagccc

SEQ ID NO: 1945068 - RNA, 19 nt, Artificial Sequence
  Description of Artificial Sequence: Synthetic oligonucleotide
gaagcuaccuucacaguag

SEQ ID NO: 1945069 - RNA, 19 nt, Artificial Sequence
  Description of Artificial Sequence: Synthetic oligonucleotide
gaaaccuuagcacuugcaa

SEQ ID NO: 1945070 - RNA, 19 nt, Artificial Sequence
  Description of Artificial Sequence: Synthetic oligonucleotide
uauaucccugauaagcuua

SEQ ID NO: 1945071 - RNA, 19 nt, Artificial Sequence
  Description of Artificial Sequence: Synthetic oligonucleotide
cugagaaguaucauucuuc

SEQ ID NO: 1945072 - RNA, 19 nt, Artificial Sequence
  Description of Artificial Sequence: Synthetic oligonucleotide
auggagauccccagaaacc

SEQ ID NO: 1945073 - RNA, 19 nt, Artificial Sequence
  Description of Artificial Sequence: Synthetic oligonucleotide
uccgaauuucugcugaauc

SEQ ID NO: 1945074 - RNA, 19 nt, Artificial Sequence
  Description of Artificial Sequence: Synthetic oligonucleotide
aauacuucuugcagccagg

SEQ ID NO: 1945075 - RNA, 19 nt, Artificial Sequence
  Description of Artificial Sequence: Synthetic oligonucleotide
uucaaauaucguuauucau

SEQ ID NO: 1945076 - RNA, 19 nt, Artificial Sequence
  Description of Artificial Sequence: Synthetic oligonucleotide
cuaaauuccuauguuagca

SEQ ID NO: 1945077 - RNA, 19 nt, Artificial Sequence
  Description of Artificial Sequence: Synthetic oligonucleotide
auuuaaaagcucuguuggu

SEQ ID NO: 1945078 - RNA, 19 nt, Artificial Sequence
  Description of Artificial Sequence: Synthetic oligonucleotide
aguaauggugcuauauaag

SEQ ID NO: 1945079 - RNA, 19 nt, Artificial Sequence
  Description of Artificial Sequence: Synthetic oligonucleotide
uuacuuuaguaaccaacaa

SEQ ID NO: 1945080 - RNA, 19 nt, Artificial Sequence
  Description of Artificial Sequence: Synthetic oligonucleotide
uguaugcucaaagauccug

SEQ ID NO: 1945081 - RNA, 19 nt, Artificial Sequence
  Description of Artificial Sequence: Synthetic oligonucleotide
acucaugagugccacaggu

SEQ ID NO: 1945082 - RNA, 19 nt, Artificial Sequence
  Description of Artificial Sequence: Synthetic oligonucleotide
agaagaagcuaccuucaca

SEQ ID NO: 1945083 - RNA, 19 nt, Artificial Sequence
  Description of Artificial Sequence: Synthetic oligonucleotide
ucguuauucauaacauuau

SEQ ID NO: 1945084 - RNA, 19 nt, Artificial Sequence
  Description of Artificial Sequence: Synthetic oligonucleotide
agugccacagguuugugau

SEQ ID NO: 1945085 - RNA, 19 nt, Artificial Sequence
  Description of Artificial Sequence: Synthetic oligonucleotide
aacucaugagugccacagg

SEQ ID NO: 1945086 - RNA, 19 nt, Artificial Sequence
  Description of Artificial Sequence: Synthetic oligonucleotide
uccacagagugacaugaca

SEQ ID NO: 1945087 - RNA, 19 nt, Artificial Sequence
  Description of Artificial Sequence: Synthetic oligonucleotide
ugccauugauguaugcuca

SEQ ID NO: 1945088 - RNA, 19 nt, Artificial Sequence
  Description of Artificial Sequence: Synthetic oligonucleotide
ucuucauaauuccuccauc

SEQ ID NO: 1945089 - RNA, 19 nt, Artificial Sequence
  Description of Artificial Sequence: Synthetic oligonucleotide
uuaagacaauguguuaucu

SEQ ID NO: 1945090 - RNA, 19 nt, Artificial Sequence
  Description of Artificial Sequence: Synthetic oligonucleotide
guaaaggucacugaggucu

SEQ ID NO: 1945091 - RNA, 19 nt, Artificial Sequence
  Description of Artificial Sequence: Synthetic oligonucleotide
caaaauuagugguuaagaa

SEQ ID NO: 1945092 - RNA, 19 nt, Artificial Sequence
  Description of Artificial Sequence: Synthetic oligonucleotide
guaugcucaaagauccugg

SEQ ID NO: 1945093 - RNA, 19 nt, Artificial Sequence
  Description of Artificial Sequence: Synthetic oligonucleotide
accaguaauuuccaaaauu

SEQ ID NO: 1945094 - RNA, 19 nt, Artificial Sequence
  Description of Artificial Sequence: Synthetic oligonucleotide
cauauuuagguagucacca

SEQ ID NO: 1945095 - RNA, 19 nt, Artificial Sequence
  Description of Artificial Sequence: Synthetic oligonucleotide
aaaccauauuuagguaguc

SEQ ID NO: 1945096 - RNA, 19 nt, Artificial Sequence
  Description of Artificial Sequence: Synthetic oligonucleotide
uaagacaauguguuaucuc

SEQ ID NO: 1945097 - RNA, 19 nt, Artificial Sequence
  Description of Artificial Sequence: Synthetic oligonucleotide
agaagcuaccuucacagua

SEQ ID NO: 1945098 - RNA, 19 nt, Artificial Sequence
  Description of Artificial Sequence: Synthetic oligonucleotide
acugaaaccuacugaauua

SEQ ID NO: 1945099 - RNA, 19 nt, Artificial Sequence
  Description of Artificial Sequence: Synthetic oligonucleotide
cauauauaucccugauaag

SEQ ID NO: 1945100 - RNA, 19 nt, Artificial Sequence
  Description of Artificial Sequence: Synthetic oligonucleotide
caucauuggguaauaaaga

SEQ ID NO: 1945101 - RNA, 19 nt, Artificial Sequence
  Description of Artificial Sequence: Synthetic oligonucleotide
aaaucauccucaaaacaau

SEQ ID NO: 1945102 - RNA, 19 nt, Artificial Sequence
  Description of Artificial Sequence: Synthetic oligonucleotide
ccuacugaauuauacagac

SEQ ID NO: 1945103 - RNA, 19 nt, Artificial Sequence
  Description of Artificial Sequence: Synthetic oligonucleotide
aguguuaauaagauuacuu

SEQ ID NO: 1945104 - RNA, 19 nt, Artificial Sequence
  Description of Artificial Sequence: Synthetic oligonucleotide
aguagcuccaaugccauca

SEQ ID NO: 1945105 - RNA, 19 nt, Artificial Sequence
  Description of Artificial Sequence: Synthetic oligonucleotide
uuauaagaacugaaaccua

SEQ ID NO: 1945106 - RNA, 19 nt, Artificial Sequence
  Description of Artificial Sequence: Synthetic oligonucleotide
uauaggcuagccagaagaa

SEQ ID NO: 1945107 - RNA, 19 nt, Artificial Sequence
  Description of Artificial Sequence: Synthetic oligonucleotide
uucccuaguuaauacuucu

SEQ ID NO: 1945108 - RNA, 19 nt, Artificial Sequence
  Description of Artificial Sequence: Synthetic oligonucleotide
uuuagcaguuccacagagu

SEQ ID NO: 1945109 - RNA, 19 nt, Artificial Sequence
  Description of Artificial Sequence: Synthetic oligonucleotide
guguauugaagcuguuugc

SEQ ID NO: 1945110 - RNA, 19 nt, Artificial Sequence
  Description of Artificial Sequence: Synthetic oligonucleotide
acuuaaauuaacaguuaca

SEQ ID NO: 1945111 - RNA, 19 nt, Artificial Sequence
  Description of Artificial Sequence: Synthetic oligonucleotide
aaccauauuuagguaguca

SEQ ID NO: 1945112 - RNA, 19 nt, Artificial Sequence
  Description of Artificial Sequence: Synthetic oligonucleotide
uaugcucaaagauccugga

SEQ ID NO: 1945113 - RNA, 19 nt, Artificial Sequence
  Description of Artificial Sequence: Synthetic oligonucleotide
ucauuaguauugucuaaau

SEQ ID NO: 1945114 - RNA, 19 nt, Artificial Sequence
  Description of Artificial Sequence: Synthetic oligonucleotide
ucaccaaucuugaaagguu

SEQ ID NO: 1945115 - RNA, 19 nt, Artificial Sequence
  Description of Artificial Sequence: Synthetic oligonucleotide
uugucuaaauuccuauguu

SEQ ID NO: 1945116 - RNA, 19 nt, Artificial Sequence
  Description of Artificial Sequence: Synthetic oligonucleotide
auacauauauaucccugau

SEQ ID NO: 1945117 - RNA, 19 nt, Artificial Sequence
  Description of Artificial Sequence: Synthetic oligonucleotide
caggauuugugucacacca

SEQ ID NO: 1945118 - RNA, 19 nt, Artificial Sequence
  Description of Artificial Sequence: Synthetic oligonucleotide
gguaauaaagaucauuagu

SEQ ID NO: 1945119 - RNA, 19 nt, Artificial Sequence
  Description of Artificial Sequence: Synthetic oligonucleotide
uaauggugagaaucauggc

SEQ ID NO: 1945120 - RNA, 19 nt, Artificial Sequence
  Description of Artificial Sequence: Synthetic oligonucleotide
agaguaauggugagaauca

SEQ ID NO: 1945121 - RNA, 19 nt, Artificial Sequence
  Description of Artificial Sequence: Synthetic oligonucleotide
agucaccaaucuugaaagg

SEQ ID NO: 1945122 - RNA, 19 nt, Artificial Sequence
  Description of Artificial Sequence: Synthetic oligonucleotide
agcagaguaauggugagaa

SEQ ID NO: 1945123 - RNA, 19 nt, Artificial Sequence
  Description of Artificial Sequence: Synthetic oligonucleotide
cauaccaguaauuuccaaa

SEQ ID NO: 1945124 - RNA, 19 nt, Artificial Sequence
  Description of Artificial Sequence: Synthetic oligonucleotide
agauguaauauagauccaa

SEQ ID NO: 1945125 - RNA, 19 nt, Artificial Sequence
  Description of Artificial Sequence: Synthetic oligonucleotide
ccuaguuaauacuucuugc

SEQ ID NO: 1945126 - RNA, 19 nt, Artificial Sequence
  Description of Artificial Sequence: Synthetic oligonucleotide
gacagcauuuggucugucc

SEQ ID NO: 1945127 - RNA, 19 nt, Artificial Sequence
  Description of Artificial Sequence: Synthetic oligonucleotide
aacccucuugguaaagguc

SEQ ID NO: 1945128 - RNA, 19 nt, Artificial Sequence
  Description of Artificial Sequence: Synthetic oligonucleotide
aucugcuuagacauucuuc

SEQ ID NO: 1945129 - RNA, 19 nt, Artificial Sequence
  Description of Artificial Sequence: Synthetic oligonucleotide
gagaguuuauaggcuagcc

SEQ ID NO: 1945130 - RNA, 19 nt, Artificial Sequence
  Description of Artificial Sequence: Synthetic oligonucleotide
uuagguagucaccaaucuu

SEQ ID NO: 1945131 - RNA, 19 nt, Artificial Sequence
  Description of Artificial Sequence: Synthetic oligonucleotide
cauaauuccuccaucucaa

SEQ ID NO: 1945132 - RNA, 19 nt, Artificial Sequence
  Description of Artificial Sequence: Synthetic oligonucleotide
acuauguguaaauucccua

SEQ ID NO: 1945133 - RNA, 19 nt, Artificial Sequence
  Description of Artificial Sequence: Synthetic oligonucleotide
cugagaguuuauaggcuag

SEQ ID NO: 1945134 - RNA, 19 nt, Artificial Sequence
  Description of Artificial Sequence: Synthetic oligonucleotide
gugguuaagaacuuaaauu

SEQ ID NO: 1945135 - RNA, 19 nt, Artificial Sequence
  Description of Artificial Sequence: Synthetic oligonucleotide
uacagcaauuaaacuuucu

SEQ ID NO: 1945136 - RNA, 19 nt, Artificial Sequence
  Description of Artificial Sequence: Synthetic oligonucleotide
auaucguuauucauaacau

SEQ ID NO: 1945137 - RNA, 19 nt, Artificial Sequence
  Description of Artificial Sequence: Synthetic oligonucleotide
auggugagaaucauggcca

SEQ ID NO: 1945138 - RNA, 19 nt, Artificial Sequence
  Description of Artificial Sequence: Synthetic oligonucleotide
ugugauucuuugccauucu

SEQ ID NO: 1945139 - RNA, 19 nt, Artificial Sequence
  Description of Artificial Sequence: Synthetic oligonucleotide
uaucguuauucauaacauu

SEQ ID NO: 1945140 - RNA, 19 nt, Artificial Sequence
  Description of Artificial Sequence: Synthetic oligonucleotide
aguaauggugagaaucaug

SEQ ID NO: 1945141 - RNA, 19 nt, Artificial Sequence
  Description of Artificial Sequence: Synthetic oligonucleotide
auauagagcccagagcaga

SEQ ID NO: 1945142 - RNA, 19 nt, Artificial Sequence
  Description of Artificial Sequence: Synthetic oligonucleotide
uguuugccauugauguaug

SEQ ID NO: 1945143 - RNA, 19 nt, Artificial Sequence
  Description of Artificial Sequence: Synthetic oligonucleotide
agcauuuggucuguccccg

SEQ ID NO: 1945144 - RNA, 19 nt, Artificial Sequence
  Description of Artificial Sequence: Synthetic oligonucleotide
ugagaguuuauaggcuagc

SEQ ID NO: 1945145 - RNA, 19 nt, Artificial Sequence
  Description of Artificial Sequence: Synthetic oligonucleotide
ccugcuuggagcauccugg

SEQ ID NO: 1945146 - RNA, 19 nt, Artificial Sequence
  Description of Artificial Sequence: Synthetic oligonucleotide
ucauaauauagagcccaga

SEQ ID NO: 1945147 - RNA, 19 nt, Artificial Sequence
  Description of Artificial Sequence: Synthetic oligonucleotide
auaggcuagccagaagaag

SEQ ID NO: 1945148 - RNA, 19 nt, Artificial Sequence
  Description of Artificial Sequence: Synthetic oligonucleotide
uuggguaauaaagaucauu

SEQ ID NO: 1945149 - RNA, 19 nt, Artificial Sequence
  Description of Artificial Sequence: Synthetic oligonucleotide
gaucauuaguauugucuaa

SEQ ID NO: 1945150 - RNA, 19 nt, Artificial Sequence
  Description of Artificial Sequence: Synthetic oligonucleotide
auacuucuugcagccaggg

SEQ ID NO: 1945151 - RNA, 19 nt, Artificial Sequence
  Description of Artificial Sequence: Synthetic oligonucleotide
auguguaaauucccuaguu

SEQ ID NO: 1945152 - RNA, 19 nt, Artificial Sequence
  Description of Artificial Sequence: Synthetic oligonucleotide
ugaaaccuacugaauuaua

SEQ ID NO: 1945153 - RNA, 19 nt, Artificial Sequence
  Description of Artificial Sequence: Synthetic oligonucleotide
guaaauucccuaguuaaua

SEQ ID NO: 1945154 - RNA, 19 nt, Artificial Sequence
  Description of Artificial Sequence: Synthetic oligonucleotide
acagagugacaugacaggu

SEQ ID NO: 1945155 - RNA, 19 nt, Artificial Sequence
  Description of Artificial Sequence: Synthetic oligonucleotide
auccugggaauucccuaac

SEQ ID NO: 1945156 - RNA, 19 nt, Artificial Sequence
  Description of Artificial Sequence: Synthetic oligonucleotide
uugugauucuuugccauuc

SEQ ID NO: 1945157 - RNA, 19 nt, Artificial Sequence
  Description of Artificial Sequence: Synthetic oligonucleotide
uccaucucaaaguguguau

SEQ ID NO: 1945158 - RNA, 19 nt, Artificial Sequence
  Description of Artificial Sequence: Synthetic oligonucleotide
cagcauuuggucugucccc

SEQ ID NO: 1945159 - RNA, 19 nt, Artificial Sequence
  Description of Artificial Sequence: Synthetic oligonucleotide
cuuacauaucauaccagua

SEQ ID NO: 1945160 - RNA, 19 nt, Artificial Sequence
  Description of Artificial Sequence: Synthetic oligonucleotide
cugggaauucccuaacaca

SEQ ID NO: 1945161 - RNA, 19 nt, Artificial Sequence
  Description of Artificial Sequence: Synthetic oligonucleotide
cuucauaauuccuccaucu

SEQ ID NO: 1945162 - RNA, 19 nt, Artificial Sequence
  Description of Artificial Sequence: Synthetic oligonucleotide
uggugagaaucauggccag

SEQ ID NO: 1945163 - RNA, 19 nt, Artificial Sequence
  Description of Artificial Sequence: Synthetic oligonucleotide
gacaauguguuaucucuua

SEQ ID NO: 1945164 - RNA, 19 nt, Artificial Sequence
  Description of Artificial Sequence: Synthetic oligonucleotide
cuauguuagcagucagcug

SEQ ID NO: 1945165 - RNA, 19 nt, Artificial Sequence
  Description of Artificial Sequence: Synthetic oligonucleotide
aucucuuacaaguguuaau

SEQ ID NO: 1945166 - RNA, 19 nt, Artificial Sequence
  Description of Artificial Sequence: Synthetic oligonucleotide
ggaauucccuaacacagca

SEQ ID NO: 1945167 - RNA, 19 nt, Artificial Sequence
  Description of Artificial Sequence: Synthetic oligonucleotide
aaucauccucaaaacaaua

SEQ ID NO: 1945168 - RNA, 19 nt, Artificial Sequence
  Description of Artificial Sequence: Synthetic oligonucleotide
aucaugaaugguucauuuu

SEQ ID NO: 1945169 - RNA, 19 nt, Artificial Sequence
  Description of Artificial Sequence: Synthetic oligonucleotide
ccauauuuagguagucacc

SEQ ID NO: 1945170 - RNA, 19 nt, Artificial Sequence
  Description of Artificial Sequence: Synthetic oligonucleotide
uuugugauucuuugccauu

SEQ ID NO: 1945171 - RNA, 19 nt, Artificial Sequence
  Description of Artificial Sequence: Synthetic oligonucleotide
auauuuagguagucaccaa

SEQ ID NO: 1945172 - RNA, 19 nt, Artificial Sequence
  Description of Artificial Sequence: Synthetic oligonucleotide
uaucugcuuagacauucuu

SEQ ID NO: 1945173 - RNA, 19 nt, Artificial Sequence
  Description of Artificial Sequence: Synthetic oligonucleotide
uagcaguuccacagaguga

SEQ ID NO: 1945174 - RNA, 19 nt, Artificial Sequence
  Description of Artificial Sequence: Synthetic oligonucleotide
cgucuaucauaauauagag

SEQ ID NO: 1945175 - RNA, 19 nt, Artificial Sequence
  Description of Artificial Sequence: Synthetic oligonucleotide
gaauucccuaacacagcag

SEQ ID NO: 1945176 - RNA, 19 nt, Artificial Sequence
  Description of Artificial Sequence: Synthetic oligonucleotide
uggaaaggcuugguuuuag

SEQ ID NO: 1945177 - RNA, 19 nt, Artificial Sequence
  Description of Artificial Sequence: Synthetic oligonucleotide
caaaguguguauugaagcu

SEQ ID NO: 1945178 - RNA, 19 nt, Artificial Sequence
  Description of Artificial Sequence: Synthetic oligonucleotide
auacagcaauuaaacuuuc

SEQ ID NO: 1945179 - RNA, 19 nt, Artificial Sequence
  Description of Artificial Sequence: Synthetic oligonucleotide
aauuagugguuaagaacuu

SEQ ID NO: 1945180 - RNA, 19 nt, Artificial Sequence
  Description of Artificial Sequence: Synthetic oligonucleotide
cauuuggucuguccccggc

SEQ ID NO: 1945181 - RNA, 19 nt, Artificial Sequence
  Description of Artificial Sequence: Synthetic oligonucleotide
cacagacuuauauacauau

SEQ ID NO: 1945182 - RNA, 19 nt, Artificial Sequence
  Description of Artificial Sequence: Synthetic oligonucleotide
gauaagcuuaagacaaugu

SEQ ID NO: 1945183 - RNA, 19 nt, Artificial Sequence
  Description of Artificial Sequence: Synthetic oligonucleotide
agauuacuuuaguaaccaa

SEQ ID NO: 1945184 - RNA, 19 nt, Artificial Sequence
  Description of Artificial Sequence: Synthetic oligonucleotide
accaauggagauccccaga

SEQ ID NO: 1945185 - RNA, 19 nt, Artificial Sequence
  Description of Artificial Sequence: Synthetic oligonucleotide
gauccccagaaaccuuagc

SEQ ID NO: 1945186 - RNA, 19 nt, Artificial Sequence
  Description of Artificial Sequence: Synthetic oligonucleotide
aaaagcucuguugguggaa

SEQ ID NO: 1945187 - RNA, 19 nt, Artificial Sequence
  Description of Artificial Sequence: Synthetic oligonucleotide
acugaauuauacagacaca

SEQ ID NO: 1945188 - RNA, 19 nt, Artificial Sequence
  Description of Artificial Sequence: Synthetic oligonucleotide
gguuacaaugauucuuaca

SEQ ID NO: 1945189 - RNA, 19 nt, Artificial Sequence
  Description of Artificial Sequence: Synthetic oligonucleotide
uaccuucacaguagcucca

SEQ ID NO: 1945190 - RNA, 19 nt, Artificial Sequence
  Description of Artificial Sequence: Synthetic oligonucleotide
gccaggguuacaaugauuc

SEQ ID NO: 1945191 - RNA, 19 nt, Artificial Sequence
  Description of Artificial Sequence: Synthetic oligonucleotide
guguuaucucuuacaagug

SEQ ID NO: 1945192 - RNA, 19 nt, Artificial Sequence
  Description of Artificial Sequence: Synthetic oligonucleotide
cagaaaccuuagcacuugc

SEQ ID NO: 1945193 - RNA, 19 nt, Artificial Sequence
  Description of Artificial Sequence: Synthetic oligonucleotide
auggugcuauauaagacaa

SEQ ID NO: 1945194 - RNA, 19 nt, Artificial Sequence
  Description of Artificial Sequence: Synthetic oligonucleotide
uuggucuguccccggcucc

SEQ ID NO: 1945195 - RNA, 19 nt, Artificial Sequence
  Description of Artificial Sequence: Synthetic oligonucleotide
guuugccauugauguaugc

SEQ ID NO: 1945196 - RNA, 19 nt, Artificial Sequence
  Description of Artificial Sequence: Synthetic oligonucleotide
auugaagcuguuugccauu

SEQ ID NO: 1945197 - RNA, 19 nt, Artificial Sequence
  Description of Artificial Sequence: Synthetic oligonucleotide
cucuuacaaguguuaauaa

SEQ ID NO: 1945198 - RNA, 19 nt, Artificial Sequence
  Description of Artificial Sequence: Synthetic oligonucleotide
aguuuauaggcuagccaga

SEQ ID NO: 1945199 - RNA, 19 nt, Artificial Sequence
  Description of Artificial Sequence: Synthetic oligonucleotide
cccuaguuaauacuucuug

SEQ ID NO: 1945200 - RNA, 19 nt, Artificial Sequence
  Description of Artificial Sequence: Synthetic oligonucleotide
aggguuacaaugauucuua

SEQ ID NO: 1945201 - RNA, 19 nt, Artificial Sequence
  Description of Artificial Sequence: Synthetic oligonucleotide
guaucauucuucagagaca

SEQ ID NO: 1945202 - RNA, 19 nt, Artificial Sequence
  Description of Artificial Sequence: Synthetic oligonucleotide
uuccacagagugacaugac

SEQ ID NO: 1945203 - RNA, 19 nt, Artificial Sequence
  Description of Artificial Sequence: Synthetic oligonucleotide
cagaagaagcuaccuucac

SEQ ID NO: 1945204 - RNA, 19 nt, Artificial Sequence
  Description of Artificial Sequence: Synthetic oligonucleotide
auaauuccuccaucucaaa

SEQ ID NO: 1945205 - RNA, 19 nt, Artificial Sequence
  Description of Artificial Sequence: Synthetic oligonucleotide
guuuauaggcuagccagaa

SEQ ID NO: 1945206 - RNA, 19 nt, Artificial Sequence
  Description of Artificial Sequence: Synthetic oligonucleotide
auuagugguuaagaacuua

SEQ ID NO: 1945207 - RNA, 19 nt, Artificial Sequence
  Description of Artificial Sequence: Synthetic oligonucleotide
caugaaugguucauuuugu

SEQ ID NO: 1945208 - RNA, 19 nt, Artificial Sequence
  Description of Artificial Sequence: Synthetic oligonucleotide
gcuaccuucacaguagcuc

SEQ ID NO: 1945209 - RNA, 19 nt, Artificial Sequence
  Description of Artificial Sequence: Synthetic oligonucleotide
uuguugcuucauccgaauu

SEQ ID NO: 1945210 - RNA, 19 nt, Artificial Sequence
  Description of Artificial Sequence: Synthetic oligonucleotide
gguuugugauucuuugcca

SEQ ID NO: 1945211 - RNA, 19 nt, Artificial Sequence
  Description of Artificial Sequence: Synthetic oligonucleotide
guuugugauucuuugccau

SEQ ID NO: 1945212 - RNA, 19 nt, Artificial Sequence
  Description of Artificial Sequence: Synthetic oligonucleotide
cauaucauaccaguaauuu

SEQ ID NO: 1945213 - RNA, 19 nt, Artificial Sequence
  Description of Artificial Sequence: Synthetic oligonucleotide
uaaaggucacugaggucuu

SEQ ID NO: 1945214 - RNA, 19 nt, Artificial Sequence
  Description of Artificial Sequence: Synthetic oligonucleotide
cuucauccgaauuucugcu

SEQ ID NO: 1945215 - RNA, 19 nt, Artificial Sequence
  Description of Artificial Sequence: Synthetic oligonucleotide
agcuuaagacaauguguua

SEQ ID NO: 1945216 - RNA, 19 nt, Artificial Sequence
  Description of Artificial Sequence: Synthetic oligonucleotide
aagcucuguugguggaaaa

SEQ ID NO: 1945217 - RNA, 19 nt, Artificial Sequence
  Description of Artificial Sequence: Synthetic oligonucleotide
auccaagacagaauuuaaa

SEQ ID NO: 1945218 - RNA, 19 nt, Artificial Sequence
  Description of Artificial Sequence: Synthetic oligonucleotide
cuugcagccaggguuacaa

SEQ ID NO: 1945219 - RNA, 19 nt, Artificial Sequence
  Description of Artificial Sequence: Synthetic oligonucleotide
ccaaaauuagugguuaaga

SEQ ID NO: 1945220 - RNA, 19 nt, Artificial Sequence
  Description of Artificial Sequence: Synthetic oligonucleotide
cuuagacauucuucuugca

SEQ ID NO: 1945221 - RNA, 19 nt, Artificial Sequence
  Description of Artificial Sequence: Synthetic oligonucleotide
ggugcuauauaagacaaau

SEQ ID NO: 1945222 - RNA, 19 nt, Artificial Sequence
  Description of Artificial Sequence: Synthetic oligonucleotide
cauccugggaauucccuaa

SEQ ID NO: 1945223 - RNA, 19 nt, Artificial Sequence
  Description of Artificial Sequence: Synthetic oligonucleotide
gucaccaaucuugaaaggu

SEQ ID NO: 1945224 - RNA, 19 nt, Artificial Sequence
  Description of Artificial Sequence: Synthetic oligonucleotide
accuuagcacuugcaacug

SEQ ID NO: 1945225 - RNA, 19 nt, Artificial Sequence
  Description of Artificial Sequence: Synthetic oligonucleotide
ccgaauuucugcugaauca

SEQ ID NO: 1945226 - RNA, 19 nt, Artificial Sequence
  Description of Artificial Sequence: Synthetic oligonucleotide
cuaacacagcaggaaucug

SEQ ID NO: 1945227 - RNA, 19 nt, Artificial Sequence
  Description of Artificial Sequence: Synthetic oligonucleotide
cagauguaauauagaucca

SEQ ID NO: 1945228 - RNA, 19 nt, Artificial Sequence
  Description of Artificial Sequence: Synthetic oligonucleotide
cagcacagacuuauauaca

SEQ ID NO: 1945229 - RNA, 19 nt, Artificial Sequence
  Description of Artificial Sequence: Synthetic oligonucleotide
ccauacagcaauuaaacuu

SEQ ID NO: 1945230 - RNA, 19 nt, Artificial Sequence
  Description of Artificial Sequence: Synthetic oligonucleotide
gagauccccagaaaccuua

SEQ ID NO: 1945231 - RNA, 19 nt, Artificial Sequence
  Description of Artificial Sequence: Synthetic oligonucleotide
cucccgucuaucauaauau

SEQ ID NO: 1945232 - RNA, 19 nt, Artificial Sequence
  Description of Artificial Sequence: Synthetic oligonucleotide
gcuagccagaagaagcuac

SEQ ID NO: 1945233 - RNA, 19 nt, Artificial Sequence
  Description of Artificial Sequence: Synthetic oligonucleotide
acaguagcuccaaugccau

SEQ ID NO: 1945234 - RNA, 19 nt, Artificial Sequence
  Description of Artificial Sequence: Synthetic oligonucleotide
guuaucucuuacaaguguu

SEQ ID NO: 1945235 - RNA, 19 nt, Artificial Sequence
  Description of Artificial Sequence: Synthetic oligonucleotide
auacaucauuggguaauaa

SEQ ID NO: 1945236 - RNA, 19 nt, Artificial Sequence
  Description of Artificial Sequence: Synthetic oligonucleotide
caauacaucauuggguaau

SEQ ID NO: 1945237 - RNA, 19 nt, Artificial Sequence
  Description of Artificial Sequence: Synthetic oligonucleotide
auuaacaguuacagaugua

SEQ ID NO: 1945238 - RNA, 19 nt, Artificial Sequence
  Description of Artificial Sequence: Synthetic oligonucleotide
cuguuugccauugauguau

SEQ ID NO: 1945239 - RNA, 19 nt, Artificial Sequence
  Description of Artificial Sequence: Synthetic oligonucleotide
agauccccagaaaccuuag

SEQ ID NO: 1945240 - RNA, 19 nt, Artificial Sequence
  Description of Artificial Sequence: Synthetic oligonucleotide
gguaaaggucacugagguc

SEQ ID NO: 1945241 - RNA, 19 nt, Artificial Sequence
  Description of Artificial Sequence: Synthetic oligonucleotide
auaucccugauaagcuuaa

SEQ ID NO: 1945242 - RNA, 19 nt, Artificial Sequence
  Description of Artificial Sequence: Synthetic oligonucleotide
gugacaugacaggugcuga

SEQ ID NO: 1945243 - RNA, 19 nt, Artificial Sequence
  Description of Artificial Sequence: Synthetic oligonucleotide
uggucuguccccggcuccc

SEQ ID NO: 1945244 - RNA, 19 nt, Artificial Sequence
  Description of Artificial Sequence: Synthetic oligonucleotide
cuuagcacuugcaacuguu

SEQ ID NO: 1945245 - RNA, 19 nt, Artificial Sequence
  Description of Artificial Sequence: Synthetic oligonucleotide
ucacaccaauggagauccc

SEQ ID NO: 1945246 - RNA, 19 nt, Artificial Sequence
  Description of Artificial Sequence: Synthetic oligonucleotide
cuggaggccaguccauaca

SEQ ID NO: 1945247 - RNA, 19 nt, Artificial Sequence
  Description of Artificial Sequence: Synthetic oligonucleotide
ggguuacaaugauucuuac

SEQ ID NO: 1945248 - RNA, 19 nt, Artificial Sequence
  Description of Artificial Sequence: Synthetic oligonucleotide
gcucccgucuaucauaaua

SEQ ID NO: 1945249 - RNA, 19 nt, Artificial Sequence
  Description of Artificial Sequence: Synthetic oligonucleotide
ggauuugugucacaccaau

SEQ ID NO: 1945250 - RNA, 19 nt, Artificial Sequence
  Description of Artificial Sequence: Synthetic oligonucleotide
cuccacaacccucuuggua

SEQ ID NO: 1945251 - RNA, 19 nt, Artificial Sequence
  Description of Artificial Sequence: Synthetic oligonucleotide
caacccucuugguaaaggu

SEQ ID NO: 1945252 - RNA, 19 nt, Artificial Sequence
  Description of Artificial Sequence: Synthetic oligonucleotide
auccgaauuucugcugaau

SEQ ID NO: 1945253 - RNA, 19 nt, Artificial Sequence
  Description of Artificial Sequence: Synthetic oligonucleotide
ucuugcagccaggguuaca

SEQ ID NO: 1945254 - RNA, 19 nt, Artificial Sequence
  Description of Artificial Sequence: Synthetic oligonucleotide
caauggagauccccagaaa

SEQ ID NO: 1945255 - RNA, 19 nt, Artificial Sequence
  Description of Artificial Sequence: Synthetic oligonucleotide
auuggguaauaaagaucau

SEQ ID NO: 1945256 - RNA, 19 nt, Artificial Sequence
  Description of Artificial Sequence: Synthetic oligonucleotide
aggauuugugucacaccaa

SEQ ID NO: 1945257 - RNA, 19 nt, Artificial Sequence
  Description of Artificial Sequence: Synthetic oligonucleotide
cacaacccucuugguaaag

SEQ ID NO: 1945258 - RNA, 19 nt, Artificial Sequence
  Description of Artificial Sequence: Synthetic oligonucleotide
gcauuuggucuguccccgg

SEQ ID NO: 1945259 - RNA, 19 nt, Artificial Sequence
  Description of Artificial Sequence: Synthetic oligonucleotide
ccuauguuagcagucagcu

SEQ ID NO: 1945260 - RNA, 19 nt, Artificial Sequence
  Description of Artificial Sequence: Synthetic oligonucleotide
cuuggagcauccugggaau

SEQ ID NO: 1945261 - RNA, 19 nt, Artificial Sequence
  Description of Artificial Sequence: Synthetic oligonucleotide
cugaaaccuacugaauuau

SEQ ID NO: 1945262 - RNA, 19 nt, Artificial Sequence
  Description of Artificial Sequence: Synthetic oligonucleotide
agacagcauuuggucuguc

SEQ ID NO: 1945263 - RNA, 19 nt, Artificial Sequence
  Description of Artificial Sequence: Synthetic oligonucleotide
cuguuugguuccucucaaa

SEQ ID NO: 1945264 - RNA, 19 nt, Artificial Sequence
  Description of Artificial Sequence: Synthetic oligonucleotide
gacaggugcugagaaguau

SEQ ID NO: 1945265 - RNA, 19 nt, Artificial Sequence
  Description of Artificial Sequence: Synthetic oligonucleotide
gaguaauggugagaaucau

SEQ ID NO: 1945266 - RNA, 19 nt, Artificial Sequence
  Description of Artificial Sequence: Synthetic oligonucleotide
gguagucaccaaucuugaa

SEQ ID NO: 1945267 - RNA, 19 nt, Artificial Sequence
  Description of Artificial Sequence: Synthetic oligonucleotide
gagcccagagcagaguaau

SEQ ID NO: 1945268 - RNA, 19 nt, Artificial Sequence
  Description of Artificial Sequence: Synthetic oligonucleotide
ggccaguccauacagcaau

SEQ ID NO: 1945269 - RNA, 19 nt, Artificial Sequence
  Description of Artificial Sequence: Synthetic oligonucleotide
gcucuguugguggaaaaua

SEQ ID NO: 1945270 - RNA, 19 nt, Artificial Sequence
  Description of Artificial Sequence: Synthetic oligonucleotide
cucaugagugccacagguu

SEQ ID NO: 1945271 - RNA, 19 nt, Artificial Sequence
  Description of Artificial Sequence: Synthetic oligonucleotide
gcuguuugccauugaugua

SEQ ID NO: 1945272 - RNA, 19 nt, Artificial Sequence
  Description of Artificial Sequence: Synthetic oligonucleotide
guguguauugaagcuguuu

SEQ ID NO: 1945273 - RNA, 19 nt, Artificial Sequence
  Description of Artificial Sequence: Synthetic oligonucleotide
aguguguauugaagcuguu

SEQ ID NO: 1945274 - RNA, 19 nt, Artificial Sequence
  Description of Artificial Sequence: Synthetic oligonucleotide
uguccccggcucccgucua

SEQ ID NO: 1945275 - RNA, 19 nt, Artificial Sequence
  Description of Artificial Sequence: Synthetic oligonucleotide
gagugacaugacaggugcu

SEQ ID NO: 1945276 - RNA, 19 nt, Artificial Sequence
  Description of Artificial Sequence: Synthetic oligonucleotide
ggcuugguuuuagcaguuc

SEQ ID NO: 1945277 - RNA, 19 nt, Artificial Sequence
  Description of Artificial Sequence: Synthetic oligonucleotide
ggcuagccagaagaagcua

SEQ ID NO: 1945278 - RNA, 19 nt, Artificial Sequence
  Description of Artificial Sequence: Synthetic oligonucleotide
ccggcucccgucuaucaua

SEQ ID NO: 1945279 - RNA, 19 nt, Artificial Sequence
  Description of Artificial Sequence: Synthetic oligonucleotide
ccacaacccucuugguaaa

SEQ ID NO: 1945280 - RNA, 19 nt, Artificial Sequence
  Description of Artificial Sequence: Synthetic oligonucleotide
ccaguccauacagcaauua

SEQ ID NO: 1945281 - RNA, 19 nt, Artificial Sequence
  Description of Artificial Sequence: Synthetic oligonucleotide
gucuguccccggcucccgu

SEQ ID NO: 1945282 - RNA, 19 nt, Artificial Sequence
  Description of Artificial Sequence: Synthetic oligonucleotide
ccaucucaaaguguguauu

SEQ ID NO: 1945283 - RNA, 19 nt, Artificial Sequence
  Description of Artificial Sequence: Synthetic oligonucleotide
ccuuagcacuugcaacugu

SEQ ID NO: 1945284 - RNA, 19 nt, Artificial Sequence
  Description of Artificial Sequence: Synthetic oligonucleotide
gccacagguuugugauucu

SEQ ID NO: 1945285 - RNA, 19 nt, Artificial Sequence
  Description of Artificial Sequence: Synthetic oligonucleotide
ggagauccccagaaaccuu

SEQ ID NO: 1945286 - RNA, 19 nt, Artificial Sequence
  Description of Artificial Sequence: Synthetic oligonucleotide
ccaucaugaaugguucauu

SEQ ID NO: 1945287 - RNA, 19 nt, Artificial Sequence
  Description of Artificial Sequence: Synthetic oligonucleotide
cggcucccgucuaucauaa

SEQ ID NO: 1945288 - RNA, 19 nt, Artificial Sequence
  Description of Artificial Sequence: Synthetic oligonucleotide
ccccggcucccgucuauca

SEQ ID NO: 1945289 - RNA, 19 nt, Artificial Sequence
  Description of Artificial Sequence: Synthetic oligonucleotide
guccccggcucccgucuau

SEQ ID NO: 1945290 - RNA, 19 nt, Artificial Sequence
  Description of Artificial Sequence: Synthetic oligonucleotide
cccggcucccgucuaucau

SEQ ID NO: 1945291 - RNA, 19 nt, Artificial Sequence
  Description of Artificial Sequence: Synthetic oligonucleotide
aaauaaaauauauauauau

SEQ ID NO: 1945292 - RNA, 19 nt, Artificial Sequence
  Description of Artificial Sequence: Synthetic oligonucleotide
aaagucaaaacagagacac

SEQ ID NO: 1945293 - RNA, 19 nt, Artificial Sequence
  Description of Artificial Sequence: Synthetic oligonucleotide
ugagguaaugguaugaugg

SEQ ID NO: 1945294 - RNA, 19 nt, Artificial Sequence
  Description of Artificial Sequence: Synthetic oligonucleotide
aaaauauauauauauauuu

SEQ ID NO: 1945295 - RNA, 19 nt, Artificial Sequence
  Description of Artificial Sequence: Synthetic oligonucleotide
uauauauauauuuauauau

SEQ ID NO: 1945296 - RNA, 19 nt, Artificial Sequence
  Description of Artificial Sequence: Synthetic oligonucleotide
aacgaugaaauacucuggc

SEQ ID NO: 1945297 - RNA, 19 nt, Artificial Sequence
  Description of Artificial Sequence: Synthetic oligonucleotide
aauauauauauauauuuau

SEQ ID NO: 1945298 - RNA, 19 nt, Artificial Sequence
  Description of Artificial Sequence: Synthetic oligonucleotide
ucauauaugcuuuuaaagc

SEQ ID NO: 1945299 - RNA, 19 nt, Artificial Sequence
  Description of Artificial Sequence: Synthetic oligonucleotide
auaaaauauauauauauau

SEQ ID NO: 1945300 - RNA, 19 nt, Artificial Sequence
  Description of Artificial Sequence: Synthetic oligonucleotide
auuacuuuccuccuaauag

SEQ ID NO: 1945301 - RNA, 19 nt, Artificial Sequence
  Description of Artificial Sequence: Synthetic oligonucleotide
uaauagagcuccaagauca

SEQ ID NO: 1945302 - RNA, 19 nt, Artificial Sequence
  Description of Artificial Sequence: Synthetic oligonucleotide
uauuuuacuauacaucuca

SEQ ID NO: 1945303 - RNA, 19 nt, Artificial Sequence
  Description of Artificial Sequence: Synthetic oligonucleotide
uauauauauauauuuauau

SEQ ID NO: 1945304 - RNA, 19 nt, Artificial Sequence
  Description of Artificial Sequence: Synthetic oligonucleotide
guugaagcggaacagaucg

SEQ ID NO: 1945305 - RNA, 19 nt, Artificial Sequence
  Description of Artificial Sequence: Synthetic oligonucleotide
auacaucucagauuuauac

SEQ ID NO: 1945306 - RNA, 19 nt, Artificial Sequence
  Description of Artificial Sequence: Synthetic oligonucleotide
uccuaugaaaauaauaugu

SEQ ID NO: 1945307 - RNA, 19 nt, Artificial Sequence
  Description of Artificial Sequence: Synthetic oligonucleotide
uauauauauuuauauaugu

SEQ ID NO: 1945308 - RNA, 19 nt, Artificial Sequence
  Description of Artificial Sequence: Synthetic oligonucleotide
aacccauuaguucuccucc

SEQ ID NO: 1945309 - RNA, 19 nt, Artificial Sequence
  Description of Artificial Sequence: Synthetic oligonucleotide
acuccauaaguuuagcagc

SEQ ID NO: 1945310 - RNA, 19 nt, Artificial Sequence
  Description of Artificial Sequence: Synthetic oligonucleotide
cauaucauaggcauccucg

SEQ ID NO: 1945311 - RNA, 19 nt, Artificial Sequence
  Description of Artificial Sequence: Synthetic oligonucleotide
uuuacccauaauauaaccc

SEQ ID NO: 1945312 - RNA, 19 nt, Artificial Sequence
  Description of Artificial Sequence: Synthetic oligonucleotide
gucuuuaagaccuaaauga

SEQ ID NO: 1945313 - RNA, 19 nt, Artificial Sequence
  Description of Artificial Sequence: Synthetic oligonucleotide
aagacggcggaauucaggg

SEQ ID NO: 1945314 - RNA, 19 nt, Artificial Sequence
  Description of Artificial Sequence: Synthetic oligonucleotide
ugauugaauuuuacuaugg

SEQ ID NO: 1945315 - RNA, 19 nt, Artificial Sequence
  Description of Artificial Sequence: Synthetic oligonucleotide
aaguuuagcagccaagcca

SEQ ID NO: 1945316 - RNA, 19 nt, Artificial Sequence
  Description of Artificial Sequence: Synthetic oligonucleotide
auaaguuuagcagccaagc

SEQ ID NO: 1945317 - RNA, 19 nt, Artificial Sequence
  Description of Artificial Sequence: Synthetic oligonucleotide
uaaaauauauauauauauu

SEQ ID NO: 1945318 - RNA, 19 nt, Artificial Sequence
  Description of Artificial Sequence: Synthetic oligonucleotide
aauauguccacaaacuugu

SEQ ID NO: 1945319 - RNA, 19 nt, Artificial Sequence
  Description of Artificial Sequence: Synthetic oligonucleotide
ugaaguaaguuuauagccu

SEQ ID NO: 1945320 - RNA, 19 nt, Artificial Sequence
  Description of Artificial Sequence: Synthetic oligonucleotide
ugcuuuacccauaauauaa

SEQ ID NO: 1945321 - RNA, 19 nt, Artificial Sequence
  Description of Artificial Sequence: Synthetic oligonucleotide
ucugcuuuacccauaauau

SEQ ID NO: 1945322 - RNA, 19 nt, Artificial Sequence
  Description of Artificial Sequence: Synthetic oligonucleotide
aaacaacccuccauaaucc

SEQ ID NO: 1945323 - RNA, 19 nt, Artificial Sequence
  Description of Artificial Sequence: Synthetic oligonucleotide
cauaaguuucuguaagugg

SEQ ID NO: 1945324 - RNA, 19 nt, Artificial Sequence
  Description of Artificial Sequence: Synthetic oligonucleotide
uccaaguuaauguuguuga

SEQ ID NO: 1945325 - RNA, 19 nt, Artificial Sequence
  Description of Artificial Sequence: Synthetic oligonucleotide
ucuaguaacuccauaaguu

SEQ ID NO: 1945326 - RNA, 19 nt, Artificial Sequence
  Description of Artificial Sequence: Synthetic oligonucleotide
uuuauagccuguauuuuca

SEQ ID NO: 1945327 - RNA, 19 nt, Artificial Sequence
  Description of Artificial Sequence: Synthetic oligonucleotide
aagcggaacagaucgucgc

SEQ ID NO: 1945328 - RNA, 19 nt, Artificial Sequence
  Description of Artificial Sequence: Synthetic oligonucleotide
gaugaaauacucuggccag

SEQ ID NO: 1945329 - RNA, 19 nt, Artificial Sequence
  Description of Artificial Sequence: Synthetic oligonucleotide
aauguuguugaagcggaac

SEQ ID NO: 1945330 - RNA, 19 nt, Artificial Sequence
  Description of Artificial Sequence: Synthetic oligonucleotide
ugguuauucaauguccucg

SEQ ID NO: 1945331 - RNA, 19 nt, Artificial Sequence
  Description of Artificial Sequence: Synthetic oligonucleotide
cuaugguuauucaaugucc

SEQ ID NO: 1945332 - RNA, 19 nt, Artificial Sequence
  Description of Artificial Sequence: Synthetic oligonucleotide
ugcuuguacauguugacug

SEQ ID NO: 1945333 - RNA, 19 nt, Artificial Sequence
  Description of Artificial Sequence: Synthetic oligonucleotide
ugauuggacacucuuacaa

SEQ ID NO: 1945334 - RNA, 19 nt, Artificial Sequence
  Description of Artificial Sequence: Synthetic oligonucleotide
cauaauccugaauuaaaag

SEQ ID NO: 1945335 - RNA, 19 nt, Artificial Sequence
  Description of Artificial Sequence: Synthetic oligonucleotide
aaggaaucccauaaguuuc

SEQ ID NO: 1945336 - RNA, 19 nt, Artificial Sequence
  Description of Artificial Sequence: Synthetic oligonucleotide
ucaaccaugauaguggaac

SEQ ID NO: 1945337 - RNA, 19 nt, Artificial Sequence
  Description of Artificial Sequence: Synthetic oligonucleotide
aauaaaauauauauauaua

SEQ ID NO: 1945338 - RNA, 19 nt, Artificial Sequence
  Description of Artificial Sequence: Synthetic oligonucleotide
auuggacacucuuacaaag

SEQ ID NO: 1945339 - RNA, 19 nt, Artificial Sequence
  Description of Artificial Sequence: Synthetic oligonucleotide
aaauauauauauauauuua

SEQ ID NO: 1945340 - RNA, 19 nt, Artificial Sequence
  Description of Artificial Sequence: Synthetic oligonucleotide
auauauauauauuuauaua

SEQ ID NO: 1945341 - RNA, 19 nt, Artificial Sequence
  Description of Artificial Sequence: Synthetic oligonucleotide
aguuaauguuguugaagcg

SEQ ID NO: 1945342 - RNA, 19 nt, Artificial Sequence
  Description of Artificial Sequence: Synthetic oligonucleotide
ggaacgaugagauuugaag

SEQ ID NO: 1945343 - RNA, 19 nt, Artificial Sequence
  Description of Artificial Sequence: Synthetic oligonucleotide
uggacacucuuacaaagag

SEQ ID NO: 1945344 - RNA, 19 nt, Artificial Sequence
  Description of Artificial Sequence: Synthetic oligonucleotide
uggcauauacugcauacug

SEQ ID NO: 1945345 - RNA, 19 nt, Artificial Sequence
  Description of Artificial Sequence: Synthetic oligonucleotide
cuugauuggacacucuuac

SEQ ID NO: 1945346 - RNA, 19 nt, Artificial Sequence
  Description of Artificial Sequence: Synthetic oligonucleotide
cuuuacccauaauauaacc

SEQ ID NO: 1945347 - RNA, 19 nt, Artificial Sequence
  Description of Artificial Sequence: Synthetic oligonucleotide
uucugcuuuacccauaaua

SEQ ID NO: 1945348 - RNA, 19 nt, Artificial Sequence
  Description of Artificial Sequence: Synthetic oligonucleotide
auauauauauuuauauaug

SEQ ID NO: 1945349 - RNA, 19 nt, Artificial Sequence
  Description of Artificial Sequence: Synthetic oligonucleotide
uaugguuauucaauguccu

SEQ ID NO: 1945350 - RNA, 19 nt, Artificial Sequence
  Description of Artificial Sequence: Synthetic oligonucleotide
aacgaugagauuugaagua

SEQ ID NO: 1945351 - RNA, 19 nt, Artificial Sequence
  Description of Artificial Sequence: Synthetic oligonucleotide
aaaugauuacuuuccuccu

SEQ ID NO: 1945352 - RNA, 19 nt, Artificial Sequence
  Description of Artificial Sequence: Synthetic oligonucleotide
acgaugaaauacucuggcc

SEQ ID NO: 1945353 - RNA, 19 nt, Artificial Sequence
  Description of Artificial Sequence: Synthetic oligonucleotide
uacuuuccuccuaauagag

SEQ ID NO: 1945354 - RNA, 19 nt, Artificial Sequence
  Description of Artificial Sequence: Synthetic oligonucleotide
uccuaauagagcuccaaga

SEQ ID NO: 1945355 - RNA, 19 nt, Artificial Sequence
  Description of Artificial Sequence: Synthetic oligonucleotide
uuacuuuccuccuaauaga

SEQ ID NO: 1945356 - RNA, 19 nt, Artificial Sequence
  Description of Artificial Sequence: Synthetic oligonucleotide
caccacauccuaaacaacc

SEQ ID NO: 1945357 - RNA, 19 nt, Artificial Sequence
  Description of Artificial Sequence: Synthetic oligonucleotide
acuguaacccaacugcuug

SEQ ID NO: 1945358 - RNA, 19 nt, Artificial Sequence
  Description of Artificial Sequence: Synthetic oligonucleotide
aagaucauccuaugaaaau

SEQ ID NO: 1945359 - RNA, 19 nt, Artificial Sequence
  Description of Artificial Sequence: Synthetic oligonucleotide
uguaugcuauugcucauug

SEQ ID NO: 1945360 - RNA, 19 nt, Artificial Sequence
  Description of Artificial Sequence: Synthetic oligonucleotide
ucagauuuauacauuucau

SEQ ID NO: 1945361 - RNA, 19 nt, Artificial Sequence
  Description of Artificial Sequence: Synthetic oligonucleotide
ucauccuaugaaaauaaua

SEQ ID NO: 1945362 - RNA, 19 nt, Artificial Sequence
  Description of Artificial Sequence: Synthetic oligonucleotide
auauaugugcagcaguggu

SEQ ID NO: 1945363 - RNA, 19 nt, Artificial Sequence
  Description of Artificial Sequence: Synthetic oligonucleotide
agcagugguucucaggcac

SEQ ID NO: 1945364 - RNA, 19 nt, Artificial Sequence
  Description of Artificial Sequence: Synthetic oligonucleotide
auaugugcagcagugguuc

SEQ ID NO: 1945365 - RNA, 19 nt, Artificial Sequence
  Description of Artificial Sequence: Synthetic oligonucleotide
uccaagcccgcucagcgcg

SEQ ID NO: 1945366 - RNA, 19 nt, Artificial Sequence
  Description of Artificial Sequence: Synthetic oligonucleotide
uuagcagccaagccaagac

SEQ ID NO: 1945367 - RNA, 19 nt, Artificial Sequence
  Description of Artificial Sequence: Synthetic oligonucleotide
cugccuaagaaccacugcc

SEQ ID NO: 1945368 - RNA, 19 nt, Artificial Sequence
  Description of Artificial Sequence: Synthetic oligonucleotide
aguuugaacauguaugcua

SEQ ID NO: 1945369 - RNA, 19 nt, Artificial Sequence
  Description of Artificial Sequence: Synthetic oligonucleotide
cauaaguuuagcagccaag

SEQ ID NO: 1945370 - RNA, 19 nt, Artificial Sequence
  Description of Artificial Sequence: Synthetic oligonucleotide
ugaauuuuacuauggcaaa

SEQ ID NO: 1945371 - RNA, 19 nt, Artificial Sequence
  Description of Artificial Sequence: Synthetic oligonucleotide
uccuaaacaacccuccaua

SEQ ID NO: 1945372 - RNA, 19 nt, Artificial Sequence
  Description of Artificial Sequence: Synthetic oligonucleotide
gaccuaaaugauuacuuuc

SEQ ID NO: 1945373 - RNA, 19 nt, Artificial Sequence
  Description of Artificial Sequence: Synthetic oligonucleotide
uaacccaacugcuuguaca

SEQ ID NO: 1945374 - RNA, 19 nt, Artificial Sequence
  Description of Artificial Sequence: Synthetic oligonucleotide
ucuguaaguggauccaagu

SEQ ID NO: 1945375 - RNA, 19 nt, Artificial Sequence
  Description of Artificial Sequence: Synthetic oligonucleotide
uucuguaaguggauccaag

SEQ ID NO: 1945376 - RNA, 19 nt, Artificial Sequence
  Description of Artificial Sequence: Synthetic oligonucleotide
guuuauagccuguauuuuc

SEQ ID NO: 1945377 - RNA, 19 nt, Artificial Sequence
  Description of Artificial Sequence: Synthetic oligonucleotide
uuccucauaucauaggcau

SEQ ID NO: 1945378 - RNA, 19 nt, Artificial Sequence
  Description of Artificial Sequence: Synthetic oligonucleotide
cuccauaaguuuagcagcc

SEQ ID NO: 1945379 - RNA, 19 nt, Artificial Sequence
  Description of Artificial Sequence: Synthetic oligonucleotide
cauacugucaaccaugaua

SEQ ID NO: 1945380 - RNA, 19 nt, Artificial Sequence
  Description of Artificial Sequence: Synthetic oligonucleotide
acaggauuuaggaggaggg

SEQ ID NO: 1945381 - RNA, 19 nt, Artificial Sequence
  Description of Artificial Sequence: Synthetic oligonucleotide
gcuauugcucauuggaacg

SEQ ID NO: 1945382 - RNA, 19 nt, Artificial Sequence
  Description of Artificial Sequence: Synthetic oligonucleotide
agaaccacugccuaugguu

SEQ ID NO: 1945383 - RNA, 19 nt, Artificial Sequence
  Description of Artificial Sequence: Synthetic oligonucleotide
uaguacucuaugacugucc

SEQ ID NO: 1945384 - RNA, 19 nt, Artificial Sequence
  Description of Artificial Sequence: Synthetic oligonucleotide
uaagaccuaaaugauuacu

SEQ ID NO: 1945385 - RNA, 19 nt, Artificial Sequence
  Description of Artificial Sequence: Synthetic oligonucleotide
cucugcaacgaugaaauac

SEQ ID NO: 1945386 - RNA, 19 nt, Artificial Sequence
  Description of Artificial Sequence: Synthetic oligonucleotide
ugcaacgaugaaauacucu

SEQ ID NO: 1945387 - RNA, 19 nt, Artificial Sequence
  Description of Artificial Sequence: Synthetic oligonucleotide
aguacucuaugacuguccu

SEQ ID NO: 1945388 - RNA, 19 nt, Artificial Sequence
  Description of Artificial Sequence: Synthetic oligonucleotide
gaacgaugagauuugaagu

SEQ ID NO: 1945389 - RNA, 19 nt, Artificial Sequence
  Description of Artificial Sequence: Synthetic oligonucleotide
uccuguagacacuguaacc

SEQ ID NO: 1945390 - RNA, 19 nt, Artificial Sequence
  Description of Artificial Sequence: Synthetic oligonucleotide
ugcauacugucaaccauga

SEQ ID NO: 1945391 - RNA, 19 nt, Artificial Sequence
  Description of Artificial Sequence: Synthetic oligonucleotide
aacccaacugcuuguacau

SEQ ID NO: 1945392 - RNA, 19 nt, Artificial Sequence
  Description of Artificial Sequence: Synthetic oligonucleotide
uauacugcauacugucaac

SEQ ID NO: 1945393 - RNA, 19 nt, Artificial Sequence
  Description of Artificial Sequence: Synthetic oligonucleotide
augguuauucaauguccuc

SEQ ID NO: 1945394 - RNA, 19 nt, Artificial Sequence
  Description of Artificial Sequence: Synthetic oligonucleotide
auauauauauauauuuaua

SEQ ID NO: 1945395 - RNA, 19 nt, Artificial Sequence
  Description of Artificial Sequence: Synthetic oligonucleotide
ugccuaugguuauucaaug

SEQ ID NO: 1945396 - RNA, 19 nt, Artificial Sequence
  Description of Artificial Sequence: Synthetic oligonucleotide
uguccuguagacacuguaa

SEQ ID NO: 1945397 - RNA, 19 nt, Artificial Sequence
  Description of Artificial Sequence: Synthetic oligonucleotide
ugcucauuggaacgaugag

SEQ ID NO: 1945398 - RNA, 19 nt, Artificial Sequence
  Description of Artificial Sequence: Synthetic oligonucleotide
uuaagaccuaaaugauuac

SEQ ID NO: 1945399 - RNA, 19 nt, Artificial Sequence
  Description of Artificial Sequence: Synthetic oligonucleotide
aucgucgcaggugaaggcc

SEQ ID NO: 1945400 - RNA, 19 nt, Artificial Sequence
  Description of Artificial Sequence: Synthetic oligonucleotide
cuaagaaccacugccuaug

SEQ ID NO: 1945401 - RNA, 19 nt, Artificial Sequence
  Description of Artificial Sequence: Synthetic oligonucleotide
aacaacccuccauaauccu

SEQ ID NO: 1945402 - RNA, 19 nt, Artificial Sequence
  Description of Artificial Sequence: Synthetic oligonucleotide
caagacggcggaauucagg

SEQ ID NO: 1945403 - RNA, 19 nt, Artificial Sequence
  Description of Artificial Sequence: Synthetic oligonucleotide
gaagcggaacagaucgucg

SEQ ID NO: 1945404 - RNA, 19 nt, Artificial Sequence
  Description of Artificial Sequence: Synthetic oligonucleotide
caugauaguggaacguguc

SEQ ID NO: 1945405 - RNA, 19 nt, Artificial Sequence
  Description of Artificial Sequence: Synthetic oligonucleotide
uauacaucucagauuuaua

SEQ ID NO: 1945406 - RNA, 19 nt, Artificial Sequence
  Description of Artificial Sequence: Synthetic oligonucleotide
agaucgucgcaggugaagg

SEQ ID NO: 1945407 - RNA, 19 nt, Artificial Sequence
  Description of Artificial Sequence: Synthetic oligonucleotide
guuauucaauguccucggg

SEQ ID NO: 1945408 - RNA, 19 nt, Artificial Sequence
  Description of Artificial Sequence: Synthetic oligonucleotide
uauaugugcagcagugguu

SEQ ID NO: 1945409 - RNA, 19 nt, Artificial Sequence
  Description of Artificial Sequence: Synthetic oligonucleotide
augagguaaugguaugaug

SEQ ID NO: 1945410 - RNA, 19 nt, Artificial Sequence
  Description of Artificial Sequence: Synthetic oligonucleotide
ugccuaagaaccacugccu

SEQ ID NO: 1945411 - RNA, 19 nt, Artificial Sequence
  Description of Artificial Sequence: Synthetic oligonucleotide
ccuaugaaaauaauauguc

SEQ ID NO: 1945412 - RNA, 19 nt, Artificial Sequence
  Description of Artificial Sequence: Synthetic oligonucleotide
cacaggauuuaggaggagg

SEQ ID NO: 1945413 - RNA, 19 nt, Artificial Sequence
  Description of Artificial Sequence: Synthetic oligonucleotide
gaacauguaugcuauugcu

SEQ ID NO: 1945414 - RNA, 19 nt, Artificial Sequence
  Description of Artificial Sequence: Synthetic oligonucleotide
ugauggauuucuucucagu

SEQ ID NO: 1945415 - RNA, 19 nt, Artificial Sequence
  Description of Artificial Sequence: Synthetic oligonucleotide
cauguugacugcaacuuga

SEQ ID NO: 1945416 - RNA, 19 nt, Artificial Sequence
  Description of Artificial Sequence: Synthetic oligonucleotide
cacauccuaaacaacccuc

SEQ ID NO: 1945417 - RNA, 19 nt, Artificial Sequence
  Description of Artificial Sequence: Synthetic oligonucleotide
cuugauugaauuuuacuau

SEQ ID NO: 1945418 - RNA, 19 nt, Artificial Sequence
  Description of Artificial Sequence: Synthetic oligonucleotide
guaugcuauugcucauugg

SEQ ID NO: 1945419 - RNA, 19 nt, Artificial Sequence
  Description of Artificial Sequence: Synthetic oligonucleotide
uagacacuguaacccaacu

SEQ ID NO: 1945420 - RNA, 19 nt, Artificial Sequence
  Description of Artificial Sequence: Synthetic oligonucleotide
gagguaaugguaugaugga

SEQ ID NO: 1945421 - RNA, 19 nt, Artificial Sequence
  Description of Artificial Sequence: Synthetic oligonucleotide
uuuagcagccaagccaaga

SEQ ID NO: 1945422 - RNA, 19 nt, Artificial Sequence
  Description of Artificial Sequence: Synthetic oligonucleotide
gaucauccuaugaaaauaa

SEQ ID NO: 1945423 - RNA, 19 nt, Artificial Sequence
  Description of Artificial Sequence: Synthetic oligonucleotide
gauuacuuuccuccuaaua

SEQ ID NO: 1945424 - RNA, 19 nt, Artificial Sequence
  Description of Artificial Sequence: Synthetic oligonucleotide
auuuuacuauacaucucag

SEQ ID NO: 1945425 - RNA, 19 nt, Artificial Sequence
  Description of Artificial Sequence: Synthetic oligonucleotide
auagucaacaguguauuuu

SEQ ID NO: 1945426 - RNA, 19 nt, Artificial Sequence
  Description of Artificial Sequence: Synthetic oligonucleotide
agaccuaaaugauuacuuu

SEQ ID NO: 1945427 - RNA, 19 nt, Artificial Sequence
  Description of Artificial Sequence: Synthetic oligonucleotide
acugccuaugguuauucaa

SEQ ID NO: 1945428 - RNA, 19 nt, Artificial Sequence
  Description of Artificial Sequence: Synthetic oligonucleotide
uacccauaauauaacccau

SEQ ID NO: 1945429 - RNA, 19 nt, Artificial Sequence
  Description of Artificial Sequence: Synthetic oligonucleotide
aaccaugauaguggaacgu

SEQ ID NO: 1945430 - RNA, 19 nt, Artificial Sequence
  Description of Artificial Sequence: Synthetic oligonucleotide
cuaugacuguccuguagac

SEQ ID NO: 1945431 - RNA, 19 nt, Artificial Sequence
  Description of Artificial Sequence: Synthetic oligonucleotide
ccuguagacacuguaaccc

SEQ ID NO: 1945432 - RNA, 19 nt, Artificial Sequence
  Description of Artificial Sequence: Synthetic oligonucleotide
agccuguauuuucaugaag

SEQ ID NO: 1945433 - RNA, 19 nt, Artificial Sequence
  Description of Artificial Sequence: Synthetic oligonucleotide
agaucauccuaugaaaaua

SEQ ID NO: 1945434 - RNA, 19 nt, Artificial Sequence
  Description of Artificial Sequence: Synthetic oligonucleotide
gaaagugcuuuccucauau

SEQ ID NO: 1945435 - RNA, 19 nt, Artificial Sequence
  Description of Artificial Sequence: Synthetic oligonucleotide
agcuacugagccuucugcu

SEQ ID NO: 1945436 - RNA, 19 nt, Artificial Sequence
  Description of Artificial Sequence: Synthetic oligonucleotide
aguuuagcagccaagccaa

SEQ ID NO: 1945437 - RNA, 19 nt, Artificial Sequence
  Description of Artificial Sequence: Synthetic oligonucleotide
agcguggucaucgcgccgc

SEQ ID NO: 1945438 - RNA, 19 nt, Artificial Sequence
  Description of Artificial Sequence: Synthetic oligonucleotide
auuggaacgaugagauuug

SEQ ID NO: 1945439 - RNA, 19 nt, Artificial Sequence
  Description of Artificial Sequence: Synthetic oligonucleotide
gaacagaucgucgcaggug

SEQ ID NO: 1945440 - RNA, 19 nt, Artificial Sequence
  Description of Artificial Sequence: Synthetic oligonucleotide
ugaagcggaacagaucguc

SEQ ID NO: 1945441 - RNA, 19 nt, Artificial Sequence
  Description of Artificial Sequence: Synthetic oligonucleotide
accaugauaguggaacgug

SEQ ID NO: 1945442 - RNA, 19 nt, Artificial Sequence
  Description of Artificial Sequence: Synthetic oligonucleotide
aguggaacguguccuucug

SEQ ID NO: 1945443 - RNA, 19 nt, Artificial Sequence
  Description of Artificial Sequence: Synthetic oligonucleotide
ugcaacuugauuggacacu

SEQ ID NO: 1945444 - RNA, 19 nt, Artificial Sequence
  Description of Artificial Sequence: Synthetic oligonucleotide
ucuggaacaccugccuaag

SEQ ID NO: 1945445 - RNA, 19 nt, Artificial Sequence
  Description of Artificial Sequence: Synthetic oligonucleotide
cucauuggaacgaugagau

SEQ ID NO: 1945446 - RNA, 19 nt, Artificial Sequence
  Description of Artificial Sequence: Synthetic oligonucleotide
gaucgucgcaggugaaggc

SEQ ID NO: 1945447 - RNA, 19 nt, Artificial Sequence
  Description of Artificial Sequence: Synthetic oligonucleotide
uggucaucgcgccgcagcc

SEQ ID NO: 1945448 - RNA, 19 nt, Artificial Sequence
  Description of Artificial Sequence: Synthetic oligonucleotide
uggaacgaugagauuugaa

SEQ ID NO: 1945449 - RNA, 19 nt, Artificial Sequence
  Description of Artificial Sequence: Synthetic oligonucleotide
auccuaaacaacccuccau

SEQ ID NO: 1945450 - RNA, 19 nt, Artificial Sequence
  Description of Artificial Sequence: Synthetic oligonucleotide
uguccaugccacucuuccc

SEQ ID NO: 1945451 - RNA, 19 nt, Artificial Sequence
  Description of Artificial Sequence: Synthetic oligonucleotide
aucccauaaguuucuguaa

SEQ ID NO: 1945452 - RNA, 19 nt, Artificial Sequence
  Description of Artificial Sequence: Synthetic oligonucleotide
ccuaugguuauucaauguc

SEQ ID NO: 1945453 - RNA, 19 nt, Artificial Sequence
  Description of Artificial Sequence: Synthetic oligonucleotide
gagacaccacauccuaaac

SEQ ID NO: 1945454 - RNA, 19 nt, Artificial Sequence
  Description of Artificial Sequence: Synthetic oligonucleotide
caagguacuguaaguaaaa

SEQ ID NO: 1945455 - RNA, 19 nt, Artificial Sequence
  Description of Artificial Sequence: Synthetic oligonucleotide
gagggagucuuuccuuggc

SEQ ID NO: 1945456 - RNA, 19 nt, Artificial Sequence
  Description of Artificial Sequence: Synthetic oligonucleotide
ugaagucuuuaagaccuaa

SEQ ID NO: 1945457 - RNA, 19 nt, Artificial Sequence
  Description of Artificial Sequence: Synthetic oligonucleotide
ucgucaggcuccccguugc

SEQ ID NO: 1945458 - RNA, 19 nt, Artificial Sequence
  Description of Artificial Sequence: Synthetic oligonucleotide
cucagcgcgaccccgcgcc

SEQ ID NO: 1945459 - RNA, 19 nt, Artificial Sequence
  Description of Artificial Sequence: Synthetic oligonucleotide
auauaugcuuuuaaagcuu

SEQ ID NO: 1945460 - RNA, 19 nt, Artificial Sequence
  Description of Artificial Sequence: Synthetic oligonucleotide
acuauggcaaacaguuuga

SEQ ID NO: 1945461 - RNA, 19 nt, Artificial Sequence
  Description of Artificial Sequence: Synthetic oligonucleotide
ggaacaccugccuaagaac

SEQ ID NO: 1945462 - RNA, 19 nt, Artificial Sequence
  Description of Artificial Sequence: Synthetic oligonucleotide
agacggcggaauucagggg

SEQ ID NO: 1945463 - RNA, 19 nt, Artificial Sequence
  Description of Artificial Sequence: Synthetic oligonucleotide
gaacguguccuucugacuu

SEQ ID NO: 1945464 - RNA, 19 nt, Artificial Sequence
  Description of Artificial Sequence: Synthetic oligonucleotide
guggucaucgcgccgcagc

SEQ ID NO: 1945465 - RNA, 19 nt, Artificial Sequence
  Description of Artificial Sequence: Synthetic oligonucleotide
cauuaguucuccuccaggu

SEQ ID NO: 1945466 - RNA, 19 nt, Artificial Sequence
  Description of Artificial Sequence: Synthetic oligonucleotide
caguguauuuuacuauaca

SEQ ID NO: 1945467 - RNA, 19 nt, Artificial Sequence
  Description of Artificial Sequence: Synthetic oligonucleotide
guacauguugacugcaacu

SEQ ID NO: 1945468 - RNA, 19 nt, Artificial Sequence
  Description of Artificial Sequence: Synthetic oligonucleotide
auaacccauuaguucuccu

SEQ ID NO: 1945469 - RNA, 19 nt, Artificial Sequence
  Description of Artificial Sequence: Synthetic oligonucleotide
aguaaguuuauagccugua

SEQ ID NO: 1945470 - RNA, 19 nt, Artificial Sequence
  Description of Artificial Sequence: Synthetic oligonucleotide
gacugcaacuugauuggac

SEQ ID NO: 1945471 - RNA, 19 nt, Artificial Sequence
  Description of Artificial Sequence: Synthetic oligonucleotide
uugaagcggaacagaucgu

SEQ ID NO: 1945472 - RNA, 19 nt, Artificial Sequence
  Description of Artificial Sequence: Synthetic oligonucleotide
gaugagauuugaaguaagu

SEQ ID NO: 1945473 - RNA, 19 nt, Artificial Sequence
  Description of Artificial Sequence: Synthetic oligonucleotide
acgaugagauuugaaguaa

SEQ ID NO: 1945474 - RNA, 19 nt, Artificial Sequence
  Description of Artificial Sequence: Synthetic oligonucleotide
aaggcccggagcgugguca

SEQ ID NO: 1945475 - RNA, 19 nt, Artificial Sequence
  Description of Artificial Sequence: Synthetic oligonucleotide
cauuggaacgaugagauuu

SEQ ID NO: 1945476 - RNA, 19 nt, Artificial Sequence
  Description of Artificial Sequence: Synthetic oligonucleotide
cuaguaacuccauaaguuu

SEQ ID NO: 1945477 - RNA, 19 nt, Artificial Sequence
  Description of Artificial Sequence: Synthetic oligonucleotide
guaacccaacugcuuguac

SEQ ID NO: 1945478 - RNA, 19 nt, Artificial Sequence
  Description of Artificial Sequence: Synthetic oligonucleotide
uccauaaguuuagcagcca

SEQ ID NO: 1945479 - RNA, 19 nt, Artificial Sequence
  Description of Artificial Sequence: Synthetic oligonucleotide
agccaagacggcggaauuc

SEQ ID NO: 1945480 - RNA, 19 nt, Artificial Sequence
  Description of Artificial Sequence: Synthetic oligonucleotide
cugcaacgaugaaauacuc

SEQ ID NO: 1945481 - RNA, 19 nt, Artificial Sequence
  Description of Artificial Sequence: Synthetic oligonucleotide
aagcccgcucagcgcgacc

SEQ ID NO: 1945482 - RNA, 19 nt, Artificial Sequence
  Description of Artificial Sequence: Synthetic oligonucleotide
gaagucuuuaagaccuaaa

SEQ ID NO: 1945483 - RNA, 19 nt, Artificial Sequence
  Description of Artificial Sequence: Synthetic oligonucleotide
guacucuaugacuguccug

SEQ ID NO: 1945484 - RNA, 19 nt, Artificial Sequence
  Description of Artificial Sequence: Synthetic oligonucleotide
cucuaguaacuccauaagu

SEQ ID NO: 1945485 - RNA, 19 nt, Artificial Sequence
  Description of Artificial Sequence: Synthetic oligonucleotide
ccauaaguuucuguaagug

SEQ ID NO: 1945486 - RNA, 19 nt, Artificial Sequence
  Description of Artificial Sequence: Synthetic oligonucleotide
aacuugucuggaacaccug

SEQ ID NO: 1945487 - RNA, 19 nt, Artificial Sequence
  Description of Artificial Sequence: Synthetic oligonucleotide
guuugaacauguaugcuau

SEQ ID NO: 1945488 - RNA, 19 nt, Artificial Sequence
  Description of Artificial Sequence: Synthetic oligonucleotide
guagacacuguaacccaac

SEQ ID NO: 1945489 - RNA, 19 nt, Artificial Sequence
  Description of Artificial Sequence: Synthetic oligonucleotide
uuccucuaguaacuccaua

SEQ ID NO: 1945490 - RNA, 19 nt, Artificial Sequence
  Description of Artificial Sequence: Synthetic oligonucleotide
uauugcucauuggaacgau

SEQ ID NO: 1945491 - RNA, 19 nt, Artificial Sequence
  Description of Artificial Sequence: Synthetic oligonucleotide
uaaguggauccaaguuaau

SEQ ID NO: 1945492 - RNA, 19 nt, Artificial Sequence
  Description of Artificial Sequence: Synthetic oligonucleotide
ccauuaguucuccuccagg

SEQ ID NO: 1945493 - RNA, 19 nt, Artificial Sequence
  Description of Artificial Sequence: Synthetic oligonucleotide
agauuugaaguaaguuuau

SEQ ID NO: 1945494 - RNA, 19 nt, Artificial Sequence
  Description of Artificial Sequence: Synthetic oligonucleotide
cuuuaagaccuaaaugauu

SEQ ID NO: 1945495 - RNA, 19 nt, Artificial Sequence
  Description of Artificial Sequence: Synthetic oligonucleotide
uguaacccaacugcuugua

SEQ ID NO: 1945496 - RNA, 19 nt, Artificial Sequence
  Description of Artificial Sequence: Synthetic oligonucleotide
agguaaugguaugauggau

SEQ ID NO: 1945497 - RNA, 19 nt, Artificial Sequence
  Description of Artificial Sequence: Synthetic oligonucleotide
ugacguguccaugccacuc

SEQ ID NO: 1945498 - RNA, 19 nt, Artificial Sequence
  Description of Artificial Sequence: Synthetic oligonucleotide
gccacucuucccuagcuac

SEQ ID NO: 1945499 - RNA, 19 nt, Artificial Sequence
  Description of Artificial Sequence: Synthetic oligonucleotide
uuggaacgaugagauuuga

SEQ ID NO: 1945500 - RNA, 19 nt, Artificial Sequence
  Description of Artificial Sequence: Synthetic oligonucleotide
augaaauacucuggccagu

SEQ ID NO: 1945501 - RNA, 19 nt, Artificial Sequence
  Description of Artificial Sequence: Synthetic oligonucleotide
cgaugaaauacucuggcca

SEQ ID NO: 1945502 - RNA, 19 nt, Artificial Sequence
  Description of Artificial Sequence: Synthetic oligonucleotide
acuugauuggacacucuua

SEQ ID NO: 1945503 - RNA, 19 nt, Artificial Sequence
  Description of Artificial Sequence: Synthetic oligonucleotide
cacucuucccuagcuacug

SEQ ID NO: 1945504 - RNA, 19 nt, Artificial Sequence
  Description of Artificial Sequence: Synthetic oligonucleotide
cuauacaucucagauuuau

SEQ ID NO: 1945505 - RNA, 19 nt, Artificial Sequence
  Description of Artificial Sequence: Synthetic oligonucleotide
acucuggccagugggcaag

SEQ ID NO: 1945506 - RNA, 19 nt, Artificial Sequence
  Description of Artificial Sequence: Synthetic oligonucleotide
cagaucgucgcaggugaag

SEQ ID NO: 1945507 - RNA, 19 nt, Artificial Sequence
  Description of Artificial Sequence: Synthetic oligonucleotide
cugcuuuacccauaauaua

SEQ ID NO: 1945508 - RNA, 19 nt, Artificial Sequence
  Description of Artificial Sequence: Synthetic oligonucleotide
gcucauuggaacgaugaga

SEQ ID NO: 1945509 - RNA, 19 nt, Artificial Sequence
  Description of Artificial Sequence: Synthetic oligonucleotide
ugccacucuucccuagcua

SEQ ID NO: 1945510 - RNA, 19 nt, Artificial Sequence
  Description of Artificial Sequence: Synthetic oligonucleotide
uccucgucaggcuccccgu

SEQ ID NO: 1945511 - RNA, 19 nt, Artificial Sequence
  Description of Artificial Sequence: Synthetic oligonucleotide
ucauuggaacgaugagauu

SEQ ID NO: 1945512 - RNA, 19 nt, Artificial Sequence
  Description of Artificial Sequence: Synthetic oligonucleotide
aacccuccauaauccugaa

SEQ ID NO: 1945513 - RNA, 19 nt, Artificial Sequence
  Description of Artificial Sequence: Synthetic oligonucleotide
ggugccucugcaacgauga

SEQ ID NO: 1945514 - RNA, 19 nt, Artificial Sequence
  Description of Artificial Sequence: Synthetic oligonucleotide
ugacugcaacuugauugga

SEQ ID NO: 1945515 - RNA, 19 nt, Artificial Sequence
  Description of Artificial Sequence: Synthetic oligonucleotide
uacugagccuucugcuuua

SEQ ID NO: 1945516 - RNA, 19 nt, Artificial Sequence
  Description of Artificial Sequence: Synthetic oligonucleotide
gcaacuugauuggacacuc

SEQ ID NO: 1945517 - RNA, 19 nt, Artificial Sequence
  Description of Artificial Sequence: Synthetic oligonucleotide
gcuuuacccauaauauaac

SEQ ID NO: 1945518 - RNA, 19 nt, Artificial Sequence
  Description of Artificial Sequence: Synthetic oligonucleotide
cuccauaauccugaauuaa

SEQ ID NO: 1945519 - RNA, 19 nt, Artificial Sequence
  Description of Artificial Sequence: Synthetic oligonucleotide
gagcguggucaucgcgccg

SEQ ID NO: 1945520 - RNA, 19 nt, Artificial Sequence
  Description of Artificial Sequence: Synthetic oligonucleotide
cugccuaugguuauucaau

SEQ ID NO: 1945521 - RNA, 19 nt, Artificial Sequence
  Description of Artificial Sequence: Synthetic oligonucleotide
cucacaggaugagguaaug

SEQ ID NO: 1945522 - RNA, 19 nt, Artificial Sequence
  Description of Artificial Sequence: Synthetic oligonucleotide
accugccuaagaaccacug

SEQ ID NO: 1945523 - RNA, 19 nt, Artificial Sequence
  Description of Artificial Sequence: Synthetic oligonucleotide
aucauccuaugaaaauaau

SEQ ID NO: 1945524 - RNA, 19 nt, Artificial Sequence
  Description of Artificial Sequence: Synthetic oligonucleotide
auguaugcuauugcucauu

SEQ ID NO: 1945525 - RNA, 19 nt, Artificial Sequence
  Description of Artificial Sequence: Synthetic oligonucleotide
cuaaacaacccuccauaau

SEQ ID NO: 1945526 - RNA, 19 nt, Artificial Sequence
  Description of Artificial Sequence: Synthetic oligonucleotide
ccugccuaagaaccacugc

SEQ ID NO: 1945527 - RNA, 19 nt, Artificial Sequence
  Description of Artificial Sequence: Synthetic oligonucleotide
gacguguccaugccacucu

SEQ ID NO: 1945528 - RNA, 19 nt, Artificial Sequence
  Description of Artificial Sequence: Synthetic oligonucleotide
gagucuuuccuuggcauau

SEQ ID NO: 1945529 - RNA, 19 nt, Artificial Sequence
  Description of Artificial Sequence: Synthetic oligonucleotide
acccauaauauaacccauu

SEQ ID NO: 1945530 - RNA, 19 nt, Artificial Sequence
  Description of Artificial Sequence: Synthetic oligonucleotide
ggauccaaguuaauguugu

SEQ ID NO: 1945531 - RNA, 19 nt, Artificial Sequence
  Description of Artificial Sequence: Synthetic oligonucleotide
caggauuuaggaggaggga

SEQ ID NO: 1945532 - RNA, 19 nt, Artificial Sequence
  Description of Artificial Sequence: Synthetic oligonucleotide
ccuaauagagcuccaagau

SEQ ID NO: 1945533 - RNA, 19 nt, Artificial Sequence
  Description of Artificial Sequence: Synthetic oligonucleotide
ucagcgcgaccccgcgccc

SEQ ID NO: 1945534 - RNA, 19 nt, Artificial Sequence
  Description of Artificial Sequence: Synthetic oligonucleotide
gguaaugguaugauggauu

SEQ ID NO: 1945535 - RNA, 19 nt, Artificial Sequence
  Description of Artificial Sequence: Synthetic oligonucleotide
aggugccucugcaacgaug

SEQ ID NO: 1945536 - RNA, 19 nt, Artificial Sequence
  Description of Artificial Sequence: Synthetic oligonucleotide
cuauggcaaacaguuugaa

SEQ ID NO: 1945537 - RNA, 19 nt, Artificial Sequence
  Description of Artificial Sequence: Synthetic oligonucleotide
cugugacguguccaugcca

SEQ ID NO: 1945538 - RNA, 19 nt, Artificial Sequence
  Description of Artificial Sequence: Synthetic oligonucleotide
gccaagacggcggaauuca

SEQ ID NO: 1945539 - RNA, 19 nt, Artificial Sequence
  Description of Artificial Sequence: Synthetic oligonucleotide
gcggaacagaucgucgcag

SEQ ID NO: 1945540 - RNA, 19 nt, Artificial Sequence
  Description of Artificial Sequence: Synthetic oligonucleotide
cacugccuaugguuauuca

SEQ ID NO: 1945541 - RNA, 19 nt, Artificial Sequence
  Description of Artificial Sequence: Synthetic oligonucleotide
cggaacagaucgucgcagg

SEQ ID NO: 1945542 - RNA, 19 nt, Artificial Sequence
  Description of Artificial Sequence: Synthetic oligonucleotide
cucagugucucuggaaagu

SEQ ID NO: 1945543 - RNA, 19 nt, Artificial Sequence
  Description of Artificial Sequence: Synthetic oligonucleotide
ggaaucccauaaguuucug

SEQ ID NO: 1945544 - RNA, 19 nt, Artificial Sequence
  Description of Artificial Sequence: Synthetic oligonucleotide
cuguaacccaacugcuugu

SEQ ID NO: 1945545 - RNA, 19 nt, Artificial Sequence
  Description of Artificial Sequence: Synthetic oligonucleotide
acguguccaugccacucuu

SEQ ID NO: 1945546 - RNA, 19 nt, Artificial Sequence
  Description of Artificial Sequence: Synthetic oligonucleotide
ccauaaguuuagcagccaa

SEQ ID NO: 1945547 - RNA, 19 nt, Artificial Sequence
  Description of Artificial Sequence: Synthetic oligonucleotide
cuacugagccuucugcuuu

SEQ ID NO: 1945548 - RNA, 19 nt, Artificial Sequence
  Description of Artificial Sequence: Synthetic oligonucleotide
cuggaacaccugccuaaga

SEQ ID NO: 1945549 - RNA, 19 nt, Artificial Sequence
  Description of Artificial Sequence: Synthetic oligonucleotide
ggcauauacugcauacugu

SEQ ID NO: 1945550 - RNA, 19 nt, Artificial Sequence
  Description of Artificial Sequence: Synthetic oligonucleotide
cauguaugcuauugcucau

SEQ ID NO: 1945551 - RNA, 19 nt, Artificial Sequence
  Description of Artificial Sequence: Synthetic oligonucleotide
cauagucaacaguguauuu

SEQ ID NO: 1945552 - RNA, 19 nt, Artificial Sequence
  Description of Artificial Sequence: Synthetic oligonucleotide
augguaugauggauuucuu

SEQ ID NO: 1945553 - RNA, 19 nt, Artificial Sequence
  Description of Artificial Sequence: Synthetic oligonucleotide
gccuaugguuauucaaugu

SEQ ID NO: 1945554 - RNA, 19 nt, Artificial Sequence
  Description of Artificial Sequence: Synthetic oligonucleotide
ccaagacggcggaauucag

SEQ ID NO: 1945555 - RNA, 19 nt, Artificial Sequence
  Description of Artificial Sequence: Synthetic oligonucleotide
gaaggcccggagcgugguc

SEQ ID NO: 1945556 - RNA, 19 nt, Artificial Sequence
  Description of Artificial Sequence: Synthetic oligonucleotide
acuauacaucucagauuua

SEQ ID NO: 1945557 - RNA, 19 nt, Artificial Sequence
  Description of Artificial Sequence: Synthetic oligonucleotide
ccuccauaauccugaauua

SEQ ID NO: 1945558 - RNA, 19 nt, Artificial Sequence
  Description of Artificial Sequence: Synthetic oligonucleotide
gccuaagaaccacugccua

SEQ ID NO: 1945559 - RNA, 19 nt, Artificial Sequence
  Description of Artificial Sequence: Synthetic oligonucleotide
ggaacguguccuucugacu

SEQ ID NO: 1945560 - RNA, 19 nt, Artificial Sequence
  Description of Artificial Sequence: Synthetic oligonucleotide
caagccaagacggcggaau

SEQ ID NO: 1945561 - RNA, 19 nt, Artificial Sequence
  Description of Artificial Sequence: Synthetic oligonucleotide
cgcacuaccggaagugcuc

SEQ ID NO: 1945562 - RNA, 19 nt, Artificial Sequence
  Description of Artificial Sequence: Synthetic oligonucleotide
cacuguaacccaacugcuu

SEQ ID NO: 1945563 - RNA, 19 nt, Artificial Sequence
  Description of Artificial Sequence: Synthetic oligonucleotide
gucaaccaugauaguggaa

SEQ ID NO: 1945564 - RNA, 19 nt, Artificial Sequence
  Description of Artificial Sequence: Synthetic oligonucleotide
ccaugauaguggaacgugu

SEQ ID NO: 1945565 - RNA, 19 nt, Artificial Sequence
  Description of Artificial Sequence: Synthetic oligonucleotide
gcccgcacuaccggaagug

SEQ ID NO: 1945566 - RNA, 19 nt, Artificial Sequence
  Description of Artificial Sequence: Synthetic oligonucleotide
ccggagcguggucaucgcg

SEQ ID NO: 1945567 - RNA, 19 nt, Artificial Sequence
  Description of Artificial Sequence: Synthetic oligonucleotide
caagcccgcucagcgcgac

SEQ ID NO: 1945568 - RNA, 19 nt, Artificial Sequence
  Description of Artificial Sequence: Synthetic oligonucleotide
cagcgcgaccccgcgcccg

SEQ ID NO: 1945569 - RNA, 19 nt, Artificial Sequence
  Description of Artificial Sequence: Synthetic oligonucleotide
aggcccggagcguggucau

SEQ ID NO: 1945570 - RNA, 19 nt, Artificial Sequence
  Description of Artificial Sequence: Synthetic oligonucleotide
cccauaaguuucuguaagu

SEQ ID NO: 1945571 - RNA, 19 nt, Artificial Sequence
  Description of Artificial Sequence: Synthetic oligonucleotide
gccaagccaagacggcgga

SEQ ID NO: 1945572 - RNA, 19 nt, Artificial Sequence
  Description of Artificial Sequence: Synthetic oligonucleotide
cgucgcaggugaaggcccg

SEQ ID NO: 1945573 - RNA, 19 nt, Artificial Sequence
  Description of Artificial Sequence: Synthetic oligonucleotide
cccgcacuaccggaagugc

SEQ ID NO: 1945574 - RNA, 19 nt, Artificial Sequence
  Description of Artificial Sequence: Synthetic oligonucleotide
gugacguguccaugccacu

SEQ ID NO: 1945575 - RNA, 19 nt, Artificial Sequence
  Description of Artificial Sequence: Synthetic oligonucleotide
ccuaagaaccacugccuau

SEQ ID NO: 1945576 - RNA, 19 nt, Artificial Sequence
  Description of Artificial Sequence: Synthetic oligonucleotide
gcgcccgcacuaccggaag

SEQ ID NO: 1945577 - RNA, 19 nt, Artificial Sequence
  Description of Artificial Sequence: Synthetic oligonucleotide
ccaggugccucugcaacga

SEQ ID NO: 1945578 - RNA, 19 nt, Artificial Sequence
  Description of Artificial Sequence: Synthetic oligonucleotide
ccacauccuaaacaacccu

SEQ ID NO: 1945579 - RNA, 19 nt, Artificial Sequence
  Description of Artificial Sequence: Synthetic oligonucleotide
ccuccuaauagagcuccaa

SEQ ID NO: 1945580 - RNA, 19 nt, Artificial Sequence
  Description of Artificial Sequence: Synthetic oligonucleotide
ggucaucgcgccgcagcca

SEQ ID NO: 1945581 - RNA, 19 nt, Artificial Sequence
  Description of Artificial Sequence: Synthetic oligonucleotide
cguguccaugccacucuuc

SEQ ID NO: 1945582 - RNA, 19 nt, Artificial Sequence
  Description of Artificial Sequence: Synthetic oligonucleotide
cguguccuucugacuuagc

SEQ ID NO: 1945583 - RNA, 19 nt, Artificial Sequence
  Description of Artificial Sequence: Synthetic oligonucleotide
ccucacaggaugagguaau

SEQ ID NO: 1945584 - RNA, 19 nt, Artificial Sequence
  Description of Artificial Sequence: Synthetic oligonucleotide
ccccguugcuggcugagua

SEQ ID NO: 1945585 - RNA, 19 nt, Artificial Sequence
  Description of Artificial Sequence: Synthetic oligonucleotide
ccacucuucccuagcuacu

SEQ ID NO: 1945586 - RNA, 19 nt, Artificial Sequence
  Description of Artificial Sequence: Synthetic oligonucleotide
ccgcacuaccggaagugcu

SEQ ID NO: 1945587 - RNA, 19 nt, Artificial Sequence
  Description of Artificial Sequence: Synthetic oligonucleotide
gcuccccguugcuggcuga

SEQ ID NO: 1945588 - RNA, 19 nt, Artificial Sequence
  Description of Artificial Sequence: Synthetic oligonucleotide
gcguggucaucgcgccgca

SEQ ID NO: 1945589 - RNA, 19 nt, Artificial Sequence
  Description of Artificial Sequence: Synthetic oligonucleotide
ccucugcaacgaugaaaua

SEQ ID NO: 1945590 - RNA, 19 nt, Artificial Sequence
  Description of Artificial Sequence: Synthetic oligonucleotide
ccaagcccgcucagcgcga

SEQ ID NO: 1945591 - RNA, 19 nt, Artificial Sequence
  Description of Artificial Sequence: Synthetic oligonucleotide
ccguugcuggcugaguagu

SEQ ID NO: 1945592 - RNA, 19 nt, Artificial Sequence
  Description of Artificial Sequence: Synthetic oligonucleotide
cguugcuggcugaguagua

SEQ ID NO: 1945593 - RNA, 19 nt, Artificial Sequence
  Description of Artificial Sequence: Synthetic oligonucleotide
ccaagccaagacggcggaa

SEQ ID NO: 1945594 - RNA, 19 nt, Artificial Sequence
  Description of Artificial Sequence: Synthetic oligonucleotide
cgcgcccgcacuaccggaa

SEQ ID NO: 1945595 - RNA, 19 nt, Artificial Sequence
  Description of Artificial Sequence: Synthetic oligonucleotide
ccucgucaggcuccccguu

SEQ ID NO: 1945596 - RNA, 19 nt, Artificial Sequence
  Description of Artificial Sequence: Synthetic oligonucleotide
cgcccgcacuaccggaagu

SEQ ID NO: 1945597 - RNA, 19 nt, Artificial Sequence
  Description of Artificial Sequence: Synthetic oligonucleotide
aaauaagauaaucaagugc

SEQ ID NO: 1945598 - RNA, 19 nt, Artificial Sequence
  Description of Artificial Sequence: Synthetic oligonucleotide
uagaaaauggaaaaugugg

SEQ ID NO: 1945599 - RNA, 19 nt, Artificial Sequence
  Description of Artificial Sequence: Synthetic oligonucleotide
uuuggcagcauaaauauug

SEQ ID NO: 1945600 - RNA, 19 nt, Artificial Sequence
  Description of Artificial Sequence: Synthetic oligonucleotide
aggauuaaaacucaggucu

SEQ ID NO: 1945601 - RNA, 19 nt, Artificial Sequence
  Description of Artificial Sequence: Synthetic oligonucleotide
aacuccauuauguacauga

SEQ ID NO: 1945602 - RNA, 19 nt, Artificial Sequence
  Description of Artificial Sequence: Synthetic oligonucleotide
caauaaugacacaagaucc

SEQ ID NO: 1945603 - RNA, 19 nt, Artificial Sequence
  Description of Artificial Sequence: Synthetic oligonucleotide
uuccaaaccaguuugauac

SEQ ID NO: 1945604 - RNA, 19 nt, Artificial Sequence
  Description of Artificial Sequence: Synthetic oligonucleotide
caugauuugcccaacagcc

SEQ ID NO: 1945605 - RNA, 19 nt, Artificial Sequence
  Description of Artificial Sequence: Synthetic oligonucleotide
uuuguuguugaucacugag

SEQ ID NO: 1945606 - RNA, 19 nt, Artificial Sequence
  Description of Artificial Sequence: Synthetic oligonucleotide
auaaauauuggcuuccucu

SEQ ID NO: 1945607 - RNA, 19 nt, Artificial Sequence
  Description of Artificial Sequence: Synthetic oligonucleotide
ugagguaguauuauuaacu

SEQ ID NO: 1945608 - RNA, 19 nt, Artificial Sequence
  Description of Artificial Sequence: Synthetic oligonucleotide
uuagagacuguguucaagg

SEQ ID NO: 1945609 - RNA, 19 nt, Artificial Sequence
  Description of Artificial Sequence: Synthetic oligonucleotide
uuagacaauguagagaugc

SEQ ID NO: 1945610 - RNA, 19 nt, Artificial Sequence
  Description of Artificial Sequence: Synthetic oligonucleotide
accggauucgcuuauuucc

SEQ ID NO: 1945611 - RNA, 19 nt, Artificial Sequence
  Description of Artificial Sequence: Synthetic oligonucleotide
gaauguuagguguugagug

SEQ ID NO: 1945612 - RNA, 19 nt, Artificial Sequence
  Description of Artificial Sequence: Synthetic oligonucleotide
aguauuauuaacuccauua

SEQ ID NO: 1945613 - RNA, 19 nt, Artificial Sequence
  Description of Artificial Sequence: Synthetic oligonucleotide
ucauucagaauuucugugg

SEQ ID NO: 1945614 - RNA, 19 nt, Artificial Sequence
  Description of Artificial Sequence: Synthetic oligonucleotide
uguauagaauguuaggugu

SEQ ID NO: 1945615 - RNA, 19 nt, Artificial Sequence
  Description of Artificial Sequence: Synthetic oligonucleotide
ugacauaucacugaugccc

SEQ ID NO: 1945616 - RNA, 19 nt, Artificial Sequence
  Description of Artificial Sequence: Synthetic oligonucleotide
gacacaagauccuagauga

SEQ ID NO: 1945617 - RNA, 19 nt, Artificial Sequence
  Description of Artificial Sequence: Synthetic oligonucleotide
uccauuauguacaugauuu

SEQ ID NO: 1945618 - RNA, 19 nt, Artificial Sequence
  Description of Artificial Sequence: Synthetic oligonucleotide
aaauuuaccuauguucuuc

SEQ ID NO: 1945619 - RNA, 19 nt, Artificial Sequence
  Description of Artificial Sequence: Synthetic oligonucleotide
aggacaauaaauaagauaa

SEQ ID NO: 1945620 - RNA, 19 nt, Artificial Sequence
  Description of Artificial Sequence: Synthetic oligonucleotide
aaucaagugcucuguauag

SEQ ID NO: 1945621 - RNA, 19 nt, Artificial Sequence
  Description of Artificial Sequence: Synthetic oligonucleotide
aaugggaacugucccaagg

SEQ ID NO: 1945622 - RNA, 19 nt, Artificial Sequence
  Description of Artificial Sequence: Synthetic oligonucleotide
ugaguguuaaugaaaacaa

SEQ ID NO: 1945623 - RNA, 19 nt, Artificial Sequence
  Description of Artificial Sequence: Synthetic oligonucleotide
aacaauaagggcagagacc

SEQ ID NO: 1945624 - RNA, 19 nt, Artificial Sequence
  Description of Artificial Sequence: Synthetic oligonucleotide
uugaguaagaccugaaaga

SEQ ID NO: 1945625 - RNA, 19 nt, Artificial Sequence
  Description of Artificial Sequence: Synthetic oligonucleotide
aagauaaucaagugcucug

SEQ ID NO: 1945626 - RNA, 19 nt, Artificial Sequence
  Description of Artificial Sequence: Synthetic oligonucleotide
aauguagagaugcucuaug

SEQ ID NO: 1945627 - RNA, 19 nt, Artificial Sequence
  Description of Artificial Sequence: Synthetic oligonucleotide
agaaugaacaauaagggca

SEQ ID NO: 1945628 - RNA, 19 nt, Artificial Sequence
  Description of Artificial Sequence: Synthetic oligonucleotide
ugucuaaugacagaguaug

SEQ ID NO: 1945629 - RNA, 19 nt, Artificial Sequence
  Description of Artificial Sequence: Synthetic oligonucleotide
uuauguacaugauuugccc

SEQ ID NO: 1945630 - RNA, 19 nt, Artificial Sequence
  Description of Artificial Sequence: Synthetic oligonucleotide
uuuaccuauguucuucuug

SEQ ID NO: 1945631 - RNA, 19 nt, Artificial Sequence
  Description of Artificial Sequence: Synthetic oligonucleotide
uguuguugaucacugagcu

SEQ ID NO: 1945632 - RNA, 19 nt, Artificial Sequence
  Description of Artificial Sequence: Synthetic oligonucleotide
uuugauaccugggagacug

SEQ ID NO: 1945633 - RNA, 19 nt, Artificial Sequence
  Description of Artificial Sequence: Synthetic oligonucleotide
gagaaugaacaauaagggc

SEQ ID NO: 1945634 - RNA, 19 nt, Artificial Sequence
  Description of Artificial Sequence: Synthetic oligonucleotide
auucgcuuauuuccaaacc

SEQ ID NO: 1945635 - RNA, 19 nt, Artificial Sequence
  Description of Artificial Sequence: Synthetic oligonucleotide
uaugacauuagacaaugua

SEQ ID NO: 1945636 - RNA, 19 nt, Artificial Sequence
  Description of Artificial Sequence: Synthetic oligonucleotide
ucuguauagaauguuaggu

SEQ ID NO: 1945637 - RNA, 19 nt, Artificial Sequence
  Description of Artificial Sequence: Synthetic oligonucleotide
gaugaaugggaacuguccc

SEQ ID NO: 1945638 - RNA, 19 nt, Artificial Sequence
  Description of Artificial Sequence: Synthetic oligonucleotide
uauuaacuccauuauguac

SEQ ID NO: 1945639 - RNA, 19 nt, Artificial Sequence
  Description of Artificial Sequence: Synthetic oligonucleotide
aauggaaaaugugguuugc

SEQ ID NO: 1945640 - RNA, 19 nt, Artificial Sequence
  Description of Artificial Sequence: Synthetic oligonucleotide
gacauuagacaauguagag

SEQ ID NO: 1945641 - RNA, 19 nt, Artificial Sequence
  Description of Artificial Sequence: Synthetic oligonucleotide
ucgaaggagguucaucacg

SEQ ID NO: 1945642 - RNA, 19 nt, Artificial Sequence
  Description of Artificial Sequence: Synthetic oligonucleotide
ucuaugcuaccaauaauga

SEQ ID NO: 1945643 - RNA, 19 nt, Artificial Sequence
  Description of Artificial Sequence: Synthetic oligonucleotide
uucgcuuauuuccaaacca

SEQ ID NO: 1945644 - RNA, 19 nt, Artificial Sequence
  Description of Artificial Sequence: Synthetic oligonucleotide
uuuauuuauuuagaaggug

SEQ ID NO: 1945645 - RNA, 19 nt, Artificial Sequence
  Description of Artificial Sequence: Synthetic oligonucleotide
aauguuagguguugagugu

SEQ ID NO: 1945646 - RNA, 19 nt, Artificial Sequence
  Description of Artificial Sequence: Synthetic oligonucleotide
agaguaugacauuagacaa

SEQ ID NO: 1945647 - RNA, 19 nt, Artificial Sequence
  Description of Artificial Sequence: Synthetic oligonucleotide
uuaccuauguucuucuugu

SEQ ID NO: 1945648 - RNA, 19 nt, Artificial Sequence
  Description of Artificial Sequence: Synthetic oligonucleotide
uagcuaauggguaacuuga

SEQ ID NO: 1945649 - RNA, 19 nt, Artificial Sequence
  Description of Artificial Sequence: Synthetic oligonucleotide
augacauuagacaauguag

SEQ ID NO: 1945650 - RNA, 19 nt, Artificial Sequence
  Description of Artificial Sequence: Synthetic oligonucleotide
aauuuaccuauguucuucu

SEQ ID NO: 1945651 - RNA, 19 nt, Artificial Sequence
  Description of Artificial Sequence: Synthetic oligonucleotide
gugguuugcacguuuagag

SEQ ID NO: 1945652 - RNA, 19 nt, Artificial Sequence
  Description of Artificial Sequence: Synthetic oligonucleotide
agcaugagaaagaaaauag

SEQ ID NO: 1945653 - RNA, 19 nt, Artificial Sequence
  Description of Artificial Sequence: Synthetic oligonucleotide
ggagaaugaacaauaaggg

SEQ ID NO: 1945654 - RNA, 19 nt, Artificial Sequence
  Description of Artificial Sequence: Synthetic oligonucleotide
aauaaugacacaagauccu

SEQ ID NO: 1945655 - RNA, 19 nt, Artificial Sequence
  Description of Artificial Sequence: Synthetic oligonucleotide
agagguauaagggugaccu

SEQ ID NO: 1945656 - RNA, 19 nt, Artificial Sequence
  Description of Artificial Sequence: Synthetic oligonucleotide
aauggguaacuugaguaag

SEQ ID NO: 1945657 - RNA, 19 nt, Artificial Sequence
  Description of Artificial Sequence: Synthetic oligonucleotide
aguaagaccugaaagaggu

SEQ ID NO: 1945658 - RNA, 19 nt, Artificial Sequence
  Description of Artificial Sequence: Synthetic oligonucleotide
cagaguaugacauuagaca

SEQ ID NO: 1945659 - RNA, 19 nt, Artificial Sequence
  Description of Artificial Sequence: Synthetic oligonucleotide
uguacaucugacuggcugc

SEQ ID NO: 1945660 - RNA, 19 nt, Artificial Sequence
  Description of Artificial Sequence: Synthetic oligonucleotide
aucaguagguucuugacau

SEQ ID NO: 1945661 - RNA, 19 nt, Artificial Sequence
  Description of Artificial Sequence: Synthetic oligonucleotide
uuguuguugaucacugagc

SEQ ID NO: 1945662 - RNA, 19 nt, Artificial Sequence
  Description of Artificial Sequence: Synthetic oligonucleotide
aaauuccgucucuuccgcc

SEQ ID NO: 1945663 - RNA, 19 nt, Artificial Sequence
  Description of Artificial Sequence: Synthetic oligonucleotide
uaccaauaaugacacaaga

SEQ ID NO: 1945664 - RNA, 19 nt, Artificial Sequence
  Description of Artificial Sequence: Synthetic oligonucleotide
cuguauagaauguuaggug

SEQ ID NO: 1945665 - RNA, 19 nt, Artificial Sequence
  Description of Artificial Sequence: Synthetic oligonucleotide
acaagauccuagaugaggg

SEQ ID NO: 1945666 - RNA, 19 nt, Artificial Sequence
  Description of Artificial Sequence: Synthetic oligonucleotide
cucgcauccagaaaccggg

SEQ ID NO: 1945667 - RNA, 19 nt, Artificial Sequence
  Description of Artificial Sequence: Synthetic oligonucleotide
aagauccuagaugagggag

SEQ ID NO: 1945668 - RNA, 19 nt, Artificial Sequence
  Description of Artificial Sequence: Synthetic oligonucleotide
aguaugacauuagacaaug

SEQ ID NO: 1945669 - RNA, 19 nt, Artificial Sequence
  Description of Artificial Sequence: Synthetic oligonucleotide
aaaccgggagcgcaggauc

SEQ ID NO: 1945670 - RNA, 19 nt, Artificial Sequence
  Description of Artificial Sequence: Synthetic oligonucleotide
uuggcuaauuccucuuugg

SEQ ID NO: 1945671 - RNA, 19 nt, Artificial Sequence
  Description of Artificial Sequence: Synthetic oligonucleotide
aauaagggcagagacccug

SEQ ID NO: 1945672 - RNA, 19 nt, Artificial Sequence
  Description of Artificial Sequence: Synthetic oligonucleotide
acagaguaugacauuagac

SEQ ID NO: 1945673 - RNA, 19 nt, Artificial Sequence
  Description of Artificial Sequence: Synthetic oligonucleotide
ucgcuuauuuccaaaccag

SEQ ID NO: 1945674 - RNA, 19 nt, Artificial Sequence
  Description of Artificial Sequence: Synthetic oligonucleotide
ucuaaugacagaguaugac

SEQ ID NO: 1945675 - RNA, 19 nt, Artificial Sequence
  Description of Artificial Sequence: Synthetic oligonucleotide
uggugaauccauugcaugc

SEQ ID NO: 1945676 - RNA, 19 nt, Artificial Sequence
  Description of Artificial Sequence: Synthetic oligonucleotide
cuagcuaauggguaacuug

SEQ ID NO: 1945677 - RNA, 19 nt, Artificial Sequence
  Description of Artificial Sequence: Synthetic oligonucleotide
agguucuugacauaucacu

SEQ ID NO: 1945678 - RNA, 19 nt, Artificial Sequence
  Description of Artificial Sequence: Synthetic oligonucleotide
uagagaugcucuaugcuac

SEQ ID NO: 1945679 - RNA, 19 nt, Artificial Sequence
  Description of Artificial Sequence: Synthetic oligonucleotide
agaaaauggaaaauguggu

SEQ ID NO: 1945680 - RNA, 19 nt, Artificial Sequence
  Description of Artificial Sequence: Synthetic oligonucleotide
gugacagccguuuuggcag

SEQ ID NO: 1945681 - RNA, 19 nt, Artificial Sequence
  Description of Artificial Sequence: Synthetic oligonucleotide
cauucagaauuucuguggc

SEQ ID NO: 1945682 - RNA, 19 nt, Artificial Sequence
  Description of Artificial Sequence: Synthetic oligonucleotide
cucuguauagaauguuagg

SEQ ID NO: 1945683 - RNA, 19 nt, Artificial Sequence
  Description of Artificial Sequence: Synthetic oligonucleotide
ucaagggaggccuagcuaa

SEQ ID NO: 1945684 - RNA, 19 nt, Artificial Sequence
  Description of Artificial Sequence: Synthetic oligonucleotide
aauuccgucucuuccgccu

SEQ ID NO: 1945685 - RNA, 19 nt, Artificial Sequence
  Description of Artificial Sequence: Synthetic oligonucleotide
ugaggaugaagccaggauu

SEQ ID NO: 1945686 - RNA, 19 nt, Artificial Sequence
  Description of Artificial Sequence: Synthetic oligonucleotide
aacugucccaaggagaaug

SEQ ID NO: 1945687 - RNA, 19 nt, Artificial Sequence
  Description of Artificial Sequence: Synthetic oligonucleotide
gaauccauugcaugccugc

SEQ ID NO: 1945688 - RNA, 19 nt, Artificial Sequence
  Description of Artificial Sequence: Synthetic oligonucleotide
aaggguauccacccgcuga

SEQ ID NO: 1945689 - RNA, 19 nt, Artificial Sequence
  Description of Artificial Sequence: Synthetic oligonucleotide
aaagagguauaagggugac

SEQ ID NO: 1945690 - RNA, 19 nt, Artificial Sequence
  Description of Artificial Sequence: Synthetic oligonucleotide
gauucgcuuauuuccaaac

SEQ ID NO: 1945691 - RNA, 19 nt, Artificial Sequence
  Description of Artificial Sequence: Synthetic oligonucleotide
uccauugcaugccugcuca

SEQ ID NO: 1945692 - RNA, 19 nt, Artificial Sequence
  Description of Artificial Sequence: Synthetic oligonucleotide
uagagacuguguucaaggg

SEQ ID NO: 1945693 - RNA, 19 nt, Artificial Sequence
  Description of Artificial Sequence: Synthetic oligonucleotide
cuaaugacagaguaugaca

SEQ ID NO: 1945694 - RNA, 19 nt, Artificial Sequence
  Description of Artificial Sequence: Synthetic oligonucleotide
gaaaaugugguuugcacgu

SEQ ID NO: 1945695 - RNA, 19 nt, Artificial Sequence
  Description of Artificial Sequence: Synthetic oligonucleotide
uaauggguaacuugaguaa

SEQ ID NO: 1945696 - RNA, 19 nt, Artificial Sequence
  Description of Artificial Sequence: Synthetic oligonucleotide
ugaaaacaauagcaugaga

SEQ ID NO: 1945697 - RNA, 19 nt, Artificial Sequence
  Description of Artificial Sequence: Synthetic oligonucleotide
uggcugauaacauggcaag

SEQ ID NO: 1945698 - RNA, 19 nt, Artificial Sequence
  Description of Artificial Sequence: Synthetic oligonucleotide
ugcucuaugcuaccaauaa

SEQ ID NO: 1945699 - RNA, 19 nt, Artificial Sequence
  Description of Artificial Sequence: Synthetic oligonucleotide
gaugagggagcaucaguag

SEQ ID NO: 1945700 - RNA, 19 nt, Artificial Sequence
  Description of Artificial Sequence: Synthetic oligonucleotide
cauggcaaggguauccacc

SEQ ID NO: 1945701 - RNA, 19 nt, Artificial Sequence
  Description of Artificial Sequence: Synthetic oligonucleotide
uaaauauuggcuuccucuu

SEQ ID NO: 1945702 - RNA, 19 nt, Artificial Sequence
  Description of Artificial Sequence: Synthetic oligonucleotide
ccaauaaugacacaagauc

SEQ ID NO: 1945703 - RNA, 19 nt, Artificial Sequence
  Description of Artificial Sequence: Synthetic oligonucleotide
acuguauccuccugucugg

SEQ ID NO: 1945704 - RNA, 19 nt, Artificial Sequence
  Description of Artificial Sequence: Synthetic oligonucleotide
gaugaugcugaccauucuc

SEQ ID NO: 1945705 - RNA, 19 nt, Artificial Sequence
  Description of Artificial Sequence: Synthetic oligonucleotide
ugaacaauaagggcagaga

SEQ ID NO: 1945706 - RNA, 19 nt, Artificial Sequence
  Description of Artificial Sequence: Synthetic oligonucleotide
acguuuagagacuguguuc

SEQ ID NO: 1945707 - RNA, 19 nt, Artificial Sequence
  Description of Artificial Sequence: Synthetic oligonucleotide
cacaagauccuagaugagg

SEQ ID NO: 1945708 - RNA, 19 nt, Artificial Sequence
  Description of Artificial Sequence: Synthetic oligonucleotide
agagaugcucuaugcuacc

SEQ ID NO: 1945709 - RNA, 19 nt, Artificial Sequence
  Description of Artificial Sequence: Synthetic oligonucleotide
uuuagagacuguguucaag

SEQ ID NO: 1945710 - RNA, 19 nt, Artificial Sequence
  Description of Artificial Sequence: Synthetic oligonucleotide
cauuagacaauguagagau

SEQ ID NO: 1945711 - RNA, 19 nt, Artificial Sequence
  Description of Artificial Sequence: Synthetic oligonucleotide
ucuuagauacugucugucu

SEQ ID NO: 1945712 - RNA, 19 nt, Artificial Sequence
  Description of Artificial Sequence: Synthetic oligonucleotide
ugucccaaggagaaugaac

SEQ ID NO: 1945713 - RNA, 19 nt, Artificial Sequence
  Description of Artificial Sequence: Synthetic oligonucleotide
uauccacccgcugaguugg

SEQ ID NO: 1945714 - RNA, 19 nt, Artificial Sequence
  Description of Artificial Sequence: Synthetic oligonucleotide
aagagguauaagggugacc

SEQ ID NO: 1945715 - RNA, 19 nt, Artificial Sequence
  Description of Artificial Sequence: Synthetic oligonucleotide
augaaaacaauagcaugag

SEQ ID NO: 1945716 - RNA, 19 nt, Artificial Sequence
  Description of Artificial Sequence: Synthetic oligonucleotide
aguguuaaugaaaacaaua

SEQ ID NO: 1945717 - RNA, 19 nt, Artificial Sequence
  Description of Artificial Sequence: Synthetic oligonucleotide
guagguucuugacauauca

SEQ ID NO: 1945718 - RNA, 19 nt, Artificial Sequence
  Description of Artificial Sequence: Synthetic oligonucleotide
augcuaccaauaaugacac

SEQ ID NO: 1945719 - RNA, 19 nt, Artificial Sequence
  Description of Artificial Sequence: Synthetic oligonucleotide
gaccuuguggaugaauggg

SEQ ID NO: 1945720 - RNA, 19 nt, Artificial Sequence
  Description of Artificial Sequence: Synthetic oligonucleotide
cuaauggguaacuugagua

SEQ ID NO: 1945721 - RNA, 19 nt, Artificial Sequence
  Description of Artificial Sequence: Synthetic oligonucleotide
uaagaccugaaagagguau

SEQ ID NO: 1945722 - RNA, 19 nt, Artificial Sequence
  Description of Artificial Sequence: Synthetic oligonucleotide
uggcuaauuccucuuuggc

SEQ ID NO: 1945723 - RNA, 19 nt, Artificial Sequence
  Description of Artificial Sequence: Synthetic oligonucleotide
ugacagaguaugacauuag

SEQ ID NO: 1945724 - RNA, 19 nt, Artificial Sequence
  Description of Artificial Sequence: Synthetic oligonucleotide
ucuggcugauaacauggca

SEQ ID NO: 1945725 - RNA, 19 nt, Artificial Sequence
  Description of Artificial Sequence: Synthetic oligonucleotide
aacuugcgguggaugaugc

SEQ ID NO: 1945726 - RNA, 19 nt, Artificial Sequence
  Description of Artificial Sequence: Synthetic oligonucleotide
agguguugaguguuaauga

SEQ ID NO: 1945727 - RNA, 19 nt, Artificial Sequence
  Description of Artificial Sequence: Synthetic oligonucleotide
cuaugcuaccaauaaugac

SEQ ID NO: 1945728 - RNA, 19 nt, Artificial Sequence
  Description of Artificial Sequence: Synthetic oligonucleotide
uauuuccaaaccaguuuga

SEQ ID NO: 1945729 - RNA, 19 nt, Artificial Sequence
  Description of Artificial Sequence: Synthetic oligonucleotide
aucacugaugcccugcgga

SEQ ID NO: 1945730 - RNA, 19 nt, Artificial Sequence
  Description of Artificial Sequence: Synthetic oligonucleotide
accaguuugauaccuggga

SEQ ID NO: 1945731 - RNA, 19 nt, Artificial Sequence
  Description of Artificial Sequence: Synthetic oligonucleotide
ugauaacauggcaagggua

SEQ ID NO: 1945732 - RNA, 19 nt, Artificial Sequence
  Description of Artificial Sequence: Synthetic oligonucleotide
auaaucaagugcucuguau

SEQ ID NO: 1945733 - RNA, 19 nt, Artificial Sequence
  Description of Artificial Sequence: Synthetic oligonucleotide
uucuugacauaucacugau

SEQ ID NO: 1945734 - RNA, 19 nt, Artificial Sequence
  Description of Artificial Sequence: Synthetic oligonucleotide
gaguaagaccugaaagagg

SEQ ID NO: 1945735 - RNA, 19 nt, Artificial Sequence
  Description of Artificial Sequence: Synthetic oligonucleotide
caggauuaaaacucagguc

SEQ ID NO: 1945736 - RNA, 19 nt, Artificial Sequence
  Description of Artificial Sequence: Synthetic oligonucleotide
agagacuguguucaaggga

SEQ ID NO: 1945737 - RNA, 19 nt, Artificial Sequence
  Description of Artificial Sequence: Synthetic oligonucleotide
acauuagacaauguagaga

SEQ ID NO: 1945738 - RNA, 19 nt, Artificial Sequence
  Description of Artificial Sequence: Synthetic oligonucleotide
ucuugacauaucacugaug

SEQ ID NO: 1945739 - RNA, 19 nt, Artificial Sequence
  Description of Artificial Sequence: Synthetic oligonucleotide
gguuugcacguuuagagac

SEQ ID NO: 1945740 - RNA, 19 nt, Artificial Sequence
  Description of Artificial Sequence: Synthetic oligonucleotide
uuucuuagauacugucugu

SEQ ID NO: 1945741 - RNA, 19 nt, Artificial Sequence
  Description of Artificial Sequence: Synthetic oligonucleotide
cugagguaguauuauuaac

SEQ ID NO: 1945742 - RNA, 19 nt, Artificial Sequence
  Description of Artificial Sequence: Synthetic oligonucleotide
ugcacguuuagagacugug

SEQ ID NO: 1945743 - RNA, 19 nt, Artificial Sequence
  Description of Artificial Sequence: Synthetic oligonucleotide
auacugucugucuuuauuu

SEQ ID NO: 1945744 - RNA, 19 nt, Artificial Sequence
  Description of Artificial Sequence: Synthetic oligonucleotide
agguauaagggugaccuug

SEQ ID NO: 1945745 - RNA, 19 nt, Artificial Sequence
  Description of Artificial Sequence: Synthetic oligonucleotide
agaauguuagguguugagu

SEQ ID NO: 1945746 - RNA, 19 nt, Artificial Sequence
  Description of Artificial Sequence: Synthetic oligonucleotide
gcugauaacauggcaaggg

SEQ ID NO: 1945747 - RNA, 19 nt, Artificial Sequence
  Description of Artificial Sequence: Synthetic oligonucleotide
ugcucuguauagaauguua

SEQ ID NO: 1945748 - RNA, 19 nt, Artificial Sequence
  Description of Artificial Sequence: Synthetic oligonucleotide
uaucacugaugcccugcgg

SEQ ID NO: 1945749 - RNA, 19 nt, Artificial Sequence
  Description of Artificial Sequence: Synthetic oligonucleotide
uuugcacguuuagagacug

SEQ ID NO: 1945750 - RNA, 19 nt, Artificial Sequence
  Description of Artificial Sequence: Synthetic oligonucleotide
aucacugagcugucuaaug

SEQ ID NO: 1945751 - RNA, 19 nt, Artificial Sequence
  Description of Artificial Sequence: Synthetic oligonucleotide
agcaucaguagguucuuga

SEQ ID NO: 1945752 - RNA, 19 nt, Artificial Sequence
  Description of Artificial Sequence: Synthetic oligonucleotide
uagacaauguagagaugcu

SEQ ID NO: 1945753 - RNA, 19 nt, Artificial Sequence
  Description of Artificial Sequence: Synthetic oligonucleotide
ugaauccauugcaugccug

SEQ ID NO: 1945754 - RNA, 19 nt, Artificial Sequence
  Description of Artificial Sequence: Synthetic oligonucleotide
aucacguggguggugaauc

SEQ ID NO: 1945755 - RNA, 19 nt, Artificial Sequence
  Description of Artificial Sequence: Synthetic oligonucleotide
gacagaguaugacauuaga

SEQ ID NO: 1945756 - RNA, 19 nt, Artificial Sequence
  Description of Artificial Sequence: Synthetic oligonucleotide
augauuugcccaacagccc

SEQ ID NO: 1945757 - RNA, 19 nt, Artificial Sequence
  Description of Artificial Sequence: Synthetic oligonucleotide
uugacauaucacugaugcc

SEQ ID NO: 1945758 - RNA, 19 nt, Artificial Sequence
  Description of Artificial Sequence: Synthetic oligonucleotide
uuuccaaaccaguuugaua

SEQ ID NO: 1945759 - RNA, 19 nt, Artificial Sequence
  Description of Artificial Sequence: Synthetic oligonucleotide
augaaugggaacuguccca

SEQ ID NO: 1945760 - RNA, 19 nt, Artificial Sequence
  Description of Artificial Sequence: Synthetic oligonucleotide
auaagauaaucaagugcuc

SEQ ID NO: 1945761 - RNA, 19 nt, Artificial Sequence
  Description of Artificial Sequence: Synthetic oligonucleotide
uccugucuggcugauaaca

SEQ ID NO: 1945762 - RNA, 19 nt, Artificial Sequence
  Description of Artificial Sequence: Synthetic oligonucleotide
aaaugugguuugcacguuu

SEQ ID NO: 1945763 - RNA, 19 nt, Artificial Sequence
  Description of Artificial Sequence: Synthetic oligonucleotide
uucagaauuucuguggcuu

SEQ ID NO: 1945764 - RNA, 19 nt, Artificial Sequence
  Description of Artificial Sequence: Synthetic oligonucleotide
guagagaugcucuaugcua

SEQ ID NO: 1945765 - RNA, 19 nt, Artificial Sequence
  Description of Artificial Sequence: Synthetic oligonucleotide
ugugguuugcacguuuaga

SEQ ID NO: 1945766 - RNA, 19 nt, Artificial Sequence
  Description of Artificial Sequence: Synthetic oligonucleotide
uccuagaugagggagcauc

SEQ ID NO: 1945767 - RNA, 19 nt, Artificial Sequence
  Description of Artificial Sequence: Synthetic oligonucleotide
uugaucacugagcugucua

SEQ ID NO: 1945768 - RNA, 19 nt, Artificial Sequence
  Description of Artificial Sequence: Synthetic oligonucleotide
auaccugggagacugugau

SEQ ID NO: 1945769 - RNA, 19 nt, Artificial Sequence
  Description of Artificial Sequence: Synthetic oligonucleotide
guucuugacauaucacuga

SEQ ID NO: 1945770 - RNA, 19 nt, Artificial Sequence
  Description of Artificial Sequence: Synthetic oligonucleotide
uggagcugaacuugcggug

SEQ ID NO: 1945771 - RNA, 19 nt, Artificial Sequence
  Description of Artificial Sequence: Synthetic oligonucleotide
uucucucgaucuccuuugg

SEQ ID NO: 1945772 - RNA, 19 nt, Artificial Sequence
  Description of Artificial Sequence: Synthetic oligonucleotide
augcugaccauucucucga

SEQ ID NO: 1945773 - RNA, 19 nt, Artificial Sequence
  Description of Artificial Sequence: Synthetic oligonucleotide
gugaccuuguggaugaaug

SEQ ID NO: 1945774 - RNA, 19 nt, Artificial Sequence
  Description of Artificial Sequence: Synthetic oligonucleotide
agauaaucaagugcucugu

SEQ ID NO: 1945775 - RNA, 19 nt, Artificial Sequence
  Description of Artificial Sequence: Synthetic oligonucleotide
aguccgucacuguauccuc

SEQ ID NO: 1945776 - RNA, 19 nt, Artificial Sequence
  Description of Artificial Sequence: Synthetic oligonucleotide
uucuuagauacugucuguc

SEQ ID NO: 1945777 - RNA, 19 nt, Artificial Sequence
  Description of Artificial Sequence: Synthetic oligonucleotide
ucucuuccgccucgcaucc

SEQ ID NO: 1945778 - RNA, 19 nt, Artificial Sequence
  Description of Artificial Sequence: Synthetic oligonucleotide
uguggaugaaugggaacug

SEQ ID NO: 1945779 - RNA, 19 nt, Artificial Sequence
  Description of Artificial Sequence: Synthetic oligonucleotide
gauaacauggcaaggguau

SEQ ID NO: 1945780 - RNA, 19 nt, Artificial Sequence
  Description of Artificial Sequence: Synthetic oligonucleotide
gaguugggaguggagggcg

SEQ ID NO: 1945781 - RNA, 19 nt, Artificial Sequence
  Description of Artificial Sequence: Synthetic oligonucleotide
cauaaauauuggcuuccuc

SEQ ID NO: 1945782 - RNA, 19 nt, Artificial Sequence
  Description of Artificial Sequence: Synthetic oligonucleotide
ugaaugggaacugucccaa

SEQ ID NO: 1945783 - RNA, 19 nt, Artificial Sequence
  Description of Artificial Sequence: Synthetic oligonucleotide
gauuaaaacucaggucuuc

SEQ ID NO: 1945784 - RNA, 19 nt, Artificial Sequence
  Description of Artificial Sequence: Synthetic oligonucleotide
uggguaacuugaguaagac

SEQ ID NO: 1945785 - RNA, 19 nt, Artificial Sequence
  Description of Artificial Sequence: Synthetic oligonucleotide
cacugagcugucuaaugac

SEQ ID NO: 1945786 - RNA, 19 nt, Artificial Sequence
  Description of Artificial Sequence: Synthetic oligonucleotide
ugaucacugagcugucuaa

SEQ ID NO: 1945787 - RNA, 19 nt, Artificial Sequence
  Description of Artificial Sequence: Synthetic oligonucleotide
gguucuugacauaucacug

SEQ ID NO: 1945788 - RNA, 19 nt, Artificial Sequence
  Description of Artificial Sequence: Synthetic oligonucleotide
auuuguuguugaucacuga

SEQ ID NO: 1945789 - RNA, 19 nt, Artificial Sequence
  Description of Artificial Sequence: Synthetic oligonucleotide
ggacuguacaucugacugg

SEQ ID NO: 1945790 - RNA, 19 nt, Artificial Sequence
  Description of Artificial Sequence: Synthetic oligonucleotide
auaacauggcaaggguauc

SEQ ID NO: 1945791 - RNA, 19 nt, Artificial Sequence
  Description of Artificial Sequence: Synthetic oligonucleotide
caggacaauaaauaagaua

SEQ ID NO: 1945792 - RNA, 19 nt, Artificial Sequence
  Description of Artificial Sequence: Synthetic oligonucleotide
cugacuggcugcgaguccg

SEQ ID NO: 1945793 - RNA, 19 nt, Artificial Sequence
  Description of Artificial Sequence: Synthetic oligonucleotide
cucgaucuccuuuggggag

SEQ ID NO: 1945794 - RNA, 19 nt, Artificial Sequence
  Description of Artificial Sequence: Synthetic oligonucleotide
agggagcaucaguagguuc

SEQ ID NO: 1945795 - RNA, 19 nt, Artificial Sequence
  Description of Artificial Sequence: Synthetic oligonucleotide
aauccauugcaugccugcu

SEQ ID NO: 1945796 - RNA, 19 nt, Artificial Sequence
  Description of Artificial Sequence: Synthetic oligonucleotide
uaagggcagagacccugag

SEQ ID NO: 1945797 - RNA, 19 nt, Artificial Sequence
  Description of Artificial Sequence: Synthetic oligonucleotide
cuggcugauaacauggcaa

SEQ ID NO: 1945798 - RNA, 19 nt, Artificial Sequence
  Description of Artificial Sequence: Synthetic oligonucleotide
gaacuugcgguggaugaug

SEQ ID NO: 1945799 - RNA, 19 nt, Artificial Sequence
  Description of Artificial Sequence: Synthetic oligonucleotide
uucaagggaggccuagcua

SEQ ID NO: 1945800 - RNA, 19 nt, Artificial Sequence
  Description of Artificial Sequence: Synthetic oligonucleotide
uccagaaaccgggagcgca

SEQ ID NO: 1945801 - RNA, 19 nt, Artificial Sequence
  Description of Artificial Sequence: Synthetic oligonucleotide
guuguugaucacugagcug

SEQ ID NO: 1945802 - RNA, 19 nt, Artificial Sequence
  Description of Artificial Sequence: Synthetic oligonucleotide
augugguuugcacguuuag

SEQ ID NO: 1945803 - RNA, 19 nt, Artificial Sequence
  Description of Artificial Sequence: Synthetic oligonucleotide
gaccauucucucgaucucc

SEQ ID NO: 1945804 - RNA, 19 nt, Artificial Sequence
  Description of Artificial Sequence: Synthetic oligonucleotide
gauaaucaagugcucugua

SEQ ID NO: 1945805 - RNA, 19 nt, Artificial Sequence
  Description of Artificial Sequence: Synthetic oligonucleotide
augacacaagauccuagau

SEQ ID NO: 1945806 - RNA, 19 nt, Artificial Sequence
  Description of Artificial Sequence: Synthetic oligonucleotide
ucacugaugcccugcggac

SEQ ID NO: 1945807 - RNA, 19 nt, Artificial Sequence
  Description of Artificial Sequence: Synthetic oligonucleotide
guacaucugacuggcugcg

SEQ ID NO: 1945808 - RNA, 19 nt, Artificial Sequence
  Description of Artificial Sequence: Synthetic oligonucleotide
ggaugaaugggaacugucc

SEQ ID NO: 1945809 - RNA, 19 nt, Artificial Sequence
  Description of Artificial Sequence: Synthetic oligonucleotide
ugauaccugggagacugug

SEQ ID NO: 1945810 - RNA, 19 nt, Artificial Sequence
  Description of Artificial Sequence: Synthetic oligonucleotide
gcuaccaauaaugacacaa

SEQ ID NO: 1945811 - RNA, 19 nt, Artificial Sequence
  Description of Artificial Sequence: Synthetic oligonucleotide
guggguggugaauccauug

SEQ ID NO: 1945812 - RNA, 19 nt, Artificial Sequence
  Description of Artificial Sequence: Synthetic oligonucleotide
auagaauguuagguguuga

SEQ ID NO: 1945813 - RNA, 19 nt, Artificial Sequence
  Description of Artificial Sequence: Synthetic oligonucleotide
gauacugucugucuuuauu

SEQ ID NO: 1945814 - RNA, 19 nt, Artificial Sequence
  Description of Artificial Sequence: Synthetic oligonucleotide
gauccuagaugagggagca

SEQ ID NO: 1945815 - RNA, 19 nt, Artificial Sequence
  Description of Artificial Sequence: Synthetic oligonucleotide
ucacguggguggugaaucc

SEQ ID NO: 1945816 - RNA, 19 nt, Artificial Sequence
  Description of Artificial Sequence: Synthetic oligonucleotide
ccggcuuugcucucgaagg

SEQ ID NO: 1945817 - RNA, 19 nt, Artificial Sequence
  Description of Artificial Sequence: Synthetic oligonucleotide
uuagguguugaguguuaau

SEQ ID NO: 1945818 - RNA, 19 nt, Artificial Sequence
  Description of Artificial Sequence: Synthetic oligonucleotide
gaaggagguucaucacgug

SEQ ID NO: 1945819 - RNA, 19 nt, Artificial Sequence
  Description of Artificial Sequence: Synthetic oligonucleotide
ugcgaguccgucacuguau

SEQ ID NO: 1945820 - RNA, 19 nt, Artificial Sequence
  Description of Artificial Sequence: Synthetic oligonucleotide
uguacaugauuugcccaac

SEQ ID NO: 1945821 - RNA, 19 nt, Artificial Sequence
  Description of Artificial Sequence: Synthetic oligonucleotide
ggugaauccauugcaugcc

SEQ ID NO: 1945822 - RNA, 19 nt, Artificial Sequence
  Description of Artificial Sequence: Synthetic oligonucleotide
aguagguucuugacauauc

SEQ ID NO: 1945823 - RNA, 19 nt, Artificial Sequence
  Description of Artificial Sequence: Synthetic oligonucleotide
uaccggauucgcuuauuuc

SEQ ID NO: 1945824 - RNA, 19 nt, Artificial Sequence
  Description of Artificial Sequence: Synthetic oligonucleotide
auuuccaaaccaguuugau

SEQ ID NO: 1945825 - RNA, 19 nt, Artificial Sequence
  Description of Artificial Sequence: Synthetic oligonucleotide
gaccugaaagagguauaag

SEQ ID NO: 1945826 - RNA, 19 nt, Artificial Sequence
  Description of Artificial Sequence: Synthetic oligonucleotide
uggcaaggguauccacccg

SEQ ID NO: 1945827 - RNA, 19 nt, Artificial Sequence
  Description of Artificial Sequence: Synthetic oligonucleotide
cuggcugcgaguccgucac

SEQ ID NO: 1945828 - RNA, 19 nt, Artificial Sequence
  Description of Artificial Sequence: Synthetic oligonucleotide
uguauccuccugucuggcu

SEQ ID NO: 1945829 - RNA, 19 nt, Artificial Sequence
  Description of Artificial Sequence: Synthetic oligonucleotide
acugagcugucuaaugaca

SEQ ID NO: 1945830 - RNA, 19 nt, Artificial Sequence
  Description of Artificial Sequence: Synthetic oligonucleotide
auagcaugagaaagaaaau

SEQ ID NO: 1945831 - RNA, 19 nt, Artificial Sequence
  Description of Artificial Sequence: Synthetic oligonucleotide
agacugugaugccacacuu

SEQ ID NO: 1945832 - RNA, 19 nt, Artificial Sequence
  Description of Artificial Sequence: Synthetic oligonucleotide
ugcggacuguacaucugac

SEQ ID NO: 1945833 - RNA, 19 nt, Artificial Sequence
  Description of Artificial Sequence: Synthetic oligonucleotide
ggagaugggcccugguccg

SEQ ID NO: 1945834 - RNA, 19 nt, Artificial Sequence
  Description of Artificial Sequence: Synthetic oligonucleotide
ucacacgugcucugcuuga

SEQ ID NO: 1945835 - RNA, 19 nt, Artificial Sequence
  Description of Artificial Sequence: Synthetic oligonucleotide
aaugugguuugcacguuua

SEQ ID NO: 1945836 - RNA, 19 nt, Artificial Sequence
  Description of Artificial Sequence: Synthetic oligonucleotide
agaccugaaagagguauaa

SEQ ID NO: 1945837 - RNA, 19 nt, Artificial Sequence
  Description of Artificial Sequence: Synthetic oligonucleotide
guauaagggugaccuugug

SEQ ID NO: 1945838 - RNA, 19 nt, Artificial Sequence
  Description of Artificial Sequence: Synthetic oligonucleotide
ggagcugaacuugcggugg

SEQ ID NO: 1945839 - RNA, 19 nt, Artificial Sequence
  Description of Artificial Sequence: Synthetic oligonucleotide
aucaagugcucuguauaga

SEQ ID NO: 1945840 - RNA, 19 nt, Artificial Sequence
  Description of Artificial Sequence: Synthetic oligonucleotide
gacacauugguggcaguga

SEQ ID NO: 1945841 - RNA, 19 nt, Artificial Sequence
  Description of Artificial Sequence: Synthetic oligonucleotide
ggcaaggguauccacccgc

SEQ ID NO: 1945842 - RNA, 19 nt, Artificial Sequence
  Description of Artificial Sequence: Synthetic oligonucleotide
ggaguggagggcgaguuag

SEQ ID NO: 1945843 - RNA, 19 nt, Artificial Sequence
  Description of Artificial Sequence: Synthetic oligonucleotide
uguugaucacugagcuguc

SEQ ID NO: 1945844 - RNA, 19 nt, Artificial Sequence
  Description of Artificial Sequence: Synthetic oligonucleotide
gaugcucuaugcuaccaau

SEQ ID NO: 1945845 - RNA, 19 nt, Artificial Sequence
  Description of Artificial Sequence: Synthetic oligonucleotide
uaagggugaccuuguggau

SEQ ID NO: 1945846 - RNA, 19 nt, Artificial Sequence
  Description of Artificial Sequence: Synthetic oligonucleotide
augcccugcggacuguaca

SEQ ID NO: 1945847 - RNA, 19 nt, Artificial Sequence
  Description of Artificial Sequence: Synthetic oligonucleotide
auauuggcuuccucuugaa

SEQ ID NO: 1945848 - RNA, 19 nt, Artificial Sequence
  Description of Artificial Sequence: Synthetic oligonucleotide
aaaaugugguuugcacguu

SEQ ID NO: 1945849 - RNA, 19 nt, Artificial Sequence
  Description of Artificial Sequence: Synthetic oligonucleotide
guacaugauuugcccaaca

SEQ ID NO: 1945850 - RNA, 19 nt, Artificial Sequence
  Description of Artificial Sequence: Synthetic oligonucleotide
accuuguggaugaauggga

SEQ ID NO: 1945851 - RNA, 19 nt, Artificial Sequence
  Description of Artificial Sequence: Synthetic oligonucleotide
gguggaaacaggacaauaa

SEQ ID NO: 1945852 - RNA, 19 nt, Artificial Sequence
  Description of Artificial Sequence: Synthetic oligonucleotide
gcuuugcucucgaaggagg

SEQ ID NO: 1945853 - RNA, 19 nt, Artificial Sequence
  Description of Artificial Sequence: Synthetic oligonucleotide
ucgaucuccuuuggggaga

SEQ ID NO: 1945854 - RNA, 19 nt, Artificial Sequence
  Description of Artificial Sequence: Synthetic oligonucleotide
aacuugaguaagaccugaa

SEQ ID NO: 1945855 - RNA, 19 nt, Artificial Sequence
  Description of Artificial Sequence: Synthetic oligonucleotide
ugcccugcggacuguacau

SEQ ID NO: 1945856 - RNA, 19 nt, Artificial Sequence
  Description of Artificial Sequence: Synthetic oligonucleotide
aagaccugaaagagguaua

SEQ ID NO: 1945857 - RNA, 19 nt, Artificial Sequence
  Description of Artificial Sequence: Synthetic oligonucleotide
ggcagugacagccguuuug

SEQ ID NO: 1945858 - RNA, 19 nt, Artificial Sequence
  Description of Artificial Sequence: Synthetic oligonucleotide
caagauccuagaugaggga

SEQ ID NO: 1945859 - RNA, 19 nt, Artificial Sequence
  Description of Artificial Sequence: Synthetic oligonucleotide
ugacugcuucacacgugcu

SEQ ID NO: 1945860 - RNA, 19 nt, Artificial Sequence
  Description of Artificial Sequence: Synthetic oligonucleotide
ggcgaguuagcuuggcuuc

SEQ ID NO: 1945861 - RNA, 19 nt, Artificial Sequence
  Description of Artificial Sequence: Synthetic oligonucleotide
ucgcauccagaaaccggga

SEQ ID NO: 1945862 - RNA, 19 nt, Artificial Sequence
  Description of Artificial Sequence: Synthetic oligonucleotide
agaaaccgggagcgcagga

SEQ ID NO: 1945863 - RNA, 19 nt, Artificial Sequence
  Description of Artificial Sequence: Synthetic oligonucleotide
ccaaggagaaugaacaaua

SEQ ID NO: 1945864 - RNA, 19 nt, Artificial Sequence
  Description of Artificial Sequence: Synthetic oligonucleotide
aagguggaaacaggacaau

SEQ ID NO: 1945865 - RNA, 19 nt, Artificial Sequence
  Description of Artificial Sequence: Synthetic oligonucleotide
uguguucaagggaggccua

SEQ ID NO: 1945866 - RNA, 19 nt, Artificial Sequence
  Description of Artificial Sequence: Synthetic oligonucleotide
auccagaaaccgggagcgc

SEQ ID NO: 1945867 - RNA, 19 nt, Artificial Sequence
  Description of Artificial Sequence: Synthetic oligonucleotide
ccucgcauccagaaaccgg

SEQ ID NO: 1945868 - RNA, 19 nt, Artificial Sequence
  Description of Artificial Sequence: Synthetic oligonucleotide
uuguaccggauucgcuuau

SEQ ID NO: 1945869 - RNA, 19 nt, Artificial Sequence
  Description of Artificial Sequence: Synthetic oligonucleotide
ucaguagguucuugacaua

SEQ ID NO: 1945870 - RNA, 19 nt, Artificial Sequence
  Description of Artificial Sequence: Synthetic oligonucleotide
auguuagguguugaguguu

SEQ ID NO: 1945871 - RNA, 19 nt, Artificial Sequence
  Description of Artificial Sequence: Synthetic oligonucleotide
gagaugcucuaugcuacca

SEQ ID NO: 1945872 - RNA, 19 nt, Artificial Sequence
  Description of Artificial Sequence: Synthetic oligonucleotide
agggcgaguuagcuuggcu

SEQ ID NO: 1945873 - RNA, 19 nt, Artificial Sequence
  Description of Artificial Sequence: Synthetic oligonucleotide
ggcugauaacauggcaagg

SEQ ID NO: 1945874 - RNA, 19 nt, Artificial Sequence
  Description of Artificial Sequence: Synthetic oligonucleotide
cuuguaccggauucgcuua

SEQ ID NO: 1945875 - RNA, 19 nt, Artificial Sequence
  Description of Artificial Sequence: Synthetic oligonucleotide
ggcuaauuccucuuuggcu

SEQ ID NO: 1945876 - RNA, 19 nt, Artificial Sequence
  Description of Artificial Sequence: Synthetic oligonucleotide
gagacccugagguaguauu

SEQ ID NO: 1945877 - RNA, 19 nt, Artificial Sequence
  Description of Artificial Sequence: Synthetic oligonucleotide
ugcuaccaauaaugacaca

SEQ ID NO: 1945878 - RNA, 19 nt, Artificial Sequence
  Description of Artificial Sequence: Synthetic oligonucleotide
ggguggugaauccauugca

SEQ ID NO: 1945879 - RNA, 19 nt, Artificial Sequence
  Description of Artificial Sequence: Synthetic oligonucleotide
ugguccggcuuugcucucg

SEQ ID NO: 1945880 - RNA, 19 nt, Artificial Sequence
  Description of Artificial Sequence: Synthetic oligonucleotide
uccgccucgcauccagaaa

SEQ ID NO: 1945881 - RNA, 19 nt, Artificial Sequence
  Description of Artificial Sequence: Synthetic oligonucleotide
guucaagggaggccuagcu

SEQ ID NO: 1945882 - RNA, 19 nt, Artificial Sequence
  Description of Artificial Sequence: Synthetic oligonucleotide
cagaaaccgggagcgcagg

SEQ ID NO: 1945883 - RNA, 19 nt, Artificial Sequence
  Description of Artificial Sequence: Synthetic oligonucleotide
guguucaagggaggccuag

SEQ ID NO: 1945884 - RNA, 19 nt, Artificial Sequence
  Description of Artificial Sequence: Synthetic oligonucleotide
uuugcucucgaaggagguu

SEQ ID NO: 1945885 - RNA, 19 nt, Artificial Sequence
  Description of Artificial Sequence: Synthetic oligonucleotide
uugcacguuuagagacugu

SEQ ID NO: 1945886 - RNA, 19 nt, Artificial Sequence
  Description of Artificial Sequence: Synthetic oligonucleotide
uaccuauguucuucuugua

SEQ ID NO: 1945887 - RNA, 19 nt, Artificial Sequence
  Description of Artificial Sequence: Synthetic oligonucleotide
guuagguguugaguguuaa

SEQ ID NO: 1945888 - RNA, 19 nt, Artificial Sequence
  Description of Artificial Sequence: Synthetic oligonucleotide
caaggguauccacccgcug

SEQ ID NO: 1945889 - RNA, 19 nt, Artificial Sequence
  Description of Artificial Sequence: Synthetic oligonucleotide
cacguuuagagacuguguu

SEQ ID NO: 1945890 - RNA, 19 nt, Artificial Sequence
  Description of Artificial Sequence: Synthetic oligonucleotide
cugcggacuguacaucuga

SEQ ID NO: 1945891 - RNA, 19 nt, Artificial Sequence
  Description of Artificial Sequence: Synthetic oligonucleotide
guuuagagacuguguucaa

SEQ ID NO: 1945892 - RNA, 19 nt, Artificial Sequence
  Description of Artificial Sequence: Synthetic oligonucleotide
gaggccuagcuaaugggua

SEQ ID NO: 1945893 - RNA, 19 nt, Artificial Sequence
  Description of Artificial Sequence: Synthetic oligonucleotide
agguggaaacaggacaaua

SEQ ID NO: 1945894 - RNA, 19 nt, Artificial Sequence
  Description of Artificial Sequence: Synthetic oligonucleotide
gagaugggcccugguccgg

SEQ ID NO: 1945895 - RNA, 19 nt, Artificial Sequence
  Description of Artificial Sequence: Synthetic oligonucleotide
ggcuuugcucucgaaggag

SEQ ID NO: 1945896 - RNA, 19 nt, Artificial Sequence
  Description of Artificial Sequence: Synthetic oligonucleotide
gaguguuaaugaaaacaau

SEQ ID NO: 1945897 - RNA, 19 nt, Artificial Sequence
  Description of Artificial Sequence: Synthetic oligonucleotide
acuccauuauguacaugau

SEQ ID NO: 1945898 - RNA, 19 nt, Artificial Sequence
  Description of Artificial Sequence: Synthetic oligonucleotide
ccagaaaccgggagcgcag

SEQ ID NO: 1945899 - RNA, 19 nt, Artificial Sequence
  Description of Artificial Sequence: Synthetic oligonucleotide
ccgccucgcauccagaaac

SEQ ID NO: 1945900 - RNA, 19 nt, Artificial Sequence
  Description of Artificial Sequence: Synthetic oligonucleotide
cuguguucaagggaggccu

SEQ ID NO: 1945901 - RNA, 19 nt, Artificial Sequence
  Description of Artificial Sequence: Synthetic oligonucleotide
agccguuuuggcagcauaa

SEQ ID NO: 1945902 - RNA, 19 nt, Artificial Sequence
  Description of Artificial Sequence: Synthetic oligonucleotide
cuccugucuggcugauaac

SEQ ID NO: 1945903 - RNA, 19 nt, Artificial Sequence
  Description of Artificial Sequence: Synthetic oligonucleotide
uacaucugacuggcugcga

SEQ ID NO: 1945904 - RNA, 19 nt, Artificial Sequence
  Description of Artificial Sequence: Synthetic oligonucleotide
cguuuuggcagcauaaaua

SEQ ID NO: 1945905 - RNA, 19 nt, Artificial Sequence
  Description of Artificial Sequence: Synthetic oligonucleotide
cuuugcucucgaaggaggu

SEQ ID NO: 1945906 - RNA, 19 nt, Artificial Sequence
  Description of Artificial Sequence: Synthetic oligonucleotide
ccaugggcugacacauugg

SEQ ID NO: 1945907 - RNA, 19 nt, Artificial Sequence
  Description of Artificial Sequence: Synthetic oligonucleotide
cugucuaaugacagaguau

SEQ ID NO: 1945908 - RNA, 19 nt, Artificial Sequence
  Description of Artificial Sequence: Synthetic oligonucleotide
gcuaauggguaacuugagu

SEQ ID NO: 1945909 - RNA, 19 nt, Artificial Sequence
  Description of Artificial Sequence: Synthetic oligonucleotide
ugacuggcugcgaguccgu

SEQ ID NO: 1945910 - RNA, 19 nt, Artificial Sequence
  Description of Artificial Sequence: Synthetic oligonucleotide
gcugaacuugcgguggaug

SEQ ID NO: 1945911 - RNA, 19 nt, Artificial Sequence
  Description of Artificial Sequence: Synthetic oligonucleotide
ggauucgcuuauuuccaaa

SEQ ID NO: 1945912 - RNA, 19 nt, Artificial Sequence
  Description of Artificial Sequence: Synthetic oligonucleotide
acccgcugaguugggagug

SEQ ID NO: 1945913 - RNA, 19 nt, Artificial Sequence
  Description of Artificial Sequence: Synthetic oligonucleotide
gaugcccugcggacuguac

SEQ ID NO: 1945914 - RNA, 19 nt, Artificial Sequence
  Description of Artificial Sequence: Synthetic oligonucleotide
agaugggaauagaaauauu

SEQ ID NO: 1945915 - RNA, 19 nt, Artificial Sequence
  Description of Artificial Sequence: Synthetic oligonucleotide
aggaugaagccaggauuaa

SEQ ID NO: 1945916 - RNA, 19 nt, Artificial Sequence
  Description of Artificial Sequence: Synthetic oligonucleotide
gaucacugagcugucuaau

SEQ ID NO: 1945917 - RNA, 19 nt, Artificial Sequence
  Description of Artificial Sequence: Synthetic oligonucleotide
augcucuaugcuaccaaua

SEQ ID NO: 1945918 - RNA, 19 nt, Artificial Sequence
  Description of Artificial Sequence: Synthetic oligonucleotide
guauagaauguuagguguu

SEQ ID NO: 1945919 - RNA, 19 nt, Artificial Sequence
  Description of Artificial Sequence: Synthetic oligonucleotide
ccacccgcugaguugggag

SEQ ID NO: 1945920 - RNA, 19 nt, Artificial Sequence
  Description of Artificial Sequence: Synthetic oligonucleotide
cuccauuauguacaugauu

SEQ ID NO: 1945921 - RNA, 19 nt, Artificial Sequence
  Description of Artificial Sequence: Synthetic oligonucleotide
uguaccggauucgcuuauu

SEQ ID NO: 1945922 - RNA, 19 nt, Artificial Sequence
  Description of Artificial Sequence: Synthetic oligonucleotide
uccgucucuuccgccucgc

SEQ ID NO: 1945923 - RNA, 19 nt, Artificial Sequence
  Description of Artificial Sequence: Synthetic oligonucleotide
guuugcacguuuagagacu

SEQ ID NO: 1945924 - RNA, 19 nt, Artificial Sequence
  Description of Artificial Sequence: Synthetic oligonucleotide
ugggcccugguccggcuuu

SEQ ID NO: 1945925 - RNA, 19 nt, Artificial Sequence
  Description of Artificial Sequence: Synthetic oligonucleotide
agagacccugagguaguau

SEQ ID NO: 1945926 - RNA, 19 nt, Artificial Sequence
  Description of Artificial Sequence: Synthetic oligonucleotide
caguagguucuugacauau

SEQ ID NO: 1945927 - RNA, 19 nt, Artificial Sequence
  Description of Artificial Sequence: Synthetic oligonucleotide
ccggauucgcuuauuucca

SEQ ID NO: 1945928 - RNA, 19 nt, Artificial Sequence
  Description of Artificial Sequence: Synthetic oligonucleotide
ggcugcgaguccgucacug

SEQ ID NO: 1945929 - RNA, 19 nt, Artificial Sequence
  Description of Artificial Sequence: Synthetic oligonucleotide
gaaaccgggagcgcaggau

SEQ ID NO: 1945930 - RNA, 19 nt, Artificial Sequence
  Description of Artificial Sequence: Synthetic oligonucleotide
acguggguggugaauccau

SEQ ID NO: 1945931 - RNA, 19 nt, Artificial Sequence
  Description of Artificial Sequence: Synthetic oligonucleotide
gguauaagggugaccuugu

SEQ ID NO: 1945932 - RNA, 19 nt, Artificial Sequence
  Description of Artificial Sequence: Synthetic oligonucleotide
aguugggaguggagggcga

SEQ ID NO: 1945933 - RNA, 19 nt, Artificial Sequence
  Description of Artificial Sequence: Synthetic oligonucleotide
guaccggauucgcuuauuu

SEQ ID NO: 1945934 - RNA, 19 nt, Artificial Sequence
  Description of Artificial Sequence: Synthetic oligonucleotide
gcuuauuuccaaaccaguu

SEQ ID NO: 1945935 - RNA, 19 nt, Artificial Sequence
  Description of Artificial Sequence: Synthetic oligonucleotide
caucugacuggcugcgagu

SEQ ID NO: 1945936 - RNA, 19 nt, Artificial Sequence
  Description of Artificial Sequence: Synthetic oligonucleotide
acuguacaucugacuggcu

SEQ ID NO: 1945937 - RNA, 19 nt, Artificial Sequence
  Description of Artificial Sequence: Synthetic oligonucleotide
cugcgaguccgucacugua

SEQ ID NO: 1945938 - RNA, 19 nt, Artificial Sequence
  Description of Artificial Sequence: Synthetic oligonucleotide
ggaugaagccaggauuaaa

SEQ ID NO: 1945939 - RNA, 19 nt, Artificial Sequence
  Description of Artificial Sequence: Synthetic oligonucleotide
gcgaguccgucacuguauc

SEQ ID NO: 1945940 - RNA, 19 nt, Artificial Sequence
  Description of Artificial Sequence: Synthetic oligonucleotide
ugaugcccugcggacugua

SEQ ID NO: 1945941 - RNA, 19 nt, Artificial Sequence
  Description of Artificial Sequence: Synthetic oligonucleotide
ggagggcgaguuagcuugg

SEQ ID NO: 1945942 - RNA, 19 nt, Artificial Sequence
  Description of Artificial Sequence: Synthetic oligonucleotide
guugaucacugagcugucu

SEQ ID NO: 1945943 - RNA, 19 nt, Artificial Sequence
  Description of Artificial Sequence: Synthetic oligonucleotide
agcugaacuugcgguggau

SEQ ID NO: 1945944 - RNA, 19 nt, Artificial Sequence
  Description of Artificial Sequence: Synthetic oligonucleotide
guaagaccugaaagaggua

SEQ ID NO: 1945945 - RNA, 19 nt, Artificial Sequence
  Description of Artificial Sequence: Synthetic oligonucleotide
ggguaaggguugcugagau

SEQ ID NO: 1945946 - RNA, 19 nt, Artificial Sequence
  Description of Artificial Sequence: Synthetic oligonucleotide
cacguggguggugaaucca

SEQ ID NO: 1945947 - RNA, 19 nt, Artificial Sequence
  Description of Artificial Sequence: Synthetic oligonucleotide
gguauccacccgcugaguu

SEQ ID NO: 1945948 - RNA, 19 nt, Artificial Sequence
  Description of Artificial Sequence: Synthetic oligonucleotide
ggccuagcuaauggguaac

SEQ ID NO: 1945949 - RNA, 19 nt, Artificial Sequence
  Description of Artificial Sequence: Synthetic oligonucleotide
gacagccguuuuggcagca

SEQ ID NO: 1945950 - RNA, 19 nt, Artificial Sequence
  Description of Artificial Sequence: Synthetic oligonucleotide
gguggugaauccauugcau

SEQ ID NO: 1945951 - RNA, 19 nt, Artificial Sequence
  Description of Artificial Sequence: Synthetic oligonucleotide
uggcugcgaguccgucacu

SEQ ID NO: 1945952 - RNA, 19 nt, Artificial Sequence
  Description of Artificial Sequence: Synthetic oligonucleotide
gggcgaguuagcuuggcuu

SEQ ID NO: 1945953 - RNA, 19 nt, Artificial Sequence
  Description of Artificial Sequence: Synthetic oligonucleotide
gacuggcugcgaguccguc

SEQ ID NO: 1945954 - RNA, 19 nt, Artificial Sequence
  Description of Artificial Sequence: Synthetic oligonucleotide
ccugguccggcuuugcucu

SEQ ID NO: 1945955 - RNA, 19 nt, Artificial Sequence
  Description of Artificial Sequence: Synthetic oligonucleotide
gcucuaugcuaccaauaau

SEQ ID NO: 1945956 - RNA, 19 nt, Artificial Sequence
  Description of Artificial Sequence: Synthetic oligonucleotide
cagccguuuuggcagcaua

SEQ ID NO: 1945957 - RNA, 19 nt, Artificial Sequence
  Description of Artificial Sequence: Synthetic oligonucleotide
augggcccugguccggcuu

SEQ ID NO: 1945958 - RNA, 19 nt, Artificial Sequence
  Description of Artificial Sequence: Synthetic oligonucleotide
ggauuaaaacucaggucuu

SEQ ID NO: 1945959 - RNA, 19 nt, Artificial Sequence
  Description of Artificial Sequence: Synthetic oligonucleotide
gcauaaauauuggcuuccu

SEQ ID NO: 1945960 - RNA, 19 nt, Artificial Sequence
  Description of Artificial Sequence: Synthetic oligonucleotide
gcggacuguacaucugacu

SEQ ID NO: 1945961 - RNA, 19 nt, Artificial Sequence
  Description of Artificial Sequence: Synthetic oligonucleotide
guggagggcgaguuagcuu

SEQ ID NO: 1945962 - RNA, 19 nt, Artificial Sequence
  Description of Artificial Sequence: Synthetic oligonucleotide
cacccgcugaguugggagu

SEQ ID NO: 1945963 - RNA, 19 nt, Artificial Sequence
  Description of Artificial Sequence: Synthetic oligonucleotide
cugucccaaggagaaugaa

SEQ ID NO: 1945964 - RNA, 19 nt, Artificial Sequence
  Description of Artificial Sequence: Synthetic oligonucleotide
cugguccggcuuugcucuc

SEQ ID NO: 1945965 - RNA, 19 nt, Artificial Sequence
  Description of Artificial Sequence: Synthetic oligonucleotide
caagggaggccuagcuaau

SEQ ID NO: 1945966 - RNA, 19 nt, Artificial Sequence
  Description of Artificial Sequence: Synthetic oligonucleotide
gccguuuuggcagcauaaa

SEQ ID NO: 1945967 - RNA, 19 nt, Artificial Sequence
  Description of Artificial Sequence: Synthetic oligonucleotide
ggcugacacauugguggca

SEQ ID NO: 1945968 - RNA, 19 nt, Artificial Sequence
  Description of Artificial Sequence: Synthetic oligonucleotide
auccacccgcugaguuggg

SEQ ID NO: 1945969 - RNA, 19 nt, Artificial Sequence
  Description of Artificial Sequence: Synthetic oligonucleotide
gcacguuuagagacugugu

SEQ ID NO: 1945970 - RNA, 19 nt, Artificial Sequence
  Description of Artificial Sequence: Synthetic oligonucleotide
gaacugucccaaggagaau

SEQ ID NO: 1945971 - RNA, 19 nt, Artificial Sequence
  Description of Artificial Sequence: Synthetic oligonucleotide
cacugaugcccugcggacu

SEQ ID NO: 1945972 - RNA, 19 nt, Artificial Sequence
  Description of Artificial Sequence: Synthetic oligonucleotide
cgcugaguugggaguggag

SEQ ID NO: 1945973 - RNA, 19 nt, Artificial Sequence
  Description of Artificial Sequence: Synthetic oligonucleotide
cccgcugaguugggagugg

SEQ ID NO: 1945974 - RNA, 19 nt, Artificial Sequence
  Description of Artificial Sequence: Synthetic oligonucleotide
cgcuuauuuccaaaccagu

SEQ ID NO: 1945975 - RNA, 19 nt, Artificial Sequence
  Description of Artificial Sequence: Synthetic oligonucleotide
gcaaggguauccacccgcu

SEQ ID NO: 1945976 - RNA, 19 nt, Artificial Sequence
  Description of Artificial Sequence: Synthetic oligonucleotide
caucacguggguggugaau

SEQ ID NO: 1945977 - RNA, 19 nt, Artificial Sequence
  Description of Artificial Sequence: Synthetic oligonucleotide
ggugaccuuguggaugaau

SEQ ID NO: 1945978 - RNA, 19 nt, Artificial Sequence
  Description of Artificial Sequence: Synthetic oligonucleotide
cagagacccugagguagua

SEQ ID NO: 1945979 - RNA, 19 nt, Artificial Sequence
  Description of Artificial Sequence: Synthetic oligonucleotide
gcugcgaguccgucacugu

SEQ ID NO: 1945980 - RNA, 19 nt, Artificial Sequence
  Description of Artificial Sequence: Synthetic oligonucleotide
guccggcuuugcucucgaa

SEQ ID NO: 1945981 - RNA, 19 nt, Artificial Sequence
  Description of Artificial Sequence: Synthetic oligonucleotide
gccuagcuaauggguaacu

SEQ ID NO: 1945982 - RNA, 19 nt, Artificial Sequence
  Description of Artificial Sequence: Synthetic oligonucleotide
cggcuuugcucucgaagga

SEQ ID NO: 1945983 - RNA, 19 nt, Artificial Sequence
  Description of Artificial Sequence: Synthetic oligonucleotide
ggagcaucaguagguucuu

SEQ ID NO: 1945984 - RNA, 19 nt, Artificial Sequence
  Description of Artificial Sequence: Synthetic oligonucleotide
ggcccugguccggcuuugc

SEQ ID NO: 1945985 - RNA, 19 nt, Artificial Sequence
  Description of Artificial Sequence: Synthetic oligonucleotide
ccuagcuaauggguaacuu

SEQ ID NO: 1945986 - RNA, 19 nt, Artificial Sequence
  Description of Artificial Sequence: Synthetic oligonucleotide
cgaguuagcuuggcuucca

SEQ ID NO: 1945987 - RNA, 19 nt, Artificial Sequence
  Description of Artificial Sequence: Synthetic oligonucleotide
ggguauccacccgcugagu

SEQ ID NO: 1945988 - RNA, 19 nt, Artificial Sequence
  Description of Artificial Sequence: Synthetic oligonucleotide
cugaugcccugcggacugu

SEQ ID NO: 1945989 - RNA, 19 nt, Artificial Sequence
  Description of Artificial Sequence: Synthetic oligonucleotide
cgucucuuccgccucgcau

SEQ ID NO: 1945990 - RNA, 19 nt, Artificial Sequence
  Description of Artificial Sequence: Synthetic oligonucleotide
ccgucucuuccgccucgca

SEQ ID NO: 1945991 - RNA, 19 nt, Artificial Sequence
  Description of Artificial Sequence: Synthetic oligonucleotide
cguggguggugaauccauu

SEQ ID NO: 1945992 - RNA, 19 nt, Artificial Sequence
  Description of Artificial Sequence: Synthetic oligonucleotide
uuuaucauaaccaaaggag

SEQ ID NO: 1945993 - RNA, 19 nt, Artificial Sequence
  Description of Artificial Sequence: Synthetic oligonucleotide
uauauguuguagcugaacg

SEQ ID NO: 1945994 - RNA, 19 nt, Artificial Sequence
  Description of Artificial Sequence: Synthetic oligonucleotide
uuuauaauaaccucaggug

SEQ ID NO: 1945995 - RNA, 19 nt, Artificial Sequence
  Description of Artificial Sequence: Synthetic oligonucleotide
uuaucauaaccaaaggagg

SEQ ID NO: 1945996 - RNA, 19 nt, Artificial Sequence
  Description of Artificial Sequence: Synthetic oligonucleotide
uuaaaagggaagaacugcg

SEQ ID NO: 1945997 - RNA, 19 nt, Artificial Sequence
  Description of Artificial Sequence: Synthetic oligonucleotide
uuauaauaaccucagguga

SEQ ID NO: 1945998 - RNA, 19 nt, Artificial Sequence
  Description of Artificial Sequence: Synthetic oligonucleotide
aauggauucuucuuaauau

SEQ ID NO: 1945999 - RNA, 19 nt, Artificial Sequence
  Description of Artificial Sequence: Synthetic oligonucleotide
uguauauuggaucugccca

SEQ ID NO: 1946000 - RNA, 19 nt, Artificial Sequence
  Description of Artificial Sequence: Synthetic oligonucleotide
gauauuacaacugugauua

SEQ ID NO: 1946001 - RNA, 19 nt, Artificial Sequence
  Description of Artificial Sequence: Synthetic oligonucleotide
aucgcaaucguccauauug

SEQ ID NO: 1946002 - RNA, 19 nt, Artificial Sequence
  Description of Artificial Sequence: Synthetic oligonucleotide
uuuucuguuguaaugcccc

SEQ ID NO: 1946003 - RNA, 19 nt, Artificial Sequence
  Description of Artificial Sequence: Synthetic oligonucleotide
auaaccauuagaaagagga

SEQ ID NO: 1946004 - RNA, 19 nt, Artificial Sequence
  Description of Artificial Sequence: Synthetic oligonucleotide
ugauuagagauguuggugc

SEQ ID NO: 1946005 - RNA, 19 nt, Artificial Sequence
  Description of Artificial Sequence: Synthetic oligonucleotide
aaccauuagaaagaggauc

SEQ ID NO: 1946006 - RNA, 19 nt, Artificial Sequence
  Description of Artificial Sequence: Synthetic oligonucleotide
uccauauugauucuaugug

SEQ ID NO: 1946007 - RNA, 19 nt, Artificial Sequence
  Description of Artificial Sequence: Synthetic oligonucleotide
agaaguacuuccuucgggg

SEQ ID NO: 1946008 - RNA, 19 nt, Artificial Sequence
  Description of Artificial Sequence: Synthetic oligonucleotide
uuuuacuacagagagcaag

SEQ ID NO: 1946009 - RNA, 19 nt, Artificial Sequence
  Description of Artificial Sequence: Synthetic oligonucleotide
caaucguccauauugauuc

SEQ ID NO: 1946010 - RNA, 19 nt, Artificial Sequence
  Description of Artificial Sequence: Synthetic oligonucleotide
uucauagauauuacaacug

SEQ ID NO: 1946011 - RNA, 19 nt, Artificial Sequence
  Description of Artificial Sequence: Synthetic oligonucleotide
uucuaugugcuguauauug

SEQ ID NO: 1946012 - RNA, 19 nt, Artificial Sequence
  Description of Artificial Sequence: Synthetic oligonucleotide
uccguuuauaauaaccuca

SEQ ID NO: 1946013 - RNA, 19 nt, Artificial Sequence
  Description of Artificial Sequence: Synthetic oligonucleotide
aguaaucugagacuccauc

SEQ ID NO: 1946014 - RNA, 19 nt, Artificial Sequence
  Description of Artificial Sequence: Synthetic oligonucleotide
uggauucuucuuaauaugc

SEQ ID NO: 1946015 - RNA, 19 nt, Artificial Sequence
  Description of Artificial Sequence: Synthetic oligonucleotide
ucauagauauuacaacugu

SEQ ID NO: 1946016 - RNA, 19 nt, Artificial Sequence
  Description of Artificial Sequence: Synthetic oligonucleotide
aaagggaagaacugcgucu

SEQ ID NO: 1946017 - RNA, 19 nt, Artificial Sequence
  Description of Artificial Sequence: Synthetic oligonucleotide
ucuccguuuauaauaaccu

SEQ ID NO: 1946018 - RNA, 19 nt, Artificial Sequence
  Description of Artificial Sequence: Synthetic oligonucleotide
uaucauaaccaaaggaggu

SEQ ID NO: 1946019 - RNA, 19 nt, Artificial Sequence
  Description of Artificial Sequence: Synthetic oligonucleotide
aaauguugaacuggcacag

SEQ ID NO: 1946020 - RNA, 19 nt, Artificial Sequence
  Description of Artificial Sequence: Synthetic oligonucleotide
uauaauaaccucaggugaa

SEQ ID NO: 1946021 - RNA, 19 nt, Artificial Sequence
  Description of Artificial Sequence: Synthetic oligonucleotide
agacacaguaucuggaauc

SEQ ID NO: 1946022 - RNA, 19 nt, Artificial Sequence
  Description of Artificial Sequence: Synthetic oligonucleotide
ucugauguuauggacagga

SEQ ID NO: 1946023 - RNA, 19 nt, Artificial Sequence
  Description of Artificial Sequence: Synthetic oligonucleotide
auuacaacugugauuagag

SEQ ID NO: 1946024 - RNA, 19 nt, Artificial Sequence
  Description of Artificial Sequence: Synthetic oligonucleotide
uuaauaugccaaaaugcaa

SEQ ID NO: 1946025 - RNA, 19 nt, Artificial Sequence
  Description of Artificial Sequence: Synthetic oligonucleotide
gauaauuggggauauuuaa

SEQ ID NO: 1946026 - RNA, 19 nt, Artificial Sequence
  Description of Artificial Sequence: Synthetic oligonucleotide
agcagaaguacuuccuucg

SEQ ID NO: 1946027 - RNA, 19 nt, Artificial Sequence
  Description of Artificial Sequence: Synthetic oligonucleotide
guuuauaauaaccucaggu

SEQ ID NO: 1946028 - RNA, 19 nt, Artificial Sequence
  Description of Artificial Sequence: Synthetic oligonucleotide
uuagguagcguuaugcuuu

SEQ ID NO: 1946029 - RNA, 19 nt, Artificial Sequence
  Description of Artificial Sequence: Synthetic oligonucleotide
caggauuucaucgcaaucg

SEQ ID NO: 1946030 - RNA, 19 nt, Artificial Sequence
  Description of Artificial Sequence: Synthetic oligonucleotide
aauaugccaaaaugcaaau

SEQ ID NO: 1946031 - RNA, 19 nt, Artificial Sequence
  Description of Artificial Sequence: Synthetic oligonucleotide
aaauugaaucuuuucugau

SEQ ID NO: 1946032 - RNA, 19 nt, Artificial Sequence
  Description of Artificial Sequence: Synthetic oligonucleotide
aauaaacucucuugacacu

SEQ ID NO: 1946033 - RNA, 19 nt, Artificial Sequence
  Description of Artificial Sequence: Synthetic oligonucleotide
uguaaugccccaguaaucu

SEQ ID NO: 1946034 - RNA, 19 nt, Artificial Sequence
  Description of Artificial Sequence: Synthetic oligonucleotide
cauauuuuguugcucccgg

SEQ ID NO: 1946035 - RNA, 19 nt, Artificial Sequence
  Description of Artificial Sequence: Synthetic oligonucleotide
aauuggggauauuuaauuu

SEQ ID NO: 1946036 - RNA, 19 nt, Artificial Sequence
  Description of Artificial Sequence: Synthetic oligonucleotide
acguauauguuguagcuga

SEQ ID NO: 1946037 - RNA, 19 nt, Artificial Sequence
  Description of Artificial Sequence: Synthetic oligonucleotide
cugaacguguaacaggugc

SEQ ID NO: 1946038 - RNA, 19 nt, Artificial Sequence
  Description of Artificial Sequence: Synthetic oligonucleotide
acuaucgagggccacagca

SEQ ID NO: 1946039 - RNA, 19 nt, Artificial Sequence
  Description of Artificial Sequence: Synthetic oligonucleotide
auagauauuacaacuguga

SEQ ID NO: 1946040 - RNA, 19 nt, Artificial Sequence
  Description of Artificial Sequence: Synthetic oligonucleotide
augugcuguauauuggauc

SEQ ID NO: 1946041 - RNA, 19 nt, Artificial Sequence
  Description of Artificial Sequence: Synthetic oligonucleotide
gagauggaggacuaucgag

SEQ ID NO: 1946042 - RNA, 19 nt, Artificial Sequence
  Description of Artificial Sequence: Synthetic oligonucleotide
acagaucaccgucucauuc

SEQ ID NO: 1946043 - RNA, 19 nt, Artificial Sequence
  Description of Artificial Sequence: Synthetic oligonucleotide
ugcacguauauguuguagc

SEQ ID NO: 1946044 - RNA, 19 nt, Artificial Sequence
  Description of Artificial Sequence: Synthetic oligonucleotide
gaugcauacuuagagucag

SEQ ID NO: 1946045 - RNA, 19 nt, Artificial Sequence
  Description of Artificial Sequence: Synthetic oligonucleotide
ugauagguggugaugcuac

SEQ ID NO: 1946046 - RNA, 19 nt, Artificial Sequence
  Description of Artificial Sequence: Synthetic oligonucleotide
uagauauuacaacugugau

SEQ ID NO: 1946047 - RNA, 19 nt, Artificial Sequence
  Description of Artificial Sequence: Synthetic oligonucleotide
cuuccuucggggaucauag

SEQ ID NO: 1946048 - RNA, 19 nt, Artificial Sequence
  Description of Artificial Sequence: Synthetic oligonucleotide
uccuucggggaucauagcc

SEQ ID NO: 1946049 - RNA, 19 nt, Artificial Sequence
  Description of Artificial Sequence: Synthetic oligonucleotide
cauagauauuacaacugug

SEQ ID NO: 1946050 - RNA, 19 nt, Artificial Sequence
  Description of Artificial Sequence: Synthetic oligonucleotide
acugugauuagagauguug

SEQ ID NO: 1946051 - RNA, 19 nt, Artificial Sequence
  Description of Artificial Sequence: Synthetic oligonucleotide
ugccccaguaaucugagac

SEQ ID NO: 1946052 - RNA, 19 nt, Artificial Sequence
  Description of Artificial Sequence: Synthetic oligonucleotide
uauuuuguugcucccgggu

SEQ ID NO: 1946053 - RNA, 19 nt, Artificial Sequence
  Description of Artificial Sequence: Synthetic oligonucleotide
uuuuguugcucccggguug

SEQ ID NO: 1946054 - RNA, 19 nt, Artificial Sequence
  Description of Artificial Sequence: Synthetic oligonucleotide
uuauggacaggagaaacac

SEQ ID NO: 1946055 - RNA, 19 nt, Artificial Sequence
  Description of Artificial Sequence: Synthetic oligonucleotide
aaauccgagucagccaugg

SEQ ID NO: 1946056 - RNA, 19 nt, Artificial Sequence
  Description of Artificial Sequence: Synthetic oligonucleotide
cuguauauuggaucugccc

SEQ ID NO: 1946057 - RNA, 19 nt, Artificial Sequence
  Description of Artificial Sequence: Synthetic oligonucleotide
acuggcacaggauuucauc

SEQ ID NO: 1946058 - RNA, 19 nt, Artificial Sequence
  Description of Artificial Sequence: Synthetic oligonucleotide
auuggaucugcccacuucu

SEQ ID NO: 1946059 - RNA, 19 nt, Artificial Sequence
  Description of Artificial Sequence: Synthetic oligonucleotide
uggaggacuaucgagggcc

SEQ ID NO: 1946060 - RNA, 19 nt, Artificial Sequence
  Description of Artificial Sequence: Synthetic oligonucleotide
ugauaaccauuagaaagag

SEQ ID NO: 1946061 - RNA, 19 nt, Artificial Sequence
  Description of Artificial Sequence: Synthetic oligonucleotide
acacugcauaggcagauuc

SEQ ID NO: 1946062 - RNA, 19 nt, Artificial Sequence
  Description of Artificial Sequence: Synthetic oligonucleotide
uaaaagggaagaacugcgu

SEQ ID NO: 1946063 - RNA, 19 nt, Artificial Sequence
  Description of Artificial Sequence: Synthetic oligonucleotide
ucugugcacguauauguug

SEQ ID NO: 1946064 - RNA, 19 nt, Artificial Sequence
  Description of Artificial Sequence: Synthetic oligonucleotide
cacaguaucuggaauccag

SEQ ID NO: 1946065 - RNA, 19 nt, Artificial Sequence
  Description of Artificial Sequence: Synthetic oligonucleotide
agaggaucaaaggaacaac

SEQ ID NO: 1946066 - RNA, 19 nt, Artificial Sequence
  Description of Artificial Sequence: Synthetic oligonucleotide
auuuguucauagauauuac

SEQ ID NO: 1946067 - RNA, 19 nt, Artificial Sequence
  Description of Artificial Sequence: Synthetic oligonucleotide
acaggauuucaucgcaauc

SEQ ID NO: 1946068 - RNA, 19 nt, Artificial Sequence
  Description of Artificial Sequence: Synthetic oligonucleotide
uacuacagagagcaaggac

SEQ ID NO: 1946069 - RNA, 19 nt, Artificial Sequence
  Description of Artificial Sequence: Synthetic oligonucleotide
ugaacguguaacaggugcu

SEQ ID NO: 1946070 - RNA, 19 nt, Artificial Sequence
  Description of Artificial Sequence: Synthetic oligonucleotide
agauauuacaacugugauu

SEQ ID NO: 1946071 - RNA, 19 nt, Artificial Sequence
  Description of Artificial Sequence: Synthetic oligonucleotide
auauuuuguugcucccggg

SEQ ID NO: 1946072 - RNA, 19 nt, Artificial Sequence
  Description of Artificial Sequence: Synthetic oligonucleotide
ugucggcacauaauaaacu

SEQ ID NO: 1946073 - RNA, 19 nt, Artificial Sequence
  Description of Artificial Sequence: Synthetic oligonucleotide
uccaucuacugagacacag

SEQ ID NO: 1946074 - RNA, 19 nt, Artificial Sequence
  Description of Artificial Sequence: Synthetic oligonucleotide
gaauccaguguggacauug

SEQ ID NO: 1946075 - RNA, 19 nt, Artificial Sequence
  Description of Artificial Sequence: Synthetic oligonucleotide
cucuugacacugcauaggc

SEQ ID NO: 1946076 - RNA, 19 nt, Artificial Sequence
  Description of Artificial Sequence: Synthetic oligonucleotide
acaacaaucagaauccaaa

SEQ ID NO: 1946077 - RNA, 19 nt, Artificial Sequence
  Description of Artificial Sequence: Synthetic oligonucleotide
ugcauaggcagauucuuuc

SEQ ID NO: 1946078 - RNA, 19 nt, Artificial Sequence
  Description of Artificial Sequence: Synthetic oligonucleotide
cuacuuaaaagggaagaac

SEQ ID NO: 1946079 - RNA, 19 nt, Artificial Sequence
  Description of Artificial Sequence: Synthetic oligonucleotide
aagaacugcgucucuguau

SEQ ID NO: 1946080 - RNA, 19 nt, Artificial Sequence
  Description of Artificial Sequence: Synthetic oligonucleotide
gauaaccauuagaaagagg

SEQ ID NO: 1946081 - RNA, 19 nt, Artificial Sequence
  Description of Artificial Sequence: Synthetic oligonucleotide
uaaucugagacuccaucua

SEQ ID NO: 1946082 - RNA, 19 nt, Artificial Sequence
  Description of Artificial Sequence: Synthetic oligonucleotide
acuuagguagcguuaugcu

SEQ ID NO: 1946083 - RNA, 19 nt, Artificial Sequence
  Description of Artificial Sequence: Synthetic oligonucleotide
ucucuuaaauggauucuuc

SEQ ID NO: 1946084 - RNA, 19 nt, Artificial Sequence
  Description of Artificial Sequence: Synthetic oligonucleotide
ugccaagugaugcauacuu

SEQ ID NO: 1946085 - RNA, 19 nt, Artificial Sequence
  Description of Artificial Sequence: Synthetic oligonucleotide
uggacauugaaauguugaa

SEQ ID NO: 1946086 - RNA, 19 nt, Artificial Sequence
  Description of Artificial Sequence: Synthetic oligonucleotide
aaacucucuugacacugca

SEQ ID NO: 1946087 - RNA, 19 nt, Artificial Sequence
  Description of Artificial Sequence: Synthetic oligonucleotide
ucggcacauaauaaacucu

SEQ ID NO: 1946088 - RNA, 19 nt, Artificial Sequence
  Description of Artificial Sequence: Synthetic oligonucleotide
uuguuuccggguuauugug

SEQ ID NO: 1946089 - RNA, 19 nt, Artificial Sequence
  Description of Artificial Sequence: Synthetic oligonucleotide
auuucaucgcaaucgucca

SEQ ID NO: 1946090 - RNA, 19 nt, Artificial Sequence
  Description of Artificial Sequence: Synthetic oligonucleotide
cauaaccaaaggagguggg

SEQ ID NO: 1946091 - RNA, 19 nt, Artificial Sequence
  Description of Artificial Sequence: Synthetic oligonucleotide
acuuaaaagggaagaacug

SEQ ID NO: 1946092 - RNA, 19 nt, Artificial Sequence
  Description of Artificial Sequence: Synthetic oligonucleotide
uuccggguuauuguguggg

SEQ ID NO: 1946093 - RNA, 19 nt, Artificial Sequence
  Description of Artificial Sequence: Synthetic oligonucleotide
ugcuguauauuggaucugc

SEQ ID NO: 1946094 - RNA, 19 nt, Artificial Sequence
  Description of Artificial Sequence: Synthetic oligonucleotide
auaaccaaaggaggugggg

SEQ ID NO: 1946095 - RNA, 19 nt, Artificial Sequence
  Description of Artificial Sequence: Synthetic oligonucleotide
ugugugggaggaaauccga

SEQ ID NO: 1946096 - RNA, 19 nt, Artificial Sequence
  Description of Artificial Sequence: Synthetic oligonucleotide
uuacaacugugauuagaga

SEQ ID NO: 1946097 - RNA, 19 nt, Artificial Sequence
  Description of Artificial Sequence: Synthetic oligonucleotide
guauauuggaucugcccac

SEQ ID NO: 1946098 - RNA, 19 nt, Artificial Sequence
  Description of Artificial Sequence: Synthetic oligonucleotide
cucuguauuggagauggag

SEQ ID NO: 1946099 - RNA, 19 nt, Artificial Sequence
  Description of Artificial Sequence: Synthetic oligonucleotide
cuggcugguacgaugugcc

SEQ ID NO: 1946100 - RNA, 19 nt, Artificial Sequence
  Description of Artificial Sequence: Synthetic oligonucleotide
guagcugaacguguaacag

SEQ ID NO: 1946101 - RNA, 19 nt, Artificial Sequence
  Description of Artificial Sequence: Synthetic oligonucleotide
cauacuuagagucagguuu

SEQ ID NO: 1946102 - RNA, 19 nt, Artificial Sequence
  Description of Artificial Sequence: Synthetic oligonucleotide
aaacauugagaaugagcuu

SEQ ID NO: 1946103 - RNA, 19 nt, Artificial Sequence
  Description of Artificial Sequence: Synthetic oligonucleotide
cuguauuggagauggagga

SEQ ID NO: 1946104 - RNA, 19 nt, Artificial Sequence
  Description of Artificial Sequence: Synthetic oligonucleotide
uucuucuuaauaugccaaa

SEQ ID NO: 1946105 - RNA, 19 nt, Artificial Sequence
  Description of Artificial Sequence: Synthetic oligonucleotide
aucauaaccaaaggaggug

SEQ ID NO: 1946106 - RNA, 19 nt, Artificial Sequence
  Description of Artificial Sequence: Synthetic oligonucleotide
uaaccauuagaaagaggau

SEQ ID NO: 1946107 - RNA, 19 nt, Artificial Sequence
  Description of Artificial Sequence: Synthetic oligonucleotide
gucggcacauaauaaacuc

SEQ ID NO: 1946108 - RNA, 19 nt, Artificial Sequence
  Description of Artificial Sequence: Synthetic oligonucleotide
agaacugcgucucuguauu

SEQ ID NO: 1946109 - RNA, 19 nt, Artificial Sequence
  Description of Artificial Sequence: Synthetic oligonucleotide
ugcauacuuagagucaggu

SEQ ID NO: 1946110 - RNA, 19 nt, Artificial Sequence
  Description of Artificial Sequence: Synthetic oligonucleotide
gagaaugagcuugucgccc

SEQ ID NO: 1946111 - RNA, 19 nt, Artificial Sequence
  Description of Artificial Sequence: Synthetic oligonucleotide
uguuuccggguuauugugu

SEQ ID NO: 1946112 - RNA, 19 nt, Artificial Sequence
  Description of Artificial Sequence: Synthetic oligonucleotide
auggaggacuaucgagggc

SEQ ID NO: 1946113 - RNA, 19 nt, Artificial Sequence
  Description of Artificial Sequence: Synthetic oligonucleotide
acguguaacaggugcuguc

SEQ ID NO: 1946114 - RNA, 19 nt, Artificial Sequence
  Description of Artificial Sequence: Synthetic oligonucleotide
ucgcaaucguccauauuga

SEQ ID NO: 1946115 - RNA, 19 nt, Artificial Sequence
  Description of Artificial Sequence: Synthetic oligonucleotide
uaugugcuguauauuggau

SEQ ID NO: 1946116 - RNA, 19 nt, Artificial Sequence
  Description of Artificial Sequence: Synthetic oligonucleotide
auucucaaggacagcuggc

SEQ ID NO: 1946117 - RNA, 19 nt, Artificial Sequence
  Description of Artificial Sequence: Synthetic oligonucleotide
cuaucgagggccacagcag

SEQ ID NO: 1946118 - RNA, 19 nt, Artificial Sequence
  Description of Artificial Sequence: Synthetic oligonucleotide
agagagcaaggacuuaggu

SEQ ID NO: 1946119 - RNA, 19 nt, Artificial Sequence
  Description of Artificial Sequence: Synthetic oligonucleotide
uuguaaugccccaguaauc

SEQ ID NO: 1946120 - RNA, 19 nt, Artificial Sequence
  Description of Artificial Sequence: Synthetic oligonucleotide
gaggaucaaaggaacaaca

SEQ ID NO: 1946121 - RNA, 19 nt, Artificial Sequence
  Description of Artificial Sequence: Synthetic oligonucleotide
aggauuucaucgcaaucgu

SEQ ID NO: 1946122 - RNA, 19 nt, Artificial Sequence
  Description of Artificial Sequence: Synthetic oligonucleotide
ucuggaauccaguguggac

SEQ ID NO: 1946123 - RNA, 19 nt, Artificial Sequence
  Description of Artificial Sequence: Synthetic oligonucleotide
guuuccggguuauugugug

SEQ ID NO: 1946124 - RNA, 19 nt, Artificial Sequence
  Description of Artificial Sequence: Synthetic oligonucleotide
ugauucuaugugcuguaua

SEQ ID NO: 1946125 - RNA, 19 nt, Artificial Sequence
  Description of Artificial Sequence: Synthetic oligonucleotide
uggcccagacagauaauug

SEQ ID NO: 1946126 - RNA, 19 nt, Artificial Sequence
  Description of Artificial Sequence: Synthetic oligonucleotide
auucuccguuuauaauaac

SEQ ID NO: 1946127 - RNA, 19 nt, Artificial Sequence
  Description of Artificial Sequence: Synthetic oligonucleotide
ucacagaucaccgucucau

SEQ ID NO: 1946128 - RNA, 19 nt, Artificial Sequence
  Description of Artificial Sequence: Synthetic oligonucleotide
ugccauucuccguuuauaa

SEQ ID NO: 1946129 - RNA, 19 nt, Artificial Sequence
  Description of Artificial Sequence: Synthetic oligonucleotide
gguacgaugugccaaguga

SEQ ID NO: 1946130 - RNA, 19 nt, Artificial Sequence
  Description of Artificial Sequence: Synthetic oligonucleotide
caguaucuggaauccagug

SEQ ID NO: 1946131 - RNA, 19 nt, Artificial Sequence
  Description of Artificial Sequence: Synthetic oligonucleotide
uguuguagcugaacgugua

SEQ ID NO: 1946132 - RNA, 19 nt, Artificial Sequence
  Description of Artificial Sequence: Synthetic oligonucleotide
agauguuggugcaggaauc

SEQ ID NO: 1946133 - RNA, 19 nt, Artificial Sequence
  Description of Artificial Sequence: Synthetic oligonucleotide
guuguaaugccccaguaau

SEQ ID NO: 1946134 - RNA, 19 nt, Artificial Sequence
  Description of Artificial Sequence: Synthetic oligonucleotide
aaucguccauauugauucu

SEQ ID NO: 1946135 - RNA, 19 nt, Artificial Sequence
  Description of Artificial Sequence: Synthetic oligonucleotide
cuccguuuauaauaaccuc

SEQ ID NO: 1946136 - RNA, 19 nt, Artificial Sequence
  Description of Artificial Sequence: Synthetic oligonucleotide
ggaucauagccucaguuuc

SEQ ID NO: 1946137 - RNA, 19 nt, Artificial Sequence
  Description of Artificial Sequence: Synthetic oligonucleotide
ucccugucggcacauaaua

SEQ ID NO: 1946138 - RNA, 19 nt, Artificial Sequence
  Description of Artificial Sequence: Synthetic oligonucleotide
agcugaacguguaacaggu

SEQ ID NO: 1946139 - RNA, 19 nt, Artificial Sequence
  Description of Artificial Sequence: Synthetic oligonucleotide
agaaugagcuugucgcccu

SEQ ID NO: 1946140 - RNA, 19 nt, Artificial Sequence
  Description of Artificial Sequence: Synthetic oligonucleotide
uuguagcugaacguguaac

SEQ ID NO: 1946141 - RNA, 19 nt, Artificial Sequence
  Description of Artificial Sequence: Synthetic oligonucleotide
guaaucugagacuccaucu

SEQ ID NO: 1946142 - RNA, 19 nt, Artificial Sequence
  Description of Artificial Sequence: Synthetic oligonucleotide
ucguccauauugauucuau

SEQ ID NO: 1946143 - RNA, 19 nt, Artificial Sequence
  Description of Artificial Sequence: Synthetic oligonucleotide
cugccugaccccacgaggc

SEQ ID NO: 1946144 - RNA, 19 nt, Artificial Sequence
  Description of Artificial Sequence: Synthetic oligonucleotide
uguauuggagauggaggac

SEQ ID NO: 1946145 - RNA, 19 nt, Artificial Sequence
  Description of Artificial Sequence: Synthetic oligonucleotide
aacaacaaucagaauccaa

SEQ ID NO: 1946146 - RNA, 19 nt, Artificial Sequence
  Description of Artificial Sequence: Synthetic oligonucleotide
uucacagaucaccgucuca

SEQ ID NO: 1946147 - RNA, 19 nt, Artificial Sequence
  Description of Artificial Sequence: Synthetic oligonucleotide
auagguggugaugcuacag

SEQ ID NO: 1946148 - RNA, 19 nt, Artificial Sequence
  Description of Artificial Sequence: Synthetic oligonucleotide
ugaccccaugccauucucc

SEQ ID NO: 1946149 - RNA, 19 nt, Artificial Sequence
  Description of Artificial Sequence: Synthetic oligonucleotide
uauauuggaucugcccacu

SEQ ID NO: 1946150 - RNA, 19 nt, Artificial Sequence
  Description of Artificial Sequence: Synthetic oligonucleotide
gucuggaagugucacugug

SEQ ID NO: 1946151 - RNA, 19 nt, Artificial Sequence
  Description of Artificial Sequence: Synthetic oligonucleotide
uuacuacagagagcaagga

SEQ ID NO: 1946152 - RNA, 19 nt, Artificial Sequence
  Description of Artificial Sequence: Synthetic oligonucleotide
ugguacgaugugccaagug

SEQ ID NO: 1946153 - RNA, 19 nt, Artificial Sequence
  Description of Artificial Sequence: Synthetic oligonucleotide
auauuacaacugugauuag

SEQ ID NO: 1946154 - RNA, 19 nt, Artificial Sequence
  Description of Artificial Sequence: Synthetic oligonucleotide
agcaaggacuuagguagcg

SEQ ID NO: 1946155 - RNA, 19 nt, Artificial Sequence
  Description of Artificial Sequence: Synthetic oligonucleotide
uagcuuuaacucuggccca

SEQ ID NO: 1946156 - RNA, 19 nt, Artificial Sequence
  Description of Artificial Sequence: Synthetic oligonucleotide
cuggaauccaguguggaca

SEQ ID NO: 1946157 - RNA, 19 nt, Artificial Sequence
  Description of Artificial Sequence: Synthetic oligonucleotide
ccguuuauaauaaccucag

SEQ ID NO: 1946158 - RNA, 19 nt, Artificial Sequence
  Description of Artificial Sequence: Synthetic oligonucleotide
agugauagguggugaugcu

SEQ ID NO: 1946159 - RNA, 19 nt, Artificial Sequence
  Description of Artificial Sequence: Synthetic oligonucleotide
aacguguaacaggugcugu

SEQ ID NO: 1946160 - RNA, 19 nt, Artificial Sequence
  Description of Artificial Sequence: Synthetic oligonucleotide
guugcucccggguugucug

SEQ ID NO: 1946161 - RNA, 19 nt, Artificial Sequence
  Description of Artificial Sequence: Synthetic oligonucleotide
guuauggacaggagaaaca

SEQ ID NO: 1946162 - RNA, 19 nt, Artificial Sequence
  Description of Artificial Sequence: Synthetic oligonucleotide
augaccccaugccauucuc

SEQ ID NO: 1946163 - RNA, 19 nt, Artificial Sequence
  Description of Artificial Sequence: Synthetic oligonucleotide
gagauguuggugcaggaau

SEQ ID NO: 1946164 - RNA, 19 nt, Artificial Sequence
  Description of Artificial Sequence: Synthetic oligonucleotide
guauauguuguagcugaac

SEQ ID NO: 1946165 - RNA, 19 nt, Artificial Sequence
  Description of Artificial Sequence: Synthetic oligonucleotide
aaggaacaacaaucagaau

SEQ ID NO: 1946166 - RNA, 19 nt, Artificial Sequence
  Description of Artificial Sequence: Synthetic oligonucleotide
caucuacugagacacagua

SEQ ID NO: 1946167 - RNA, 19 nt, Artificial Sequence
  Description of Artificial Sequence: Synthetic oligonucleotide
agacagauaauuggggaua

SEQ ID NO: 1946168 - RNA, 19 nt, Artificial Sequence
  Description of Artificial Sequence: Synthetic oligonucleotide
cacgaggccacugucggag

SEQ ID NO: 1946169 - RNA, 19 nt, Artificial Sequence
  Description of Artificial Sequence: Synthetic oligonucleotide
uucaucgcaaucguccaua

SEQ ID NO: 1946170 - RNA, 19 nt, Artificial Sequence
  Description of Artificial Sequence: Synthetic oligonucleotide
uuucaucgcaaucguccau

SEQ ID NO: 1946171 - RNA, 19 nt, Artificial Sequence
  Description of Artificial Sequence: Synthetic oligonucleotide
ggacauugaaauguugaac

SEQ ID NO: 1946172 - RNA, 19 nt, Artificial Sequence
  Description of Artificial Sequence: Synthetic oligonucleotide
cagaauccaaauugaaucu

SEQ ID NO: 1946173 - RNA, 19 nt, Artificial Sequence
  Description of Artificial Sequence: Synthetic oligonucleotide
acgugugguuuaucauaac

SEQ ID NO: 1946174 - RNA, 19 nt, Artificial Sequence
  Description of Artificial Sequence: Synthetic oligonucleotide
cuucggggaucauagccuc

SEQ ID NO: 1946175 - RNA, 19 nt, Artificial Sequence
  Description of Artificial Sequence: Synthetic oligonucleotide
gaucauagccucaguuuca

SEQ ID NO: 1946176 - RNA, 19 nt, Artificial Sequence
  Description of Artificial Sequence: Synthetic oligonucleotide
uuuguugcucccggguugu

SEQ ID NO: 1946177 - RNA, 19 nt, Artificial Sequence
  Description of Artificial Sequence: Synthetic oligonucleotide
cacguauauguuguagcug

SEQ ID NO: 1946178 - RNA, 19 nt, Artificial Sequence
  Description of Artificial Sequence: Synthetic oligonucleotide
uggagugauagguggugau

SEQ ID NO: 1946179 - RNA, 19 nt, Artificial Sequence
  Description of Artificial Sequence: Synthetic oligonucleotide
cugcgucucuguauuggag

SEQ ID NO: 1946180 - RNA, 19 nt, Artificial Sequence
  Description of Artificial Sequence: Synthetic oligonucleotide
gugcacguauauguuguag

SEQ ID NO: 1946181 - RNA, 19 nt, Artificial Sequence
  Description of Artificial Sequence: Synthetic oligonucleotide
agcacgugugguuuaucau

SEQ ID NO: 1946182 - RNA, 19 nt, Artificial Sequence
  Description of Artificial Sequence: Synthetic oligonucleotide
uguccaaaauuagcuuuaa

SEQ ID NO: 1946183 - RNA, 19 nt, Artificial Sequence
  Description of Artificial Sequence: Synthetic oligonucleotide
aauccgagucagccaugga

SEQ ID NO: 1946184 - RNA, 19 nt, Artificial Sequence
  Description of Artificial Sequence: Synthetic oligonucleotide
ggugaugcuacagggcucc

SEQ ID NO: 1946185 - RNA, 19 nt, Artificial Sequence
  Description of Artificial Sequence: Synthetic oligonucleotide
agcuuuaacucuggcccag

SEQ ID NO: 1946186 - RNA, 19 nt, Artificial Sequence
  Description of Artificial Sequence: Synthetic oligonucleotide
gggaggaaauccgagucag

SEQ ID NO: 1946187 - RNA, 19 nt, Artificial Sequence
  Description of Artificial Sequence: Synthetic oligonucleotide
uccgacugguuacuacuua

SEQ ID NO: 1946188 - RNA, 19 nt, Artificial Sequence
  Description of Artificial Sequence: Synthetic oligonucleotide
acgaggccacugucggagc

SEQ ID NO: 1946189 - RNA, 19 nt, Artificial Sequence
  Description of Artificial Sequence: Synthetic oligonucleotide
gcccagacagauaauuggg

SEQ ID NO: 1946190 - RNA, 19 nt, Artificial Sequence
  Description of Artificial Sequence: Synthetic oligonucleotide
gaagaacugcgucucugua

SEQ ID NO: 1946191 - RNA, 19 nt, Artificial Sequence
  Description of Artificial Sequence: Synthetic oligonucleotide
ucaucgcaaucguccauau

SEQ ID NO: 1946192 - RNA, 19 nt, Artificial Sequence
  Description of Artificial Sequence: Synthetic oligonucleotide
gaacugcgucucuguauug

SEQ ID NO: 1946193 - RNA, 19 nt, Artificial Sequence
  Description of Artificial Sequence: Synthetic oligonucleotide
auacuuagagucagguuuu

SEQ ID NO: 1946194 - RNA, 19 nt, Artificial Sequence
  Description of Artificial Sequence: Synthetic oligonucleotide
cagcacgugugguuuauca

SEQ ID NO: 1946195 - RNA, 19 nt, Artificial Sequence
  Description of Artificial Sequence: Synthetic oligonucleotide
acauugagaaugagcuugu

SEQ ID NO: 1946196 - RNA, 19 nt, Artificial Sequence
  Description of Artificial Sequence: Synthetic oligonucleotide
cuguccaaaauuagcuuua

SEQ ID NO: 1946197 - RNA, 19 nt, Artificial Sequence
  Description of Artificial Sequence: Synthetic oligonucleotide
ucauagccucaguuucacu

SEQ ID NO: 1946198 - RNA, 19 nt, Artificial Sequence
  Description of Artificial Sequence: Synthetic oligonucleotide
auguuguagcugaacgugu

SEQ ID NO: 1946199 - RNA, 19 nt, Artificial Sequence
  Description of Artificial Sequence: Synthetic oligonucleotide
uggagccguuucuggagug

SEQ ID NO: 1946200 - RNA, 19 nt, Artificial Sequence
  Description of Artificial Sequence: Synthetic oligonucleotide
uguugcucccggguugucu

SEQ ID NO: 1946201 - RNA, 19 nt, Artificial Sequence
  Description of Artificial Sequence: Synthetic oligonucleotide
uccggguuauuguguggga

SEQ ID NO: 1946202 - RNA, 19 nt, Artificial Sequence
  Description of Artificial Sequence: Synthetic oligonucleotide
gugugggaggaaauccgag

SEQ ID NO: 1946203 - RNA, 19 nt, Artificial Sequence
  Description of Artificial Sequence: Synthetic oligonucleotide
ccauucuccguuuauaaua

SEQ ID NO: 1946204 - RNA, 19 nt, Artificial Sequence
  Description of Artificial Sequence: Synthetic oligonucleotide
ugugcacguauauguugua

SEQ ID NO: 1946205 - RNA, 19 nt, Artificial Sequence
  Description of Artificial Sequence: Synthetic oligonucleotide
auaugccaaaaugcaaaua

SEQ ID NO: 1946206 - RNA, 19 nt, Artificial Sequence
  Description of Artificial Sequence: Synthetic oligonucleotide
cugugcacguauauguugu

SEQ ID NO: 1946207 - RNA, 19 nt, Artificial Sequence
  Description of Artificial Sequence: Synthetic oligonucleotide
ggagauggaggacuaucga

SEQ ID NO: 1946208 - RNA, 19 nt, Artificial Sequence
  Description of Artificial Sequence: Synthetic oligonucleotide
uuccuucggggaucauagc

SEQ ID NO: 1946209 - RNA, 19 nt, Artificial Sequence
  Description of Artificial Sequence: Synthetic oligonucleotide
accccacgaggccacuguc

SEQ ID NO: 1946210 - RNA, 19 nt, Artificial Sequence
  Description of Artificial Sequence: Synthetic oligonucleotide
gaaauccgagucagccaug

SEQ ID NO: 1946211 - RNA, 19 nt, Artificial Sequence
  Description of Artificial Sequence: Synthetic oligonucleotide
gugguuuaucauaaccaaa

SEQ ID NO: 1946212 - RNA, 19 nt, Artificial Sequence
  Description of Artificial Sequence: Synthetic oligonucleotide
auauuggaucugcccacuu

SEQ ID NO: 1946213 - RNA, 19 nt, Artificial Sequence
  Description of Artificial Sequence: Synthetic oligonucleotide
cuuagguagcguuaugcuu

SEQ ID NO: 1946214 - RNA, 19 nt, Artificial Sequence
  Description of Artificial Sequence: Synthetic oligonucleotide
ggcacaggauuucaucgca

SEQ ID NO: 1946215 - RNA, 19 nt, Artificial Sequence
  Description of Artificial Sequence: Synthetic oligonucleotide
gaacuggcacaggauuuca

SEQ ID NO: 1946216 - RNA, 19 nt, Artificial Sequence
  Description of Artificial Sequence: Synthetic oligonucleotide
acuuccuucggggaucaua

SEQ ID NO: 1946217 - RNA, 19 nt, Artificial Sequence
  Description of Artificial Sequence: Synthetic oligonucleotide
uagguagcguuaugcuuuu

SEQ ID NO: 1946218 - RNA, 19 nt, Artificial Sequence
  Description of Artificial Sequence: Synthetic oligonucleotide
uugucgcccuucucucuga

SEQ ID NO: 1946219 - RNA, 19 nt, Artificial Sequence
  Description of Artificial Sequence: Synthetic oligonucleotide
cagacagauaauuggggau

SEQ ID NO: 1946220 - RNA, 19 nt, Artificial Sequence
  Description of Artificial Sequence: Synthetic oligonucleotide
cuacugagacacaguaucu

SEQ ID NO: 1946221 - RNA, 19 nt, Artificial Sequence
  Description of Artificial Sequence: Synthetic oligonucleotide
cguuuauaauaaccucagg

SEQ ID NO: 1946222 - RNA, 19 nt, Artificial Sequence
  Description of Artificial Sequence: Synthetic oligonucleotide
cccacgaggccacugucgg

SEQ ID NO: 1946223 - RNA, 19 nt, Artificial Sequence
  Description of Artificial Sequence: Synthetic oligonucleotide
uggcugguacgaugugcca

SEQ ID NO: 1946224 - RNA, 19 nt, Artificial Sequence
  Description of Artificial Sequence: Synthetic oligonucleotide
augcuacagggcuccgacu

SEQ ID NO: 1946225 - RNA, 19 nt, Artificial Sequence
  Description of Artificial Sequence: Synthetic oligonucleotide
gcuguauauuggaucugcc

SEQ ID NO: 1946226 - RNA, 19 nt, Artificial Sequence
  Description of Artificial Sequence: Synthetic oligonucleotide
gaugugccaagugaugcau

SEQ ID NO: 1946227 - RNA, 19 nt, Artificial Sequence
  Description of Artificial Sequence: Synthetic oligonucleotide
gcacgugugguuuaucaua

SEQ ID NO: 1946228 - RNA, 19 nt, Artificial Sequence
  Description of Artificial Sequence: Synthetic oligonucleotide
gccucaguuucacuuaaaa

SEQ ID NO: 1946229 - RNA, 19 nt, Artificial Sequence
  Description of Artificial Sequence: Synthetic oligonucleotide
gcacguauauguuguagcu

SEQ ID NO: 1946230 - RNA, 19 nt, Artificial Sequence
  Description of Artificial Sequence: Synthetic oligonucleotide
ccaguguggacauugaaau

SEQ ID NO: 1946231 - RNA, 19 nt, Artificial Sequence
  Description of Artificial Sequence: Synthetic oligonucleotide
cauugagaaugagcuuguc

SEQ ID NO: 1946232 - RNA, 19 nt, Artificial Sequence
  Description of Artificial Sequence: Synthetic oligonucleotide
ugucgcccuucucucugau

SEQ ID NO: 1946233 - RNA, 19 nt, Artificial Sequence
  Description of Artificial Sequence: Synthetic oligonucleotide
ggguuauugugugggagga

SEQ ID NO: 1946234 - RNA, 19 nt, Artificial Sequence
  Description of Artificial Sequence: Synthetic oligonucleotide
aucguccauauugauucua

SEQ ID NO: 1946235 - RNA, 19 nt, Artificial Sequence
  Description of Artificial Sequence: Synthetic oligonucleotide
cccaguaaucugagacucc

SEQ ID NO: 1946236 - RNA, 19 nt, Artificial Sequence
  Description of Artificial Sequence: Synthetic oligonucleotide
caaggacuuagguagcguu

SEQ ID NO: 1946237 - RNA, 19 nt, Artificial Sequence
  Description of Artificial Sequence: Synthetic oligonucleotide
gucgcccuucucucugaug

SEQ ID NO: 1946238 - RNA, 19 nt, Artificial Sequence
  Description of Artificial Sequence: Synthetic oligonucleotide
gugauagguggugaugcua

SEQ ID NO: 1946239 - RNA, 19 nt, Artificial Sequence
  Description of Artificial Sequence: Synthetic oligonucleotide
uacagagagcaaggacuua

SEQ ID NO: 1946240 - RNA, 19 nt, Artificial Sequence
  Description of Artificial Sequence: Synthetic oligonucleotide
guacgaugugccaagugau

SEQ ID NO: 1946241 - RNA, 19 nt, Artificial Sequence
  Description of Artificial Sequence: Synthetic oligonucleotide
ggacuuagguagcguuaug

SEQ ID NO: 1946242 - RNA, 19 nt, Artificial Sequence
  Description of Artificial Sequence: Synthetic oligonucleotide
ccccaguaaucugagacuc

SEQ ID NO: 1946243 - RNA, 19 nt, Artificial Sequence
  Description of Artificial Sequence: Synthetic oligonucleotide
cacaggauuucaucgcaau

SEQ ID NO: 1946244 - RNA, 19 nt, Artificial Sequence
  Description of Artificial Sequence: Synthetic oligonucleotide
ugaccccacgaggccacug

SEQ ID NO: 1946245 - RNA, 19 nt, Artificial Sequence
  Description of Artificial Sequence: Synthetic oligonucleotide
ccccacgaggccacugucg

SEQ ID NO: 1946246 - RNA, 19 nt, Artificial Sequence
  Description of Artificial Sequence: Synthetic oligonucleotide
ggcuccgacugguuacuac

SEQ ID NO: 1946247 - RNA, 19 nt, Artificial Sequence
  Description of Artificial Sequence: Synthetic oligonucleotide
gaggacuaucgagggccac

SEQ ID NO: 1946248 - RNA, 19 nt, Artificial Sequence
  Description of Artificial Sequence: Synthetic oligonucleotide
augccccaguaaucugaga

SEQ ID NO: 1946249 - RNA, 19 nt, Artificial Sequence
  Description of Artificial Sequence: Synthetic oligonucleotide
agggcuccgacugguuacu

SEQ ID NO: 1946250 - RNA, 19 nt, Artificial Sequence
  Description of Artificial Sequence: Synthetic oligonucleotide
acagauaauuggggauauu

SEQ ID NO: 1946251 - RNA, 19 nt, Artificial Sequence
  Description of Artificial Sequence: Synthetic oligonucleotide
guacuuccuucggggauca

SEQ ID NO: 1946252 - RNA, 19 nt, Artificial Sequence
  Description of Artificial Sequence: Synthetic oligonucleotide
aggcucggugcuccaacuu

SEQ ID NO: 1946253 - RNA, 19 nt, Artificial Sequence
  Description of Artificial Sequence: Synthetic oligonucleotide
ccggguuauugugugggag

SEQ ID NO: 1946254 - RNA, 19 nt, Artificial Sequence
  Description of Artificial Sequence: Synthetic oligonucleotide
gaccccacgaggccacugu

SEQ ID NO: 1946255 - RNA, 19 nt, Artificial Sequence
  Description of Artificial Sequence: Synthetic oligonucleotide
ccguuucuggagugauagg

SEQ ID NO: 1946256 - RNA, 19 nt, Artificial Sequence
  Description of Artificial Sequence: Synthetic oligonucleotide
ccgucucauucucaaggac

SEQ ID NO: 1946257 - RNA, 19 nt, Artificial Sequence
  Description of Artificial Sequence: Synthetic oligonucleotide
uuuucccugucggcacaua

SEQ ID NO: 1946258 - RNA, 19 nt, Artificial Sequence
  Description of Artificial Sequence: Synthetic oligonucleotide
cacuguggacagcugcucu

SEQ ID NO: 1946259 - RNA, 19 nt, Artificial Sequence
  Description of Artificial Sequence: Synthetic oligonucleotide
ccgacugguuacuacuuaa

SEQ ID NO: 1946260 - RNA, 19 nt, Artificial Sequence
  Description of Artificial Sequence: Synthetic oligonucleotide
ggggaucauagccucaguu

SEQ ID NO: 1946261 - RNA, 19 nt, Artificial Sequence
  Description of Artificial Sequence: Synthetic oligonucleotide
cuccaucuacugagacaca

SEQ ID NO: 1946262 - RNA, 19 nt, Artificial Sequence
  Description of Artificial Sequence: Synthetic oligonucleotide
ccaggcucggugcuccaac

SEQ ID NO: 1946263 - RNA, 19 nt, Artificial Sequence
  Description of Artificial Sequence: Synthetic oligonucleotide
gcugaacguguaacaggug

SEQ ID NO: 1946264 - RNA, 19 nt, Artificial Sequence
  Description of Artificial Sequence: Synthetic oligonucleotide
ccuucggggaucauagccu

SEQ ID NO: 1946265 - RNA, 19 nt, Artificial Sequence
  Description of Artificial Sequence: Synthetic oligonucleotide
cuggagccguuucuggagu

SEQ ID NO: 1946266 - RNA, 19 nt, Artificial Sequence
  Description of Artificial Sequence: Synthetic oligonucleotide
augugccaagugaugcaua

SEQ ID NO: 1946267 - RNA, 19 nt, Artificial Sequence
  Description of Artificial Sequence: Synthetic oligonucleotide
gccccaguaaucugagacu

SEQ ID NO: 1946268 - RNA, 19 nt, Artificial Sequence
  Description of Artificial Sequence: Synthetic oligonucleotide
gucuuuguuuccggguuau

SEQ ID NO: 1946269 - RNA, 19 nt, Artificial Sequence
  Description of Artificial Sequence: Synthetic oligonucleotide
gcauacuuagagucagguu

SEQ ID NO: 1946270 - RNA, 19 nt, Artificial Sequence
  Description of Artificial Sequence: Synthetic oligonucleotide
ggagccguuucuggaguga

SEQ ID NO: 1946271 - RNA, 19 nt, Artificial Sequence
  Description of Artificial Sequence: Synthetic oligonucleotide
cguguaacaggugcuguca

SEQ ID NO: 1946272 - RNA, 19 nt, Artificial Sequence
  Description of Artificial Sequence: Synthetic oligonucleotide
gcaaucguccauauugauu

SEQ ID NO: 1946273 - RNA, 19 nt, Artificial Sequence
  Description of Artificial Sequence: Synthetic oligonucleotide
gaaugagcuugucgcccuu

SEQ ID NO: 1946274 - RNA, 19 nt, Artificial Sequence
  Description of Artificial Sequence: Synthetic oligonucleotide
gccauucuccguuuauaau

SEQ ID NO: 1946275 - RNA, 19 nt, Artificial Sequence
  Description of Artificial Sequence: Synthetic oligonucleotide
caguaaucugagacuccau

SEQ ID NO: 1946276 - RNA, 19 nt, Artificial Sequence
  Description of Artificial Sequence: Synthetic oligonucleotide
ggguugucuggaaguguca

SEQ ID NO: 1946277 - RNA, 19 nt, Artificial Sequence
  Description of Artificial Sequence: Synthetic oligonucleotide
gccaagugaugcauacuua

SEQ ID NO: 1946278 - RNA, 19 nt, Artificial Sequence
  Description of Artificial Sequence: Synthetic oligonucleotide
cuccgacugguuacuacuu

SEQ ID NO: 1946279 - RNA, 19 nt, Artificial Sequence
  Description of Artificial Sequence: Synthetic oligonucleotide
caggcucggugcuccaacu

SEQ ID NO: 1946280 - RNA, 19 nt, Artificial Sequence
  Description of Artificial Sequence: Synthetic oligonucleotide
cccugucggcacauaauaa

SEQ ID NO: 1946281 - RNA, 19 nt, Artificial Sequence
  Description of Artificial Sequence: Synthetic oligonucleotide
gacacugcauaggcagauu

SEQ ID NO: 1946282 - RNA, 19 nt, Artificial Sequence
  Description of Artificial Sequence: Synthetic oligonucleotide
gcuuuaacucuggcccaga

SEQ ID NO: 1946283 - RNA, 19 nt, Artificial Sequence
  Description of Artificial Sequence: Synthetic oligonucleotide
gcacaggauuucaucgcaa

SEQ ID NO: 1946284 - RNA, 19 nt, Artificial Sequence
  Description of Artificial Sequence: Synthetic oligonucleotide
cgacugguuacuacuuaaa

SEQ ID NO: 1946285 - RNA, 19 nt, Artificial Sequence
  Description of Artificial Sequence: Synthetic oligonucleotide
ggcucggugcuccaacuuu

SEQ ID NO: 1946286 - RNA, 19 nt, Artificial Sequence
  Description of Artificial Sequence: Synthetic oligonucleotide
gacagcuggcugguacgau

SEQ ID NO: 1946287 - RNA, 19 nt, Artificial Sequence
  Description of Artificial Sequence: Synthetic oligonucleotide
caccagcacgugugguuua

SEQ ID NO: 1946288 - RNA, 19 nt, Artificial Sequence
  Description of Artificial Sequence: Synthetic oligonucleotide
cguauauguuguagcugaa

SEQ ID NO: 1946289 - RNA, 19 nt, Artificial Sequence
  Description of Artificial Sequence: Synthetic oligonucleotide
ccgagucagccauggagcu

SEQ ID NO: 1946290 - RNA, 19 nt, Artificial Sequence
  Description of Artificial Sequence: Synthetic oligonucleotide
cuuuucccugucggcacau

SEQ ID NO: 1946291 - RNA, 19 nt, Artificial Sequence
  Description of Artificial Sequence: Synthetic oligonucleotide
caucgcaaucguccauauu

SEQ ID NO: 1946292 - RNA, 19 nt, Artificial Sequence
  Description of Artificial Sequence: Synthetic oligonucleotide
cugguacgaugugccaagu

SEQ ID NO: 1946293 - RNA, 19 nt, Artificial Sequence
  Description of Artificial Sequence: Synthetic oligonucleotide
ccagcacgugugguuuauc

SEQ ID NO: 1946294 - RNA, 19 nt, Artificial Sequence
  Description of Artificial Sequence: Synthetic oligonucleotide
ccacgaggccacugucgga

SEQ ID NO: 1946295 - RNA, 19 nt, Artificial Sequence
  Description of Artificial Sequence: Synthetic oligonucleotide
gucggagcuggagccguuu

SEQ ID NO: 1946296 - RNA, 19 nt, Artificial Sequence
  Description of Artificial Sequence: Synthetic oligonucleotide
ccucacgggguggugggcu

SEQ ID NO: 1946297 - RNA, 19 nt, Artificial Sequence
  Description of Artificial Sequence: Synthetic oligonucleotide
ccggguugucuggaagugu

SEQ ID NO: 1946298 - RNA, 19 nt, Artificial Sequence
  Description of Artificial Sequence: Synthetic oligonucleotide
ggaauccaguguggacauu

SEQ ID NO: 1946299 - RNA, 19 nt, Artificial Sequence
  Description of Artificial Sequence: Synthetic oligonucleotide
uucacuuccacacuuuucg

SEQ ID NO: 1946300 - RNA, 19 nt, Artificial Sequence
  Description of Artificial Sequence: Synthetic oligonucleotide
aauauugcaguuuccaacu

SEQ ID NO: 1946301 - RNA, 19 nt, Artificial Sequence
  Description of Artificial Sequence: Synthetic oligonucleotide
caaugcauaccaaagacgg

SEQ ID NO: 1946302 - RNA, 19 nt, Artificial Sequence
  Description of Artificial Sequence: Synthetic oligonucleotide
ucauacuguagcaagacug

SEQ ID NO: 1946303 - RNA, 19 nt, Artificial Sequence
  Description of Artificial Sequence: Synthetic oligonucleotide
gauauagagaacuaacgac

SEQ ID NO: 1946304 - RNA, 19 nt, Artificial Sequence
  Description of Artificial Sequence: Synthetic oligonucleotide
ugauauagagaacuaacga

SEQ ID NO: 1946305 - RNA, 19 nt, Artificial Sequence
  Description of Artificial Sequence: Synthetic oligonucleotide
uauccuaugagacugugcu

SEQ ID NO: 1946306 - RNA, 19 nt, Artificial Sequence
  Description of Artificial Sequence: Synthetic oligonucleotide
auaccugagguuuccaucc

SEQ ID NO: 1946307 - RNA, 19 nt, Artificial Sequence
  Description of Artificial Sequence: Synthetic oligonucleotide
ugguuuaggaauauugcag

SEQ ID NO: 1946308 - RNA, 19 nt, Artificial Sequence
  Description of Artificial Sequence: Synthetic oligonucleotide
aaugaagagcugucugacc

SEQ ID NO: 1946309 - RNA, 19 nt, Artificial Sequence
  Description of Artificial Sequence: Synthetic oligonucleotide
ucuuuuacccucaaguccu

SEQ ID NO: 1946310 - RNA, 19 nt, Artificial Sequence
  Description of Artificial Sequence: Synthetic oligonucleotide
aaagaaguuugguuuagga

SEQ ID NO: 1946311 - RNA, 19 nt, Artificial Sequence
  Description of Artificial Sequence: Synthetic oligonucleotide
gaauauugcaguuuccaac

SEQ ID NO: 1946312 - RNA, 19 nt, Artificial Sequence
  Description of Artificial Sequence: Synthetic oligonucleotide
caugauauagagaacuaac

SEQ ID NO: 1946313 - RNA, 19 nt, Artificial Sequence
  Description of Artificial Sequence: Synthetic oligonucleotide
uauguccucggucacaugc

SEQ ID NO: 1946314 - RNA, 19 nt, Artificial Sequence
  Description of Artificial Sequence: Synthetic oligonucleotide
uauagagaacuaacgacug

SEQ ID NO: 1946315 - RNA, 19 nt, Artificial Sequence
  Description of Artificial Sequence: Synthetic oligonucleotide
uuaggaauauugcaguuuc

SEQ ID NO: 1946316 - RNA, 19 nt, Artificial Sequence
  Description of Artificial Sequence: Synthetic oligonucleotide
ugguaaagaaguauuauuu

SEQ ID NO: 1946317 - RNA, 19 nt, Artificial Sequence
  Description of Artificial Sequence: Synthetic oligonucleotide
uuacccucaaguccuaucc

SEQ ID NO: 1946318 - RNA, 19 nt, Artificial Sequence
  Description of Artificial Sequence: Synthetic oligonucleotide
aaguccuauccuaugagac

SEQ ID NO: 1946319 - RNA, 19 nt, Artificial Sequence
  Description of Artificial Sequence: Synthetic oligonucleotide
uauuagccaaugcauacca

SEQ ID NO: 1946320 - RNA, 19 nt, Artificial Sequence
  Description of Artificial Sequence: Synthetic oligonucleotide
uuugguuacauggucaaug

SEQ ID NO: 1946321 - RNA, 19 nt, Artificial Sequence
  Description of Artificial Sequence: Synthetic oligonucleotide
ugugacuaguuccuuaugu

SEQ ID NO: 1946322 - RNA, 19 nt, Artificial Sequence
  Description of Artificial Sequence: Synthetic oligonucleotide
uccaacuuugaccugcuug

SEQ ID NO: 1946323 - RNA, 19 nt, Artificial Sequence
  Description of Artificial Sequence: Synthetic oligonucleotide
uguagcaagacugugacua

SEQ ID NO: 1946324 - RNA, 19 nt, Artificial Sequence
  Description of Artificial Sequence: Synthetic oligonucleotide
ugacuaguuccuuaugucc

SEQ ID NO: 1946325 - RNA, 19 nt, Artificial Sequence
  Description of Artificial Sequence: Synthetic oligonucleotide
uugguuuaggaauauugca

SEQ ID NO: 1946326 - RNA, 19 nt, Artificial Sequence
  Description of Artificial Sequence: Synthetic oligonucleotide
cuuggucucggauaguggg

SEQ ID NO: 1946327 - RNA, 19 nt, Artificial Sequence
  Description of Artificial Sequence: Synthetic oligonucleotide
gaggauuccaucucaccgg

SEQ ID NO: 1946328 - RNA, 19 nt, Artificial Sequence
  Description of Artificial Sequence: Synthetic oligonucleotide
ugauuuuauuagccaaugc

SEQ ID NO: 1946329 - RNA, 19 nt, Artificial Sequence
  Description of Artificial Sequence: Synthetic oligonucleotide
agaacuaacgacuggucca

SEQ ID NO: 1946330 - RNA, 19 nt, Artificial Sequence
  Description of Artificial Sequence: Synthetic oligonucleotide
uguccugacaauuaauguc

SEQ ID NO: 1946331 - RNA, 19 nt, Artificial Sequence
  Description of Artificial Sequence: Synthetic oligonucleotide
gagaacuaacgacuggucc

SEQ ID NO: 1946332 - RNA, 19 nt, Artificial Sequence
  Description of Artificial Sequence: Synthetic oligonucleotide
auauagagaacuaacgacu

SEQ ID NO: 1946333 - RNA, 19 nt, Artificial Sequence
  Description of Artificial Sequence: Synthetic oligonucleotide
ucaaguccuauccuaugag

SEQ ID NO: 1946334 - RNA, 19 nt, Artificial Sequence
  Description of Artificial Sequence: Synthetic oligonucleotide
ucucaggugacucugccac

SEQ ID NO: 1946335 - RNA, 19 nt, Artificial Sequence
  Description of Artificial Sequence: Synthetic oligonucleotide
aacugcugcgauguauucc

SEQ ID NO: 1946336 - RNA, 19 nt, Artificial Sequence
  Description of Artificial Sequence: Synthetic oligonucleotide
acuagucuggugcgaagcc

SEQ ID NO: 1946337 - RNA, 19 nt, Artificial Sequence
  Description of Artificial Sequence: Synthetic oligonucleotide
agguacaagagcugcuccc

SEQ ID NO: 1946338 - RNA, 19 nt, Artificial Sequence
  Description of Artificial Sequence: Synthetic oligonucleotide
auacagguacaagagcugc

SEQ ID NO: 1946339 - RNA, 19 nt, Artificial Sequence
  Description of Artificial Sequence: Synthetic oligonucleotide
gagguuuccauccuggauc

SEQ ID NO: 1946340 - RNA, 19 nt, Artificial Sequence
  Description of Artificial Sequence: Synthetic oligonucleotide
uacaguuucuuuuacccuc

SEQ ID NO: 1946341 - RNA, 19 nt, Artificial Sequence
  Description of Artificial Sequence: Synthetic oligonucleotide
agcuucauacuguagcaag

SEQ ID NO: 1946342 - RNA, 19 nt, Artificial Sequence
  Description of Artificial Sequence: Synthetic oligonucleotide
uuaaugucagcuucauacu

SEQ ID NO: 1946343 - RNA, 19 nt, Artificial Sequence
  Description of Artificial Sequence: Synthetic oligonucleotide
aaacucacaggcagcagcg

SEQ ID NO: 1946344 - RNA, 19 nt, Artificial Sequence
  Description of Artificial Sequence: Synthetic oligonucleotide
auagagaacuaacgacugg

SEQ ID NO: 1946345 - RNA, 19 nt, Artificial Sequence
  Description of Artificial Sequence: Synthetic oligonucleotide
uucgauuugauggcuuugg

SEQ ID NO: 1946346 - RNA, 19 nt, Artificial Sequence
  Description of Artificial Sequence: Synthetic oligonucleotide
guuucuuuuacccucaagu

SEQ ID NO: 1946347 - RNA, 19 nt, Artificial Sequence
  Description of Artificial Sequence: Synthetic oligonucleotide
uuagccaaugcauaccaaa

SEQ ID NO: 1946348 - RNA, 19 nt, Artificial Sequence
  Description of Artificial Sequence: Synthetic oligonucleotide
ugagacugugcuuuuccag

SEQ ID NO: 1946349 - RNA, 19 nt, Artificial Sequence
  Description of Artificial Sequence: Synthetic oligonucleotide
accaaaaccauuauuggcu

SEQ ID NO: 1946350 - RNA, 19 nt, Artificial Sequence
  Description of Artificial Sequence: Synthetic oligonucleotide
aaagacgggugguaaagaa

SEQ ID NO: 1946351 - RNA, 19 nt, Artificial Sequence
  Description of Artificial Sequence: Synthetic oligonucleotide
caccaaaaccauuauuggc

SEQ ID NO: 1946352 - RNA, 19 nt, Artificial Sequence
  Description of Artificial Sequence: Synthetic oligonucleotide
auaugcucuguccucacug

SEQ ID NO: 1946353 - RNA, 19 nt, Artificial Sequence
  Description of Artificial Sequence: Synthetic oligonucleotide
ucccuucaaaaucaaagaa

SEQ ID NO: 1946354 - RNA, 19 nt, Artificial Sequence
  Description of Artificial Sequence: Synthetic oligonucleotide
acugcugcgauguauuccu

SEQ ID NO: 1946355 - RNA, 19 nt, Artificial Sequence
  Description of Artificial Sequence: Synthetic oligonucleotide
gcaguuuccaacuuugacc

SEQ ID NO: 1946356 - RNA, 19 nt, Artificial Sequence
  Description of Artificial Sequence: Synthetic oligonucleotide
uuauuagccaaugcauacc

SEQ ID NO: 1946357 - RNA, 19 nt, Artificial Sequence
  Description of Artificial Sequence: Synthetic oligonucleotide
uugcuucccuucaaaauca

SEQ ID NO: 1946358 - RNA, 19 nt, Artificial Sequence
  Description of Artificial Sequence: Synthetic oligonucleotide
guaaagaaguauuauuucu

SEQ ID NO: 1946359 - RNA, 19 nt, Artificial Sequence
  Description of Artificial Sequence: Synthetic oligonucleotide
auguccacuagcucgauau

SEQ ID NO: 1946360 - RNA, 19 nt, Artificial Sequence
  Description of Artificial Sequence: Synthetic oligonucleotide
auuccaucucaccggaguc

SEQ ID NO: 1946361 - RNA, 19 nt, Artificial Sequence
  Description of Artificial Sequence: Synthetic oligonucleotide
guuguccugacaauuaaug

SEQ ID NO: 1946362 - RNA, 19 nt, Artificial Sequence
  Description of Artificial Sequence: Synthetic oligonucleotide
uuaacugcugcgauguauu

SEQ ID NO: 1946363 - RNA, 19 nt, Artificial Sequence
  Description of Artificial Sequence: Synthetic oligonucleotide
agcagcguaaugaagagcu

SEQ ID NO: 1946364 - RNA, 19 nt, Artificial Sequence
  Description of Artificial Sequence: Synthetic oligonucleotide
gauaccugagguuuccauc

SEQ ID NO: 1946365 - RNA, 19 nt, Artificial Sequence
  Description of Artificial Sequence: Synthetic oligonucleotide
aaugcauaccaaagacggg

SEQ ID NO: 1946366 - RNA, 19 nt, Artificial Sequence
  Description of Artificial Sequence: Synthetic oligonucleotide
gagaaacugcuuugcagcc

SEQ ID NO: 1946367 - RNA, 19 nt, Artificial Sequence
  Description of Artificial Sequence: Synthetic oligonucleotide
gguuacauggucaauguug

SEQ ID NO: 1946368 - RNA, 19 nt, Artificial Sequence
  Description of Artificial Sequence: Synthetic oligonucleotide
accagagaaacugcuuugc

SEQ ID NO: 1946369 - RNA, 19 nt, Artificial Sequence
  Description of Artificial Sequence: Synthetic oligonucleotide
uuggucucggauagugggg

SEQ ID NO: 1946370 - RNA, 19 nt, Artificial Sequence
  Description of Artificial Sequence: Synthetic oligonucleotide
aaugucagcuucauacugu

SEQ ID NO: 1946371 - RNA, 19 nt, Artificial Sequence
  Description of Artificial Sequence: Synthetic oligonucleotide
ugcgauguauuccugcauc

SEQ ID NO: 1946372 - RNA, 19 nt, Artificial Sequence
  Description of Artificial Sequence: Synthetic oligonucleotide
ucggauaguggggucagcg

SEQ ID NO: 1946373 - RNA, 19 nt, Artificial Sequence
  Description of Artificial Sequence: Synthetic oligonucleotide
cuggcauacagguacaaga

SEQ ID NO: 1946374 - RNA, 19 nt, Artificial Sequence
  Description of Artificial Sequence: Synthetic oligonucleotide
uaaugaagagcugucugac

SEQ ID NO: 1946375 - RNA, 19 nt, Artificial Sequence
  Description of Artificial Sequence: Synthetic oligonucleotide
uucauacuguagcaagacu

SEQ ID NO: 1946376 - RNA, 19 nt, Artificial Sequence
  Description of Artificial Sequence: Synthetic oligonucleotide
gguaaagaaguauuauuuc

SEQ ID NO: 1946377 - RNA, 19 nt, Artificial Sequence
  Description of Artificial Sequence: Synthetic oligonucleotide
ugcccaguggagcauagcu

SEQ ID NO: 1946378 - RNA, 19 nt, Artificial Sequence
  Description of Artificial Sequence: Synthetic oligonucleotide
uccacuagcucgauaugcu

SEQ ID NO: 1946379 - RNA, 19 nt, Artificial Sequence
  Description of Artificial Sequence: Synthetic oligonucleotide
uucccugcaguaaucaaau

SEQ ID NO: 1946380 - RNA, 19 nt, Artificial Sequence
  Description of Artificial Sequence: Synthetic oligonucleotide
ucaugauauagagaacuaa

SEQ ID NO: 1946381 - RNA, 19 nt, Artificial Sequence
  Description of Artificial Sequence: Synthetic oligonucleotide
uucaugauauagagaacua

SEQ ID NO: 1946382 - RNA, 19 nt, Artificial Sequence
  Description of Artificial Sequence: Synthetic oligonucleotide
acuggugugacgccuccuc

SEQ ID NO: 1946383 - RNA, 19 nt, Artificial Sequence
  Description of Artificial Sequence: Synthetic oligonucleotide
agaaacugcuuugcagccc

SEQ ID NO: 1946384 - RNA, 19 nt, Artificial Sequence
  Description of Artificial Sequence: Synthetic oligonucleotide
ugcauaccaaagacgggug

SEQ ID NO: 1946385 - RNA, 19 nt, Artificial Sequence
  Description of Artificial Sequence: Synthetic oligonucleotide
aggaauauugcaguuucca

SEQ ID NO: 1946386 - RNA, 19 nt, Artificial Sequence
  Description of Artificial Sequence: Synthetic oligonucleotide
aguggggucagcgccagac

SEQ ID NO: 1946387 - RNA, 19 nt, Artificial Sequence
  Description of Artificial Sequence: Synthetic oligonucleotide
aagacgggugguaaagaag

SEQ ID NO: 1946388 - RNA, 19 nt, Artificial Sequence
  Description of Artificial Sequence: Synthetic oligonucleotide
ugccacuugaccugcccgg

SEQ ID NO: 1946389 - RNA, 19 nt, Artificial Sequence
  Description of Artificial Sequence: Synthetic oligonucleotide
gacucugccacuugaccug

SEQ ID NO: 1946390 - RNA, 19 nt, Artificial Sequence
  Description of Artificial Sequence: Synthetic oligonucleotide
augcauaccaaagacgggu

SEQ ID NO: 1946391 - RNA, 19 nt, Artificial Sequence
  Description of Artificial Sequence: Synthetic oligonucleotide
acuagcucgauaugcucug

SEQ ID NO: 1946392 - RNA, 19 nt, Artificial Sequence
  Description of Artificial Sequence: Synthetic oligonucleotide
uuuaacugcugcgauguau

SEQ ID NO: 1946393 - RNA, 19 nt, Artificial Sequence
  Description of Artificial Sequence: Synthetic oligonucleotide
cauacagguacaagagcug

SEQ ID NO: 1946394 - RNA, 19 nt, Artificial Sequence
  Description of Artificial Sequence: Synthetic oligonucleotide
aguccuauccuaugagacu

SEQ ID NO: 1946395 - RNA, 19 nt, Artificial Sequence
  Description of Artificial Sequence: Synthetic oligonucleotide
uacauggucaauguuguuu

SEQ ID NO: 1946396 - RNA, 19 nt, Artificial Sequence
  Description of Artificial Sequence: Synthetic oligonucleotide
aguuucuuuuacccucaag

SEQ ID NO: 1946397 - RNA, 19 nt, Artificial Sequence
  Description of Artificial Sequence: Synthetic oligonucleotide
uaggaauauugcaguuucc

SEQ ID NO: 1946398 - RNA, 19 nt, Artificial Sequence
  Description of Artificial Sequence: Synthetic oligonucleotide
ucuggugcgaagcccgggc

SEQ ID NO: 1946399 - RNA, 19 nt, Artificial Sequence
  Description of Artificial Sequence: Synthetic oligonucleotide
uccugacaauuaaugucag

SEQ ID NO: 1946400 - RNA, 19 nt, Artificial Sequence
  Description of Artificial Sequence: Synthetic oligonucleotide
uuuaggaauauugcaguuu

SEQ ID NO: 1946401 - RNA, 19 nt, Artificial Sequence
  Description of Artificial Sequence: Synthetic oligonucleotide
ugugacgccuccucccggg

SEQ ID NO: 1946402 - RNA, 19 nt, Artificial Sequence
  Description of Artificial Sequence: Synthetic oligonucleotide
ccugcaguaaucaaauaug

SEQ ID NO: 1946403 - RNA, 19 nt, Artificial Sequence
  Description of Artificial Sequence: Synthetic oligonucleotide
cuauccuaugagacugugc

SEQ ID NO: 1946404 - RNA, 19 nt, Artificial Sequence
  Description of Artificial Sequence: Synthetic oligonucleotide
ucacaugcccaguggagca

SEQ ID NO: 1946405 - RNA, 19 nt, Artificial Sequence
  Description of Artificial Sequence: Synthetic oligonucleotide
gacgccgcuagcugugugg

SEQ ID NO: 1946406 - RNA, 19 nt, Artificial Sequence
  Description of Artificial Sequence: Synthetic oligonucleotide
ugacaauuaaugucagcuu

SEQ ID NO: 1946407 - RNA, 19 nt, Artificial Sequence
  Description of Artificial Sequence: Synthetic oligonucleotide
acugugacuaguuccuuau

SEQ ID NO: 1946408 - RNA, 19 nt, Artificial Sequence
  Description of Artificial Sequence: Synthetic oligonucleotide
uauugcaguuuccaacuuu

SEQ ID NO: 1946409 - RNA, 19 nt, Artificial Sequence
  Description of Artificial Sequence: Synthetic oligonucleotide
ucggucucaggguucuggg

SEQ ID NO: 1946410 - RNA, 19 nt, Artificial Sequence
  Description of Artificial Sequence: Synthetic oligonucleotide
ugcaguaaucaaauauguu

SEQ ID NO: 1946411 - RNA, 19 nt, Artificial Sequence
  Description of Artificial Sequence: Synthetic oligonucleotide
agccaaugcauaccaaaga

SEQ ID NO: 1946412 - RNA, 19 nt, Artificial Sequence
  Description of Artificial Sequence: Synthetic oligonucleotide
uucguuguccugacaauua

SEQ ID NO: 1946413 - RNA, 19 nt, Artificial Sequence
  Description of Artificial Sequence: Synthetic oligonucleotide
uuuucgauuugauggcuuu

SEQ ID NO: 1946414 - RNA, 19 nt, Artificial Sequence
  Description of Artificial Sequence: Synthetic oligonucleotide
guccuauccuaugagacug

SEQ ID NO: 1946415 - RNA, 19 nt, Artificial Sequence
  Description of Artificial Sequence: Synthetic oligonucleotide
guccugacaauuaauguca

SEQ ID NO: 1946416 - RNA, 19 nt, Artificial Sequence
  Description of Artificial Sequence: Synthetic oligonucleotide
aguuccccaccgcugucgc

SEQ ID NO: 1946417 - RNA, 19 nt, Artificial Sequence
  Description of Artificial Sequence: Synthetic oligonucleotide
agcagugggacgccgcuag

SEQ ID NO: 1946418 - RNA, 19 nt, Artificial Sequence
  Description of Artificial Sequence: Synthetic oligonucleotide
agacgggugguaaagaagu

SEQ ID NO: 1946419 - RNA, 19 nt, Artificial Sequence
  Description of Artificial Sequence: Synthetic oligonucleotide
acuaacgacugguccacca

SEQ ID NO: 1946420 - RNA, 19 nt, Artificial Sequence
  Description of Artificial Sequence: Synthetic oligonucleotide
uuuccauccuggaucuagu

SEQ ID NO: 1946421 - RNA, 19 nt, Artificial Sequence
  Description of Artificial Sequence: Synthetic oligonucleotide
aucucaccggagucguccc

SEQ ID NO: 1946422 - RNA, 19 nt, Artificial Sequence
  Description of Artificial Sequence: Synthetic oligonucleotide
uuuacccucaaguccuauc

SEQ ID NO: 1946423 - RNA, 19 nt, Artificial Sequence
  Description of Artificial Sequence: Synthetic oligonucleotide
cgaacugauuuuauuagcc

SEQ ID NO: 1946424 - RNA, 19 nt, Artificial Sequence
  Description of Artificial Sequence: Synthetic oligonucleotide
gugacuaguuccuuauguc

SEQ ID NO: 1946425 - RNA, 19 nt, Artificial Sequence
  Description of Artificial Sequence: Synthetic oligonucleotide
uguccucggucacaugccc

SEQ ID NO: 1946426 - RNA, 19 nt, Artificial Sequence
  Description of Artificial Sequence: Synthetic oligonucleotide
ggauaguggggucagcgcc

SEQ ID NO: 1946427 - RNA, 19 nt, Artificial Sequence
  Description of Artificial Sequence: Synthetic oligonucleotide
uacagguacaagagcugcu

SEQ ID NO: 1946428 - RNA, 19 nt, Artificial Sequence
  Description of Artificial Sequence: Synthetic oligonucleotide
ugcaucgcuugccuagggc

SEQ ID NO: 1946429 - RNA, 19 nt, Artificial Sequence
  Description of Artificial Sequence: Synthetic oligonucleotide
ugcugcgauguauuccugc

SEQ ID NO: 1946430 - RNA, 19 nt, Artificial Sequence
  Description of Artificial Sequence: Synthetic oligonucleotide
ugcuuugcagcccgucacc

SEQ ID NO: 1946431 - RNA, 19 nt, Artificial Sequence
  Description of Artificial Sequence: Synthetic oligonucleotide
ucgauuugauggcuuuggu

SEQ ID NO: 1946432 - RNA, 19 nt, Artificial Sequence
  Description of Artificial Sequence: Synthetic oligonucleotide
agagaacuaacgacugguc

SEQ ID NO: 1946433 - RNA, 19 nt, Artificial Sequence
  Description of Artificial Sequence: Synthetic oligonucleotide
aacuaacgacugguccacc

SEQ ID NO: 1946434 - RNA, 19 nt, Artificial Sequence
  Description of Artificial Sequence: Synthetic oligonucleotide
gugacucugccacuugacc

SEQ ID NO: 1946435 - RNA, 19 nt, Artificial Sequence
  Description of Artificial Sequence: Synthetic oligonucleotide
uaguuccuuauguccucgg

SEQ ID NO: 1946436 - RNA, 19 nt, Artificial Sequence
  Description of Artificial Sequence: Synthetic oligonucleotide
uguuuucccugcaguaauc

SEQ ID NO: 1946437 - RNA, 19 nt, Artificial Sequence
  Description of Artificial Sequence: Synthetic oligonucleotide
uaacgacugguccaccaaa

SEQ ID NO: 1946438 - RNA, 19 nt, Artificial Sequence
  Description of Artificial Sequence: Synthetic oligonucleotide
ggaugccucggucucaggg

SEQ ID NO: 1946439 - RNA, 19 nt, Artificial Sequence
  Description of Artificial Sequence: Synthetic oligonucleotide
ccaccaaaaccauuauugg

SEQ ID NO: 1946440 - RNA, 19 nt, Artificial Sequence
  Description of Artificial Sequence: Synthetic oligonucleotide
agggcuuuccaugcuuccc

SEQ ID NO: 1946441 - RNA, 19 nt, Artificial Sequence
  Description of Artificial Sequence: Synthetic oligonucleotide
caucucaccggagucgucc

SEQ ID NO: 1946442 - RNA, 19 nt, Artificial Sequence
  Description of Artificial Sequence: Synthetic oligonucleotide
ucgauaugcucuguccuca

SEQ ID NO: 1946443 - RNA, 19 nt, Artificial Sequence
  Description of Artificial Sequence: Synthetic oligonucleotide
agcuccacgauguccaaaa

SEQ ID NO: 1946444 - RNA, 19 nt, Artificial Sequence
  Description of Artificial Sequence: Synthetic oligonucleotide
ucguuguccugacaauuaa

SEQ ID NO: 1946445 - RNA, 19 nt, Artificial Sequence
  Description of Artificial Sequence: Synthetic oligonucleotide
guagcaagacugugacuag

SEQ ID NO: 1946446 - RNA, 19 nt, Artificial Sequence
  Description of Artificial Sequence: Synthetic oligonucleotide
acugcuuugcagcccguca

SEQ ID NO: 1946447 - RNA, 19 nt, Artificial Sequence
  Description of Artificial Sequence: Synthetic oligonucleotide
cagacagucgucuuggucu

SEQ ID NO: 1946448 - RNA, 19 nt, Artificial Sequence
  Description of Artificial Sequence: Synthetic oligonucleotide
uuucgauuugauggcuuug

SEQ ID NO: 1946449 - RNA, 19 nt, Artificial Sequence
  Description of Artificial Sequence: Synthetic oligonucleotide
gaacuaacgacugguccac

SEQ ID NO: 1946450 - RNA, 19 nt, Artificial Sequence
  Description of Artificial Sequence: Synthetic oligonucleotide
ugauaccugagguuuccau

SEQ ID NO: 1946451 - RNA, 19 nt, Artificial Sequence
  Description of Artificial Sequence: Synthetic oligonucleotide
auuccugcaucgcuugccu

SEQ ID NO: 1946452 - RNA, 19 nt, Artificial Sequence
  Description of Artificial Sequence: Synthetic oligonucleotide
uggaucaagccuuguuagu

SEQ ID NO: 1946453 - RNA, 19 nt, Artificial Sequence
  Description of Artificial Sequence: Synthetic oligonucleotide
uucucugauaccugagguu

SEQ ID NO: 1946454 - RNA, 19 nt, Artificial Sequence
  Description of Artificial Sequence: Synthetic oligonucleotide
uucccaguuccccgaacug

SEQ ID NO: 1946455 - RNA, 19 nt, Artificial Sequence
  Description of Artificial Sequence: Synthetic oligonucleotide
uggugugacgccuccuccc

SEQ ID NO: 1946456 - RNA, 19 nt, Artificial Sequence
  Description of Artificial Sequence: Synthetic oligonucleotide
cucgauaugcucuguccuc

SEQ ID NO: 1946457 - RNA, 19 nt, Artificial Sequence
  Description of Artificial Sequence: Synthetic oligonucleotide
aguuccuuauguccucggu

SEQ ID NO: 1946458 - RNA, 19 nt, Artificial Sequence
  Description of Artificial Sequence: Synthetic oligonucleotide
aacugcuuugcagcccguc

SEQ ID NO: 1946459 - RNA, 19 nt, Artificial Sequence
  Description of Artificial Sequence: Synthetic oligonucleotide
aggauuccaucucaccgga

SEQ ID NO: 1946460 - RNA, 19 nt, Artificial Sequence
  Description of Artificial Sequence: Synthetic oligonucleotide
cuaguuccuuauguccucg

SEQ ID NO: 1946461 - RNA, 19 nt, Artificial Sequence
  Description of Artificial Sequence: Synthetic oligonucleotide
guccacuagcucgauaugc

SEQ ID NO: 1946462 - RNA, 19 nt, Artificial Sequence
  Description of Artificial Sequence: Synthetic oligonucleotide
uuccacacuuuucgauuug

SEQ ID NO: 1946463 - RNA, 19 nt, Artificial Sequence
  Description of Artificial Sequence: Synthetic oligonucleotide
cucaaguccuauccuauga

SEQ ID NO: 1946464 - RNA, 19 nt, Artificial Sequence
  Description of Artificial Sequence: Synthetic oligonucleotide
guccccggagcucaguucc

SEQ ID NO: 1946465 - RNA, 19 nt, Artificial Sequence
  Description of Artificial Sequence: Synthetic oligonucleotide
agcucaguuccccaccgcu

SEQ ID NO: 1946466 - RNA, 19 nt, Artificial Sequence
  Description of Artificial Sequence: Synthetic oligonucleotide
uguaccuggcauacaggua

SEQ ID NO: 1946467 - RNA, 19 nt, Artificial Sequence
  Description of Artificial Sequence: Synthetic oligonucleotide
agcgccagacuggagcagc

SEQ ID NO: 1946468 - RNA, 19 nt, Artificial Sequence
  Description of Artificial Sequence: Synthetic oligonucleotide
gagacugugcuuuuccagu

SEQ ID NO: 1946469 - RNA, 19 nt, Artificial Sequence
  Description of Artificial Sequence: Synthetic oligonucleotide
gucacaugcccaguggagc

SEQ ID NO: 1946470 - RNA, 19 nt, Artificial Sequence
  Description of Artificial Sequence: Synthetic oligonucleotide
auguccucggucacaugcc

SEQ ID NO: 1946471 - RNA, 19 nt, Artificial Sequence
  Description of Artificial Sequence: Synthetic oligonucleotide
gcgauguauuccugcaucg

SEQ ID NO: 1946472 - RNA, 19 nt, Artificial Sequence
  Description of Artificial Sequence: Synthetic oligonucleotide
uggugcgaagcccgggcag

SEQ ID NO: 1946473 - RNA, 19 nt, Artificial Sequence
  Description of Artificial Sequence: Synthetic oligonucleotide
cagguacaagagcugcucc

SEQ ID NO: 1946474 - RNA, 19 nt, Artificial Sequence
  Description of Artificial Sequence: Synthetic oligonucleotide
uuugaccugcuuguaccug

SEQ ID NO: 1946475 - RNA, 19 nt, Artificial Sequence
  Description of Artificial Sequence: Synthetic oligonucleotide
ugcggguaggaacggggug

SEQ ID NO: 1946476 - RNA, 19 nt, Artificial Sequence
  Description of Artificial Sequence: Synthetic oligonucleotide
caaguccuauccuaugaga

SEQ ID NO: 1946477 - RNA, 19 nt, Artificial Sequence
  Description of Artificial Sequence: Synthetic oligonucleotide
cacuagucuggugcgaagc

SEQ ID NO: 1946478 - RNA, 19 nt, Artificial Sequence
  Description of Artificial Sequence: Synthetic oligonucleotide
cccgaacugauuuuauuag

SEQ ID NO: 1946479 - RNA, 19 nt, Artificial Sequence
  Description of Artificial Sequence: Synthetic oligonucleotide
agagcugucugaccuucgu

SEQ ID NO: 1946480 - RNA, 19 nt, Artificial Sequence
  Description of Artificial Sequence: Synthetic oligonucleotide
cuuggacgugugcagcagc

SEQ ID NO: 1946481 - RNA, 19 nt, Artificial Sequence
  Description of Artificial Sequence: Synthetic oligonucleotide
ugggaggauuccaucucac

SEQ ID NO: 1946482 - RNA, 19 nt, Artificial Sequence
  Description of Artificial Sequence: Synthetic oligonucleotide
uacccucaaguccuauccu

SEQ ID NO: 1946483 - RNA, 19 nt, Artificial Sequence
  Description of Artificial Sequence: Synthetic oligonucleotide
cugccacuugaccugcccg

SEQ ID NO: 1946484 - RNA, 19 nt, Artificial Sequence
  Description of Artificial Sequence: Synthetic oligonucleotide
cuagcuguguggcuuucuc

SEQ ID NO: 1946485 - RNA, 19 nt, Artificial Sequence
  Description of Artificial Sequence: Synthetic oligonucleotide
ggcauacagguacaagagc

SEQ ID NO: 1946486 - RNA, 19 nt, Artificial Sequence
  Description of Artificial Sequence: Synthetic oligonucleotide
caucgcuugccuagggcug

SEQ ID NO: 1946487 - RNA, 19 nt, Artificial Sequence
  Description of Artificial Sequence: Synthetic oligonucleotide
gcauaccaaagacgggugg

SEQ ID NO: 1946488 - RNA, 19 nt, Artificial Sequence
  Description of Artificial Sequence: Synthetic oligonucleotide
uguccucacuggugugacg

SEQ ID NO: 1946489 - RNA, 19 nt, Artificial Sequence
  Description of Artificial Sequence: Synthetic oligonucleotide
acucugccacuugaccugc

SEQ ID NO: 1946490 - RNA, 19 nt, Artificial Sequence
  Description of Artificial Sequence: Synthetic oligonucleotide
ucacuggugugacgccucc

SEQ ID NO: 1946491 - RNA, 19 nt, Artificial Sequence
  Description of Artificial Sequence: Synthetic oligonucleotide
gaagagcugucugaccuuc

SEQ ID NO: 1946492 - RNA, 19 nt, Artificial Sequence
  Description of Artificial Sequence: Synthetic oligonucleotide
ccauuauuggcuucuuuuc

SEQ ID NO: 1946493 - RNA, 19 nt, Artificial Sequence
  Description of Artificial Sequence: Synthetic oligonucleotide
uccuuauguccucggucac

SEQ ID NO: 1946494 - RNA, 19 nt, Artificial Sequence
  Description of Artificial Sequence: Synthetic oligonucleotide
caggguucugggaggauuc

SEQ ID NO: 1946495 - RNA, 19 nt, Artificial Sequence
  Description of Artificial Sequence: Synthetic oligonucleotide
acagucgucuuggucucgg

SEQ ID NO: 1946496 - RNA, 19 nt, Artificial Sequence
  Description of Artificial Sequence: Synthetic oligonucleotide
cugugguggccccugcggg

SEQ ID NO: 1946497 - RNA, 19 nt, Artificial Sequence
  Description of Artificial Sequence: Synthetic oligonucleotide
cugcuuugcagcccgucac

SEQ ID NO: 1946498 - RNA, 19 nt, Artificial Sequence
  Description of Artificial Sequence: Synthetic oligonucleotide
uccuuucuucucugauacc

SEQ ID NO: 1946499 - RNA, 19 nt, Artificial Sequence
  Description of Artificial Sequence: Synthetic oligonucleotide
ccgaacugauuuuauuagc

SEQ ID NO: 1946500 - RNA, 19 nt, Artificial Sequence
  Description of Artificial Sequence: Synthetic oligonucleotide
augucagcuucauacugua

SEQ ID NO: 1946501 - RNA, 19 nt, Artificial Sequence
  Description of Artificial Sequence: Synthetic oligonucleotide
uuccgggaugccucggucu

SEQ ID NO: 1946502 - RNA, 19 nt, Artificial Sequence
  Description of Artificial Sequence: Synthetic oligonucleotide
gacuaguuccuuauguccu

SEQ ID NO: 1946503 - RNA, 19 nt, Artificial Sequence
  Description of Artificial Sequence: Synthetic oligonucleotide
gauaguggggucagcgcca

SEQ ID NO: 1946504 - RNA, 19 nt, Artificial Sequence
  Description of Artificial Sequence: Synthetic oligonucleotide
ggugugacgccuccucccg

SEQ ID NO: 1946505 - RNA, 19 nt, Artificial Sequence
  Description of Artificial Sequence: Synthetic oligonucleotide
ggaccacuagucuggugcg

SEQ ID NO: 1946506 - RNA, 19 nt, Artificial Sequence
  Description of Artificial Sequence: Synthetic oligonucleotide
gugguaaagaaguauuauu

SEQ ID NO: 1946507 - RNA, 19 nt, Artificial Sequence
  Description of Artificial Sequence: Synthetic oligonucleotide
uccuauccuaugagacugu

SEQ ID NO: 1946508 - RNA, 19 nt, Artificial Sequence
  Description of Artificial Sequence: Synthetic oligonucleotide
aacgacugguccaccaaaa

SEQ ID NO: 1946509 - RNA, 19 nt, Artificial Sequence
  Description of Artificial Sequence: Synthetic oligonucleotide
aggugacucugccacuuga

SEQ ID NO: 1946510 - RNA, 19 nt, Artificial Sequence
  Description of Artificial Sequence: Synthetic oligonucleotide
cuggugugacgccuccucc

SEQ ID NO: 1946511 - RNA, 19 nt, Artificial Sequence
  Description of Artificial Sequence: Synthetic oligonucleotide
uuccccaccgcugucgccu

SEQ ID NO: 1946512 - RNA, 19 nt, Artificial Sequence
  Description of Artificial Sequence: Synthetic oligonucleotide
gcagcagcguaaugaagag

SEQ ID NO: 1946513 - RNA, 19 nt, Artificial Sequence
  Description of Artificial Sequence: Synthetic oligonucleotide
uagcucgauaugcucuguc

SEQ ID NO: 1946514 - RNA, 19 nt, Artificial Sequence
  Description of Artificial Sequence: Synthetic oligonucleotide
aucgcuugccuagggcugg

SEQ ID NO: 1946515 - RNA, 19 nt, Artificial Sequence
  Description of Artificial Sequence: Synthetic oligonucleotide
accaaagacgggugguaaa

SEQ ID NO: 1946516 - RNA, 19 nt, Artificial Sequence
  Description of Artificial Sequence: Synthetic oligonucleotide
aggguucugggaggauucc

SEQ ID NO: 1946517 - RNA, 19 nt, Artificial Sequence
  Description of Artificial Sequence: Synthetic oligonucleotide
agucucuggaucaagccuu

SEQ ID NO: 1946518 - RNA, 19 nt, Artificial Sequence
  Description of Artificial Sequence: Synthetic oligonucleotide
acgccgcuagcuguguggc

SEQ ID NO: 1946519 - RNA, 19 nt, Artificial Sequence
  Description of Artificial Sequence: Synthetic oligonucleotide
uccgggaugccucggucuc

SEQ ID NO: 1946520 - RNA, 19 nt, Artificial Sequence
  Description of Artificial Sequence: Synthetic oligonucleotide
agucgucuuggucucggau

SEQ ID NO: 1946521 - RNA, 19 nt, Artificial Sequence
  Description of Artificial Sequence: Synthetic oligonucleotide
cucaccggagucguccccg

SEQ ID NO: 1946522 - RNA, 19 nt, Artificial Sequence
  Description of Artificial Sequence: Synthetic oligonucleotide
ccagucucuggaucaagcc

SEQ ID NO: 1946523 - RNA, 19 nt, Artificial Sequence
  Description of Artificial Sequence: Synthetic oligonucleotide
guauuccugcaucgcuugc

SEQ ID NO: 1946524 - RNA, 19 nt, Artificial Sequence
  Description of Artificial Sequence: Synthetic oligonucleotide
auauugcaguuuccaacuu

SEQ ID NO: 1946525 - RNA, 19 nt, Artificial Sequence
  Description of Artificial Sequence: Synthetic oligonucleotide
cguaaugaagagcugucug

SEQ ID NO: 1946526 - RNA, 19 nt, Artificial Sequence
  Description of Artificial Sequence: Synthetic oligonucleotide
cugaccuucguuguccuga

SEQ ID NO: 1946527 - RNA, 19 nt, Artificial Sequence
  Description of Artificial Sequence: Synthetic oligonucleotide
ucucaccggagucgucccc

SEQ ID NO: 1946528 - RNA, 19 nt, Artificial Sequence
  Description of Artificial Sequence: Synthetic oligonucleotide
ucaccggagucguccccgg

SEQ ID NO: 1946529 - RNA, 19 nt, Artificial Sequence
  Description of Artificial Sequence: Synthetic oligonucleotide
uuuuaacugcugcgaugua

SEQ ID NO: 1946530 - RNA, 19 nt, Artificial Sequence
  Description of Artificial Sequence: Synthetic oligonucleotide
gacugugacuaguuccuua

SEQ ID NO: 1946531 - RNA, 19 nt, Artificial Sequence
  Description of Artificial Sequence: Synthetic oligonucleotide
acccucaaguccuauccua

SEQ ID NO: 1946532 - RNA, 19 nt, Artificial Sequence
  Description of Artificial Sequence: Synthetic oligonucleotide
cagguuccgggaugccucg

SEQ ID NO: 1946533 - RNA, 19 nt, Artificial Sequence
  Description of Artificial Sequence: Synthetic oligonucleotide
cugcuuguaccuggcauac

SEQ ID NO: 1946534 - RNA, 19 nt, Artificial Sequence
  Description of Artificial Sequence: Synthetic oligonucleotide
ugcuucccuucaaaaucaa

SEQ ID NO: 1946535 - RNA, 19 nt, Artificial Sequence
  Description of Artificial Sequence: Synthetic oligonucleotide
uggcuuucucaggugacuc

SEQ ID NO: 1946536 - RNA, 19 nt, Artificial Sequence
  Description of Artificial Sequence: Synthetic oligonucleotide
uccucacuggugugacgcc

SEQ ID NO: 1946537 - RNA, 19 nt, Artificial Sequence
  Description of Artificial Sequence: Synthetic oligonucleotide
cucacuggugugacgccuc

SEQ ID NO: 1946538 - RNA, 19 nt, Artificial Sequence
  Description of Artificial Sequence: Synthetic oligonucleotide
gaagcccgggcagcagugg

SEQ ID NO: 1946539 - RNA, 19 nt, Artificial Sequence
  Description of Artificial Sequence: Synthetic oligonucleotide
uuccccgaacugauuuuau

SEQ ID NO: 1946540 - RNA, 19 nt, Artificial Sequence
  Description of Artificial Sequence: Synthetic oligonucleotide
uuauguccucggucacaug

SEQ ID NO: 1946541 - RNA, 19 nt, Artificial Sequence
  Description of Artificial Sequence: Synthetic oligonucleotide
aguuccccgaacugauuuu

SEQ ID NO: 1946542 - RNA, 19 nt, Artificial Sequence
  Description of Artificial Sequence: Synthetic oligonucleotide
ccaaagacgggugguaaag

SEQ ID NO: 1946543 - RNA, 19 nt, Artificial Sequence
  Description of Artificial Sequence: Synthetic oligonucleotide
cuucuggcagacagucguc

SEQ ID NO: 1946544 - RNA, 19 nt, Artificial Sequence
  Description of Artificial Sequence: Synthetic oligonucleotide
auguauuccugcaucgcuu

SEQ ID NO: 1946545 - RNA, 19 nt, Artificial Sequence
  Description of Artificial Sequence: Synthetic oligonucleotide
uggccauguccacuagcuc

SEQ ID NO: 1946546 - RNA, 19 nt, Artificial Sequence
  Description of Artificial Sequence: Synthetic oligonucleotide
caguuccccaccgcugucg

SEQ ID NO: 1946547 - RNA, 19 nt, Artificial Sequence
  Description of Artificial Sequence: Synthetic oligonucleotide
aacucacaggcagcagcgu

SEQ ID NO: 1946548 - RNA, 19 nt, Artificial Sequence
  Description of Artificial Sequence: Synthetic oligonucleotide
cuuugcagcccgucaccuc

SEQ ID NO: 1946549 - RNA, 19 nt, Artificial Sequence
  Description of Artificial Sequence: Synthetic oligonucleotide
cuacaguuucuuuuacccu

SEQ ID NO: 1946550 - RNA, 19 nt, Artificial Sequence
  Description of Artificial Sequence: Synthetic oligonucleotide
ccugacaauuaaugucagc

SEQ ID NO: 1946551 - RNA, 19 nt, Artificial Sequence
  Description of Artificial Sequence: Synthetic oligonucleotide
gcggguaggaacggggugg

SEQ ID NO: 1946552 - RNA, 19 nt, Artificial Sequence
  Description of Artificial Sequence: Synthetic oligonucleotide
cacuagcucgauaugcucu

SEQ ID NO: 1946553 - RNA, 19 nt, Artificial Sequence
  Description of Artificial Sequence: Synthetic oligonucleotide
gagucguccccggagcuca

SEQ ID NO: 1946554 - RNA, 19 nt, Artificial Sequence
  Description of Artificial Sequence: Synthetic oligonucleotide
cuaacgacugguccaccaa

SEQ ID NO: 1946555 - RNA, 19 nt, Artificial Sequence
  Description of Artificial Sequence: Synthetic oligonucleotide
cuaugagacugugcuuuuc

SEQ ID NO: 1946556 - RNA, 19 nt, Artificial Sequence
  Description of Artificial Sequence: Synthetic oligonucleotide
auaccaaagacggguggua

SEQ ID NO: 1946557 - RNA, 19 nt, Artificial Sequence
  Description of Artificial Sequence: Synthetic oligonucleotide
auccuaugagacugugcuu

SEQ ID NO: 1946558 - RNA, 19 nt, Artificial Sequence
  Description of Artificial Sequence: Synthetic oligonucleotide
cugcaucgcuugccuaggg

SEQ ID NO: 1946559 - RNA, 19 nt, Artificial Sequence
  Description of Artificial Sequence: Synthetic oligonucleotide
gauaugcucuguccucacu

SEQ ID NO: 1946560 - RNA, 19 nt, Artificial Sequence
  Description of Artificial Sequence: Synthetic oligonucleotide
uuuuacccucaaguccuau

SEQ ID NO: 1946561 - RNA, 19 nt, Artificial Sequence
  Description of Artificial Sequence: Synthetic oligonucleotide
acgggguggccauguccac

SEQ ID NO: 1946562 - RNA, 19 nt, Artificial Sequence
  Description of Artificial Sequence: Synthetic oligonucleotide
gagcucaguuccccaccgc

SEQ ID NO: 1946563 - RNA, 19 nt, Artificial Sequence
  Description of Artificial Sequence: Synthetic oligonucleotide
gacagucgucuuggucucg

SEQ ID NO: 1946564 - RNA, 19 nt, Artificial Sequence
  Description of Artificial Sequence: Synthetic oligonucleotide
gacgugugcagcagccuuc

SEQ ID NO: 1946565 - RNA, 19 nt, Artificial Sequence
  Description of Artificial Sequence: Synthetic oligonucleotide
gugugacgccuccucccgg

SEQ ID NO: 1946566 - RNA, 19 nt, Artificial Sequence
  Description of Artificial Sequence: Synthetic oligonucleotide
cugucugaccuucguuguc

SEQ ID NO: 1946567 - RNA, 19 nt, Artificial Sequence
  Description of Artificial Sequence: Synthetic oligonucleotide
gcaagacugugacuaguuc

SEQ ID NO: 1946568 - RNA, 19 nt, Artificial Sequence
  Description of Artificial Sequence: Synthetic oligonucleotide
accacuagucuggugcgaa

SEQ ID NO: 1946569 - RNA, 19 nt, Artificial Sequence
  Description of Artificial Sequence: Synthetic oligonucleotide
ccugugguggccccugcgg

SEQ ID NO: 1946570 - RNA, 19 nt, Artificial Sequence
  Description of Artificial Sequence: Synthetic oligonucleotide
ccaacuuugaccugcuugu

SEQ ID NO: 1946571 - RNA, 19 nt, Artificial Sequence
  Description of Artificial Sequence: Synthetic oligonucleotide
caaagacgggugguaaaga

SEQ ID NO: 1946572 - RNA, 19 nt, Artificial Sequence
  Description of Artificial Sequence: Synthetic oligonucleotide
ggcuuugguuacaugguca

SEQ ID NO: 1946573 - RNA, 19 nt, Artificial Sequence
  Description of Artificial Sequence: Synthetic oligonucleotide
auuagccaaugcauaccaa

SEQ ID NO: 1946574 - RNA, 19 nt, Artificial Sequence
  Description of Artificial Sequence: Synthetic oligonucleotide
cucuguccucacuggugug

SEQ ID NO: 1946575 - RNA, 19 nt, Artificial Sequence
  Description of Artificial Sequence: Synthetic oligonucleotide
guuccgggaugccucgguc

SEQ ID NO: 1946576 - RNA, 19 nt, Artificial Sequence
  Description of Artificial Sequence: Synthetic oligonucleotide
gccccugcggguaggaacg

SEQ ID NO: 1946577 - RNA, 19 nt, Artificial Sequence
  Description of Artificial Sequence: Synthetic oligonucleotide
gucucuggaucaagccuug

SEQ ID NO: 1946578 - RNA, 19 nt, Artificial Sequence
  Description of Artificial Sequence: Synthetic oligonucleotide
gcagacagucgucuugguc

SEQ ID NO: 1946579 - RNA, 19 nt, Artificial Sequence
  Description of Artificial Sequence: Synthetic oligonucleotide
cugauuguuucuucaugau

SEQ ID NO: 1946580 - RNA, 19 nt, Artificial Sequence
  Description of Artificial Sequence: Synthetic oligonucleotide
ugucgccugugguggcccc

SEQ ID NO: 1946581 - RNA, 19 nt, Artificial Sequence
  Description of Artificial Sequence: Synthetic oligonucleotide
ugguggccccugcggguag

SEQ ID NO: 1946582 - RNA, 19 nt, Artificial Sequence
  Description of Artificial Sequence: Synthetic oligonucleotide
cagacuggagcagcagcuc

SEQ ID NO: 1946583 - RNA, 19 nt, Artificial Sequence
  Description of Artificial Sequence: Synthetic oligonucleotide
ugccuagggcuggagucac

SEQ ID NO: 1946584 - RNA, 19 nt, Artificial Sequence
  Description of Artificial Sequence: Synthetic oligonucleotide
ccucaaguccuauccuaug

SEQ ID NO: 1946585 - RNA, 19 nt, Artificial Sequence
  Description of Artificial Sequence: Synthetic oligonucleotide
acgugugcagcagccuucu

SEQ ID NO: 1946586 - RNA, 19 nt, Artificial Sequence
  Description of Artificial Sequence: Synthetic oligonucleotide
ggugacucugccacuugac

SEQ ID NO: 1946587 - RNA, 19 nt, Artificial Sequence
  Description of Artificial Sequence: Synthetic oligonucleotide
ggugguaaagaaguauuau

SEQ ID NO: 1946588 - RNA, 19 nt, Artificial Sequence
  Description of Artificial Sequence: Synthetic oligonucleotide
ugcuuguaccuggcauaca

SEQ ID NO: 1946589 - RNA, 19 nt, Artificial Sequence
  Description of Artificial Sequence: Synthetic oligonucleotide
ucccugcaguaaucaaaua

SEQ ID NO: 1946590 - RNA, 19 nt, Artificial Sequence
  Description of Artificial Sequence: Synthetic oligonucleotide
cuggaccacuagucuggug

SEQ ID NO: 1946591 - RNA, 19 nt, Artificial Sequence
  Description of Artificial Sequence: Synthetic oligonucleotide
cuuauguccucggucacau

SEQ ID NO: 1946592 - RNA, 19 nt, Artificial Sequence
  Description of Artificial Sequence: Synthetic oligonucleotide
cuuccacacuuuucgauuu

SEQ ID NO: 1946593 - RNA, 19 nt, Artificial Sequence
  Description of Artificial Sequence: Synthetic oligonucleotide
ugccucggucucaggguuc

SEQ ID NO: 1946594 - RNA, 19 nt, Artificial Sequence
  Description of Artificial Sequence: Synthetic oligonucleotide
caggugacucugccacuug

SEQ ID NO: 1946595 - RNA, 19 nt, Artificial Sequence
  Description of Artificial Sequence: Synthetic oligonucleotide
uuccaacuuugaccugcuu

SEQ ID NO: 1946596 - RNA, 19 nt, Artificial Sequence
  Description of Artificial Sequence: Synthetic oligonucleotide
cucaguuccccaccgcugu

SEQ ID NO: 1946597 - RNA, 19 nt, Artificial Sequence
  Description of Artificial Sequence: Synthetic oligonucleotide
gaccugcuuguaccuggca

SEQ ID NO: 1946598 - RNA, 19 nt, Artificial Sequence
  Description of Artificial Sequence: Synthetic oligonucleotide
gcaucgcuugccuagggcu

SEQ ID NO: 1946599 - RNA, 19 nt, Artificial Sequence
  Description of Artificial Sequence: Synthetic oligonucleotide
cuuuucgauuugauggcuu

SEQ ID NO: 1946600 - RNA, 19 nt, Artificial Sequence
  Description of Artificial Sequence: Synthetic oligonucleotide
cacuuccacacuuuucgau

SEQ ID NO: 1946601 - RNA, 19 nt, Artificial Sequence
  Description of Artificial Sequence: Synthetic oligonucleotide
gcucgauaugcucuguccu

SEQ ID NO: 1946602 - RNA, 19 nt, Artificial Sequence
  Description of Artificial Sequence: Synthetic oligonucleotide
ccacuagcucgauaugcuc

SEQ ID NO: 1946603 - RNA, 19 nt, Artificial Sequence
  Description of Artificial Sequence: Synthetic oligonucleotide
ccccgaacugauuuuauua

SEQ ID NO: 1946604 - RNA, 19 nt, Artificial Sequence
  Description of Artificial Sequence: Synthetic oligonucleotide
cugcugcgauguauuccug

SEQ ID NO: 1946605 - RNA, 19 nt, Artificial Sequence
  Description of Artificial Sequence: Synthetic oligonucleotide
ggugcgaagcccgggcagc

SEQ ID NO: 1946606 - RNA, 19 nt, Artificial Sequence
  Description of Artificial Sequence: Synthetic oligonucleotide
ggucaauguuguuuucccu

SEQ ID NO: 1946607 - RNA, 19 nt, Artificial Sequence
  Description of Artificial Sequence: Synthetic oligonucleotide
guuccccaccgcugucgcc

SEQ ID NO: 1946608 - RNA, 19 nt, Artificial Sequence
  Description of Artificial Sequence: Synthetic oligonucleotide
aaacugcuuugcagcccgu

SEQ ID NO: 1946609 - RNA, 19 nt, Artificial Sequence
  Description of Artificial Sequence: Synthetic oligonucleotide
ccuggcauacagguacaag

SEQ ID NO: 1946610 - RNA, 19 nt, Artificial Sequence
  Description of Artificial Sequence: Synthetic oligonucleotide
cacaggcagcagcguaaug

SEQ ID NO: 1946611 - RNA, 19 nt, Artificial Sequence
  Description of Artificial Sequence: Synthetic oligonucleotide
gugacgccuccucccgggc

SEQ ID NO: 1946612 - RNA, 19 nt, Artificial Sequence
  Description of Artificial Sequence: Synthetic oligonucleotide
gacgccuccucccgggccu

SEQ ID NO: 1946613 - RNA, 19 nt, Artificial Sequence
  Description of Artificial Sequence: Synthetic oligonucleotide
cccaguggagcauagcucu

SEQ ID NO: 1946614 - RNA, 19 nt, Artificial Sequence
  Description of Artificial Sequence: Synthetic oligonucleotide
gaccacuagucuggugcga

SEQ ID NO: 1946615 - RNA, 19 nt, Artificial Sequence
  Description of Artificial Sequence: Synthetic oligonucleotide
cuggugcgaagcccgggca

SEQ ID NO: 1946616 - RNA, 19 nt, Artificial Sequence
  Description of Artificial Sequence: Synthetic oligonucleotide
ucgccugugguggccccug

SEQ ID NO: 1946617 - RNA, 19 nt, Artificial Sequence
  Description of Artificial Sequence: Synthetic oligonucleotide
ccuauccuaugagacugug

SEQ ID NO: 1946618 - RNA, 19 nt, Artificial Sequence
  Description of Artificial Sequence: Synthetic oligonucleotide
cuuuuacccucaaguccua

SEQ ID NO: 1946619 - RNA, 19 nt, Artificial Sequence
  Description of Artificial Sequence: Synthetic oligonucleotide
gaccuucguuguccugaca

SEQ ID NO: 1946620 - RNA, 19 nt, Artificial Sequence
  Description of Artificial Sequence: Synthetic oligonucleotide
cggauaguggggucagcgc

SEQ ID NO: 1946621 - RNA, 19 nt, Artificial Sequence
  Description of Artificial Sequence: Synthetic oligonucleotide
gacgggugguaaagaagua

SEQ ID NO: 1946622 - RNA, 19 nt, Artificial Sequence
  Description of Artificial Sequence: Synthetic oligonucleotide
ggaucaagccuuguuaguu

SEQ ID NO: 1946623 - RNA, 19 nt, Artificial Sequence
  Description of Artificial Sequence: Synthetic oligonucleotide
gcucaguuccccaccgcug

SEQ ID NO: 1946624 - RNA, 19 nt, Artificial Sequence
  Description of Artificial Sequence: Synthetic oligonucleotide
ccacuagucuggugcgaag

SEQ ID NO: 1946625 - RNA, 19 nt, Artificial Sequence
  Description of Artificial Sequence: Synthetic oligonucleotide
agguuccgggaugccucgg

SEQ ID NO: 1946626 - RNA, 19 nt, Artificial Sequence
  Description of Artificial Sequence: Synthetic oligonucleotide
caguuccccgaacugauuu

SEQ ID NO: 1946627 - RNA, 19 nt, Artificial Sequence
  Description of Artificial Sequence: Synthetic oligonucleotide
cgauguauuccugcaucgc

SEQ ID NO: 1946628 - RNA, 19 nt, Artificial Sequence
  Description of Artificial Sequence: Synthetic oligonucleotide
gccugugguggccccugcg

SEQ ID NO: 1946629 - RNA, 19 nt, Artificial Sequence
  Description of Artificial Sequence: Synthetic oligonucleotide
acaugcccaguggagcaua

SEQ ID NO: 1946630 - RNA, 19 nt, Artificial Sequence
  Description of Artificial Sequence: Synthetic oligonucleotide
cuucguuguccugacaauu

SEQ ID NO: 1946631 - RNA, 19 nt, Artificial Sequence
  Description of Artificial Sequence: Synthetic oligonucleotide
uugcagcccgucaccucuu

SEQ ID NO: 1946632 - RNA, 19 nt, Artificial Sequence
  Description of Artificial Sequence: Synthetic oligonucleotide
agacugugacuaguuccuu

SEQ ID NO: 1946633 - RNA, 19 nt, Artificial Sequence
  Description of Artificial Sequence: Synthetic oligonucleotide
ccggagucguccccggagc

SEQ ID NO: 1946634 - RNA, 19 nt, Artificial Sequence
  Description of Artificial Sequence: Synthetic oligonucleotide
cugauaccugagguuucca

SEQ ID NO: 1946635 - RNA, 19 nt, Artificial Sequence
  Description of Artificial Sequence: Synthetic oligonucleotide
uggagucaccaagggcuuu

SEQ ID NO: 1946636 - RNA, 19 nt, Artificial Sequence
  Description of Artificial Sequence: Synthetic oligonucleotide
cugugcuuuuccagucucu

SEQ ID NO: 1946637 - RNA, 19 nt, Artificial Sequence
  Description of Artificial Sequence: Synthetic oligonucleotide
gucugaccuucguuguccu

SEQ ID NO: 1946638 - RNA, 19 nt, Artificial Sequence
  Description of Artificial Sequence: Synthetic oligonucleotide
ggauuccaucucaccggag

SEQ ID NO: 1946639 - RNA, 19 nt, Artificial Sequence
  Description of Artificial Sequence: Synthetic oligonucleotide
gagcugucugaccuucguu

SEQ ID NO: 1946640 - RNA, 19 nt, Artificial Sequence
  Description of Artificial Sequence: Synthetic oligonucleotide
cuagggcuggagucaccaa

SEQ ID NO: 1946641 - RNA, 19 nt, Artificial Sequence
  Description of Artificial Sequence: Synthetic oligonucleotide
cucuggaucaagccuuguu

SEQ ID NO: 1946642 - RNA, 19 nt, Artificial Sequence
  Description of Artificial Sequence: Synthetic oligonucleotide
ccaguggagcauagcucug

SEQ ID NO: 1946643 - RNA, 19 nt, Artificial Sequence
  Description of Artificial Sequence: Synthetic oligonucleotide
ggucucggauagugggguc

SEQ ID NO: 1946644 - RNA, 19 nt, Artificial Sequence
  Description of Artificial Sequence: Synthetic oligonucleotide
ccggagcucaguuccccac

SEQ ID NO: 1946645 - RNA, 19 nt, Artificial Sequence
  Description of Artificial Sequence: Synthetic oligonucleotide
cccgucaccucuucuggca

SEQ ID NO: 1946646 - RNA, 19 nt, Artificial Sequence
  Description of Artificial Sequence: Synthetic oligonucleotide
gcccaguggagcauagcuc

SEQ ID NO: 1946647 - RNA, 19 nt, Artificial Sequence
  Description of Artificial Sequence: Synthetic oligonucleotide
cugcggguaggaacggggu

SEQ ID NO: 1946648 - RNA, 19 nt, Artificial Sequence
  Description of Artificial Sequence: Synthetic oligonucleotide
cagucgucuuggucucgga

SEQ ID NO: 1946649 - RNA, 19 nt, Artificial Sequence
  Description of Artificial Sequence: Synthetic oligonucleotide
cgauaugcucuguccucac

SEQ ID NO: 1946650 - RNA, 19 nt, Artificial Sequence
  Description of Artificial Sequence: Synthetic oligonucleotide
ggacgccgcuagcugugug

SEQ ID NO: 1946651 - RNA, 19 nt, Artificial Sequence
  Description of Artificial Sequence: Synthetic oligonucleotide
gcagugggacgccgcuagc

SEQ ID NO: 1946652 - RNA, 19 nt, Artificial Sequence
  Description of Artificial Sequence: Synthetic oligonucleotide
gcguaaugaagagcugucu

SEQ ID NO: 1946653 - RNA, 19 nt, Artificial Sequence
  Description of Artificial Sequence: Synthetic oligonucleotide
cgaagcccgggcagcagug

SEQ ID NO: 1946654 - RNA, 19 nt, Artificial Sequence
  Description of Artificial Sequence: Synthetic oligonucleotide
ccuuauguccucggucaca

SEQ ID NO: 1946655 - RNA, 19 nt, Artificial Sequence
  Description of Artificial Sequence: Synthetic oligonucleotide
cuuugguuacauggucaau

SEQ ID NO: 1946656 - RNA, 19 nt, Artificial Sequence
  Description of Artificial Sequence: Synthetic oligonucleotide
gguggccccugcggguagg

SEQ ID NO: 1946657 - RNA, 19 nt, Artificial Sequence
  Description of Artificial Sequence: Synthetic oligonucleotide
gugcagcagccuucucaaa

SEQ ID NO: 1946658 - RNA, 19 nt, Artificial Sequence
  Description of Artificial Sequence: Synthetic oligonucleotide
ggacgugugcagcagccuu

SEQ ID NO: 1946659 - RNA, 19 nt, Artificial Sequence
  Description of Artificial Sequence: Synthetic oligonucleotide
ccaccgcugucgccugugg

SEQ ID NO: 1946660 - RNA, 19 nt, Artificial Sequence
  Description of Artificial Sequence: Synthetic oligonucleotide
cagugggacgccgcuagcu

SEQ ID NO: 1946661 - RNA, 19 nt, Artificial Sequence
  Description of Artificial Sequence: Synthetic oligonucleotide
gguuccgggaugccucggu

SEQ ID NO: 1946662 - RNA, 19 nt, Artificial Sequence
  Description of Artificial Sequence: Synthetic oligonucleotide
gcagcagugggacgccgcu

SEQ ID NO: 1946663 - RNA, 19 nt, Artificial Sequence
  Description of Artificial Sequence: Synthetic oligonucleotide
gugguggccccugcgggua

SEQ ID NO: 1946664 - RNA, 19 nt, Artificial Sequence
  Description of Artificial Sequence: Synthetic oligonucleotide
cuagcucgauaugcucugu

SEQ ID NO: 1946665 - RNA, 19 nt, Artificial Sequence
  Description of Artificial Sequence: Synthetic oligonucleotide
cucguccagguuccgggau

SEQ ID NO: 1946666 - RNA, 19 nt, Artificial Sequence
  Description of Artificial Sequence: Synthetic oligonucleotide
ggcuuuccaugcuucccau

SEQ ID NO: 1946667 - RNA, 19 nt, Artificial Sequence
  Description of Artificial Sequence: Synthetic oligonucleotide
cccucaaguccuauccuau

SEQ ID NO: 1946668 - RNA, 19 nt, Artificial Sequence
  Description of Artificial Sequence: Synthetic oligonucleotide
caccggagucguccccgga

SEQ ID NO: 1946669 - RNA, 19 nt, Artificial Sequence
  Description of Artificial Sequence: Synthetic oligonucleotide
caccgcugucgccuguggu

SEQ ID NO: 1946670 - RNA, 19 nt, Artificial Sequence
  Description of Artificial Sequence: Synthetic oligonucleotide
ccuucguuguccugacaau

SEQ ID NO: 1946671 - RNA, 19 nt, Artificial Sequence
  Description of Artificial Sequence: Synthetic oligonucleotide
cucugcccucuucaucuuu

SEQ ID NO: 1946672 - RNA, 19 nt, Artificial Sequence
  Description of Artificial Sequence: Synthetic oligonucleotide
gccgcuagcuguguggcuu

SEQ ID NO: 1946673 - RNA, 19 nt, Artificial Sequence
  Description of Artificial Sequence: Synthetic oligonucleotide
cguuguccugacaauuaau

SEQ ID NO: 1946674 - RNA, 19 nt, Artificial Sequence
  Description of Artificial Sequence: Synthetic oligonucleotide
gcgccagacuggagcagca

SEQ ID NO: 1946675 - RNA, 19 nt, Artificial Sequence
  Description of Artificial Sequence: Synthetic oligonucleotide
gcuagcuguguggcuuucu

SEQ ID NO: 1946676 - RNA, 19 nt, Artificial Sequence
  Description of Artificial Sequence: Synthetic oligonucleotide
cagcagugggacgccgcua

SEQ ID NO: 1946677 - RNA, 19 nt, Artificial Sequence
  Description of Artificial Sequence: Synthetic oligonucleotide
ccuaugagacugugcuuuu

SEQ ID NO: 1946678 - RNA, 19 nt, Artificial Sequence
  Description of Artificial Sequence: Synthetic oligonucleotide
ccccugcggguaggaacgg

SEQ ID NO: 1946679 - RNA, 19 nt, Artificial Sequence
  Description of Artificial Sequence: Synthetic oligonucleotide
gccucggucucaggguucu

SEQ ID NO: 1946680 - RNA, 19 nt, Artificial Sequence
  Description of Artificial Sequence: Synthetic oligonucleotide
cacuggugugacgccuccu

SEQ ID NO: 1946681 - RNA, 19 nt, Artificial Sequence
  Description of Artificial Sequence: Synthetic oligonucleotide
gucgccugugguggccccu

SEQ ID NO: 1946682 - RNA, 19 nt, Artificial Sequence
  Description of Artificial Sequence: Synthetic oligonucleotide
ccucacuggugugacgccu

SEQ ID NO: 1946683 - RNA, 19 nt, Artificial Sequence
  Description of Artificial Sequence: Synthetic oligonucleotide
ccgggaugccucggucuca

SEQ ID NO: 1946684 - RNA, 19 nt, Artificial Sequence
  Description of Artificial Sequence: Synthetic oligonucleotide
ccuggaccacuagucuggu

SEQ ID NO: 1946685 - RNA, 19 nt, Artificial Sequence
  Description of Artificial Sequence: Synthetic oligonucleotide
gggacgccgcuagcugugu

SEQ ID NO: 1946686 - RNA, 19 nt, Artificial Sequence
  Description of Artificial Sequence: Synthetic oligonucleotide
cggagucguccccggagcu

SEQ ID NO: 1946687 - RNA, 19 nt, Artificial Sequence
  Description of Artificial Sequence: Synthetic oligonucleotide
ccgcuagcuguguggcuuu

SEQ ID NO: 1946688 - RNA, 19 nt, Artificial Sequence
  Description of Artificial Sequence: Synthetic oligonucleotide
ccucggucacaugcccagu

SEQ ID NO: 1946689 - RNA, 19 nt, Artificial Sequence
  Description of Artificial Sequence: Synthetic oligonucleotide
cgccgcuagcuguguggcu

SEQ ID NO: 1946690 - RNA, 19 nt, Artificial Sequence
  Description of Artificial Sequence: Synthetic oligonucleotide
uagaagaucacuuauaacc

SEQ ID NO: 1946691 - RNA, 19 nt, Artificial Sequence
  Description of Artificial Sequence: Synthetic oligonucleotide
aauauaacuagcacaauac

SEQ ID NO: 1946692 - RNA, 19 nt, Artificial Sequence
  Description of Artificial Sequence: Synthetic oligonucleotide
aauuaaucuguucagugag

SEQ ID NO: 1946693 - RNA, 19 nt, Artificial Sequence
  Description of Artificial Sequence: Synthetic oligonucleotide
gauguuguagauuaagggg

SEQ ID NO: 1946694 - RNA, 19 nt, Artificial Sequence
  Description of Artificial Sequence: Synthetic oligonucleotide
aaugaaagcaauugaaagu

SEQ ID NO: 1946695 - RNA, 19 nt, Artificial Sequence
  Description of Artificial Sequence: Synthetic oligonucleotide
aaaugguguguccagcucc

SEQ ID NO: 1946696 - RNA, 19 nt, Artificial Sequence
  Description of Artificial Sequence: Synthetic oligonucleotide
agaugacacaaccacaucc

SEQ ID NO: 1946697 - RNA, 19 nt, Artificial Sequence
  Description of Artificial Sequence: Synthetic oligonucleotide
aguaaauauaacuagcaca

SEQ ID NO: 1946698 - RNA, 19 nt, Artificial Sequence
  Description of Artificial Sequence: Synthetic oligonucleotide
auagucaauccauagaguc

SEQ ID NO: 1946699 - RNA, 19 nt, Artificial Sequence
  Description of Artificial Sequence: Synthetic oligonucleotide
aacaacaacaggugugacc

SEQ ID NO: 1946700 - RNA, 19 nt, Artificial Sequence
  Description of Artificial Sequence: Synthetic oligonucleotide
aaacauccaaguaagacac

SEQ ID NO: 1946701 - RNA, 19 nt, Artificial Sequence
  Description of Artificial Sequence: Synthetic oligonucleotide
uauaacuagcacaauacug

SEQ ID NO: 1946702 - RNA, 19 nt, Artificial Sequence
  Description of Artificial Sequence: Synthetic oligonucleotide
cuuauaaccccugagacgg

SEQ ID NO: 1946703 - RNA, 19 nt, Artificial Sequence
  Description of Artificial Sequence: Synthetic oligonucleotide
aggccuuuagcacacaugc

SEQ ID NO: 1946704 - RNA, 19 nt, Artificial Sequence
  Description of Artificial Sequence: Synthetic oligonucleotide
ugagauggacuuuaguugg

SEQ ID NO: 1946705 - RNA, 19 nt, Artificial Sequence
  Description of Artificial Sequence: Synthetic oligonucleotide
aggauaaauguccugacuc

SEQ ID NO: 1946706 - RNA, 19 nt, Artificial Sequence
  Description of Artificial Sequence: Synthetic oligonucleotide
cuuuaguuggucaagacuc

SEQ ID NO: 1946707 - RNA, 19 nt, Artificial Sequence
  Description of Artificial Sequence: Synthetic oligonucleotide
aaauauaacuagcacaaua

SEQ ID NO: 1946708 - RNA, 19 nt, Artificial Sequence
  Description of Artificial Sequence: Synthetic oligonucleotide
aauacauuguuuacuagag

SEQ ID NO: 1946709 - RNA, 19 nt, Artificial Sequence
  Description of Artificial Sequence: Synthetic oligonucleotide
ugagguauuucauauuucc

SEQ ID NO: 1946710 - RNA, 19 nt, Artificial Sequence
  Description of Artificial Sequence: Synthetic oligonucleotide
aaucucugcuuauauguuc

SEQ ID NO: 1946711 - RNA, 19 nt, Artificial Sequence
  Description of Artificial Sequence: Synthetic oligonucleotide
agugcuguuucccagauca

SEQ ID NO: 1946712 - RNA, 19 nt, Artificial Sequence
  Description of Artificial Sequence: Synthetic oligonucleotide
ugacuauucacguugcuug

SEQ ID NO: 1946713 - RNA, 19 nt, Artificial Sequence
  Description of Artificial Sequence: Synthetic oligonucleotide
ugagcagagaggcuuaugc

SEQ ID NO: 1946714 - RNA, 19 nt, Artificial Sequence
  Description of Artificial Sequence: Synthetic oligonucleotide
gaagacagaugacacaacc

SEQ ID NO: 1946715 - RNA, 19 nt, Artificial Sequence
  Description of Artificial Sequence: Synthetic oligonucleotide
aaguaauauggcugaagag

SEQ ID NO: 1946716 - RNA, 19 nt, Artificial Sequence
  Description of Artificial Sequence: Synthetic oligonucleotide
aguaauauggcugaagagu

SEQ ID NO: 1946717 - RNA, 19 nt, Artificial Sequence
  Description of Artificial Sequence: Synthetic oligonucleotide
agaacucccaguuguaaac

SEQ ID NO: 1946718 - RNA, 19 nt, Artificial Sequence
  Description of Artificial Sequence: Synthetic oligonucleotide
acagucguauguugaaucc

SEQ ID NO: 1946719 - RNA, 19 nt, Artificial Sequence
  Description of Artificial Sequence: Synthetic oligonucleotide
gaaguaauauggcugaaga

SEQ ID NO: 1946720 - RNA, 19 nt, Artificial Sequence
  Description of Artificial Sequence: Synthetic oligonucleotide
aagggguucauagucaauc

SEQ ID NO: 1946721 - RNA, 19 nt, Artificial Sequence
  Description of Artificial Sequence: Synthetic oligonucleotide
acuuauaaccccugagacg

SEQ ID NO: 1946722 - RNA, 19 nt, Artificial Sequence
  Description of Artificial Sequence: Synthetic oligonucleotide
gauuaagggguucauaguc

SEQ ID NO: 1946723 - RNA, 19 nt, Artificial Sequence
  Description of Artificial Sequence: Synthetic oligonucleotide
ucacuuauaaccccugaga

SEQ ID NO: 1946724 - RNA, 19 nt, Artificial Sequence
  Description of Artificial Sequence: Synthetic oligonucleotide
uauuuccuggcuuuccugg

SEQ ID NO: 1946725 - RNA, 19 nt, Artificial Sequence
  Description of Artificial Sequence: Synthetic oligonucleotide
uucacguugcuugagaacc

SEQ ID NO: 1946726 - RNA, 19 nt, Artificial Sequence
  Description of Artificial Sequence: Synthetic oligonucleotide
aaaacaacaacagguguga

SEQ ID NO: 1946727 - RNA, 19 nt, Artificial Sequence
  Description of Artificial Sequence: Synthetic oligonucleotide
aagugcaggccuuuagcac

SEQ ID NO: 1946728 - RNA, 19 nt, Artificial Sequence
  Description of Artificial Sequence: Synthetic oligonucleotide
uaggacuuaauuuuccaca

SEQ ID NO: 1946729 - RNA, 19 nt, Artificial Sequence
  Description of Artificial Sequence: Synthetic oligonucleotide
agacaaaacaacaacaggu

SEQ ID NO: 1946730 - RNA, 19 nt, Artificial Sequence
  Description of Artificial Sequence: Synthetic oligonucleotide
gguauuucauauuuccugg

SEQ ID NO: 1946731 - RNA, 19 nt, Artificial Sequence
  Description of Artificial Sequence: Synthetic oligonucleotide
uuuaguuugcugacuauuc

SEQ ID NO: 1946732 - RNA, 19 nt, Artificial Sequence
  Description of Artificial Sequence: Synthetic oligonucleotide
auagacaaaacaacaacag

SEQ ID NO: 1946733 - RNA, 19 nt, Artificial Sequence
  Description of Artificial Sequence: Synthetic oligonucleotide
gacuuaauuuuccacaguc

SEQ ID NO: 1946734 - RNA, 19 nt, Artificial Sequence
  Description of Artificial Sequence: Synthetic oligonucleotide
uucaggaaugucuuguggc

SEQ ID NO: 1946735 - RNA, 19 nt, Artificial Sequence
  Description of Artificial Sequence: Synthetic oligonucleotide
uucauagucaauccauaga

SEQ ID NO: 1946736 - RNA, 19 nt, Artificial Sequence
  Description of Artificial Sequence: Synthetic oligonucleotide
agaaccauggaagugcagg

SEQ ID NO: 1946737 - RNA, 19 nt, Artificial Sequence
  Description of Artificial Sequence: Synthetic oligonucleotide
uugcugacuauucacguug

SEQ ID NO: 1946738 - RNA, 19 nt, Artificial Sequence
  Description of Artificial Sequence: Synthetic oligonucleotide
guaaacaucauucaggaau

SEQ ID NO: 1946739 - RNA, 19 nt, Artificial Sequence
  Description of Artificial Sequence: Synthetic oligonucleotide
aaauguccugacucagacg

SEQ ID NO: 1946740 - RNA, 19 nt, Artificial Sequence
  Description of Artificial Sequence: Synthetic oligonucleotide
aagcacacgacucagcuua

SEQ ID NO: 1946741 - RNA, 19 nt, Artificial Sequence
  Description of Artificial Sequence: Synthetic oligonucleotide
cugagauggacuuuaguug

SEQ ID NO: 1946742 - RNA, 19 nt, Artificial Sequence
  Description of Artificial Sequence: Synthetic oligonucleotide
uauuucauauuuccuggcu

SEQ ID NO: 1946743 - RNA, 19 nt, Artificial Sequence
  Description of Artificial Sequence: Synthetic oligonucleotide
uuaguggacagcuucaaua

SEQ ID NO: 1946744 - RNA, 19 nt, Artificial Sequence
  Description of Artificial Sequence: Synthetic oligonucleotide
gaaacuccacuccuuaggc

SEQ ID NO: 1946745 - RNA, 19 nt, Artificial Sequence
  Description of Artificial Sequence: Synthetic oligonucleotide
aggacuuaauuuuccacag

SEQ ID NO: 1946746 - RNA, 19 nt, Artificial Sequence
  Description of Artificial Sequence: Synthetic oligonucleotide
uuaguuugcugacuauuca

SEQ ID NO: 1946747 - RNA, 19 nt, Artificial Sequence
  Description of Artificial Sequence: Synthetic oligonucleotide
ugcgucaccaucaggcagg

SEQ ID NO: 1946748 - RNA, 19 nt, Artificial Sequence
  Description of Artificial Sequence: Synthetic oligonucleotide
agggguucauagucaaucc

SEQ ID NO: 1946749 - RNA, 19 nt, Artificial Sequence
  Description of Artificial Sequence: Synthetic oligonucleotide
uuaaucuguucagugagca

SEQ ID NO: 1946750 - RNA, 19 nt, Artificial Sequence
  Description of Artificial Sequence: Synthetic oligonucleotide
auauaacuagcacaauacu

SEQ ID NO: 1946751 - RNA, 19 nt, Artificial Sequence
  Description of Artificial Sequence: Synthetic oligonucleotide
aaccauauuuuaauguucu

SEQ ID NO: 1946752 - RNA, 19 nt, Artificial Sequence
  Description of Artificial Sequence: Synthetic oligonucleotide
cuuauauguucucucugcc

SEQ ID NO: 1946753 - RNA, 19 nt, Artificial Sequence
  Description of Artificial Sequence: Synthetic oligonucleotide
agucacucguuucagggag

SEQ ID NO: 1946754 - RNA, 19 nt, Artificial Sequence
  Description of Artificial Sequence: Synthetic oligonucleotide
uaaccauauuuuaauguuc

SEQ ID NO: 1946755 - RNA, 19 nt, Artificial Sequence
  Description of Artificial Sequence: Synthetic oligonucleotide
aucacuuauaaccccugag

SEQ ID NO: 1946756 - RNA, 19 nt, Artificial Sequence
  Description of Artificial Sequence: Synthetic oligonucleotide
aauccuagaagaucacuua

SEQ ID NO: 1946757 - RNA, 19 nt, Artificial Sequence
  Description of Artificial Sequence: Synthetic oligonucleotide
uuaggacuuaauuuuccac

SEQ ID NO: 1946758 - RNA, 19 nt, Artificial Sequence
  Description of Artificial Sequence: Synthetic oligonucleotide
aaaagaguccaagcacacg

SEQ ID NO: 1946759 - RNA, 19 nt, Artificial Sequence
  Description of Artificial Sequence: Synthetic oligonucleotide
guugaauccuagaagauca

SEQ ID NO: 1946760 - RNA, 19 nt, Artificial Sequence
  Description of Artificial Sequence: Synthetic oligonucleotide
aaagcaauugaaaguguca

SEQ ID NO: 1946761 - RNA, 19 nt, Artificial Sequence
  Description of Artificial Sequence: Synthetic oligonucleotide
gauaaauguccugacucag

SEQ ID NO: 1946762 - RNA, 19 nt, Artificial Sequence
  Description of Artificial Sequence: Synthetic oligonucleotide
auagagucuaaauggugug

SEQ ID NO: 1946763 - RNA, 19 nt, Artificial Sequence
  Description of Artificial Sequence: Synthetic oligonucleotide
cacuuauaaccccugagac

SEQ ID NO: 1946764 - RNA, 19 nt, Artificial Sequence
  Description of Artificial Sequence: Synthetic oligonucleotide
acucagacgguccugcguc

SEQ ID NO: 1946765 - RNA, 19 nt, Artificial Sequence
  Description of Artificial Sequence: Synthetic oligonucleotide
uccauagagucuaaauggu

SEQ ID NO: 1946766 - RNA, 19 nt, Artificial Sequence
  Description of Artificial Sequence: Synthetic oligonucleotide
cuugugauguuguagauua

SEQ ID NO: 1946767 - RNA, 19 nt, Artificial Sequence
  Description of Artificial Sequence: Synthetic oligonucleotide
caauacauuguuuacuaga

SEQ ID NO: 1946768 - RNA, 19 nt, Artificial Sequence
  Description of Artificial Sequence: Synthetic oligonucleotide
auucacguugcuugagaac

SEQ ID NO: 1946769 - RNA, 19 nt, Artificial Sequence
  Description of Artificial Sequence: Synthetic oligonucleotide
cauuguuuacuagagugag

SEQ ID NO: 1946770 - RNA, 19 nt, Artificial Sequence
  Description of Artificial Sequence: Synthetic oligonucleotide
augacuacucuugugaugu

SEQ ID NO: 1946771 - RNA, 19 nt, Artificial Sequence
  Description of Artificial Sequence: Synthetic oligonucleotide
uccaggauaaauguccuga

SEQ ID NO: 1946772 - RNA, 19 nt, Artificial Sequence
  Description of Artificial Sequence: Synthetic oligonucleotide
agcacaauacuggaggguc

SEQ ID NO: 1946773 - RNA, 19 nt, Artificial Sequence
  Description of Artificial Sequence: Synthetic oligonucleotide
acuuaauuuuccacagucg

SEQ ID NO: 1946774 - RNA, 19 nt, Artificial Sequence
  Description of Artificial Sequence: Synthetic oligonucleotide
cuagcacaauacuggaggg

SEQ ID NO: 1946775 - RNA, 19 nt, Artificial Sequence
  Description of Artificial Sequence: Synthetic oligonucleotide
auaaauuaaucuguucagu

SEQ ID NO: 1946776 - RNA, 19 nt, Artificial Sequence
  Description of Artificial Sequence: Synthetic oligonucleotide
uuuccgaccccagugaggc

SEQ ID NO: 1946777 - RNA, 19 nt, Artificial Sequence
  Description of Artificial Sequence: Synthetic oligonucleotide
uagucaauccauagagucu

SEQ ID NO: 1946778 - RNA, 19 nt, Artificial Sequence
  Description of Artificial Sequence: Synthetic oligonucleotide
ugagacggccgaaaggaug

SEQ ID NO: 1946779 - RNA, 19 nt, Artificial Sequence
  Description of Artificial Sequence: Synthetic oligonucleotide
uuuaguuggucaagacucu

SEQ ID NO: 1946780 - RNA, 19 nt, Artificial Sequence
  Description of Artificial Sequence: Synthetic oligonucleotide
gaugacuacucuugugaug

SEQ ID NO: 1946781 - RNA, 19 nt, Artificial Sequence
  Description of Artificial Sequence: Synthetic oligonucleotide
agagucuaaaugguguguc

SEQ ID NO: 1946782 - RNA, 19 nt, Artificial Sequence
  Description of Artificial Sequence: Synthetic oligonucleotide
uacuagagugaguuguucu

SEQ ID NO: 1946783 - RNA, 19 nt, Artificial Sequence
  Description of Artificial Sequence: Synthetic oligonucleotide
uaguuugcugacuauucac

SEQ ID NO: 1946784 - RNA, 19 nt, Artificial Sequence
  Description of Artificial Sequence: Synthetic oligonucleotide
auguuguagauuaaggggu

SEQ ID NO: 1946785 - RNA, 19 nt, Artificial Sequence
  Description of Artificial Sequence: Synthetic oligonucleotide
aauauggcugaagaguuuu

SEQ ID NO: 1946786 - RNA, 19 nt, Artificial Sequence
  Description of Artificial Sequence: Synthetic oligonucleotide
ggaaacuccacuccuuagg

SEQ ID NO: 1946787 - RNA, 19 nt, Artificial Sequence
  Description of Artificial Sequence: Synthetic oligonucleotide
uucucggaaaagucgauau

SEQ ID NO: 1946788 - RNA, 19 nt, Artificial Sequence
  Description of Artificial Sequence: Synthetic oligonucleotide
uguuucccagaucaagaac

SEQ ID NO: 1946789 - RNA, 19 nt, Artificial Sequence
  Description of Artificial Sequence: Synthetic oligonucleotide
aaaagcaacagugcuguuu

SEQ ID NO: 1946790 - RNA, 19 nt, Artificial Sequence
  Description of Artificial Sequence: Synthetic oligonucleotide
uguugaauccuagaagauc

SEQ ID NO: 1946791 - RNA, 19 nt, Artificial Sequence
  Description of Artificial Sequence: Synthetic oligonucleotide
uuagcacacaugccccagg

SEQ ID NO: 1946792 - RNA, 19 nt, Artificial Sequence
  Description of Artificial Sequence: Synthetic oligonucleotide
cuagaagaucacuuauaac

SEQ ID NO: 1946793 - RNA, 19 nt, Artificial Sequence
  Description of Artificial Sequence: Synthetic oligonucleotide
agcuccuuuaacaacuuag

SEQ ID NO: 1946794 - RNA, 19 nt, Artificial Sequence
  Description of Artificial Sequence: Synthetic oligonucleotide
agaaguaauauggcugaag

SEQ ID NO: 1946795 - RNA, 19 nt, Artificial Sequence
  Description of Artificial Sequence: Synthetic oligonucleotide
uuaagggguucauagucaa

SEQ ID NO: 1946796 - RNA, 19 nt, Artificial Sequence
  Description of Artificial Sequence: Synthetic oligonucleotide
uauucacguugcuugagaa

SEQ ID NO: 1946797 - RNA, 19 nt, Artificial Sequence
  Description of Artificial Sequence: Synthetic oligonucleotide
guauuucauauuuccuggc

SEQ ID NO: 1946798 - RNA, 19 nt, Artificial Sequence
  Description of Artificial Sequence: Synthetic oligonucleotide
gagucuaaauggugugucc

SEQ ID NO: 1946799 - RNA, 19 nt, Artificial Sequence
  Description of Artificial Sequence: Synthetic oligonucleotide
ugagaaccauggaagugca

SEQ ID NO: 1946800 - RNA, 19 nt, Artificial Sequence
  Description of Artificial Sequence: Synthetic oligonucleotide
caacuuaguggacagcuuc

SEQ ID NO: 1946801 - RNA, 19 nt, Artificial Sequence
  Description of Artificial Sequence: Synthetic oligonucleotide
uggcagaaguaauauggcu

SEQ ID NO: 1946802 - RNA, 19 nt, Artificial Sequence
  Description of Artificial Sequence: Synthetic oligonucleotide
aggcuuaugcaugugagcu

SEQ ID NO: 1946803 - RNA, 19 nt, Artificial Sequence
  Description of Artificial Sequence: Synthetic oligonucleotide
gcuuauauguucucucugc

SEQ ID NO: 1946804 - RNA, 19 nt, Artificial Sequence
  Description of Artificial Sequence: Synthetic oligonucleotide
uguuuacuagagugaguug

SEQ ID NO: 1946805 - RNA, 19 nt, Artificial Sequence
  Description of Artificial Sequence: Synthetic oligonucleotide
gccuuuagcacacaugccc

SEQ ID NO: 1946806 - RNA, 19 nt, Artificial Sequence
  Description of Artificial Sequence: Synthetic oligonucleotide
cuuaauuuuccacagucgu

SEQ ID NO: 1946807 - RNA, 19 nt, Artificial Sequence
  Description of Artificial Sequence: Synthetic oligonucleotide
uuuacuagagugaguuguu

SEQ ID NO: 1946808 - RNA, 19 nt, Artificial Sequence
  Description of Artificial Sequence: Synthetic oligonucleotide
cacaaccacauccacugag

SEQ ID NO: 1946809 - RNA, 19 nt, Artificial Sequence
  Description of Artificial Sequence: Synthetic oligonucleotide
gaggcuuaugcaugugagc

SEQ ID NO: 1946810 - RNA, 19 nt, Artificial Sequence
  Description of Artificial Sequence: Synthetic oligonucleotide
gauggacuuuaguugguca

SEQ ID NO: 1946811 - RNA, 19 nt, Artificial Sequence
  Description of Artificial Sequence: Synthetic oligonucleotide
acucuuuucucggaaaagu

SEQ ID NO: 1946812 - RNA, 19 nt, Artificial Sequence
  Description of Artificial Sequence: Synthetic oligonucleotide
ccauauuuuaauguucucc

SEQ ID NO: 1946813 - RNA, 19 nt, Artificial Sequence
  Description of Artificial Sequence: Synthetic oligonucleotide
gucuaaaugguguguccag

SEQ ID NO: 1946814 - RNA, 19 nt, Artificial Sequence
  Description of Artificial Sequence: Synthetic oligonucleotide
cacagucguauguugaauc

SEQ ID NO: 1946815 - RNA, 19 nt, Artificial Sequence
  Description of Artificial Sequence: Synthetic oligonucleotide
uaaaugguguguccagcuc

SEQ ID NO: 1946816 - RNA, 19 nt, Artificial Sequence
  Description of Artificial Sequence: Synthetic oligonucleotide
aaccugugcacaacaaaug

SEQ ID NO: 1946817 - RNA, 19 nt, Artificial Sequence
  Description of Artificial Sequence: Synthetic oligonucleotide
uuguagauuaagggguuca

SEQ ID NO: 1946818 - RNA, 19 nt, Artificial Sequence
  Description of Artificial Sequence: Synthetic oligonucleotide
gacuuuaguuggucaagac

SEQ ID NO: 1946819 - RNA, 19 nt, Artificial Sequence
  Description of Artificial Sequence: Synthetic oligonucleotide
uggaaacuccacuccuuag

SEQ ID NO: 1946820 - RNA, 19 nt, Artificial Sequence
  Description of Artificial Sequence: Synthetic oligonucleotide
ucggaaaagucgauauaaa

SEQ ID NO: 1946821 - RNA, 19 nt, Artificial Sequence
  Description of Artificial Sequence: Synthetic oligonucleotide
aguccaagcacacgacuca

SEQ ID NO: 1946822 - RNA, 19 nt, Artificial Sequence
  Description of Artificial Sequence: Synthetic oligonucleotide
cauagagucuaaauggugu

SEQ ID NO: 1946823 - RNA, 19 nt, Artificial Sequence
  Description of Artificial Sequence: Synthetic oligonucleotide
gauaggagcgcagcgauaa

SEQ ID NO: 1946824 - RNA, 19 nt, Artificial Sequence
  Description of Artificial Sequence: Synthetic oligonucleotide
ucguauguugaauccuaga

SEQ ID NO: 1946825 - RNA, 19 nt, Artificial Sequence
  Description of Artificial Sequence: Synthetic oligonucleotide
agaggcuuaugcaugugag

SEQ ID NO: 1946826 - RNA, 19 nt, Artificial Sequence
  Description of Artificial Sequence: Synthetic oligonucleotide
ugaauccuagaagaucacu

SEQ ID NO: 1946827 - RNA, 19 nt, Artificial Sequence
  Description of Artificial Sequence: Synthetic oligonucleotide
acuagagugaguuguucuu

SEQ ID NO: 1946828 - RNA, 19 nt, Artificial Sequence
  Description of Artificial Sequence: Synthetic oligonucleotide
aguuggucaagacucuuuu

SEQ ID NO: 1946829 - RNA, 19 nt, Artificial Sequence
  Description of Artificial Sequence: Synthetic oligonucleotide
uaggagcgcagcgauaacc

SEQ ID NO: 1946830 - RNA, 19 nt, Artificial Sequence
  Description of Artificial Sequence: Synthetic oligonucleotide
auuaagggguucauaguca

SEQ ID NO: 1946831 - RNA, 19 nt, Artificial Sequence
  Description of Artificial Sequence: Synthetic oligonucleotide
agucuaaauggugugucca

SEQ ID NO: 1946832 - RNA, 19 nt, Artificial Sequence
  Description of Artificial Sequence: Synthetic oligonucleotide
ugcugacuauucacguugc

SEQ ID NO: 1946833 - RNA, 19 nt, Artificial Sequence
  Description of Artificial Sequence: Synthetic oligonucleotide
agucaauccauagagucua

SEQ ID NO: 1946834 - RNA, 19 nt, Artificial Sequence
  Description of Artificial Sequence: Synthetic oligonucleotide
caggcgaagcaagaaaagc

SEQ ID NO: 1946835 - RNA, 19 nt, Artificial Sequence
  Description of Artificial Sequence: Synthetic oligonucleotide
aacuuaguggacagcuuca

SEQ ID NO: 1946836 - RNA, 19 nt, Artificial Sequence
  Description of Artificial Sequence: Synthetic oligonucleotide
caacaggugugaccggugg

SEQ ID NO: 1946837 - RNA, 19 nt, Artificial Sequence
  Description of Artificial Sequence: Synthetic oligonucleotide
uugaauccuagaagaucac

SEQ ID NO: 1946838 - RNA, 19 nt, Artificial Sequence
  Description of Artificial Sequence: Synthetic oligonucleotide
agugggcgagcagugacac

SEQ ID NO: 1946839 - RNA, 19 nt, Artificial Sequence
  Description of Artificial Sequence: Synthetic oligonucleotide
ugguuuccgaccccaguga

SEQ ID NO: 1946840 - RNA, 19 nt, Artificial Sequence
  Description of Artificial Sequence: Synthetic oligonucleotide
acauuguuuacuagaguga

SEQ ID NO: 1946841 - RNA, 19 nt, Artificial Sequence
  Description of Artificial Sequence: Synthetic oligonucleotide
aagucuaaaaugagguauu

SEQ ID NO: 1946842 - RNA, 19 nt, Artificial Sequence
  Description of Artificial Sequence: Synthetic oligonucleotide
gguggugcaccacagaaga

SEQ ID NO: 1946843 - RNA, 19 nt, Artificial Sequence
  Description of Artificial Sequence: Synthetic oligonucleotide
aacaggugugaccgguggu

SEQ ID NO: 1946844 - RNA, 19 nt, Artificial Sequence
  Description of Artificial Sequence: Synthetic oligonucleotide
agauggacuuuaguugguc

SEQ ID NO: 1946845 - RNA, 19 nt, Artificial Sequence
  Description of Artificial Sequence: Synthetic oligonucleotide
ugaccgguggugcaccaca

SEQ ID NO: 1946846 - RNA, 19 nt, Artificial Sequence
  Description of Artificial Sequence: Synthetic oligonucleotide
aggcgaagcaagaaaagca

SEQ ID NO: 1946847 - RNA, 19 nt, Artificial Sequence
  Description of Artificial Sequence: Synthetic oligonucleotide
ggaagugcaggccuuuagc

SEQ ID NO: 1946848 - RNA, 19 nt, Artificial Sequence
  Description of Artificial Sequence: Synthetic oligonucleotide
uuaugcaugugagcuggca

SEQ ID NO: 1946849 - RNA, 19 nt, Artificial Sequence
  Description of Artificial Sequence: Synthetic oligonucleotide
cucggaaaagucgauauaa

SEQ ID NO: 1946850 - RNA, 19 nt, Artificial Sequence
  Description of Artificial Sequence: Synthetic oligonucleotide
guuucccagaucaagaacu

SEQ ID NO: 1946851 - RNA, 19 nt, Artificial Sequence
  Description of Artificial Sequence: Synthetic oligonucleotide
agagugaguuguucuuucu

SEQ ID NO: 1946852 - RNA, 19 nt, Artificial Sequence
  Description of Artificial Sequence: Synthetic oligonucleotide
gaagaguuuugcaaauaaa

SEQ ID NO: 1946853 - RNA, 19 nt, Artificial Sequence
  Description of Artificial Sequence: Synthetic oligonucleotide
uagagucuaaauggugugu

SEQ ID NO: 1946854 - RNA, 19 nt, Artificial Sequence
  Description of Artificial Sequence: Synthetic oligonucleotide
uaauauggcugaagaguuu

SEQ ID NO: 1946855 - RNA, 19 nt, Artificial Sequence
  Description of Artificial Sequence: Synthetic oligonucleotide
ucaagaacucccaguugua

SEQ ID NO: 1946856 - RNA, 19 nt, Artificial Sequence
  Description of Artificial Sequence: Synthetic oligonucleotide
ggauaaauguccugacuca

SEQ ID NO: 1946857 - RNA, 19 nt, Artificial Sequence
  Description of Artificial Sequence: Synthetic oligonucleotide
ucacguugcuugagaacca

SEQ ID NO: 1946858 - RNA, 19 nt, Artificial Sequence
  Description of Artificial Sequence: Synthetic oligonucleotide
acuacucuugugauguugu

SEQ ID NO: 1946859 - RNA, 19 nt, Artificial Sequence
  Description of Artificial Sequence: Synthetic oligonucleotide
gcagaaguaauauggcuga

SEQ ID NO: 1946860 - RNA, 19 nt, Artificial Sequence
  Description of Artificial Sequence: Synthetic oligonucleotide
agguggagucacucguuuc

SEQ ID NO: 1946861 - RNA, 19 nt, Artificial Sequence
  Description of Artificial Sequence: Synthetic oligonucleotide
auauguucucucugccaca

SEQ ID NO: 1946862 - RNA, 19 nt, Artificial Sequence
  Description of Artificial Sequence: Synthetic oligonucleotide
agcgauaaccauauuuuaa

SEQ ID NO: 1946863 - RNA, 19 nt, Artificial Sequence
  Description of Artificial Sequence: Synthetic oligonucleotide
ucucggaaaagucgauaua

SEQ ID NO: 1946864 - RNA, 19 nt, Artificial Sequence
  Description of Artificial Sequence: Synthetic oligonucleotide
ugacucagacgguccugcg

SEQ ID NO: 1946865 - RNA, 19 nt, Artificial Sequence
  Description of Artificial Sequence: Synthetic oligonucleotide
agaagacagaugacacaac

SEQ ID NO: 1946866 - RNA, 19 nt, Artificial Sequence
  Description of Artificial Sequence: Synthetic oligonucleotide
acuauucacguugcuugag

SEQ ID NO: 1946867 - RNA, 19 nt, Artificial Sequence
  Description of Artificial Sequence: Synthetic oligonucleotide
ucacucguuucagggagcc

SEQ ID NO: 1946868 - RNA, 19 nt, Artificial Sequence
  Description of Artificial Sequence: Synthetic oligonucleotide
auaggagcgcagcgauaac

SEQ ID NO: 1946869 - RNA, 19 nt, Artificial Sequence
  Description of Artificial Sequence: Synthetic oligonucleotide
gagacggccgaaaggauga

SEQ ID NO: 1946870 - RNA, 19 nt, Artificial Sequence
  Description of Artificial Sequence: Synthetic oligonucleotide
accccgccucuucagauag

SEQ ID NO: 1946871 - RNA, 19 nt, Artificial Sequence
  Description of Artificial Sequence: Synthetic oligonucleotide
uguagauuaagggguucau

SEQ ID NO: 1946872 - RNA, 19 nt, Artificial Sequence
  Description of Artificial Sequence: Synthetic oligonucleotide
uuauaaccccugagacggc

SEQ ID NO: 1946873 - RNA, 19 nt, Artificial Sequence
  Description of Artificial Sequence: Synthetic oligonucleotide
uaguuggucaagacucuuu

SEQ ID NO: 1946874 - RNA, 19 nt, Artificial Sequence
  Description of Artificial Sequence: Synthetic oligonucleotide
auaaauguccugacucaga

SEQ ID NO: 1946875 - RNA, 19 nt, Artificial Sequence
  Description of Artificial Sequence: Synthetic oligonucleotide
uccgaccccagugaggcca

SEQ ID NO: 1946876 - RNA, 19 nt, Artificial Sequence
  Description of Artificial Sequence: Synthetic oligonucleotide
uguccugacucagacgguc

SEQ ID NO: 1946877 - RNA, 19 nt, Artificial Sequence
  Description of Artificial Sequence: Synthetic oligonucleotide
caggccuuuagcacacaug

SEQ ID NO: 1946878 - RNA, 19 nt, Artificial Sequence
  Description of Artificial Sequence: Synthetic oligonucleotide
gagucacucguuucaggga

SEQ ID NO: 1946879 - RNA, 19 nt, Artificial Sequence
  Description of Artificial Sequence: Synthetic oligonucleotide
uaaccccugagacggccga

SEQ ID NO: 1946880 - RNA, 19 nt, Artificial Sequence
  Description of Artificial Sequence: Synthetic oligonucleotide
cuauucacguugcuugaga

SEQ ID NO: 1946881 - RNA, 19 nt, Artificial Sequence
  Description of Artificial Sequence: Synthetic oligonucleotide
acucccaguuguaaacauc

SEQ ID NO: 1946882 - RNA, 19 nt, Artificial Sequence
  Description of Artificial Sequence: Synthetic oligonucleotide
uuucucggaaaagucgaua

SEQ ID NO: 1946883 - RNA, 19 nt, Artificial Sequence
  Description of Artificial Sequence: Synthetic oligonucleotide
uuguugguuuccgacccca

SEQ ID NO: 1946884 - RNA, 19 nt, Artificial Sequence
  Description of Artificial Sequence: Synthetic oligonucleotide
uccacugagcgcuguggac

SEQ ID NO: 1946885 - RNA, 19 nt, Artificial Sequence
  Description of Artificial Sequence: Synthetic oligonucleotide
guuggucaagacucuuuuc

SEQ ID NO: 1946886 - RNA, 19 nt, Artificial Sequence
  Description of Artificial Sequence: Synthetic oligonucleotide
cuuguugguuuccgacccc

SEQ ID NO: 1946887 - RNA, 19 nt, Artificial Sequence
  Description of Artificial Sequence: Synthetic oligonucleotide
guuuccgaccccagugagg

SEQ ID NO: 1946888 - RNA, 19 nt, Artificial Sequence
  Description of Artificial Sequence: Synthetic oligonucleotide
agcgcuguggaccccgccu

SEQ ID NO: 1946889 - RNA, 19 nt, Artificial Sequence
  Description of Artificial Sequence: Synthetic oligonucleotide
agccggaaaagaguccaag

SEQ ID NO: 1946890 - RNA, 19 nt, Artificial Sequence
  Description of Artificial Sequence: Synthetic oligonucleotide
gucguauguugaauccuag

SEQ ID NO: 1946891 - RNA, 19 nt, Artificial Sequence
  Description of Artificial Sequence: Synthetic oligonucleotide
cugcgucaccaucaggcag

SEQ ID NO: 1946892 - RNA, 19 nt, Artificial Sequence
  Description of Artificial Sequence: Synthetic oligonucleotide
auuguuuacuagagugagu

SEQ ID NO: 1946893 - RNA, 19 nt, Artificial Sequence
  Description of Artificial Sequence: Synthetic oligonucleotide
uagcacaauacuggagggu

SEQ ID NO: 1946894 - RNA, 19 nt, Artificial Sequence
  Description of Artificial Sequence: Synthetic oligonucleotide
uguggccuugaagaaccug

SEQ ID NO: 1946895 - RNA, 19 nt, Artificial Sequence
  Description of Artificial Sequence: Synthetic oligonucleotide
cuuaggcuggcugagcaga

SEQ ID NO: 1946896 - RNA, 19 nt, Artificial Sequence
  Description of Artificial Sequence: Synthetic oligonucleotide
caauugaaagugucagcaa

SEQ ID NO: 1946897 - RNA, 19 nt, Artificial Sequence
  Description of Artificial Sequence: Synthetic oligonucleotide
acgguccugcgucaccauc

SEQ ID NO: 1946898 - RNA, 19 nt, Artificial Sequence
  Description of Artificial Sequence: Synthetic oligonucleotide
guaauauggcugaagaguu

SEQ ID NO: 1946899 - RNA, 19 nt, Artificial Sequence
  Description of Artificial Sequence: Synthetic oligonucleotide
ccauagagucuaaauggug

SEQ ID NO: 1946900 - RNA, 19 nt, Artificial Sequence
  Description of Artificial Sequence: Synthetic oligonucleotide
gccggaaaagaguccaagc

SEQ ID NO: 1946901 - RNA, 19 nt, Artificial Sequence
  Description of Artificial Sequence: Synthetic oligonucleotide
uaagggguucauagucaau

SEQ ID NO: 1946902 - RNA, 19 nt, Artificial Sequence
  Description of Artificial Sequence: Synthetic oligonucleotide
cacacgacucagcuuagga

SEQ ID NO: 1946903 - RNA, 19 nt, Artificial Sequence
  Description of Artificial Sequence: Synthetic oligonucleotide
aggaaugucuuguggccuu

SEQ ID NO: 1946904 - RNA, 19 nt, Artificial Sequence
  Description of Artificial Sequence: Synthetic oligonucleotide
agcgcagcgauaaccauau

SEQ ID NO: 1946905 - RNA, 19 nt, Artificial Sequence
  Description of Artificial Sequence: Synthetic oligonucleotide
gguuuccgaccccagugag

SEQ ID NO: 1946906 - RNA, 19 nt, Artificial Sequence
  Description of Artificial Sequence: Synthetic oligonucleotide
caacaacaggugugaccgg

SEQ ID NO: 1946907 - RNA, 19 nt, Artificial Sequence
  Description of Artificial Sequence: Synthetic oligonucleotide
cauagucaauccauagagu

SEQ ID NO: 1946908 - RNA, 19 nt, Artificial Sequence
  Description of Artificial Sequence: Synthetic oligonucleotide
ucguuucagggagccaucu

SEQ ID NO: 1946909 - RNA, 19 nt, Artificial Sequence
  Description of Artificial Sequence: Synthetic oligonucleotide
gagguauuucauauuuccu

SEQ ID NO: 1946910 - RNA, 19 nt, Artificial Sequence
  Description of Artificial Sequence: Synthetic oligonucleotide
cagaugacacaaccacauc

SEQ ID NO: 1946911 - RNA, 19 nt, Artificial Sequence
  Description of Artificial Sequence: Synthetic oligonucleotide
gcagagaggcuuaugcaug

SEQ ID NO: 1946912 - RNA, 19 nt, Artificial Sequence
  Description of Artificial Sequence: Synthetic oligonucleotide
auguugaauccuagaagau

SEQ ID NO: 1946913 - RNA, 19 nt, Artificial Sequence
  Description of Artificial Sequence: Synthetic oligonucleotide
acuuaguggacagcuucaa

SEQ ID NO: 1946914 - RNA, 19 nt, Artificial Sequence
  Description of Artificial Sequence: Synthetic oligonucleotide
gcgauaaccauauuuuaau

SEQ ID NO: 1946915 - RNA, 19 nt, Artificial Sequence
  Description of Artificial Sequence: Synthetic oligonucleotide
ccggaaaagaguccaagca

SEQ ID NO: 1946916 - RNA, 19 nt, Artificial Sequence
  Description of Artificial Sequence: Synthetic oligonucleotide
ugugaccgguggugcacca

SEQ ID NO: 1946917 - RNA, 19 nt, Artificial Sequence
  Description of Artificial Sequence: Synthetic oligonucleotide
agacgguccugcgucacca

SEQ ID NO: 1946918 - RNA, 19 nt, Artificial Sequence
  Description of Artificial Sequence: Synthetic oligonucleotide
gagaaccauggaagugcag

SEQ ID NO: 1946919 - RNA, 19 nt, Artificial Sequence
  Description of Artificial Sequence: Synthetic oligonucleotide
ccaggcgaagcaagaaaag

SEQ ID NO: 1946920 - RNA, 19 nt, Artificial Sequence
  Description of Artificial Sequence: Synthetic oligonucleotide
cugagcgcuguggaccccg

SEQ ID NO: 1946921 - RNA, 19 nt, Artificial Sequence
  Description of Artificial Sequence: Synthetic oligonucleotide
caccacagaagagggucag

SEQ ID NO: 1946922 - RNA, 19 nt, Artificial Sequence
  Description of Artificial Sequence: Synthetic oligonucleotide
guagauuaagggguucaua

SEQ ID NO: 1946923 - RNA, 19 nt, Artificial Sequence
  Description of Artificial Sequence: Synthetic oligonucleotide
acggccgaaaggaugacua

SEQ ID NO: 1946924 - RNA, 19 nt, Artificial Sequence
  Description of Artificial Sequence: Synthetic oligonucleotide
cucagcuuaggacuuaauu

SEQ ID NO: 1946925 - RNA, 19 nt, Artificial Sequence
  Description of Artificial Sequence: Synthetic oligonucleotide
cguauguugaauccuagaa

SEQ ID NO: 1946926 - RNA, 19 nt, Artificial Sequence
  Description of Artificial Sequence: Synthetic oligonucleotide
ggcuuuaguuugcugacua

SEQ ID NO: 1946927 - RNA, 19 nt, Artificial Sequence
  Description of Artificial Sequence: Synthetic oligonucleotide
gggguucauagucaaucca

SEQ ID NO: 1946928 - RNA, 19 nt, Artificial Sequence
  Description of Artificial Sequence: Synthetic oligonucleotide
cuggaaacuccacuccuua

SEQ ID NO: 1946929 - RNA, 19 nt, Artificial Sequence
  Description of Artificial Sequence: Synthetic oligonucleotide
cagcgauaaccauauuuua

SEQ ID NO: 1946930 - RNA, 19 nt, Artificial Sequence
  Description of Artificial Sequence: Synthetic oligonucleotide
ccugagacggccgaaagga

SEQ ID NO: 1946931 - RNA, 19 nt, Artificial Sequence
  Description of Artificial Sequence: Synthetic oligonucleotide
ggcgaagcaagaaaagcaa

SEQ ID NO: 1946932 - RNA, 19 nt, Artificial Sequence
  Description of Artificial Sequence: Synthetic oligonucleotide
cucuucagauaggagcgca

SEQ ID NO: 1946933 - RNA, 19 nt, Artificial Sequence
  Description of Artificial Sequence: Synthetic oligonucleotide
agagaggcuuaugcaugug

SEQ ID NO: 1946934 - RNA, 19 nt, Artificial Sequence
  Description of Artificial Sequence: Synthetic oligonucleotide
gaccgguggugcaccacag

SEQ ID NO: 1946935 - RNA, 19 nt, Artificial Sequence
  Description of Artificial Sequence: Synthetic oligonucleotide
caagaacucccaguuguaa

SEQ ID NO: 1946936 - RNA, 19 nt, Artificial Sequence
  Description of Artificial Sequence: Synthetic oligonucleotide
gacucagacgguccugcgu

SEQ ID NO: 1946937 - RNA, 19 nt, Artificial Sequence
  Description of Artificial Sequence: Synthetic oligonucleotide
ggacuuuaguuggucaaga

SEQ ID NO: 1946938 - RNA, 19 nt, Artificial Sequence
  Description of Artificial Sequence: Synthetic oligonucleotide
guccugacucagacggucc

SEQ ID NO: 1946939 - RNA, 19 nt, Artificial Sequence
  Description of Artificial Sequence: Synthetic oligonucleotide
ugugccccucuggaaacuc

SEQ ID NO: 1946940 - RNA, 19 nt, Artificial Sequence
  Description of Artificial Sequence: Synthetic oligonucleotide
gucacucguuucagggagc

SEQ ID NO: 1946941 - RNA, 19 nt, Artificial Sequence
  Description of Artificial Sequence: Synthetic oligonucleotide
cuuuccuggcagaaguaau

SEQ ID NO: 1946942 - RNA, 19 nt, Artificial Sequence
  Description of Artificial Sequence: Synthetic oligonucleotide
gccgaaaggaugacuacuc

SEQ ID NO: 1946943 - RNA, 19 nt, Artificial Sequence
  Description of Artificial Sequence: Synthetic oligonucleotide
acaacuuaguggacagcuu

SEQ ID NO: 1946944 - RNA, 19 nt, Artificial Sequence
  Description of Artificial Sequence: Synthetic oligonucleotide
agacggccgaaaggaugac

SEQ ID NO: 1946945 - RNA, 19 nt, Artificial Sequence
  Description of Artificial Sequence: Synthetic oligonucleotide
gacucagcuuaggacuuaa

SEQ ID NO: 1946946 - RNA, 19 nt, Artificial Sequence
  Description of Artificial Sequence: Synthetic oligonucleotide
cccugagacggccgaaagg

SEQ ID NO: 1946947 - RNA, 19 nt, Artificial Sequence
  Description of Artificial Sequence: Synthetic oligonucleotide
accgguggugcaccacaga

SEQ ID NO: 1946948 - RNA, 19 nt, Artificial Sequence
  Description of Artificial Sequence: Synthetic oligonucleotide
gcuugagaaccauggaagu

SEQ ID NO: 1946949 - RNA, 19 nt, Artificial Sequence
  Description of Artificial Sequence: Synthetic oligonucleotide
gcagcgauaaccauauuuu

SEQ ID NO: 1946950 - RNA, 19 nt, Artificial Sequence
  Description of Artificial Sequence: Synthetic oligonucleotide
gguucauagucaauccaua

SEQ ID NO: 1946951 - RNA, 19 nt, Artificial Sequence
  Description of Artificial Sequence: Synthetic oligonucleotide
acguugcuugagaaccaug

SEQ ID NO: 1946952 - RNA, 19 nt, Artificial Sequence
  Description of Artificial Sequence: Synthetic oligonucleotide
gugugaccgguggugcacc

SEQ ID NO: 1946953 - RNA, 19 nt, Artificial Sequence
  Description of Artificial Sequence: Synthetic oligonucleotide
cuuuguccucagugggcga

SEQ ID NO: 1946954 - RNA, 19 nt, Artificial Sequence
  Description of Artificial Sequence: Synthetic oligonucleotide
cagauaggagcgcagcgau

SEQ ID NO: 1946955 - RNA, 19 nt, Artificial Sequence
  Description of Artificial Sequence: Synthetic oligonucleotide
gagcgcuguggaccccgcc

SEQ ID NO: 1946956 - RNA, 19 nt, Artificial Sequence
  Description of Artificial Sequence: Synthetic oligonucleotide
cuguggaccccgccucuuc

SEQ ID NO: 1946957 - RNA, 19 nt, Artificial Sequence
  Description of Artificial Sequence: Synthetic oligonucleotide
agcacacgacucagcuuag

SEQ ID NO: 1946958 - RNA, 19 nt, Artificial Sequence
  Description of Artificial Sequence: Synthetic oligonucleotide
cucagacgguccugcguca

SEQ ID NO: 1946959 - RNA, 19 nt, Artificial Sequence
  Description of Artificial Sequence: Synthetic oligonucleotide
gccaggcgaagcaagaaaa

SEQ ID NO: 1946960 - RNA, 19 nt, Artificial Sequence
  Description of Artificial Sequence: Synthetic oligonucleotide
ggugugaccgguggugcac

SEQ ID NO: 1946961 - RNA, 19 nt, Artificial Sequence
  Description of Artificial Sequence: Synthetic oligonucleotide
cuuaguggacagcuucaau

SEQ ID NO: 1946962 - RNA, 19 nt, Artificial Sequence
  Description of Artificial Sequence: Synthetic oligonucleotide
gcuccuuuaacaacuuagu

SEQ ID NO: 1946963 - RNA, 19 nt, Artificial Sequence
  Description of Artificial Sequence: Synthetic oligonucleotide
cugacuauucacguugcuu

SEQ ID NO: 1946964 - RNA, 19 nt, Artificial Sequence
  Description of Artificial Sequence: Synthetic oligonucleotide
gaccccgccucuucagaua

SEQ ID NO: 1946965 - RNA, 19 nt, Artificial Sequence
  Description of Artificial Sequence: Synthetic oligonucleotide
ggccaggcgaagcaagaaa

SEQ ID NO: 1946966 - RNA, 19 nt, Artificial Sequence
  Description of Artificial Sequence: Synthetic oligonucleotide
ggguucauagucaauccau

SEQ ID NO: 1946967 - RNA, 19 nt, Artificial Sequence
  Description of Artificial Sequence: Synthetic oligonucleotide
ggacuuaauuuuccacagu

SEQ ID NO: 1946968 - RNA, 19 nt, Artificial Sequence
  Description of Artificial Sequence: Synthetic oligonucleotide
aaccccugagacggccgaa

SEQ ID NO: 1946969 - RNA, 19 nt, Artificial Sequence
  Description of Artificial Sequence: Synthetic oligonucleotide
ccacuccuuaggcuggcug

SEQ ID NO: 1946970 - RNA, 19 nt, Artificial Sequence
  Description of Artificial Sequence: Synthetic oligonucleotide
cuagagugaguuguucuuu

SEQ ID NO: 1946971 - RNA, 19 nt, Artificial Sequence
  Description of Artificial Sequence: Synthetic oligonucleotide
gcacacgacucagcuuagg

SEQ ID NO: 1946972 - RNA, 19 nt, Artificial Sequence
  Description of Artificial Sequence: Synthetic oligonucleotide
auggaagugcaggccuuua

SEQ ID NO: 1946973 - RNA, 19 nt, Artificial Sequence
  Description of Artificial Sequence: Synthetic oligonucleotide
caggaaugucuuguggccu

SEQ ID NO: 1946974 - RNA, 19 nt, Artificial Sequence
  Description of Artificial Sequence: Synthetic oligonucleotide
auguccugacucagacggu

SEQ ID NO: 1946975 - RNA, 19 nt, Artificial Sequence
  Description of Artificial Sequence: Synthetic oligonucleotide
cagucguauguugaauccu

SEQ ID NO: 1946976 - RNA, 19 nt, Artificial Sequence
  Description of Artificial Sequence: Synthetic oligonucleotide
cagaaguaauauggcugaa

SEQ ID NO: 1946977 - RNA, 19 nt, Artificial Sequence
  Description of Artificial Sequence: Synthetic oligonucleotide
agauaggagcgcagcgaua

SEQ ID NO: 1946978 - RNA, 19 nt, Artificial Sequence
  Description of Artificial Sequence: Synthetic oligonucleotide
gacggccgaaaggaugacu

SEQ ID NO: 1946979 - RNA, 19 nt, Artificial Sequence
  Description of Artificial Sequence: Synthetic oligonucleotide
ugcaggccuuuagcacaca

SEQ ID NO: 1946980 - RNA, 19 nt, Artificial Sequence
  Description of Artificial Sequence: Synthetic oligonucleotide
ggccgaaaggaugacuacu

SEQ ID NO: 1946981 - RNA, 19 nt, Artificial Sequence
  Description of Artificial Sequence: Synthetic oligonucleotide
gugaccgguggugcaccac

SEQ ID NO: 1946982 - RNA, 19 nt, Artificial Sequence
  Description of Artificial Sequence: Synthetic oligonucleotide
gcuuuaguuugcugacuau

SEQ ID NO: 1946983 - RNA, 19 nt, Artificial Sequence
  Description of Artificial Sequence: Synthetic oligonucleotide
gcaugugagcuggcaggug

SEQ ID NO: 1946984 - RNA, 19 nt, Artificial Sequence
  Description of Artificial Sequence: Synthetic oligonucleotide
cugagacggccgaaaggau

SEQ ID NO: 1946985 - RNA, 19 nt, Artificial Sequence
  Description of Artificial Sequence: Synthetic oligonucleotide
gcgcuguggaccccgccuc

SEQ ID NO: 1946986 - RNA, 19 nt, Artificial Sequence
  Description of Artificial Sequence: Synthetic oligonucleotide
gcugacuauucacguugcu

SEQ ID NO: 1946987 - RNA, 19 nt, Artificial Sequence
  Description of Artificial Sequence: Synthetic oligonucleotide
cgcagcgauaaccauauuu

SEQ ID NO: 1946988 - RNA, 19 nt, Artificial Sequence
  Description of Artificial Sequence: Synthetic oligonucleotide
cggccgaaaggaugacuac

SEQ ID NO: 1946989 - RNA, 19 nt, Artificial Sequence
  Description of Artificial Sequence: Synthetic oligonucleotide
ccgaccccagugaggccag

SEQ ID NO: 1946990 - RNA, 19 nt, Artificial Sequence
  Description of Artificial Sequence: Synthetic oligonucleotide
ccgaaaggaugacuacucu

SEQ ID NO: 1946991 - RNA, 19 nt, Artificial Sequence
  Description of Artificial Sequence: Synthetic oligonucleotide
cacguugcuugagaaccau

SEQ ID NO: 1946992 - RNA, 19 nt, Artificial Sequence
  Description of Artificial Sequence: Synthetic oligonucleotide
gcaggccuuuagcacacau

SEQ ID NO: 1946993 - RNA, 19 nt, Artificial Sequence
  Description of Artificial Sequence: Synthetic oligonucleotide
cauggaagugcaggccuuu

SEQ ID NO: 1946994 - RNA, 19 nt, Artificial Sequence
  Description of Artificial Sequence: Synthetic oligonucleotide
ccccgccucuucagauagg

SEQ ID NO: 1946995 - RNA, 19 nt, Artificial Sequence
  Description of Artificial Sequence: Synthetic oligonucleotide
gugcaccacagaagagggu

SEQ ID NO: 1946996 - RNA, 19 nt, Artificial Sequence
  Description of Artificial Sequence: Synthetic oligonucleotide
gugugccccucuggaaacu

SEQ ID NO: 1946997 - RNA, 19 nt, Artificial Sequence
  Description of Artificial Sequence: Synthetic oligonucleotide
gcagguggagucacucguu

SEQ ID NO: 1946998 - RNA, 19 nt, Artificial Sequence
  Description of Artificial Sequence: Synthetic oligonucleotide
gcugagcagagaggcuuau

SEQ ID NO: 1946999 - RNA, 19 nt, Artificial Sequence
  Description of Artificial Sequence: Synthetic oligonucleotide
gcuguggaccccgccucuu

SEQ ID NO: 1947000 - RNA, 19 nt, Artificial Sequence
  Description of Artificial Sequence: Synthetic oligonucleotide
cguuucagggagccaucuu

SEQ ID NO: 1947001 - RNA, 19 nt, Artificial Sequence
  Description of Artificial Sequence: Synthetic oligonucleotide
gcgcagcgauaaccauauu

SEQ ID NO: 1947002 - RNA, 19 nt, Artificial Sequence
  Description of Artificial Sequence: Synthetic oligonucleotide
aagccuaucaccucuaggg

SEQ ID NO: 1947003 - RNA, 19 nt, Artificial Sequence
  Description of Artificial Sequence: Synthetic oligonucleotide
aagauagucaggcagaaga

SEQ ID NO: 1947004 - RNA, 19 nt, Artificial Sequence
  Description of Artificial Sequence: Synthetic oligonucleotide
aaaguuggcgaccaggcag

SEQ ID NO: 1947005 - RNA, 19 nt, Artificial Sequence
  Description of Artificial Sequence: Synthetic oligonucleotide
aagaaaugaaaacuuggug

SEQ ID NO: 1947006 - RNA, 19 nt, Artificial Sequence
  Description of Artificial Sequence: Synthetic oligonucleotide
aggaccaugaugcagggac

SEQ ID NO: 1947007 - RNA, 19 nt, Artificial Sequence
  Description of Artificial Sequence: Synthetic oligonucleotide
gaagucagcaacgagagcc

SEQ ID NO: 1947008 - RNA, 19 nt, Artificial Sequence
  Description of Artificial Sequence: Synthetic oligonucleotide
ugcagggacauuuaaaugu

SEQ ID NO: 1947009 - RNA, 19 nt, Artificial Sequence
  Description of Artificial Sequence: Synthetic oligonucleotide
gauacagaaguaugucucg

SEQ ID NO: 1947010 - RNA, 19 nt, Artificial Sequence
  Description of Artificial Sequence: Synthetic oligonucleotide
gacauuuaaauguccuggg

SEQ ID NO: 1947011 - RNA, 19 nt, Artificial Sequence
  Description of Artificial Sequence: Synthetic oligonucleotide
aaguaugucucguggggcg

SEQ ID NO: 1947012 - RNA, 19 nt, Artificial Sequence
  Description of Artificial Sequence: Synthetic oligonucleotide
aaaacuugguggcucaagu

SEQ ID NO: 1947013 - RNA, 19 nt, Artificial Sequence
  Description of Artificial Sequence: Synthetic oligonucleotide
agugucaccagacaguugu

SEQ ID NO: 1947014 - RNA, 19 nt, Artificial Sequence
  Description of Artificial Sequence: Synthetic oligonucleotide
acagaaguaugucucgugg

SEQ ID NO: 1947015 - RNA, 19 nt, Artificial Sequence
  Description of Artificial Sequence: Synthetic oligonucleotide
aaugaagucaugccucgug

SEQ ID NO: 1947016 - RNA, 19 nt, Artificial Sequence
  Description of Artificial Sequence: Synthetic oligonucleotide
ugauacagaaguaugucuc

SEQ ID NO: 1947017 - RNA, 19 nt, Artificial Sequence
  Description of Artificial Sequence: Synthetic oligonucleotide
gaacuuguaggccauauuc

SEQ ID NO: 1947018 - RNA, 19 nt, Artificial Sequence
  Description of Artificial Sequence: Synthetic oligonucleotide
aagucaugccucgugaugg

SEQ ID NO: 1947019 - RNA, 19 nt, Artificial Sequence
  Description of Artificial Sequence: Synthetic oligonucleotide
uuguaggccauauucagca

SEQ ID NO: 1947020 - RNA, 19 nt, Artificial Sequence
  Description of Artificial Sequence: Synthetic oligonucleotide
ucucaaugaagucaugccu

SEQ ID NO: 1947021 - RNA, 19 nt, Artificial Sequence
  Description of Artificial Sequence: Synthetic oligonucleotide
agacgaagcauucccaggg

SEQ ID NO: 1947022 - RNA, 19 nt, Artificial Sequence
  Description of Artificial Sequence: Synthetic oligonucleotide
uaggccauauucagcagcg

SEQ ID NO: 1947023 - RNA, 19 nt, Artificial Sequence
  Description of Artificial Sequence: Synthetic oligonucleotide
acauuuaaauguccugggg

SEQ ID NO: 1947024 - RNA, 19 nt, Artificial Sequence
  Description of Artificial Sequence: Synthetic oligonucleotide
aagacgaagcauucccagg

SEQ ID NO: 1947025 - RNA, 19 nt, Artificial Sequence
  Description of Artificial Sequence: Synthetic oligonucleotide
uguaucggcaccccaaugu

SEQ ID NO: 1947026 - RNA, 19 nt, Artificial Sequence
  Description of Artificial Sequence: Synthetic oligonucleotide
aacaacacccaggaugacg

SEQ ID NO: 1947027 - RNA, 19 nt, Artificial Sequence
  Description of Artificial Sequence: Synthetic oligonucleotide
aacuugguggcucaaguau

SEQ ID NO: 1947028 - RNA, 19 nt, Artificial Sequence
  Description of Artificial Sequence: Synthetic oligonucleotide
cacgugguggauucgaugg

SEQ ID NO: 1947029 - RNA, 19 nt, Artificial Sequence
  Description of Artificial Sequence: Synthetic oligonucleotide
uuggcgaccaggcagcugc

SEQ ID NO: 1947030 - RNA, 19 nt, Artificial Sequence
  Description of Artificial Sequence: Synthetic oligonucleotide
gaagacgaagcauucccag

SEQ ID NO: 1947031 - RNA, 19 nt, Artificial Sequence
  Description of Artificial Sequence: Synthetic oligonucleotide
aaauaugugugugaccacu

SEQ ID NO: 1947032 - RNA, 19 nt, Artificial Sequence
  Description of Artificial Sequence: Synthetic oligonucleotide
uguagggucgauguggugc

SEQ ID NO: 1947033 - RNA, 19 nt, Artificial Sequence
  Description of Artificial Sequence: Synthetic oligonucleotide
ugggcagauccacagagcc

SEQ ID NO: 1947034 - RNA, 19 nt, Artificial Sequence
  Description of Artificial Sequence: Synthetic oligonucleotide
gaccaagugagucagcgac

SEQ ID NO: 1947035 - RNA, 19 nt, Artificial Sequence
  Description of Artificial Sequence: Synthetic oligonucleotide
acuucaugucaucugcccg

SEQ ID NO: 1947036 - RNA, 19 nt, Artificial Sequence
  Description of Artificial Sequence: Synthetic oligonucleotide
uggguucggaacuuguagg

SEQ ID NO: 1947037 - RNA, 19 nt, Artificial Sequence
  Description of Artificial Sequence: Synthetic oligonucleotide
gaaggugccaaagauaguc

SEQ ID NO: 1947038 - RNA, 19 nt, Artificial Sequence
  Description of Artificial Sequence: Synthetic oligonucleotide
ugcaaacgcuacuugaucu

SEQ ID NO: 1947039 - RNA, 19 nt, Artificial Sequence
  Description of Artificial Sequence: Synthetic oligonucleotide
acgccagaagccuaucacc

SEQ ID NO: 1947040 - RNA, 19 nt, Artificial Sequence
  Description of Artificial Sequence: Synthetic oligonucleotide
uucgaugguguuuccgugg

SEQ ID NO: 1947041 - RNA, 19 nt, Artificial Sequence
  Description of Artificial Sequence: Synthetic oligonucleotide
agaggccagaauuuggcag

SEQ ID NO: 1947042 - RNA, 19 nt, Artificial Sequence
  Description of Artificial Sequence: Synthetic oligonucleotide
uacuugaucuucugggccc

SEQ ID NO: 1947043 - RNA, 19 nt, Artificial Sequence
  Description of Artificial Sequence: Synthetic oligonucleotide
gccagaauuuggcagaugg

SEQ ID NO: 1947044 - RNA, 19 nt, Artificial Sequence
  Description of Artificial Sequence: Synthetic oligonucleotide
ggacauuuaaauguccugg

SEQ ID NO: 1947045 - RNA, 19 nt, Artificial Sequence
  Description of Artificial Sequence: Synthetic oligonucleotide
gaagccuaucaccucuagg

SEQ ID NO: 1947046 - RNA, 19 nt, Artificial Sequence
  Description of Artificial Sequence: Synthetic oligonucleotide
cuucucacccgucaggccc

SEQ ID NO: 1947047 - RNA, 19 nt, Artificial Sequence
  Description of Artificial Sequence: Synthetic oligonucleotide
aacgagagccccugcaaca

SEQ ID NO: 1947048 - RNA, 19 nt, Artificial Sequence
  Description of Artificial Sequence: Synthetic oligonucleotide
ugugugaccacuuguggau

SEQ ID NO: 1947049 - RNA, 19 nt, Artificial Sequence
  Description of Artificial Sequence: Synthetic oligonucleotide
ucccggaauggccugauga

SEQ ID NO: 1947050 - RNA, 19 nt, Artificial Sequence
  Description of Artificial Sequence: Synthetic oligonucleotide
aacacccaggaugacgagg

SEQ ID NO: 1947051 - RNA, 19 nt, Artificial Sequence
  Description of Artificial Sequence: Synthetic oligonucleotide
aacgcuacuugaucuucug

SEQ ID NO: 1947052 - RNA, 19 nt, Artificial Sequence
  Description of Artificial Sequence: Synthetic oligonucleotide
uccaagcgacgccagaagc

SEQ ID NO: 1947053 - RNA, 19 nt, Artificial Sequence
  Description of Artificial Sequence: Synthetic oligonucleotide
cacuuguggaucugguugg

SEQ ID NO: 1947054 - RNA, 19 nt, Artificial Sequence
  Description of Artificial Sequence: Synthetic oligonucleotide
gccaaagauagucaggcag

SEQ ID NO: 1947055 - RNA, 19 nt, Artificial Sequence
  Description of Artificial Sequence: Synthetic oligonucleotide
gaugcagggacauuuaaau

SEQ ID NO: 1947056 - RNA, 19 nt, Artificial Sequence
  Description of Artificial Sequence: Synthetic oligonucleotide
uguggugauacagaaguau

SEQ ID NO: 1947057 - RNA, 19 nt, Artificial Sequence
  Description of Artificial Sequence: Synthetic oligonucleotide
agacaguugucaccauugg

SEQ ID NO: 1947058 - RNA, 19 nt, Artificial Sequence
  Description of Artificial Sequence: Synthetic oligonucleotide
uacagaaguaugucucgug

SEQ ID NO: 1947059 - RNA, 19 nt, Artificial Sequence
  Description of Artificial Sequence: Synthetic oligonucleotide
agauagucaggcagaagac

SEQ ID NO: 1947060 - RNA, 19 nt, Artificial Sequence
  Description of Artificial Sequence: Synthetic oligonucleotide
uggguggcagccagggucg

SEQ ID NO: 1947061 - RNA, 19 nt, Artificial Sequence
  Description of Artificial Sequence: Synthetic oligonucleotide
gacagaccaagugagucag

SEQ ID NO: 1947062 - RNA, 19 nt, Artificial Sequence
  Description of Artificial Sequence: Synthetic oligonucleotide
aagaggccagaauuuggca

SEQ ID NO: 1947063 - RNA, 19 nt, Artificial Sequence
  Description of Artificial Sequence: Synthetic oligonucleotide
agccuaucaccucuagggg

SEQ ID NO: 1947064 - RNA, 19 nt, Artificial Sequence
  Description of Artificial Sequence: Synthetic oligonucleotide
ugaugcagggacauuuaaa

SEQ ID NO: 1947065 - RNA, 19 nt, Artificial Sequence
  Description of Artificial Sequence: Synthetic oligonucleotide
aucggcaccccaauguacc

SEQ ID NO: 1947066 - RNA, 19 nt, Artificial Sequence
  Description of Artificial Sequence: Synthetic oligonucleotide
gugccaaagauagucaggc

SEQ ID NO: 1947067 - RNA, 19 nt, Artificial Sequence
  Description of Artificial Sequence: Synthetic oligonucleotide
augagguccuccaagcgac

SEQ ID NO: 1947068 - RNA, 19 nt, Artificial Sequence
  Description of Artificial Sequence: Synthetic oligonucleotide
aggaagucagcaacgagag

SEQ ID NO: 1947069 - RNA, 19 nt, Artificial Sequence
  Description of Artificial Sequence: Synthetic oligonucleotide
ucaccagacaguugucacc

SEQ ID NO: 1947070 - RNA, 19 nt, Artificial Sequence
  Description of Artificial Sequence: Synthetic oligonucleotide
cuggguucggaacuuguag

SEQ ID NO: 1947071 - RNA, 19 nt, Artificial Sequence
  Description of Artificial Sequence: Synthetic oligonucleotide
uucaguucaggcuggggaa

SEQ ID NO: 1947072 - RNA, 19 nt, Artificial Sequence
  Description of Artificial Sequence: Synthetic oligonucleotide
cagaccaagugagucagcg

SEQ ID NO: 1947073 - RNA, 19 nt, Artificial Sequence
  Description of Artificial Sequence: Synthetic oligonucleotide
guaggccauauucagcagc

SEQ ID NO: 1947074 - RNA, 19 nt, Artificial Sequence
  Description of Artificial Sequence: Synthetic oligonucleotide
aggaucacgugccaguccu

SEQ ID NO: 1947075 - RNA, 19 nt, Artificial Sequence
  Description of Artificial Sequence: Synthetic oligonucleotide
agucaugccucgugauggc

SEQ ID NO: 1947076 - RNA, 19 nt, Artificial Sequence
  Description of Artificial Sequence: Synthetic oligonucleotide
agccccauguaucggcacc

SEQ ID NO: 1947077 - RNA, 19 nt, Artificial Sequence
  Description of Artificial Sequence: Synthetic oligonucleotide
gacgaagcauucccagggg

SEQ ID NO: 1947078 - RNA, 19 nt, Artificial Sequence
  Description of Artificial Sequence: Synthetic oligonucleotide
ucaaguauucugugucacu

SEQ ID NO: 1947079 - RNA, 19 nt, Artificial Sequence
  Description of Artificial Sequence: Synthetic oligonucleotide
aaacuugguggcucaagua

SEQ ID NO: 1947080 - RNA, 19 nt, Artificial Sequence
  Description of Artificial Sequence: Synthetic oligonucleotide
augaagucaugccucguga

SEQ ID NO: 1947081 - RNA, 19 nt, Artificial Sequence
  Description of Artificial Sequence: Synthetic oligonucleotide
gucgauguggugcucccgg

SEQ ID NO: 1947082 - RNA, 19 nt, Artificial Sequence
  Description of Artificial Sequence: Synthetic oligonucleotide
ucaugccucgugauggcug

SEQ ID NO: 1947083 - RNA, 19 nt, Artificial Sequence
  Description of Artificial Sequence: Synthetic oligonucleotide
gaagaaaugaaaacuuggu

SEQ ID NO: 1947084 - RNA, 19 nt, Artificial Sequence
  Description of Artificial Sequence: Synthetic oligonucleotide
auagucaggcagaagacga

SEQ ID NO: 1947085 - RNA, 19 nt, Artificial Sequence
  Description of Artificial Sequence: Synthetic oligonucleotide
auaugugugugaccacuug

SEQ ID NO: 1947086 - RNA, 19 nt, Artificial Sequence
  Description of Artificial Sequence: Synthetic oligonucleotide
ccuuggagcagcucaaugg

SEQ ID NO: 1947087 - RNA, 19 nt, Artificial Sequence
  Description of Artificial Sequence: Synthetic oligonucleotide
uaguugagccagccugugg

SEQ ID NO: 1947088 - RNA, 19 nt, Artificial Sequence
  Description of Artificial Sequence: Synthetic oligonucleotide
uuggagcagcucaauggcc

SEQ ID NO: 1947089 - RNA, 19 nt, Artificial Sequence
  Description of Artificial Sequence: Synthetic oligonucleotide
gaugacgaggggugugugc

SEQ ID NO: 1947090 - RNA, 19 nt, Artificial Sequence
  Description of Artificial Sequence: Synthetic oligonucleotide
gacccaguagggcagcccc

SEQ ID NO: 1947091 - RNA, 19 nt, Artificial Sequence
  Description of Artificial Sequence: Synthetic oligonucleotide
ugcccgaggcuucucaccc

SEQ ID NO: 1947092 - RNA, 19 nt, Artificial Sequence
  Description of Artificial Sequence: Synthetic oligonucleotide
acacccaggaugacgaggg

SEQ ID NO: 1947093 - RNA, 19 nt, Artificial Sequence
  Description of Artificial Sequence: Synthetic oligonucleotide
auucgaugguguuuccgug

SEQ ID NO: 1947094 - RNA, 19 nt, Artificial Sequence
  Description of Artificial Sequence: Synthetic oligonucleotide
augaaaacuugguggcuca

SEQ ID NO: 1947095 - RNA, 19 nt, Artificial Sequence
  Description of Artificial Sequence: Synthetic oligonucleotide
aguaugucucguggggcgc

SEQ ID NO: 1947096 - RNA, 19 nt, Artificial Sequence
  Description of Artificial Sequence: Synthetic oligonucleotide
ggguaguugagccagccug

SEQ ID NO: 1947097 - RNA, 19 nt, Artificial Sequence
  Description of Artificial Sequence: Synthetic oligonucleotide
aggggugugugcucccagc

SEQ ID NO: 1947098 - RNA, 19 nt, Artificial Sequence
  Description of Artificial Sequence: Synthetic oligonucleotide
uuggcagauggcuucaguu

SEQ ID NO: 1947099 - RNA, 19 nt, Artificial Sequence
  Description of Artificial Sequence: Synthetic oligonucleotide
ggugugugcucccagcggg

SEQ ID NO: 1947100 - RNA, 19 nt, Artificial Sequence
  Description of Artificial Sequence: Synthetic oligonucleotide
cucccagcgggcuagcagc

SEQ ID NO: 1947101 - RNA, 19 nt, Artificial Sequence
  Description of Artificial Sequence: Synthetic oligonucleotide
agguccuccaagcgacgcc

SEQ ID NO: 1947102 - RNA, 19 nt, Artificial Sequence
  Description of Artificial Sequence: Synthetic oligonucleotide
gaagcauucccagggguac

SEQ ID NO: 1947103 - RNA, 19 nt, Artificial Sequence
  Description of Artificial Sequence: Synthetic oligonucleotide
gauucgaugguguuuccgu

SEQ ID NO: 1947104 - RNA, 19 nt, Artificial Sequence
  Description of Artificial Sequence: Synthetic oligonucleotide
gaucaccggggacagacca

SEQ ID NO: 1947105 - RNA, 19 nt, Artificial Sequence
  Description of Artificial Sequence: Synthetic oligonucleotide
gaggccagaauuuggcaga

SEQ ID NO: 1947106 - RNA, 19 nt, Artificial Sequence
  Description of Artificial Sequence: Synthetic oligonucleotide
acgcuacuugaucuucugg

SEQ ID NO: 1947107 - RNA, 19 nt, Artificial Sequence
  Description of Artificial Sequence: Synthetic oligonucleotide
uaucggcaccccaauguac

SEQ ID NO: 1947108 - RNA, 19 nt, Artificial Sequence
  Description of Artificial Sequence: Synthetic oligonucleotide
ucgaugguguuuccguggu

SEQ ID NO: 1947109 - RNA, 19 nt, Artificial Sequence
  Description of Artificial Sequence: Synthetic oligonucleotide
augguguuuccgugguagg

SEQ ID NO: 1947110 - RNA, 19 nt, Artificial Sequence
  Description of Artificial Sequence: Synthetic oligonucleotide
agacaggaagucagcaacg

SEQ ID NO: 1947111 - RNA, 19 nt, Artificial Sequence
  Description of Artificial Sequence: Synthetic oligonucleotide
cugagggaggaccaugaug

SEQ ID NO: 1947112 - RNA, 19 nt, Artificial Sequence
  Description of Artificial Sequence: Synthetic oligonucleotide
ugaugaaggccuuccccac

SEQ ID NO: 1947113 - RNA, 19 nt, Artificial Sequence
  Description of Artificial Sequence: Synthetic oligonucleotide
ggacucuucacuggaaggg

SEQ ID NO: 1947114 - RNA, 19 nt, Artificial Sequence
  Description of Artificial Sequence: Synthetic oligonucleotide
ugaccauugcccagcucug

SEQ ID NO: 1947115 - RNA, 19 nt, Artificial Sequence
  Description of Artificial Sequence: Synthetic oligonucleotide
ucagcaacgagagccccug

SEQ ID NO: 1947116 - RNA, 19 nt, Artificial Sequence
  Description of Artificial Sequence: Synthetic oligonucleotide
uccccuucugcagucaggc

SEQ ID NO: 1947117 - RNA, 19 nt, Artificial Sequence
  Description of Artificial Sequence: Synthetic oligonucleotide
uuuccgugguaggaucacg

SEQ ID NO: 1947118 - RNA, 19 nt, Artificial Sequence
  Description of Artificial Sequence: Synthetic oligonucleotide
ccaaauaugugugugacca

SEQ ID NO: 1947119 - RNA, 19 nt, Artificial Sequence
  Description of Artificial Sequence: Synthetic oligonucleotide
gaccaggcagcugcaaacg

SEQ ID NO: 1947120 - RNA, 19 nt, Artificial Sequence
  Description of Artificial Sequence: Synthetic oligonucleotide
cagggacauuuaaaugucc

SEQ ID NO: 1947121 - RNA, 19 nt, Artificial Sequence
  Description of Artificial Sequence: Synthetic oligonucleotide
gacucuucacuggaagggc

SEQ ID NO: 1947122 - RNA, 19 nt, Artificial Sequence
  Description of Artificial Sequence: Synthetic oligonucleotide
agaagccuaucaccucuag

SEQ ID NO: 1947123 - RNA, 19 nt, Artificial Sequence
  Description of Artificial Sequence: Synthetic oligonucleotide
ugaccacuuguggaucugg

SEQ ID NO: 1947124 - RNA, 19 nt, Artificial Sequence
  Description of Artificial Sequence: Synthetic oligonucleotide
gucaccagacaguugucac

SEQ ID NO: 1947125 - RNA, 19 nt, Artificial Sequence
  Description of Artificial Sequence: Synthetic oligonucleotide
gcuacuugaucuucugggc

SEQ ID NO: 1947126 - RNA, 19 nt, Artificial Sequence
  Description of Artificial Sequence: Synthetic oligonucleotide
gaaaguuggcgaccaggca

SEQ ID NO: 1947127 - RNA, 19 nt, Artificial Sequence
  Description of Artificial Sequence: Synthetic oligonucleotide
ugagguccuccaagcgacg

SEQ ID NO: 1947128 - RNA, 19 nt, Artificial Sequence
  Description of Artificial Sequence: Synthetic oligonucleotide
uggugcucccggaauggcc

SEQ ID NO: 1947129 - RNA, 19 nt, Artificial Sequence
  Description of Artificial Sequence: Synthetic oligonucleotide
agcggcagaagugucacca

SEQ ID NO: 1947130 - RNA, 19 nt, Artificial Sequence
  Description of Artificial Sequence: Synthetic oligonucleotide
gaucacgugccaguccugc

SEQ ID NO: 1947131 - RNA, 19 nt, Artificial Sequence
  Description of Artificial Sequence: Synthetic oligonucleotide
agucagcaacgagagcccc

SEQ ID NO: 1947132 - RNA, 19 nt, Artificial Sequence
  Description of Artificial Sequence: Synthetic oligonucleotide
ugugcucccagcgggcuag

SEQ ID NO: 1947133 - RNA, 19 nt, Artificial Sequence
  Description of Artificial Sequence: Synthetic oligonucleotide
cagagccccauguaucggc

SEQ ID NO: 1947134 - RNA, 19 nt, Artificial Sequence
  Description of Artificial Sequence: Synthetic oligonucleotide
guggauucgaugguguuuc

SEQ ID NO: 1947135 - RNA, 19 nt, Artificial Sequence
  Description of Artificial Sequence: Synthetic oligonucleotide
accggggacagaccaagug

SEQ ID NO: 1947136 - RNA, 19 nt, Artificial Sequence
  Description of Artificial Sequence: Synthetic oligonucleotide
aaggugccaaagauaguca

SEQ ID NO: 1947137 - RNA, 19 nt, Artificial Sequence
  Description of Artificial Sequence: Synthetic oligonucleotide
auguggugcucccggaaug

SEQ ID NO: 1947138 - RNA, 19 nt, Artificial Sequence
  Description of Artificial Sequence: Synthetic oligonucleotide
ucgugauggcuguaggguc

SEQ ID NO: 1947139 - RNA, 19 nt, Artificial Sequence
  Description of Artificial Sequence: Synthetic oligonucleotide
agcaacgagagccccugca

SEQ ID NO: 1947140 - RNA, 19 nt, Artificial Sequence
  Description of Artificial Sequence: Synthetic oligonucleotide
cugaccauugcccagcucu

SEQ ID NO: 1947141 - RNA, 19 nt, Artificial Sequence
  Description of Artificial Sequence: Synthetic oligonucleotide
agauccacagagccccaug

SEQ ID NO: 1947142 - RNA, 19 nt, Artificial Sequence
  Description of Artificial Sequence: Synthetic oligonucleotide
agggacauuuaaauguccu

SEQ ID NO: 1947143 - RNA, 19 nt, Artificial Sequence
  Description of Artificial Sequence: Synthetic oligonucleotide
ucuggguucggaacuugua

SEQ ID NO: 1947144 - RNA, 19 nt, Artificial Sequence
  Description of Artificial Sequence: Synthetic oligonucleotide
aaacgcuacuugaucuucu

SEQ ID NO: 1947145 - RNA, 19 nt, Artificial Sequence
  Description of Artificial Sequence: Synthetic oligonucleotide
ugucucguggggcgccacg

SEQ ID NO: 1947146 - RNA, 19 nt, Artificial Sequence
  Description of Artificial Sequence: Synthetic oligonucleotide
gugugugaccacuugugga

SEQ ID NO: 1947147 - RNA, 19 nt, Artificial Sequence
  Description of Artificial Sequence: Synthetic oligonucleotide
ggcucucuggaucaccggg

SEQ ID NO: 1947148 - RNA, 19 nt, Artificial Sequence
  Description of Artificial Sequence: Synthetic oligonucleotide
augacgaggggugugugcu

SEQ ID NO: 1947149 - RNA, 19 nt, Artificial Sequence
  Description of Artificial Sequence: Synthetic oligonucleotide
acgaagcauucccaggggu

SEQ ID NO: 1947150 - RNA, 19 nt, Artificial Sequence
  Description of Artificial Sequence: Synthetic oligonucleotide
uccgugguaggaucacgug

SEQ ID NO: 1947151 - RNA, 19 nt, Artificial Sequence
  Description of Artificial Sequence: Synthetic oligonucleotide
cgcuacuugaucuucuggg

SEQ ID NO: 1947152 - RNA, 19 nt, Artificial Sequence
  Description of Artificial Sequence: Synthetic oligonucleotide
agcucaaagaggccagaau

SEQ ID NO: 1947153 - RNA, 19 nt, Artificial Sequence
  Description of Artificial Sequence: Synthetic oligonucleotide
auacagaaguaugucucgu

SEQ ID NO: 1947154 - RNA, 19 nt, Artificial Sequence
  Description of Artificial Sequence: Synthetic oligonucleotide
ggccauauucagcagcggc

SEQ ID NO: 1947155 - RNA, 19 nt, Artificial Sequence
  Description of Artificial Sequence: Synthetic oligonucleotide
ggaauggccugaugaaggc

SEQ ID NO: 1947156 - RNA, 19 nt, Artificial Sequence
  Description of Artificial Sequence: Synthetic oligonucleotide
cugcaaacgcuacuugauc

SEQ ID NO: 1947157 - RNA, 19 nt, Artificial Sequence
  Description of Artificial Sequence: Synthetic oligonucleotide
gggaaaguuggcgaccagg

SEQ ID NO: 1947158 - RNA, 19 nt, Artificial Sequence
  Description of Artificial Sequence: Synthetic oligonucleotide
ggguucggaacuuguaggc

SEQ ID NO: 1947159 - RNA, 19 nt, Artificial Sequence
  Description of Artificial Sequence: Synthetic oligonucleotide
ugguguuuccgugguagga

SEQ ID NO: 1947160 - RNA, 19 nt, Artificial Sequence
  Description of Artificial Sequence: Synthetic oligonucleotide
ggugauacagaaguauguc

SEQ ID NO: 1947161 - RNA, 19 nt, Artificial Sequence
  Description of Artificial Sequence: Synthetic oligonucleotide
augaugcagggacauuuaa

SEQ ID NO: 1947162 - RNA, 19 nt, Artificial Sequence
  Description of Artificial Sequence: Synthetic oligonucleotide
caacgagagccccugcaac

SEQ ID NO: 1947163 - RNA, 19 nt, Artificial Sequence
  Description of Artificial Sequence: Synthetic oligonucleotide
ucuucacuggaagggcagc

SEQ ID NO: 1947164 - RNA, 19 nt, Artificial Sequence
  Description of Artificial Sequence: Synthetic oligonucleotide
uucggaacuuguaggccau

SEQ ID NO: 1947165 - RNA, 19 nt, Artificial Sequence
  Description of Artificial Sequence: Synthetic oligonucleotide
gucgacugcccaccuaggc

SEQ ID NO: 1947166 - RNA, 19 nt, Artificial Sequence
  Description of Artificial Sequence: Synthetic oligonucleotide
cacgugccaguccugcagg

SEQ ID NO: 1947167 - RNA, 19 nt, Artificial Sequence
  Description of Artificial Sequence: Synthetic oligonucleotide
cagugacccaguagggcag

SEQ ID NO: 1947168 - RNA, 19 nt, Artificial Sequence
  Description of Artificial Sequence: Synthetic oligonucleotide
auguaucggcaccccaaug

SEQ ID NO: 1947169 - RNA, 19 nt, Artificial Sequence
  Description of Artificial Sequence: Synthetic oligonucleotide
gggucgacugcccaccuag

SEQ ID NO: 1947170 - RNA, 19 nt, Artificial Sequence
  Description of Artificial Sequence: Synthetic oligonucleotide
cgugguaggaucacgugcc

SEQ ID NO: 1947171 - RNA, 19 nt, Artificial Sequence
  Description of Artificial Sequence: Synthetic oligonucleotide
uaggugugcagggcugagg

SEQ ID NO: 1947172 - RNA, 19 nt, Artificial Sequence
  Description of Artificial Sequence: Synthetic oligonucleotide
agaagacgaagcauuccca

SEQ ID NO: 1947173 - RNA, 19 nt, Artificial Sequence
  Description of Artificial Sequence: Synthetic oligonucleotide
gcaacaacacccaggauga

SEQ ID NO: 1947174 - RNA, 19 nt, Artificial Sequence
  Description of Artificial Sequence: Synthetic oligonucleotide
ugguaggaucacgugccag

SEQ ID NO: 1947175 - RNA, 19 nt, Artificial Sequence
  Description of Artificial Sequence: Synthetic oligonucleotide
agaccaagugagucagcga

SEQ ID NO: 1947176 - RNA, 19 nt, Artificial Sequence
  Description of Artificial Sequence: Synthetic oligonucleotide
gacaggaagucagcaacga

SEQ ID NO: 1947177 - RNA, 19 nt, Artificial Sequence
  Description of Artificial Sequence: Synthetic oligonucleotide
ccccacaaugggcagaucc

SEQ ID NO: 1947178 - RNA, 19 nt, Artificial Sequence
  Description of Artificial Sequence: Synthetic oligonucleotide
gaucuucugggcccacuuc

SEQ ID NO: 1947179 - RNA, 19 nt, Artificial Sequence
  Description of Artificial Sequence: Synthetic oligonucleotide
agggaggaccaugaugcag

SEQ ID NO: 1947180 - RNA, 19 nt, Artificial Sequence
  Description of Artificial Sequence: Synthetic oligonucleotide
guugagccagccuguggug

SEQ ID NO: 1947181 - RNA, 19 nt, Artificial Sequence
  Description of Artificial Sequence: Synthetic oligonucleotide
caaacgcuacuugaucuuc

SEQ ID NO: 1947182 - RNA, 19 nt, Artificial Sequence
  Description of Artificial Sequence: Synthetic oligonucleotide
cuccaagcgacgccagaag

SEQ ID NO: 1947183 - RNA, 19 nt, Artificial Sequence
  Description of Artificial Sequence: Synthetic oligonucleotide
agccccaaauaugugugug

SEQ ID NO: 1947184 - RNA, 19 nt, Artificial Sequence
  Description of Artificial Sequence: Synthetic oligonucleotide
ccaagcgacgccagaagcc

SEQ ID NO: 1947185 - RNA, 19 nt, Artificial Sequence
  Description of Artificial Sequence: Synthetic oligonucleotide
cugcaggacagugacccag

SEQ ID NO: 1947186 - RNA, 19 nt, Artificial Sequence
  Description of Artificial Sequence: Synthetic oligonucleotide
agagccccugcaacaacac

SEQ ID NO: 1947187 - RNA, 19 nt, Artificial Sequence
  Description of Artificial Sequence: Synthetic oligonucleotide
ucugcccgaggcuucucac

SEQ ID NO: 1947188 - RNA, 19 nt, Artificial Sequence
  Description of Artificial Sequence: Synthetic oligonucleotide
agccagccuguggugauac

SEQ ID NO: 1947189 - RNA, 19 nt, Artificial Sequence
  Description of Artificial Sequence: Synthetic oligonucleotide
cuguccgcugcccacugac

SEQ ID NO: 1947190 - RNA, 19 nt, Artificial Sequence
  Description of Artificial Sequence: Synthetic oligonucleotide
ggauucgaugguguuuccg

SEQ ID NO: 1947191 - RNA, 19 nt, Artificial Sequence
  Description of Artificial Sequence: Synthetic oligonucleotide
ugccucgugauggcuguag

SEQ ID NO: 1947192 - RNA, 19 nt, Artificial Sequence
  Description of Artificial Sequence: Synthetic oligonucleotide
ggggugugugcucccagcg

SEQ ID NO: 1947193 - RNA, 19 nt, Artificial Sequence
  Description of Artificial Sequence: Synthetic oligonucleotide
acugaccauugcccagcuc

SEQ ID NO: 1947194 - RNA, 19 nt, Artificial Sequence
  Description of Artificial Sequence: Synthetic oligonucleotide
acgaggggugugugcuccc

SEQ ID NO: 1947195 - RNA, 19 nt, Artificial Sequence
  Description of Artificial Sequence: Synthetic oligonucleotide
ccaaagauagucaggcaga

SEQ ID NO: 1947196 - RNA, 19 nt, Artificial Sequence
  Description of Artificial Sequence: Synthetic oligonucleotide
gucucuggacucuggguuc

SEQ ID NO: 1947197 - RNA, 19 nt, Artificial Sequence
  Description of Artificial Sequence: Synthetic oligonucleotide
uggauucgaugguguuucc

SEQ ID NO: 1947198 - RNA, 19 nt, Artificial Sequence
  Description of Artificial Sequence: Synthetic oligonucleotide
gugccaguccugcaggaca

SEQ ID NO: 1947199 - RNA, 19 nt, Artificial Sequence
  Description of Artificial Sequence: Synthetic oligonucleotide
acagagccccauguaucgg

SEQ ID NO: 1947200 - RNA, 19 nt, Artificial Sequence
  Description of Artificial Sequence: Synthetic oligonucleotide
ggacagaccaagugaguca

SEQ ID NO: 1947201 - RNA, 19 nt, Artificial Sequence
  Description of Artificial Sequence: Synthetic oligonucleotide
gaggggugugugcucccag

SEQ ID NO: 1947202 - RNA, 19 nt, Artificial Sequence
  Description of Artificial Sequence: Synthetic oligonucleotide
ucgauguggugcucccgga

SEQ ID NO: 1947203 - RNA, 19 nt, Artificial Sequence
  Description of Artificial Sequence: Synthetic oligonucleotide
cugcccgaggcuucucacc

SEQ ID NO: 1947204 - RNA, 19 nt, Artificial Sequence
  Description of Artificial Sequence: Synthetic oligonucleotide
ucggcaccccaauguacca

SEQ ID NO: 1947205 - RNA, 19 nt, Artificial Sequence
  Description of Artificial Sequence: Synthetic oligonucleotide
uggggcgccacguggugga

SEQ ID NO: 1947206 - RNA, 19 nt, Artificial Sequence
  Description of Artificial Sequence: Synthetic oligonucleotide
ccaagugagucagcgaccc

SEQ ID NO: 1947207 - RNA, 19 nt, Artificial Sequence
  Description of Artificial Sequence: Synthetic oligonucleotide
caguugucaccauuggucu

SEQ ID NO: 1947208 - RNA, 19 nt, Artificial Sequence
  Description of Artificial Sequence: Synthetic oligonucleotide
gagguccuccaagcgacgc

SEQ ID NO: 1947209 - RNA, 19 nt, Artificial Sequence
  Description of Artificial Sequence: Synthetic oligonucleotide
uggccuuggagcagcucaa

SEQ ID NO: 1947210 - RNA, 19 nt, Artificial Sequence
  Description of Artificial Sequence: Synthetic oligonucleotide
ccucgugauggcuguaggg

SEQ ID NO: 1947211 - RNA, 19 nt, Artificial Sequence
  Description of Artificial Sequence: Synthetic oligonucleotide
agggcagcucaaagaggcc

SEQ ID NO: 1947212 - RNA, 19 nt, Artificial Sequence
  Description of Artificial Sequence: Synthetic oligonucleotide
cgugauggcuguagggucg

SEQ ID NO: 1947213 - RNA, 19 nt, Artificial Sequence
  Description of Artificial Sequence: Synthetic oligonucleotide
aucugcccgaggcuucuca

SEQ ID NO: 1947214 - RNA, 19 nt, Artificial Sequence
  Description of Artificial Sequence: Synthetic oligonucleotide
aagcauucccagggguaca

SEQ ID NO: 1947215 - RNA, 19 nt, Artificial Sequence
  Description of Artificial Sequence: Synthetic oligonucleotide
acagaccaagugagucagc

SEQ ID NO: 1947216 - RNA, 19 nt, Artificial Sequence
  Description of Artificial Sequence: Synthetic oligonucleotide
guccgcugcccacugacca

SEQ ID NO: 1947217 - RNA, 19 nt, Artificial Sequence
  Description of Artificial Sequence: Synthetic oligonucleotide
guaggaucacgugccaguc

SEQ ID NO: 1947218 - RNA, 19 nt, Artificial Sequence
  Description of Artificial Sequence: Synthetic oligonucleotide
ccauauucagcagcggcag

SEQ ID NO: 1947219 - RNA, 19 nt, Artificial Sequence
  Description of Artificial Sequence: Synthetic oligonucleotide
ccgugguaggaucacgugc

SEQ ID NO: 1947220 - RNA, 19 nt, Artificial Sequence
  Description of Artificial Sequence: Synthetic oligonucleotide
aucacgugccaguccugca

SEQ ID NO: 1947221 - RNA, 19 nt, Artificial Sequence
  Description of Artificial Sequence: Synthetic oligonucleotide
guaguugagccagccugug

SEQ ID NO: 1947222 - RNA, 19 nt, Artificial Sequence
  Description of Artificial Sequence: Synthetic oligonucleotide
gguucggaacuuguaggcc

SEQ ID NO: 1947223 - RNA, 19 nt, Artificial Sequence
  Description of Artificial Sequence: Synthetic oligonucleotide
aggaugacgaggggugugu

SEQ ID NO: 1947224 - RNA, 19 nt, Artificial Sequence
  Description of Artificial Sequence: Synthetic oligonucleotide
ugacccaguagggcagccc

SEQ ID NO: 1947225 - RNA, 19 nt, Artificial Sequence
  Description of Artificial Sequence: Synthetic oligonucleotide
gggacagaccaagugaguc

SEQ ID NO: 1947226 - RNA, 19 nt, Artificial Sequence
  Description of Artificial Sequence: Synthetic oligonucleotide
guaucggcaccccaaugua

SEQ ID NO: 1947227 - RNA, 19 nt, Artificial Sequence
  Description of Artificial Sequence: Synthetic oligonucleotide
cccaccuaggccucugggg

SEQ ID NO: 1947228 - RNA, 19 nt, Artificial Sequence
  Description of Artificial Sequence: Synthetic oligonucleotide
caaagauagucaggcagaa

SEQ ID NO: 1947229 - RNA, 19 nt, Artificial Sequence
  Description of Artificial Sequence: Synthetic oligonucleotide
gcucaaagaggccagaauu

SEQ ID NO: 1947230 - RNA, 19 nt, Artificial Sequence
  Description of Artificial Sequence: Synthetic oligonucleotide
gauguggugcucccggaau

SEQ ID NO: 1947231 - RNA, 19 nt, Artificial Sequence
  Description of Artificial Sequence: Synthetic oligonucleotide
gggugugugcucccagcgg

SEQ ID NO: 1947232 - RNA, 19 nt, Artificial Sequence
  Description of Artificial Sequence: Synthetic oligonucleotide
gcagccccaaauaugugug

SEQ ID NO: 1947233 - RNA, 19 nt, Artificial Sequence
  Description of Artificial Sequence: Synthetic oligonucleotide
ggucaggcgugcaagggug

SEQ ID NO: 1947234 - RNA, 19 nt, Artificial Sequence
  Description of Artificial Sequence: Synthetic oligonucleotide
ucaucugcccgaggcuucu

SEQ ID NO: 1947235 - RNA, 19 nt, Artificial Sequence
  Description of Artificial Sequence: Synthetic oligonucleotide
gcucaaguauucuguguca

SEQ ID NO: 1947236 - RNA, 19 nt, Artificial Sequence
  Description of Artificial Sequence: Synthetic oligonucleotide
caccauuggucucaaugaa

SEQ ID NO: 1947237 - RNA, 19 nt, Artificial Sequence
  Description of Artificial Sequence: Synthetic oligonucleotide
caagugagucagcgacccc

SEQ ID NO: 1947238 - RNA, 19 nt, Artificial Sequence
  Description of Artificial Sequence: Synthetic oligonucleotide
ugguggauucgaugguguu

SEQ ID NO: 1947239 - RNA, 19 nt, Artificial Sequence
  Description of Artificial Sequence: Synthetic oligonucleotide
gcgggcuagcagcaggagg

SEQ ID NO: 1947240 - RNA, 19 nt, Artificial Sequence
  Description of Artificial Sequence: Synthetic oligonucleotide
ggggcucucuggaucaccg

SEQ ID NO: 1947241 - RNA, 19 nt, Artificial Sequence
  Description of Artificial Sequence: Synthetic oligonucleotide
acuugguggcucaaguauu

SEQ ID NO: 1947242 - RNA, 19 nt, Artificial Sequence
  Description of Artificial Sequence: Synthetic oligonucleotide
auggccaggaaggcccaag

SEQ ID NO: 1947243 - RNA, 19 nt, Artificial Sequence
  Description of Artificial Sequence: Synthetic oligonucleotide
guagggucgauguggugcu

SEQ ID NO: 1947244 - RNA, 19 nt, Artificial Sequence
  Description of Artificial Sequence: Synthetic oligonucleotide
guaugucucguggggcgcc

SEQ ID NO: 1947245 - RNA, 19 nt, Artificial Sequence
  Description of Artificial Sequence: Synthetic oligonucleotide
cucugggguaggugugcag

SEQ ID NO: 1947246 - RNA, 19 nt, Artificial Sequence
  Description of Artificial Sequence: Synthetic oligonucleotide
gguaggaucacgugccagu

SEQ ID NO: 1947247 - RNA, 19 nt, Artificial Sequence
  Description of Artificial Sequence: Synthetic oligonucleotide
gucaggcgugcaagggugg

SEQ ID NO: 1947248 - RNA, 19 nt, Artificial Sequence
  Description of Artificial Sequence: Synthetic oligonucleotide
ccacuucaugucaucugcc

SEQ ID NO: 1947249 - RNA, 19 nt, Artificial Sequence
  Description of Artificial Sequence: Synthetic oligonucleotide
auccacagagccccaugua

SEQ ID NO: 1947250 - RNA, 19 nt, Artificial Sequence
  Description of Artificial Sequence: Synthetic oligonucleotide
aggaaggcccaaggaaaga

SEQ ID NO: 1947251 - RNA, 19 nt, Artificial Sequence
  Description of Artificial Sequence: Synthetic oligonucleotide
ccauuggucucaaugaagu

SEQ ID NO: 1947252 - RNA, 19 nt, Artificial Sequence
  Description of Artificial Sequence: Synthetic oligonucleotide
ccagggguacagcugcucc

SEQ ID NO: 1947253 - RNA, 19 nt, Artificial Sequence
  Description of Artificial Sequence: Synthetic oligonucleotide
uaugucucguggggcgcca

SEQ ID NO: 1947254 - RNA, 19 nt, Artificial Sequence
  Description of Artificial Sequence: Synthetic oligonucleotide
ggaagucagcaacgagagc

SEQ ID NO: 1947255 - RNA, 19 nt, Artificial Sequence
  Description of Artificial Sequence: Synthetic oligonucleotide
gguacccgggcccagccca

SEQ ID NO: 1947256 - RNA, 19 nt, Artificial Sequence
  Description of Artificial Sequence: Synthetic oligonucleotide
cugcagucaggcuuggccu

SEQ ID NO: 1947257 - RNA, 19 nt, Artificial Sequence
  Description of Artificial Sequence: Synthetic oligonucleotide
caggggacucuucacugga

SEQ ID NO: 1947258 - RNA, 19 nt, Artificial Sequence
  Description of Artificial Sequence: Synthetic oligonucleotide
guaggugugcagggcugag

SEQ ID NO: 1947259 - RNA, 19 nt, Artificial Sequence
  Description of Artificial Sequence: Synthetic oligonucleotide
caaugggcagauccacaga

SEQ ID NO: 1947260 - RNA, 19 nt, Artificial Sequence
  Description of Artificial Sequence: Synthetic oligonucleotide
aguucaggcuggggaaagu

SEQ ID NO: 1947261 - RNA, 19 nt, Artificial Sequence
  Description of Artificial Sequence: Synthetic oligonucleotide
cauaccagugagggccaug

SEQ ID NO: 1947262 - RNA, 19 nt, Artificial Sequence
  Description of Artificial Sequence: Synthetic oligonucleotide
gccucgugauggcuguagg

SEQ ID NO: 1947263 - RNA, 19 nt, Artificial Sequence
  Description of Artificial Sequence: Synthetic oligonucleotide
cucgugauggcuguagggu

SEQ ID NO: 1947264 - RNA, 19 nt, Artificial Sequence
  Description of Artificial Sequence: Synthetic oligonucleotide
ugacgaggggugugugcuc

SEQ ID NO: 1947265 - RNA, 19 nt, Artificial Sequence
  Description of Artificial Sequence: Synthetic oligonucleotide
ccccaaauaugugugugac

SEQ ID NO: 1947266 - RNA, 19 nt, Artificial Sequence
  Description of Artificial Sequence: Synthetic oligonucleotide
gcccacuucaugucaucug

SEQ ID NO: 1947267 - RNA, 19 nt, Artificial Sequence
  Description of Artificial Sequence: Synthetic oligonucleotide
gcucccagcgggcuagcag

SEQ ID NO: 1947268 - RNA, 19 nt, Artificial Sequence
  Description of Artificial Sequence: Synthetic oligonucleotide
cacccaggaugacgagggg

SEQ ID NO: 1947269 - RNA, 19 nt, Artificial Sequence
  Description of Artificial Sequence: Synthetic oligonucleotide
caggcgugcaagggugggg

SEQ ID NO: 1947270 - RNA, 19 nt, Artificial Sequence
  Description of Artificial Sequence: Synthetic oligonucleotide
cuguagggucgauguggug

SEQ ID NO: 1947271 - RNA, 19 nt, Artificial Sequence
  Description of Artificial Sequence: Synthetic oligonucleotide
ggcagccccaaauaugugu

SEQ ID NO: 1947272 - RNA, 19 nt, Artificial Sequence
  Description of Artificial Sequence: Synthetic oligonucleotide
acgugccaguccugcagga

SEQ ID NO: 1947273 - RNA, 19 nt, Artificial Sequence
  Description of Artificial Sequence: Synthetic oligonucleotide
gguggcucaaguauucugu

SEQ ID NO: 1947274 - RNA, 19 nt, Artificial Sequence
  Description of Artificial Sequence: Synthetic oligonucleotide
acucuggguucggaacuug

SEQ ID NO: 1947275 - RNA, 19 nt, Artificial Sequence
  Description of Artificial Sequence: Synthetic oligonucleotide
acgagagccccugcaacaa

SEQ ID NO: 1947276 - RNA, 19 nt, Artificial Sequence
  Description of Artificial Sequence: Synthetic oligonucleotide
ggcgccacgugguggauuc

SEQ ID NO: 1947277 - RNA, 19 nt, Artificial Sequence
  Description of Artificial Sequence: Synthetic oligonucleotide
ccagcgggcuagcagcagg

SEQ ID NO: 1947278 - RNA, 19 nt, Artificial Sequence
  Description of Artificial Sequence: Synthetic oligonucleotide
ggggucaggcgugcaaggg

SEQ ID NO: 1947279 - RNA, 19 nt, Artificial Sequence
  Description of Artificial Sequence: Synthetic oligonucleotide
guggggcgccacguggugg

SEQ ID NO: 1947280 - RNA, 19 nt, Artificial Sequence
  Description of Artificial Sequence: Synthetic oligonucleotide
gugguaggaucacgugcca

SEQ ID NO: 1947281 - RNA, 19 nt, Artificial Sequence
  Description of Artificial Sequence: Synthetic oligonucleotide
cagccagggucgacugccc

SEQ ID NO: 1947282 - RNA, 19 nt, Artificial Sequence
  Description of Artificial Sequence: Synthetic oligonucleotide
ggccugaugaaggccuucc

SEQ ID NO: 1947283 - RNA, 19 nt, Artificial Sequence
  Description of Artificial Sequence: Synthetic oligonucleotide
gugaccacuuguggaucug

SEQ ID NO: 1947284 - RNA, 19 nt, Artificial Sequence
  Description of Artificial Sequence: Synthetic oligonucleotide
gccccaaauauguguguga

SEQ ID NO: 1947285 - RNA, 19 nt, Artificial Sequence
  Description of Artificial Sequence: Synthetic oligonucleotide
gcaacgagagccccugcaa

SEQ ID NO: 1947286 - RNA, 19 nt, Artificial Sequence
  Description of Artificial Sequence: Synthetic oligonucleotide
cagucaggcuuggccuugg

SEQ ID NO: 1947287 - RNA, 19 nt, Artificial Sequence
  Description of Artificial Sequence: Synthetic oligonucleotide
ccacgugguggauucgaug

SEQ ID NO: 1947288 - RNA, 19 nt, Artificial Sequence
  Description of Artificial Sequence: Synthetic oligonucleotide
caugccucgugauggcugu

SEQ ID NO: 1947289 - RNA, 19 nt, Artificial Sequence
  Description of Artificial Sequence: Synthetic oligonucleotide
ccggaauggccugaugaag

SEQ ID NO: 1947290 - RNA, 19 nt, Artificial Sequence
  Description of Artificial Sequence: Synthetic oligonucleotide
cuguggugauacagaagua

SEQ ID NO: 1947291 - RNA, 19 nt, Artificial Sequence
  Description of Artificial Sequence: Synthetic oligonucleotide
gguccuccaagcgacgcca

SEQ ID NO: 1947292 - RNA, 19 nt, Artificial Sequence
  Description of Artificial Sequence: Synthetic oligonucleotide
caagcgacgccagaagccu

SEQ ID NO: 1947293 - RNA, 19 nt, Artificial Sequence
  Description of Artificial Sequence: Synthetic oligonucleotide
gcccaccuaggccucuggg

SEQ ID NO: 1947294 - RNA, 19 nt, Artificial Sequence
  Description of Artificial Sequence: Synthetic oligonucleotide
agcgggcuagcagcaggag

SEQ ID NO: 1947295 - RNA, 19 nt, Artificial Sequence
  Description of Artificial Sequence: Synthetic oligonucleotide
augucucguggggcgccac

SEQ ID NO: 1947296 - RNA, 19 nt, Artificial Sequence
  Description of Artificial Sequence: Synthetic oligonucleotide
gggcagcucaaagaggcca

SEQ ID NO: 1947297 - RNA, 19 nt, Artificial Sequence
  Description of Artificial Sequence: Synthetic oligonucleotide
guggugcucccggaauggc

SEQ ID NO: 1947298 - RNA, 19 nt, Artificial Sequence
  Description of Artificial Sequence: Synthetic oligonucleotide
cgaccaggcagcugcaaac

SEQ ID NO: 1947299 - RNA, 19 nt, Artificial Sequence
  Description of Artificial Sequence: Synthetic oligonucleotide
gcggcagaagugucaccag

SEQ ID NO: 1947300 - RNA, 19 nt, Artificial Sequence
  Description of Artificial Sequence: Synthetic oligonucleotide
ccauguaucggcaccccaa

SEQ ID NO: 1947301 - RNA, 19 nt, Artificial Sequence
  Description of Artificial Sequence: Synthetic oligonucleotide
cagcgggcuagcagcagga

SEQ ID NO: 1947302 - RNA, 19 nt, Artificial Sequence
  Description of Artificial Sequence: Synthetic oligonucleotide
ggucgauguggugcucccg

SEQ ID NO: 1947303 - RNA, 19 nt, Artificial Sequence
  Description of Artificial Sequence: Synthetic oligonucleotide
agcgacgccagaagccuau

SEQ ID NO: 1947304 - RNA, 19 nt, Artificial Sequence
  Description of Artificial Sequence: Synthetic oligonucleotide
ggacucuggguucggaacu

SEQ ID NO: 1947305 - RNA, 19 nt, Artificial Sequence
  Description of Artificial Sequence: Synthetic oligonucleotide
cauguaucggcaccccaau

SEQ ID NO: 1947306 - RNA, 19 nt, Artificial Sequence
  Description of Artificial Sequence: Synthetic oligonucleotide
ccucccuuggguggcagcc

SEQ ID NO: 1947307 - RNA, 19 nt, Artificial Sequence
  Description of Artificial Sequence: Synthetic oligonucleotide
aggccagaauuuggcagau

SEQ ID NO: 1947308 - RNA, 19 nt, Artificial Sequence
  Description of Artificial Sequence: Synthetic oligonucleotide
gggcagauccacagagccc

SEQ ID NO: 1947309 - RNA, 19 nt, Artificial Sequence
  Description of Artificial Sequence: Synthetic oligonucleotide
ccggggacagaccaaguga

SEQ ID NO: 1947310 - RNA, 19 nt, Artificial Sequence
  Description of Artificial Sequence: Synthetic oligonucleotide
gccuuccccacaaugggca

SEQ ID NO: 1947311 - RNA, 19 nt, Artificial Sequence
  Description of Artificial Sequence: Synthetic oligonucleotide
cagcaacgagagccccugc

SEQ ID NO: 1947312 - RNA, 19 nt, Artificial Sequence
  Description of Artificial Sequence: Synthetic oligonucleotide
uacccgggcccagcccagg

SEQ ID NO: 1947313 - RNA, 19 nt, Artificial Sequence
  Description of Artificial Sequence: Synthetic oligonucleotide
guuggcgaccaggcagcug

SEQ ID NO: 1947314 - RNA, 19 nt, Artificial Sequence
  Description of Artificial Sequence: Synthetic oligonucleotide
ggucgacugcccaccuagg

SEQ ID NO: 1947315 - RNA, 19 nt, Artificial Sequence
  Description of Artificial Sequence: Synthetic oligonucleotide
gccuguggugauacagaag

SEQ ID NO: 1947316 - RNA, 19 nt, Artificial Sequence
  Description of Artificial Sequence: Synthetic oligonucleotide
aguuggcgaccaggcagcu

SEQ ID NO: 1947317 - RNA, 19 nt, Artificial Sequence
  Description of Artificial Sequence: Synthetic oligonucleotide
ccagggucgacugcccacc

SEQ ID NO: 1947318 - RNA, 19 nt, Artificial Sequence
  Description of Artificial Sequence: Synthetic oligonucleotide
ggguaggugugcagggcug

SEQ ID NO: 1947319 - RNA, 19 nt, Artificial Sequence
  Description of Artificial Sequence: Synthetic oligonucleotide
gaggaccaugaugcaggga

SEQ ID NO: 1947320 - RNA, 19 nt, Artificial Sequence
  Description of Artificial Sequence: Synthetic oligonucleotide
ggcugagggaggaccauga

SEQ ID NO: 1947321 - RNA, 19 nt, Artificial Sequence
  Description of Artificial Sequence: Synthetic oligonucleotide
ggggaaaguuggcgaccag

SEQ ID NO: 1947322 - RNA, 19 nt, Artificial Sequence
  Description of Artificial Sequence: Synthetic oligonucleotide
cagaagccuaucaccucua

SEQ ID NO: 1947323 - RNA, 19 nt, Artificial Sequence
  Description of Artificial Sequence: Synthetic oligonucleotide
cuucacuggaagggcagcu

SEQ ID NO: 1947324 - RNA, 19 nt, Artificial Sequence
  Description of Artificial Sequence: Synthetic oligonucleotide
ggaugacgaggggugugug

SEQ ID NO: 1947325 - RNA, 19 nt, Artificial Sequence
  Description of Artificial Sequence: Synthetic oligonucleotide
ccagaagccuaucaccucu

SEQ ID NO: 1947326 - RNA, 19 nt, Artificial Sequence
  Description of Artificial Sequence: Synthetic oligonucleotide
gccccauguaucggcaccc

SEQ ID NO: 1947327 - RNA, 19 nt, Artificial Sequence
  Description of Artificial Sequence: Synthetic oligonucleotide
caguagggcagccccaaau

SEQ ID NO: 1947328 - RNA, 19 nt, Artificial Sequence
  Description of Artificial Sequence: Synthetic oligonucleotide
ggccagacaggaagucagc

SEQ ID NO: 1947329 - RNA, 19 nt, Artificial Sequence
  Description of Artificial Sequence: Synthetic oligonucleotide
ggaucaccggggacagacc

SEQ ID NO: 1947330 - RNA, 19 nt, Artificial Sequence
  Description of Artificial Sequence: Synthetic oligonucleotide
aagcgacgccagaagccua

SEQ ID NO: 1947331 - RNA, 19 nt, Artificial Sequence
  Description of Artificial Sequence: Synthetic oligonucleotide
guggcagccagggucgacu

SEQ ID NO: 1947332 - RNA, 19 nt, Artificial Sequence
  Description of Artificial Sequence: Synthetic oligonucleotide
ggugcucccggaauggccu

SEQ ID NO: 1947333 - RNA, 19 nt, Artificial Sequence
  Description of Artificial Sequence: Synthetic oligonucleotide
gugucaccagacaguuguc

SEQ ID NO: 1947334 - RNA, 19 nt, Artificial Sequence
  Description of Artificial Sequence: Synthetic oligonucleotide
agggucgacugcccaccua

SEQ ID NO: 1947335 - RNA, 19 nt, Artificial Sequence
  Description of Artificial Sequence: Synthetic oligonucleotide
ccaguccugcaggacagug

SEQ ID NO: 1947336 - RNA, 19 nt, Artificial Sequence
  Description of Artificial Sequence: Synthetic oligonucleotide
gcugcccacugaccauugc

SEQ ID NO: 1947337 - RNA, 19 nt, Artificial Sequence
  Description of Artificial Sequence: Synthetic oligonucleotide
cgugguggauucgauggug

SEQ ID NO: 1947338 - RNA, 19 nt, Artificial Sequence
  Description of Artificial Sequence: Synthetic oligonucleotide
ucggaacuuguaggccaua

SEQ ID NO: 1947339 - RNA, 19 nt, Artificial Sequence
  Description of Artificial Sequence: Synthetic oligonucleotide
ucucacccgucaggcccug

SEQ ID NO: 1947340 - RNA, 19 nt, Artificial Sequence
  Description of Artificial Sequence: Synthetic oligonucleotide
gcaaacgcuacuugaucuu

SEQ ID NO: 1947341 - RNA, 19 nt, Artificial Sequence
  Description of Artificial Sequence: Synthetic oligonucleotide
aggggacucuucacuggaa

SEQ ID NO: 1947342 - RNA, 19 nt, Artificial Sequence
  Description of Artificial Sequence: Synthetic oligonucleotide
gcagucaggcuuggccuug

SEQ ID NO: 1947343 - RNA, 19 nt, Artificial Sequence
  Description of Artificial Sequence: Synthetic oligonucleotide
gcgaccaggcagcugcaaa

SEQ ID NO: 1947344 - RNA, 19 nt, Artificial Sequence
  Description of Artificial Sequence: Synthetic oligonucleotide
cccggaauggccugaugaa

SEQ ID NO: 1947345 - RNA, 19 nt, Artificial Sequence
  Description of Artificial Sequence: Synthetic oligonucleotide
caccuaggccucuggggua

SEQ ID NO: 1947346 - RNA, 19 nt, Artificial Sequence
  Description of Artificial Sequence: Synthetic oligonucleotide
gucagcaacgagagccccu

SEQ ID NO: 1947347 - RNA, 19 nt, Artificial Sequence
  Description of Artificial Sequence: Synthetic oligonucleotide
ggguacccgggcccagccc

SEQ ID NO: 1947348 - RNA, 19 nt, Artificial Sequence
  Description of Artificial Sequence: Synthetic oligonucleotide
uagggucgauguggugcuc

SEQ ID NO: 1947349 - RNA, 19 nt, Artificial Sequence
  Description of Artificial Sequence: Synthetic oligonucleotide
cagccccaaauaugugugu

SEQ ID NO: 1947350 - RNA, 19 nt, Artificial Sequence
  Description of Artificial Sequence: Synthetic oligonucleotide
cucacccgucaggcccugg

SEQ ID NO: 1947351 - RNA, 19 nt, Artificial Sequence
  Description of Artificial Sequence: Synthetic oligonucleotide
gucaugccucgugauggcu

SEQ ID NO: 1947352 - RNA, 19 nt, Artificial Sequence
  Description of Artificial Sequence: Synthetic oligonucleotide
caaugaagucaugccucgu

SEQ ID NO: 1947353 - RNA, 19 nt, Artificial Sequence
  Description of Artificial Sequence: Synthetic oligonucleotide
cgaagcauucccaggggua

SEQ ID NO: 1947354 - RNA, 19 nt, Artificial Sequence
  Description of Artificial Sequence: Synthetic oligonucleotide
gcuguagggucgauguggu

SEQ ID NO: 1947355 - RNA, 19 nt, Artificial Sequence
  Description of Artificial Sequence: Synthetic oligonucleotide
ggccagaauuuggcagaug

SEQ ID NO: 1947356 - RNA, 19 nt, Artificial Sequence
  Description of Artificial Sequence: Synthetic oligonucleotide
ccaggccagacaggaaguc

SEQ ID NO: 1947357 - RNA, 19 nt, Artificial Sequence
  Description of Artificial Sequence: Synthetic oligonucleotide
gucucguggggcgccacgu

SEQ ID NO: 1947358 - RNA, 19 nt, Artificial Sequence
  Description of Artificial Sequence: Synthetic oligonucleotide
gccucccuuggguggcagc

SEQ ID NO: 1947359 - RNA, 19 nt, Artificial Sequence
  Description of Artificial Sequence: Synthetic oligonucleotide
gggguaguugagccagccu

SEQ ID NO: 1947360 - RNA, 19 nt, Artificial Sequence
  Description of Artificial Sequence: Synthetic oligonucleotide
ccuccaagcgacgccagaa

SEQ ID NO: 1947361 - RNA, 19 nt, Artificial Sequence
  Description of Artificial Sequence: Synthetic oligonucleotide
cccauaccagugagggcca

SEQ ID NO: 1947362 - RNA, 19 nt, Artificial Sequence
  Description of Artificial Sequence: Synthetic oligonucleotide
cccauguaucggcacccca

SEQ ID NO: 1947363 - RNA, 19 nt, Artificial Sequence
  Description of Artificial Sequence: Synthetic oligonucleotide
cacugaccauugcccagcu

SEQ ID NO: 1947364 - RNA, 19 nt, Artificial Sequence
  Description of Artificial Sequence: Synthetic oligonucleotide
caucugcccgaggcuucuc

SEQ ID NO: 1947365 - RNA, 19 nt, Artificial Sequence
  Description of Artificial Sequence: Synthetic oligonucleotide
ggcccacuucaugucaucu

SEQ ID NO: 1947366 - RNA, 19 nt, Artificial Sequence
  Description of Artificial Sequence: Synthetic oligonucleotide
ccccauguaucggcacccc

SEQ ID NO: 1947367 - RNA, 19 nt, Artificial Sequence
  Description of Artificial Sequence: Synthetic oligonucleotide
cccaauguaccaggccaga

SEQ ID NO: 1947368 - RNA, 19 nt, Artificial Sequence
  Description of Artificial Sequence: Synthetic oligonucleotide
ccucucccuguccgcugcc

SEQ ID NO: 1947369 - RNA, 19 nt, Artificial Sequence
  Description of Artificial Sequence: Synthetic oligonucleotide
cgugccaguccugcaggac

SEQ ID NO: 1947370 - RNA, 19 nt, Artificial Sequence
  Description of Artificial Sequence: Synthetic oligonucleotide
gcugagggaggaccaugau

SEQ ID NO: 1947371 - RNA, 19 nt, Artificial Sequence
  Description of Artificial Sequence: Synthetic oligonucleotide
caccggggacagaccaagu

SEQ ID NO: 1947372 - RNA, 19 nt, Artificial Sequence
  Description of Artificial Sequence: Synthetic oligonucleotide
gccagccuguggugauaca

SEQ ID NO: 1947373 - RNA, 19 nt, Artificial Sequence
  Description of Artificial Sequence: Synthetic oligonucleotide
cggcaccccaauguaccag

SEQ ID NO: 1947374 - RNA, 19 nt, Artificial Sequence
  Description of Artificial Sequence: Synthetic oligonucleotide
cuaggccucugggguaggu

SEQ ID NO: 1947375 - RNA, 19 nt, Artificial Sequence
  Description of Artificial Sequence: Synthetic oligonucleotide
ccgucaggcccuggaugag

SEQ ID NO: 1947376 - RNA, 19 nt, Artificial Sequence
  Description of Artificial Sequence: Synthetic oligonucleotide
augccucgugauggcugua

SEQ ID NO: 1947377 - RNA, 19 nt, Artificial Sequence
  Description of Artificial Sequence: Synthetic oligonucleotide
cagggucgacugcccaccu

SEQ ID NO: 1947378 - RNA, 19 nt, Artificial Sequence
  Description of Artificial Sequence: Synthetic oligonucleotide
cgauguggugcucccggaa

SEQ ID NO: 1947379 - RNA, 19 nt, Artificial Sequence
  Description of Artificial Sequence: Synthetic oligonucleotide
ccgaggcuucucacccguc

SEQ ID NO: 1947380 - RNA, 19 nt, Artificial Sequence
  Description of Artificial Sequence: Synthetic oligonucleotide
gcgccacgugguggauucg

SEQ ID NO: 1947381 - RNA, 19 nt, Artificial Sequence
  Description of Artificial Sequence: Synthetic oligonucleotide
cagauccacagagccccau

SEQ ID NO: 1947382 - RNA, 19 nt, Artificial Sequence
  Description of Artificial Sequence: Synthetic oligonucleotide
ggcgaccaggcagcugcaa

SEQ ID NO: 1947383 - RNA, 19 nt, Artificial Sequence
  Description of Artificial Sequence: Synthetic oligonucleotide
cccgaggcuucucacccgu

SEQ ID NO: 1947384 - RNA, 19 nt, Artificial Sequence
  Description of Artificial Sequence: Synthetic oligonucleotide
gcgacgccagaagccuauc

SEQ ID NO: 1947385 - RNA, 19 nt, Artificial Sequence
  Description of Artificial Sequence: Synthetic oligonucleotide
ccuguccgcugcccacuga

SEQ ID NO: 1947386 - RNA, 19 nt, Artificial Sequence
  Description of Artificial Sequence: Synthetic oligonucleotide
cgccacgugguggauucga

SEQ ID NO: 1947387 - RNA, 19 nt, Artificial Sequence
  Description of Artificial Sequence: Synthetic oligonucleotide
gccacgugguggauucgau

SEQ ID NO: 1947388 - RNA, 19 nt, Artificial Sequence
  Description of Artificial Sequence: Synthetic oligonucleotide
ggccuuggagcagcucaau

SEQ ID NO: 1947389 - RNA, 19 nt, Artificial Sequence
  Description of Artificial Sequence: Synthetic oligonucleotide
cgaggggugugugcuccca

SEQ ID NO: 1947390 - RNA, 19 nt, Artificial Sequence
  Description of Artificial Sequence: Synthetic oligonucleotide
gggcgccacgugguggauu

SEQ ID NO: 1947391 - RNA, 19 nt, Artificial Sequence
  Description of Artificial Sequence: Synthetic oligonucleotide
ccgcugcccacugaccauu

SEQ ID NO: 1947392 - RNA, 19 nt, Artificial Sequence
  Description of Artificial Sequence: Synthetic oligonucleotide
ccauaccagugagggccau

SEQ ID NO: 1947393 - RNA, 19 nt, Artificial Sequence
  Description of Artificial Sequence: Synthetic oligonucleotide
ggggcgccacgugguggau

SEQ ID NO: 1947394 - RNA, 19 nt, Artificial Sequence
  Description of Artificial Sequence: Synthetic oligonucleotide
accgaaaauaucuacaacc

SEQ ID NO: 1947395 - RNA, 19 nt, Artificial Sequence
  Description of Artificial Sequence: Synthetic oligonucleotide
ucaaauaacacgcucaggc

SEQ ID NO: 1947396 - RNA, 19 nt, Artificial Sequence
  Description of Artificial Sequence: Synthetic oligonucleotide
aauucauauaaguauaugu

SEQ ID NO: 1947397 - RNA, 19 nt, Artificial Sequence
  Description of Artificial Sequence: Synthetic oligonucleotide
ucauauaaguauauguggg

SEQ ID NO: 1947398 - RNA, 19 nt, Artificial Sequence
  Description of Artificial Sequence: Synthetic oligonucleotide
cuuguuuuacaauauaccg

SEQ ID NO: 1947399 - RNA, 19 nt, Artificial Sequence
  Description of Artificial Sequence: Synthetic oligonucleotide
uguaaaagcccuuuguagg

SEQ ID NO: 1947400 - RNA, 19 nt, Artificial Sequence
  Description of Artificial Sequence: Synthetic oligonucleotide
aggaauucaaauaacacgc

SEQ ID NO: 1947401 - RNA, 19 nt, Artificial Sequence
  Description of Artificial Sequence: Synthetic oligonucleotide
caacuuacaaucuaggugc

SEQ ID NO: 1947402 - RNA, 19 nt, Artificial Sequence
  Description of Artificial Sequence: Synthetic oligonucleotide
aaaaucaaggaauucaaau

SEQ ID NO: 1947403 - RNA, 19 nt, Artificial Sequence
  Description of Artificial Sequence: Synthetic oligonucleotide
agcauaaucauccuuauca

SEQ ID NO: 1947404 - RNA, 19 nt, Artificial Sequence
  Description of Artificial Sequence: Synthetic oligonucleotide
uccaugauguauaagauac

SEQ ID NO: 1947405 - RNA, 19 nt, Artificial Sequence
  Description of Artificial Sequence: Synthetic oligonucleotide
acuacaaaagcuuucucac

SEQ ID NO: 1947406 - RNA, 19 nt, Artificial Sequence
  Description of Artificial Sequence: Synthetic oligonucleotide
ugagguguaagcauaauca

SEQ ID NO: 1947407 - RNA, 19 nt, Artificial Sequence
  Description of Artificial Sequence: Synthetic oligonucleotide
ucaucauacgcauaauugg

SEQ ID NO: 1947408 - RNA, 19 nt, Artificial Sequence
  Description of Artificial Sequence: Synthetic oligonucleotide
aaucaaggaauucaaauaa

SEQ ID NO: 1947409 - RNA, 19 nt, Artificial Sequence
  Description of Artificial Sequence: Synthetic oligonucleotide
acaaccuuuuccuaaaagg

SEQ ID NO: 1947410 - RNA, 19 nt, Artificial Sequence
  Description of Artificial Sequence: Synthetic oligonucleotide
acacuuaucaguuuugcuc

SEQ ID NO: 1947411 - RNA, 19 nt, Artificial Sequence
  Description of Artificial Sequence: Synthetic oligonucleotide
ucuugagaaauucauauaa

SEQ ID NO: 1947412 - RNA, 19 nt, Artificial Sequence
  Description of Artificial Sequence: Synthetic oligonucleotide
ucuuguuuuacaauauacc

SEQ ID NO: 1947413 - RNA, 19 nt, Artificial Sequence
  Description of Artificial Sequence: Synthetic oligonucleotide
aagguugauuaacacuucc

SEQ ID NO: 1947414 - RNA, 19 nt, Artificial Sequence
  Description of Artificial Sequence: Synthetic oligonucleotide
auccuuaucaaucucugac

SEQ ID NO: 1947415 - RNA, 19 nt, Artificial Sequence
  Description of Artificial Sequence: Synthetic oligonucleotide
uugauuaacacuuccugag

SEQ ID NO: 1947416 - RNA, 19 nt, Artificial Sequence
  Description of Artificial Sequence: Synthetic oligonucleotide
aucaaucucugacaguucc

SEQ ID NO: 1947417 - RNA, 19 nt, Artificial Sequence
  Description of Artificial Sequence: Synthetic oligonucleotide
uguuuuacaauauaccgaa

SEQ ID NO: 1947418 - RNA, 19 nt, Artificial Sequence
  Description of Artificial Sequence: Synthetic oligonucleotide
acaacuuacaaucuaggug

SEQ ID NO: 1947419 - RNA, 19 nt, Artificial Sequence
  Description of Artificial Sequence: Synthetic oligonucleotide
ucaguuuugcucuuggugc

SEQ ID NO: 1947420 - RNA, 19 nt, Artificial Sequence
  Description of Artificial Sequence: Synthetic oligonucleotide
ucaaggaauucaaauaaca

SEQ ID NO: 1947421 - RNA, 19 nt, Artificial Sequence
  Description of Artificial Sequence: Synthetic oligonucleotide
aaaucaaggaauucaaaua

SEQ ID NO: 1947422 - RNA, 19 nt, Artificial Sequence
  Description of Artificial Sequence: Synthetic oligonucleotide
aaaacaacuuacaaucuag

SEQ ID NO: 1947423 - RNA, 19 nt, Artificial Sequence
  Description of Artificial Sequence: Synthetic oligonucleotide
uauaccgaaaauaucuaca

SEQ ID NO: 1947424 - RNA, 19 nt, Artificial Sequence
  Description of Artificial Sequence: Synthetic oligonucleotide
cuaggugcaaacuaccugg

SEQ ID NO: 1947425 - RNA, 19 nt, Artificial Sequence
  Description of Artificial Sequence: Synthetic oligonucleotide
uuuguaggccugaacaagg

SEQ ID NO: 1947426 - RNA, 19 nt, Artificial Sequence
  Description of Artificial Sequence: Synthetic oligonucleotide
acgaaaggaucccaaaccc

SEQ ID NO: 1947427 - RNA, 19 nt, Artificial Sequence
  Description of Artificial Sequence: Synthetic oligonucleotide
uuuucuaagcaacgugugg

SEQ ID NO: 1947428 - RNA, 19 nt, Artificial Sequence
  Description of Artificial Sequence: Synthetic oligonucleotide
uuguaaaagcccuuuguag

SEQ ID NO: 1947429 - RNA, 19 nt, Artificial Sequence
  Description of Artificial Sequence: Synthetic oligonucleotide
gauuaacacuuccugagag

SEQ ID NO: 1947430 - RNA, 19 nt, Artificial Sequence
  Description of Artificial Sequence: Synthetic oligonucleotide
aacaagguugauuaacacu

SEQ ID NO: 1947431 - RNA, 19 nt, Artificial Sequence
  Description of Artificial Sequence: Synthetic oligonucleotide
aacacuuccugagaggacg

SEQ ID NO: 1947432 - RNA, 19 nt, Artificial Sequence
  Description of Artificial Sequence: Synthetic oligonucleotide
uugagaaauucauauaagu

SEQ ID NO: 1947433 - RNA, 19 nt, Artificial Sequence
  Description of Artificial Sequence: Synthetic oligonucleotide
uuguuuuacaauauaccga

SEQ ID NO: 1947434 - RNA, 19 nt, Artificial Sequence
  Description of Artificial Sequence: Synthetic oligonucleotide
auguauaagauacaaugca

SEQ ID NO: 1947435 - RNA, 19 nt, Artificial Sequence
  Description of Artificial Sequence: Synthetic oligonucleotide
auauaccgaaaauaucuac

SEQ ID NO: 1947436 - RNA, 19 nt, Artificial Sequence
  Description of Artificial Sequence: Synthetic oligonucleotide
uuuagaacacuuaucaguu

SEQ ID NO: 1947437 - RNA, 19 nt, Artificial Sequence
  Description of Artificial Sequence: Synthetic oligonucleotide
aauuggugaguaucucucg

SEQ ID NO: 1947438 - RNA, 19 nt, Artificial Sequence
  Description of Artificial Sequence: Synthetic oligonucleotide
aaggauucccacuacaaaa

SEQ ID NO: 1947439 - RNA, 19 nt, Artificial Sequence
  Description of Artificial Sequence: Synthetic oligonucleotide
aacaacuuacaaucuaggu

SEQ ID NO: 1947440 - RNA, 19 nt, Artificial Sequence
  Description of Artificial Sequence: Synthetic oligonucleotide
gauguauaagauacaaugc

SEQ ID NO: 1947441 - RNA, 19 nt, Artificial Sequence
  Description of Artificial Sequence: Synthetic oligonucleotide
aauucaaauaacacgcuca

SEQ ID NO: 1947442 - RNA, 19 nt, Artificial Sequence
  Description of Artificial Sequence: Synthetic oligonucleotide
uacaaugcauguuguaagg

SEQ ID NO: 1947443 - RNA, 19 nt, Artificial Sequence
  Description of Artificial Sequence: Synthetic oligonucleotide
ugauuuucuaagcaacgug

SEQ ID NO: 1947444 - RNA, 19 nt, Artificial Sequence
  Description of Artificial Sequence: Synthetic oligonucleotide
uauuguaaaagcccuuugu

SEQ ID NO: 1947445 - RNA, 19 nt, Artificial Sequence
  Description of Artificial Sequence: Synthetic oligonucleotide
uaaugucugcuucagacac

SEQ ID NO: 1947446 - RNA, 19 nt, Artificial Sequence
  Description of Artificial Sequence: Synthetic oligonucleotide
uauaugugggcgauucggg

SEQ ID NO: 1947447 - RNA, 19 nt, Artificial Sequence
  Description of Artificial Sequence: Synthetic oligonucleotide
uaaauaauucaggacacca

SEQ ID NO: 1947448 - RNA, 19 nt, Artificial Sequence
  Description of Artificial Sequence: Synthetic oligonucleotide
aaguauaugugggcgauuc

SEQ ID NO: 1947449 - RNA, 19 nt, Artificial Sequence
  Description of Artificial Sequence: Synthetic oligonucleotide
uguauaagauacaaugcau

SEQ ID NO: 1947450 - RNA, 19 nt, Artificial Sequence
  Description of Artificial Sequence: Synthetic oligonucleotide
uuugccaaguauuuccaag

SEQ ID NO: 1947451 - RNA, 19 nt, Artificial Sequence
  Description of Artificial Sequence: Synthetic oligonucleotide
gagaggacgacuuuucacc

SEQ ID NO: 1947452 - RNA, 19 nt, Artificial Sequence
  Description of Artificial Sequence: Synthetic oligonucleotide
cauauaaguauaugugggc

SEQ ID NO: 1947453 - RNA, 19 nt, Artificial Sequence
  Description of Artificial Sequence: Synthetic oligonucleotide
auucaaauaacacgcucag

SEQ ID NO: 1947454 - RNA, 19 nt, Artificial Sequence
  Description of Artificial Sequence: Synthetic oligonucleotide
aaucuaggugcaaacuacc

SEQ ID NO: 1947455 - RNA, 19 nt, Artificial Sequence
  Description of Artificial Sequence: Synthetic oligonucleotide
auuaacacuuccugagagg

SEQ ID NO: 1947456 - RNA, 19 nt, Artificial Sequence
  Description of Artificial Sequence: Synthetic oligonucleotide
caugcaaaaucuuuagaac

SEQ ID NO: 1947457 - RNA, 19 nt, Artificial Sequence
  Description of Artificial Sequence: Synthetic oligonucleotide
cacauguaaaacaacuuac

SEQ ID NO: 1947458 - RNA, 19 nt, Artificial Sequence
  Description of Artificial Sequence: Synthetic oligonucleotide
aaucuuuagaacacuuauc

SEQ ID NO: 1947459 - RNA, 19 nt, Artificial Sequence
  Description of Artificial Sequence: Synthetic oligonucleotide
uaauucaggacaccaauau

SEQ ID NO: 1947460 - RNA, 19 nt, Artificial Sequence
  Description of Artificial Sequence: Synthetic oligonucleotide
acuaccuggauuuacaaua

SEQ ID NO: 1947461 - RNA, 19 nt, Artificial Sequence
  Description of Artificial Sequence: Synthetic oligonucleotide
ucucaugcaaaaucuuuag

SEQ ID NO: 1947462 - RNA, 19 nt, Artificial Sequence
  Description of Artificial Sequence: Synthetic oligonucleotide
aucuuguuuuacaauauac

SEQ ID NO: 1947463 - RNA, 19 nt, Artificial Sequence
  Description of Artificial Sequence: Synthetic oligonucleotide
aaacaacuuacaaucuagg

SEQ ID NO: 1947464 - RNA, 19 nt, Artificial Sequence
  Description of Artificial Sequence: Synthetic oligonucleotide
uggccuuccauuaaugucu

SEQ ID NO: 1947465 - RNA, 19 nt, Artificial Sequence
  Description of Artificial Sequence: Synthetic oligonucleotide
uaauuuucuucuucaaggu

SEQ ID NO: 1947466 - RNA, 19 nt, Artificial Sequence
  Description of Artificial Sequence: Synthetic oligonucleotide
uauaaguauaugugggcga

SEQ ID NO: 1947467 - RNA, 19 nt, Artificial Sequence
  Description of Artificial Sequence: Synthetic oligonucleotide
uugacacacuucuucaucc

SEQ ID NO: 1947468 - RNA, 19 nt, Artificial Sequence
  Description of Artificial Sequence: Synthetic oligonucleotide
auguaaaacaacuuacaau

SEQ ID NO: 1947469 - RNA, 19 nt, Artificial Sequence
  Description of Artificial Sequence: Synthetic oligonucleotide
caauauaccgaaaauaucu

SEQ ID NO: 1947470 - RNA, 19 nt, Artificial Sequence
  Description of Artificial Sequence: Synthetic oligonucleotide
uguuguaaggaaaucuuua

SEQ ID NO: 1947471 - RNA, 19 nt, Artificial Sequence
  Description of Artificial Sequence: Synthetic oligonucleotide
agaauucuagcaucuccac

SEQ ID NO: 1947472 - RNA, 19 nt, Artificial Sequence
  Description of Artificial Sequence: Synthetic oligonucleotide
ucuaggugcaaacuaccug

SEQ ID NO: 1947473 - RNA, 19 nt, Artificial Sequence
  Description of Artificial Sequence: Synthetic oligonucleotide
acauuaguggaugggaugg

SEQ ID NO: 1947474 - RNA, 19 nt, Artificial Sequence
  Description of Artificial Sequence: Synthetic oligonucleotide
uaauuggugaguaucucuc

SEQ ID NO: 1947475 - RNA, 19 nt, Artificial Sequence
  Description of Artificial Sequence: Synthetic oligonucleotide
uguucuuagugcauccggc

SEQ ID NO: 1947476 - RNA, 19 nt, Artificial Sequence
  Description of Artificial Sequence: Synthetic oligonucleotide
uccggcaaaaucaaggaau

SEQ ID NO: 1947477 - RNA, 19 nt, Artificial Sequence
  Description of Artificial Sequence: Synthetic oligonucleotide
ucauacgcauaauugguga

SEQ ID NO: 1947478 - RNA, 19 nt, Artificial Sequence
  Description of Artificial Sequence: Synthetic oligonucleotide
uuucuaagcaacgugugga

SEQ ID NO: 1947479 - RNA, 19 nt, Artificial Sequence
  Description of Artificial Sequence: Synthetic oligonucleotide
uaacucuucacgaaaggau

SEQ ID NO: 1947480 - RNA, 19 nt, Artificial Sequence
  Description of Artificial Sequence: Synthetic oligonucleotide
auaauuggugaguaucucu

SEQ ID NO: 1947481 - RNA, 19 nt, Artificial Sequence
  Description of Artificial Sequence: Synthetic oligonucleotide
uucucacacgccaagucag

SEQ ID NO: 1947482 - RNA, 19 nt, Artificial Sequence
  Description of Artificial Sequence: Synthetic oligonucleotide
gacuuuucaccguaucucc

SEQ ID NO: 1947483 - RNA, 19 nt, Artificial Sequence
  Description of Artificial Sequence: Synthetic oligonucleotide
aacacuuaucaguuuugcu

SEQ ID NO: 1947484 - RNA, 19 nt, Artificial Sequence
  Description of Artificial Sequence: Synthetic oligonucleotide
caaauaacacgcucaggcc

SEQ ID NO: 1947485 - RNA, 19 nt, Artificial Sequence
  Description of Artificial Sequence: Synthetic oligonucleotide
ucgcucuuugcccagaaga

SEQ ID NO: 1947486 - RNA, 19 nt, Artificial Sequence
  Description of Artificial Sequence: Synthetic oligonucleotide
guaaaagcccuuuguaggc

SEQ ID NO: 1947487 - RNA, 19 nt, Artificial Sequence
  Description of Artificial Sequence: Synthetic oligonucleotide
uugccaaguauuuccaagc

SEQ ID NO: 1947488 - RNA, 19 nt, Artificial Sequence
  Description of Artificial Sequence: Synthetic oligonucleotide
ucaaucucugacaguuccg

SEQ ID NO: 1947489 - RNA, 19 nt, Artificial Sequence
  Description of Artificial Sequence: Synthetic oligonucleotide
ucauccuuaucaaucucug

SEQ ID NO: 1947490 - RNA, 19 nt, Artificial Sequence
  Description of Artificial Sequence: Synthetic oligonucleotide
uuugcaucccucaagcuuu

SEQ ID NO: 1947491 - RNA, 19 nt, Artificial Sequence
  Description of Artificial Sequence: Synthetic oligonucleotide
cacgaaaggaucccaaacc

SEQ ID NO: 1947492 - RNA, 19 nt, Artificial Sequence
  Description of Artificial Sequence: Synthetic oligonucleotide
uuauguucuuagugcaucc

SEQ ID NO: 1947493 - RNA, 19 nt, Artificial Sequence
  Description of Artificial Sequence: Synthetic oligonucleotide
guauaugugggcgauucgg

SEQ ID NO: 1947494 - RNA, 19 nt, Artificial Sequence
  Description of Artificial Sequence: Synthetic oligonucleotide
aagcauaaucauccuuauc

SEQ ID NO: 1947495 - RNA, 19 nt, Artificial Sequence
  Description of Artificial Sequence: Synthetic oligonucleotide
caaucuaggugcaaacuac

SEQ ID NO: 1947496 - RNA, 19 nt, Artificial Sequence
  Description of Artificial Sequence: Synthetic oligonucleotide
gaacuuuucaucauacgca

SEQ ID NO: 1947497 - RNA, 19 nt, Artificial Sequence
  Description of Artificial Sequence: Synthetic oligonucleotide
ugaagugaaaggugggcca

SEQ ID NO: 1947498 - RNA, 19 nt, Artificial Sequence
  Description of Artificial Sequence: Synthetic oligonucleotide
uuugacacacuucuucauc

SEQ ID NO: 1947499 - RNA, 19 nt, Artificial Sequence
  Description of Artificial Sequence: Synthetic oligonucleotide
gaugggauggcacaaucuc

SEQ ID NO: 1947500 - RNA, 19 nt, Artificial Sequence
  Description of Artificial Sequence: Synthetic oligonucleotide
aaggaaaucuuuaaauaau

SEQ ID NO: 1947501 - RNA, 19 nt, Artificial Sequence
  Description of Artificial Sequence: Synthetic oligonucleotide
ugauuaacacuuccugaga

SEQ ID NO: 1947502 - RNA, 19 nt, Artificial Sequence
  Description of Artificial Sequence: Synthetic oligonucleotide
cauaacucuucacgaaagg

SEQ ID NO: 1947503 - RNA, 19 nt, Artificial Sequence
  Description of Artificial Sequence: Synthetic oligonucleotide
ucacgaaaggaucccaaac

SEQ ID NO: 1947504 - RNA, 19 nt, Artificial Sequence
  Description of Artificial Sequence: Synthetic oligonucleotide
uccuuaucaaucucugaca

SEQ ID NO: 1947505 - RNA, 19 nt, Artificial Sequence
  Description of Artificial Sequence: Synthetic oligonucleotide
auaccgaaaauaucuacaa

SEQ ID NO: 1947506 - RNA, 19 nt, Artificial Sequence
  Description of Artificial Sequence: Synthetic oligonucleotide
acauccacucuucuucaac

SEQ ID NO: 1947507 - RNA, 19 nt, Artificial Sequence
  Description of Artificial Sequence: Synthetic oligonucleotide
agaggacgacuuuucaccg

SEQ ID NO: 1947508 - RNA, 19 nt, Artificial Sequence
  Description of Artificial Sequence: Synthetic oligonucleotide
uguaggggaacuuuucauc

SEQ ID NO: 1947509 - RNA, 19 nt, Artificial Sequence
  Description of Artificial Sequence: Synthetic oligonucleotide
gcaguuauguucuuagugc

SEQ ID NO: 1947510 - RNA, 19 nt, Artificial Sequence
  Description of Artificial Sequence: Synthetic oligonucleotide
uucuucuagacauccacuc

SEQ ID NO: 1947511 - RNA, 19 nt, Artificial Sequence
  Description of Artificial Sequence: Synthetic oligonucleotide
uccauuaaugucugcuuca

SEQ ID NO: 1947512 - RNA, 19 nt, Artificial Sequence
  Description of Artificial Sequence: Synthetic oligonucleotide
gauacaaugcauguuguaa

SEQ ID NO: 1947513 - RNA, 19 nt, Artificial Sequence
  Description of Artificial Sequence: Synthetic oligonucleotide
guugauuaacacuuccuga

SEQ ID NO: 1947514 - RNA, 19 nt, Artificial Sequence
  Description of Artificial Sequence: Synthetic oligonucleotide
cauccacucuucuucaacc

SEQ ID NO: 1947515 - RNA, 19 nt, Artificial Sequence
  Description of Artificial Sequence: Synthetic oligonucleotide
auccgcuuaauuuucuucu

SEQ ID NO: 1947516 - RNA, 19 nt, Artificial Sequence
  Description of Artificial Sequence: Synthetic oligonucleotide
uuaucacauguaaaacaac

SEQ ID NO: 1947517 - RNA, 19 nt, Artificial Sequence
  Description of Artificial Sequence: Synthetic oligonucleotide
uccaacauuaguggauggg

SEQ ID NO: 1947518 - RNA, 19 nt, Artificial Sequence
  Description of Artificial Sequence: Synthetic oligonucleotide
uuacaaucuaggugcaaac

SEQ ID NO: 1947519 - RNA, 19 nt, Artificial Sequence
  Description of Artificial Sequence: Synthetic oligonucleotide
acaagguugauuaacacuu

SEQ ID NO: 1947520 - RNA, 19 nt, Artificial Sequence
  Description of Artificial Sequence: Synthetic oligonucleotide
caaccuuuuccuaaaagga

SEQ ID NO: 1947521 - RNA, 19 nt, Artificial Sequence
  Description of Artificial Sequence: Synthetic oligonucleotide
ucacagaauucuagcaucu

SEQ ID NO: 1947522 - RNA, 19 nt, Artificial Sequence
  Description of Artificial Sequence: Synthetic oligonucleotide
auauuguaaaagcccuuug

SEQ ID NO: 1947523 - RNA, 19 nt, Artificial Sequence
  Description of Artificial Sequence: Synthetic oligonucleotide
aaaagcccuuuguaggccu

SEQ ID NO: 1947524 - RNA, 19 nt, Artificial Sequence
  Description of Artificial Sequence: Synthetic oligonucleotide
cucacagaauucuagcauc

SEQ ID NO: 1947525 - RNA, 19 nt, Artificial Sequence
  Description of Artificial Sequence: Synthetic oligonucleotide
ucuacaaccuuuuccuaaa

SEQ ID NO: 1947526 - RNA, 19 nt, Artificial Sequence
  Description of Artificial Sequence: Synthetic oligonucleotide
gauggcacaaucucaugca

SEQ ID NO: 1947527 - RNA, 19 nt, Artificial Sequence
  Description of Artificial Sequence: Synthetic oligonucleotide
ucuucuagacauccacucu

SEQ ID NO: 1947528 - RNA, 19 nt, Artificial Sequence
  Description of Artificial Sequence: Synthetic oligonucleotide
ugaucuuguuuuacaauau

SEQ ID NO: 1947529 - RNA, 19 nt, Artificial Sequence
  Description of Artificial Sequence: Synthetic oligonucleotide
acucuucacgaaaggaucc

SEQ ID NO: 1947530 - RNA, 19 nt, Artificial Sequence
  Description of Artificial Sequence: Synthetic oligonucleotide
aauucaggacaccaauauu

SEQ ID NO: 1947531 - RNA, 19 nt, Artificial Sequence
  Description of Artificial Sequence: Synthetic oligonucleotide
aaacuaccuggauuuacaa

SEQ ID NO: 1947532 - RNA, 19 nt, Artificial Sequence
  Description of Artificial Sequence: Synthetic oligonucleotide
aucaaggaauucaaauaac

SEQ ID NO: 1947533 - RNA, 19 nt, Artificial Sequence
  Description of Artificial Sequence: Synthetic oligonucleotide
ugagaggacgacuuuucac

SEQ ID NO: 1947534 - RNA, 19 nt, Artificial Sequence
  Description of Artificial Sequence: Synthetic oligonucleotide
ggcgauucggguuuguagg

SEQ ID NO: 1947535 - RNA, 19 nt, Artificial Sequence
  Description of Artificial Sequence: Synthetic oligonucleotide
ucucucgggcuccaucucg

SEQ ID NO: 1947536 - RNA, 19 nt, Artificial Sequence
  Description of Artificial Sequence: Synthetic oligonucleotide
augcuuguagacguccugc

SEQ ID NO: 1947537 - RNA, 19 nt, Artificial Sequence
  Description of Artificial Sequence: Synthetic oligonucleotide
cacuacaaaagcuuucuca

SEQ ID NO: 1947538 - RNA, 19 nt, Artificial Sequence
  Description of Artificial Sequence: Synthetic oligonucleotide
uuccuaaaaggauucccac

SEQ ID NO: 1947539 - RNA, 19 nt, Artificial Sequence
  Description of Artificial Sequence: Synthetic oligonucleotide
acaaucuaggugcaaacua

SEQ ID NO: 1947540 - RNA, 19 nt, Artificial Sequence
  Description of Artificial Sequence: Synthetic oligonucleotide
aguauaugugggcgauucg

SEQ ID NO: 1947541 - RNA, 19 nt, Artificial Sequence
  Description of Artificial Sequence: Synthetic oligonucleotide
ucaagguuucaugaucuug

SEQ ID NO: 1947542 - RNA, 19 nt, Artificial Sequence
  Description of Artificial Sequence: Synthetic oligonucleotide
uucaaauaacacgcucagg

SEQ ID NO: 1947543 - RNA, 19 nt, Artificial Sequence
  Description of Artificial Sequence: Synthetic oligonucleotide
aauaacacgcucaggccca

SEQ ID NO: 1947544 - RNA, 19 nt, Artificial Sequence
  Description of Artificial Sequence: Synthetic oligonucleotide
ugccaaguauuuccaagca

SEQ ID NO: 1947545 - RNA, 19 nt, Artificial Sequence
  Description of Artificial Sequence: Synthetic oligonucleotide
uuuucaccguaucuccaug

SEQ ID NO: 1947546 - RNA, 19 nt, Artificial Sequence
  Description of Artificial Sequence: Synthetic oligonucleotide
aacuaccuggauuuacaau

SEQ ID NO: 1947547 - RNA, 19 nt, Artificial Sequence
  Description of Artificial Sequence: Synthetic oligonucleotide
gugugauauuguaaaagcc

SEQ ID NO: 1947548 - RNA, 19 nt, Artificial Sequence
  Description of Artificial Sequence: Synthetic oligonucleotide
auaacucuucacgaaagga

SEQ ID NO: 1947549 - RNA, 19 nt, Artificial Sequence
  Description of Artificial Sequence: Synthetic oligonucleotide
gaacacuuaucaguuuugc

SEQ ID NO: 1947550 - RNA, 19 nt, Artificial Sequence
  Description of Artificial Sequence: Synthetic oligonucleotide
cauacgcauaauuggugag

SEQ ID NO: 1947551 - RNA, 19 nt, Artificial Sequence
  Description of Artificial Sequence: Synthetic oligonucleotide
ucuuagugcauccggcaaa

SEQ ID NO: 1947552 - RNA, 19 nt, Artificial Sequence
  Description of Artificial Sequence: Synthetic oligonucleotide
aauauaccgaaaauaucua

SEQ ID NO: 1947553 - RNA, 19 nt, Artificial Sequence
  Description of Artificial Sequence: Synthetic oligonucleotide
guaggggaacuuuucauca

SEQ ID NO: 1947554 - RNA, 19 nt, Artificial Sequence
  Description of Artificial Sequence: Synthetic oligonucleotide
uaccgaaaauaucuacaac

SEQ ID NO: 1947555 - RNA, 19 nt, Artificial Sequence
  Description of Artificial Sequence: Synthetic oligonucleotide
guuguaaggaaaucuuuaa

SEQ ID NO: 1947556 - RNA, 19 nt, Artificial Sequence
  Description of Artificial Sequence: Synthetic oligonucleotide
aagugaaaggugggccacc

SEQ ID NO: 1947557 - RNA, 19 nt, Artificial Sequence
  Description of Artificial Sequence: Synthetic oligonucleotide
aucuacaaccuuuuccuaa

SEQ ID NO: 1947558 - RNA, 19 nt, Artificial Sequence
  Description of Artificial Sequence: Synthetic oligonucleotide
cuuuguaggccugaacaag

SEQ ID NO: 1947559 - RNA, 19 nt, Artificial Sequence
  Description of Artificial Sequence: Synthetic oligonucleotide
acgacuuuucaccguaucu

SEQ ID NO: 1947560 - RNA, 19 nt, Artificial Sequence
  Description of Artificial Sequence: Synthetic oligonucleotide
cugaacaagguugauuaac

SEQ ID NO: 1947561 - RNA, 19 nt, Artificial Sequence
  Description of Artificial Sequence: Synthetic oligonucleotide
aaucucaugcaaaaucuuu

SEQ ID NO: 1947562 - RNA, 19 nt, Artificial Sequence
  Description of Artificial Sequence: Synthetic oligonucleotide
uuccaacauuaguggaugg

SEQ ID NO: 1947563 - RNA, 19 nt, Artificial Sequence
  Description of Artificial Sequence: Synthetic oligonucleotide
caacguguggaauuccaac

SEQ ID NO: 1947564 - RNA, 19 nt, Artificial Sequence
  Description of Artificial Sequence: Synthetic oligonucleotide
agguguaagcauaaucauc

SEQ ID NO: 1947565 - RNA, 19 nt, Artificial Sequence
  Description of Artificial Sequence: Synthetic oligonucleotide
acauguaaaacaacuuaca

SEQ ID NO: 1947566 - RNA, 19 nt, Artificial Sequence
  Description of Artificial Sequence: Synthetic oligonucleotide
uaagcauaaucauccuuau

SEQ ID NO: 1947567 - RNA, 19 nt, Artificial Sequence
  Description of Artificial Sequence: Synthetic oligonucleotide
gaauucuagcaucuccaca

SEQ ID NO: 1947568 - RNA, 19 nt, Artificial Sequence
  Description of Artificial Sequence: Synthetic oligonucleotide
acauaacucuucacgaaag

SEQ ID NO: 1947569 - RNA, 19 nt, Artificial Sequence
  Description of Artificial Sequence: Synthetic oligonucleotide
ucaccguaucuccaugucu

SEQ ID NO: 1947570 - RNA, 19 nt, Artificial Sequence
  Description of Artificial Sequence: Synthetic oligonucleotide
ugggauggcacaaucucau

SEQ ID NO: 1947571 - RNA, 19 nt, Artificial Sequence
  Description of Artificial Sequence: Synthetic oligonucleotide
uuagcagugcacagaugcu

SEQ ID NO: 1947572 - RNA, 19 nt, Artificial Sequence
  Description of Artificial Sequence: Synthetic oligonucleotide
aggauucccacuacaaaag

SEQ ID NO: 1947573 - RNA, 19 nt, Artificial Sequence
  Description of Artificial Sequence: Synthetic oligonucleotide
uucuuagugcauccggcaa

SEQ ID NO: 1947574 - RNA, 19 nt, Artificial Sequence
  Description of Artificial Sequence: Synthetic oligonucleotide
cugagguguaagcauaauc

SEQ ID NO: 1947575 - RNA, 19 nt, Artificial Sequence
  Description of Artificial Sequence: Synthetic oligonucleotide
uacaaucuaggugcaaacu

SEQ ID NO: 1947576 - RNA, 19 nt, Artificial Sequence
  Description of Artificial Sequence: Synthetic oligonucleotide
uuucaccguaucuccaugu

SEQ ID NO: 1947577 - RNA, 19 nt, Artificial Sequence
  Description of Artificial Sequence: Synthetic oligonucleotide
uuuuggaccaagugugaua

SEQ ID NO: 1947578 - RNA, 19 nt, Artificial Sequence
  Description of Artificial Sequence: Synthetic oligonucleotide
ggauggcacaaucucaugc

SEQ ID NO: 1947579 - RNA, 19 nt, Artificial Sequence
  Description of Artificial Sequence: Synthetic oligonucleotide
ucaacccauaccagauggc

SEQ ID NO: 1947580 - RNA, 19 nt, Artificial Sequence
  Description of Artificial Sequence: Synthetic oligonucleotide
auuuucuaagcaacgugug

SEQ ID NO: 1947581 - RNA, 19 nt, Artificial Sequence
  Description of Artificial Sequence: Synthetic oligonucleotide
uuccagucgcucuuugccc

SEQ ID NO: 1947582 - RNA, 19 nt, Artificial Sequence
  Description of Artificial Sequence: Synthetic oligonucleotide
uucuagacauccacucuuc

SEQ ID NO: 1947583 - RNA, 19 nt, Artificial Sequence
  Description of Artificial Sequence: Synthetic oligonucleotide
caccguaucuccaugucuc

SEQ ID NO: 1947584 - RNA, 19 nt, Artificial Sequence
  Description of Artificial Sequence: Synthetic oligonucleotide
caacccauaccagauggcc

SEQ ID NO: 1947585 - RNA, 19 nt, Artificial Sequence
  Description of Artificial Sequence: Synthetic oligonucleotide
uuucaugaucuuguuuuac

SEQ ID NO: 1947586 - RNA, 19 nt, Artificial Sequence
  Description of Artificial Sequence: Synthetic oligonucleotide
ucgauccucacagaauucu

SEQ ID NO: 1947587 - RNA, 19 nt, Artificial Sequence
  Description of Artificial Sequence: Synthetic oligonucleotide
guuauguucuuagugcauc

SEQ ID NO: 1947588 - RNA, 19 nt, Artificial Sequence
  Description of Artificial Sequence: Synthetic oligonucleotide
aagcaacguguggaauucc

SEQ ID NO: 1947589 - RNA, 19 nt, Artificial Sequence
  Description of Artificial Sequence: Synthetic oligonucleotide
ugauauuguaaaagcccuu

SEQ ID NO: 1947590 - RNA, 19 nt, Artificial Sequence
  Description of Artificial Sequence: Synthetic oligonucleotide
agauuucuguuugcauccc

SEQ ID NO: 1947591 - RNA, 19 nt, Artificial Sequence
  Description of Artificial Sequence: Synthetic oligonucleotide
auaugugggcgauucgggu

SEQ ID NO: 1947592 - RNA, 19 nt, Artificial Sequence
  Description of Artificial Sequence: Synthetic oligonucleotide
uaagcaacguguggaauuc

SEQ ID NO: 1947593 - RNA, 19 nt, Artificial Sequence
  Description of Artificial Sequence: Synthetic oligonucleotide
ucuccaugucucugcauca

SEQ ID NO: 1947594 - RNA, 19 nt, Artificial Sequence
  Description of Artificial Sequence: Synthetic oligonucleotide
cuuucucacacgccaaguc

SEQ ID NO: 1947595 - RNA, 19 nt, Artificial Sequence
  Description of Artificial Sequence: Synthetic oligonucleotide
uucacgaaaggaucccaaa

SEQ ID NO: 1947596 - RNA, 19 nt, Artificial Sequence
  Description of Artificial Sequence: Synthetic oligonucleotide
gugaguaucucucgggcuc

SEQ ID NO: 1947597 - RNA, 19 nt, Artificial Sequence
  Description of Artificial Sequence: Synthetic oligonucleotide
ccuuaucaaucucugacag

SEQ ID NO: 1947598 - RNA, 19 nt, Artificial Sequence
  Description of Artificial Sequence: Synthetic oligonucleotide
uuguaggccugaacaaggu

SEQ ID NO: 1947599 - RNA, 19 nt, Artificial Sequence
  Description of Artificial Sequence: Synthetic oligonucleotide
gcauccggcaaaaucaagg

SEQ ID NO: 1947600 - RNA, 19 nt, Artificial Sequence
  Description of Artificial Sequence: Synthetic oligonucleotide
cuucuucaacccauaccag

SEQ ID NO: 1947601 - RNA, 19 nt, Artificial Sequence
  Description of Artificial Sequence: Synthetic oligonucleotide
auaaguauaugugggcgau

SEQ ID NO: 1947602 - RNA, 19 nt, Artificial Sequence
  Description of Artificial Sequence: Synthetic oligonucleotide
cauccgcuuaauuuucuuc

SEQ ID NO: 1947603 - RNA, 19 nt, Artificial Sequence
  Description of Artificial Sequence: Synthetic oligonucleotide
agcuuucucacacgccaag

SEQ ID NO: 1947604 - RNA, 19 nt, Artificial Sequence
  Description of Artificial Sequence: Synthetic oligonucleotide
uaccagauggccuuccauu

SEQ ID NO: 1947605 - RNA, 19 nt, Artificial Sequence
  Description of Artificial Sequence: Synthetic oligonucleotide
ugacaguuccguuuucuuu

SEQ ID NO: 1947606 - RNA, 19 nt, Artificial Sequence
  Description of Artificial Sequence: Synthetic oligonucleotide
ucucacacgccaagucagc

SEQ ID NO: 1947607 - RNA, 19 nt, Artificial Sequence
  Description of Artificial Sequence: Synthetic oligonucleotide
uccagucgcucuuugccca

SEQ ID NO: 1947608 - RNA, 19 nt, Artificial Sequence
  Description of Artificial Sequence: Synthetic oligonucleotide
ugcauccggcaaaaucaag

SEQ ID NO: 1947609 - RNA, 19 nt, Artificial Sequence
  Description of Artificial Sequence: Synthetic oligonucleotide
aucauacgcauaauuggug

SEQ ID NO: 1947610 - RNA, 19 nt, Artificial Sequence
  Description of Artificial Sequence: Synthetic oligonucleotide
aagguuucaugaucuuguu

SEQ ID NO: 1947611 - RNA, 19 nt, Artificial Sequence
  Description of Artificial Sequence: Synthetic oligonucleotide
gaucuuguuuuacaauaua

SEQ ID NO: 1947612 - RNA, 19 nt, Artificial Sequence
  Description of Artificial Sequence: Synthetic oligonucleotide
ugccuucucucucuugaga

SEQ ID NO: 1947613 - RNA, 19 nt, Artificial Sequence
  Description of Artificial Sequence: Synthetic oligonucleotide
ucagacacuuugccaagua

SEQ ID NO: 1947614 - RNA, 19 nt, Artificial Sequence
  Description of Artificial Sequence: Synthetic oligonucleotide
gggaacuuuucaucauacg

SEQ ID NO: 1947615 - RNA, 19 nt, Artificial Sequence
  Description of Artificial Sequence: Synthetic oligonucleotide
auaagauacaaugcauguu

SEQ ID NO: 1947616 - RNA, 19 nt, Artificial Sequence
  Description of Artificial Sequence: Synthetic oligonucleotide
uaugugggcgauucggguu

SEQ ID NO: 1947617 - RNA, 19 nt, Artificial Sequence
  Description of Artificial Sequence: Synthetic oligonucleotide
uacgcauaauuggugagua

SEQ ID NO: 1947618 - RNA, 19 nt, Artificial Sequence
  Description of Artificial Sequence: Synthetic oligonucleotide
uguuugcaucccucaagcu

SEQ ID NO: 1947619 - RNA, 19 nt, Artificial Sequence
  Description of Artificial Sequence: Synthetic oligonucleotide
guucuuagugcauccggca

SEQ ID NO: 1947620 - RNA, 19 nt, Artificial Sequence
  Description of Artificial Sequence: Synthetic oligonucleotide
acacuuugccaaguauuuc

SEQ ID NO: 1947621 - RNA, 19 nt, Artificial Sequence
  Description of Artificial Sequence: Synthetic oligonucleotide
cuuacaaucuaggugcaaa

SEQ ID NO: 1947622 - RNA, 19 nt, Artificial Sequence
  Description of Artificial Sequence: Synthetic oligonucleotide
uaggugcaaacuaccugga

SEQ ID NO: 1947623 - RNA, 19 nt, Artificial Sequence
  Description of Artificial Sequence: Synthetic oligonucleotide
acguguggaauuccaacau

SEQ ID NO: 1947624 - RNA, 19 nt, Artificial Sequence
  Description of Artificial Sequence: Synthetic oligonucleotide
cauccggcaaaaucaagga

SEQ ID NO: 1947625 - RNA, 19 nt, Artificial Sequence
  Description of Artificial Sequence: Synthetic oligonucleotide
cauaauuggugaguaucuc

SEQ ID NO: 1947626 - RNA, 19 nt, Artificial Sequence
  Description of Artificial Sequence: Synthetic oligonucleotide
ugguguucuucugugucug

SEQ ID NO: 1947627 - RNA, 19 nt, Artificial Sequence
  Description of Artificial Sequence: Synthetic oligonucleotide
cuggauuuacaauacuaua

SEQ ID NO: 1947628 - RNA, 19 nt, Artificial Sequence
  Description of Artificial Sequence: Synthetic oligonucleotide
auacgcauaauuggugagu

SEQ ID NO: 1947629 - RNA, 19 nt, Artificial Sequence
  Description of Artificial Sequence: Synthetic oligonucleotide
gaagugaaaggugggccac

SEQ ID NO: 1947630 - RNA, 19 nt, Artificial Sequence
  Description of Artificial Sequence: Synthetic oligonucleotide
aacccauaccagauggccu

SEQ ID NO: 1947631 - RNA, 19 nt, Artificial Sequence
  Description of Artificial Sequence: Synthetic oligonucleotide
aggaucccaaaccccagga

SEQ ID NO: 1947632 - RNA, 19 nt, Artificial Sequence
  Description of Artificial Sequence: Synthetic oligonucleotide
auuaguggaugggauggca

SEQ ID NO: 1947633 - RNA, 19 nt, Artificial Sequence
  Description of Artificial Sequence: Synthetic oligonucleotide
agauacaaugcauguugua

SEQ ID NO: 1947634 - RNA, 19 nt, Artificial Sequence
  Description of Artificial Sequence: Synthetic oligonucleotide
ugaguaucucucgggcucc

SEQ ID NO: 1947635 - RNA, 19 nt, Artificial Sequence
  Description of Artificial Sequence: Synthetic oligonucleotide
cacacgccaagucagcauc

SEQ ID NO: 1947636 - RNA, 19 nt, Artificial Sequence
  Description of Artificial Sequence: Synthetic oligonucleotide
ucuucacgaaaggauccca

SEQ ID NO: 1947637 - RNA, 19 nt, Artificial Sequence
  Description of Artificial Sequence: Synthetic oligonucleotide
gcaucugccuuccagucgc

SEQ ID NO: 1947638 - RNA, 19 nt, Artificial Sequence
  Description of Artificial Sequence: Synthetic oligonucleotide
caucauacgcauaauuggu

SEQ ID NO: 1947639 - RNA, 19 nt, Artificial Sequence
  Description of Artificial Sequence: Synthetic oligonucleotide
ccaagugugauauuguaaa

SEQ ID NO: 1947640 - RNA, 19 nt, Artificial Sequence
  Description of Artificial Sequence: Synthetic oligonucleotide
gacgacuuuucaccguauc

SEQ ID NO: 1947641 - RNA, 19 nt, Artificial Sequence
  Description of Artificial Sequence: Synthetic oligonucleotide
gauggccuuccauuaaugu

SEQ ID NO: 1947642 - RNA, 19 nt, Artificial Sequence
  Description of Artificial Sequence: Synthetic oligonucleotide
ggauucccacuacaaaagc

SEQ ID NO: 1947643 - RNA, 19 nt, Artificial Sequence
  Description of Artificial Sequence: Synthetic oligonucleotide
cagaugcuuguagacgucc

SEQ ID NO: 1947644 - RNA, 19 nt, Artificial Sequence
  Description of Artificial Sequence: Synthetic oligonucleotide
cuuaucaguuuugcucuug

SEQ ID NO: 1947645 - RNA, 19 nt, Artificial Sequence
  Description of Artificial Sequence: Synthetic oligonucleotide
cucuucacgaaaggauccc

SEQ ID NO: 1947646 - RNA, 19 nt, Artificial Sequence
  Description of Artificial Sequence: Synthetic oligonucleotide
gccaaguauuuccaagcag

SEQ ID NO: 1947647 - RNA, 19 nt, Artificial Sequence
  Description of Artificial Sequence: Synthetic oligonucleotide
gauauuguaaaagcccuuu

SEQ ID NO: 1947648 - RNA, 19 nt, Artificial Sequence
  Description of Artificial Sequence: Synthetic oligonucleotide
cucaugcaaaaucuuuaga

SEQ ID NO: 1947649 - RNA, 19 nt, Artificial Sequence
  Description of Artificial Sequence: Synthetic oligonucleotide
ugcauguuguaaggaaauc

SEQ ID NO: 1947650 - RNA, 19 nt, Artificial Sequence
  Description of Artificial Sequence: Synthetic oligonucleotide
ucuaagcaacguguggaau

SEQ ID NO: 1947651 - RNA, 19 nt, Artificial Sequence
  Description of Artificial Sequence: Synthetic oligonucleotide
aaugucugcuucagacacu

SEQ ID NO: 1947652 - RNA, 19 nt, Artificial Sequence
  Description of Artificial Sequence: Synthetic oligonucleotide
acccauaccagauggccuu

SEQ ID NO: 1947653 - RNA, 19 nt, Artificial Sequence
  Description of Artificial Sequence: Synthetic oligonucleotide
agguugauuaacacuuccu

SEQ ID NO: 1947654 - RNA, 19 nt, Artificial Sequence
  Description of Artificial Sequence: Synthetic oligonucleotide
auaauucaggacaccaaua

SEQ ID NO: 1947655 - RNA, 19 nt, Artificial Sequence
  Description of Artificial Sequence: Synthetic oligonucleotide
aacuuacaaucuaggugca

SEQ ID NO: 1947656 - RNA, 19 nt, Artificial Sequence
  Description of Artificial Sequence: Synthetic oligonucleotide
cuuuuccaugauguauaag

SEQ ID NO: 1947657 - RNA, 19 nt, Artificial Sequence
  Description of Artificial Sequence: Synthetic oligonucleotide
cacugagauuucuguuugc

SEQ ID NO: 1947658 - RNA, 19 nt, Artificial Sequence
  Description of Artificial Sequence: Synthetic oligonucleotide
aggacgacuuuucaccgua

SEQ ID NO: 1947659 - RNA, 19 nt, Artificial Sequence
  Description of Artificial Sequence: Synthetic oligonucleotide
cacagaugcuuguagacgu

SEQ ID NO: 1947660 - RNA, 19 nt, Artificial Sequence
  Description of Artificial Sequence: Synthetic oligonucleotide
gauucccacuacaaaagcu

SEQ ID NO: 1947661 - RNA, 19 nt, Artificial Sequence
  Description of Artificial Sequence: Synthetic oligonucleotide
auaccagauggccuuccau

SEQ ID NO: 1947662 - RNA, 19 nt, Artificial Sequence
  Description of Artificial Sequence: Synthetic oligonucleotide
guauuuccaagcaguuaug

SEQ ID NO: 1947663 - RNA, 19 nt, Artificial Sequence
  Description of Artificial Sequence: Synthetic oligonucleotide
cucugguugcccgaguuuc

SEQ ID NO: 1947664 - RNA, 19 nt, Artificial Sequence
  Description of Artificial Sequence: Synthetic oligonucleotide
cauguuguaaggaaaucuu

SEQ ID NO: 1947665 - RNA, 19 nt, Artificial Sequence
  Description of Artificial Sequence: Synthetic oligonucleotide
ucggguuuguaggggaacu

SEQ ID NO: 1947666 - RNA, 19 nt, Artificial Sequence
  Description of Artificial Sequence: Synthetic oligonucleotide
auccggcaaaaucaaggaa

SEQ ID NO: 1947667 - RNA, 19 nt, Artificial Sequence
  Description of Artificial Sequence: Synthetic oligonucleotide
guggaauuccaacauuagu

SEQ ID NO: 1947668 - RNA, 19 nt, Artificial Sequence
  Description of Artificial Sequence: Synthetic oligonucleotide
ucacacgccaagucagcau

SEQ ID NO: 1947669 - RNA, 19 nt, Artificial Sequence
  Description of Artificial Sequence: Synthetic oligonucleotide
guagacguccugcagcucu

SEQ ID NO: 1947670 - RNA, 19 nt, Artificial Sequence
  Description of Artificial Sequence: Synthetic oligonucleotide
uugcccagaagaagcugaa

SEQ ID NO: 1947671 - RNA, 19 nt, Artificial Sequence
  Description of Artificial Sequence: Synthetic oligonucleotide
agguuucaugaucuuguuu

SEQ ID NO: 1947672 - RNA, 19 nt, Artificial Sequence
  Description of Artificial Sequence: Synthetic oligonucleotide
gggcgauucggguuuguag

SEQ ID NO: 1947673 - RNA, 19 nt, Artificial Sequence
  Description of Artificial Sequence: Synthetic oligonucleotide
aucuaggugcaaacuaccu

SEQ ID NO: 1947674 - RNA, 19 nt, Artificial Sequence
  Description of Artificial Sequence: Synthetic oligonucleotide
ucauccgcuuaauuuucuu

SEQ ID NO: 1947675 - RNA, 19 nt, Artificial Sequence
  Description of Artificial Sequence: Synthetic oligonucleotide
agugaaaggugggccacca

SEQ ID NO: 1947676 - RNA, 19 nt, Artificial Sequence
  Description of Artificial Sequence: Synthetic oligonucleotide
caagugugauauuguaaaa

SEQ ID NO: 1947677 - RNA, 19 nt, Artificial Sequence
  Description of Artificial Sequence: Synthetic oligonucleotide
gcgauucggguuuguaggg

SEQ ID NO: 1947678 - RNA, 19 nt, Artificial Sequence
  Description of Artificial Sequence: Synthetic oligonucleotide
cauuaguggaugggauggc

SEQ ID NO: 1947679 - RNA, 19 nt, Artificial Sequence
  Description of Artificial Sequence: Synthetic oligonucleotide
accaagugugauauuguaa

SEQ ID NO: 1947680 - RNA, 19 nt, Artificial Sequence
  Description of Artificial Sequence: Synthetic oligonucleotide
uucaagguuucaugaucuu

SEQ ID NO: 1947681 - RNA, 19 nt, Artificial Sequence
  Description of Artificial Sequence: Synthetic oligonucleotide
guaaaacaacuuacaaucu

SEQ ID NO: 1947682 - RNA, 19 nt, Artificial Sequence
  Description of Artificial Sequence: Synthetic oligonucleotide
gcaucccucaagcuuuucc

SEQ ID NO: 1947683 - RNA, 19 nt, Artificial Sequence
  Description of Artificial Sequence: Synthetic oligonucleotide
guguggaauuccaacauua

SEQ ID NO: 1947684 - RNA, 19 nt, Artificial Sequence
  Description of Artificial Sequence: Synthetic oligonucleotide
caucucgauccucacagaa

SEQ ID NO: 1947685 - RNA, 19 nt, Artificial Sequence
  Description of Artificial Sequence: Synthetic oligonucleotide
augugggcgauucggguuu

SEQ ID NO: 1947686 - RNA, 19 nt, Artificial Sequence
  Description of Artificial Sequence: Synthetic oligonucleotide
cucgauccucacagaauuc

SEQ ID NO: 1947687 - RNA, 19 nt, Artificial Sequence
  Description of Artificial Sequence: Synthetic oligonucleotide
guaucucucgggcuccauc

SEQ ID NO: 1947688 - RNA, 19 nt, Artificial Sequence
  Description of Artificial Sequence: Synthetic oligonucleotide
acagaugcuuguagacguc

SEQ ID NO: 1947689 - RNA, 19 nt, Artificial Sequence
  Description of Artificial Sequence: Synthetic oligonucleotide
accguaucuccaugucucu

SEQ ID NO: 1947690 - RNA, 19 nt, Artificial Sequence
  Description of Artificial Sequence: Synthetic oligonucleotide
auguuguaaggaaaucuuu

SEQ ID NO: 1947691 - RNA, 19 nt, Artificial Sequence
  Description of Artificial Sequence: Synthetic oligonucleotide
aaagcccuuuguaggccug

SEQ ID NO: 1947692 - RNA, 19 nt, Artificial Sequence
  Description of Artificial Sequence: Synthetic oligonucleotide
cauccuuaucaaucucuga

SEQ ID NO: 1947693 - RNA, 19 nt, Artificial Sequence
  Description of Artificial Sequence: Synthetic oligonucleotide
uucggguuuguaggggaac

SEQ ID NO: 1947694 - RNA, 19 nt, Artificial Sequence
  Description of Artificial Sequence: Synthetic oligonucleotide
cuucacgaaaggaucccaa

SEQ ID NO: 1947695 - RNA, 19 nt, Artificial Sequence
  Description of Artificial Sequence: Synthetic oligonucleotide
gcugaagugaaaggugggc

SEQ ID NO: 1947696 - RNA, 19 nt, Artificial Sequence
  Description of Artificial Sequence: Synthetic oligonucleotide
ccuaaaaggauucccacua

SEQ ID NO: 1947697 - RNA, 19 nt, Artificial Sequence
  Description of Artificial Sequence: Synthetic oligonucleotide
agcaacguguggaauucca

SEQ ID NO: 1947698 - RNA, 19 nt, Artificial Sequence
  Description of Artificial Sequence: Synthetic oligonucleotide
cguaucuccaugucucugc

SEQ ID NO: 1947699 - RNA, 19 nt, Artificial Sequence
  Description of Artificial Sequence: Synthetic oligonucleotide
cuaagcaacguguggaauu

SEQ ID NO: 1947700 - RNA, 19 nt, Artificial Sequence
  Description of Artificial Sequence: Synthetic oligonucleotide
cuucuucuagacauccacu

SEQ ID NO: 1947701 - RNA, 19 nt, Artificial Sequence
  Description of Artificial Sequence: Synthetic oligonucleotide
aguuuugcucuuggugccu

SEQ ID NO: 1947702 - RNA, 19 nt, Artificial Sequence
  Description of Artificial Sequence: Synthetic oligonucleotide
gucgcucuuugcccagaag

SEQ ID NO: 1947703 - RNA, 19 nt, Artificial Sequence
  Description of Artificial Sequence: Synthetic oligonucleotide
agaugcuuguagacguccu

SEQ ID NO: 1947704 - RNA, 19 nt, Artificial Sequence
  Description of Artificial Sequence: Synthetic oligonucleotide
uaucuccaugucucugcau

SEQ ID NO: 1947705 - RNA, 19 nt, Artificial Sequence
  Description of Artificial Sequence: Synthetic oligonucleotide
aggugcaaacuaccuggau

SEQ ID NO: 1947706 - RNA, 19 nt, Artificial Sequence
  Description of Artificial Sequence: Synthetic oligonucleotide
cuucuagacauccacucuu

SEQ ID NO: 1947707 - RNA, 19 nt, Artificial Sequence
  Description of Artificial Sequence: Synthetic oligonucleotide
acgcauaauuggugaguau

SEQ ID NO: 1947708 - RNA, 19 nt, Artificial Sequence
  Description of Artificial Sequence: Synthetic oligonucleotide
ccauuaaugucugcuucag

SEQ ID NO: 1947709 - RNA, 19 nt, Artificial Sequence
  Description of Artificial Sequence: Synthetic oligonucleotide
gcaaacuaccuggauuuac

SEQ ID NO: 1947710 - RNA, 19 nt, Artificial Sequence
  Description of Artificial Sequence: Synthetic oligonucleotide
aagcccuuuguaggccuga

SEQ ID NO: 1947711 - RNA, 19 nt, Artificial Sequence
  Description of Artificial Sequence: Synthetic oligonucleotide
aucucgauccucacagaau

SEQ ID NO: 1947712 - RNA, 19 nt, Artificial Sequence
  Description of Artificial Sequence: Synthetic oligonucleotide
cugauuuucuaagcaacgu

SEQ ID NO: 1947713 - RNA, 19 nt, Artificial Sequence
  Description of Artificial Sequence: Synthetic oligonucleotide
gacauccacucuucuucaa

SEQ ID NO: 1947714 - RNA, 19 nt, Artificial Sequence
  Description of Artificial Sequence: Synthetic oligonucleotide
uaaguauaugugggcgauu

SEQ ID NO: 1947715 - RNA, 19 nt, Artificial Sequence
  Description of Artificial Sequence: Synthetic oligonucleotide
ccgaaaauaucuacaaccu

SEQ ID NO: 1947716 - RNA, 19 nt, Artificial Sequence
  Description of Artificial Sequence: Synthetic oligonucleotide
uuccugagaggacgacuuu

SEQ ID NO: 1947717 - RNA, 19 nt, Artificial Sequence
  Description of Artificial Sequence: Synthetic oligonucleotide
cuccaugucucugcaucac

SEQ ID NO: 1947718 - RNA, 19 nt, Artificial Sequence
  Description of Artificial Sequence: Synthetic oligonucleotide
cgcauaauuggugaguauc

SEQ ID NO: 1947719 - RNA, 19 nt, Artificial Sequence
  Description of Artificial Sequence: Synthetic oligonucleotide
cuuuucaccguaucuccau

SEQ ID NO: 1947720 - RNA, 19 nt, Artificial Sequence
  Description of Artificial Sequence: Synthetic oligonucleotide
gcauguuguaaggaaaucu

SEQ ID NO: 1947721 - RNA, 19 nt, Artificial Sequence
  Description of Artificial Sequence: Synthetic oligonucleotide
cauaccagauggccuucca

SEQ ID NO: 1947722 - RNA, 19 nt, Artificial Sequence
  Description of Artificial Sequence: Synthetic oligonucleotide
ccaacauuaguggauggga

SEQ ID NO: 1947723 - RNA, 19 nt, Artificial Sequence
  Description of Artificial Sequence: Synthetic oligonucleotide
acuuacaaucuaggugcaa

SEQ ID NO: 1947724 - RNA, 19 nt, Artificial Sequence
  Description of Artificial Sequence: Synthetic oligonucleotide
ugcaaacuaccuggauuua

SEQ ID NO: 1947725 - RNA, 19 nt, Artificial Sequence
  Description of Artificial Sequence: Synthetic oligonucleotide
agucgcucuuugcccagaa

SEQ ID NO: 1947726 - RNA, 19 nt, Artificial Sequence
  Description of Artificial Sequence: Synthetic oligonucleotide
agacguccugcagcucugg

SEQ ID NO: 1947727 - RNA, 19 nt, Artificial Sequence
  Description of Artificial Sequence: Synthetic oligonucleotide
acgcucaggcccaacuucu

SEQ ID NO: 1947728 - RNA, 19 nt, Artificial Sequence
  Description of Artificial Sequence: Synthetic oligonucleotide
aggcccaacuucugguguu

SEQ ID NO: 1947729 - RNA, 19 nt, Artificial Sequence
  Description of Artificial Sequence: Synthetic oligonucleotide
gcauaauuggugaguaucu

SEQ ID NO: 1947730 - RNA, 19 nt, Artificial Sequence
  Description of Artificial Sequence: Synthetic oligonucleotide
cugagauuucuguuugcau

SEQ ID NO: 1947731 - RNA, 19 nt, Artificial Sequence
  Description of Artificial Sequence: Synthetic oligonucleotide
cuacaaccuuuuccuaaaa

SEQ ID NO: 1947732 - RNA, 19 nt, Artificial Sequence
  Description of Artificial Sequence: Synthetic oligonucleotide
cucacacgccaagucagca

SEQ ID NO: 1947733 - RNA, 19 nt, Artificial Sequence
  Description of Artificial Sequence: Synthetic oligonucleotide
gaggacgacuuuucaccgu

SEQ ID NO: 1947734 - RNA, 19 nt, Artificial Sequence
  Description of Artificial Sequence: Synthetic oligonucleotide
ccuggauuuacaauacuau

SEQ ID NO: 1947735 - RNA, 19 nt, Artificial Sequence
  Description of Artificial Sequence: Synthetic oligonucleotide
cgacuuuucaccguaucuc

SEQ ID NO: 1947736 - RNA, 19 nt, Artificial Sequence
  Description of Artificial Sequence: Synthetic oligonucleotide
acacuuccugagaggacga

SEQ ID NO: 1947737 - RNA, 19 nt, Artificial Sequence
  Description of Artificial Sequence: Synthetic oligonucleotide
ugugggcgauucggguuug

SEQ ID NO: 1947738 - RNA, 19 nt, Artificial Sequence
  Description of Artificial Sequence: Synthetic oligonucleotide
ccgaguuuccaguuucuga

SEQ ID NO: 1947739 - RNA, 19 nt, Artificial Sequence
  Description of Artificial Sequence: Synthetic oligonucleotide
ggugaguaucucucgggcu

SEQ ID NO: 1947740 - RNA, 19 nt, Artificial Sequence
  Description of Artificial Sequence: Synthetic oligonucleotide
acacgccaagucagcaucu

SEQ ID NO: 1947741 - RNA, 19 nt, Artificial Sequence
  Description of Artificial Sequence: Synthetic oligonucleotide
uccaagcaguuauguucuu

SEQ ID NO: 1947742 - RNA, 19 nt, Artificial Sequence
  Description of Artificial Sequence: Synthetic oligonucleotide
auucggguuuguaggggaa

SEQ ID NO: 1947743 - RNA, 19 nt, Artificial Sequence
  Description of Artificial Sequence: Synthetic oligonucleotide
ggaauucaaauaacacgcu

SEQ ID NO: 1947744 - RNA, 19 nt, Artificial Sequence
  Description of Artificial Sequence: Synthetic oligonucleotide
acuuuucaucauacgcaua

SEQ ID NO: 1947745 - RNA, 19 nt, Artificial Sequence
  Description of Artificial Sequence: Synthetic oligonucleotide
ugggcgauucggguuugua

SEQ ID NO: 1947746 - RNA, 19 nt, Artificial Sequence
  Description of Artificial Sequence: Synthetic oligonucleotide
ccacauaacucuucacgaa

SEQ ID NO: 1947747 - RNA, 19 nt, Artificial Sequence
  Description of Artificial Sequence: Synthetic oligonucleotide
gugcauccggcaaaaucaa

SEQ ID NO: 1947748 - RNA, 19 nt, Artificial Sequence
  Description of Artificial Sequence: Synthetic oligonucleotide
cugguugcccgaguuucca

SEQ ID NO: 1947749 - RNA, 19 nt, Artificial Sequence
  Description of Artificial Sequence: Synthetic oligonucleotide
cacuuccugagaggacgac

SEQ ID NO: 1947750 - RNA, 19 nt, Artificial Sequence
  Description of Artificial Sequence: Synthetic oligonucleotide
ccacuacaaaagcuuucuc

SEQ ID NO: 1947751 - RNA, 19 nt, Artificial Sequence
  Description of Artificial Sequence: Synthetic oligonucleotide
cagauggccuuccauuaau

SEQ ID NO: 1947752 - RNA, 19 nt, Artificial Sequence
  Description of Artificial Sequence: Synthetic oligonucleotide
gguugcccgaguuuccagu

SEQ ID NO: 1947753 - RNA, 19 nt, Artificial Sequence
  Description of Artificial Sequence: Synthetic oligonucleotide
gaguaucucucgggcucca

SEQ ID NO: 1947754 - RNA, 19 nt, Artificial Sequence
  Description of Artificial Sequence: Synthetic oligonucleotide
uaacacgcucaggcccaac

SEQ ID NO: 1947755 - RNA, 19 nt, Artificial Sequence
  Description of Artificial Sequence: Synthetic oligonucleotide
aguaucucucgggcuccau

SEQ ID NO: 1947756 - RNA, 19 nt, Artificial Sequence
  Description of Artificial Sequence: Synthetic oligonucleotide
auaacacgcucaggcccaa

SEQ ID NO: 1947757 - RNA, 19 nt, Artificial Sequence
  Description of Artificial Sequence: Synthetic oligonucleotide
cgauucggguuuguagggg

SEQ ID NO: 1947758 - RNA, 19 nt, Artificial Sequence
  Description of Artificial Sequence: Synthetic oligonucleotide
gacguccugcagcucuggu

SEQ ID NO: 1947759 - RNA, 19 nt, Artificial Sequence
  Description of Artificial Sequence: Synthetic oligonucleotide
gcccuuuguaggccugaac

SEQ ID NO: 1947760 - RNA, 19 nt, Artificial Sequence
  Description of Artificial Sequence: Synthetic oligonucleotide
gcaacguguggaauuccaa

SEQ ID NO: 1947761 - RNA, 19 nt, Artificial Sequence
  Description of Artificial Sequence: Synthetic oligonucleotide
agcccuuuguaggccugaa

SEQ ID NO: 1947762 - RNA, 19 nt, Artificial Sequence
  Description of Artificial Sequence: Synthetic oligonucleotide
gguuuguaggggaacuuuu

SEQ ID NO: 1947763 - RNA, 19 nt, Artificial Sequence
  Description of Artificial Sequence: Synthetic oligonucleotide
cccgaguuuccaguuucug

SEQ ID NO: 1947764 - RNA, 19 nt, Artificial Sequence
  Description of Artificial Sequence: Synthetic oligonucleotide
ugccuuccagucgcucuuu

SEQ ID NO: 1947765 - RNA, 19 nt, Artificial Sequence
  Description of Artificial Sequence: Synthetic oligonucleotide
ccguaucuccaugucucug

SEQ ID NO: 1947766 - RNA, 19 nt, Artificial Sequence
  Description of Artificial Sequence: Synthetic oligonucleotide
cgcucuuugcccagaagaa

SEQ ID NO: 1947767 - RNA, 19 nt, Artificial Sequence
  Description of Artificial Sequence: Synthetic oligonucleotide
aggccugaacaagguugau

SEQ ID NO: 1947768 - RNA, 19 nt, Artificial Sequence
  Description of Artificial Sequence: Synthetic oligonucleotide
ccagauggccuuccauuaa

SEQ ID NO: 1947769 - RNA, 19 nt, Artificial Sequence
  Description of Artificial Sequence: Synthetic oligonucleotide
ggcccaacuucugguguuc

SEQ ID NO: 1947770 - RNA, 19 nt, Artificial Sequence
  Description of Artificial Sequence: Synthetic oligonucleotide
gcuuucucacacgccaagu

SEQ ID NO: 1947771 - RNA, 19 nt, Artificial Sequence
  Description of Artificial Sequence: Synthetic oligonucleotide
gcagugcacagaugcuugu

SEQ ID NO: 1947772 - RNA, 19 nt, Artificial Sequence
  Description of Artificial Sequence: Synthetic oligonucleotide
ccggcaaaaucaaggaauu

SEQ ID NO: 1947773 - RNA, 19 nt, Artificial Sequence
  Description of Artificial Sequence: Synthetic oligonucleotide
ggguuuguaggggaacuuu

SEQ ID NO: 1947774 - RNA, 19 nt, Artificial Sequence
  Description of Artificial Sequence: Synthetic oligonucleotide
ccaagcaguuauguucuua

SEQ ID NO: 1947775 - RNA, 19 nt, Artificial Sequence
  Description of Artificial Sequence: Synthetic oligonucleotide
cgaaaauaucuacaaccuu

SEQ ID NO: 1947776 - RNA, 19 nt, Artificial Sequence
  Description of Artificial Sequence: Synthetic oligonucleotide
cagucgcucuuugcccaga

SEQ ID NO: 1947777 - RNA, 19 nt, Artificial Sequence
  Description of Artificial Sequence: Synthetic oligonucleotide
gcacaaucucaugcaaaau

SEQ ID NO: 1947778 - RNA, 19 nt, Artificial Sequence
  Description of Artificial Sequence: Synthetic oligonucleotide
ggccugaacaagguugauu

SEQ ID NO: 1947779 - RNA, 19 nt, Artificial Sequence
  Description of Artificial Sequence: Synthetic oligonucleotide
cccauaccagauggccuuc

SEQ ID NO: 1947780 - RNA, 19 nt, Artificial Sequence
  Description of Artificial Sequence: Synthetic oligonucleotide
cguguggaauuccaacauu

SEQ ID NO: 1947781 - RNA, 19 nt, Artificial Sequence
  Description of Artificial Sequence: Synthetic oligonucleotide
ggacgacuuuucaccguau

SEQ ID NO: 1947782 - RNA, 19 nt, Artificial Sequence
  Description of Artificial Sequence: Synthetic oligonucleotide
gugggcgauucggguuugu

SEQ ID NO: 1947783 - RNA, 19 nt, Artificial Sequence
  Description of Artificial Sequence: Synthetic oligonucleotide
cggguuuguaggggaacuu

SEQ ID NO: 1947784 - RNA, 19 nt, Artificial Sequence
  Description of Artificial Sequence: Synthetic oligonucleotide
aagauguuugucuggaggg

SEQ ID NO: 1947785 - RNA, 19 nt, Artificial Sequence
  Description of Artificial Sequence: Synthetic oligonucleotide
uauaauaaggggcaagaug

SEQ ID NO: 1947786 - RNA, 19 nt, Artificial Sequence
  Description of Artificial Sequence: Synthetic oligonucleotide
accaucaccacacaccggc

SEQ ID NO: 1947787 - RNA, 19 nt, Artificial Sequence
  Description of Artificial Sequence: Synthetic oligonucleotide
uuggaauacgccaucagca

SEQ ID NO: 1947788 - RNA, 19 nt, Artificial Sequence
  Description of Artificial Sequence: Synthetic oligonucleotide
agauucuccaccaacaccg

SEQ ID NO: 1947789 - RNA, 19 nt, Artificial Sequence
  Description of Artificial Sequence: Synthetic oligonucleotide
aaagguggcuuugacuucc

SEQ ID NO: 1947790 - RNA, 19 nt, Artificial Sequence
  Description of Artificial Sequence: Synthetic oligonucleotide
gaucccgaaagucagacac

SEQ ID NO: 1947791 - RNA, 19 nt, Artificial Sequence
  Description of Artificial Sequence: Synthetic oligonucleotide
uuaauguugggguacggca

SEQ ID NO: 1947792 - RNA, 19 nt, Artificial Sequence
  Description of Artificial Sequence: Synthetic oligonucleotide
aacccugccauccugguug

SEQ ID NO: 1947793 - RNA, 19 nt, Artificial Sequence
  Description of Artificial Sequence: Synthetic oligonucleotide
acaagagaacuccaccacc

SEQ ID NO: 1947794 - RNA, 19 nt, Artificial Sequence
  Description of Artificial Sequence: Synthetic oligonucleotide
augaccacaagagaacucc

SEQ ID NO: 1947795 - RNA, 19 nt, Artificial Sequence
  Description of Artificial Sequence: Synthetic oligonucleotide
ucagacaccggcugcaugg

SEQ ID NO: 1947796 - RNA, 19 nt, Artificial Sequence
  Description of Artificial Sequence: Synthetic oligonucleotide
cucaaugugcaucagcggg

SEQ ID NO: 1947797 - RNA, 19 nt, Artificial Sequence
  Description of Artificial Sequence: Synthetic oligonucleotide
accacaagagaacuccacc

SEQ ID NO: 1947798 - RNA, 19 nt, Artificial Sequence
  Description of Artificial Sequence: Synthetic oligonucleotide
auccaaguaagccaucuuc

SEQ ID NO: 1947799 - RNA, 19 nt, Artificial Sequence
  Description of Artificial Sequence: Synthetic oligonucleotide
aagaauuugaggcugccuu

SEQ ID NO: 1947800 - RNA, 19 nt, Artificial Sequence
  Description of Artificial Sequence: Synthetic oligonucleotide
uucuugacggacaagcgug

SEQ ID NO: 1947801 - RNA, 19 nt, Artificial Sequence
  Description of Artificial Sequence: Synthetic oligonucleotide
auguaucuggcgcagguac

SEQ ID NO: 1947802 - RNA, 19 nt, Artificial Sequence
  Description of Artificial Sequence: Synthetic oligonucleotide
aauuccaguuguugguuag

SEQ ID NO: 1947803 - RNA, 19 nt, Artificial Sequence
  Description of Artificial Sequence: Synthetic oligonucleotide
caagauguuugucuggagg

SEQ ID NO: 1947804 - RNA, 19 nt, Artificial Sequence
  Description of Artificial Sequence: Synthetic oligonucleotide
auaccgaugauccaggaaa

SEQ ID NO: 1947805 - RNA, 19 nt, Artificial Sequence
  Description of Artificial Sequence: Synthetic oligonucleotide
aauguugggguacggcauc

SEQ ID NO: 1947806 - RNA, 19 nt, Artificial Sequence
  Description of Artificial Sequence: Synthetic oligonucleotide
ucucucuggugccuaaugg

SEQ ID NO: 1947807 - RNA, 19 nt, Artificial Sequence
  Description of Artificial Sequence: Synthetic oligonucleotide
gaccuuguguccuaggcag

SEQ ID NO: 1947808 - RNA, 19 nt, Artificial Sequence
  Description of Artificial Sequence: Synthetic oligonucleotide
aaugaccacugcucggcac

SEQ ID NO: 1947809 - RNA, 19 nt, Artificial Sequence
  Description of Artificial Sequence: Synthetic oligonucleotide
agaaguuaauccuuucacu

SEQ ID NO: 1947810 - RNA, 19 nt, Artificial Sequence
  Description of Artificial Sequence: Synthetic oligonucleotide
uccgcaaagcagcaaaggc

SEQ ID NO: 1947811 - RNA, 19 nt, Artificial Sequence
  Description of Artificial Sequence: Synthetic oligonucleotide
ggugaauuccaguuguugg

SEQ ID NO: 1947812 - RNA, 19 nt, Artificial Sequence
  Description of Artificial Sequence: Synthetic oligonucleotide
acauaaugcacuuggaaua

SEQ ID NO: 1947813 - RNA, 19 nt, Artificial Sequence
  Description of Artificial Sequence: Synthetic oligonucleotide
uuucuugacggacaagcgu

SEQ ID NO: 1947814 - RNA, 19 nt, Artificial Sequence
  Description of Artificial Sequence: Synthetic oligonucleotide
aaagugcacggcuggguuc

SEQ ID NO: 1947815 - RNA, 19 nt, Artificial Sequence
  Description of Artificial Sequence: Synthetic oligonucleotide
aagagaacuccaccacccg

SEQ ID NO: 1947816 - RNA, 19 nt, Artificial Sequence
  Description of Artificial Sequence: Synthetic oligonucleotide
ucucuggugccuaauggcc

SEQ ID NO: 1947817 - RNA, 19 nt, Artificial Sequence
  Description of Artificial Sequence: Synthetic oligonucleotide
cagcacauaaugcacuugg

SEQ ID NO: 1947818 - RNA, 19 nt, Artificial Sequence
  Description of Artificial Sequence: Synthetic oligonucleotide
uucaaugaccacugcucgg

SEQ ID NO: 1947819 - RNA, 19 nt, Artificial Sequence
  Description of Artificial Sequence: Synthetic oligonucleotide
ggugagagcugccagaaag

SEQ ID NO: 1947820 - RNA, 19 nt, Artificial Sequence
  Description of Artificial Sequence: Synthetic oligonucleotide
cagaaaggccucaaugugc

SEQ ID NO: 1947821 - RNA, 19 nt, Artificial Sequence
  Description of Artificial Sequence: Synthetic oligonucleotide
aagcacaccaccccuccag

SEQ ID NO: 1947822 - RNA, 19 nt, Artificial Sequence
  Description of Artificial Sequence: Synthetic oligonucleotide
uacggcauccccaccauca

SEQ ID NO: 1947823 - RNA, 19 nt, Artificial Sequence
  Description of Artificial Sequence: Synthetic oligonucleotide
ugucagauggccuccugcc

SEQ ID NO: 1947824 - RNA, 19 nt, Artificial Sequence
  Description of Artificial Sequence: Synthetic oligonucleotide
cucguauccaugcuggcag

SEQ ID NO: 1947825 - RNA, 19 nt, Artificial Sequence
  Description of Artificial Sequence: Synthetic oligonucleotide
uggagacuuaauguugggg

SEQ ID NO: 1947826 - RNA, 19 nt, Artificial Sequence
  Description of Artificial Sequence: Synthetic oligonucleotide
uuacaguccuucauacaca

SEQ ID NO: 1947827 - RNA, 19 nt, Artificial Sequence
  Description of Artificial Sequence: Synthetic oligonucleotide
uugaggcugccuuucaccc

SEQ ID NO: 1947828 - RNA, 19 nt, Artificial Sequence
  Description of Artificial Sequence: Synthetic oligonucleotide
agaacaugccagcagcuga

SEQ ID NO: 1947829 - RNA, 19 nt, Artificial Sequence
  Description of Artificial Sequence: Synthetic oligonucleotide
gauaacccugccauccugg

SEQ ID NO: 1947830 - RNA, 19 nt, Artificial Sequence
  Description of Artificial Sequence: Synthetic oligonucleotide
ucucuucucugguagguga

SEQ ID NO: 1947831 - RNA, 19 nt, Artificial Sequence
  Description of Artificial Sequence: Synthetic oligonucleotide
cugaccgcagcacauaaug

SEQ ID NO: 1947832 - RNA, 19 nt, Artificial Sequence
  Description of Artificial Sequence: Synthetic oligonucleotide
accaacaccguucccuggg

SEQ ID NO: 1947833 - RNA, 19 nt, Artificial Sequence
  Description of Artificial Sequence: Synthetic oligonucleotide
ugaggcagaucucuucucu

SEQ ID NO: 1947834 - RNA, 19 nt, Artificial Sequence
  Description of Artificial Sequence: Synthetic oligonucleotide
gcugcauauaauaaggggc

SEQ ID NO: 1947835 - RNA, 19 nt, Artificial Sequence
  Description of Artificial Sequence: Synthetic oligonucleotide
ugcacuuggaauacgccau

SEQ ID NO: 1947836 - RNA, 19 nt, Artificial Sequence
  Description of Artificial Sequence: Synthetic oligonucleotide
cagaucucuucucugguag

SEQ ID NO: 1947837 - RNA, 19 nt, Artificial Sequence
  Description of Artificial Sequence: Synthetic oligonucleotide
ggcuuugacuuccacacgg

SEQ ID NO: 1947838 - RNA, 19 nt, Artificial Sequence
  Description of Artificial Sequence: Synthetic oligonucleotide
aucacaugaccacaagaga

SEQ ID NO: 1947839 - RNA, 19 nt, Artificial Sequence
  Description of Artificial Sequence: Synthetic oligonucleotide
cugcauauaauaaggggca

SEQ ID NO: 1947840 - RNA, 19 nt, Artificial Sequence
  Description of Artificial Sequence: Synthetic oligonucleotide
ugaccuuguguccuaggca

SEQ ID NO: 1947841 - RNA, 19 nt, Artificial Sequence
  Description of Artificial Sequence: Synthetic oligonucleotide
ugccuuucacccaacgcug

SEQ ID NO: 1947842 - RNA, 19 nt, Artificial Sequence
  Description of Artificial Sequence: Synthetic oligonucleotide
uggaauacgccaucagcac

SEQ ID NO: 1947843 - RNA, 19 nt, Artificial Sequence
  Description of Artificial Sequence: Synthetic oligonucleotide
auggauugguuuacagucc

SEQ ID NO: 1947844 - RNA, 19 nt, Artificial Sequence
  Description of Artificial Sequence: Synthetic oligonucleotide
uugugccuucucccgaugg

SEQ ID NO: 1947845 - RNA, 19 nt, Artificial Sequence
  Description of Artificial Sequence: Synthetic oligonucleotide
cuaauggcccugccuaugg

SEQ ID NO: 1947846 - RNA, 19 nt, Artificial Sequence
  Description of Artificial Sequence: Synthetic oligonucleotide
cuuaauguugggguacggc

SEQ ID NO: 1947847 - RNA, 19 nt, Artificial Sequence
  Description of Artificial Sequence: Synthetic oligonucleotide
ugguuuacaguccuucaua

SEQ ID NO: 1947848 - RNA, 19 nt, Artificial Sequence
  Description of Artificial Sequence: Synthetic oligonucleotide
auugguuuacaguccuuca

SEQ ID NO: 1947849 - RNA, 19 nt, Artificial Sequence
  Description of Artificial Sequence: Synthetic oligonucleotide
aucugaggcagaucucuuc

SEQ ID NO: 1947850 - RNA, 19 nt, Artificial Sequence
  Description of Artificial Sequence: Synthetic oligonucleotide
aaacacaaugcuggcgaag

SEQ ID NO: 1947851 - RNA, 19 nt, Artificial Sequence
  Description of Artificial Sequence: Synthetic oligonucleotide
ugcaaccacagagaggagc

SEQ ID NO: 1947852 - RNA, 19 nt, Artificial Sequence
  Description of Artificial Sequence: Synthetic oligonucleotide
ggaaacacaaugcuggcga

SEQ ID NO: 1947853 - RNA, 19 nt, Artificial Sequence
  Description of Artificial Sequence: Synthetic oligonucleotide
guacucauaggaagggagg

SEQ ID NO: 1947854 - RNA, 19 nt, Artificial Sequence
  Description of Artificial Sequence: Synthetic oligonucleotide
cguuacacagguuacagag

SEQ ID NO: 1947855 - RNA, 19 nt, Artificial Sequence
  Description of Artificial Sequence: Synthetic oligonucleotide
cucauaggaagggaggaag

SEQ ID NO: 1947856 - RNA, 19 nt, Artificial Sequence
  Description of Artificial Sequence: Synthetic oligonucleotide
uugguuuacaguccuucau

SEQ ID NO: 1947857 - RNA, 19 nt, Artificial Sequence
  Description of Artificial Sequence: Synthetic oligonucleotide
ucccugcaaccacagagag

SEQ ID NO: 1947858 - RNA, 19 nt, Artificial Sequence
  Description of Artificial Sequence: Synthetic oligonucleotide
cauaaugcacuuggaauac

SEQ ID NO: 1947859 - RNA, 19 nt, Artificial Sequence
  Description of Artificial Sequence: Synthetic oligonucleotide
caggauaacccugccaucc

SEQ ID NO: 1947860 - RNA, 19 nt, Artificial Sequence
  Description of Artificial Sequence: Synthetic oligonucleotide
ugccuaauggcccugccua

SEQ ID NO: 1947861 - RNA, 19 nt, Artificial Sequence
  Description of Artificial Sequence: Synthetic oligonucleotide
cauauaauaaggggcaaga

SEQ ID NO: 1947862 - RNA, 19 nt, Artificial Sequence
  Description of Artificial Sequence: Synthetic oligonucleotide
agggagggcgggcauaccg

SEQ ID NO: 1947863 - RNA, 19 nt, Artificial Sequence
  Description of Artificial Sequence: Synthetic oligonucleotide
acuuggaauacgccaucag

SEQ ID NO: 1947864 - RNA, 19 nt, Artificial Sequence
  Description of Artificial Sequence: Synthetic oligonucleotide
cacagagaggagcaaggcc

SEQ ID NO: 1947865 - RNA, 19 nt, Artificial Sequence
  Description of Artificial Sequence: Synthetic oligonucleotide
gacuuaauguugggguacg

SEQ ID NO: 1947866 - RNA, 19 nt, Artificial Sequence
  Description of Artificial Sequence: Synthetic oligonucleotide
uuccgcaaagcagcaaagg

SEQ ID NO: 1947867 - RNA, 19 nt, Artificial Sequence
  Description of Artificial Sequence: Synthetic oligonucleotide
caucagcaggcccagacug

SEQ ID NO: 1947868 - RNA, 19 nt, Artificial Sequence
  Description of Artificial Sequence: Synthetic oligonucleotide
ucuugacggacaagcgugc

SEQ ID NO: 1947869 - RNA, 19 nt, Artificial Sequence
  Description of Artificial Sequence: Synthetic oligonucleotide
cagauucuccaccaacacc

SEQ ID NO: 1947870 - RNA, 19 nt, Artificial Sequence
  Description of Artificial Sequence: Synthetic oligonucleotide
uguuugucuggagggauca

SEQ ID NO: 1947871 - RNA, 19 nt, Artificial Sequence
  Description of Artificial Sequence: Synthetic oligonucleotide
cacagguuacagaggacgc

SEQ ID NO: 1947872 - RNA, 19 nt, Artificial Sequence
  Description of Artificial Sequence: Synthetic oligonucleotide
guuacacagguuacagagg

SEQ ID NO: 1947873 - RNA, 19 nt, Artificial Sequence
  Description of Artificial Sequence: Synthetic oligonucleotide
gaugauccaggaaacacaa

SEQ ID NO: 1947874 - RNA, 19 nt, Artificial Sequence
  Description of Artificial Sequence: Synthetic oligonucleotide
gaccacguuacacagguua

SEQ ID NO: 1947875 - RNA, 19 nt, Artificial Sequence
  Description of Artificial Sequence: Synthetic oligonucleotide
cacggucucguauccaugc

SEQ ID NO: 1947876 - RNA, 19 nt, Artificial Sequence
  Description of Artificial Sequence: Synthetic oligonucleotide
uuccaguuguugguuagag

SEQ ID NO: 1947877 - RNA, 19 nt, Artificial Sequence
  Description of Artificial Sequence: Synthetic oligonucleotide
ugguuagagggcccgcugc

SEQ ID NO: 1947878 - RNA, 19 nt, Artificial Sequence
  Description of Artificial Sequence: Synthetic oligonucleotide
cacaagagaacuccaccac

SEQ ID NO: 1947879 - RNA, 19 nt, Artificial Sequence
  Description of Artificial Sequence: Synthetic oligonucleotide
cagguuacagaggacgcgg

SEQ ID NO: 1947880 - RNA, 19 nt, Artificial Sequence
  Description of Artificial Sequence: Synthetic oligonucleotide
uguguccuaggcagggucu

SEQ ID NO: 1947881 - RNA, 19 nt, Artificial Sequence
  Description of Artificial Sequence: Synthetic oligonucleotide
uaaggggcaagauguuugu

SEQ ID NO: 1947882 - RNA, 19 nt, Artificial Sequence
  Description of Artificial Sequence: Synthetic oligonucleotide
accugggcaaagugcacgg

SEQ ID NO: 1947883 - RNA, 19 nt, Artificial Sequence
  Description of Artificial Sequence: Synthetic oligonucleotide
caguuguugguuagagggc

SEQ ID NO: 1947884 - RNA, 19 nt, Artificial Sequence
  Description of Artificial Sequence: Synthetic oligonucleotide
ucccgauggaacuuccgca

SEQ ID NO: 1947885 - RNA, 19 nt, Artificial Sequence
  Description of Artificial Sequence: Synthetic oligonucleotide
ucacccaacgcugccuugg

SEQ ID NO: 1947886 - RNA, 19 nt, Artificial Sequence
  Description of Artificial Sequence: Synthetic oligonucleotide
aagggaggaagcacaccac

SEQ ID NO: 1947887 - RNA, 19 nt, Artificial Sequence
  Description of Artificial Sequence: Synthetic oligonucleotide
uguaucuggcgcagguacu

SEQ ID NO: 1947888 - RNA, 19 nt, Artificial Sequence
  Description of Artificial Sequence: Synthetic oligonucleotide
ugcgcauguaucuggcgca

SEQ ID NO: 1947889 - RNA, 19 nt, Artificial Sequence
  Description of Artificial Sequence: Synthetic oligonucleotide
gguacucauaggaagggag

SEQ ID NO: 1947890 - RNA, 19 nt, Artificial Sequence
  Description of Artificial Sequence: Synthetic oligonucleotide
cucuggugccuaauggccc

SEQ ID NO: 1947891 - RNA, 19 nt, Artificial Sequence
  Description of Artificial Sequence: Synthetic oligonucleotide
uccacacggucucguaucc

SEQ ID NO: 1947892 - RNA, 19 nt, Artificial Sequence
  Description of Artificial Sequence: Synthetic oligonucleotide
ugugccuucucccgaugga

SEQ ID NO: 1947893 - RNA, 19 nt, Artificial Sequence
  Description of Artificial Sequence: Synthetic oligonucleotide
uugggguacggcaucccca

SEQ ID NO: 1947894 - RNA, 19 nt, Artificial Sequence
  Description of Artificial Sequence: Synthetic oligonucleotide
ucucccgauggaacuuccg

SEQ ID NO: 1947895 - RNA, 19 nt, Artificial Sequence
  Description of Artificial Sequence: Synthetic oligonucleotide
aguggugagagcugccaga

SEQ ID NO: 1947896 - RNA, 19 nt, Artificial Sequence
  Description of Artificial Sequence: Synthetic oligonucleotide
cacuccagaacaugccagc

SEQ ID NO: 1947897 - RNA, 19 nt, Artificial Sequence
  Description of Artificial Sequence: Synthetic oligonucleotide
gugcgcauguaucuggcgc

SEQ ID NO: 1947898 - RNA, 19 nt, Artificial Sequence
  Description of Artificial Sequence: Synthetic oligonucleotide
auaaugcacuuggaauacg

SEQ ID NO: 1947899 - RNA, 19 nt, Artificial Sequence
  Description of Artificial Sequence: Synthetic oligonucleotide
uugacggacaagcgugcca

SEQ ID NO: 1947900 - RNA, 19 nt, Artificial Sequence
  Description of Artificial Sequence: Synthetic oligonucleotide
uugguuagagggcccgcug

SEQ ID NO: 1947901 - RNA, 19 nt, Artificial Sequence
  Description of Artificial Sequence: Synthetic oligonucleotide
gucaucagcaggcccagac

SEQ ID NO: 1947902 - RNA, 19 nt, Artificial Sequence
  Description of Artificial Sequence: Synthetic oligonucleotide
uuguguccuaggcaggguc

SEQ ID NO: 1947903 - RNA, 19 nt, Artificial Sequence
  Description of Artificial Sequence: Synthetic oligonucleotide
ucggcacucccucaccacc

SEQ ID NO: 1947904 - RNA, 19 nt, Artificial Sequence
  Description of Artificial Sequence: Synthetic oligonucleotide
agugcgcauguaucuggcg

SEQ ID NO: 1947905 - RNA, 19 nt, Artificial Sequence
  Description of Artificial Sequence: Synthetic oligonucleotide
ugucccagugcgcauguau

SEQ ID NO: 1947906 - RNA, 19 nt, Artificial Sequence
  Description of Artificial Sequence: Synthetic oligonucleotide
ugaccacaagagaacucca

SEQ ID NO: 1947907 - RNA, 19 nt, Artificial Sequence
  Description of Artificial Sequence: Synthetic oligonucleotide
agggcgggcauaccgauga

SEQ ID NO: 1947908 - RNA, 19 nt, Artificial Sequence
  Description of Artificial Sequence: Synthetic oligonucleotide
gacaccggcugcauggugc

SEQ ID NO: 1947909 - RNA, 19 nt, Artificial Sequence
  Description of Artificial Sequence: Synthetic oligonucleotide
accgcagcacauaaugcac

SEQ ID NO: 1947910 - RNA, 19 nt, Artificial Sequence
  Description of Artificial Sequence: Synthetic oligonucleotide
acaagcgugccagcaggcc

SEQ ID NO: 1947911 - RNA, 19 nt, Artificial Sequence
  Description of Artificial Sequence: Synthetic oligonucleotide
cuuccgcaaagcagcaaag

SEQ ID NO: 1947912 - RNA, 19 nt, Artificial Sequence
  Description of Artificial Sequence: Synthetic oligonucleotide
cucccgauggaacuuccgc

SEQ ID NO: 1947913 - RNA, 19 nt, Artificial Sequence
  Description of Artificial Sequence: Synthetic oligonucleotide
uggcggcucaggauaaccc

SEQ ID NO: 1947914 - RNA, 19 nt, Artificial Sequence
  Description of Artificial Sequence: Synthetic oligonucleotide
accacguuacacagguuac

SEQ ID NO: 1947915 - RNA, 19 nt, Artificial Sequence
  Description of Artificial Sequence: Synthetic oligonucleotide
cuggagggaucacaugacc

SEQ ID NO: 1947916 - RNA, 19 nt, Artificial Sequence
  Description of Artificial Sequence: Synthetic oligonucleotide
ucucguauccaugcuggca

SEQ ID NO: 1947917 - RNA, 19 nt, Artificial Sequence
  Description of Artificial Sequence: Synthetic oligonucleotide
agaauuugaggcugccuuu

SEQ ID NO: 1947918 - RNA, 19 nt, Artificial Sequence
  Description of Artificial Sequence: Synthetic oligonucleotide
acccgcucagcuuccacuc

SEQ ID NO: 1947919 - RNA, 19 nt, Artificial Sequence
  Description of Artificial Sequence: Synthetic oligonucleotide
ggacaagcgugccagcagg

SEQ ID NO: 1947920 - RNA, 19 nt, Artificial Sequence
  Description of Artificial Sequence: Synthetic oligonucleotide
ggagcaaggccccugucag

SEQ ID NO: 1947921 - RNA, 19 nt, Artificial Sequence
  Description of Artificial Sequence: Synthetic oligonucleotide
uuggcaguggugagagcug

SEQ ID NO: 1947922 - RNA, 19 nt, Artificial Sequence
  Description of Artificial Sequence: Synthetic oligonucleotide
gagacuuaauguuggggua

SEQ ID NO: 1947923 - RNA, 19 nt, Artificial Sequence
  Description of Artificial Sequence: Synthetic oligonucleotide
cugucagauggccuccugc

SEQ ID NO: 1947924 - RNA, 19 nt, Artificial Sequence
  Description of Artificial Sequence: Synthetic oligonucleotide
ccgaaagucagacaccggc

SEQ ID NO: 1947925 - RNA, 19 nt, Artificial Sequence
  Description of Artificial Sequence: Synthetic oligonucleotide
caucaccacacaccggccc

SEQ ID NO: 1947926 - RNA, 19 nt, Artificial Sequence
  Description of Artificial Sequence: Synthetic oligonucleotide
acaugaccacaagagaacu

SEQ ID NO: 1947927 - RNA, 19 nt, Artificial Sequence
  Description of Artificial Sequence: Synthetic oligonucleotide
gaauuugaggcugccuuuc

SEQ ID NO: 1947928 - RNA, 19 nt, Artificial Sequence
  Description of Artificial Sequence: Synthetic oligonucleotide
ggucucguauccaugcugg

SEQ ID NO: 1947929 - RNA, 19 nt, Artificial Sequence
  Description of Artificial Sequence: Synthetic oligonucleotide
cacauaaugcacuuggaau

SEQ ID NO: 1947930 - RNA, 19 nt, Artificial Sequence
  Description of Artificial Sequence: Synthetic oligonucleotide
ggaauacgccaucagcacc

SEQ ID NO: 1947931 - RNA, 19 nt, Artificial Sequence
  Description of Artificial Sequence: Synthetic oligonucleotide
auauaauaaggggcaagau

SEQ ID NO: 1947932 - RNA, 19 nt, Artificial Sequence
  Description of Artificial Sequence: Synthetic oligonucleotide
gcagguacucauaggaagg

SEQ ID NO: 1947933 - RNA, 19 nt, Artificial Sequence
  Description of Artificial Sequence: Synthetic oligonucleotide
uaauaaggggcaagauguu

SEQ ID NO: 1947934 - RNA, 19 nt, Artificial Sequence
  Description of Artificial Sequence: Synthetic oligonucleotide
auacgccaucagcaccugc

SEQ ID NO: 1947935 - RNA, 19 nt, Artificial Sequence
  Description of Artificial Sequence: Synthetic oligonucleotide
ccugcaaccacagagagga

SEQ ID NO: 1947936 - RNA, 19 nt, Artificial Sequence
  Description of Artificial Sequence: Synthetic oligonucleotide
ggagacuuaauguuggggu

SEQ ID NO: 1947937 - RNA, 19 nt, Artificial Sequence
  Description of Artificial Sequence: Synthetic oligonucleotide
caugaccacaagagaacuc

SEQ ID NO: 1947938 - RNA, 19 nt, Artificial Sequence
  Description of Artificial Sequence: Synthetic oligonucleotide
ggugccaccuucaaugacc

SEQ ID NO: 1947939 - RNA, 19 nt, Artificial Sequence
  Description of Artificial Sequence: Synthetic oligonucleotide
aacaugccagcagcugauc

SEQ ID NO: 1947940 - RNA, 19 nt, Artificial Sequence
  Description of Artificial Sequence: Synthetic oligonucleotide
aaggggcaagauguuuguc

SEQ ID NO: 1947941 - RNA, 19 nt, Artificial Sequence
  Description of Artificial Sequence: Synthetic oligonucleotide
agucuugucccagugcgca

SEQ ID NO: 1947942 - RNA, 19 nt, Artificial Sequence
  Description of Artificial Sequence: Synthetic oligonucleotide
guuuacaguccuucauaca

SEQ ID NO: 1947943 - RNA, 19 nt, Artificial Sequence
  Description of Artificial Sequence: Synthetic oligonucleotide
agcugaucccgaaagucag

SEQ ID NO: 1947944 - RNA, 19 nt, Artificial Sequence
  Description of Artificial Sequence: Synthetic oligonucleotide
cugaucccgaaagucagac

SEQ ID NO: 1947945 - RNA, 19 nt, Artificial Sequence
  Description of Artificial Sequence: Synthetic oligonucleotide
acggcuggguucaagagca

SEQ ID NO: 1947946 - RNA, 19 nt, Artificial Sequence
  Description of Artificial Sequence: Synthetic oligonucleotide
ucuugucccagugcgcaug

SEQ ID NO: 1947947 - RNA, 19 nt, Artificial Sequence
  Description of Artificial Sequence: Synthetic oligonucleotide
ugaauuccaguuguugguu

SEQ ID NO: 1947948 - RNA, 19 nt, Artificial Sequence
  Description of Artificial Sequence: Synthetic oligonucleotide
ugggguacggcauccccac

SEQ ID NO: 1947949 - RNA, 19 nt, Artificial Sequence
  Description of Artificial Sequence: Synthetic oligonucleotide
gacgcggccugucuccucc

SEQ ID NO: 1947950 - RNA, 19 nt, Artificial Sequence
  Description of Artificial Sequence: Synthetic oligonucleotide
acuuaauguugggguacgg

SEQ ID NO: 1947951 - RNA, 19 nt, Artificial Sequence
  Description of Artificial Sequence: Synthetic oligonucleotide
uggguucaagagcaagaau

SEQ ID NO: 1947952 - RNA, 19 nt, Artificial Sequence
  Description of Artificial Sequence: Synthetic oligonucleotide
ugucuggagggaucacaug

SEQ ID NO: 1947953 - RNA, 19 nt, Artificial Sequence
  Description of Artificial Sequence: Synthetic oligonucleotide
aagcgugccagcaggccag

SEQ ID NO: 1947954 - RNA, 19 nt, Artificial Sequence
  Description of Artificial Sequence: Synthetic oligonucleotide
acggcauccccaccaucac

SEQ ID NO: 1947955 - RNA, 19 nt, Artificial Sequence
  Description of Artificial Sequence: Synthetic oligonucleotide
caggucgcggggcuggugg

SEQ ID NO: 1947956 - RNA, 19 nt, Artificial Sequence
  Description of Artificial Sequence: Synthetic oligonucleotide
ugaucccgaaagucagaca

SEQ ID NO: 1947957 - RNA, 19 nt, Artificial Sequence
  Description of Artificial Sequence: Synthetic oligonucleotide
ggggcaagauguuugucug

SEQ ID NO: 1947958 - RNA, 19 nt, Artificial Sequence
  Description of Artificial Sequence: Synthetic oligonucleotide
uucucccgauggaacuucc

SEQ ID NO: 1947959 - RNA, 19 nt, Artificial Sequence
  Description of Artificial Sequence: Synthetic oligonucleotide
gaauacgccaucagcaccu

SEQ ID NO: 1947960 - RNA, 19 nt, Artificial Sequence
  Description of Artificial Sequence: Synthetic oligonucleotide
acguuacacagguuacaga

SEQ ID NO: 1947961 - RNA, 19 nt, Artificial Sequence
  Description of Artificial Sequence: Synthetic oligonucleotide
ugcauauaauaaggggcaa

SEQ ID NO: 1947962 - RNA, 19 nt, Artificial Sequence
  Description of Artificial Sequence: Synthetic oligonucleotide
auaacccugccauccuggu

SEQ ID NO: 1947963 - RNA, 19 nt, Artificial Sequence
  Description of Artificial Sequence: Synthetic oligonucleotide
cuauggauugguuuacagu

SEQ ID NO: 1947964 - RNA, 19 nt, Artificial Sequence
  Description of Artificial Sequence: Synthetic oligonucleotide
agauguuugucuggaggga

SEQ ID NO: 1947965 - RNA, 19 nt, Artificial Sequence
  Description of Artificial Sequence: Synthetic oligonucleotide
ggaucacaugaccacaaga

SEQ ID NO: 1947966 - RNA, 19 nt, Artificial Sequence
  Description of Artificial Sequence: Synthetic oligonucleotide
cgcugcauauaauaagggg

SEQ ID NO: 1947967 - RNA, 19 nt, Artificial Sequence
  Description of Artificial Sequence: Synthetic oligonucleotide
cagugcgcauguaucuggc

SEQ ID NO: 1947968 - RNA, 19 nt, Artificial Sequence
  Description of Artificial Sequence: Synthetic oligonucleotide
agguuacagaggacgcggc

SEQ ID NO: 1947969 - RNA, 19 nt, Artificial Sequence
  Description of Artificial Sequence: Synthetic oligonucleotide
agcagcugaucccgaaagu

SEQ ID NO: 1947970 - RNA, 19 nt, Artificial Sequence
  Description of Artificial Sequence: Synthetic oligonucleotide
cagcugaucccgaaaguca

SEQ ID NO: 1947971 - RNA, 19 nt, Artificial Sequence
  Description of Artificial Sequence: Synthetic oligonucleotide
ucguauccaugcuggcagc

SEQ ID NO: 1947972 - RNA, 19 nt, Artificial Sequence
  Description of Artificial Sequence: Synthetic oligonucleotide
aauacgccaucagcaccug

SEQ ID NO: 1947973 - RNA, 19 nt, Artificial Sequence
  Description of Artificial Sequence: Synthetic oligonucleotide
cagggucugauccaaguaa

SEQ ID NO: 1947974 - RNA, 19 nt, Artificial Sequence
  Description of Artificial Sequence: Synthetic oligonucleotide
gcgggcauaccgaugaucc

SEQ ID NO: 1947975 - RNA, 19 nt, Artificial Sequence
  Description of Artificial Sequence: Synthetic oligonucleotide
cugccuauggauugguuua

SEQ ID NO: 1947976 - RNA, 19 nt, Artificial Sequence
  Description of Artificial Sequence: Synthetic oligonucleotide
gggcauaccgaugauccag

SEQ ID NO: 1947977 - RNA, 19 nt, Artificial Sequence
  Description of Artificial Sequence: Synthetic oligonucleotide
ugcagcucuggagacuuaa

SEQ ID NO: 1947978 - RNA, 19 nt, Artificial Sequence
  Description of Artificial Sequence: Synthetic oligonucleotide
cagucuugucccagugcgc

SEQ ID NO: 1947979 - RNA, 19 nt, Artificial Sequence
  Description of Artificial Sequence: Synthetic oligonucleotide
ccuucauacacagauucuc

SEQ ID NO: 1947980 - RNA, 19 nt, Artificial Sequence
  Description of Artificial Sequence: Synthetic oligonucleotide
agcaaggccccugucagau

SEQ ID NO: 1947981 - RNA, 19 nt, Artificial Sequence
  Description of Artificial Sequence: Synthetic oligonucleotide
cuugacggacaagcgugcc

SEQ ID NO: 1947982 - RNA, 19 nt, Artificial Sequence
  Description of Artificial Sequence: Synthetic oligonucleotide
uguugguuagagggcccgc

SEQ ID NO: 1947983 - RNA, 19 nt, Artificial Sequence
  Description of Artificial Sequence: Synthetic oligonucleotide
guuguugguuagagggccc

SEQ ID NO: 1947984 - RNA, 19 nt, Artificial Sequence
  Description of Artificial Sequence: Synthetic oligonucleotide
uggcgaagucucucuggug

SEQ ID NO: 1947985 - RNA, 19 nt, Artificial Sequence
  Description of Artificial Sequence: Synthetic oligonucleotide
gacaagcgugccagcaggc

SEQ ID NO: 1947986 - RNA, 19 nt, Artificial Sequence
  Description of Artificial Sequence: Synthetic oligonucleotide
gggcaaagugcacggcugg

SEQ ID NO: 1947987 - RNA, 19 nt, Artificial Sequence
  Description of Artificial Sequence: Synthetic oligonucleotide
ccagugcgcauguaucugg

SEQ ID NO: 1947988 - RNA, 19 nt, Artificial Sequence
  Description of Artificial Sequence: Synthetic oligonucleotide
ugccuauggauugguuuac

SEQ ID NO: 1947989 - RNA, 19 nt, Artificial Sequence
  Description of Artificial Sequence: Synthetic oligonucleotide
gcccgcugcauauaauaag

SEQ ID NO: 1947990 - RNA, 19 nt, Artificial Sequence
  Description of Artificial Sequence: Synthetic oligonucleotide
ugacuuccacacggucucg

SEQ ID NO: 1947991 - RNA, 19 nt, Artificial Sequence
  Description of Artificial Sequence: Synthetic oligonucleotide
ggcauaccgaugauccagg

SEQ ID NO: 1947992 - RNA, 19 nt, Artificial Sequence
  Description of Artificial Sequence: Synthetic oligonucleotide
uucacccaacgcugccuug

SEQ ID NO: 1947993 - RNA, 19 nt, Artificial Sequence
  Description of Artificial Sequence: Synthetic oligonucleotide
ggauaacccugccauccug

SEQ ID NO: 1947994 - RNA, 19 nt, Artificial Sequence
  Description of Artificial Sequence: Synthetic oligonucleotide
caccaacaccguucccugg

SEQ ID NO: 1947995 - RNA, 19 nt, Artificial Sequence
  Description of Artificial Sequence: Synthetic oligonucleotide
uaucuggcgcagguacuca

SEQ ID NO: 1947996 - RNA, 19 nt, Artificial Sequence
  Description of Artificial Sequence: Synthetic oligonucleotide
agguacucauaggaaggga

SEQ ID NO: 1947997 - RNA, 19 nt, Artificial Sequence
  Description of Artificial Sequence: Synthetic oligonucleotide
cccacggucaucagagaag

SEQ ID NO: 1947998 - RNA, 19 nt, Artificial Sequence
  Description of Artificial Sequence: Synthetic oligonucleotide
gucucguauccaugcuggc

SEQ ID NO: 1947999 - RNA, 19 nt, Artificial Sequence
  Description of Artificial Sequence: Synthetic oligonucleotide
agcacauaaugcacuugga

SEQ ID NO: 1948000 - RNA, 19 nt, Artificial Sequence
  Description of Artificial Sequence: Synthetic oligonucleotide
cauaccgaugauccaggaa

SEQ ID NO: 1948001 - RNA, 19 nt, Artificial Sequence
  Description of Artificial Sequence: Synthetic oligonucleotide
gucagacaccggcugcaug

SEQ ID NO: 1948002 - RNA, 19 nt, Artificial Sequence
  Description of Artificial Sequence: Synthetic oligonucleotide
gggaucacaugaccacaag

SEQ ID NO: 1948003 - RNA, 19 nt, Artificial Sequence
  Description of Artificial Sequence: Synthetic oligonucleotide
gcaagauguuugucuggag

SEQ ID NO: 1948004 - RNA, 19 nt, Artificial Sequence
  Description of Artificial Sequence: Synthetic oligonucleotide
gcaaccacagagaggagca

SEQ ID NO: 1948005 - RNA, 19 nt, Artificial Sequence
  Description of Artificial Sequence: Synthetic oligonucleotide
acggucucguauccaugcu

SEQ ID NO: 1948006 - RNA, 19 nt, Artificial Sequence
  Description of Artificial Sequence: Synthetic oligonucleotide
uccuaggcagggucugauc

SEQ ID NO: 1948007 - RNA, 19 nt, Artificial Sequence
  Description of Artificial Sequence: Synthetic oligonucleotide
acggacaagcgugccagca

SEQ ID NO: 1948008 - RNA, 19 nt, Artificial Sequence
  Description of Artificial Sequence: Synthetic oligonucleotide
cacugcucggcacucccuc

SEQ ID NO: 1948009 - RNA, 19 nt, Artificial Sequence
  Description of Artificial Sequence: Synthetic oligonucleotide
gacggacaagcgugccagc

SEQ ID NO: 1948010 - RNA, 19 nt, Artificial Sequence
  Description of Artificial Sequence: Synthetic oligonucleotide
gacaggguugugccuucuc

SEQ ID NO: 1948011 - RNA, 19 nt, Artificial Sequence
  Description of Artificial Sequence: Synthetic oligonucleotide
accgaugauccaggaaaca

SEQ ID NO: 1948012 - RNA, 19 nt, Artificial Sequence
  Description of Artificial Sequence: Synthetic oligonucleotide
cucggcacucccucaccac

SEQ ID NO: 1948013 - RNA, 19 nt, Artificial Sequence
  Description of Artificial Sequence: Synthetic oligonucleotide
ccgaugauccaggaaacac

SEQ ID NO: 1948014 - RNA, 19 nt, Artificial Sequence
  Description of Artificial Sequence: Synthetic oligonucleotide
ccgcaaagcagcaaaggca

SEQ ID NO: 1948015 - RNA, 19 nt, Artificial Sequence
  Description of Artificial Sequence: Synthetic oligonucleotide
uccaugcuggcagcuucgc

SEQ ID NO: 1948016 - RNA, 19 nt, Artificial Sequence
  Description of Artificial Sequence: Synthetic oligonucleotide
guugugccuucucccgaug

SEQ ID NO: 1948017 - RNA, 19 nt, Artificial Sequence
  Description of Artificial Sequence: Synthetic oligonucleotide
aucuggcgcagguacucau

SEQ ID NO: 1948018 - RNA, 19 nt, Artificial Sequence
  Description of Artificial Sequence: Synthetic oligonucleotide
gcagcugaucccgaaaguc

SEQ ID NO: 1948019 - RNA, 19 nt, Artificial Sequence
  Description of Artificial Sequence: Synthetic oligonucleotide
uggugagagcugccagaaa

SEQ ID NO: 1948020 - RNA, 19 nt, Artificial Sequence
  Description of Artificial Sequence: Synthetic oligonucleotide
gucccagugcgcauguauc

SEQ ID NO: 1948021 - RNA, 19 nt, Artificial Sequence
  Description of Artificial Sequence: Synthetic oligonucleotide
ggcugccuuucacccaacg

SEQ ID NO: 1948022 - RNA, 19 nt, Artificial Sequence
  Description of Artificial Sequence: Synthetic oligonucleotide
ggcaaagugcacggcuggg

SEQ ID NO: 1948023 - RNA, 19 nt, Artificial Sequence
  Description of Artificial Sequence: Synthetic oligonucleotide
cugcucggcacucccucac

SEQ ID NO: 1948024 - RNA, 19 nt, Artificial Sequence
  Description of Artificial Sequence: Synthetic oligonucleotide
ggguacggcauccccacca

SEQ ID NO: 1948025 - RNA, 19 nt, Artificial Sequence
  Description of Artificial Sequence: Synthetic oligonucleotide
cacccaacgcugccuuggc

SEQ ID NO: 1948026 - RNA, 19 nt, Artificial Sequence
  Description of Artificial Sequence: Synthetic oligonucleotide
gguuagagggcccgcugca

SEQ ID NO: 1948027 - RNA, 19 nt, Artificial Sequence
  Description of Artificial Sequence: Synthetic oligonucleotide
gagggcccgcugcauauaa

SEQ ID NO: 1948028 - RNA, 19 nt, Artificial Sequence
  Description of Artificial Sequence: Synthetic oligonucleotide
gcacggcuggguucaagag

SEQ ID NO: 1948029 - RNA, 19 nt, Artificial Sequence
  Description of Artificial Sequence: Synthetic oligonucleotide
guggugagagcugccagaa

SEQ ID NO: 1948030 - RNA, 19 nt, Artificial Sequence
  Description of Artificial Sequence: Synthetic oligonucleotide
uggugccuaauggcccugc

SEQ ID NO: 1948031 - RNA, 19 nt, Artificial Sequence
  Description of Artificial Sequence: Synthetic oligonucleotide
aggccagucuugucccagu

SEQ ID NO: 1948032 - RNA, 19 nt, Artificial Sequence
  Description of Artificial Sequence: Synthetic oligonucleotide
gagcaaggccccugucaga

SEQ ID NO: 1948033 - RNA, 19 nt, Artificial Sequence
  Description of Artificial Sequence: Synthetic oligonucleotide
gauccaaguaagccaucuu

SEQ ID NO: 1948034 - RNA, 19 nt, Artificial Sequence
  Description of Artificial Sequence: Synthetic oligonucleotide
cgaugauccaggaaacaca

SEQ ID NO: 1948035 - RNA, 19 nt, Artificial Sequence
  Description of Artificial Sequence: Synthetic oligonucleotide
ggugccuaauggcccugcc

SEQ ID NO: 1948036 - RNA, 19 nt, Artificial Sequence
  Description of Artificial Sequence: Synthetic oligonucleotide
cccugcaaccacagagagg

SEQ ID NO: 1948037 - RNA, 19 nt, Artificial Sequence
  Description of Artificial Sequence: Synthetic oligonucleotide
acacggucucguauccaug

SEQ ID NO: 1948038 - RNA, 19 nt, Artificial Sequence
  Description of Artificial Sequence: Synthetic oligonucleotide
caaugaccacugcucggca

SEQ ID NO: 1948039 - RNA, 19 nt, Artificial Sequence
  Description of Artificial Sequence: Synthetic oligonucleotide
gaagucucucuggugccua

SEQ ID NO: 1948040 - RNA, 19 nt, Artificial Sequence
  Description of Artificial Sequence: Synthetic oligonucleotide
ccaacgcugccuuggcggc

SEQ ID NO: 1948041 - RNA, 19 nt, Artificial Sequence
  Description of Artificial Sequence: Synthetic oligonucleotide
ccaacaccguucccugggg

SEQ ID NO: 1948042 - RNA, 19 nt, Artificial Sequence
  Description of Artificial Sequence: Synthetic oligonucleotide
uacagaggacgcggccugu

SEQ ID NO: 1948043 - RNA, 19 nt, Artificial Sequence
  Description of Artificial Sequence: Synthetic oligonucleotide
gcucaggauaacccugcca

SEQ ID NO: 1948044 - RNA, 19 nt, Artificial Sequence
  Description of Artificial Sequence: Synthetic oligonucleotide
ggccagucuugucccagug

SEQ ID NO: 1948045 - RNA, 19 nt, Artificial Sequence
  Description of Artificial Sequence: Synthetic oligonucleotide
ccugaccuuguguccuagg

SEQ ID NO: 1948046 - RNA, 19 nt, Artificial Sequence
  Description of Artificial Sequence: Synthetic oligonucleotide
gagggcgggcauaccgaug

SEQ ID NO: 1948047 - RNA, 19 nt, Artificial Sequence
  Description of Artificial Sequence: Synthetic oligonucleotide
gccccugucagauggccuc

SEQ ID NO: 1948048 - RNA, 19 nt, Artificial Sequence
  Description of Artificial Sequence: Synthetic oligonucleotide
gucagauggccuccugccu

SEQ ID NO: 1948049 - RNA, 19 nt, Artificial Sequence
  Description of Artificial Sequence: Synthetic oligonucleotide
caccacacaccggcccacg

SEQ ID NO: 1948050 - RNA, 19 nt, Artificial Sequence
  Description of Artificial Sequence: Synthetic oligonucleotide
cacacggucucguauccau

SEQ ID NO: 1948051 - RNA, 19 nt, Artificial Sequence
  Description of Artificial Sequence: Synthetic oligonucleotide
gccuuggcggcucaggaua

SEQ ID NO: 1948052 - RNA, 19 nt, Artificial Sequence
  Description of Artificial Sequence: Synthetic oligonucleotide
caaagugcacggcuggguu

SEQ ID NO: 1948053 - RNA, 19 nt, Artificial Sequence
  Description of Artificial Sequence: Synthetic oligonucleotide
guacggcauccccaccauc

SEQ ID NO: 1948054 - RNA, 19 nt, Artificial Sequence
  Description of Artificial Sequence: Synthetic oligonucleotide
guugguuagagggcccgcu

SEQ ID NO: 1948055 - RNA, 19 nt, Artificial Sequence
  Description of Artificial Sequence: Synthetic oligonucleotide
gggcccgcugcauauaaua

SEQ ID NO: 1948056 - RNA, 19 nt, Artificial Sequence
  Description of Artificial Sequence: Synthetic oligonucleotide
gcauguaucuggcgcaggu

SEQ ID NO: 1948057 - RNA, 19 nt, Artificial Sequence
  Description of Artificial Sequence: Synthetic oligonucleotide
gugccuaauggcccugccu

SEQ ID NO: 1948058 - RNA, 19 nt, Artificial Sequence
  Description of Artificial Sequence: Synthetic oligonucleotide
cccgaaagucagacaccgg

SEQ ID NO: 1948059 - RNA, 19 nt, Artificial Sequence
  Description of Artificial Sequence: Synthetic oligonucleotide
cuccaccaacaccguuccc

SEQ ID NO: 1948060 - RNA, 19 nt, Artificial Sequence
  Description of Artificial Sequence: Synthetic oligonucleotide
cuuggcggcucaggauaac

SEQ ID NO: 1948061 - RNA, 19 nt, Artificial Sequence
  Description of Artificial Sequence: Synthetic oligonucleotide
ugccugaccgcagcacaua

SEQ ID NO: 1948062 - RNA, 19 nt, Artificial Sequence
  Description of Artificial Sequence: Synthetic oligonucleotide
cauguaucuggcgcaggua

SEQ ID NO: 1948063 - RNA, 19 nt, Artificial Sequence
  Description of Artificial Sequence: Synthetic oligonucleotide
agucucucuggugccuaau

SEQ ID NO: 1948064 - RNA, 19 nt, Artificial Sequence
  Description of Artificial Sequence: Synthetic oligonucleotide
gcggcucaggauaacccug

SEQ ID NO: 1948065 - RNA, 19 nt, Artificial Sequence
  Description of Artificial Sequence: Synthetic oligonucleotide
gcccacggucaucagagaa

SEQ ID NO: 1948066 - RNA, 19 nt, Artificial Sequence
  Description of Artificial Sequence: Synthetic oligonucleotide
gcauaccgaugauccagga

SEQ ID NO: 1948067 - RNA, 19 nt, Artificial Sequence
  Description of Artificial Sequence: Synthetic oligonucleotide
gcagggucugauccaagua

SEQ ID NO: 1948068 - RNA, 19 nt, Artificial Sequence
  Description of Artificial Sequence: Synthetic oligonucleotide
ccaugcuggcagcuucgcc

SEQ ID NO: 1948069 - RNA, 19 nt, Artificial Sequence
  Description of Artificial Sequence: Synthetic oligonucleotide
acaccggcccacggucauc

SEQ ID NO: 1948070 - RNA, 19 nt, Artificial Sequence
  Description of Artificial Sequence: Synthetic oligonucleotide
agacaggguugugccuucu

SEQ ID NO: 1948071 - RNA, 19 nt, Artificial Sequence
  Description of Artificial Sequence: Synthetic oligonucleotide
ggcagaucucuucucuggu

SEQ ID NO: 1948072 - RNA, 19 nt, Artificial Sequence
  Description of Artificial Sequence: Synthetic oligonucleotide
gcccaaagguggcuuugac

SEQ ID NO: 1948073 - RNA, 19 nt, Artificial Sequence
  Description of Artificial Sequence: Synthetic oligonucleotide
cccgauggaacuuccgcaa

SEQ ID NO: 1948074 - RNA, 19 nt, Artificial Sequence
  Description of Artificial Sequence: Synthetic oligonucleotide
gccuuucacccaacgcugc

SEQ ID NO: 1948075 - RNA, 19 nt, Artificial Sequence
  Description of Artificial Sequence: Synthetic oligonucleotide
agcuuccacuccagaacau

SEQ ID NO: 1948076 - RNA, 19 nt, Artificial Sequence
  Description of Artificial Sequence: Synthetic oligonucleotide
gacuuccacacggucucgu

SEQ ID NO: 1948077 - RNA, 19 nt, Artificial Sequence
  Description of Artificial Sequence: Synthetic oligonucleotide
gcucggcacucccucacca

SEQ ID NO: 1948078 - RNA, 19 nt, Artificial Sequence
  Description of Artificial Sequence: Synthetic oligonucleotide
caccggcccacggucauca

SEQ ID NO: 1948079 - RNA, 19 nt, Artificial Sequence
  Description of Artificial Sequence: Synthetic oligonucleotide
gcgcauguaucuggcgcag

SEQ ID NO: 1948080 - RNA, 19 nt, Artificial Sequence
  Description of Artificial Sequence: Synthetic oligonucleotide
cggucucguauccaugcug

SEQ ID NO: 1948081 - RNA, 19 nt, Artificial Sequence
  Description of Artificial Sequence: Synthetic oligonucleotide
gacagggagggcgggcaua

SEQ ID NO: 1948082 - RNA, 19 nt, Artificial Sequence
  Description of Artificial Sequence: Synthetic oligonucleotide
aggacgcggccugucuccu

SEQ ID NO: 1948083 - RNA, 19 nt, Artificial Sequence
  Description of Artificial Sequence: Synthetic oligonucleotide
cggacaagcgugccagcag

SEQ ID NO: 1948084 - RNA, 19 nt, Artificial Sequence
  Description of Artificial Sequence: Synthetic oligonucleotide
cuggugccuaauggcccug

SEQ ID NO: 1948085 - RNA, 19 nt, Artificial Sequence
  Description of Artificial Sequence: Synthetic oligonucleotide
cccagugcgcauguaucug

SEQ ID NO: 1948086 - RNA, 19 nt, Artificial Sequence
  Description of Artificial Sequence: Synthetic oligonucleotide
cuucucugguaggugaauu

SEQ ID NO: 1948087 - RNA, 19 nt, Artificial Sequence
  Description of Artificial Sequence: Synthetic oligonucleotide
ggcgggcauaccgaugauc

SEQ ID NO: 1948088 - RNA, 19 nt, Artificial Sequence
  Description of Artificial Sequence: Synthetic oligonucleotide
gccugaccgcagcacauaa

SEQ ID NO: 1948089 - RNA, 19 nt, Artificial Sequence
  Description of Artificial Sequence: Synthetic oligonucleotide
cccaaagguggcuuugacu

SEQ ID NO: 1948090 - RNA, 19 nt, Artificial Sequence
  Description of Artificial Sequence: Synthetic oligonucleotide
gguugugccuucucccgau

SEQ ID NO: 1948091 - RNA, 19 nt, Artificial Sequence
  Description of Artificial Sequence: Synthetic oligonucleotide
ggcccgcugcauauaauaa

SEQ ID NO: 1948092 - RNA, 19 nt, Artificial Sequence
  Description of Artificial Sequence: Synthetic oligonucleotide
aggcugccuuucacccaac

SEQ ID NO: 1948093 - RNA, 19 nt, Artificial Sequence
  Description of Artificial Sequence: Synthetic oligonucleotide
gcugaucccgaaagucaga

SEQ ID NO: 1948094 - RNA, 19 nt, Artificial Sequence
  Description of Artificial Sequence: Synthetic oligonucleotide
gggagggcgggcauaccga

SEQ ID NO: 1948095 - RNA, 19 nt, Artificial Sequence
  Description of Artificial Sequence: Synthetic oligonucleotide
gggguacggcauccccacc

SEQ ID NO: 1948096 - RNA, 19 nt, Artificial Sequence
  Description of Artificial Sequence: Synthetic oligonucleotide
gccuauggauugguuuaca

SEQ ID NO: 1948097 - RNA, 19 nt, Artificial Sequence
  Description of Artificial Sequence: Synthetic oligonucleotide
acgcggccugucuccucca

SEQ ID NO: 1948098 - RNA, 19 nt, Artificial Sequence
  Description of Artificial Sequence: Synthetic oligonucleotide
caaccacagagaggagcaa

SEQ ID NO: 1948099 - RNA, 19 nt, Artificial Sequence
  Description of Artificial Sequence: Synthetic oligonucleotide
cgaaagucagacaccggcu

SEQ ID NO: 1948100 - RNA, 19 nt, Artificial Sequence
  Description of Artificial Sequence: Synthetic oligonucleotide
gcaaagugcacggcugggu

SEQ ID NO: 1948101 - RNA, 19 nt, Artificial Sequence
  Description of Artificial Sequence: Synthetic oligonucleotide
cagaggacgcggccugucu

SEQ ID NO: 1948102 - RNA, 19 nt, Artificial Sequence
  Description of Artificial Sequence: Synthetic oligonucleotide
cugccugaccgcagcacau

SEQ ID NO: 1948103 - RNA, 19 nt, Artificial Sequence
  Description of Artificial Sequence: Synthetic oligonucleotide
agagggcccgcugcauaua

SEQ ID NO: 1948104 - RNA, 19 nt, Artificial Sequence
  Description of Artificial Sequence: Synthetic oligonucleotide
uugucccagugcgcaugua

SEQ ID NO: 1948105 - RNA, 19 nt, Artificial Sequence
  Description of Artificial Sequence: Synthetic oligonucleotide
gccugaccuuguguccuag

SEQ ID NO: 1948106 - RNA, 19 nt, Artificial Sequence
  Description of Artificial Sequence: Synthetic oligonucleotide
gucuugucccagugcgcau

SEQ ID NO: 1948107 - RNA, 19 nt, Artificial Sequence
  Description of Artificial Sequence: Synthetic oligonucleotide
gguacggcauccccaccau

SEQ ID NO: 1948108 - RNA, 19 nt, Artificial Sequence
  Description of Artificial Sequence: Synthetic oligonucleotide
agcgugccagcaggccagu

SEQ ID NO: 1948109 - RNA, 19 nt, Artificial Sequence
  Description of Artificial Sequence: Synthetic oligonucleotide
gcgcagguacucauaggaa

SEQ ID NO: 1948110 - RNA, 19 nt, Artificial Sequence
  Description of Artificial Sequence: Synthetic oligonucleotide
ggaggcaggucgcggggcu

SEQ ID NO: 1948111 - RNA, 19 nt, Artificial Sequence
  Description of Artificial Sequence: Synthetic oligonucleotide
agggcccgcugcauauaau

SEQ ID NO: 1948112 - RNA, 19 nt, Artificial Sequence
  Description of Artificial Sequence: Synthetic oligonucleotide
gcggccugucuccuccauc

SEQ ID NO: 1948113 - RNA, 19 nt, Artificial Sequence
  Description of Artificial Sequence: Synthetic oligonucleotide
ccccugucagauggccucc

SEQ ID NO: 1948114 - RNA, 19 nt, Artificial Sequence
  Description of Artificial Sequence: Synthetic oligonucleotide
acgcugccuuggcggcuca

SEQ ID NO: 1948115 - RNA, 19 nt, Artificial Sequence
  Description of Artificial Sequence: Synthetic oligonucleotide
ggagggcgggcauaccgau

SEQ ID NO: 1948116 - RNA, 19 nt, Artificial Sequence
  Description of Artificial Sequence: Synthetic oligonucleotide
ccuuggcggcucaggauaa

SEQ ID NO: 1948117 - RNA, 19 nt, Artificial Sequence
  Description of Artificial Sequence: Synthetic oligonucleotide
cgcauguaucuggcgcagg

SEQ ID NO: 1948118 - RNA, 19 nt, Artificial Sequence
  Description of Artificial Sequence: Synthetic oligonucleotide
gggccugaccuuguguccu

SEQ ID NO: 1948119 - RNA, 19 nt, Artificial Sequence
  Description of Artificial Sequence: Synthetic oligonucleotide
ccgcagcacauaaugcacu

SEQ ID NO: 1948120 - RNA, 19 nt, Artificial Sequence
  Description of Artificial Sequence: Synthetic oligonucleotide
ccacccgcucagcuuccac

SEQ ID NO: 1948121 - RNA, 19 nt, Artificial Sequence
  Description of Artificial Sequence: Synthetic oligonucleotide
agugcacggcuggguucaa

SEQ ID NO: 1948122 - RNA, 19 nt, Artificial Sequence
  Description of Artificial Sequence: Synthetic oligonucleotide
ggacgcggccugucuccuc

SEQ ID NO: 1948123 - RNA, 19 nt, Artificial Sequence
  Description of Artificial Sequence: Synthetic oligonucleotide
ggccugaccuuguguccua

SEQ ID NO: 1948124 - RNA, 19 nt, Artificial Sequence
  Description of Artificial Sequence: Synthetic oligonucleotide
cacggucaucagagaaguu

SEQ ID NO: 1948125 - RNA, 19 nt, Artificial Sequence
  Description of Artificial Sequence: Synthetic oligonucleotide
ggcugcauggugccaccuu

SEQ ID NO: 1948126 - RNA, 19 nt, Artificial Sequence
  Description of Artificial Sequence: Synthetic oligonucleotide
cgggcauaccgaugaucca

SEQ ID NO: 1948127 - RNA, 19 nt, Artificial Sequence
  Description of Artificial Sequence: Synthetic oligonucleotide
caucagcggggaggcaggu

SEQ ID NO: 1948128 - RNA, 19 nt, Artificial Sequence
  Description of Artificial Sequence: Synthetic oligonucleotide
ggauugguuuacaguccuu

SEQ ID NO: 1948129 - RNA, 19 nt, Artificial Sequence
  Description of Artificial Sequence: Synthetic oligonucleotide
ccacacaccggcccacggu

SEQ ID NO: 1948130 - RNA, 19 nt, Artificial Sequence
  Description of Artificial Sequence: Synthetic oligonucleotide
caacgcugccuuggcggcu

SEQ ID NO: 1948131 - RNA, 19 nt, Artificial Sequence
  Description of Artificial Sequence: Synthetic oligonucleotide
ggacagggagggcgggcau

SEQ ID NO: 1948132 - RNA, 19 nt, Artificial Sequence
  Description of Artificial Sequence: Synthetic oligonucleotide
gcagcucuggagacuuaau

SEQ ID NO: 1948133 - RNA, 19 nt, Artificial Sequence
  Description of Artificial Sequence: Synthetic oligonucleotide
caccggcugcauggugcca

SEQ ID NO: 1948134 - RNA, 19 nt, Artificial Sequence
  Description of Artificial Sequence: Synthetic oligonucleotide
ccugaccgcagcacauaau

SEQ ID NO: 1948135 - RNA, 19 nt, Artificial Sequence
  Description of Artificial Sequence: Synthetic oligonucleotide
ccacacggucucguaucca

SEQ ID NO: 1948136 - RNA, 19 nt, Artificial Sequence
  Description of Artificial Sequence: Synthetic oligonucleotide
ggccccugucagauggccu

SEQ ID NO: 1948137 - RNA, 19 nt, Artificial Sequence
  Description of Artificial Sequence: Synthetic oligonucleotide
gcaggcccaaagguggcuu

SEQ ID NO: 1948138 - RNA, 19 nt, Artificial Sequence
  Description of Artificial Sequence: Synthetic oligonucleotide
ccacugcucggcacucccu

SEQ ID NO: 1948139 - RNA, 19 nt, Artificial Sequence
  Description of Artificial Sequence: Synthetic oligonucleotide
cggcacucccucaccaccu

SEQ ID NO: 1948140 - RNA, 19 nt, Artificial Sequence
  Description of Artificial Sequence: Synthetic oligonucleotide
gcgugccagcaggccaguc

SEQ ID NO: 1948141 - RNA, 19 nt, Artificial Sequence
  Description of Artificial Sequence: Synthetic oligonucleotide
gggcgggcauaccgaugau

SEQ ID NO: 1948142 - RNA, 19 nt, Artificial Sequence
  Description of Artificial Sequence: Synthetic oligonucleotide
ggaccacguuacacagguu

SEQ ID NO: 1948143 - RNA, 19 nt, Artificial Sequence
  Description of Artificial Sequence: Synthetic oligonucleotide
ggcaggucgcggggcuggu

SEQ ID NO: 1948144 - RNA, 19 nt, Artificial Sequence
  Description of Artificial Sequence: Synthetic oligonucleotide
cggcuggguucaagagcaa

SEQ ID NO: 1948145 - RNA, 19 nt, Artificial Sequence
  Description of Artificial Sequence: Synthetic oligonucleotide
cgcggccugucuccuccau

SEQ ID NO: 1948146 - RNA, 19 nt, Artificial Sequence
  Description of Artificial Sequence: Synthetic oligonucleotide
aaagaucacauccugcccg

SEQ ID NO: 1948147 - RNA, 19 nt, Artificial Sequence
  Description of Artificial Sequence: Synthetic oligonucleotide
uuuauuacugcccacugug

SEQ ID NO: 1948148 - RNA, 19 nt, Artificial Sequence
  Description of Artificial Sequence: Synthetic oligonucleotide
cuagucauaugcuaggugg

SEQ ID NO: 1948149 - RNA, 19 nt, Artificial Sequence
  Description of Artificial Sequence: Synthetic oligonucleotide
aucacuaggccgcaaagcc

SEQ ID NO: 1948150 - RNA, 19 nt, Artificial Sequence
  Description of Artificial Sequence: Synthetic oligonucleotide
acuacaaugguucaagaca

SEQ ID NO: 1948151 - RNA, 19 nt, Artificial Sequence
  Description of Artificial Sequence: Synthetic oligonucleotide
ucacauuccaaauauugug

SEQ ID NO: 1948152 - RNA, 19 nt, Artificial Sequence
  Description of Artificial Sequence: Synthetic oligonucleotide
gucggaaccacacaguggg

SEQ ID NO: 1948153 - RNA, 19 nt, Artificial Sequence
  Description of Artificial Sequence: Synthetic oligonucleotide
uauugugaggcugagacac

SEQ ID NO: 1948154 - RNA, 19 nt, Artificial Sequence
  Description of Artificial Sequence: Synthetic oligonucleotide
aacugaguuagucccacug

SEQ ID NO: 1948155 - RNA, 19 nt, Artificial Sequence
  Description of Artificial Sequence: Synthetic oligonucleotide
ugucuagucauaugcuagg

SEQ ID NO: 1948156 - RNA, 19 nt, Artificial Sequence
  Description of Artificial Sequence: Synthetic oligonucleotide
aagaucacauccugcccgg

SEQ ID NO: 1948157 - RNA, 19 nt, Artificial Sequence
  Description of Artificial Sequence: Synthetic oligonucleotide
aacccuguggcguucagcu

SEQ ID NO: 1948158 - RNA, 19 nt, Artificial Sequence
  Description of Artificial Sequence: Synthetic oligonucleotide
acaaugguucaagacaugg

SEQ ID NO: 1948159 - RNA, 19 nt, Artificial Sequence
  Description of Artificial Sequence: Synthetic oligonucleotide
uagucauaugcuagguggg

SEQ ID NO: 1948160 - RNA, 19 nt, Artificial Sequence
  Description of Artificial Sequence: Synthetic oligonucleotide
agugagguuagcgucgggc

SEQ ID NO: 1948161 - RNA, 19 nt, Artificial Sequence
  Description of Artificial Sequence: Synthetic oligonucleotide
ucuagucauaugcuaggug

SEQ ID NO: 1948162 - RNA, 19 nt, Artificial Sequence
  Description of Artificial Sequence: Synthetic oligonucleotide
guuagcgucgggccgagcg

SEQ ID NO: 1948163 - RNA, 19 nt, Artificial Sequence
  Description of Artificial Sequence: Synthetic oligonucleotide
accccuaaacuguacagag

SEQ ID NO: 1948164 - RNA, 19 nt, Artificial Sequence
  Description of Artificial Sequence: Synthetic oligonucleotide
guagguggcacccuagugc

SEQ ID NO: 1948165 - RNA, 19 nt, Artificial Sequence
  Description of Artificial Sequence: Synthetic oligonucleotide
agguauggccgucggaacc

SEQ ID NO: 1948166 - RNA, 19 nt, Artificial Sequence
  Description of Artificial Sequence: Synthetic oligonucleotide
ugaguuagucccacugugc

SEQ ID NO: 1948167 - RNA, 19 nt, Artificial Sequence
  Description of Artificial Sequence: Synthetic oligonucleotide
uccacuacaaugguucaag

SEQ ID NO: 1948168 - RNA, 19 nt, Artificial Sequence
  Description of Artificial Sequence: Synthetic oligonucleotide
ugggguuccgauucgcagg

SEQ ID NO: 1948169 - RNA, 19 nt, Artificial Sequence
  Description of Artificial Sequence: Synthetic oligonucleotide
gauugcagcugggagaacc

SEQ ID NO: 1948170 - RNA, 19 nt, Artificial Sequence
  Description of Artificial Sequence: Synthetic oligonucleotide
uccaaauauugugaggcug

SEQ ID NO: 1948171 - RNA, 19 nt, Artificial Sequence
  Description of Artificial Sequence: Synthetic oligonucleotide
guaauaguaguagcagggg

SEQ ID NO: 1948172 - RNA, 19 nt, Artificial Sequence
  Description of Artificial Sequence: Synthetic oligonucleotide
cugucagaguagcagaggc

SEQ ID NO: 1948173 - RNA, 19 nt, Artificial Sequence
  Description of Artificial Sequence: Synthetic oligonucleotide
ucggcuaguagccgcagcc

SEQ ID NO: 1948174 - RNA, 19 nt, Artificial Sequence
  Description of Artificial Sequence: Synthetic oligonucleotide
gagcgacagacgcacagcg

SEQ ID NO: 1948175 - RNA, 19 nt, Artificial Sequence
  Description of Artificial Sequence: Synthetic oligonucleotide
uaggcgaacaccucacagc

SEQ ID NO: 1948176 - RNA, 19 nt, Artificial Sequence
  Description of Artificial Sequence: Synthetic oligonucleotide
agucauaugcuaggugggc

SEQ ID NO: 1948177 - RNA, 19 nt, Artificial Sequence
  Description of Artificial Sequence: Synthetic oligonucleotide
ugugagcacugucagagua

SEQ ID NO: 1948178 - RNA, 19 nt, Artificial Sequence
  Description of Artificial Sequence: Synthetic oligonucleotide
cacuacaaugguucaagac

SEQ ID NO: 1948179 - RNA, 19 nt, Artificial Sequence
  Description of Artificial Sequence: Synthetic oligonucleotide
ugagacacgaucugggguu

SEQ ID NO: 1948180 - RNA, 19 nt, Artificial Sequence
  Description of Artificial Sequence: Synthetic oligonucleotide
ugugcucacucuauccaca

SEQ ID NO: 1948181 - RNA, 19 nt, Artificial Sequence
  Description of Artificial Sequence: Synthetic oligonucleotide
gagaucuggaccuaguagu

SEQ ID NO: 1948182 - RNA, 19 nt, Artificial Sequence
  Description of Artificial Sequence: Synthetic oligonucleotide
accgcccaagucuagcugg

SEQ ID NO: 1948183 - RNA, 19 nt, Artificial Sequence
  Description of Artificial Sequence: Synthetic oligonucleotide
uguccaagccaucuuuccu

SEQ ID NO: 1948184 - RNA, 19 nt, Artificial Sequence
  Description of Artificial Sequence: Synthetic oligonucleotide
uuauuacugcccacugugu

SEQ ID NO: 1948185 - RNA, 19 nt, Artificial Sequence
  Description of Artificial Sequence: Synthetic oligonucleotide
aguuagucccacugugcuc

SEQ ID NO: 1948186 - RNA, 19 nt, Artificial Sequence
  Description of Artificial Sequence: Synthetic oligonucleotide
ucgauggaggccaugggau

SEQ ID NO: 1948187 - RNA, 19 nt, Artificial Sequence
  Description of Artificial Sequence: Synthetic oligonucleotide
ugcccucaucacuaggccg

SEQ ID NO: 1948188 - RNA, 19 nt, Artificial Sequence
  Description of Artificial Sequence: Synthetic oligonucleotide
auaguaguagcaggggcag

SEQ ID NO: 1948189 - RNA, 19 nt, Artificial Sequence
  Description of Artificial Sequence: Synthetic oligonucleotide
cugcgcguagguauggccg

SEQ ID NO: 1948190 - RNA, 19 nt, Artificial Sequence
  Description of Artificial Sequence: Synthetic oligonucleotide
cugagguccaccccuaaac

SEQ ID NO: 1948191 - RNA, 19 nt, Artificial Sequence
  Description of Artificial Sequence: Synthetic oligonucleotide
accaguaauaguaguagca

SEQ ID NO: 1948192 - RNA, 19 nt, Artificial Sequence
  Description of Artificial Sequence: Synthetic oligonucleotide
uaaucggugccccgccccg

SEQ ID NO: 1948193 - RNA, 19 nt, Artificial Sequence
  Description of Artificial Sequence: Synthetic oligonucleotide
gagguccaccccuaaacug

SEQ ID NO: 1948194 - RNA, 19 nt, Artificial Sequence
  Description of Artificial Sequence: Synthetic oligonucleotide
caccaguaauaguaguagc

SEQ ID NO: 1948195 - RNA, 19 nt, Artificial Sequence
  Description of Artificial Sequence: Synthetic oligonucleotide
cacuaggccgcaaagccug

SEQ ID NO: 1948196 - RNA, 19 nt, Artificial Sequence
  Description of Artificial Sequence: Synthetic oligonucleotide
ucuauccacacacccucac

SEQ ID NO: 1948197 - RNA, 19 nt, Artificial Sequence
  Description of Artificial Sequence: Synthetic oligonucleotide
guuagucccacugugcuca

SEQ ID NO: 1948198 - RNA, 19 nt, Artificial Sequence
  Description of Artificial Sequence: Synthetic oligonucleotide
agcgcgggcgaccuccugc

SEQ ID NO: 1948199 - RNA, 19 nt, Artificial Sequence
  Description of Artificial Sequence: Synthetic oligonucleotide
ucucgcugcacugaacuga

SEQ ID NO: 1948200 - RNA, 19 nt, Artificial Sequence
  Description of Artificial Sequence: Synthetic oligonucleotide
uggaccuaguaguaauccu

SEQ ID NO: 1948201 - RNA, 19 nt, Artificial Sequence
  Description of Artificial Sequence: Synthetic oligonucleotide
cuaguagccgcagccagcc

SEQ ID NO: 1948202 - RNA, 19 nt, Artificial Sequence
  Description of Artificial Sequence: Synthetic oligonucleotide
ucacuaggccgcaaagccu

SEQ ID NO: 1948203 - RNA, 19 nt, Artificial Sequence
  Description of Artificial Sequence: Synthetic oligonucleotide
ucuggaccuaguaguaauc

SEQ ID NO: 1948204 - RNA, 19 nt, Artificial Sequence
  Description of Artificial Sequence: Synthetic oligonucleotide
ucugcgcguagguauggcc

SEQ ID NO: 1948205 - RNA, 19 nt, Artificial Sequence
  Description of Artificial Sequence: Synthetic oligonucleotide
cacccgaccugcuaggcag

SEQ ID NO: 1948206 - RNA, 19 nt, Artificial Sequence
  Description of Artificial Sequence: Synthetic oligonucleotide
ucagagaucuggaccuagu

SEQ ID NO: 1948207 - RNA, 19 nt, Artificial Sequence
  Description of Artificial Sequence: Synthetic oligonucleotide
acacccucacucccaaauc

SEQ ID NO: 1948208 - RNA, 19 nt, Artificial Sequence
  Description of Artificial Sequence: Synthetic oligonucleotide
ugaacugaguuagucccac

SEQ ID NO: 1948209 - RNA, 19 nt, Artificial Sequence
  Description of Artificial Sequence: Synthetic oligonucleotide
uuagcgucgggccgagcgc

SEQ ID NO: 1948210 - RNA, 19 nt, Artificial Sequence
  Description of Artificial Sequence: Synthetic oligonucleotide
gugagcgacagacgcacag

SEQ ID NO: 1948211 - RNA, 19 nt, Artificial Sequence
  Description of Artificial Sequence: Synthetic oligonucleotide
aucuggaccuaguaguaau

SEQ ID NO: 1948212 - RNA, 19 nt, Artificial Sequence
  Description of Artificial Sequence: Synthetic oligonucleotide
acugucagaguagcagagg

SEQ ID NO: 1948213 - RNA, 19 nt, Artificial Sequence
  Description of Artificial Sequence: Synthetic oligonucleotide
agcacucggggcaucagcg

SEQ ID NO: 1948214 - RNA, 19 nt, Artificial Sequence
  Description of Artificial Sequence: Synthetic oligonucleotide
ucauaugcuaggugggcuu

SEQ ID NO: 1948215 - RNA, 19 nt, Artificial Sequence
  Description of Artificial Sequence: Synthetic oligonucleotide
ucgcccucggcuaguagcc

SEQ ID NO: 1948216 - RNA, 19 nt, Artificial Sequence
  Description of Artificial Sequence: Synthetic oligonucleotide
agguuggcgcauucccagc

SEQ ID NO: 1948217 - RNA, 19 nt, Artificial Sequence
  Description of Artificial Sequence: Synthetic oligonucleotide
cucgcugcacugaacugag

SEQ ID NO: 1948218 - RNA, 19 nt, Artificial Sequence
  Description of Artificial Sequence: Synthetic oligonucleotide
caucacuaggccgcaaagc

SEQ ID NO: 1948219 - RNA, 19 nt, Artificial Sequence
  Description of Artificial Sequence: Synthetic oligonucleotide
uguccacuacaaugguuca

SEQ ID NO: 1948220 - RNA, 19 nt, Artificial Sequence
  Description of Artificial Sequence: Synthetic oligonucleotide
cuaacggggagcggggucc

SEQ ID NO: 1948221 - RNA, 19 nt, Artificial Sequence
  Description of Artificial Sequence: Synthetic oligonucleotide
cucggcucaggucaccgcc

SEQ ID NO: 1948222 - RNA, 19 nt, Artificial Sequence
  Description of Artificial Sequence: Synthetic oligonucleotide
cugggguuccgauucgcag

SEQ ID NO: 1948223 - RNA, 19 nt, Artificial Sequence
  Description of Artificial Sequence: Synthetic oligonucleotide
cacucggggcaucagcgcg

SEQ ID NO: 1948224 - RNA, 19 nt, Artificial Sequence
  Description of Artificial Sequence: Synthetic oligonucleotide
caaauauugugaggcugag

SEQ ID NO: 1948225 - RNA, 19 nt, Artificial Sequence
  Description of Artificial Sequence: Synthetic oligonucleotide
gagggucauccccuggcag

SEQ ID NO: 1948226 - RNA, 19 nt, Artificial Sequence
  Description of Artificial Sequence: Synthetic oligonucleotide
guagguauggccgucggaa

SEQ ID NO: 1948227 - RNA, 19 nt, Artificial Sequence
  Description of Artificial Sequence: Synthetic oligonucleotide
cugugcucacucuauccac

SEQ ID NO: 1948228 - RNA, 19 nt, Artificial Sequence
  Description of Artificial Sequence: Synthetic oligonucleotide
cagaguagcagaggcuucc

SEQ ID NO: 1948229 - RNA, 19 nt, Artificial Sequence
  Description of Artificial Sequence: Synthetic oligonucleotide
auggccgucggaaccacac

SEQ ID NO: 1948230 - RNA, 19 nt, Artificial Sequence
  Description of Artificial Sequence: Synthetic oligonucleotide
ugccccaccccucucgcug

SEQ ID NO: 1948231 - RNA, 19 nt, Artificial Sequence
  Description of Artificial Sequence: Synthetic oligonucleotide
cuuggccaagggcauuccg

SEQ ID NO: 1948232 - RNA, 19 nt, Artificial Sequence
  Description of Artificial Sequence: Synthetic oligonucleotide
ucugagguccaccccuaaa

SEQ ID NO: 1948233 - RNA, 19 nt, Artificial Sequence
  Description of Artificial Sequence: Synthetic oligonucleotide
ccucaaacuucugaggucc

SEQ ID NO: 1948234 - RNA, 19 nt, Artificial Sequence
  Description of Artificial Sequence: Synthetic oligonucleotide
gauaugagggucauccccu

SEQ ID NO: 1948235 - RNA, 19 nt, Artificial Sequence
  Description of Artificial Sequence: Synthetic oligonucleotide
gaguuagucccacugugcu

SEQ ID NO: 1948236 - RNA, 19 nt, Artificial Sequence
  Description of Artificial Sequence: Synthetic oligonucleotide
ugagcgacagacgcacagc

SEQ ID NO: 1948237 - RNA, 19 nt, Artificial Sequence
  Description of Artificial Sequence: Synthetic oligonucleotide
cugugagcgacagacgcac

SEQ ID NO: 1948238 - RNA, 19 nt, Artificial Sequence
  Description of Artificial Sequence: Synthetic oligonucleotide
ccaguaauaguaguagcag

SEQ ID NO: 1948239 - RNA, 19 nt, Artificial Sequence
  Description of Artificial Sequence: Synthetic oligonucleotide
uggcgcauucccagcagca

SEQ ID NO: 1948240 - RNA, 19 nt, Artificial Sequence
  Description of Artificial Sequence: Synthetic oligonucleotide
agcgcacucuucuggccgg

SEQ ID NO: 1948241 - RNA, 19 nt, Artificial Sequence
  Description of Artificial Sequence: Synthetic oligonucleotide
augggguugccccaccccu

SEQ ID NO: 1948242 - RNA, 19 nt, Artificial Sequence
  Description of Artificial Sequence: Synthetic oligonucleotide
gcgacagacgcacagcggc

SEQ ID NO: 1948243 - RNA, 19 nt, Artificial Sequence
  Description of Artificial Sequence: Synthetic oligonucleotide
aaucggugccccgccccgc

SEQ ID NO: 1948244 - RNA, 19 nt, Artificial Sequence
  Description of Artificial Sequence: Synthetic oligonucleotide
augguucaagacauggggu

SEQ ID NO: 1948245 - RNA, 19 nt, Artificial Sequence
  Description of Artificial Sequence: Synthetic oligonucleotide
cuuuccuccacucgaugga

SEQ ID NO: 1948246 - RNA, 19 nt, Artificial Sequence
  Description of Artificial Sequence: Synthetic oligonucleotide
gguuccgauucgcagggcc

SEQ ID NO: 1948247 - RNA, 19 nt, Artificial Sequence
  Description of Artificial Sequence: Synthetic oligonucleotide
ucaccgcccaagucuagcu

SEQ ID NO: 1948248 - RNA, 19 nt, Artificial Sequence
  Description of Artificial Sequence: Synthetic oligonucleotide
agcgguaggugcccucauc

SEQ ID NO: 1948249 - RNA, 19 nt, Artificial Sequence
  Description of Artificial Sequence: Synthetic oligonucleotide
aucagagaucuggaccuag

SEQ ID NO: 1948250 - RNA, 19 nt, Artificial Sequence
  Description of Artificial Sequence: Synthetic oligonucleotide
agaucgcagagcuggcccu

SEQ ID NO: 1948251 - RNA, 19 nt, Artificial Sequence
  Description of Artificial Sequence: Synthetic oligonucleotide
gggguuccgauucgcaggg

SEQ ID NO: 1948252 - RNA, 19 nt, Artificial Sequence
  Description of Artificial Sequence: Synthetic oligonucleotide
ugcucacucuauccacaca

SEQ ID NO: 1948253 - RNA, 19 nt, Artificial Sequence
  Description of Artificial Sequence: Synthetic oligonucleotide
ccucacucccaaaucagag

SEQ ID NO: 1948254 - RNA, 19 nt, Artificial Sequence
  Description of Artificial Sequence: Synthetic oligonucleotide
cucgauggaggccauggga

SEQ ID NO: 1948255 - RNA, 19 nt, Artificial Sequence
  Description of Artificial Sequence: Synthetic oligonucleotide
ucaggucaccgcccaaguc

SEQ ID NO: 1948256 - RNA, 19 nt, Artificial Sequence
  Description of Artificial Sequence: Synthetic oligonucleotide
guagccgcagccagccucg

SEQ ID NO: 1948257 - RNA, 19 nt, Artificial Sequence
  Description of Artificial Sequence: Synthetic oligonucleotide
ucggcucaggucaccgccc

SEQ ID NO: 1948258 - RNA, 19 nt, Artificial Sequence
  Description of Artificial Sequence: Synthetic oligonucleotide
acgcaucgcgcacccgacc

SEQ ID NO: 1948259 - RNA, 19 nt, Artificial Sequence
  Description of Artificial Sequence: Synthetic oligonucleotide
cacucgagcugcucgccgc

SEQ ID NO: 1948260 - RNA, 19 nt, Artificial Sequence
  Description of Artificial Sequence: Synthetic oligonucleotide
agguccaccccuaaacugu

SEQ ID NO: 1948261 - RNA, 19 nt, Artificial Sequence
  Description of Artificial Sequence: Synthetic oligonucleotide
ccuaguaguaauccucuuc

SEQ ID NO: 1948262 - RNA, 19 nt, Artificial Sequence
  Description of Artificial Sequence: Synthetic oligonucleotide
guuggcgcauucccagcag

SEQ ID NO: 1948263 - RNA, 19 nt, Artificial Sequence
  Description of Artificial Sequence: Synthetic oligonucleotide
ccaaaucagagaucuggac

SEQ ID NO: 1948264 - RNA, 19 nt, Artificial Sequence
  Description of Artificial Sequence: Synthetic oligonucleotide
ugcgcguagguauggccgu

SEQ ID NO: 1948265 - RNA, 19 nt, Artificial Sequence
  Description of Artificial Sequence: Synthetic oligonucleotide
gugcccucaucacuaggcc

SEQ ID NO: 1948266 - RNA, 19 nt, Artificial Sequence
  Description of Artificial Sequence: Synthetic oligonucleotide
agacaugggguugccccac

SEQ ID NO: 1948267 - RNA, 19 nt, Artificial Sequence
  Description of Artificial Sequence: Synthetic oligonucleotide
ugggauaggcgaacaccuc

SEQ ID NO: 1948268 - RNA, 19 nt, Artificial Sequence
  Description of Artificial Sequence: Synthetic oligonucleotide
ccaaauauugugaggcuga

SEQ ID NO: 1948269 - RNA, 19 nt, Artificial Sequence
  Description of Artificial Sequence: Synthetic oligonucleotide
auugugaggcugagacacg

SEQ ID NO: 1948270 - RNA, 19 nt, Artificial Sequence
  Description of Artificial Sequence: Synthetic oligonucleotide
ggcauuccgggcaaggcag

SEQ ID NO: 1948271 - RNA, 19 nt, Artificial Sequence
  Description of Artificial Sequence: Synthetic oligonucleotide
uuacugcccacugugucua

SEQ ID NO: 1948272 - RNA, 19 nt, Artificial Sequence
  Description of Artificial Sequence: Synthetic oligonucleotide
aucugcgcguagguauggc

SEQ ID NO: 1948273 - RNA, 19 nt, Artificial Sequence
  Description of Artificial Sequence: Synthetic oligonucleotide
cuaggugggcuuuguccac

SEQ ID NO: 1948274 - RNA, 19 nt, Artificial Sequence
  Description of Artificial Sequence: Synthetic oligonucleotide
ggaccuaguaguaauccuc

SEQ ID NO: 1948275 - RNA, 19 nt, Artificial Sequence
  Description of Artificial Sequence: Synthetic oligonucleotide
cacccucacucccaaauca

SEQ ID NO: 1948276 - RNA, 19 nt, Artificial Sequence
  Description of Artificial Sequence: Synthetic oligonucleotide
ucggaaccacacagugggc

SEQ ID NO: 1948277 - RNA, 19 nt, Artificial Sequence
  Description of Artificial Sequence: Synthetic oligonucleotide
agacacgaucugggguucc

SEQ ID NO: 1948278 - RNA, 19 nt, Artificial Sequence
  Description of Artificial Sequence: Synthetic oligonucleotide
gggauaggcgaacaccuca

SEQ ID NO: 1948279 - RNA, 19 nt, Artificial Sequence
  Description of Artificial Sequence: Synthetic oligonucleotide
gguucaagacaugggguug

SEQ ID NO: 1948280 - RNA, 19 nt, Artificial Sequence
  Description of Artificial Sequence: Synthetic oligonucleotide
cauuccgggcaaggcagcg

SEQ ID NO: 1948281 - RNA, 19 nt, Artificial Sequence
  Description of Artificial Sequence: Synthetic oligonucleotide
uccacaccaccaccaguaa

SEQ ID NO: 1948282 - RNA, 19 nt, Artificial Sequence
  Description of Artificial Sequence: Synthetic oligonucleotide
ugugagcgacagacgcaca

SEQ ID NO: 1948283 - RNA, 19 nt, Artificial Sequence
  Description of Artificial Sequence: Synthetic oligonucleotide
ucgccgcagguaaucggug

SEQ ID NO: 1948284 - RNA, 19 nt, Artificial Sequence
  Description of Artificial Sequence: Synthetic oligonucleotide
auuccgggcaaggcagcgg

SEQ ID NO: 1948285 - RNA, 19 nt, Artificial Sequence
  Description of Artificial Sequence: Synthetic oligonucleotide
ucagcgcguagguggcacc

SEQ ID NO: 1948286 - RNA, 19 nt, Artificial Sequence
  Description of Artificial Sequence: Synthetic oligonucleotide
gaaucuguagccagccagu

SEQ ID NO: 1948287 - RNA, 19 nt, Artificial Sequence
  Description of Artificial Sequence: Synthetic oligonucleotide
accugcuaggcagccccgc

SEQ ID NO: 1948288 - RNA, 19 nt, Artificial Sequence
  Description of Artificial Sequence: Synthetic oligonucleotide
uauggccgucggaaccaca

SEQ ID NO: 1948289 - RNA, 19 nt, Artificial Sequence
  Description of Artificial Sequence: Synthetic oligonucleotide
acagagauaugagggucau

SEQ ID NO: 1948290 - RNA, 19 nt, Artificial Sequence
  Description of Artificial Sequence: Synthetic oligonucleotide
guagcagaggcuuccacuu

SEQ ID NO: 1948291 - RNA, 19 nt, Artificial Sequence
  Description of Artificial Sequence: Synthetic oligonucleotide
cagcgcccguagaaguugg

SEQ ID NO: 1948292 - RNA, 19 nt, Artificial Sequence
  Description of Artificial Sequence: Synthetic oligonucleotide
aaccacacagugggcucug

SEQ ID NO: 1948293 - RNA, 19 nt, Artificial Sequence
  Description of Artificial Sequence: Synthetic oligonucleotide
cagaucugcgcguagguau

SEQ ID NO: 1948294 - RNA, 19 nt, Artificial Sequence
  Description of Artificial Sequence: Synthetic oligonucleotide
gccggcagggagcacagcc

SEQ ID NO: 1948295 - RNA, 19 nt, Artificial Sequence
  Description of Artificial Sequence: Synthetic oligonucleotide
ggcgaccuccugcaggcgg

SEQ ID NO: 1948296 - RNA, 19 nt, Artificial Sequence
  Description of Artificial Sequence: Synthetic oligonucleotide
gaucuggaccuaguaguaa

SEQ ID NO: 1948297 - RNA, 19 nt, Artificial Sequence
  Description of Artificial Sequence: Synthetic oligonucleotide
caucgcgcacccgaccugc

SEQ ID NO: 1948298 - RNA, 19 nt, Artificial Sequence
  Description of Artificial Sequence: Synthetic oligonucleotide
gcuccggcaccucuccucg

SEQ ID NO: 1948299 - RNA, 19 nt, Artificial Sequence
  Description of Artificial Sequence: Synthetic oligonucleotide
uggccgucggaaccacaca

SEQ ID NO: 1948300 - RNA, 19 nt, Artificial Sequence
  Description of Artificial Sequence: Synthetic oligonucleotide
agcgccaagguaggugcag

SEQ ID NO: 1948301 - RNA, 19 nt, Artificial Sequence
  Description of Artificial Sequence: Synthetic oligonucleotide
cucaucacuaggccgcaaa

SEQ ID NO: 1948302 - RNA, 19 nt, Artificial Sequence
  Description of Artificial Sequence: Synthetic oligonucleotide
ggaaccacacagugggcuc

SEQ ID NO: 1948303 - RNA, 19 nt, Artificial Sequence
  Description of Artificial Sequence: Synthetic oligonucleotide
agaucuggaccuaguagua

SEQ ID NO: 1948304 - RNA, 19 nt, Artificial Sequence
  Description of Artificial Sequence: Synthetic oligonucleotide
acgaucugggguuccgauu

SEQ ID NO: 1948305 - RNA, 19 nt, Artificial Sequence
  Description of Artificial Sequence: Synthetic oligonucleotide
cucggcuaguagccgcagc

SEQ ID NO: 1948306 - RNA, 19 nt, Artificial Sequence
  Description of Artificial Sequence: Synthetic oligonucleotide
gacagacgcacagcggcuc

SEQ ID NO: 1948307 - RNA, 19 nt, Artificial Sequence
  Description of Artificial Sequence: Synthetic oligonucleotide
gucaccgcccaagucuagc

SEQ ID NO: 1948308 - RNA, 19 nt, Artificial Sequence
  Description of Artificial Sequence: Synthetic oligonucleotide
acucgagcugcucgccgca

SEQ ID NO: 1948309 - RNA, 19 nt, Artificial Sequence
  Description of Artificial Sequence: Synthetic oligonucleotide
agccucgccgcagguaauc

SEQ ID NO: 1948310 - RNA, 19 nt, Artificial Sequence
  Description of Artificial Sequence: Synthetic oligonucleotide
uuggcgcugggguccagau

SEQ ID NO: 1948311 - RNA, 19 nt, Artificial Sequence
  Description of Artificial Sequence: Synthetic oligonucleotide
agacgcacagcggcuccgg

SEQ ID NO: 1948312 - RNA, 19 nt, Artificial Sequence
  Description of Artificial Sequence: Synthetic oligonucleotide
cacgcaucgcgcacccgac

SEQ ID NO: 1948313 - RNA, 19 nt, Artificial Sequence
  Description of Artificial Sequence: Synthetic oligonucleotide
accuaguaguaauccucuu

SEQ ID NO: 1948314 - RNA, 19 nt, Artificial Sequence
  Description of Artificial Sequence: Synthetic oligonucleotide
agaguagcagaggcuucca

SEQ ID NO: 1948315 - RNA, 19 nt, Artificial Sequence
  Description of Artificial Sequence: Synthetic oligonucleotide
cacucuauccacacacccu

SEQ ID NO: 1948316 - RNA, 19 nt, Artificial Sequence
  Description of Artificial Sequence: Synthetic oligonucleotide
gacgcacagcggcuccggc

SEQ ID NO: 1948317 - RNA, 19 nt, Artificial Sequence
  Description of Artificial Sequence: Synthetic oligonucleotide
ggauaggcgaacaccucac

SEQ ID NO: 1948318 - RNA, 19 nt, Artificial Sequence
  Description of Artificial Sequence: Synthetic oligonucleotide
cugugucuagucauaugcu

SEQ ID NO: 1948319 - RNA, 19 nt, Artificial Sequence
  Description of Artificial Sequence: Synthetic oligonucleotide
gcccucaucacuaggccgc

SEQ ID NO: 1948320 - RNA, 19 nt, Artificial Sequence
  Description of Artificial Sequence: Synthetic oligonucleotide
cugagacacgaucuggggu

SEQ ID NO: 1948321 - RNA, 19 nt, Artificial Sequence
  Description of Artificial Sequence: Synthetic oligonucleotide
caccccuaaacuguacaga

SEQ ID NO: 1948322 - RNA, 19 nt, Artificial Sequence
  Description of Artificial Sequence: Synthetic oligonucleotide
caccgcccaagucuagcug

SEQ ID NO: 1948323 - RNA, 19 nt, Artificial Sequence
  Description of Artificial Sequence: Synthetic oligonucleotide
cagagaucuggaccuagua

SEQ ID NO: 1948324 - RNA, 19 nt, Artificial Sequence
  Description of Artificial Sequence: Synthetic oligonucleotide
gguuggcgcauucccagca

SEQ ID NO: 1948325 - RNA, 19 nt, Artificial Sequence
  Description of Artificial Sequence: Synthetic oligonucleotide
gccgcaaagccugaaucug

SEQ ID NO: 1948326 - RNA, 19 nt, Artificial Sequence
  Description of Artificial Sequence: Synthetic oligonucleotide
gccgcagguaaucggugcc

SEQ ID NO: 1948327 - RNA, 19 nt, Artificial Sequence
  Description of Artificial Sequence: Synthetic oligonucleotide
gggcauuccgggcaaggca

SEQ ID NO: 1948328 - RNA, 19 nt, Artificial Sequence
  Description of Artificial Sequence: Synthetic oligonucleotide
gaccugcuaggcagccccg

SEQ ID NO: 1948329 - RNA, 19 nt, Artificial Sequence
  Description of Artificial Sequence: Synthetic oligonucleotide
ccgucggaaccacacagug

SEQ ID NO: 1948330 - RNA, 19 nt, Artificial Sequence
  Description of Artificial Sequence: Synthetic oligonucleotide
gcacugaacugaguuaguc

SEQ ID NO: 1948331 - RNA, 19 nt, Artificial Sequence
  Description of Artificial Sequence: Synthetic oligonucleotide
gguauggccgucggaacca

SEQ ID NO: 1948332 - RNA, 19 nt, Artificial Sequence
  Description of Artificial Sequence: Synthetic oligonucleotide
cccuaaacuguacagagau

SEQ ID NO: 1948333 - RNA, 19 nt, Artificial Sequence
  Description of Artificial Sequence: Synthetic oligonucleotide
gcacucgagcugcucgccg

SEQ ID NO: 1948334 - RNA, 19 nt, Artificial Sequence
  Description of Artificial Sequence: Synthetic oligonucleotide
cagcgcguagguggcaccc

SEQ ID NO: 1948335 - RNA, 19 nt, Artificial Sequence
  Description of Artificial Sequence: Synthetic oligonucleotide
gcgggcgaccuccugcagg

SEQ ID NO: 1948336 - RNA, 19 nt, Artificial Sequence
  Description of Artificial Sequence: Synthetic oligonucleotide
aacggggagcgggguccac

SEQ ID NO: 1948337 - RNA, 19 nt, Artificial Sequence
  Description of Artificial Sequence: Synthetic oligonucleotide
agcgcccguagaaguuggc

SEQ ID NO: 1948338 - RNA, 19 nt, Artificial Sequence
  Description of Artificial Sequence: Synthetic oligonucleotide
cgcccguagaaguuggcgc

SEQ ID NO: 1948339 - RNA, 19 nt, Artificial Sequence
  Description of Artificial Sequence: Synthetic oligonucleotide
cgucggaaccacacagugg

SEQ ID NO: 1948340 - RNA, 19 nt, Artificial Sequence
  Description of Artificial Sequence: Synthetic oligonucleotide
cucgccgcagguaaucggu

SEQ ID NO: 1948341 - RNA, 19 nt, Artificial Sequence
  Description of Artificial Sequence: Synthetic oligonucleotide
gcguagguauggccgucgg

SEQ ID NO: 1948342 - RNA, 19 nt, Artificial Sequence
  Description of Artificial Sequence: Synthetic oligonucleotide
gcuaguagccgcagccagc

SEQ ID NO: 1948343 - RNA, 19 nt, Artificial Sequence
  Description of Artificial Sequence: Synthetic oligonucleotide
uccgauucgcagggcccug

SEQ ID NO: 1948344 - RNA, 19 nt, Artificial Sequence
  Description of Artificial Sequence: Synthetic oligonucleotide
gcacgcaucgcgcacccga

SEQ ID NO: 1948345 - RNA, 19 nt, Artificial Sequence
  Description of Artificial Sequence: Synthetic oligonucleotide
gcgcccguagaaguuggcg

SEQ ID NO: 1948346 - RNA, 19 nt, Artificial Sequence
  Description of Artificial Sequence: Synthetic oligonucleotide
gaacugaguuagucccacu

SEQ ID NO: 1948347 - RNA, 19 nt, Artificial Sequence
  Description of Artificial Sequence: Synthetic oligonucleotide
gucuagucauaugcuaggu

SEQ ID NO: 1948348 - RNA, 19 nt, Artificial Sequence
  Description of Artificial Sequence: Synthetic oligonucleotide
ccugcuaggcagccccgcg

SEQ ID NO: 1948349 - RNA, 19 nt, Artificial Sequence
  Description of Artificial Sequence: Synthetic oligonucleotide
ggcgcauucccagcagcag

SEQ ID NO: 1948350 - RNA, 19 nt, Artificial Sequence
  Description of Artificial Sequence: Synthetic oligonucleotide
cagugagguuagcgucggg

SEQ ID NO: 1948351 - RNA, 19 nt, Artificial Sequence
  Description of Artificial Sequence: Synthetic oligonucleotide
gcagcgcacucuucuggcc

SEQ ID NO: 1948352 - RNA, 19 nt, Artificial Sequence
  Description of Artificial Sequence: Synthetic oligonucleotide
cgcgcuaacggggagcggg

SEQ ID NO: 1948353 - RNA, 19 nt, Artificial Sequence
  Description of Artificial Sequence: Synthetic oligonucleotide
ucgcugcacugaacugagu

SEQ ID NO: 1948354 - RNA, 19 nt, Artificial Sequence
  Description of Artificial Sequence: Synthetic oligonucleotide
uaacggggagcggggucca

SEQ ID NO: 1948355 - RNA, 19 nt, Artificial Sequence
  Description of Artificial Sequence: Synthetic oligonucleotide
ccucgccgcagguaaucgg

SEQ ID NO: 1948356 - RNA, 19 nt, Artificial Sequence
  Description of Artificial Sequence: Synthetic oligonucleotide
uugccccaccccucucgcu

SEQ ID NO: 1948357 - RNA, 19 nt, Artificial Sequence
  Description of Artificial Sequence: Synthetic oligonucleotide
ccaagucuagcuggcacuc

SEQ ID NO: 1948358 - RNA, 19 nt, Artificial Sequence
  Description of Artificial Sequence: Synthetic oligonucleotide
gcacucggggcaucagcgc

SEQ ID NO: 1948359 - RNA, 19 nt, Artificial Sequence
  Description of Artificial Sequence: Synthetic oligonucleotide
ucggggcaucagcgcguag

SEQ ID NO: 1948360 - RNA, 19 nt, Artificial Sequence
  Description of Artificial Sequence: Synthetic oligonucleotide
gcuaacggggagcgggguc

SEQ ID NO: 1948361 - RNA, 19 nt, Artificial Sequence
  Description of Artificial Sequence: Synthetic oligonucleotide
gcagcgcccguagaaguug

SEQ ID NO: 1948362 - RNA, 19 nt, Artificial Sequence
  Description of Artificial Sequence: Synthetic oligonucleotide
guccacuacaaugguucaa

SEQ ID NO: 1948363 - RNA, 19 nt, Artificial Sequence
  Description of Artificial Sequence: Synthetic oligonucleotide
acucggggcaucagcgcgu

SEQ ID NO: 1948364 - RNA, 19 nt, Artificial Sequence
  Description of Artificial Sequence: Synthetic oligonucleotide
agaucacauccugcccggu

SEQ ID NO: 1948365 - RNA, 19 nt, Artificial Sequence
  Description of Artificial Sequence: Synthetic oligonucleotide
ucgcgcacccgaccugcua

SEQ ID NO: 1948366 - RNA, 19 nt, Artificial Sequence
  Description of Artificial Sequence: Synthetic oligonucleotide
aggucaccgcccaagucua

SEQ ID NO: 1948367 - RNA, 19 nt, Artificial Sequence
  Description of Artificial Sequence: Synthetic oligonucleotide
ggcuccggcaccucuccuc

SEQ ID NO: 1948368 - RNA, 19 nt, Artificial Sequence
  Description of Artificial Sequence: Synthetic oligonucleotide
agguuagcgucgggccgag

SEQ ID NO: 1948369 - RNA, 19 nt, Artificial Sequence
  Description of Artificial Sequence: Synthetic oligonucleotide
gauucgcagggcccuggau

SEQ ID NO: 1948370 - RNA, 19 nt, Artificial Sequence
  Description of Artificial Sequence: Synthetic oligonucleotide
guauggccgucggaaccac

SEQ ID NO: 1948371 - RNA, 19 nt, Artificial Sequence
  Description of Artificial Sequence: Synthetic oligonucleotide
gcccucggcuaguagccgc

SEQ ID NO: 1948372 - RNA, 19 nt, Artificial Sequence
  Description of Artificial Sequence: Synthetic oligonucleotide
ugauugcagcugggagaac

SEQ ID NO: 1948373 - RNA, 19 nt, Artificial Sequence
  Description of Artificial Sequence: Synthetic oligonucleotide
cgggcgaccuccugcaggc

SEQ ID NO: 1948374 - RNA, 19 nt, Artificial Sequence
  Description of Artificial Sequence: Synthetic oligonucleotide
cucgagcugcucgccgcag

SEQ ID NO: 1948375 - RNA, 19 nt, Artificial Sequence
  Description of Artificial Sequence: Synthetic oligonucleotide
uccgggcaaggcagcggua

SEQ ID NO: 1948376 - RNA, 19 nt, Artificial Sequence
  Description of Artificial Sequence: Synthetic oligonucleotide
cgcagcgcacucuucuggc

SEQ ID NO: 1948377 - RNA, 19 nt, Artificial Sequence
  Description of Artificial Sequence: Synthetic oligonucleotide
ggaaccagauucauugauu

SEQ ID NO: 1948378 - RNA, 19 nt, Artificial Sequence
  Description of Artificial Sequence: Synthetic oligonucleotide
cccgcgcuaacggggagcg

SEQ ID NO: 1948379 - RNA, 19 nt, Artificial Sequence
  Description of Artificial Sequence: Synthetic oligonucleotide
gcgcacccgaccugcuagg

SEQ ID NO: 1948380 - RNA, 19 nt, Artificial Sequence
  Description of Artificial Sequence: Synthetic oligonucleotide
gccucgccgcagguaaucg

SEQ ID NO: 1948381 - RNA, 19 nt, Artificial Sequence
  Description of Artificial Sequence: Synthetic oligonucleotide
ccgggcaaggcagcgguag

SEQ ID NO: 1948382 - RNA, 19 nt, Artificial Sequence
  Description of Artificial Sequence: Synthetic oligonucleotide
acuaggccgcaaagccuga

SEQ ID NO: 1948383 - RNA, 19 nt, Artificial Sequence
  Description of Artificial Sequence: Synthetic oligonucleotide
agcgcguagguggcacccu

SEQ ID NO: 1948384 - RNA, 19 nt, Artificial Sequence
  Description of Artificial Sequence: Synthetic oligonucleotide
gcccguagaaguuggcgcu

SEQ ID NO: 1948385 - RNA, 19 nt, Artificial Sequence
  Description of Artificial Sequence: Synthetic oligonucleotide
ggcacucgagcugcucgcc

SEQ ID NO: 1948386 - RNA, 19 nt, Artificial Sequence
  Description of Artificial Sequence: Synthetic oligonucleotide
cacgaucugggguuccgau

SEQ ID NO: 1948387 - RNA, 19 nt, Artificial Sequence
  Description of Artificial Sequence: Synthetic oligonucleotide
cccucacucccaaaucaga

SEQ ID NO: 1948388 - RNA, 19 nt, Artificial Sequence
  Description of Artificial Sequence: Synthetic oligonucleotide
ccgccccgcgcuaacgggg

SEQ ID NO: 1948389 - RNA, 19 nt, Artificial Sequence
  Description of Artificial Sequence: Synthetic oligonucleotide
ccggucacauuccaaauau

SEQ ID NO: 1948390 - RNA, 19 nt, Artificial Sequence
  Description of Artificial Sequence: Synthetic oligonucleotide
ccagccucgccgcagguaa

SEQ ID NO: 1948391 - RNA, 19 nt, Artificial Sequence
  Description of Artificial Sequence: Synthetic oligonucleotide
cgcgcacccgaccugcuag

SEQ ID NO: 1948392 - RNA, 19 nt, Artificial Sequence
  Description of Artificial Sequence: Synthetic oligonucleotide
ccgcccaagucuagcuggc

SEQ ID NO: 1948393 - RNA, 19 nt, Artificial Sequence
  Description of Artificial Sequence: Synthetic oligonucleotide
cagccgcacgcaucgcgca

SEQ ID NO: 1948394 - RNA, 19 nt, Artificial Sequence
  Description of Artificial Sequence: Synthetic oligonucleotide
gcaucgcgcacccgaccug

SEQ ID NO: 1948395 - RNA, 19 nt, Artificial Sequence
  Description of Artificial Sequence: Synthetic oligonucleotide
gcgcuaacggggagcgggg

SEQ ID NO: 1948396 - RNA, 19 nt, Artificial Sequence
  Description of Artificial Sequence: Synthetic oligonucleotide
cgccgcagguaaucggugc

SEQ ID NO: 1948397 - RNA, 19 nt, Artificial Sequence
  Description of Artificial Sequence: Synthetic oligonucleotide
gcgaccuccugcaggcggc

SEQ ID NO: 1948398 - RNA, 19 nt, Artificial Sequence
  Description of Artificial Sequence: Synthetic oligonucleotide
gcgccaagguaggugcagc

SEQ ID NO: 1948399 - RNA, 19 nt, Artificial Sequence
  Description of Artificial Sequence: Synthetic oligonucleotide
gcacccgaccugcuaggca

SEQ ID NO: 1948400 - RNA, 19 nt, Artificial Sequence
  Description of Artificial Sequence: Synthetic oligonucleotide
cgcagguaaucggugcccc

SEQ ID NO: 1948401 - RNA, 19 nt, Artificial Sequence
  Description of Artificial Sequence: Synthetic oligonucleotide
cugcccggucacauuccaa

SEQ ID NO: 1948402 - RNA, 19 nt, Artificial Sequence
  Description of Artificial Sequence: Synthetic oligonucleotide
cauaugcuaggugggcuuu

SEQ ID NO: 1948403 - RNA, 19 nt, Artificial Sequence
  Description of Artificial Sequence: Synthetic oligonucleotide
gccgcacgcaucgcgcacc

SEQ ID NO: 1948404 - RNA, 19 nt, Artificial Sequence
  Description of Artificial Sequence: Synthetic oligonucleotide
ggagaacccuguggcguuc

SEQ ID NO: 1948405 - RNA, 19 nt, Artificial Sequence
  Description of Artificial Sequence: Synthetic oligonucleotide
ggggagcgggguccacacc

SEQ ID NO: 1948406 - RNA, 19 nt, Artificial Sequence
  Description of Artificial Sequence: Synthetic oligonucleotide
ccgauucgcagggcccugg

SEQ ID NO: 1948407 - RNA, 19 nt, Artificial Sequence
  Description of Artificial Sequence: Synthetic oligonucleotide
uagccgcagccagccucgc

SEQ ID NO: 1948408 - RNA, 19 nt, Artificial Sequence
  Description of Artificial Sequence: Synthetic oligonucleotide
cccacugugucuagucaua

SEQ ID NO: 1948409 - RNA, 19 nt, Artificial Sequence
  Description of Artificial Sequence: Synthetic oligonucleotide
ggucaccgcccaagucuag

SEQ ID NO: 1948410 - RNA, 19 nt, Artificial Sequence
  Description of Artificial Sequence: Synthetic oligonucleotide
cgcguagguggcacccuag

SEQ ID NO: 1948411 - RNA, 19 nt, Artificial Sequence
  Description of Artificial Sequence: Synthetic oligonucleotide
cccggucacauuccaaaua

SEQ ID NO: 1948412 - RNA, 19 nt, Artificial Sequence
  Description of Artificial Sequence: Synthetic oligonucleotide
gcagaucugcgcguaggua

SEQ ID NO: 1948413 - RNA, 19 nt, Artificial Sequence
  Description of Artificial Sequence: Synthetic oligonucleotide
cgcguagguauggccgucg

SEQ ID NO: 1948414 - RNA, 19 nt, Artificial Sequence
  Description of Artificial Sequence: Synthetic oligonucleotide
ggcgaacaccucacagcca

SEQ ID NO: 1948415 - RNA, 19 nt, Artificial Sequence
  Description of Artificial Sequence: Synthetic oligonucleotide
caucagcgcguagguggca

SEQ ID NO: 1948416 - RNA, 19 nt, Artificial Sequence
  Description of Artificial Sequence: Synthetic oligonucleotide
gcgcgggcgaccuccugca

SEQ ID NO: 1948417 - RNA, 19 nt, Artificial Sequence
  Description of Artificial Sequence: Synthetic oligonucleotide
gguccaccccuaaacugua

SEQ ID NO: 1948418 - RNA, 19 nt, Artificial Sequence
  Description of Artificial Sequence: Synthetic oligonucleotide
ccgcacgcaucgcgcaccc

SEQ ID NO: 1948419 - RNA, 19 nt, Artificial Sequence
  Description of Artificial Sequence: Synthetic oligonucleotide
cgcaaagccugaaucugua

SEQ ID NO: 1948420 - RNA, 19 nt, Artificial Sequence
  Description of Artificial Sequence: Synthetic oligonucleotide
aucgcgcacccgaccugcu

SEQ ID NO: 1948421 - RNA, 19 nt, Artificial Sequence
  Description of Artificial Sequence: Synthetic oligonucleotide
gguggcacccuagugccuu

SEQ ID NO: 1948422 - RNA, 19 nt, Artificial Sequence
  Description of Artificial Sequence: Synthetic oligonucleotide
cccucggcuaguagccgca

SEQ ID NO: 1948423 - RNA, 19 nt, Artificial Sequence
  Description of Artificial Sequence: Synthetic oligonucleotide
ccgaccugcuaggcagccc

SEQ ID NO: 1948424 - RNA, 19 nt, Artificial Sequence
  Description of Artificial Sequence: Synthetic oligonucleotide
cguagguauggccgucgga

SEQ ID NO: 1948425 - RNA, 19 nt, Artificial Sequence
  Description of Artificial Sequence: Synthetic oligonucleotide
ccccgcgcuaacggggagc

SEQ ID NO: 1948426 - RNA, 19 nt, Artificial Sequence
  Description of Artificial Sequence: Synthetic oligonucleotide
gggcgaccuccugcaggcg

SEQ ID NO: 1948427 - RNA, 19 nt, Artificial Sequence
  Description of Artificial Sequence: Synthetic oligonucleotide
ggguuccgauucgcagggc

SEQ ID NO: 1948428 - RNA, 19 nt, Artificial Sequence
  Description of Artificial Sequence: Synthetic oligonucleotide
cuguggcguucagcugguc

SEQ ID NO: 1948429 - RNA, 19 nt, Artificial Sequence
  Description of Artificial Sequence: Synthetic oligonucleotide
ccucggcuaguagccgcag

SEQ ID NO: 1948430 - RNA, 19 nt, Artificial Sequence
  Description of Artificial Sequence: Synthetic oligonucleotide
cucggggcaucagcgcgua

SEQ ID NO: 1948431 - RNA, 19 nt, Artificial Sequence
  Description of Artificial Sequence: Synthetic oligonucleotide
gccccgcgcuaacggggag

SEQ ID NO: 1948432 - RNA, 19 nt, Artificial Sequence
  Description of Artificial Sequence: Synthetic oligonucleotide
gcgcguagguggcacccua

SEQ ID NO: 1948433 - RNA, 19 nt, Artificial Sequence
  Description of Artificial Sequence: Synthetic oligonucleotide
gguuagcgucgggccgagc

SEQ ID NO: 1948434 - RNA, 19 nt, Artificial Sequence
  Description of Artificial Sequence: Synthetic oligonucleotide
ggguugccccaccccucuc

SEQ ID NO: 1948435 - RNA, 19 nt, Artificial Sequence
  Description of Artificial Sequence: Synthetic oligonucleotide
ggcucaggucaccgcccaa

SEQ ID NO: 1948436 - RNA, 19 nt, Artificial Sequence
  Description of Artificial Sequence: Synthetic oligonucleotide
cgcacccgaccugcuaggc

SEQ ID NO: 1948437 - RNA, 19 nt, Artificial Sequence
  Description of Artificial Sequence: Synthetic oligonucleotide
gccgucggaaccacacagu

SEQ ID NO: 1948438 - RNA, 19 nt, Artificial Sequence
  Description of Artificial Sequence: Synthetic oligonucleotide
cgucgggccgagcgcgggc

SEQ ID NO: 1948439 - RNA, 19 nt, Artificial Sequence
  Description of Artificial Sequence: Synthetic oligonucleotide
gcgcguagguauggccguc

SEQ ID NO: 1948440 - RNA, 19 nt, Artificial Sequence
  Description of Artificial Sequence: Synthetic oligonucleotide
ccuguggcguucagcuggu

SEQ ID NO: 1948441 - RNA, 19 nt, Artificial Sequence
  Description of Artificial Sequence: Synthetic oligonucleotide
cgcaucgcgcacccgaccu

SEQ ID NO: 1948442 - RNA, 19 nt, Artificial Sequence
  Description of Artificial Sequence: Synthetic oligonucleotide
cccgcggcgcagcgcacuc

SEQ ID NO: 1948443 - RNA, 19 nt, Artificial Sequence
  Description of Artificial Sequence: Synthetic oligonucleotide
cgaacaccucacagccaaa

SEQ ID NO: 1948444 - RNA, 19 nt, Artificial Sequence
  Description of Artificial Sequence: Synthetic oligonucleotide
ggcguucagcugguccacu

SEQ ID NO: 1948445 - RNA, 19 nt, Artificial Sequence
  Description of Artificial Sequence: Synthetic oligonucleotide
cagccucgccgcagguaau

SEQ ID NO: 1948446 - RNA, 19 nt, Artificial Sequence
  Description of Artificial Sequence: Synthetic oligonucleotide
cggcuaguagccgcagcca

SEQ ID NO: 1948447 - RNA, 19 nt, Artificial Sequence
  Description of Artificial Sequence: Synthetic oligonucleotide
ccaccccucucgcugcacu

SEQ ID NO: 1948448 - RNA, 19 nt, Artificial Sequence
  Description of Artificial Sequence: Synthetic oligonucleotide
ccgcgcuaacggggagcgg

SEQ ID NO: 1948449 - RNA, 19 nt, Artificial Sequence
  Description of Artificial Sequence: Synthetic oligonucleotide
cccaccccucucgcugcac

SEQ ID NO: 1948450 - RNA, 19 nt, Artificial Sequence
  Description of Artificial Sequence: Synthetic oligonucleotide
cgcgggcgaccuccugcag

SEQ ID NO: 1948451 - RNA, 19 nt, Artificial Sequence
  Description of Artificial Sequence: Synthetic oligonucleotide
cgccccgcgcuaacgggga

SEQ ID NO: 1948452 - RNA, 19 nt, Artificial Sequence
  Description of Artificial Sequence: Synthetic oligonucleotide
cgcacgcaucgcgcacccg

SEQ ID NO: 1948453 - RNA, 19 nt, Artificial Sequence
  Description of Artificial Sequence: Synthetic oligonucleotide
cggucacauuccaaauauu

SEQ ID NO: 1948454 - RNA, 19 nt, Artificial Sequence
  Description of Artificial Sequence: Synthetic oligonucleotide
gggcagcgccaagguaggu

SEQ ID NO: 1948455 - RNA, 19 nt, Artificial Sequence
  Description of Artificial Sequence: Synthetic oligonucleotide
ccacuuggccaagggcauu

SEQ ID NO: 1948456 - RNA, 19 nt, Artificial Sequence
  Description of Artificial Sequence: Synthetic oligonucleotide
cgcuaacggggagcggggu

SEQ ID NO: 1948457 - RNA, 19 nt, Artificial Sequence
  Description of Artificial Sequence: Synthetic oligonucleotide
cccuccagguuggcgcauu

SEQ ID NO: 1948458 - RNA, 19 nt, Artificial Sequence
  Description of Artificial Sequence: Synthetic oligonucleotide
cggcuccggcaccucuccu

SEQ ID NO: 1948459 - RNA, 19 nt, Artificial Sequence
  Description of Artificial Sequence: Synthetic oligonucleotide
auaguuaucaauuagaggg

SEQ ID NO: 1948460 - RNA, 19 nt, Artificial Sequence
  Description of Artificial Sequence: Synthetic oligonucleotide
aaucuuaagaaauucuaac

SEQ ID NO: 1948461 - RNA, 19 nt, Artificial Sequence
  Description of Artificial Sequence: Synthetic oligonucleotide
aauucuaaccuacagacug

SEQ ID NO: 1948462 - RNA, 19 nt, Artificial Sequence
  Description of Artificial Sequence: Synthetic oligonucleotide
ugagauaugguucuugugg

SEQ ID NO: 1948463 - RNA, 19 nt, Artificial Sequence
  Description of Artificial Sequence: Synthetic oligonucleotide
ucaauuacccaccugaaag

SEQ ID NO: 1948464 - RNA, 19 nt, Artificial Sequence
  Description of Artificial Sequence: Synthetic oligonucleotide
aauaguuaucaauuagagg

SEQ ID NO: 1948465 - RNA, 19 nt, Artificial Sequence
  Description of Artificial Sequence: Synthetic oligonucleotide
gaaauucuaaccuacagac

SEQ ID NO: 1948466 - RNA, 19 nt, Artificial Sequence
  Description of Artificial Sequence: Synthetic oligonucleotide
aauguaagaaccucauauc

SEQ ID NO: 1948467 - RNA, 19 nt, Artificial Sequence
  Description of Artificial Sequence: Synthetic oligonucleotide
uaauaaacaccuaagguac

SEQ ID NO: 1948468 - RNA, 19 nt, Artificial Sequence
  Description of Artificial Sequence: Synthetic oligonucleotide
uuuagaagauacuugacca

SEQ ID NO: 1948469 - RNA, 19 nt, Artificial Sequence
  Description of Artificial Sequence: Synthetic oligonucleotide
uaugauaucgccauagaga

SEQ ID NO: 1948470 - RNA, 19 nt, Artificial Sequence
  Description of Artificial Sequence: Synthetic oligonucleotide
gauaucgccauagagaagg

SEQ ID NO: 1948471 - RNA, 19 nt, Artificial Sequence
  Description of Artificial Sequence: Synthetic oligonucleotide
aaacaccuaagguacacac

SEQ ID NO: 1948472 - RNA, 19 nt, Artificial Sequence
  Description of Artificial Sequence: Synthetic oligonucleotide
cuaagguacacacugaacc

SEQ ID NO: 1948473 - RNA, 19 nt, Artificial Sequence
  Description of Artificial Sequence: Synthetic oligonucleotide
uuugaaaggguacuccugg

SEQ ID NO: 1948474 - RNA, 19 nt, Artificial Sequence
  Description of Artificial Sequence: Synthetic oligonucleotide
agugguuuaaguuuagaag

SEQ ID NO: 1948475 - RNA, 19 nt, Artificial Sequence
  Description of Artificial Sequence: Synthetic oligonucleotide
aacucaauuacccaccuga

SEQ ID NO: 1948476 - RNA, 19 nt, Artificial Sequence
  Description of Artificial Sequence: Synthetic oligonucleotide
agauacuugaccaaauugc

SEQ ID NO: 1948477 - RNA, 19 nt, Artificial Sequence
  Description of Artificial Sequence: Synthetic oligonucleotide
uacuugaccaaauugcccg

SEQ ID NO: 1948478 - RNA, 19 nt, Artificial Sequence
  Description of Artificial Sequence: Synthetic oligonucleotide
uucaaugacauuguagugg

SEQ ID NO: 1948479 - RNA, 19 nt, Artificial Sequence
  Description of Artificial Sequence: Synthetic oligonucleotide
uugucuagcuuucacaucc

SEQ ID NO: 1948480 - RNA, 19 nt, Artificial Sequence
  Description of Artificial Sequence: Synthetic oligonucleotide
ugagguaccacgaucacca

SEQ ID NO: 1948481 - RNA, 19 nt, Artificial Sequence
  Description of Artificial Sequence: Synthetic oligonucleotide
ucuucuaaggaacagcgcu

SEQ ID NO: 1948482 - RNA, 19 nt, Artificial Sequence
  Description of Artificial Sequence: Synthetic oligonucleotide
cugacauacauccaagugg

SEQ ID NO: 1948483 - RNA, 19 nt, Artificial Sequence
  Description of Artificial Sequence: Synthetic oligonucleotide
aauuacccaccugaaagcc

SEQ ID NO: 1948484 - RNA, 19 nt, Artificial Sequence
  Description of Artificial Sequence: Synthetic oligonucleotide
auauauauauauuaauaau

SEQ ID NO: 1948485 - RNA, 19 nt, Artificial Sequence
  Description of Artificial Sequence: Synthetic oligonucleotide
auaaauacaacuccacacu

SEQ ID NO: 1948486 - RNA, 19 nt, Artificial Sequence
  Description of Artificial Sequence: Synthetic oligonucleotide
cuagcuuucacauccgagg

SEQ ID NO: 1948487 - RNA, 19 nt, Artificial Sequence
  Description of Artificial Sequence: Synthetic oligonucleotide
uuuauuagcaaaacccuuc

SEQ ID NO: 1948488 - RNA, 19 nt, Artificial Sequence
  Description of Artificial Sequence: Synthetic oligonucleotide
gaauaguuaucaauuagag

SEQ ID NO: 1948489 - RNA, 19 nt, Artificial Sequence
  Description of Artificial Sequence: Synthetic oligonucleotide
aauggguucugaugagagc

SEQ ID NO: 1948490 - RNA, 19 nt, Artificial Sequence
  Description of Artificial Sequence: Synthetic oligonucleotide
uguaagaaccucauauccc

SEQ ID NO: 1948491 - RNA, 19 nt, Artificial Sequence
  Description of Artificial Sequence: Synthetic oligonucleotide
ucuauaggaauaguuauca

SEQ ID NO: 1948492 - RNA, 19 nt, Artificial Sequence
  Description of Artificial Sequence: Synthetic oligonucleotide
uaaauacaacuccacacug

SEQ ID NO: 1948493 - RNA, 19 nt, Artificial Sequence
  Description of Artificial Sequence: Synthetic oligonucleotide
gacugagucauccagacuc

SEQ ID NO: 1948494 - RNA, 19 nt, Artificial Sequence
  Description of Artificial Sequence: Synthetic oligonucleotide
cuaaccuacagacugaguc

SEQ ID NO: 1948495 - RNA, 19 nt, Artificial Sequence
  Description of Artificial Sequence: Synthetic oligonucleotide
aauacaacuccacacugau

SEQ ID NO: 1948496 - RNA, 19 nt, Artificial Sequence
  Description of Artificial Sequence: Synthetic oligonucleotide
gaagcgaaagucuugucug

SEQ ID NO: 1948497 - RNA, 19 nt, Artificial Sequence
  Description of Artificial Sequence: Synthetic oligonucleotide
agaaauucuaaccuacaga

SEQ ID NO: 1948498 - RNA, 19 nt, Artificial Sequence
  Description of Artificial Sequence: Synthetic oligonucleotide
ucaauuagaggguaaccug

SEQ ID NO: 1948499 - RNA, 19 nt, Artificial Sequence
  Description of Artificial Sequence: Synthetic oligonucleotide
aaggucaaguuauuguaug

SEQ ID NO: 1948500 - RNA, 19 nt, Artificial Sequence
  Description of Artificial Sequence: Synthetic oligonucleotide
gugguuuaaguuuagaaga

SEQ ID NO: 1948501 - RNA, 19 nt, Artificial Sequence
  Description of Artificial Sequence: Synthetic oligonucleotide
ucuuaguaguggcacgugg

SEQ ID NO: 1948502 - RNA, 19 nt, Artificial Sequence
  Description of Artificial Sequence: Synthetic oligonucleotide
uaaccugugaagaacuucu

SEQ ID NO: 1948503 - RNA, 19 nt, Artificial Sequence
  Description of Artificial Sequence: Synthetic oligonucleotide
aaguaacucuaauugcuug

SEQ ID NO: 1948504 - RNA, 19 nt, Artificial Sequence
  Description of Artificial Sequence: Synthetic oligonucleotide
aggaauaguuaucaauuag

SEQ ID NO: 1948505 - RNA, 19 nt, Artificial Sequence
  Description of Artificial Sequence: Synthetic oligonucleotide
caccugaaagccauaaugg

SEQ ID NO: 1948506 - RNA, 19 nt, Artificial Sequence
  Description of Artificial Sequence: Synthetic oligonucleotide
augauaucgccauagagaa

SEQ ID NO: 1948507 - RNA, 19 nt, Artificial Sequence
  Description of Artificial Sequence: Synthetic oligonucleotide
ugaaccauuaugugacuag

SEQ ID NO: 1948508 - RNA, 19 nt, Artificial Sequence
  Description of Artificial Sequence: Synthetic oligonucleotide
uucagggaaaucuuaagaa

SEQ ID NO: 1948509 - RNA, 19 nt, Artificial Sequence
  Description of Artificial Sequence: Synthetic oligonucleotide
cuaucuaauaaauacaacu

SEQ ID NO: 1948510 - RNA, 19 nt, Artificial Sequence
  Description of Artificial Sequence: Synthetic oligonucleotide
aaaaucuugccguaugaua

SEQ ID NO: 1948511 - RNA, 19 nt, Artificial Sequence
  Description of Artificial Sequence: Synthetic oligonucleotide
uuugaauguucccggagug

SEQ ID NO: 1948512 - RNA, 19 nt, Artificial Sequence
  Description of Artificial Sequence: Synthetic oligonucleotide
uagcuuucacauccgaggg

SEQ ID NO: 1948513 - RNA, 19 nt, Artificial Sequence
  Description of Artificial Sequence: Synthetic oligonucleotide
cacugaaccauuaugugac

SEQ ID NO: 1948514 - RNA, 19 nt, Artificial Sequence
  Description of Artificial Sequence: Synthetic oligonucleotide
uggcucauacucauaaaag

SEQ ID NO: 1948515 - RNA, 19 nt, Artificial Sequence
  Description of Artificial Sequence: Synthetic oligonucleotide
cacacguucaaugacauug

SEQ ID NO: 1948516 - RNA, 19 nt, Artificial Sequence
  Description of Artificial Sequence: Synthetic oligonucleotide
guggauccuauacagaaag

SEQ ID NO: 1948517 - RNA, 19 nt, Artificial Sequence
  Description of Artificial Sequence: Synthetic oligonucleotide
ugugacuagacuaucuaau

SEQ ID NO: 1948518 - RNA, 19 nt, Artificial Sequence
  Description of Artificial Sequence: Synthetic oligonucleotide
uuauuagcaaaacccuucu

SEQ ID NO: 1948519 - RNA, 19 nt, Artificial Sequence
  Description of Artificial Sequence: Synthetic oligonucleotide
guuuaaguuuagaagauac

SEQ ID NO: 1948520 - RNA, 19 nt, Artificial Sequence
  Description of Artificial Sequence: Synthetic oligonucleotide
agcaguuugaauguucccg

SEQ ID NO: 1948521 - RNA, 19 nt, Artificial Sequence
  Description of Artificial Sequence: Synthetic oligonucleotide
guaugauaucgccauagag

SEQ ID NO: 1948522 - RNA, 19 nt, Artificial Sequence
  Description of Artificial Sequence: Synthetic oligonucleotide
ucuagcuuucacauccgag

SEQ ID NO: 1948523 - RNA, 19 nt, Artificial Sequence
  Description of Artificial Sequence: Synthetic oligonucleotide
aaaacucaauuacccaccu

SEQ ID NO: 1948524 - RNA, 19 nt, Artificial Sequence
  Description of Artificial Sequence: Synthetic oligonucleotide
uaugagauaugguucuugu

SEQ ID NO: 1948525 - RNA, 19 nt, Artificial Sequence
  Description of Artificial Sequence: Synthetic oligonucleotide
ugccaauaugugaugaucu

SEQ ID NO: 1948526 - RNA, 19 nt, Artificial Sequence
  Description of Artificial Sequence: Synthetic oligonucleotide
ucuaauugcuugucuagcu

SEQ ID NO: 1948527 - RNA, 19 nt, Artificial Sequence
  Description of Artificial Sequence: Synthetic oligonucleotide
uucacgugacucaucaucu

SEQ ID NO: 1948528 - RNA, 19 nt, Artificial Sequence
  Description of Artificial Sequence: Synthetic oligonucleotide
aacacuuugaaaggguacu

SEQ ID NO: 1948529 - RNA, 19 nt, Artificial Sequence
  Description of Artificial Sequence: Synthetic oligonucleotide
ucugaugagagcaguuuga

SEQ ID NO: 1948530 - RNA, 19 nt, Artificial Sequence
  Description of Artificial Sequence: Synthetic oligonucleotide
uucugaugagagcaguuug

SEQ ID NO: 1948531 - RNA, 19 nt, Artificial Sequence
  Description of Artificial Sequence: Synthetic oligonucleotide
auaaccugccaauauguga

SEQ ID NO: 1948532 - RNA, 19 nt, Artificial Sequence
  Description of Artificial Sequence: Synthetic oligonucleotide
gacuaguuagcuuuucuuc

SEQ ID NO: 1948533 - RNA, 19 nt, Artificial Sequence
  Description of Artificial Sequence: Synthetic oligonucleotide
auaaacaccuaagguacac

SEQ ID NO: 1948534 - RNA, 19 nt, Artificial Sequence
  Description of Artificial Sequence: Synthetic oligonucleotide
uuaugugacuagacuaucu

SEQ ID NO: 1948535 - RNA, 19 nt, Artificial Sequence
  Description of Artificial Sequence: Synthetic oligonucleotide
cuugucuguaaauuggcuc

SEQ ID NO: 1948536 - RNA, 19 nt, Artificial Sequence
  Description of Artificial Sequence: Synthetic oligonucleotide
uccaaguggauccuauaca

SEQ ID NO: 1948537 - RNA, 19 nt, Artificial Sequence
  Description of Artificial Sequence: Synthetic oligonucleotide
uaaccuacagacugaguca

SEQ ID NO: 1948538 - RNA, 19 nt, Artificial Sequence
  Description of Artificial Sequence: Synthetic oligonucleotide
ucauacucauaaaagucau

SEQ ID NO: 1948539 - RNA, 19 nt, Artificial Sequence
  Description of Artificial Sequence: Synthetic oligonucleotide
aacucuaauugcuugucua

SEQ ID NO: 1948540 - RNA, 19 nt, Artificial Sequence
  Description of Artificial Sequence: Synthetic oligonucleotide
uuagaggguaaccugugaa

SEQ ID NO: 1948541 - RNA, 19 nt, Artificial Sequence
  Description of Artificial Sequence: Synthetic oligonucleotide
aguaacucuaauugcuugu

SEQ ID NO: 1948542 - RNA, 19 nt, Artificial Sequence
  Description of Artificial Sequence: Synthetic oligonucleotide
uagaggguaaccugugaag

SEQ ID NO: 1948543 - RNA, 19 nt, Artificial Sequence
  Description of Artificial Sequence: Synthetic oligonucleotide
uaguuagcuuuucuucagg

SEQ ID NO: 1948544 - RNA, 19 nt, Artificial Sequence
  Description of Artificial Sequence: Synthetic oligonucleotide
caauuacccaccugaaagc

SEQ ID NO: 1948545 - RNA, 19 nt, Artificial Sequence
  Description of Artificial Sequence: Synthetic oligonucleotide
cuugccguaugauaucgcc

SEQ ID NO: 1948546 - RNA, 19 nt, Artificial Sequence
  Description of Artificial Sequence: Synthetic oligonucleotide
aaucacacgccugagcuga

SEQ ID NO: 1948547 - RNA, 19 nt, Artificial Sequence
  Description of Artificial Sequence: Synthetic oligonucleotide
aaaggguacuccugguaug

SEQ ID NO: 1948548 - RNA, 19 nt, Artificial Sequence
  Description of Artificial Sequence: Synthetic oligonucleotide
aucaauuagaggguaaccu

SEQ ID NO: 1948549 - RNA, 19 nt, Artificial Sequence
  Description of Artificial Sequence: Synthetic oligonucleotide
agauccucggcacuagguc

SEQ ID NO: 1948550 - RNA, 19 nt, Artificial Sequence
  Description of Artificial Sequence: Synthetic oligonucleotide
agcauaaccugccaauaug

SEQ ID NO: 1948551 - RNA, 19 nt, Artificial Sequence
  Description of Artificial Sequence: Synthetic oligonucleotide
acugauuuguugcugugga

SEQ ID NO: 1948552 - RNA, 19 nt, Artificial Sequence
  Description of Artificial Sequence: Synthetic oligonucleotide
ucauauccccaccaggacu

SEQ ID NO: 1948553 - RNA, 19 nt, Artificial Sequence
  Description of Artificial Sequence: Synthetic oligonucleotide
aaccauuaugugacuagac

SEQ ID NO: 1948554 - RNA, 19 nt, Artificial Sequence
  Description of Artificial Sequence: Synthetic oligonucleotide
auacuugaccaaauugccc

SEQ ID NO: 1948555 - RNA, 19 nt, Artificial Sequence
  Description of Artificial Sequence: Synthetic oligonucleotide
ucugagugguuuaaguuua

SEQ ID NO: 1948556 - RNA, 19 nt, Artificial Sequence
  Description of Artificial Sequence: Synthetic oligonucleotide
uuaucaauuagaggguaac

SEQ ID NO: 1948557 - RNA, 19 nt, Artificial Sequence
  Description of Artificial Sequence: Synthetic oligonucleotide
aaacccucuauaggaauag

SEQ ID NO: 1948558 - RNA, 19 nt, Artificial Sequence
  Description of Artificial Sequence: Synthetic oligonucleotide
acuaucuaauaaauacaac

SEQ ID NO: 1948559 - RNA, 19 nt, Artificial Sequence
  Description of Artificial Sequence: Synthetic oligonucleotide
uaugugacuagacuaucua

SEQ ID NO: 1948560 - RNA, 19 nt, Artificial Sequence
  Description of Artificial Sequence: Synthetic oligonucleotide
aguuugaauguucccggag

SEQ ID NO: 1948561 - RNA, 19 nt, Artificial Sequence
  Description of Artificial Sequence: Synthetic oligonucleotide
gacuaucuaauaaauacaa

SEQ ID NO: 1948562 - RNA, 19 nt, Artificial Sequence
  Description of Artificial Sequence: Synthetic oligonucleotide
ucaagcaaaucccaacaua

SEQ ID NO: 1948563 - RNA, 19 nt, Artificial Sequence
  Description of Artificial Sequence: Synthetic oligonucleotide
cuaguuagcuuuucuucag

SEQ ID NO: 1948564 - RNA, 19 nt, Artificial Sequence
  Description of Artificial Sequence: Synthetic oligonucleotide
aauugcuugucuagcuuuc

SEQ ID NO: 1948565 - RNA, 19 nt, Artificial Sequence
  Description of Artificial Sequence: Synthetic oligonucleotide
gaauggguucugaugagag

SEQ ID NO: 1948566 - RNA, 19 nt, Artificial Sequence
  Description of Artificial Sequence: Synthetic oligonucleotide
uaucaauuagaggguaacc

SEQ ID NO: 1948567 - RNA, 19 nt, Artificial Sequence
  Description of Artificial Sequence: Synthetic oligonucleotide
ugaauguucccggagugug

SEQ ID NO: 1948568 - RNA, 19 nt, Artificial Sequence
  Description of Artificial Sequence: Synthetic oligonucleotide
ugcuggccuaauaagaaaa

SEQ ID NO: 1948569 - RNA, 19 nt, Artificial Sequence
  Description of Artificial Sequence: Synthetic oligonucleotide
agcgcuagcauuuugucuu

SEQ ID NO: 1948570 - RNA, 19 nt, Artificial Sequence
  Description of Artificial Sequence: Synthetic oligonucleotide
ugugaagcgaaagucuugu

SEQ ID NO: 1948571 - RNA, 19 nt, Artificial Sequence
  Description of Artificial Sequence: Synthetic oligonucleotide
ugugaugaucuccuuggaa

SEQ ID NO: 1948572 - RNA, 19 nt, Artificial Sequence
  Description of Artificial Sequence: Synthetic oligonucleotide
ugguuuaaguuuagaagau

SEQ ID NO: 1948573 - RNA, 19 nt, Artificial Sequence
  Description of Artificial Sequence: Synthetic oligonucleotide
uaaaagucauccaguucac

SEQ ID NO: 1948574 - RNA, 19 nt, Artificial Sequence
  Description of Artificial Sequence: Synthetic oligonucleotide
auuaugugacuagacuauc

SEQ ID NO: 1948575 - RNA, 19 nt, Artificial Sequence
  Description of Artificial Sequence: Synthetic oligonucleotide
aauuagaggguaaccugug

SEQ ID NO: 1948576 - RNA, 19 nt, Artificial Sequence
  Description of Artificial Sequence: Synthetic oligonucleotide
acagcgcuagcauuuuguc

SEQ ID NO: 1948577 - RNA, 19 nt, Artificial Sequence
  Description of Artificial Sequence: Synthetic oligonucleotide
gugacucaucaucucauag

SEQ ID NO: 1948578 - RNA, 19 nt, Artificial Sequence
  Description of Artificial Sequence: Synthetic oligonucleotide
accucauauccccaccagg

SEQ ID NO: 1948579 - RNA, 19 nt, Artificial Sequence
  Description of Artificial Sequence: Synthetic oligonucleotide
uguucccggagugugaagc

SEQ ID NO: 1948580 - RNA, 19 nt, Artificial Sequence
  Description of Artificial Sequence: Synthetic oligonucleotide
gcaaaacucaauuacccac

SEQ ID NO: 1948581 - RNA, 19 nt, Artificial Sequence
  Description of Artificial Sequence: Synthetic oligonucleotide
aaacucaauuacccaccug

SEQ ID NO: 1948582 - RNA, 19 nt, Artificial Sequence
  Description of Artificial Sequence: Synthetic oligonucleotide
cuuaagaaauucuaaccua

SEQ ID NO: 1948583 - RNA, 19 nt, Artificial Sequence
  Description of Artificial Sequence: Synthetic oligonucleotide
aucggugucuguuuucaug

SEQ ID NO: 1948584 - RNA, 19 nt, Artificial Sequence
  Description of Artificial Sequence: Synthetic oligonucleotide
uaggaauaguuaucaauua

SEQ ID NO: 1948585 - RNA, 19 nt, Artificial Sequence
  Description of Artificial Sequence: Synthetic oligonucleotide
ugcaaucacacgccugagc

SEQ ID NO: 1948586 - RNA, 19 nt, Artificial Sequence
  Description of Artificial Sequence: Synthetic oligonucleotide
accugaaagccauaauggu

SEQ ID NO: 1948587 - RNA, 19 nt, Artificial Sequence
  Description of Artificial Sequence: Synthetic oligonucleotide
uggacuaguuagcuuuucu

SEQ ID NO: 1948588 - RNA, 19 nt, Artificial Sequence
  Description of Artificial Sequence: Synthetic oligonucleotide
agacuaucuaauaaauaca

SEQ ID NO: 1948589 - RNA, 19 nt, Artificial Sequence
  Description of Artificial Sequence: Synthetic oligonucleotide
aucgccauagagaaggugu

SEQ ID NO: 1948590 - RNA, 19 nt, Artificial Sequence
  Description of Artificial Sequence: Synthetic oligonucleotide
uucacacguucaaugacau

SEQ ID NO: 1948591 - RNA, 19 nt, Artificial Sequence
  Description of Artificial Sequence: Synthetic oligonucleotide
augacuaggaauggguucu

SEQ ID NO: 1948592 - RNA, 19 nt, Artificial Sequence
  Description of Artificial Sequence: Synthetic oligonucleotide
uccuuggaagaaaagccau

SEQ ID NO: 1948593 - RNA, 19 nt, Artificial Sequence
  Description of Artificial Sequence: Synthetic oligonucleotide
auggguuucacgugacuca

SEQ ID NO: 1948594 - RNA, 19 nt, Artificial Sequence
  Description of Artificial Sequence: Synthetic oligonucleotide
augagauaugguucuugug

SEQ ID NO: 1948595 - RNA, 19 nt, Artificial Sequence
  Description of Artificial Sequence: Synthetic oligonucleotide
ugccguaugauaucgccau

SEQ ID NO: 1948596 - RNA, 19 nt, Artificial Sequence
  Description of Artificial Sequence: Synthetic oligonucleotide
agcuuucacauccgagggg

SEQ ID NO: 1948597 - RNA, 19 nt, Artificial Sequence
  Description of Artificial Sequence: Synthetic oligonucleotide
cguguugaugaacacaucg

SEQ ID NO: 1948598 - RNA, 19 nt, Artificial Sequence
  Description of Artificial Sequence: Synthetic oligonucleotide
gauggguuucacgugacuc

SEQ ID NO: 1948599 - RNA, 19 nt, Artificial Sequence
  Description of Artificial Sequence: Synthetic oligonucleotide
acuagacuaucuaauaaau

SEQ ID NO: 1948600 - RNA, 19 nt, Artificial Sequence
  Description of Artificial Sequence: Synthetic oligonucleotide
auagauccucggcacuagg

SEQ ID NO: 1948601 - RNA, 19 nt, Artificial Sequence
  Description of Artificial Sequence: Synthetic oligonucleotide
aacagcgcuagcauuuugu

SEQ ID NO: 1948602 - RNA, 19 nt, Artificial Sequence
  Description of Artificial Sequence: Synthetic oligonucleotide
aggucaaguuauuguaugu

SEQ ID NO: 1948603 - RNA, 19 nt, Artificial Sequence
  Description of Artificial Sequence: Synthetic oligonucleotide
ugauaucgccauagagaag

SEQ ID NO: 1948604 - RNA, 19 nt, Artificial Sequence
  Description of Artificial Sequence: Synthetic oligonucleotide
aauaaacaccuaagguaca

SEQ ID NO: 1948605 - RNA, 19 nt, Artificial Sequence
  Description of Artificial Sequence: Synthetic oligonucleotide
uugccguaugauaucgcca

SEQ ID NO: 1948606 - RNA, 19 nt, Artificial Sequence
  Description of Artificial Sequence: Synthetic oligonucleotide
aaaacccuucuuaguagug

SEQ ID NO: 1948607 - RNA, 19 nt, Artificial Sequence
  Description of Artificial Sequence: Synthetic oligonucleotide
acuggacaugauguagccc

SEQ ID NO: 1948608 - RNA, 19 nt, Artificial Sequence
  Description of Artificial Sequence: Synthetic oligonucleotide
uagauccucggcacuaggu

SEQ ID NO: 1948609 - RNA, 19 nt, Artificial Sequence
  Description of Artificial Sequence: Synthetic oligonucleotide
gauccuauacagaaagaaa

SEQ ID NO: 1948610 - RNA, 19 nt, Artificial Sequence
  Description of Artificial Sequence: Synthetic oligonucleotide
gauccucggcacuagguca

SEQ ID NO: 1948611 - RNA, 19 nt, Artificial Sequence
  Description of Artificial Sequence: Synthetic oligonucleotide
guguucaucuucuaaggaa

SEQ ID NO: 1948612 - RNA, 19 nt, Artificial Sequence
  Description of Artificial Sequence: Synthetic oligonucleotide
cucuaauugcuugucuagc

SEQ ID NO: 1948613 - RNA, 19 nt, Artificial Sequence
  Description of Artificial Sequence: Synthetic oligonucleotide
auuagaggguaaccuguga

SEQ ID NO: 1948614 - RNA, 19 nt, Artificial Sequence
  Description of Artificial Sequence: Synthetic oligonucleotide
gaacacuuugaaaggguac

SEQ ID NO: 1948615 - RNA, 19 nt, Artificial Sequence
  Description of Artificial Sequence: Synthetic oligonucleotide
aucuucuaaggaacagcgc

SEQ ID NO: 1948616 - RNA, 19 nt, Artificial Sequence
  Description of Artificial Sequence: Synthetic oligonucleotide
acguucaaugacauuguag

SEQ ID NO: 1948617 - RNA, 19 nt, Artificial Sequence
  Description of Artificial Sequence: Synthetic oligonucleotide
uucacauccgaggggcgcg

SEQ ID NO: 1948618 - RNA, 19 nt, Artificial Sequence
  Description of Artificial Sequence: Synthetic oligonucleotide
uucaccccaaguaacucua

SEQ ID NO: 1948619 - RNA, 19 nt, Artificial Sequence
  Description of Artificial Sequence: Synthetic oligonucleotide
augugacuagacuaucuaa

SEQ ID NO: 1948620 - RNA, 19 nt, Artificial Sequence
  Description of Artificial Sequence: Synthetic oligonucleotide
guuagcuuuucuucaggga

SEQ ID NO: 1948621 - RNA, 19 nt, Artificial Sequence
  Description of Artificial Sequence: Synthetic oligonucleotide
cuaaggaacagcgcuagca

SEQ ID NO: 1948622 - RNA, 19 nt, Artificial Sequence
  Description of Artificial Sequence: Synthetic oligonucleotide
cacuuugaaaggguacucc

SEQ ID NO: 1948623 - RNA, 19 nt, Artificial Sequence
  Description of Artificial Sequence: Synthetic oligonucleotide
aauguucccggagugugaa

SEQ ID NO: 1948624 - RNA, 19 nt, Artificial Sequence
  Description of Artificial Sequence: Synthetic oligonucleotide
uuuguugcuguggacuagu

SEQ ID NO: 1948625 - RNA, 19 nt, Artificial Sequence
  Description of Artificial Sequence: Synthetic oligonucleotide
ucggcacuaggucacugga

SEQ ID NO: 1948626 - RNA, 19 nt, Artificial Sequence
  Description of Artificial Sequence: Synthetic oligonucleotide
ccccaaguaacucuaauug

SEQ ID NO: 1948627 - RNA, 19 nt, Artificial Sequence
  Description of Artificial Sequence: Synthetic oligonucleotide
gguuucacgugacucauca

SEQ ID NO: 1948628 - RNA, 19 nt, Artificial Sequence
  Description of Artificial Sequence: Synthetic oligonucleotide
ucuaaggaacagcgcuagc

SEQ ID NO: 1948629 - RNA, 19 nt, Artificial Sequence
  Description of Artificial Sequence: Synthetic oligonucleotide
aaaacccucuauaggaaua

SEQ ID NO: 1948630 - RNA, 19 nt, Artificial Sequence
  Description of Artificial Sequence: Synthetic oligonucleotide
aaccuacagacugagucau

SEQ ID NO: 1948631 - RNA, 19 nt, Artificial Sequence
  Description of Artificial Sequence: Synthetic oligonucleotide
acgaucaccaggaaacuca

SEQ ID NO: 1948632 - RNA, 19 nt, Artificial Sequence
  Description of Artificial Sequence: Synthetic oligonucleotide
uuucacauccgaggggcgc

SEQ ID NO: 1948633 - RNA, 19 nt, Artificial Sequence
  Description of Artificial Sequence: Synthetic oligonucleotide
gaaccucauauccccacca

SEQ ID NO: 1948634 - RNA, 19 nt, Artificial Sequence
  Description of Artificial Sequence: Synthetic oligonucleotide
caauaugugaugaucuccu

SEQ ID NO: 1948635 - RNA, 19 nt, Artificial Sequence
  Description of Artificial Sequence: Synthetic oligonucleotide
acauuguaguggggaaggc

SEQ ID NO: 1948636 - RNA, 19 nt, Artificial Sequence
  Description of Artificial Sequence: Synthetic oligonucleotide
uguugcuguggacuaguua

SEQ ID NO: 1948637 - RNA, 19 nt, Artificial Sequence
  Description of Artificial Sequence: Synthetic oligonucleotide
cucggcacuaggucacugg

SEQ ID NO: 1948638 - RNA, 19 nt, Artificial Sequence
  Description of Artificial Sequence: Synthetic oligonucleotide
gaaccauuaugugacuaga

SEQ ID NO: 1948639 - RNA, 19 nt, Artificial Sequence
  Description of Artificial Sequence: Synthetic oligonucleotide
guucccggagugugaagcg

SEQ ID NO: 1948640 - RNA, 19 nt, Artificial Sequence
  Description of Artificial Sequence: Synthetic oligonucleotide
ucuugccguaugauaucgc

SEQ ID NO: 1948641 - RNA, 19 nt, Artificial Sequence
  Description of Artificial Sequence: Synthetic oligonucleotide
cacgccugagcugacauac

SEQ ID NO: 1948642 - RNA, 19 nt, Artificial Sequence
  Description of Artificial Sequence: Synthetic oligonucleotide
guaugagauaugguucuug

SEQ ID NO: 1948643 - RNA, 19 nt, Artificial Sequence
  Description of Artificial Sequence: Synthetic oligonucleotide
uugaaaggguacuccuggu

SEQ ID NO: 1948644 - RNA, 19 nt, Artificial Sequence
  Description of Artificial Sequence: Synthetic oligonucleotide
cuccuuggaagaaaagcca

SEQ ID NO: 1948645 - RNA, 19 nt, Artificial Sequence
  Description of Artificial Sequence: Synthetic oligonucleotide
auugcccguguugaugaac

SEQ ID NO: 1948646 - RNA, 19 nt, Artificial Sequence
  Description of Artificial Sequence: Synthetic oligonucleotide
aggaugacuaggaaugggu

SEQ ID NO: 1948647 - RNA, 19 nt, Artificial Sequence
  Description of Artificial Sequence: Synthetic oligonucleotide
uauuagcaaaacccuucuu

SEQ ID NO: 1948648 - RNA, 19 nt, Artificial Sequence
  Description of Artificial Sequence: Synthetic oligonucleotide
cccaaguaacucuaauugc

SEQ ID NO: 1948649 - RNA, 19 nt, Artificial Sequence
  Description of Artificial Sequence: Synthetic oligonucleotide
cuggaauaugaauguucac

SEQ ID NO: 1948650 - RNA, 19 nt, Artificial Sequence
  Description of Artificial Sequence: Synthetic oligonucleotide
gggcaaaacucaauuaccc

SEQ ID NO: 1948651 - RNA, 19 nt, Artificial Sequence
  Description of Artificial Sequence: Synthetic oligonucleotide
cuuucacauccgaggggcg

SEQ ID NO: 1948652 - RNA, 19 nt, Artificial Sequence
  Description of Artificial Sequence: Synthetic oligonucleotide
cucauauccccaccaggac

SEQ ID NO: 1948653 - RNA, 19 nt, Artificial Sequence
  Description of Artificial Sequence: Synthetic oligonucleotide
uugauggguuucacgugac

SEQ ID NO: 1948654 - RNA, 19 nt, Artificial Sequence
  Description of Artificial Sequence: Synthetic oligonucleotide
guuugaauguucccggagu

SEQ ID NO: 1948655 - RNA, 19 nt, Artificial Sequence
  Description of Artificial Sequence: Synthetic oligonucleotide
ugagugguuuaaguuuaga

SEQ ID NO: 1948656 - RNA, 19 nt, Artificial Sequence
  Description of Artificial Sequence: Synthetic oligonucleotide
caauuagaggguaaccugu

SEQ ID NO: 1948657 - RNA, 19 nt, Artificial Sequence
  Description of Artificial Sequence: Synthetic oligonucleotide
guaacucuaauugcuuguc

SEQ ID NO: 1948658 - RNA, 19 nt, Artificial Sequence
  Description of Artificial Sequence: Synthetic oligonucleotide
uccugguaugagauauggu

SEQ ID NO: 1948659 - RNA, 19 nt, Artificial Sequence
  Description of Artificial Sequence: Synthetic oligonucleotide
gugacuagacuaucuaaua

SEQ ID NO: 1948660 - RNA, 19 nt, Artificial Sequence
  Description of Artificial Sequence: Synthetic oligonucleotide
ucauagauccucggcacua

SEQ ID NO: 1948661 - RNA, 19 nt, Artificial Sequence
  Description of Artificial Sequence: Synthetic oligonucleotide
uccucagcauaaccugcca

SEQ ID NO: 1948662 - RNA, 19 nt, Artificial Sequence
  Description of Artificial Sequence: Synthetic oligonucleotide
ucagcauaaccugccaaua

SEQ ID NO: 1948663 - RNA, 19 nt, Artificial Sequence
  Description of Artificial Sequence: Synthetic oligonucleotide
ggcacuaggucacuggaca

SEQ ID NO: 1948664 - RNA, 19 nt, Artificial Sequence
  Description of Artificial Sequence: Synthetic oligonucleotide
aguuaucaauuagagggua

SEQ ID NO: 1948665 - RNA, 19 nt, Artificial Sequence
  Description of Artificial Sequence: Synthetic oligonucleotide
cugagguaccacgaucacc

SEQ ID NO: 1948666 - RNA, 19 nt, Artificial Sequence
  Description of Artificial Sequence: Synthetic oligonucleotide
ccaauaugugaugaucucc

SEQ ID NO: 1948667 - RNA, 19 nt, Artificial Sequence
  Description of Artificial Sequence: Synthetic oligonucleotide
ccuacagacugagucaucc

SEQ ID NO: 1948668 - RNA, 19 nt, Artificial Sequence
  Description of Artificial Sequence: Synthetic oligonucleotide
uaucgccauagagaaggug

SEQ ID NO: 1948669 - RNA, 19 nt, Artificial Sequence
  Description of Artificial Sequence: Synthetic oligonucleotide
gaaagucuugucuguaaau

SEQ ID NO: 1948670 - RNA, 19 nt, Artificial Sequence
  Description of Artificial Sequence: Synthetic oligonucleotide
guaaccugugaagaacuuc

SEQ ID NO: 1948671 - RNA, 19 nt, Artificial Sequence
  Description of Artificial Sequence: Synthetic oligonucleotide
ggagugugaagcgaaaguc

SEQ ID NO: 1948672 - RNA, 19 nt, Artificial Sequence
  Description of Artificial Sequence: Synthetic oligonucleotide
ggcaaaacucaauuaccca

SEQ ID NO: 1948673 - RNA, 19 nt, Artificial Sequence
  Description of Artificial Sequence: Synthetic oligonucleotide
caaucacacgccugagcug

SEQ ID NO: 1948674 - RNA, 19 nt, Artificial Sequence
  Description of Artificial Sequence: Synthetic oligonucleotide
cugagugguuuaaguuuag

SEQ ID NO: 1948675 - RNA, 19 nt, Artificial Sequence
  Description of Artificial Sequence: Synthetic oligonucleotide
uguggacuaguuagcuuuu

SEQ ID NO: 1948676 - RNA, 19 nt, Artificial Sequence
  Description of Artificial Sequence: Synthetic oligonucleotide
gcugcaaucacacgccuga

SEQ ID NO: 1948677 - RNA, 19 nt, Artificial Sequence
  Description of Artificial Sequence: Synthetic oligonucleotide
ugaccaaauugcccguguu

SEQ ID NO: 1948678 - RNA, 19 nt, Artificial Sequence
  Description of Artificial Sequence: Synthetic oligonucleotide
agcccgcuacaguagggag

SEQ ID NO: 1948679 - RNA, 19 nt, Artificial Sequence
  Description of Artificial Sequence: Synthetic oligonucleotide
agugugaagcgaaagucuu

SEQ ID NO: 1948680 - RNA, 19 nt, Artificial Sequence
  Description of Artificial Sequence: Synthetic oligonucleotide
ggggcaaaacucaauuacc

SEQ ID NO: 1948681 - RNA, 19 nt, Artificial Sequence
  Description of Artificial Sequence: Synthetic oligonucleotide
gaaggcugagguaccacga

SEQ ID NO: 1948682 - RNA, 19 nt, Artificial Sequence
  Description of Artificial Sequence: Synthetic oligonucleotide
acaguagggagggaacacu

SEQ ID NO: 1948683 - RNA, 19 nt, Artificial Sequence
  Description of Artificial Sequence: Synthetic oligonucleotide
gaacagcgcuagcauuuug

SEQ ID NO: 1948684 - RNA, 19 nt, Artificial Sequence
  Description of Artificial Sequence: Synthetic oligonucleotide
gauuugugucuucuggaau

SEQ ID NO: 1948685 - RNA, 19 nt, Artificial Sequence
  Description of Artificial Sequence: Synthetic oligonucleotide
uguagcccagcccgcuaca

SEQ ID NO: 1948686 - RNA, 19 nt, Artificial Sequence
  Description of Artificial Sequence: Synthetic oligonucleotide
auucuaaccuacagacuga

SEQ ID NO: 1948687 - RNA, 19 nt, Artificial Sequence
  Description of Artificial Sequence: Synthetic oligonucleotide
cauagauccucggcacuag

SEQ ID NO: 1948688 - RNA, 19 nt, Artificial Sequence
  Description of Artificial Sequence: Synthetic oligonucleotide
cuuaguaguggcacguggu

SEQ ID NO: 1948689 - RNA, 19 nt, Artificial Sequence
  Description of Artificial Sequence: Synthetic oligonucleotide
acauccgaggggcgcgagg

SEQ ID NO: 1948690 - RNA, 19 nt, Artificial Sequence
  Description of Artificial Sequence: Synthetic oligonucleotide
auccucggcacuaggucac

SEQ ID NO: 1948691 - RNA, 19 nt, Artificial Sequence
  Description of Artificial Sequence: Synthetic oligonucleotide
ccuucuuaguaguggcacg

SEQ ID NO: 1948692 - RNA, 19 nt, Artificial Sequence
  Description of Artificial Sequence: Synthetic oligonucleotide
cacgugacucaucaucuca

SEQ ID NO: 1948693 - RNA, 19 nt, Artificial Sequence
  Description of Artificial Sequence: Synthetic oligonucleotide
ucccggagugugaagcgaa

SEQ ID NO: 1948694 - RNA, 19 nt, Artificial Sequence
  Description of Artificial Sequence: Synthetic oligonucleotide
gcaaucacacgccugagcu

SEQ ID NO: 1948695 - RNA, 19 nt, Artificial Sequence
  Description of Artificial Sequence: Synthetic oligonucleotide
ucacgugacucaucaucuc

SEQ ID NO: 1948696 - RNA, 19 nt, Artificial Sequence
  Description of Artificial Sequence: Synthetic oligonucleotide
gguguucaucuucuaagga

SEQ ID NO: 1948697 - RNA, 19 nt, Artificial Sequence
  Description of Artificial Sequence: Synthetic oligonucleotide
ccauuaugugacuagacua

SEQ ID NO: 1948698 - RNA, 19 nt, Artificial Sequence
  Description of Artificial Sequence: Synthetic oligonucleotide
cuauaggaauaguuaucaa

SEQ ID NO: 1948699 - RNA, 19 nt, Artificial Sequence
  Description of Artificial Sequence: Synthetic oligonucleotide
gagugugaagcgaaagucu

SEQ ID NO: 1948700 - RNA, 19 nt, Artificial Sequence
  Description of Artificial Sequence: Synthetic oligonucleotide
agacugagucauccagacu

SEQ ID NO: 1948701 - RNA, 19 nt, Artificial Sequence
  Description of Artificial Sequence: Synthetic oligonucleotide
cucaauuacccaccugaaa

SEQ ID NO: 1948702 - RNA, 19 nt, Artificial Sequence
  Description of Artificial Sequence: Synthetic oligonucleotide
aggaacagcgcuagcauuu

SEQ ID NO: 1948703 - RNA, 19 nt, Artificial Sequence
  Description of Artificial Sequence: Synthetic oligonucleotide
ugauguagcccagcccgcu

SEQ ID NO: 1948704 - RNA, 19 nt, Artificial Sequence
  Description of Artificial Sequence: Synthetic oligonucleotide
auuacccaccugaaagcca

SEQ ID NO: 1948705 - RNA, 19 nt, Artificial Sequence
  Description of Artificial Sequence: Synthetic oligonucleotide
ccuaagguacacacugaac

SEQ ID NO: 1948706 - RNA, 19 nt, Artificial Sequence
  Description of Artificial Sequence: Synthetic oligonucleotide
cuguggacuaguuagcuuu

SEQ ID NO: 1948707 - RNA, 19 nt, Artificial Sequence
  Description of Artificial Sequence: Synthetic oligonucleotide
ccucauauccccaccagga

SEQ ID NO: 1948708 - RNA, 19 nt, Artificial Sequence
  Description of Artificial Sequence: Synthetic oligonucleotide
gaauguucccggaguguga

SEQ ID NO: 1948709 - RNA, 19 nt, Artificial Sequence
  Description of Artificial Sequence: Synthetic oligonucleotide
aguggcacgugguguuccu

SEQ ID NO: 1948710 - RNA, 19 nt, Artificial Sequence
  Description of Artificial Sequence: Synthetic oligonucleotide
gccaauaugugaugaucuc

SEQ ID NO: 1948711 - RNA, 19 nt, Artificial Sequence
  Description of Artificial Sequence: Synthetic oligonucleotide
cuacaguagggagggaaca

SEQ ID NO: 1948712 - RNA, 19 nt, Artificial Sequence
  Description of Artificial Sequence: Synthetic oligonucleotide
ugacuaggaauggguucug

SEQ ID NO: 1948713 - RNA, 19 nt, Artificial Sequence
  Description of Artificial Sequence: Synthetic oligonucleotide
cccgcuacaguagggaggg

SEQ ID NO: 1948714 - RNA, 19 nt, Artificial Sequence
  Description of Artificial Sequence: Synthetic oligonucleotide
cuacagacugagucaucca

SEQ ID NO: 1948715 - RNA, 19 nt, Artificial Sequence
  Description of Artificial Sequence: Synthetic oligonucleotide
uucccggagugugaagcga

SEQ ID NO: 1948716 - RNA, 19 nt, Artificial Sequence
  Description of Artificial Sequence: Synthetic oligonucleotide
ccguaugauaucgccauag

SEQ ID NO: 1948717 - RNA, 19 nt, Artificial Sequence
  Description of Artificial Sequence: Synthetic oligonucleotide
auguucccggagugugaag

SEQ ID NO: 1948718 - RNA, 19 nt, Artificial Sequence
  Description of Artificial Sequence: Synthetic oligonucleotide
cucagcauaaccugccaau

SEQ ID NO: 1948719 - RNA, 19 nt, Artificial Sequence
  Description of Artificial Sequence: Synthetic oligonucleotide
acucaauuacccaccugaa

SEQ ID NO: 1948720 - RNA, 19 nt, Artificial Sequence
  Description of Artificial Sequence: Synthetic oligonucleotide
cacgaucaccaggaaacuc

SEQ ID NO: 1948721 - RNA, 19 nt, Artificial Sequence
  Description of Artificial Sequence: Synthetic oligonucleotide
acccucuauaggaauaguu

SEQ ID NO: 1948722 - RNA, 19 nt, Artificial Sequence
  Description of Artificial Sequence: Synthetic oligonucleotide
ggcugagguaccacgauca

SEQ ID NO: 1948723 - RNA, 19 nt, Artificial Sequence
  Description of Artificial Sequence: Synthetic oligonucleotide
gucuagcuuucacauccga

SEQ ID NO: 1948724 - RNA, 19 nt, Artificial Sequence
  Description of Artificial Sequence: Synthetic oligonucleotide
cauauccccaccaggacuu

SEQ ID NO: 1948725 - RNA, 19 nt, Artificial Sequence
  Description of Artificial Sequence: Synthetic oligonucleotide
caaguaacucuaauugcuu

SEQ ID NO: 1948726 - RNA, 19 nt, Artificial Sequence
  Description of Artificial Sequence: Synthetic oligonucleotide
cccucuauaggaauaguua

SEQ ID NO: 1948727 - RNA, 19 nt, Artificial Sequence
  Description of Artificial Sequence: Synthetic oligonucleotide
gcuacaguagggagggaac

SEQ ID NO: 1948728 - RNA, 19 nt, Artificial Sequence
  Description of Artificial Sequence: Synthetic oligonucleotide
gacuaggaauggguucuga

SEQ ID NO: 1948729 - RNA, 19 nt, Artificial Sequence
  Description of Artificial Sequence: Synthetic oligonucleotide
cuucuuaguaguggcacgu

SEQ ID NO: 1948730 - RNA, 19 nt, Artificial Sequence
  Description of Artificial Sequence: Synthetic oligonucleotide
cugcuggccuaauaagaaa

SEQ ID NO: 1948731 - RNA, 19 nt, Artificial Sequence
  Description of Artificial Sequence: Synthetic oligonucleotide
ucacacgccugagcugaca

SEQ ID NO: 1948732 - RNA, 19 nt, Artificial Sequence
  Description of Artificial Sequence: Synthetic oligonucleotide
gguuuaaguuuagaagaua

SEQ ID NO: 1948733 - RNA, 19 nt, Artificial Sequence
  Description of Artificial Sequence: Synthetic oligonucleotide
agcgaaagucuugucugua

SEQ ID NO: 1948734 - RNA, 19 nt, Artificial Sequence
  Description of Artificial Sequence: Synthetic oligonucleotide
cugcaaucacacgccugag

SEQ ID NO: 1948735 - RNA, 19 nt, Artificial Sequence
  Description of Artificial Sequence: Synthetic oligonucleotide
accuacagacugagucauc

SEQ ID NO: 1948736 - RNA, 19 nt, Artificial Sequence
  Description of Artificial Sequence: Synthetic oligonucleotide
acccaccugaaagccauaa

SEQ ID NO: 1948737 - RNA, 19 nt, Artificial Sequence
  Description of Artificial Sequence: Synthetic oligonucleotide
cgcgaggucaccaggauga

SEQ ID NO: 1948738 - RNA, 19 nt, Artificial Sequence
  Description of Artificial Sequence: Synthetic oligonucleotide
caccaggaugacuaggaau

SEQ ID NO: 1948739 - RNA, 19 nt, Artificial Sequence
  Description of Artificial Sequence: Synthetic oligonucleotide
cauccaaguggauccuaua

SEQ ID NO: 1948740 - RNA, 19 nt, Artificial Sequence
  Description of Artificial Sequence: Synthetic oligonucleotide
cugaaccauuaugugacua

SEQ ID NO: 1948741 - RNA, 19 nt, Artificial Sequence
  Description of Artificial Sequence: Synthetic oligonucleotide
auaucgccauagagaaggu

SEQ ID NO: 1948742 - RNA, 19 nt, Artificial Sequence
  Description of Artificial Sequence: Synthetic oligonucleotide
gcccgcuacaguagggagg

SEQ ID NO: 1948743 - RNA, 19 nt, Artificial Sequence
  Description of Artificial Sequence: Synthetic oligonucleotide
ccucuauaggaauaguuau

SEQ ID NO: 1948744 - RNA, 19 nt, Artificial Sequence
  Description of Artificial Sequence: Synthetic oligonucleotide
ucacauccgaggggcgcga

SEQ ID NO: 1948745 - RNA, 19 nt, Artificial Sequence
  Description of Artificial Sequence: Synthetic oligonucleotide
ggacuaguuagcuuuucuu

SEQ ID NO: 1948746 - RNA, 19 nt, Artificial Sequence
  Description of Artificial Sequence: Synthetic oligonucleotide
gcgaaagucuugucuguaa

SEQ ID NO: 1948747 - RNA, 19 nt, Artificial Sequence
  Description of Artificial Sequence: Synthetic oligonucleotide
gcugagguaccacgaucac

SEQ ID NO: 1948748 - RNA, 19 nt, Artificial Sequence
  Description of Artificial Sequence: Synthetic oligonucleotide
aucacacgccugagcugac

SEQ ID NO: 1948749 - RNA, 19 nt, Artificial Sequence
  Description of Artificial Sequence: Synthetic oligonucleotide
guggacuaguuagcuuuuc

SEQ ID NO: 1948750 - RNA, 19 nt, Artificial Sequence
  Description of Artificial Sequence: Synthetic oligonucleotide
cagcgcuagcauuuugucu

SEQ ID NO: 1948751 - RNA, 19 nt, Artificial Sequence
  Description of Artificial Sequence: Synthetic oligonucleotide
acacgccugagcugacaua

SEQ ID NO: 1948752 - RNA, 19 nt, Artificial Sequence
  Description of Artificial Sequence: Synthetic oligonucleotide
cucauagauccucggcacu

SEQ ID NO: 1948753 - RNA, 19 nt, Artificial Sequence
  Description of Artificial Sequence: Synthetic oligonucleotide
cacguucaaugacauugua

SEQ ID NO: 1948754 - RNA, 19 nt, Artificial Sequence
  Description of Artificial Sequence: Synthetic oligonucleotide
caacuccacacugauuugu

SEQ ID NO: 1948755 - RNA, 19 nt, Artificial Sequence
  Description of Artificial Sequence: Synthetic oligonucleotide
ccauaaugguuuucaaggu

SEQ ID NO: 1948756 - RNA, 19 nt, Artificial Sequence
  Description of Artificial Sequence: Synthetic oligonucleotide
cccagcccgcuacaguagg

SEQ ID NO: 1948757 - RNA, 19 nt, Artificial Sequence
  Description of Artificial Sequence: Synthetic oligonucleotide
cagcauaaccugccaauau

SEQ ID NO: 1948758 - RNA, 19 nt, Artificial Sequence
  Description of Artificial Sequence: Synthetic oligonucleotide
uacccaccugaaagccaua

SEQ ID NO: 1948759 - RNA, 19 nt, Artificial Sequence
  Description of Artificial Sequence: Synthetic oligonucleotide
ggguaaccugugaagaacu

SEQ ID NO: 1948760 - RNA, 19 nt, Artificial Sequence
  Description of Artificial Sequence: Synthetic oligonucleotide
gcgcgaggucaccaggaug

SEQ ID NO: 1948761 - RNA, 19 nt, Artificial Sequence
  Description of Artificial Sequence: Synthetic oligonucleotide
ggcugcaaucacacgccug

SEQ ID NO: 1948762 - RNA, 19 nt, Artificial Sequence
  Description of Artificial Sequence: Synthetic oligonucleotide
ccuuuucagccugcuggcc

SEQ ID NO: 1948763 - RNA, 19 nt, Artificial Sequence
  Description of Artificial Sequence: Synthetic oligonucleotide
guaccacgaucaccaggaa

SEQ ID NO: 1948764 - RNA, 19 nt, Artificial Sequence
  Description of Artificial Sequence: Synthetic oligonucleotide
cguaugauaucgccauaga

SEQ ID NO: 1948765 - RNA, 19 nt, Artificial Sequence
  Description of Artificial Sequence: Synthetic oligonucleotide
gcccguguugaugaacaca

SEQ ID NO: 1948766 - RNA, 19 nt, Artificial Sequence
  Description of Artificial Sequence: Synthetic oligonucleotide
cacauccgaggggcgcgag

SEQ ID NO: 1948767 - RNA, 19 nt, Artificial Sequence
  Description of Artificial Sequence: Synthetic oligonucleotide
cacacgccugagcugacau

SEQ ID NO: 1948768 - RNA, 19 nt, Artificial Sequence
  Description of Artificial Sequence: Synthetic oligonucleotide
caccccaaguaacucuaau

SEQ ID NO: 1948769 - RNA, 19 nt, Artificial Sequence
  Description of Artificial Sequence: Synthetic oligonucleotide
uucagccugcuggccuaau

SEQ ID NO: 1948770 - RNA, 19 nt, Artificial Sequence
  Description of Artificial Sequence: Synthetic oligonucleotide
acgccugagcugacauaca

SEQ ID NO: 1948771 - RNA, 19 nt, Artificial Sequence
  Description of Artificial Sequence: Synthetic oligonucleotide
ccucagcauaaccugccaa

SEQ ID NO: 1948772 - RNA, 19 nt, Artificial Sequence
  Description of Artificial Sequence: Synthetic oligonucleotide
auauccccaccaggacuuu

SEQ ID NO: 1948773 - RNA, 19 nt, Artificial Sequence
  Description of Artificial Sequence: Synthetic oligonucleotide
cggcacuaggucacuggac

SEQ ID NO: 1948774 - RNA, 19 nt, Artificial Sequence
  Description of Artificial Sequence: Synthetic oligonucleotide
gcuguggacuaguuagcuu

SEQ ID NO: 1948775 - RNA, 19 nt, Artificial Sequence
  Description of Artificial Sequence: Synthetic oligonucleotide
gcacuaggucacuggacau

SEQ ID NO: 1948776 - RNA, 19 nt, Artificial Sequence
  Description of Artificial Sequence: Synthetic oligonucleotide
caucggugucuguuuucau

SEQ ID NO: 1948777 - RNA, 19 nt, Artificial Sequence
  Description of Artificial Sequence: Synthetic oligonucleotide
gggcgcgaggucaccagga

SEQ ID NO: 1948778 - RNA, 19 nt, Artificial Sequence
  Description of Artificial Sequence: Synthetic oligonucleotide
ccgaggggcgcgaggucac

SEQ ID NO: 1948779 - RNA, 19 nt, Artificial Sequence
  Description of Artificial Sequence: Synthetic oligonucleotide
ccauagagaagguguucau

SEQ ID NO: 1948780 - RNA, 19 nt, Artificial Sequence
  Description of Artificial Sequence: Synthetic oligonucleotide
gccguaugauaucgccaua

SEQ ID NO: 1948781 - RNA, 19 nt, Artificial Sequence
  Description of Artificial Sequence: Synthetic oligonucleotide
cgugacucaucaucucaua

SEQ ID NO: 1948782 - RNA, 19 nt, Artificial Sequence
  Description of Artificial Sequence: Synthetic oligonucleotide
gcgaggucaccaggaugac

SEQ ID NO: 1948783 - RNA, 19 nt, Artificial Sequence
  Description of Artificial Sequence: Synthetic oligonucleotide
ggaacagcgcuagcauuuu

SEQ ID NO: 1948784 - RNA, 19 nt, Artificial Sequence
  Description of Artificial Sequence: Synthetic oligonucleotide
ggcgcgaggucaccaggau

SEQ ID NO: 1948785 - RNA, 19 nt, Artificial Sequence
  Description of Artificial Sequence: Synthetic oligonucleotide
ccacgaucaccaggaaacu

SEQ ID NO: 1948786 - RNA, 19 nt, Artificial Sequence
  Description of Artificial Sequence: Synthetic oligonucleotide
cccaccugaaagccauaau

SEQ ID NO: 1948787 - RNA, 19 nt, Artificial Sequence
  Description of Artificial Sequence: Synthetic oligonucleotide
cgaggggcgcgaggucacc

SEQ ID NO: 1948788 - RNA, 19 nt, Artificial Sequence
  Description of Artificial Sequence: Synthetic oligonucleotide
ucgaauaucauuuaguucu

SEQ ID NO: 1948789 - RNA, 19 nt, Artificial Sequence
  Description of Artificial Sequence: Synthetic oligonucleotide
guuugaaugugacagaucg

SEQ ID NO: 1948790 - RNA, 19 nt, Artificial Sequence
  Description of Artificial Sequence: Synthetic oligonucleotide
auauauaggugucuaaagc

SEQ ID NO: 1948791 - RNA, 19 nt, Artificial Sequence
  Description of Artificial Sequence: Synthetic oligonucleotide
aagagauaccccaagaugc

SEQ ID NO: 1948792 - RNA, 19 nt, Artificial Sequence
  Description of Artificial Sequence: Synthetic oligonucleotide
aauuccuuaaccucagcac

SEQ ID NO: 1948793 - RNA, 19 nt, Artificial Sequence
  Description of Artificial Sequence: Synthetic oligonucleotide
uuuaauugcuacuucagug

SEQ ID NO: 1948794 - RNA, 19 nt, Artificial Sequence
  Description of Artificial Sequence: Synthetic oligonucleotide
agaaaugagcucuugagag

SEQ ID NO: 1948795 - RNA, 19 nt, Artificial Sequence
  Description of Artificial Sequence: Synthetic oligonucleotide
ugaguugugaaauugcugc

SEQ ID NO: 1948796 - RNA, 19 nt, Artificial Sequence
  Description of Artificial Sequence: Synthetic oligonucleotide
aaagagauaccccaagaug

SEQ ID NO: 1948797 - RNA, 19 nt, Artificial Sequence
  Description of Artificial Sequence: Synthetic oligonucleotide
ugacagaucgauuugacug

SEQ ID NO: 1948798 - RNA, 19 nt, Artificial Sequence
  Description of Artificial Sequence: Synthetic oligonucleotide
aauccuauuaguuugccau

SEQ ID NO: 1948799 - RNA, 19 nt, Artificial Sequence
  Description of Artificial Sequence: Synthetic oligonucleotide
uaacggaacucucugaggg

SEQ ID NO: 1948800 - RNA, 19 nt, Artificial Sequence
  Description of Artificial Sequence: Synthetic oligonucleotide
aauauccgaaccuucaaca

SEQ ID NO: 1948801 - RNA, 19 nt, Artificial Sequence
  Description of Artificial Sequence: Synthetic oligonucleotide
caggaguaaauucaaaucg

SEQ ID NO: 1948802 - RNA, 19 nt, Artificial Sequence
  Description of Artificial Sequence: Synthetic oligonucleotide
aucgauuugacugagguuc

SEQ ID NO: 1948803 - RNA, 19 nt, Artificial Sequence
  Description of Artificial Sequence: Synthetic oligonucleotide
aguaaauucaaaucgaaua

SEQ ID NO: 1948804 - RNA, 19 nt, Artificial Sequence
  Description of Artificial Sequence: Synthetic oligonucleotide
aagguguggguguugaugg

SEQ ID NO: 1948805 - RNA, 19 nt, Artificial Sequence
  Description of Artificial Sequence: Synthetic oligonucleotide
augagcagaaaucuguucg

SEQ ID NO: 1948806 - RNA, 19 nt, Artificial Sequence
  Description of Artificial Sequence: Synthetic oligonucleotide
acuauuacuaaaucccuuc

SEQ ID NO: 1948807 - RNA, 19 nt, Artificial Sequence
  Description of Artificial Sequence: Synthetic oligonucleotide
aaaugagcucuugagagac

SEQ ID NO: 1948808 - RNA, 19 nt, Artificial Sequence
  Description of Artificial Sequence: Synthetic oligonucleotide
uucaguguuaaagagauac

SEQ ID NO: 1948809 - RNA, 19 nt, Artificial Sequence
  Description of Artificial Sequence: Synthetic oligonucleotide
uuaguuugccaucaucagg

SEQ ID NO: 1948810 - RNA, 19 nt, Artificial Sequence
  Description of Artificial Sequence: Synthetic oligonucleotide
ugagagauuuccauccugg

SEQ ID NO: 1948811 - RNA, 19 nt, Artificial Sequence
  Description of Artificial Sequence: Synthetic oligonucleotide
aaucgaauaucauuuaguu

SEQ ID NO: 1948812 - RNA, 19 nt, Artificial Sequence
  Description of Artificial Sequence: Synthetic oligonucleotide
ugucuaaagcuccaagccg

SEQ ID NO: 1948813 - RNA, 19 nt, Artificial Sequence
  Description of Artificial Sequence: Synthetic oligonucleotide
auuugacugagguucuucc

SEQ ID NO: 1948814 - RNA, 19 nt, Artificial Sequence
  Description of Artificial Sequence: Synthetic oligonucleotide
acagauaugcauguguggc

SEQ ID NO: 1948815 - RNA, 19 nt, Artificial Sequence
  Description of Artificial Sequence: Synthetic oligonucleotide
uaguuugccaucaucagga

SEQ ID NO: 1948816 - RNA, 19 nt, Artificial Sequence
  Description of Artificial Sequence: Synthetic oligonucleotide
aauuagcugccacuauuac

SEQ ID NO: 1948817 - RNA, 19 nt, Artificial Sequence
  Description of Artificial Sequence: Synthetic oligonucleotide
uacuaaaucccuuccauca

SEQ ID NO: 1948818 - RNA, 19 nt, Artificial Sequence
  Description of Artificial Sequence: Synthetic oligonucleotide
aaauucaaaucgaauauca

SEQ ID NO: 1948819 - RNA, 19 nt, Artificial Sequence
  Description of Artificial Sequence: Synthetic oligonucleotide
agagauuuccauccugggc

SEQ ID NO: 1948820 - RNA, 19 nt, Artificial Sequence
  Description of Artificial Sequence: Synthetic oligonucleotide
aacuuuuaauugcuacuuc

SEQ ID NO: 1948821 - RNA, 19 nt, Artificial Sequence
  Description of Artificial Sequence: Synthetic oligonucleotide
uuaaccucagcacaagacu

SEQ ID NO: 1948822 - RNA, 19 nt, Artificial Sequence
  Description of Artificial Sequence: Synthetic oligonucleotide
uauaggugucuaaagcucc

SEQ ID NO: 1948823 - RNA, 19 nt, Artificial Sequence
  Description of Artificial Sequence: Synthetic oligonucleotide
ugauggcagaagaagauca

SEQ ID NO: 1948824 - RNA, 19 nt, Artificial Sequence
  Description of Artificial Sequence: Synthetic oligonucleotide
uagaugagcagaaaucugu

SEQ ID NO: 1948825 - RNA, 19 nt, Artificial Sequence
  Description of Artificial Sequence: Synthetic oligonucleotide
ugaaaagagcucagaauug

SEQ ID NO: 1948826 - RNA, 19 nt, Artificial Sequence
  Description of Artificial Sequence: Synthetic oligonucleotide
uuaaagagauaccccaaga

SEQ ID NO: 1948827 - RNA, 19 nt, Artificial Sequence
  Description of Artificial Sequence: Synthetic oligonucleotide
uuuuaauugcuacuucagu

SEQ ID NO: 1948828 - RNA, 19 nt, Artificial Sequence
  Description of Artificial Sequence: Synthetic oligonucleotide
ugcuacuucaguguuaaag

SEQ ID NO: 1948829 - RNA, 19 nt, Artificial Sequence
  Description of Artificial Sequence: Synthetic oligonucleotide
aaugugacagaucgauuug

SEQ ID NO: 1948830 - RNA, 19 nt, Artificial Sequence
  Description of Artificial Sequence: Synthetic oligonucleotide
aguguuaaagagauacccc

SEQ ID NO: 1948831 - RNA, 19 nt, Artificial Sequence
  Description of Artificial Sequence: Synthetic oligonucleotide
aucgaauaucauuuaguuc

SEQ ID NO: 1948832 - RNA, 19 nt, Artificial Sequence
  Description of Artificial Sequence: Synthetic oligonucleotide
ucuacuaacggaacucucu

SEQ ID NO: 1948833 - RNA, 19 nt, Artificial Sequence
  Description of Artificial Sequence: Synthetic oligonucleotide
acuaacggaacucucugag

SEQ ID NO: 1948834 - RNA, 19 nt, Artificial Sequence
  Description of Artificial Sequence: Synthetic oligonucleotide
aaucuguucgggaacgugg

SEQ ID NO: 1948835 - RNA, 19 nt, Artificial Sequence
  Description of Artificial Sequence: Synthetic oligonucleotide
agaucuuucagaaauggug

SEQ ID NO: 1948836 - RNA, 19 nt, Artificial Sequence
  Description of Artificial Sequence: Synthetic oligonucleotide
auauccgaaccuucaacac

SEQ ID NO: 1948837 - RNA, 19 nt, Artificial Sequence
  Description of Artificial Sequence: Synthetic oligonucleotide
auuaguuugccaucaucag

SEQ ID NO: 1948838 - RNA, 19 nt, Artificial Sequence
  Description of Artificial Sequence: Synthetic oligonucleotide
ugagcagaaaucuguucgg

SEQ ID NO: 1948839 - RNA, 19 nt, Artificial Sequence
  Description of Artificial Sequence: Synthetic oligonucleotide
uaaagagauaccccaagau

SEQ ID NO: 1948840 - RNA, 19 nt, Artificial Sequence
  Description of Artificial Sequence: Synthetic oligonucleotide
agaucgauuugacugaggu

SEQ ID NO: 1948841 - RNA, 19 nt, Artificial Sequence
  Description of Artificial Sequence: Synthetic oligonucleotide
ugugguuuagcugaugcug

SEQ ID NO: 1948842 - RNA, 19 nt, Artificial Sequence
  Description of Artificial Sequence: Synthetic oligonucleotide
auaucuacuaacggaacuc

SEQ ID NO: 1948843 - RNA, 19 nt, Artificial Sequence
  Description of Artificial Sequence: Synthetic oligonucleotide
uuugcuggggcucuuuggc

SEQ ID NO: 1948844 - RNA, 19 nt, Artificial Sequence
  Description of Artificial Sequence: Synthetic oligonucleotide
aauccaacuucucuuuccu

SEQ ID NO: 1948845 - RNA, 19 nt, Artificial Sequence
  Description of Artificial Sequence: Synthetic oligonucleotide
uaaaucccuuccaucaacc

SEQ ID NO: 1948846 - RNA, 19 nt, Artificial Sequence
  Description of Artificial Sequence: Synthetic oligonucleotide
aauuuucugcaaauuagcu

SEQ ID NO: 1948847 - RNA, 19 nt, Artificial Sequence
  Description of Artificial Sequence: Synthetic oligonucleotide
aagaucauauauagguguc

SEQ ID NO: 1948848 - RNA, 19 nt, Artificial Sequence
  Description of Artificial Sequence: Synthetic oligonucleotide
uauccgaaccuucaacacc

SEQ ID NO: 1948849 - RNA, 19 nt, Artificial Sequence
  Description of Artificial Sequence: Synthetic oligonucleotide
guuaaagagauaccccaag

SEQ ID NO: 1948850 - RNA, 19 nt, Artificial Sequence
  Description of Artificial Sequence: Synthetic oligonucleotide
cuuaaccucagcacaagac

SEQ ID NO: 1948851 - RNA, 19 nt, Artificial Sequence
  Description of Artificial Sequence: Synthetic oligonucleotide
uaccccaagaugcucaggc

SEQ ID NO: 1948852 - RNA, 19 nt, Artificial Sequence
  Description of Artificial Sequence: Synthetic oligonucleotide
gugucuaaagcuccaagcc

SEQ ID NO: 1948853 - RNA, 19 nt, Artificial Sequence
  Description of Artificial Sequence: Synthetic oligonucleotide
uacuucaguguuaaagaga

SEQ ID NO: 1948854 - RNA, 19 nt, Artificial Sequence
  Description of Artificial Sequence: Synthetic oligonucleotide
aagccgggaaguuuguuug

SEQ ID NO: 1948855 - RNA, 19 nt, Artificial Sequence
  Description of Artificial Sequence: Synthetic oligonucleotide
augagcucuugagagaccc

SEQ ID NO: 1948856 - RNA, 19 nt, Artificial Sequence
  Description of Artificial Sequence: Synthetic oligonucleotide
aaauccuauuaguuugcca

SEQ ID NO: 1948857 - RNA, 19 nt, Artificial Sequence
  Description of Artificial Sequence: Synthetic oligonucleotide
gaagaucauauauaggugu

SEQ ID NO: 1948858 - RNA, 19 nt, Artificial Sequence
  Description of Artificial Sequence: Synthetic oligonucleotide
uguguaggcaucuggccag

SEQ ID NO: 1948859 - RNA, 19 nt, Artificial Sequence
  Description of Artificial Sequence: Synthetic oligonucleotide
ucaguguuaaagagauacc

SEQ ID NO: 1948860 - RNA, 19 nt, Artificial Sequence
  Description of Artificial Sequence: Synthetic oligonucleotide
agauaugcauguguggcac

SEQ ID NO: 1948861 - RNA, 19 nt, Artificial Sequence
  Description of Artificial Sequence: Synthetic oligonucleotide
auauaggugucuaaagcuc

SEQ ID NO: 1948862 - RNA, 19 nt, Artificial Sequence
  Description of Artificial Sequence: Synthetic oligonucleotide
cuauuacuaaaucccuucc

SEQ ID NO: 1948863 - RNA, 19 nt, Artificial Sequence
  Description of Artificial Sequence: Synthetic oligonucleotide
aacggaacucucugagggg

SEQ ID NO: 1948864 - RNA, 19 nt, Artificial Sequence
  Description of Artificial Sequence: Synthetic oligonucleotide
uauggagacggccacugga

SEQ ID NO: 1948865 - RNA, 19 nt, Artificial Sequence
  Description of Artificial Sequence: Synthetic oligonucleotide
gaauauccgaaccuucaac

SEQ ID NO: 1948866 - RNA, 19 nt, Artificial Sequence
  Description of Artificial Sequence: Synthetic oligonucleotide
ucgccugcugaaaagagcu

SEQ ID NO: 1948867 - RNA, 19 nt, Artificial Sequence
  Description of Artificial Sequence: Synthetic oligonucleotide
aagaugcucaggccccggc

SEQ ID NO: 1948868 - RNA, 19 nt, Artificial Sequence
  Description of Artificial Sequence: Synthetic oligonucleotide
gucuaaagcuccaagccgg

SEQ ID NO: 1948869 - RNA, 19 nt, Artificial Sequence
  Description of Artificial Sequence: Synthetic oligonucleotide
agaaaucuguucgggaacg

SEQ ID NO: 1948870 - RNA, 19 nt, Artificial Sequence
  Description of Artificial Sequence: Synthetic oligonucleotide
agaugaggaugcccaacgc

SEQ ID NO: 1948871 - RNA, 19 nt, Artificial Sequence
  Description of Artificial Sequence: Synthetic oligonucleotide
ucuaaagcuccaagccggg

SEQ ID NO: 1948872 - RNA, 19 nt, Artificial Sequence
  Description of Artificial Sequence: Synthetic oligonucleotide
caacagauaugcaugugug

SEQ ID NO: 1948873 - RNA, 19 nt, Artificial Sequence
  Description of Artificial Sequence: Synthetic oligonucleotide
guguuaaagagauacccca

SEQ ID NO: 1948874 - RNA, 19 nt, Artificial Sequence
  Description of Artificial Sequence: Synthetic oligonucleotide
uaaauucaaaucgaauauc

SEQ ID NO: 1948875 - RNA, 19 nt, Artificial Sequence
  Description of Artificial Sequence: Synthetic oligonucleotide
auuagcugccacuauuacu

SEQ ID NO: 1948876 - RNA, 19 nt, Artificial Sequence
  Description of Artificial Sequence: Synthetic oligonucleotide
agcagcauaucuacuaacg

SEQ ID NO: 1948877 - RNA, 19 nt, Artificial Sequence
  Description of Artificial Sequence: Synthetic oligonucleotide
uguuaaagagauaccccaa

SEQ ID NO: 1948878 - RNA, 19 nt, Artificial Sequence
  Description of Artificial Sequence: Synthetic oligonucleotide
aaguuuguuugcuggggcu

SEQ ID NO: 1948879 - RNA, 19 nt, Artificial Sequence
  Description of Artificial Sequence: Synthetic oligonucleotide
aagacugauagggaccuug

SEQ ID NO: 1948880 - RNA, 19 nt, Artificial Sequence
  Description of Artificial Sequence: Synthetic oligonucleotide
uguucgggaacguggagca

SEQ ID NO: 1948881 - RNA, 19 nt, Artificial Sequence
  Description of Artificial Sequence: Synthetic oligonucleotide
uagguucaggccaacagaa

SEQ ID NO: 1948882 - RNA, 19 nt, Artificial Sequence
  Description of Artificial Sequence: Synthetic oligonucleotide
uggaauuccuuaaccucag

SEQ ID NO: 1948883 - RNA, 19 nt, Artificial Sequence
  Description of Artificial Sequence: Synthetic oligonucleotide
gccaguuugaaugugacag

SEQ ID NO: 1948884 - RNA, 19 nt, Artificial Sequence
  Description of Artificial Sequence: Synthetic oligonucleotide
uuucagaaauggugggugc

SEQ ID NO: 1948885 - RNA, 19 nt, Artificial Sequence
  Description of Artificial Sequence: Synthetic oligonucleotide
cuuccaucaaccaggccag

SEQ ID NO: 1948886 - RNA, 19 nt, Artificial Sequence
  Description of Artificial Sequence: Synthetic oligonucleotide
uguggcaccuccuuaggcu

SEQ ID NO: 1948887 - RNA, 19 nt, Artificial Sequence
  Description of Artificial Sequence: Synthetic oligonucleotide
agguagaugagcagaaauc

SEQ ID NO: 1948888 - RNA, 19 nt, Artificial Sequence
  Description of Artificial Sequence: Synthetic oligonucleotide
aaaucccuuccaucaacca

SEQ ID NO: 1948889 - RNA, 19 nt, Artificial Sequence
  Description of Artificial Sequence: Synthetic oligonucleotide
gaacguggagcaaagugcc

SEQ ID NO: 1948890 - RNA, 19 nt, Artificial Sequence
  Description of Artificial Sequence: Synthetic oligonucleotide
uucaacaccagaugccagu

SEQ ID NO: 1948891 - RNA, 19 nt, Artificial Sequence
  Description of Artificial Sequence: Synthetic oligonucleotide
ugugacagaucgauuugac

SEQ ID NO: 1948892 - RNA, 19 nt, Artificial Sequence
  Description of Artificial Sequence: Synthetic oligonucleotide
aucccuuccaucaaccagg

SEQ ID NO: 1948893 - RNA, 19 nt, Artificial Sequence
  Description of Artificial Sequence: Synthetic oligonucleotide
uuugaaugugacagaucga

SEQ ID NO: 1948894 - RNA, 19 nt, Artificial Sequence
  Description of Artificial Sequence: Synthetic oligonucleotide
cuuucagaaauggugggug

SEQ ID NO: 1948895 - RNA, 19 nt, Artificial Sequence
  Description of Artificial Sequence: Synthetic oligonucleotide
uccgcugugucucucccag

SEQ ID NO: 1948896 - RNA, 19 nt, Artificial Sequence
  Description of Artificial Sequence: Synthetic oligonucleotide
guaguaaggcaagaguaag

SEQ ID NO: 1948897 - RNA, 19 nt, Artificial Sequence
  Description of Artificial Sequence: Synthetic oligonucleotide
uccaguucaucaucacucc

SEQ ID NO: 1948898 - RNA, 19 nt, Artificial Sequence
  Description of Artificial Sequence: Synthetic oligonucleotide
ggugucuaaagcuccaagc

SEQ ID NO: 1948899 - RNA, 19 nt, Artificial Sequence
  Description of Artificial Sequence: Synthetic oligonucleotide
aguugugaaauugcugcuc

SEQ ID NO: 1948900 - RNA, 19 nt, Artificial Sequence
  Description of Artificial Sequence: Synthetic oligonucleotide
uuugacugagguucuucca

SEQ ID NO: 1948901 - RNA, 19 nt, Artificial Sequence
  Description of Artificial Sequence: Synthetic oligonucleotide
uccacaauuuucugcaaau

SEQ ID NO: 1948902 - RNA, 19 nt, Artificial Sequence
  Description of Artificial Sequence: Synthetic oligonucleotide
ugggcaaauccuauuaguu

SEQ ID NO: 1948903 - RNA, 19 nt, Artificial Sequence
  Description of Artificial Sequence: Synthetic oligonucleotide
ggagagauacuugagcagg

SEQ ID NO: 1948904 - RNA, 19 nt, Artificial Sequence
  Description of Artificial Sequence: Synthetic oligonucleotide
gacagaucgauuugacuga

SEQ ID NO: 1948905 - RNA, 19 nt, Artificial Sequence
  Description of Artificial Sequence: Synthetic oligonucleotide
agaagaucauauauaggug

SEQ ID NO: 1948906 - RNA, 19 nt, Artificial Sequence
  Description of Artificial Sequence: Synthetic oligonucleotide
cuggagagauacuugagca

SEQ ID NO: 1948907 - RNA, 19 nt, Artificial Sequence
  Description of Artificial Sequence: Synthetic oligonucleotide
auguguggcaccuccuuag

SEQ ID NO: 1948908 - RNA, 19 nt, Artificial Sequence
  Description of Artificial Sequence: Synthetic oligonucleotide
cuaaaucccuuccaucaac

SEQ ID NO: 1948909 - RNA, 19 nt, Artificial Sequence
  Description of Artificial Sequence: Synthetic oligonucleotide
uguguggcaccuccuuagg

SEQ ID NO: 1948910 - RNA, 19 nt, Artificial Sequence
  Description of Artificial Sequence: Synthetic oligonucleotide
gaaaugagcucuugagaga

SEQ ID NO: 1948911 - RNA, 19 nt, Artificial Sequence
  Description of Artificial Sequence: Synthetic oligonucleotide
uuuggcaguuguagguuca

SEQ ID NO: 1948912 - RNA, 19 nt, Artificial Sequence
  Description of Artificial Sequence: Synthetic oligonucleotide
aucaucacuccacucccag

SEQ ID NO: 1948913 - RNA, 19 nt, Artificial Sequence
  Description of Artificial Sequence: Synthetic oligonucleotide
gaaugugacagaucgauuu

SEQ ID NO: 1948914 - RNA, 19 nt, Artificial Sequence
  Description of Artificial Sequence: Synthetic oligonucleotide
aaaucuguucgggaacgug

SEQ ID NO: 1948915 - RNA, 19 nt, Artificial Sequence
  Description of Artificial Sequence: Synthetic oligonucleotide
aauucaaaucgaauaucau

SEQ ID NO: 1948916 - RNA, 19 nt, Artificial Sequence
  Description of Artificial Sequence: Synthetic oligonucleotide
aaugagcucuugagagacc

SEQ ID NO: 1948917 - RNA, 19 nt, Artificial Sequence
  Description of Artificial Sequence: Synthetic oligonucleotide
cugaguugugaaauugcug

SEQ ID NO: 1948918 - RNA, 19 nt, Artificial Sequence
  Description of Artificial Sequence: Synthetic oligonucleotide
agaguaagcugagagauuu

SEQ ID NO: 1948919 - RNA, 19 nt, Artificial Sequence
  Description of Artificial Sequence: Synthetic oligonucleotide
cuacuaacggaacucucug

SEQ ID NO: 1948920 - RNA, 19 nt, Artificial Sequence
  Description of Artificial Sequence: Synthetic oligonucleotide
gaugcucaggccccggcag

SEQ ID NO: 1948921 - RNA, 19 nt, Artificial Sequence
  Description of Artificial Sequence: Synthetic oligonucleotide
uccuauuaguuugccauca

SEQ ID NO: 1948922 - RNA, 19 nt, Artificial Sequence
  Description of Artificial Sequence: Synthetic oligonucleotide
ugugaaauugcugcucuuc

SEQ ID NO: 1948923 - RNA, 19 nt, Artificial Sequence
  Description of Artificial Sequence: Synthetic oligonucleotide
aaauuagcugccacuauua

SEQ ID NO: 1948924 - RNA, 19 nt, Artificial Sequence
  Description of Artificial Sequence: Synthetic oligonucleotide
gauaccccaagaugcucag

SEQ ID NO: 1948925 - RNA, 19 nt, Artificial Sequence
  Description of Artificial Sequence: Synthetic oligonucleotide
agcauaucuacuaacggaa

SEQ ID NO: 1948926 - RNA, 19 nt, Artificial Sequence
  Description of Artificial Sequence: Synthetic oligonucleotide
uuugcuggcucugcagagg

SEQ ID NO: 1948927 - RNA, 19 nt, Artificial Sequence
  Description of Artificial Sequence: Synthetic oligonucleotide
uaucuacuaacggaacucu

SEQ ID NO: 1948928 - RNA, 19 nt, Artificial Sequence
  Description of Artificial Sequence: Synthetic oligonucleotide
uaauugcuacuucaguguu

SEQ ID NO: 1948929 - RNA, 19 nt, Artificial Sequence
  Description of Artificial Sequence: Synthetic oligonucleotide
aaagugcccauggggucgc

SEQ ID NO: 1948930 - RNA, 19 nt, Artificial Sequence
  Description of Artificial Sequence: Synthetic oligonucleotide
agcagaaaugagcucuuga

SEQ ID NO: 1948931 - RNA, 19 nt, Artificial Sequence
  Description of Artificial Sequence: Synthetic oligonucleotide
cuauuaguuugccaucauc

SEQ ID NO: 1948932 - RNA, 19 nt, Artificial Sequence
  Description of Artificial Sequence: Synthetic oligonucleotide
ugcaaauuagcugccacua

SEQ ID NO: 1948933 - RNA, 19 nt, Artificial Sequence
  Description of Artificial Sequence: Synthetic oligonucleotide
cuguaguaaggcaagagua

SEQ ID NO: 1948934 - RNA, 19 nt, Artificial Sequence
  Description of Artificial Sequence: Synthetic oligonucleotide
uacuugagcaggcugugua

SEQ ID NO: 1948935 - RNA, 19 nt, Artificial Sequence
  Description of Artificial Sequence: Synthetic oligonucleotide
uuuagcugaugcugagcug

SEQ ID NO: 1948936 - RNA, 19 nt, Artificial Sequence
  Description of Artificial Sequence: Synthetic oligonucleotide
aguuuguuugcuggggcuc

SEQ ID NO: 1948937 - RNA, 19 nt, Artificial Sequence
  Description of Artificial Sequence: Synthetic oligonucleotide
auugcuacuucaguguuaa

SEQ ID NO: 1948938 - RNA, 19 nt, Artificial Sequence
  Description of Artificial Sequence: Synthetic oligonucleotide
ggaacguggagcaaagugc

SEQ ID NO: 1948939 - RNA, 19 nt, Artificial Sequence
  Description of Artificial Sequence: Synthetic oligonucleotide
cagcauaucuacuaacgga

SEQ ID NO: 1948940 - RNA, 19 nt, Artificial Sequence
  Description of Artificial Sequence: Synthetic oligonucleotide
caaagugcccauggggucg

SEQ ID NO: 1948941 - RNA, 19 nt, Artificial Sequence
  Description of Artificial Sequence: Synthetic oligonucleotide
gugagucuuucacucgggg

SEQ ID NO: 1948942 - RNA, 19 nt, Artificial Sequence
  Description of Artificial Sequence: Synthetic oligonucleotide
ucuuucagaaauggugggu

SEQ ID NO: 1948943 - RNA, 19 nt, Artificial Sequence
  Description of Artificial Sequence: Synthetic oligonucleotide
uguuugcuggggcucuuug

SEQ ID NO: 1948944 - RNA, 19 nt, Artificial Sequence
  Description of Artificial Sequence: Synthetic oligonucleotide
guaaggcaagaguaagcug

SEQ ID NO: 1948945 - RNA, 19 nt, Artificial Sequence
  Description of Artificial Sequence: Synthetic oligonucleotide
ugggcccugaggcacacca

SEQ ID NO: 1948946 - RNA, 19 nt, Artificial Sequence
  Description of Artificial Sequence: Synthetic oligonucleotide
agcagaaaucuguucggga

SEQ ID NO: 1948947 - RNA, 19 nt, Artificial Sequence
  Description of Artificial Sequence: Synthetic oligonucleotide
aggugucuaaagcuccaag

SEQ ID NO: 1948948 - RNA, 19 nt, Artificial Sequence
  Description of Artificial Sequence: Synthetic oligonucleotide
guuuagcugaugcugagcu

SEQ ID NO: 1948949 - RNA, 19 nt, Artificial Sequence
  Description of Artificial Sequence: Synthetic oligonucleotide
cagaaaucuguucgggaac

SEQ ID NO: 1948950 - RNA, 19 nt, Artificial Sequence
  Description of Artificial Sequence: Synthetic oligonucleotide
cuugagcaggcuguguagg

SEQ ID NO: 1948951 - RNA, 19 nt, Artificial Sequence
  Description of Artificial Sequence: Synthetic oligonucleotide
caacgcagcugcuacugcc

SEQ ID NO: 1948952 - RNA, 19 nt, Artificial Sequence
  Description of Artificial Sequence: Synthetic oligonucleotide
acaagacugauagggaccu

SEQ ID NO: 1948953 - RNA, 19 nt, Artificial Sequence
  Description of Artificial Sequence: Synthetic oligonucleotide
ugugucucucccaggagua

SEQ ID NO: 1948954 - RNA, 19 nt, Artificial Sequence
  Description of Artificial Sequence: Synthetic oligonucleotide
aacguggagcaaagugccc

SEQ ID NO: 1948955 - RNA, 19 nt, Artificial Sequence
  Description of Artificial Sequence: Synthetic oligonucleotide
gggaacguggagcaaagug

SEQ ID NO: 1948956 - RNA, 19 nt, Artificial Sequence
  Description of Artificial Sequence: Synthetic oligonucleotide
gauaugcauguguggcacc

SEQ ID NO: 1948957 - RNA, 19 nt, Artificial Sequence
  Description of Artificial Sequence: Synthetic oligonucleotide
uacuaacggaacucucuga

SEQ ID NO: 1948958 - RNA, 19 nt, Artificial Sequence
  Description of Artificial Sequence: Synthetic oligonucleotide
aaggcaagaguaagcugag

SEQ ID NO: 1948959 - RNA, 19 nt, Artificial Sequence
  Description of Artificial Sequence: Synthetic oligonucleotide
agaauuggacagugagucu

SEQ ID NO: 1948960 - RNA, 19 nt, Artificial Sequence
  Description of Artificial Sequence: Synthetic oligonucleotide
ucgggaacguggagcaaag

SEQ ID NO: 1948961 - RNA, 19 nt, Artificial Sequence
  Description of Artificial Sequence: Synthetic oligonucleotide
ucgauuugacugagguucu

SEQ ID NO: 1948962 - RNA, 19 nt, Artificial Sequence
  Description of Artificial Sequence: Synthetic oligonucleotide
acuaaaucccuuccaucaa

SEQ ID NO: 1948963 - RNA, 19 nt, Artificial Sequence
  Description of Artificial Sequence: Synthetic oligonucleotide
cagaaaugagcucuugaga

SEQ ID NO: 1948964 - RNA, 19 nt, Artificial Sequence
  Description of Artificial Sequence: Synthetic oligonucleotide
ucuguucgggaacguggag

SEQ ID NO: 1948965 - RNA, 19 nt, Artificial Sequence
  Description of Artificial Sequence: Synthetic oligonucleotide
uccuuguggaaaggugugg

SEQ ID NO: 1948966 - RNA, 19 nt, Artificial Sequence
  Description of Artificial Sequence: Synthetic oligonucleotide
agccgggaaguuuguuugc

SEQ ID NO: 1948967 - RNA, 19 nt, Artificial Sequence
  Description of Artificial Sequence: Synthetic oligonucleotide
ucaggaauauccgaaccuu

SEQ ID NO: 1948968 - RNA, 19 nt, Artificial Sequence
  Description of Artificial Sequence: Synthetic oligonucleotide
guagaugagcagaaaucug

SEQ ID NO: 1948969 - RNA, 19 nt, Artificial Sequence
  Description of Artificial Sequence: Synthetic oligonucleotide
gagagauacuugagcaggc

SEQ ID NO: 1948970 - RNA, 19 nt, Artificial Sequence
  Description of Artificial Sequence: Synthetic oligonucleotide
aggcaagaugaggaugccc

SEQ ID NO: 1948971 - RNA, 19 nt, Artificial Sequence
  Description of Artificial Sequence: Synthetic oligonucleotide
uugauggcagaagaagauc

SEQ ID NO: 1948972 - RNA, 19 nt, Artificial Sequence
  Description of Artificial Sequence: Synthetic oligonucleotide
caguuguagguucaggcca

SEQ ID NO: 1948973 - RNA, 19 nt, Artificial Sequence
  Description of Artificial Sequence: Synthetic oligonucleotide
uucucagauggaggaagag

SEQ ID NO: 1948974 - RNA, 19 nt, Artificial Sequence
  Description of Artificial Sequence: Synthetic oligonucleotide
gagcagcauaucuacuaac

SEQ ID NO: 1948975 - RNA, 19 nt, Artificial Sequence
  Description of Artificial Sequence: Synthetic oligonucleotide
ugcccaacgcagcugcuac

SEQ ID NO: 1948976 - RNA, 19 nt, Artificial Sequence
  Description of Artificial Sequence: Synthetic oligonucleotide
cuguucgggaacguggagc

SEQ ID NO: 1948977 - RNA, 19 nt, Artificial Sequence
  Description of Artificial Sequence: Synthetic oligonucleotide
gaucauauauaggugucua

SEQ ID NO: 1948978 - RNA, 19 nt, Artificial Sequence
  Description of Artificial Sequence: Synthetic oligonucleotide
aggcugacucuuccagggc

SEQ ID NO: 1948979 - RNA, 19 nt, Artificial Sequence
  Description of Artificial Sequence: Synthetic oligonucleotide
caaauccuauuaguuugcc

SEQ ID NO: 1948980 - RNA, 19 nt, Artificial Sequence
  Description of Artificial Sequence: Synthetic oligonucleotide
auagggaccuuggucuccg

SEQ ID NO: 1948981 - RNA, 19 nt, Artificial Sequence
  Description of Artificial Sequence: Synthetic oligonucleotide
aggaauauccgaaccuuca

SEQ ID NO: 1948982 - RNA, 19 nt, Artificial Sequence
  Description of Artificial Sequence: Synthetic oligonucleotide
cugagagauuuccauccug

SEQ ID NO: 1948983 - RNA, 19 nt, Artificial Sequence
  Description of Artificial Sequence: Synthetic oligonucleotide
ugcuacugcccgcucggcc

SEQ ID NO: 1948984 - RNA, 19 nt, Artificial Sequence
  Description of Artificial Sequence: Synthetic oligonucleotide
gcagguacgggagagcagg

SEQ ID NO: 1948985 - RNA, 19 nt, Artificial Sequence
  Description of Artificial Sequence: Synthetic oligonucleotide
auaugcauguguggcaccu

SEQ ID NO: 1948986 - RNA, 19 nt, Artificial Sequence
  Description of Artificial Sequence: Synthetic oligonucleotide
caggaauauccgaaccuuc

SEQ ID NO: 1948987 - RNA, 19 nt, Artificial Sequence
  Description of Artificial Sequence: Synthetic oligonucleotide
ggcucuuuggcaguuguag

SEQ ID NO: 1948988 - RNA, 19 nt, Artificial Sequence
  Description of Artificial Sequence: Synthetic oligonucleotide
agacugauagggaccuugg

SEQ ID NO: 1948989 - RNA, 19 nt, Artificial Sequence
  Description of Artificial Sequence: Synthetic oligonucleotide
agccugguacucuccgaac

SEQ ID NO: 1948990 - RNA, 19 nt, Artificial Sequence
  Description of Artificial Sequence: Synthetic oligonucleotide
caggccaacagaagcaaca

SEQ ID NO: 1948991 - RNA, 19 nt, Artificial Sequence
  Description of Artificial Sequence: Synthetic oligonucleotide
agcucagaauuggacagug

SEQ ID NO: 1948992 - RNA, 19 nt, Artificial Sequence
  Description of Artificial Sequence: Synthetic oligonucleotide
uccuuaaccucagcacaag

SEQ ID NO: 1948993 - RNA, 19 nt, Artificial Sequence
  Description of Artificial Sequence: Synthetic oligonucleotide
ugagcucuugagagacccc

SEQ ID NO: 1948994 - RNA, 19 nt, Artificial Sequence
  Description of Artificial Sequence: Synthetic oligonucleotide
uggguguugauggcagaag

SEQ ID NO: 1948995 - RNA, 19 nt, Artificial Sequence
  Description of Artificial Sequence: Synthetic oligonucleotide
ucccuuccaucaaccaggc

SEQ ID NO: 1948996 - RNA, 19 nt, Artificial Sequence
  Description of Artificial Sequence: Synthetic oligonucleotide
guugugaaauugcugcucu

SEQ ID NO: 1948997 - RNA, 19 nt, Artificial Sequence
  Description of Artificial Sequence: Synthetic oligonucleotide
acagaucgauuugacugag

SEQ ID NO: 1948998 - RNA, 19 nt, Artificial Sequence
  Description of Artificial Sequence: Synthetic oligonucleotide
agauaccccaagaugcuca

SEQ ID NO: 1948999 - RNA, 19 nt, Artificial Sequence
  Description of Artificial Sequence: Synthetic oligonucleotide
gacaugagcagcauaucua

SEQ ID NO: 1949000 - RNA, 19 nt, Artificial Sequence
  Description of Artificial Sequence: Synthetic oligonucleotide
cucggggagaccugaguug

SEQ ID NO: 1949001 - RNA, 19 nt, Artificial Sequence
  Description of Artificial Sequence: Synthetic oligonucleotide
aucuacuaacggaacucuc

SEQ ID NO: 1949002 - RNA, 19 nt, Artificial Sequence
  Description of Artificial Sequence: Synthetic oligonucleotide
uuucacucggggagaccug

SEQ ID NO: 1949003 - RNA, 19 nt, Artificial Sequence
  Description of Artificial Sequence: Synthetic oligonucleotide
cugcuucucagauggagga

SEQ ID NO: 1949004 - RNA, 19 nt, Artificial Sequence
  Description of Artificial Sequence: Synthetic oligonucleotide
uuggucuccguggaguggu

SEQ ID NO: 1949005 - RNA, 19 nt, Artificial Sequence
  Description of Artificial Sequence: Synthetic oligonucleotide
gcaggcaagaugaggaugc

SEQ ID NO: 1949006 - RNA, 19 nt, Artificial Sequence
  Description of Artificial Sequence: Synthetic oligonucleotide
accuccuuaggcugacucu

SEQ ID NO: 1949007 - RNA, 19 nt, Artificial Sequence
  Description of Artificial Sequence: Synthetic oligonucleotide
agugagucuuucacucggg

SEQ ID NO: 1949008 - RNA, 19 nt, Artificial Sequence
  Description of Artificial Sequence: Synthetic oligonucleotide
auggagacggccacuggag

SEQ ID NO: 1949009 - RNA, 19 nt, Artificial Sequence
  Description of Artificial Sequence: Synthetic oligonucleotide
cagaucgauuugacugagg

SEQ ID NO: 1949010 - RNA, 19 nt, Artificial Sequence
  Description of Artificial Sequence: Synthetic oligonucleotide
guucaggccaacagaagca

SEQ ID NO: 1949011 - RNA, 19 nt, Artificial Sequence
  Description of Artificial Sequence: Synthetic oligonucleotide
cauaucuacuaacggaacu

SEQ ID NO: 1949012 - RNA, 19 nt, Artificial Sequence
  Description of Artificial Sequence: Synthetic oligonucleotide
agagauaccccaagaugcu

SEQ ID NO: 1949013 - RNA, 19 nt, Artificial Sequence
  Description of Artificial Sequence: Synthetic oligonucleotide
ucggggagaccugaguugu

SEQ ID NO: 1949014 - RNA, 19 nt, Artificial Sequence
  Description of Artificial Sequence: Synthetic oligonucleotide
agcaggcaagaugaggaug

SEQ ID NO: 1949015 - RNA, 19 nt, Artificial Sequence
  Description of Artificial Sequence: Synthetic oligonucleotide
cagauaugcauguguggca

SEQ ID NO: 1949016 - RNA, 19 nt, Artificial Sequence
  Description of Artificial Sequence: Synthetic oligonucleotide
gcagaaaucuguucgggaa

SEQ ID NO: 1949017 - RNA, 19 nt, Artificial Sequence
  Description of Artificial Sequence: Synthetic oligonucleotide
ggcaagaugaggaugccca

SEQ ID NO: 1949018 - RNA, 19 nt, Artificial Sequence
  Description of Artificial Sequence: Synthetic oligonucleotide
uggcaguuguagguucagg

SEQ ID NO: 1949019 - RNA, 19 nt, Artificial Sequence
  Description of Artificial Sequence: Synthetic oligonucleotide
ggaugcccaacgcagcugc

SEQ ID NO: 1949020 - RNA, 19 nt, Artificial Sequence
  Description of Artificial Sequence: Synthetic oligonucleotide
ucacuccacucccagccuc

SEQ ID NO: 1949021 - RNA, 19 nt, Artificial Sequence
  Description of Artificial Sequence: Synthetic oligonucleotide
gcaagaguaagcugagaga

SEQ ID NO: 1949022 - RNA, 19 nt, Artificial Sequence
  Description of Artificial Sequence: Synthetic oligonucleotide
gguagaugagcagaaaucu

SEQ ID NO: 1949023 - RNA, 19 nt, Artificial Sequence
  Description of Artificial Sequence: Synthetic oligonucleotide
ggagacggccacuggagcc

SEQ ID NO: 1949024 - RNA, 19 nt, Artificial Sequence
  Description of Artificial Sequence: Synthetic oligonucleotide
ucuuauggagacggccacu

SEQ ID NO: 1949025 - RNA, 19 nt, Artificial Sequence
  Description of Artificial Sequence: Synthetic oligonucleotide
guaggcaucuggccagcug

SEQ ID NO: 1949026 - RNA, 19 nt, Artificial Sequence
  Description of Artificial Sequence: Synthetic oligonucleotide
acguggagcaaagugccca

SEQ ID NO: 1949027 - RNA, 19 nt, Artificial Sequence
  Description of Artificial Sequence: Synthetic oligonucleotide
cugccacuauuacuaaauc

SEQ ID NO: 1949028 - RNA, 19 nt, Artificial Sequence
  Description of Artificial Sequence: Synthetic oligonucleotide
uucugcaaauuagcugcca

SEQ ID NO: 1949029 - RNA, 19 nt, Artificial Sequence
  Description of Artificial Sequence: Synthetic oligonucleotide
augcucaggccccggcagg

SEQ ID NO: 1949030 - RNA, 19 nt, Artificial Sequence
  Description of Artificial Sequence: Synthetic oligonucleotide
aauuggacagugagucuuu

SEQ ID NO: 1949031 - RNA, 19 nt, Artificial Sequence
  Description of Artificial Sequence: Synthetic oligonucleotide
agcacaagacugauaggga

SEQ ID NO: 1949032 - RNA, 19 nt, Artificial Sequence
  Description of Artificial Sequence: Synthetic oligonucleotide
gaauuggacagugagucuu

SEQ ID NO: 1949033 - RNA, 19 nt, Artificial Sequence
  Description of Artificial Sequence: Synthetic oligonucleotide
uacgggagagcaggcaaga

SEQ ID NO: 1949034 - RNA, 19 nt, Artificial Sequence
  Description of Artificial Sequence: Synthetic oligonucleotide
ucacucggggagaccugag

SEQ ID NO: 1949035 - RNA, 19 nt, Artificial Sequence
  Description of Artificial Sequence: Synthetic oligonucleotide
ucaacaccagaugccaguu

SEQ ID NO: 1949036 - RNA, 19 nt, Artificial Sequence
  Description of Artificial Sequence: Synthetic oligonucleotide
ugguacucuccgaaccuuu

SEQ ID NO: 1949037 - RNA, 19 nt, Artificial Sequence
  Description of Artificial Sequence: Synthetic oligonucleotide
guaagcugagagauuucca

SEQ ID NO: 1949038 - RNA, 19 nt, Artificial Sequence
  Description of Artificial Sequence: Synthetic oligonucleotide
uggggucgccugcugaaaa

SEQ ID NO: 1949039 - RNA, 19 nt, Artificial Sequence
  Description of Artificial Sequence: Synthetic oligonucleotide
agcaacagauaugcaugug

SEQ ID NO: 1949040 - RNA, 19 nt, Artificial Sequence
  Description of Artificial Sequence: Synthetic oligonucleotide
caucaaccaggccagcaga

SEQ ID NO: 1949041 - RNA, 19 nt, Artificial Sequence
  Description of Artificial Sequence: Synthetic oligonucleotide
ugggugcucucuguaauau

SEQ ID NO: 1949042 - RNA, 19 nt, Artificial Sequence
  Description of Artificial Sequence: Synthetic oligonucleotide
gucgccugcugaaaagagc

SEQ ID NO: 1949043 - RNA, 19 nt, Artificial Sequence
  Description of Artificial Sequence: Synthetic oligonucleotide
gagccugguacucuccgaa

SEQ ID NO: 1949044 - RNA, 19 nt, Artificial Sequence
  Description of Artificial Sequence: Synthetic oligonucleotide
ucuccguggaguggucugc

SEQ ID NO: 1949045 - RNA, 19 nt, Artificial Sequence
  Description of Artificial Sequence: Synthetic oligonucleotide
caccuccuuaggcugacuc

SEQ ID NO: 1949046 - RNA, 19 nt, Artificial Sequence
  Description of Artificial Sequence: Synthetic oligonucleotide
auaggugucuaaagcucca

SEQ ID NO: 1949047 - RNA, 19 nt, Artificial Sequence
  Description of Artificial Sequence: Synthetic oligonucleotide
ggguguugauggcagaaga

SEQ ID NO: 1949048 - RNA, 19 nt, Artificial Sequence
  Description of Artificial Sequence: Synthetic oligonucleotide
ugcccauggggucgccugc

SEQ ID NO: 1949049 - RNA, 19 nt, Artificial Sequence
  Description of Artificial Sequence: Synthetic oligonucleotide
aucacuccacucccagccu

SEQ ID NO: 1949050 - RNA, 19 nt, Artificial Sequence
  Description of Artificial Sequence: Synthetic oligonucleotide
acugagguucuuccacaau

SEQ ID NO: 1949051 - RNA, 19 nt, Artificial Sequence
  Description of Artificial Sequence: Synthetic oligonucleotide
guacgggagagcaggcaag

SEQ ID NO: 1949052 - RNA, 19 nt, Artificial Sequence
  Description of Artificial Sequence: Synthetic oligonucleotide
uggugggugcucucuguaa

SEQ ID NO: 1949053 - RNA, 19 nt, Artificial Sequence
  Description of Artificial Sequence: Synthetic oligonucleotide
gccugguacucuccgaacc

SEQ ID NO: 1949054 - RNA, 19 nt, Artificial Sequence
  Description of Artificial Sequence: Synthetic oligonucleotide
gcugaugcugagcugggca

SEQ ID NO: 1949055 - RNA, 19 nt, Artificial Sequence
  Description of Artificial Sequence: Synthetic oligonucleotide
aucuguucgggaacgugga

SEQ ID NO: 1949056 - RNA, 19 nt, Artificial Sequence
  Description of Artificial Sequence: Synthetic oligonucleotide
agaccugaguugugaaauu

SEQ ID NO: 1949057 - RNA, 19 nt, Artificial Sequence
  Description of Artificial Sequence: Synthetic oligonucleotide
ggaguaaauucaaaucgaa

SEQ ID NO: 1949058 - RNA, 19 nt, Artificial Sequence
  Description of Artificial Sequence: Synthetic oligonucleotide
uccaagccgggaaguuugu

SEQ ID NO: 1949059 - RNA, 19 nt, Artificial Sequence
  Description of Artificial Sequence: Synthetic oligonucleotide
agucuuucacucggggaga

SEQ ID NO: 1949060 - RNA, 19 nt, Artificial Sequence
  Description of Artificial Sequence: Synthetic oligonucleotide
gagauaccccaagaugcuc

SEQ ID NO: 1949061 - RNA, 19 nt, Artificial Sequence
  Description of Artificial Sequence: Synthetic oligonucleotide
ucuuucacucggggagacc

SEQ ID NO: 1949062 - RNA, 19 nt, Artificial Sequence
  Description of Artificial Sequence: Synthetic oligonucleotide
aguuugccaucaucaggaa

SEQ ID NO: 1949063 - RNA, 19 nt, Artificial Sequence
  Description of Artificial Sequence: Synthetic oligonucleotide
ccaucaaccaggccagcag

SEQ ID NO: 1949064 - RNA, 19 nt, Artificial Sequence
  Description of Artificial Sequence: Synthetic oligonucleotide
ggcuguguaggcaucuggc

SEQ ID NO: 1949065 - RNA, 19 nt, Artificial Sequence
  Description of Artificial Sequence: Synthetic oligonucleotide
uugugaaauugcugcucuu

SEQ ID NO: 1949066 - RNA, 19 nt, Artificial Sequence
  Description of Artificial Sequence: Synthetic oligonucleotide
gaccuuggucuccguggag

SEQ ID NO: 1949067 - RNA, 19 nt, Artificial Sequence
  Description of Artificial Sequence: Synthetic oligonucleotide
ggaauauccgaaccuucaa

SEQ ID NO: 1949068 - RNA, 19 nt, Artificial Sequence
  Description of Artificial Sequence: Synthetic oligonucleotide
auuuccauccugggcccug

SEQ ID NO: 1949069 - RNA, 19 nt, Artificial Sequence
  Description of Artificial Sequence: Synthetic oligonucleotide
ggacaugagcagcauaucu

SEQ ID NO: 1949070 - RNA, 19 nt, Artificial Sequence
  Description of Artificial Sequence: Synthetic oligonucleotide
uggaaagguguggguguug

SEQ ID NO: 1949071 - RNA, 19 nt, Artificial Sequence
  Description of Artificial Sequence: Synthetic oligonucleotide
gugacagaucgauuugacu

SEQ ID NO: 1949072 - RNA, 19 nt, Artificial Sequence
  Description of Artificial Sequence: Synthetic oligonucleotide
cugggcaaauccuauuagu

SEQ ID NO: 1949073 - RNA, 19 nt, Artificial Sequence
  Description of Artificial Sequence: Synthetic oligonucleotide
auggcagaagaagaucaua

SEQ ID NO: 1949074 - RNA, 19 nt, Artificial Sequence
  Description of Artificial Sequence: Synthetic oligonucleotide
gguacgggagagcaggcaa

SEQ ID NO: 1949075 - RNA, 19 nt, Artificial Sequence
  Description of Artificial Sequence: Synthetic oligonucleotide
cagguacgggagagcaggc

SEQ ID NO: 1949076 - RNA, 19 nt, Artificial Sequence
  Description of Artificial Sequence: Synthetic oligonucleotide
cucaggccccggcagguac

SEQ ID NO: 1949077 - RNA, 19 nt, Artificial Sequence
  Description of Artificial Sequence: Synthetic oligonucleotide
gcugaaaagagcucagaau

SEQ ID NO: 1949078 - RNA, 19 nt, Artificial Sequence
  Description of Artificial Sequence: Synthetic oligonucleotide
uaggugucuaaagcuccaa

SEQ ID NO: 1949079 - RNA, 19 nt, Artificial Sequence
  Description of Artificial Sequence: Synthetic oligonucleotide
uccguggaguggucugcug

SEQ ID NO: 1949080 - RNA, 19 nt, Artificial Sequence
  Description of Artificial Sequence: Synthetic oligonucleotide
cugagcugggcaaauccua

SEQ ID NO: 1949081 - RNA, 19 nt, Artificial Sequence
  Description of Artificial Sequence: Synthetic oligonucleotide
gaucgauuugacugagguu

SEQ ID NO: 1949082 - RNA, 19 nt, Artificial Sequence
  Description of Artificial Sequence: Synthetic oligonucleotide
ugcuucucagauggaggaa

SEQ ID NO: 1949083 - RNA, 19 nt, Artificial Sequence
  Description of Artificial Sequence: Synthetic oligonucleotide
cucccaggaguaaauucaa

SEQ ID NO: 1949084 - RNA, 19 nt, Artificial Sequence
  Description of Artificial Sequence: Synthetic oligonucleotide
auggugggugcucucugua

SEQ ID NO: 1949085 - RNA, 19 nt, Artificial Sequence
  Description of Artificial Sequence: Synthetic oligonucleotide
caagaugcucaggccccgg

SEQ ID NO: 1949086 - RNA, 19 nt, Artificial Sequence
  Description of Artificial Sequence: Synthetic oligonucleotide
gcaaagugcccaugggguc

SEQ ID NO: 1949087 - RNA, 19 nt, Artificial Sequence
  Description of Artificial Sequence: Synthetic oligonucleotide
auccaacuucucuuuccuu

SEQ ID NO: 1949088 - RNA, 19 nt, Artificial Sequence
  Description of Artificial Sequence: Synthetic oligonucleotide
uaugcauguguggcaccuc

SEQ ID NO: 1949089 - RNA, 19 nt, Artificial Sequence
  Description of Artificial Sequence: Synthetic oligonucleotide
ggggucgccugcugaaaag

SEQ ID NO: 1949090 - RNA, 19 nt, Artificial Sequence
  Description of Artificial Sequence: Synthetic oligonucleotide
gacugauagggaccuuggu

SEQ ID NO: 1949091 - RNA, 19 nt, Artificial Sequence
  Description of Artificial Sequence: Synthetic oligonucleotide
caucaucacuccacuccca

SEQ ID NO: 1949092 - RNA, 19 nt, Artificial Sequence
  Description of Artificial Sequence: Synthetic oligonucleotide
cauggggucgccugcugaa

SEQ ID NO: 1949093 - RNA, 19 nt, Artificial Sequence
  Description of Artificial Sequence: Synthetic oligonucleotide
gcauaucuacuaacggaac

SEQ ID NO: 1949094 - RNA, 19 nt, Artificial Sequence
  Description of Artificial Sequence: Synthetic oligonucleotide
caggcaagaugaggaugcc

SEQ ID NO: 1949095 - RNA, 19 nt, Artificial Sequence
  Description of Artificial Sequence: Synthetic oligonucleotide
aggaugcccaacgcagcug

SEQ ID NO: 1949096 - RNA, 19 nt, Artificial Sequence
  Description of Artificial Sequence: Synthetic oligonucleotide
cagaagcaacagauaugca

SEQ ID NO: 1949097 - RNA, 19 nt, Artificial Sequence
  Description of Artificial Sequence: Synthetic oligonucleotide
ggucgccugcugaaaagag

SEQ ID NO: 1949098 - RNA, 19 nt, Artificial Sequence
  Description of Artificial Sequence: Synthetic oligonucleotide
ugacucuuccagggcugug

SEQ ID NO: 1949099 - RNA, 19 nt, Artificial Sequence
  Description of Artificial Sequence: Synthetic oligonucleotide
aagugcccauggggucgcc

SEQ ID NO: 1949100 - RNA, 19 nt, Artificial Sequence
  Description of Artificial Sequence: Synthetic oligonucleotide
ggagaccugaguugugaaa

SEQ ID NO: 1949101 - RNA, 19 nt, Artificial Sequence
  Description of Artificial Sequence: Synthetic oligonucleotide
uuccagggcugugguuuag

SEQ ID NO: 1949102 - RNA, 19 nt, Artificial Sequence
  Description of Artificial Sequence: Synthetic oligonucleotide
cauguguggcaccuccuua

SEQ ID NO: 1949103 - RNA, 19 nt, Artificial Sequence
  Description of Artificial Sequence: Synthetic oligonucleotide
cacuauuacuaaaucccuu

SEQ ID NO: 1949104 - RNA, 19 nt, Artificial Sequence
  Description of Artificial Sequence: Synthetic oligonucleotide
gguguugauggcagaagaa

SEQ ID NO: 1949105 - RNA, 19 nt, Artificial Sequence
  Description of Artificial Sequence: Synthetic oligonucleotide
cuuccacaauuuucugcaa

SEQ ID NO: 1949106 - RNA, 19 nt, Artificial Sequence
  Description of Artificial Sequence: Synthetic oligonucleotide
caagccgggaaguuuguuu

SEQ ID NO: 1949107 - RNA, 19 nt, Artificial Sequence
  Description of Artificial Sequence: Synthetic oligonucleotide
ggaugcuggccacuggcaa

SEQ ID NO: 1949108 - RNA, 19 nt, Artificial Sequence
  Description of Artificial Sequence: Synthetic oligonucleotide
cugugguuuagcugaugcu

SEQ ID NO: 1949109 - RNA, 19 nt, Artificial Sequence
  Description of Artificial Sequence: Synthetic oligonucleotide
gaaaucuguucgggaacgu

SEQ ID NO: 1949110 - RNA, 19 nt, Artificial Sequence
  Description of Artificial Sequence: Synthetic oligonucleotide
uuccaucaaccaggccagc

SEQ ID NO: 1949111 - RNA, 19 nt, Artificial Sequence
  Description of Artificial Sequence: Synthetic oligonucleotide
cuaaagcuccaagccggga

SEQ ID NO: 1949112 - RNA, 19 nt, Artificial Sequence
  Description of Artificial Sequence: Synthetic oligonucleotide
guuguagguucaggccaac

SEQ ID NO: 1949113 - RNA, 19 nt, Artificial Sequence
  Description of Artificial Sequence: Synthetic oligonucleotide
cugcugaaaagagcucaga

SEQ ID NO: 1949114 - RNA, 19 nt, Artificial Sequence
  Description of Artificial Sequence: Synthetic oligonucleotide
ggggacaugagcagcauau

SEQ ID NO: 1949115 - RNA, 19 nt, Artificial Sequence
  Description of Artificial Sequence: Synthetic oligonucleotide
uugcuacuucaguguuaaa

SEQ ID NO: 1949116 - RNA, 19 nt, Artificial Sequence
  Description of Artificial Sequence: Synthetic oligonucleotide
gcugccacuauuacuaaau

SEQ ID NO: 1949117 - RNA, 19 nt, Artificial Sequence
  Description of Artificial Sequence: Synthetic oligonucleotide
gaaagguguggguguugau

SEQ ID NO: 1949118 - RNA, 19 nt, Artificial Sequence
  Description of Artificial Sequence: Synthetic oligonucleotide
agacugagccugugcuguu

SEQ ID NO: 1949119 - RNA, 19 nt, Artificial Sequence
  Description of Artificial Sequence: Synthetic oligonucleotide
caccagaugccaguuugaa

SEQ ID NO: 1949120 - RNA, 19 nt, Artificial Sequence
  Description of Artificial Sequence: Synthetic oligonucleotide
uggucuccguggagugguc

SEQ ID NO: 1949121 - RNA, 19 nt, Artificial Sequence
  Description of Artificial Sequence: Synthetic oligonucleotide
cuucaguguuaaagagaua

SEQ ID NO: 1949122 - RNA, 19 nt, Artificial Sequence
  Description of Artificial Sequence: Synthetic oligonucleotide
ggcugacucuuccagggcu

SEQ ID NO: 1949123 - RNA, 19 nt, Artificial Sequence
  Description of Artificial Sequence: Synthetic oligonucleotide
cgaaccuucaacaccagau

SEQ ID NO: 1949124 - RNA, 19 nt, Artificial Sequence
  Description of Artificial Sequence: Synthetic oligonucleotide
ccgggaaguuuguuugcug

SEQ ID NO: 1949125 - RNA, 19 nt, Artificial Sequence
  Description of Artificial Sequence: Synthetic oligonucleotide
gcaagaugaggaugcccaa

SEQ ID NO: 1949126 - RNA, 19 nt, Artificial Sequence
  Description of Artificial Sequence: Synthetic oligonucleotide
ccuuaaccucagcacaaga

SEQ ID NO: 1949127 - RNA, 19 nt, Artificial Sequence
  Description of Artificial Sequence: Synthetic oligonucleotide
agugcccauggggucgccu

SEQ ID NO: 1949128 - RNA, 19 nt, Artificial Sequence
  Description of Artificial Sequence: Synthetic oligonucleotide
ccaacgcagcugcuacugc

SEQ ID NO: 1949129 - RNA, 19 nt, Artificial Sequence
  Description of Artificial Sequence: Synthetic oligonucleotide
gagcucagaauuggacagu

SEQ ID NO: 1949130 - RNA, 19 nt, Artificial Sequence
  Description of Artificial Sequence: Synthetic oligonucleotide
gacggccacuggagccugg

SEQ ID NO: 1949131 - RNA, 19 nt, Artificial Sequence
  Description of Artificial Sequence: Synthetic oligonucleotide
ccaagaugcucaggccccg

SEQ ID NO: 1949132 - RNA, 19 nt, Artificial Sequence
  Description of Artificial Sequence: Synthetic oligonucleotide
gggagaccugaguugugaa

SEQ ID NO: 1949133 - RNA, 19 nt, Artificial Sequence
  Description of Artificial Sequence: Synthetic oligonucleotide
agcuccaagccgggaaguu

SEQ ID NO: 1949134 - RNA, 19 nt, Artificial Sequence
  Description of Artificial Sequence: Synthetic oligonucleotide
ggugggugcucucuguaau

SEQ ID NO: 1949135 - RNA, 19 nt, Artificial Sequence
  Description of Artificial Sequence: Synthetic oligonucleotide
augcccaacgcagcugcua

SEQ ID NO: 1949136 - RNA, 19 nt, Artificial Sequence
  Description of Artificial Sequence: Synthetic oligonucleotide
cuuccagggcugugguuua

SEQ ID NO: 1949137 - RNA, 19 nt, Artificial Sequence
  Description of Artificial Sequence: Synthetic oligonucleotide
agacggccacuggagccug

SEQ ID NO: 1949138 - RNA, 19 nt, Artificial Sequence
  Description of Artificial Sequence: Synthetic oligonucleotide
cccugaggcacaccagcug

SEQ ID NO: 1949139 - RNA, 19 nt, Artificial Sequence
  Description of Artificial Sequence: Synthetic oligonucleotide
gggacaugagcagcauauc

SEQ ID NO: 1949140 - RNA, 19 nt, Artificial Sequence
  Description of Artificial Sequence: Synthetic oligonucleotide
gggucgccugcugaaaaga

SEQ ID NO: 1949141 - RNA, 19 nt, Artificial Sequence
  Description of Artificial Sequence: Synthetic oligonucleotide
auggggucgccugcugaaa

SEQ ID NO: 1949142 - RNA, 19 nt, Artificial Sequence
  Description of Artificial Sequence: Synthetic oligonucleotide
cuccgcugugucucuccca

SEQ ID NO: 1949143 - RNA, 19 nt, Artificial Sequence
  Description of Artificial Sequence: Synthetic oligonucleotide
gcaaauuagcugccacuau

SEQ ID NO: 1949144 - RNA, 19 nt, Artificial Sequence
  Description of Artificial Sequence: Synthetic oligonucleotide
acgggagagcaggcaagau

SEQ ID NO: 1949145 - RNA, 19 nt, Artificial Sequence
  Description of Artificial Sequence: Synthetic oligonucleotide
ccuccgcugugucucuccc

SEQ ID NO: 1949146 - RNA, 19 nt, Artificial Sequence
  Description of Artificial Sequence: Synthetic oligonucleotide
gaguggucugcuggagacu

SEQ ID NO: 1949147 - RNA, 19 nt, Artificial Sequence
  Description of Artificial Sequence: Synthetic oligonucleotide
cccuccgcugugucucucc

SEQ ID NO: 1949148 - RNA, 19 nt, Artificial Sequence
  Description of Artificial Sequence: Synthetic oligonucleotide
cccggcagguacgggagag

SEQ ID NO: 1949149 - RNA, 19 nt, Artificial Sequence
  Description of Artificial Sequence: Synthetic oligonucleotide
gucucucccaggaguaaau

SEQ ID NO: 1949150 - RNA, 19 nt, Artificial Sequence
  Description of Artificial Sequence: Synthetic oligonucleotide
cugcccgcucggccacugc

SEQ ID NO: 1949151 - RNA, 19 nt, Artificial Sequence
  Description of Artificial Sequence: Synthetic oligonucleotide
gcugagcugggcaaauccu

SEQ ID NO: 1949152 - RNA, 19 nt, Artificial Sequence
  Description of Artificial Sequence: Synthetic oligonucleotide
cacucggggagaccugagu

SEQ ID NO: 1949153 - RNA, 19 nt, Artificial Sequence
  Description of Artificial Sequence: Synthetic oligonucleotide
cguggaguggucugcugga

SEQ ID NO: 1949154 - RNA, 19 nt, Artificial Sequence
  Description of Artificial Sequence: Synthetic oligonucleotide
ccugguacucuccgaaccu

SEQ ID NO: 1949155 - RNA, 19 nt, Artificial Sequence
  Description of Artificial Sequence: Synthetic oligonucleotide
cgcucggccacugcuguag

SEQ ID NO: 1949156 - RNA, 19 nt, Artificial Sequence
  Description of Artificial Sequence: Synthetic oligonucleotide
ccgcugugucucucccagg

SEQ ID NO: 1949157 - RNA, 19 nt, Artificial Sequence
  Description of Artificial Sequence: Synthetic oligonucleotide
gggcccugaggcacaccag

SEQ ID NO: 1949158 - RNA, 19 nt, Artificial Sequence
  Description of Artificial Sequence: Synthetic oligonucleotide
guucgggaacguggagcaa

SEQ ID NO: 1949159 - RNA, 19 nt, Artificial Sequence
  Description of Artificial Sequence: Synthetic oligonucleotide
cagcugcuacugcccgcuc

SEQ ID NO: 1949160 - RNA, 19 nt, Artificial Sequence
  Description of Artificial Sequence: Synthetic oligonucleotide
guggaaagguguggguguu

SEQ ID NO: 1949161 - RNA, 19 nt, Artificial Sequence
  Description of Artificial Sequence: Synthetic oligonucleotide
cugguacucuccgaaccuu

SEQ ID NO: 1949162 - RNA, 19 nt, Artificial Sequence
  Description of Artificial Sequence: Synthetic oligonucleotide
gcccgcucggccacugcug

SEQ ID NO: 1949163 - RNA, 19 nt, Artificial Sequence
  Description of Artificial Sequence: Synthetic oligonucleotide
gccgggaaguuuguuugcu

SEQ ID NO: 1949164 - RNA, 19 nt, Artificial Sequence
  Description of Artificial Sequence: Synthetic oligonucleotide
cccauggggucgccugcug

SEQ ID NO: 1949165 - RNA, 19 nt, Artificial Sequence
  Description of Artificial Sequence: Synthetic oligonucleotide
ccggcagguacgggagagc

SEQ ID NO: 1949166 - RNA, 19 nt, Artificial Sequence
  Description of Artificial Sequence: Synthetic oligonucleotide
gggugcucucuguaauauu

SEQ ID NO: 1949167 - RNA, 19 nt, Artificial Sequence
  Description of Artificial Sequence: Synthetic oligonucleotide
ggucuccguggaguggucu

SEQ ID NO: 1949168 - RNA, 19 nt, Artificial Sequence
  Description of Artificial Sequence: Synthetic oligonucleotide
cgaauaucauuuaguucuu

SEQ ID NO: 1949169 - RNA, 19 nt, Artificial Sequence
  Description of Artificial Sequence: Synthetic oligonucleotide
ccacaauuuucugcaaauu

SEQ ID NO: 1949170 - RNA, 19 nt, Artificial Sequence
  Description of Artificial Sequence: Synthetic oligonucleotide
cggggagaccugaguugug

SEQ ID NO: 1949171 - RNA, 19 nt, Artificial Sequence
  Description of Artificial Sequence: Synthetic oligonucleotide
ccuccauccucugucuuau

SEQ ID NO: 1949172 - RNA, 19 nt, Artificial Sequence
  Description of Artificial Sequence: Synthetic oligonucleotide
gcccaacgcagcugcuacu

SEQ ID NO: 1949173 - RNA, 19 nt, Artificial Sequence
  Description of Artificial Sequence: Synthetic oligonucleotide
caagacugauagggaccuu

SEQ ID NO: 1949174 - RNA, 19 nt, Artificial Sequence
  Description of Artificial Sequence: Synthetic oligonucleotide
cguggagcaaagugcccau

SEQ ID NO: 1949175 - RNA, 19 nt, Artificial Sequence
  Description of Artificial Sequence: Synthetic oligonucleotide
cccgcucggccacugcugu

SEQ ID NO: 1949176 - RNA, 19 nt, Artificial Sequence
  Description of Artificial Sequence: Synthetic oligonucleotide
gcccauggggucgccugcu

SEQ ID NO: 1949177 - RNA, 19 nt, Artificial Sequence
  Description of Artificial Sequence: Synthetic oligonucleotide
gcucaggccccggcaggua

SEQ ID NO: 1949178 - RNA, 19 nt, Artificial Sequence
  Description of Artificial Sequence: Synthetic oligonucleotide
gcaccuccuuaggcugacu

SEQ ID NO: 1949179 - RNA, 19 nt, Artificial Sequence
  Description of Artificial Sequence: Synthetic oligonucleotide
ccaagccgggaaguuuguu

SEQ ID NO: 1949180 - RNA, 19 nt, Artificial Sequence
  Description of Artificial Sequence: Synthetic oligonucleotide
ccgcucggccacugcugua

SEQ ID NO: 1949181 - RNA, 19 nt, Artificial Sequence
  Description of Artificial Sequence: Synthetic oligonucleotide
cgggaacguggagcaaagu

SEQ ID NO: 1949182 - RNA, 19 nt, Artificial Sequence
  Description of Artificial Sequence: Synthetic oligonucleotide
aguuagacuaucuuuaacc

SEQ ID NO: 1949183 - RNA, 19 nt, Artificial Sequence
  Description of Artificial Sequence: Synthetic oligonucleotide
uuauuauagacuuuaaaag

SEQ ID NO: 1949184 - RNA, 19 nt, Artificial Sequence
  Description of Artificial Sequence: Synthetic oligonucleotide
aaaauagacagucucugcg

SEQ ID NO: 1949185 - RNA, 19 nt, Artificial Sequence
  Description of Artificial Sequence: Synthetic oligonucleotide
aaaagugaagacuguaaac

SEQ ID NO: 1949186 - RNA, 19 nt, Artificial Sequence
  Description of Artificial Sequence: Synthetic oligonucleotide
aaaaguagaaaaggcaggc

SEQ ID NO: 1949187 - RNA, 19 nt, Artificial Sequence
  Description of Artificial Sequence: Synthetic oligonucleotide
guaaacaccaacuccaugg

SEQ ID NO: 1949188 - RNA, 19 nt, Artificial Sequence
  Description of Artificial Sequence: Synthetic oligonucleotide
aauagacagucucugcggc

SEQ ID NO: 1949189 - RNA, 19 nt, Artificial Sequence
  Description of Artificial Sequence: Synthetic oligonucleotide
uagacuaucuuuaaccugc

SEQ ID NO: 1949190 - RNA, 19 nt, Artificial Sequence
  Description of Artificial Sequence: Synthetic oligonucleotide
aaugcggagggcuuugggc

SEQ ID NO: 1949191 - RNA, 19 nt, Artificial Sequence
  Description of Artificial Sequence: Synthetic oligonucleotide
aauuguuuuggcaaaagug

SEQ ID NO: 1949192 - RNA, 19 nt, Artificial Sequence
  Description of Artificial Sequence: Synthetic oligonucleotide
aaagugaagacuguaaaca

SEQ ID NO: 1949193 - RNA, 19 nt, Artificial Sequence
  Description of Artificial Sequence: Synthetic oligonucleotide
cuuagugcacaaaagacag

SEQ ID NO: 1949194 - RNA, 19 nt, Artificial Sequence
  Description of Artificial Sequence: Synthetic oligonucleotide
uagacuuuaaaagucggcg

SEQ ID NO: 1949195 - RNA, 19 nt, Artificial Sequence
  Description of Artificial Sequence: Synthetic oligonucleotide
uauagacuuuaaaagucgg

SEQ ID NO: 1949196 - RNA, 19 nt, Artificial Sequence
  Description of Artificial Sequence: Synthetic oligonucleotide
acuaucuuuaaccugccag

SEQ ID NO: 1949197 - RNA, 19 nt, Artificial Sequence
  Description of Artificial Sequence: Synthetic oligonucleotide
auuauagacuuuaaaaguc

SEQ ID NO: 1949198 - RNA, 19 nt, Artificial Sequence
  Description of Artificial Sequence: Synthetic oligonucleotide
gagaccaccaauaaguuag

SEQ ID NO: 1949199 - RNA, 19 nt, Artificial Sequence
  Description of Artificial Sequence: Synthetic oligonucleotide
uuguauucggcauugaagu

SEQ ID NO: 1949200 - RNA, 19 nt, Artificial Sequence
  Description of Artificial Sequence: Synthetic oligonucleotide
guucuuguagcucugacgc

SEQ ID NO: 1949201 - RNA, 19 nt, Artificial Sequence
  Description of Artificial Sequence: Synthetic oligonucleotide
aaguuagacuaucuuuaac

SEQ ID NO: 1949202 - RNA, 19 nt, Artificial Sequence
  Description of Artificial Sequence: Synthetic oligonucleotide
agggacaucagacuguggg

SEQ ID NO: 1949203 - RNA, 19 nt, Artificial Sequence
  Description of Artificial Sequence: Synthetic oligonucleotide
ucuuuaaccugccagcaca

SEQ ID NO: 1949204 - RNA, 19 nt, Artificial Sequence
  Description of Artificial Sequence: Synthetic oligonucleotide
uugaggucaaugcggaggg

SEQ ID NO: 1949205 - RNA, 19 nt, Artificial Sequence
  Description of Artificial Sequence: Synthetic oligonucleotide
agacuuuaaaagucggcgg

SEQ ID NO: 1949206 - RNA, 19 nt, Artificial Sequence
  Description of Artificial Sequence: Synthetic oligonucleotide
ugaagaaucugcccacggg

SEQ ID NO: 1949207 - RNA, 19 nt, Artificial Sequence
  Description of Artificial Sequence: Synthetic oligonucleotide
cacagaguagaaaagguac

SEQ ID NO: 1949208 - RNA, 19 nt, Artificial Sequence
  Description of Artificial Sequence: Synthetic oligonucleotide
cuaucuuuaaccugccagc

SEQ ID NO: 1949209 - RNA, 19 nt, Artificial Sequence
  Description of Artificial Sequence: Synthetic oligonucleotide
uuuccgguauuccugaaga

SEQ ID NO: 1949210 - RNA, 19 nt, Artificial Sequence
  Description of Artificial Sequence: Synthetic oligonucleotide
ucugacgcugcucugacga

SEQ ID NO: 1949211 - RNA, 19 nt, Artificial Sequence
  Description of Artificial Sequence: Synthetic oligonucleotide
ugcuuagugcacaaaagac

SEQ ID NO: 1949212 - RNA, 19 nt, Artificial Sequence
  Description of Artificial Sequence: Synthetic oligonucleotide
aagaccauauguuguugag

SEQ ID NO: 1949213 - RNA, 19 nt, Artificial Sequence
  Description of Artificial Sequence: Synthetic oligonucleotide
uagacuacccacuguacag

SEQ ID NO: 1949214 - RNA, 19 nt, Artificial Sequence
  Description of Artificial Sequence: Synthetic oligonucleotide
uuaaccugccagcacagca

SEQ ID NO: 1949215 - RNA, 19 nt, Artificial Sequence
  Description of Artificial Sequence: Synthetic oligonucleotide
uuccugaagaaucugccca

SEQ ID NO: 1949216 - RNA, 19 nt, Artificial Sequence
  Description of Artificial Sequence: Synthetic oligonucleotide
ugucucauacuccucggag

SEQ ID NO: 1949217 - RNA, 19 nt, Artificial Sequence
  Description of Artificial Sequence: Synthetic oligonucleotide
uuagacuaucuuuaaccug

SEQ ID NO: 1949218 - RNA, 19 nt, Artificial Sequence
  Description of Artificial Sequence: Synthetic oligonucleotide
gacagguucccagaaaggg

SEQ ID NO: 1949219 - RNA, 19 nt, Artificial Sequence
  Description of Artificial Sequence: Synthetic oligonucleotide
gagccucuaacccuggagg

SEQ ID NO: 1949220 - RNA, 19 nt, Artificial Sequence
  Description of Artificial Sequence: Synthetic oligonucleotide
gccaguacggaucugaagg

SEQ ID NO: 1949221 - RNA, 19 nt, Artificial Sequence
  Description of Artificial Sequence: Synthetic oligonucleotide
aaaguccgucagcaggggc

SEQ ID NO: 1949222 - RNA, 19 nt, Artificial Sequence
  Description of Artificial Sequence: Synthetic oligonucleotide
auuguauucggcauugaag

SEQ ID NO: 1949223 - RNA, 19 nt, Artificial Sequence
  Description of Artificial Sequence: Synthetic oligonucleotide
guauucggcauugaagucg

SEQ ID NO: 1949224 - RNA, 19 nt, Artificial Sequence
  Description of Artificial Sequence: Synthetic oligonucleotide
aaguagacuacccacugua

SEQ ID NO: 1949225 - RNA, 19 nt, Artificial Sequence
  Description of Artificial Sequence: Synthetic oligonucleotide
auagacuuuaaaagucggc

SEQ ID NO: 1949226 - RNA, 19 nt, Artificial Sequence
  Description of Artificial Sequence: Synthetic oligonucleotide
ucggcuauggaugugugag

SEQ ID NO: 1949227 - RNA, 19 nt, Artificial Sequence
  Description of Artificial Sequence: Synthetic oligonucleotide
ugcugaagaccauauguug

SEQ ID NO: 1949228 - RNA, 19 nt, Artificial Sequence
  Description of Artificial Sequence: Synthetic oligonucleotide
auacucugcgaugaggcgc

SEQ ID NO: 1949229 - RNA, 19 nt, Artificial Sequence
  Description of Artificial Sequence: Synthetic oligonucleotide
auacucauuguauucggca

SEQ ID NO: 1949230 - RNA, 19 nt, Artificial Sequence
  Description of Artificial Sequence: Synthetic oligonucleotide
cucagacuggguaaagucc

SEQ ID NO: 1949231 - RNA, 19 nt, Artificial Sequence
  Description of Artificial Sequence: Synthetic oligonucleotide
aaaggcagagaccaccaau

SEQ ID NO: 1949232 - RNA, 19 nt, Artificial Sequence
  Description of Artificial Sequence: Synthetic oligonucleotide
uagugcacaaaagacaggu

SEQ ID NO: 1949233 - RNA, 19 nt, Artificial Sequence
  Description of Artificial Sequence: Synthetic oligonucleotide
uuagugcacaaaagacagg

SEQ ID NO: 1949234 - RNA, 19 nt, Artificial Sequence
  Description of Artificial Sequence: Synthetic oligonucleotide
cuugggucggcuauggaug

SEQ ID NO: 1949235 - RNA, 19 nt, Artificial Sequence
  Description of Artificial Sequence: Synthetic oligonucleotide
uguacaguccaaaggcaga

SEQ ID NO: 1949236 - RNA, 19 nt, Artificial Sequence
  Description of Artificial Sequence: Synthetic oligonucleotide
aaaguagacuacccacugu

SEQ ID NO: 1949237 - RNA, 19 nt, Artificial Sequence
  Description of Artificial Sequence: Synthetic oligonucleotide
aaaagucggcgguucaccu

SEQ ID NO: 1949238 - RNA, 19 nt, Artificial Sequence
  Description of Artificial Sequence: Synthetic oligonucleotide
gaguucauagaaaaguaga

SEQ ID NO: 1949239 - RNA, 19 nt, Artificial Sequence
  Description of Artificial Sequence: Synthetic oligonucleotide
uguaaacaccaacuccaug

SEQ ID NO: 1949240 - RNA, 19 nt, Artificial Sequence
  Description of Artificial Sequence: Synthetic oligonucleotide
accaccaauaaguuagacu

SEQ ID NO: 1949241 - RNA, 19 nt, Artificial Sequence
  Description of Artificial Sequence: Synthetic oligonucleotide
gaccuagugcaucugggag

SEQ ID NO: 1949242 - RNA, 19 nt, Artificial Sequence
  Description of Artificial Sequence: Synthetic oligonucleotide
ucuuguagcucugacgcug

SEQ ID NO: 1949243 - RNA, 19 nt, Artificial Sequence
  Description of Artificial Sequence: Synthetic oligonucleotide
uuguugaggucaaugcgga

SEQ ID NO: 1949244 - RNA, 19 nt, Artificial Sequence
  Description of Artificial Sequence: Synthetic oligonucleotide
gguugucucauacuccucg

SEQ ID NO: 1949245 - RNA, 19 nt, Artificial Sequence
  Description of Artificial Sequence: Synthetic oligonucleotide
gugcacaaaagacagguuc

SEQ ID NO: 1949246 - RNA, 19 nt, Artificial Sequence
  Description of Artificial Sequence: Synthetic oligonucleotide
aucuuuaaccugccagcac

SEQ ID NO: 1949247 - RNA, 19 nt, Artificial Sequence
  Description of Artificial Sequence: Synthetic oligonucleotide
uauucggcauugaagucgu

SEQ ID NO: 1949248 - RNA, 19 nt, Artificial Sequence
  Description of Artificial Sequence: Synthetic oligonucleotide
ucggcauugaagucguucu

SEQ ID NO: 1949249 - RNA, 19 nt, Artificial Sequence
  Description of Artificial Sequence: Synthetic oligonucleotide
uaaguuagacuaucuuuaa

SEQ ID NO: 1949250 - RNA, 19 nt, Artificial Sequence
  Description of Artificial Sequence: Synthetic oligonucleotide
ugaggagccagcaggucgc

SEQ ID NO: 1949251 - RNA, 19 nt, Artificial Sequence
  Description of Artificial Sequence: Synthetic oligonucleotide
aagcugugugaaccugcgc

SEQ ID NO: 1949252 - RNA, 19 nt, Artificial Sequence
  Description of Artificial Sequence: Synthetic oligonucleotide
uccgauacucauuguauuc

SEQ ID NO: 1949253 - RNA, 19 nt, Artificial Sequence
  Description of Artificial Sequence: Synthetic oligonucleotide
uggguaaaguccgucagca

SEQ ID NO: 1949254 - RNA, 19 nt, Artificial Sequence
  Description of Artificial Sequence: Synthetic oligonucleotide
uaaaagucggcgguucacc

SEQ ID NO: 1949255 - RNA, 19 nt, Artificial Sequence
  Description of Artificial Sequence: Synthetic oligonucleotide
ugcgaugaggcgcuugaug

SEQ ID NO: 1949256 - RNA, 19 nt, Artificial Sequence
  Description of Artificial Sequence: Synthetic oligonucleotide
cucgaugcgcgcaugcagg

SEQ ID NO: 1949257 - RNA, 19 nt, Artificial Sequence
  Description of Artificial Sequence: Synthetic oligonucleotide
gauuuuccgguauuccuga

SEQ ID NO: 1949258 - RNA, 19 nt, Artificial Sequence
  Description of Artificial Sequence: Synthetic oligonucleotide
ucugcgaugaggcgcuuga

SEQ ID NO: 1949259 - RNA, 19 nt, Artificial Sequence
  Description of Artificial Sequence: Synthetic oligonucleotide
cauggcucaaaguagacua

SEQ ID NO: 1949260 - RNA, 19 nt, Artificial Sequence
  Description of Artificial Sequence: Synthetic oligonucleotide
uaaccugccagcacagcac

SEQ ID NO: 1949261 - RNA, 19 nt, Artificial Sequence
  Description of Artificial Sequence: Synthetic oligonucleotide
caagcugugugaaccugcg

SEQ ID NO: 1949262 - RNA, 19 nt, Artificial Sequence
  Description of Artificial Sequence: Synthetic oligonucleotide
uuccaucaaauuuauuaua

SEQ ID NO: 1949263 - RNA, 19 nt, Artificial Sequence
  Description of Artificial Sequence: Synthetic oligonucleotide
auucagaccuagugcaucu

SEQ ID NO: 1949264 - RNA, 19 nt, Artificial Sequence
  Description of Artificial Sequence: Synthetic oligonucleotide
agaccauauguuguugagg

SEQ ID NO: 1949265 - RNA, 19 nt, Artificial Sequence
  Description of Artificial Sequence: Synthetic oligonucleotide
aaguaguccgggcucucug

SEQ ID NO: 1949266 - RNA, 19 nt, Artificial Sequence
  Description of Artificial Sequence: Synthetic oligonucleotide
uacucauuguauucggcau

SEQ ID NO: 1949267 - RNA, 19 nt, Artificial Sequence
  Description of Artificial Sequence: Synthetic oligonucleotide
guugucucauacuccucgg

SEQ ID NO: 1949268 - RNA, 19 nt, Artificial Sequence
  Description of Artificial Sequence: Synthetic oligonucleotide
gauacucauuguauucggc

SEQ ID NO: 1949269 - RNA, 19 nt, Artificial Sequence
  Description of Artificial Sequence: Synthetic oligonucleotide
gucucauacuccucggagc

SEQ ID NO: 1949270 - RNA, 19 nt, Artificial Sequence
  Description of Artificial Sequence: Synthetic oligonucleotide
aguucauagaaaaguagaa

SEQ ID NO: 1949271 - RNA, 19 nt, Artificial Sequence
  Description of Artificial Sequence: Synthetic oligonucleotide
agaaucugcccacggguug

SEQ ID NO: 1949272 - RNA, 19 nt, Artificial Sequence
  Description of Artificial Sequence: Synthetic oligonucleotide
caggcuccgauacucauug

SEQ ID NO: 1949273 - RNA, 19 nt, Artificial Sequence
  Description of Artificial Sequence: Synthetic oligonucleotide
aaagggccgaguucauaga

SEQ ID NO: 1949274 - RNA, 19 nt, Artificial Sequence
  Description of Artificial Sequence: Synthetic oligonucleotide
guagacuacccacuguaca

SEQ ID NO: 1949275 - RNA, 19 nt, Artificial Sequence
  Description of Artificial Sequence: Synthetic oligonucleotide
uuaaaagucggcgguucac

SEQ ID NO: 1949276 - RNA, 19 nt, Artificial Sequence
  Description of Artificial Sequence: Synthetic oligonucleotide
aguccgggcucucugaagu

SEQ ID NO: 1949277 - RNA, 19 nt, Artificial Sequence
  Description of Artificial Sequence: Synthetic oligonucleotide
gugugacaugaacagcagg

SEQ ID NO: 1949278 - RNA, 19 nt, Artificial Sequence
  Description of Artificial Sequence: Synthetic oligonucleotide
cacggguugucucauacuc

SEQ ID NO: 1949279 - RNA, 19 nt, Artificial Sequence
  Description of Artificial Sequence: Synthetic oligonucleotide
uguauucggcauugaaguc

SEQ ID NO: 1949280 - RNA, 19 nt, Artificial Sequence
  Description of Artificial Sequence: Synthetic oligonucleotide
uacucugcgaugaggcgcu

SEQ ID NO: 1949281 - RNA, 19 nt, Artificial Sequence
  Description of Artificial Sequence: Synthetic oligonucleotide
aagggccgaguucauagaa

SEQ ID NO: 1949282 - RNA, 19 nt, Artificial Sequence
  Description of Artificial Sequence: Synthetic oligonucleotide
aguagacuacccacuguac

SEQ ID NO: 1949283 - RNA, 19 nt, Artificial Sequence
  Description of Artificial Sequence: Synthetic oligonucleotide
ugaagaccauauguuguug

SEQ ID NO: 1949284 - RNA, 19 nt, Artificial Sequence
  Description of Artificial Sequence: Synthetic oligonucleotide
gacuuuaaaagucggcggu

SEQ ID NO: 1949285 - RNA, 19 nt, Artificial Sequence
  Description of Artificial Sequence: Synthetic oligonucleotide
ccaccaauaaguuagacua

SEQ ID NO: 1949286 - RNA, 19 nt, Artificial Sequence
  Description of Artificial Sequence: Synthetic oligonucleotide
accauauguuguugagguc

SEQ ID NO: 1949287 - RNA, 19 nt, Artificial Sequence
  Description of Artificial Sequence: Synthetic oligonucleotide
accugcuuagugcacaaaa

SEQ ID NO: 1949288 - RNA, 19 nt, Artificial Sequence
  Description of Artificial Sequence: Synthetic oligonucleotide
uucuucuugggucggcuau

SEQ ID NO: 1949289 - RNA, 19 nt, Artificial Sequence
  Description of Artificial Sequence: Synthetic oligonucleotide
cucauuguauucggcauug

SEQ ID NO: 1949290 - RNA, 19 nt, Artificial Sequence
  Description of Artificial Sequence: Synthetic oligonucleotide
gagauggcgggguauuuca

SEQ ID NO: 1949291 - RNA, 19 nt, Artificial Sequence
  Description of Artificial Sequence: Synthetic oligonucleotide
gacgcagcugcugaagacc

SEQ ID NO: 1949292 - RNA, 19 nt, Artificial Sequence
  Description of Artificial Sequence: Synthetic oligonucleotide
auggcgggguauuucagca

SEQ ID NO: 1949293 - RNA, 19 nt, Artificial Sequence
  Description of Artificial Sequence: Synthetic oligonucleotide
cugcuuagugcacaaaaga

SEQ ID NO: 1949294 - RNA, 19 nt, Artificial Sequence
  Description of Artificial Sequence: Synthetic oligonucleotide
aguagaaaaggcaggcaga

SEQ ID NO: 1949295 - RNA, 19 nt, Artificial Sequence
  Description of Artificial Sequence: Synthetic oligonucleotide
aguacggaucugaaggcag

SEQ ID NO: 1949296 - RNA, 19 nt, Artificial Sequence
  Description of Artificial Sequence: Synthetic oligonucleotide
aaguccgucagcaggggca

SEQ ID NO: 1949297 - RNA, 19 nt, Artificial Sequence
  Description of Artificial Sequence: Synthetic oligonucleotide
guacaguccaaaggcagag

SEQ ID NO: 1949298 - RNA, 19 nt, Artificial Sequence
  Description of Artificial Sequence: Synthetic oligonucleotide
ugugugaaccugcgcguga

SEQ ID NO: 1949299 - RNA, 19 nt, Artificial Sequence
  Description of Artificial Sequence: Synthetic oligonucleotide
ugcagguacucgcagcguc

SEQ ID NO: 1949300 - RNA, 19 nt, Artificial Sequence
  Description of Artificial Sequence: Synthetic oligonucleotide
aaggcagagaccaccaaua

SEQ ID NO: 1949301 - RNA, 19 nt, Artificial Sequence
  Description of Artificial Sequence: Synthetic oligonucleotide
uggcucaaaguagacuacc

SEQ ID NO: 1949302 - RNA, 19 nt, Artificial Sequence
  Description of Artificial Sequence: Synthetic oligonucleotide
uaaaguccgucagcagggg

SEQ ID NO: 1949303 - RNA, 19 nt, Artificial Sequence
  Description of Artificial Sequence: Synthetic oligonucleotide
gacuggguaaaguccguca

SEQ ID NO: 1949304 - RNA, 19 nt, Artificial Sequence
  Description of Artificial Sequence: Synthetic oligonucleotide
ucuucucucggcuguaguu

SEQ ID NO: 1949305 - RNA, 19 nt, Artificial Sequence
  Description of Artificial Sequence: Synthetic oligonucleotide
gcaucaagcugugugaacc

SEQ ID NO: 1949306 - RNA, 19 nt, Artificial Sequence
  Description of Artificial Sequence: Synthetic oligonucleotide
ugccaguacggaucugaag

SEQ ID NO: 1949307 - RNA, 19 nt, Artificial Sequence
  Description of Artificial Sequence: Synthetic oligonucleotide
acuacccacuguacagucc

SEQ ID NO: 1949308 - RNA, 19 nt, Artificial Sequence
  Description of Artificial Sequence: Synthetic oligonucleotide
cuaacccuggagguguggg

SEQ ID NO: 1949309 - RNA, 19 nt, Artificial Sequence
  Description of Artificial Sequence: Synthetic oligonucleotide
gaugcgcgcaugcaggcuc

SEQ ID NO: 1949310 - RNA, 19 nt, Artificial Sequence
  Description of Artificial Sequence: Synthetic oligonucleotide
uguugaggucaaugcggag

SEQ ID NO: 1949311 - RNA, 19 nt, Artificial Sequence
  Description of Artificial Sequence: Synthetic oligonucleotide
gaaagggucccggggaggc

SEQ ID NO: 1949312 - RNA, 19 nt, Artificial Sequence
  Description of Artificial Sequence: Synthetic oligonucleotide
gggacaucagacugugggg

SEQ ID NO: 1949313 - RNA, 19 nt, Artificial Sequence
  Description of Artificial Sequence: Synthetic oligonucleotide
gugaucugcucgaugcgcg

SEQ ID NO: 1949314 - RNA, 19 nt, Artificial Sequence
  Description of Artificial Sequence: Synthetic oligonucleotide
ugccucuccugucaauugu

SEQ ID NO: 1949315 - RNA, 19 nt, Artificial Sequence
  Description of Artificial Sequence: Synthetic oligonucleotide
ucguucuuguagcucugac

SEQ ID NO: 1949316 - RNA, 19 nt, Artificial Sequence
  Description of Artificial Sequence: Synthetic oligonucleotide
auagacagucucugcggca

SEQ ID NO: 1949317 - RNA, 19 nt, Artificial Sequence
  Description of Artificial Sequence: Synthetic oligonucleotide
uccgguauuccugaagaau

SEQ ID NO: 1949318 - RNA, 19 nt, Artificial Sequence
  Description of Artificial Sequence: Synthetic oligonucleotide
uucggcauugaagucguuc

SEQ ID NO: 1949319 - RNA, 19 nt, Artificial Sequence
  Description of Artificial Sequence: Synthetic oligonucleotide
ugaaccugcgcgugaucug

SEQ ID NO: 1949320 - RNA, 19 nt, Artificial Sequence
  Description of Artificial Sequence: Synthetic oligonucleotide
uguaguugguguuggucuu

SEQ ID NO: 1949321 - RNA, 19 nt, Artificial Sequence
  Description of Artificial Sequence: Synthetic oligonucleotide
gguauuucagcaaguaguc

SEQ ID NO: 1949322 - RNA, 19 nt, Artificial Sequence
  Description of Artificial Sequence: Synthetic oligonucleotide
uggaugugugaggagccag

SEQ ID NO: 1949323 - RNA, 19 nt, Artificial Sequence
  Description of Artificial Sequence: Synthetic oligonucleotide
caugcaggcuccgauacuc

SEQ ID NO: 1949324 - RNA, 19 nt, Artificial Sequence
  Description of Artificial Sequence: Synthetic oligonucleotide
ugaugugcgccagcuugcg

SEQ ID NO: 1949325 - RNA, 19 nt, Artificial Sequence
  Description of Artificial Sequence: Synthetic oligonucleotide
ugaccuugccaguacggau

SEQ ID NO: 1949326 - RNA, 19 nt, Artificial Sequence
  Description of Artificial Sequence: Synthetic oligonucleotide
cagcuugcggugcagguac

SEQ ID NO: 1949327 - RNA, 19 nt, Artificial Sequence
  Description of Artificial Sequence: Synthetic oligonucleotide
cuacccacuguacagucca

SEQ ID NO: 1949328 - RNA, 19 nt, Artificial Sequence
  Description of Artificial Sequence: Synthetic oligonucleotide
uaacccuggaggugugggc

SEQ ID NO: 1949329 - RNA, 19 nt, Artificial Sequence
  Description of Artificial Sequence: Synthetic oligonucleotide
gacuacccacuguacaguc

SEQ ID NO: 1949330 - RNA, 19 nt, Artificial Sequence
  Description of Artificial Sequence: Synthetic oligonucleotide
aguaguccgggcucucuga

SEQ ID NO: 1949331 - RNA, 19 nt, Artificial Sequence
  Description of Artificial Sequence: Synthetic oligonucleotide
agagaccaccaauaaguua

SEQ ID NO: 1949332 - RNA, 19 nt, Artificial Sequence
  Description of Artificial Sequence: Synthetic oligonucleotide
auggcucaaaguagacuac

SEQ ID NO: 1949333 - RNA, 19 nt, Artificial Sequence
  Description of Artificial Sequence: Synthetic oligonucleotide
agcaggaccuggcacucug

SEQ ID NO: 1949334 - RNA, 19 nt, Artificial Sequence
  Description of Artificial Sequence: Synthetic oligonucleotide
ugacgaugagauggcgggg

SEQ ID NO: 1949335 - RNA, 19 nt, Artificial Sequence
  Description of Artificial Sequence: Synthetic oligonucleotide
agccucuaacccuggaggu

SEQ ID NO: 1949336 - RNA, 19 nt, Artificial Sequence
  Description of Artificial Sequence: Synthetic oligonucleotide
augugugaggagccagcag

SEQ ID NO: 1949337 - RNA, 19 nt, Artificial Sequence
  Description of Artificial Sequence: Synthetic oligonucleotide
uggcaaaagugaagacugu

SEQ ID NO: 1949338 - RNA, 19 nt, Artificial Sequence
  Description of Artificial Sequence: Synthetic oligonucleotide
uccugucaauuguuuuggc

SEQ ID NO: 1949339 - RNA, 19 nt, Artificial Sequence
  Description of Artificial Sequence: Synthetic oligonucleotide
agcugcagugaccuugcca

SEQ ID NO: 1949340 - RNA, 19 nt, Artificial Sequence
  Description of Artificial Sequence: Synthetic oligonucleotide
ucuaacccuggaggugugg

SEQ ID NO: 1949341 - RNA, 19 nt, Artificial Sequence
  Description of Artificial Sequence: Synthetic oligonucleotide
acuccucggagccuuggcu

SEQ ID NO: 1949342 - RNA, 19 nt, Artificial Sequence
  Description of Artificial Sequence: Synthetic oligonucleotide
agaguagaaaagguacaaa

SEQ ID NO: 1949343 - RNA, 19 nt, Artificial Sequence
  Description of Artificial Sequence: Synthetic oligonucleotide
ucucggcuguaguuggugu

SEQ ID NO: 1949344 - RNA, 19 nt, Artificial Sequence
  Description of Artificial Sequence: Synthetic oligonucleotide
caaugcggagggcuuuggg

SEQ ID NO: 1949345 - RNA, 19 nt, Artificial Sequence
  Description of Artificial Sequence: Synthetic oligonucleotide
gaccuugccaguacggauc

SEQ ID NO: 1949346 - RNA, 19 nt, Artificial Sequence
  Description of Artificial Sequence: Synthetic oligonucleotide
ggaccuggcacucugcuga

SEQ ID NO: 1949347 - RNA, 19 nt, Artificial Sequence
  Description of Artificial Sequence: Synthetic oligonucleotide
gcugcugaagaccauaugu

SEQ ID NO: 1949348 - RNA, 19 nt, Artificial Sequence
  Description of Artificial Sequence: Synthetic oligonucleotide
cauuguauucggcauugaa

SEQ ID NO: 1949349 - RNA, 19 nt, Artificial Sequence
  Description of Artificial Sequence: Synthetic oligonucleotide
ucgaugcgcgcaugcaggc

SEQ ID NO: 1949350 - RNA, 19 nt, Artificial Sequence
  Description of Artificial Sequence: Synthetic oligonucleotide
cagugaccuugccaguacg

SEQ ID NO: 1949351 - RNA, 19 nt, Artificial Sequence
  Description of Artificial Sequence: Synthetic oligonucleotide
uucuuguagcucugacgcu

SEQ ID NO: 1949352 - RNA, 19 nt, Artificial Sequence
  Description of Artificial Sequence: Synthetic oligonucleotide
ggacaucagacuguggggc

SEQ ID NO: 1949353 - RNA, 19 nt, Artificial Sequence
  Description of Artificial Sequence: Synthetic oligonucleotide
gcuuagugcacaaaagaca

SEQ ID NO: 1949354 - RNA, 19 nt, Artificial Sequence
  Description of Artificial Sequence: Synthetic oligonucleotide
uugggucggcuauggaugu

SEQ ID NO: 1949355 - RNA, 19 nt, Artificial Sequence
  Description of Artificial Sequence: Synthetic oligonucleotide
ccgguauuccugaagaauc

SEQ ID NO: 1949356 - RNA, 19 nt, Artificial Sequence
  Description of Artificial Sequence: Synthetic oligonucleotide
gaugugugaggagccagca

SEQ ID NO: 1949357 - RNA, 19 nt, Artificial Sequence
  Description of Artificial Sequence: Synthetic oligonucleotide
ggcgggguauuucagcaag

SEQ ID NO: 1949358 - RNA, 19 nt, Artificial Sequence
  Description of Artificial Sequence: Synthetic oligonucleotide
ucaaugcggagggcuuugg

SEQ ID NO: 1949359 - RNA, 19 nt, Artificial Sequence
  Description of Artificial Sequence: Synthetic oligonucleotide
gucucugcggcagccaaag

SEQ ID NO: 1949360 - RNA, 19 nt, Artificial Sequence
  Description of Artificial Sequence: Synthetic oligonucleotide
uacggaucugaaggcagca

SEQ ID NO: 1949361 - RNA, 19 nt, Artificial Sequence
  Description of Artificial Sequence: Synthetic oligonucleotide
uccucggagccuuggcuca

SEQ ID NO: 1949362 - RNA, 19 nt, Artificial Sequence
  Description of Artificial Sequence: Synthetic oligonucleotide
cgaguucauagaaaaguag

SEQ ID NO: 1949363 - RNA, 19 nt, Artificial Sequence
  Description of Artificial Sequence: Synthetic oligonucleotide
agacuggguaaaguccguc

SEQ ID NO: 1949364 - RNA, 19 nt, Artificial Sequence
  Description of Artificial Sequence: Synthetic oligonucleotide
ugugcgccagcuugcggug

SEQ ID NO: 1949365 - RNA, 19 nt, Artificial Sequence
  Description of Artificial Sequence: Synthetic oligonucleotide
ugacgcugcucugacgaug

SEQ ID NO: 1949366 - RNA, 19 nt, Artificial Sequence
  Description of Artificial Sequence: Synthetic oligonucleotide
aagaaucugcccacggguu

SEQ ID NO: 1949367 - RNA, 19 nt, Artificial Sequence
  Description of Artificial Sequence: Synthetic oligonucleotide
agcugcugaagaccauaug

SEQ ID NO: 1949368 - RNA, 19 nt, Artificial Sequence
  Description of Artificial Sequence: Synthetic oligonucleotide
agaaagggucccggggagg

SEQ ID NO: 1949369 - RNA, 19 nt, Artificial Sequence
  Description of Artificial Sequence: Synthetic oligonucleotide
accuugccaguacggaucu

SEQ ID NO: 1949370 - RNA, 19 nt, Artificial Sequence
  Description of Artificial Sequence: Synthetic oligonucleotide
uaguccgggcucucugaag

SEQ ID NO: 1949371 - RNA, 19 nt, Artificial Sequence
  Description of Artificial Sequence: Synthetic oligonucleotide
ggguauuucagcaaguagu

SEQ ID NO: 1949372 - RNA, 19 nt, Artificial Sequence
  Description of Artificial Sequence: Synthetic oligonucleotide
cuugccaguacggaucuga

SEQ ID NO: 1949373 - RNA, 19 nt, Artificial Sequence
  Description of Artificial Sequence: Synthetic oligonucleotide
ugccgcuggucauacucug

SEQ ID NO: 1949374 - RNA, 19 nt, Artificial Sequence
  Description of Artificial Sequence: Synthetic oligonucleotide
cuccucggagccuuggcuc

SEQ ID NO: 1949375 - RNA, 19 nt, Artificial Sequence
  Description of Artificial Sequence: Synthetic oligonucleotide
ucggcgguucaccugcuua

SEQ ID NO: 1949376 - RNA, 19 nt, Artificial Sequence
  Description of Artificial Sequence: Synthetic oligonucleotide
uugccaguacggaucugaa

SEQ ID NO: 1949377 - RNA, 19 nt, Artificial Sequence
  Description of Artificial Sequence: Synthetic oligonucleotide
gacuaucuuuaaccugcca

SEQ ID NO: 1949378 - RNA, 19 nt, Artificial Sequence
  Description of Artificial Sequence: Synthetic oligonucleotide
aaucugcccacggguuguc

SEQ ID NO: 1949379 - RNA, 19 nt, Artificial Sequence
  Description of Artificial Sequence: Synthetic oligonucleotide
ccauauguuguugagguca

SEQ ID NO: 1949380 - RNA, 19 nt, Artificial Sequence
  Description of Artificial Sequence: Synthetic oligonucleotide
caucagacuguggggcugg

SEQ ID NO: 1949381 - RNA, 19 nt, Artificial Sequence
  Description of Artificial Sequence: Synthetic oligonucleotide
uuccgguauuccugaagaa

SEQ ID NO: 1949382 - RNA, 19 nt, Artificial Sequence
  Description of Artificial Sequence: Synthetic oligonucleotide
caauuguuuuggcaaaagu

SEQ ID NO: 1949383 - RNA, 19 nt, Artificial Sequence
  Description of Artificial Sequence: Synthetic oligonucleotide
cauauguuguugaggucaa

SEQ ID NO: 1949384 - RNA, 19 nt, Artificial Sequence
  Description of Artificial Sequence: Synthetic oligonucleotide
acccuggaggugugggccg

SEQ ID NO: 1949385 - RNA, 19 nt, Artificial Sequence
  Description of Artificial Sequence: Synthetic oligonucleotide
guucccagaaagggucccg

SEQ ID NO: 1949386 - RNA, 19 nt, Artificial Sequence
  Description of Artificial Sequence: Synthetic oligonucleotide
gaggcgcuugaugugcgcc

SEQ ID NO: 1949387 - RNA, 19 nt, Artificial Sequence
  Description of Artificial Sequence: Synthetic oligonucleotide
acuuuaaaagucggcgguu

SEQ ID NO: 1949388 - RNA, 19 nt, Artificial Sequence
  Description of Artificial Sequence: Synthetic oligonucleotide
cuagggccaggccugcaac

SEQ ID NO: 1949389 - RNA, 19 nt, Artificial Sequence
  Description of Artificial Sequence: Synthetic oligonucleotide
cagaguagaaaagguacaa

SEQ ID NO: 1949390 - RNA, 19 nt, Artificial Sequence
  Description of Artificial Sequence: Synthetic oligonucleotide
guacggaucugaaggcagc

SEQ ID NO: 1949391 - RNA, 19 nt, Artificial Sequence
  Description of Artificial Sequence: Synthetic oligonucleotide
cgauacucauuguauucgg

SEQ ID NO: 1949392 - RNA, 19 nt, Artificial Sequence
  Description of Artificial Sequence: Synthetic oligonucleotide
gcaggcuaaggugaggggc

SEQ ID NO: 1949393 - RNA, 19 nt, Artificial Sequence
  Description of Artificial Sequence: Synthetic oligonucleotide
ccaguacggaucugaaggc

SEQ ID NO: 1949394 - RNA, 19 nt, Artificial Sequence
  Description of Artificial Sequence: Synthetic oligonucleotide
acaucagacuguggggcug

SEQ ID NO: 1949395 - RNA, 19 nt, Artificial Sequence
  Description of Artificial Sequence: Synthetic oligonucleotide
uucagaccuagugcaucug

SEQ ID NO: 1949396 - RNA, 19 nt, Artificial Sequence
  Description of Artificial Sequence: Synthetic oligonucleotide
ugcagugaccuugccagua

SEQ ID NO: 1949397 - RNA, 19 nt, Artificial Sequence
  Description of Artificial Sequence: Synthetic oligonucleotide
cucugcugacugucccugg

SEQ ID NO: 1949398 - RNA, 19 nt, Artificial Sequence
  Description of Artificial Sequence: Synthetic oligonucleotide
aguccgucagcaggggcag

SEQ ID NO: 1949399 - RNA, 19 nt, Artificial Sequence
  Description of Artificial Sequence: Synthetic oligonucleotide
cucugacgcugcucugacg

SEQ ID NO: 1949400 - RNA, 19 nt, Artificial Sequence
  Description of Artificial Sequence: Synthetic oligonucleotide
ugcaacugccgcuggucau

SEQ ID NO: 1949401 - RNA, 19 nt, Artificial Sequence
  Description of Artificial Sequence: Synthetic oligonucleotide
ucauuguauucggcauuga

SEQ ID NO: 1949402 - RNA, 19 nt, Artificial Sequence
  Description of Artificial Sequence: Synthetic oligonucleotide
gcagcgucucuucucucgg

SEQ ID NO: 1949403 - RNA, 19 nt, Artificial Sequence
  Description of Artificial Sequence: Synthetic oligonucleotide
gaccaccaauaaguuagac

SEQ ID NO: 1949404 - RNA, 19 nt, Artificial Sequence
  Description of Artificial Sequence: Synthetic oligonucleotide
cucugacgaugagauggcg

SEQ ID NO: 1949405 - RNA, 19 nt, Artificial Sequence
  Description of Artificial Sequence: Synthetic oligonucleotide
ugcgccagcuugcggugca

SEQ ID NO: 1949406 - RNA, 19 nt, Artificial Sequence
  Description of Artificial Sequence: Synthetic oligonucleotide
ugcggagggcuuugggcac

SEQ ID NO: 1949407 - RNA, 19 nt, Artificial Sequence
  Description of Artificial Sequence: Synthetic oligonucleotide
accugcgcgugaucugcuc

SEQ ID NO: 1949408 - RNA, 19 nt, Artificial Sequence
  Description of Artificial Sequence: Synthetic oligonucleotide
auacuccucggagccuugg

SEQ ID NO: 1949409 - RNA, 19 nt, Artificial Sequence
  Description of Artificial Sequence: Synthetic oligonucleotide
gcucgaugcgcgcaugcag

SEQ ID NO: 1949410 - RNA, 19 nt, Artificial Sequence
  Description of Artificial Sequence: Synthetic oligonucleotide
cccagaaagggucccgggg

SEQ ID NO: 1949411 - RNA, 19 nt, Artificial Sequence
  Description of Artificial Sequence: Synthetic oligonucleotide
ccacuggcgugcuagggcc

SEQ ID NO: 1949412 - RNA, 19 nt, Artificial Sequence
  Description of Artificial Sequence: Synthetic oligonucleotide
gacaucagacuguggggcu

SEQ ID NO: 1949413 - RNA, 19 nt, Artificial Sequence
  Description of Artificial Sequence: Synthetic oligonucleotide
acggaucugaaggcagcag

SEQ ID NO: 1949414 - RNA, 19 nt, Artificial Sequence
  Description of Artificial Sequence: Synthetic oligonucleotide
ucggagccuuggcucagcu

SEQ ID NO: 1949415 - RNA, 19 nt, Artificial Sequence
  Description of Artificial Sequence: Synthetic oligonucleotide
uggagccucuaacccugga

SEQ ID NO: 1949416 - RNA, 19 nt, Artificial Sequence
  Description of Artificial Sequence: Synthetic oligonucleotide
cagcccacuggcgugcuag

SEQ ID NO: 1949417 - RNA, 19 nt, Artificial Sequence
  Description of Artificial Sequence: Synthetic oligonucleotide
ggcuauggaugugugagga

SEQ ID NO: 1949418 - RNA, 19 nt, Artificial Sequence
  Description of Artificial Sequence: Synthetic oligonucleotide
augaggcgcuugaugugcg

SEQ ID NO: 1949419 - RNA, 19 nt, Artificial Sequence
  Description of Artificial Sequence: Synthetic oligonucleotide
auuuuccgguauuccugaa

SEQ ID NO: 1949420 - RNA, 19 nt, Artificial Sequence
  Description of Artificial Sequence: Synthetic oligonucleotide
cagccaaagggccgaguuc

SEQ ID NO: 1949421 - RNA, 19 nt, Artificial Sequence
  Description of Artificial Sequence: Synthetic oligonucleotide
ugcucgaugcgcgcaugca

SEQ ID NO: 1949422 - RNA, 19 nt, Artificial Sequence
  Description of Artificial Sequence: Synthetic oligonucleotide
agcccacuggcgugcuagg

SEQ ID NO: 1949423 - RNA, 19 nt, Artificial Sequence
  Description of Artificial Sequence: Synthetic oligonucleotide
ccugucaauuguuuuggca

SEQ ID NO: 1949424 - RNA, 19 nt, Artificial Sequence
  Description of Artificial Sequence: Synthetic oligonucleotide
ggcaggcuaaggugagggg

SEQ ID NO: 1949425 - RNA, 19 nt, Artificial Sequence
  Description of Artificial Sequence: Synthetic oligonucleotide
ccgcuggucauacucugcg

SEQ ID NO: 1949426 - RNA, 19 nt, Artificial Sequence
  Description of Artificial Sequence: Synthetic oligonucleotide
gggccgaguucauagaaaa

SEQ ID NO: 1949427 - RNA, 19 nt, Artificial Sequence
  Description of Artificial Sequence: Synthetic oligonucleotide
ggucauacucugcgaugag

SEQ ID NO: 1949428 - RNA, 19 nt, Artificial Sequence
  Description of Artificial Sequence: Synthetic oligonucleotide
ggaucugaaggcagcagga

SEQ ID NO: 1949429 - RNA, 19 nt, Artificial Sequence
  Description of Artificial Sequence: Synthetic oligonucleotide
augcgcgcaugcaggcucc

SEQ ID NO: 1949430 - RNA, 19 nt, Artificial Sequence
  Description of Artificial Sequence: Synthetic oligonucleotide
ugugaggagccagcagguc

SEQ ID NO: 1949431 - RNA, 19 nt, Artificial Sequence
  Description of Artificial Sequence: Synthetic oligonucleotide
gcgaugaggcgcuugaugu

SEQ ID NO: 1949432 - RNA, 19 nt, Artificial Sequence
  Description of Artificial Sequence: Synthetic oligonucleotide
agauggcgggguauuucag

SEQ ID NO: 1949433 - RNA, 19 nt, Artificial Sequence
  Description of Artificial Sequence: Synthetic oligonucleotide
guacucgcagcgucucuuc

SEQ ID NO: 1949434 - RNA, 19 nt, Artificial Sequence
  Description of Artificial Sequence: Synthetic oligonucleotide
cauacuccucggagccuug

SEQ ID NO: 1949435 - RNA, 19 nt, Artificial Sequence
  Description of Artificial Sequence: Synthetic oligonucleotide
aucugcucgaugcgcgcau

SEQ ID NO: 1949436 - RNA, 19 nt, Artificial Sequence
  Description of Artificial Sequence: Synthetic oligonucleotide
ggaugugugaggagccagc

SEQ ID NO: 1949437 - RNA, 19 nt, Artificial Sequence
  Description of Artificial Sequence: Synthetic oligonucleotide
cugugugaaccugcgcgug

SEQ ID NO: 1949438 - RNA, 19 nt, Artificial Sequence
  Description of Artificial Sequence: Synthetic oligonucleotide
gccgaguucauagaaaagu

SEQ ID NO: 1949439 - RNA, 19 nt, Artificial Sequence
  Description of Artificial Sequence: Synthetic oligonucleotide
ugaggucaaugcggagggc

SEQ ID NO: 1949440 - RNA, 19 nt, Artificial Sequence
  Description of Artificial Sequence: Synthetic oligonucleotide
gacgaugagauggcggggu

SEQ ID NO: 1949441 - RNA, 19 nt, Artificial Sequence
  Description of Artificial Sequence: Synthetic oligonucleotide
gucggcuauggauguguga

SEQ ID NO: 1949442 - RNA, 19 nt, Artificial Sequence
  Description of Artificial Sequence: Synthetic oligonucleotide
gaucugcucgaugcgcgca

SEQ ID NO: 1949443 - RNA, 19 nt, Artificial Sequence
  Description of Artificial Sequence: Synthetic oligonucleotide
cgguucaccugcuuagugc

SEQ ID NO: 1949444 - RNA, 19 nt, Artificial Sequence
  Description of Artificial Sequence: Synthetic oligonucleotide
ucgcucagacuggguaaag

SEQ ID NO: 1949445 - RNA, 19 nt, Artificial Sequence
  Description of Artificial Sequence: Synthetic oligonucleotide
acuggcgugcuagggccag

SEQ ID NO: 1949446 - RNA, 19 nt, Artificial Sequence
  Description of Artificial Sequence: Synthetic oligonucleotide
gcgugaucugcucgaugcg

SEQ ID NO: 1949447 - RNA, 19 nt, Artificial Sequence
  Description of Artificial Sequence: Synthetic oligonucleotide
uggcgggguauuucagcaa

SEQ ID NO: 1949448 - RNA, 19 nt, Artificial Sequence
  Description of Artificial Sequence: Synthetic oligonucleotide
gcuguaguugguguugguc

SEQ ID NO: 1949449 - RNA, 19 nt, Artificial Sequence
  Description of Artificial Sequence: Synthetic oligonucleotide
ccugcgcgugaucugcucg

SEQ ID NO: 1949450 - RNA, 19 nt, Artificial Sequence
  Description of Artificial Sequence: Synthetic oligonucleotide
ggcaucaagcugugugaac

SEQ ID NO: 1949451 - RNA, 19 nt, Artificial Sequence
  Description of Artificial Sequence: Synthetic oligonucleotide
gugaaccugcgcgugaucu

SEQ ID NO: 1949452 - RNA, 19 nt, Artificial Sequence
  Description of Artificial Sequence: Synthetic oligonucleotide
agguacucgcagcgucucu

SEQ ID NO: 1949453 - RNA, 19 nt, Artificial Sequence
  Description of Artificial Sequence: Synthetic oligonucleotide
ggacgcagcugcugaagac

SEQ ID NO: 1949454 - RNA, 19 nt, Artificial Sequence
  Description of Artificial Sequence: Synthetic oligonucleotide
cugcugaagaccauauguu

SEQ ID NO: 1949455 - RNA, 19 nt, Artificial Sequence
  Description of Artificial Sequence: Synthetic oligonucleotide
guaguccgggcucucugaa

SEQ ID NO: 1949456 - RNA, 19 nt, Artificial Sequence
  Description of Artificial Sequence: Synthetic oligonucleotide
gagccuuggcucagcugcc

SEQ ID NO: 1949457 - RNA, 19 nt, Artificial Sequence
  Description of Artificial Sequence: Synthetic oligonucleotide
accaacuccauggcucaaa

SEQ ID NO: 1949458 - RNA, 19 nt, Artificial Sequence
  Description of Artificial Sequence: Synthetic oligonucleotide
gaaucugcccacggguugu

SEQ ID NO: 1949459 - RNA, 19 nt, Artificial Sequence
  Description of Artificial Sequence: Synthetic oligonucleotide
ggcuccgauacucauugua

SEQ ID NO: 1949460 - RNA, 19 nt, Artificial Sequence
  Description of Artificial Sequence: Synthetic oligonucleotide
agucguucuuguagcucug

SEQ ID NO: 1949461 - RNA, 19 nt, Artificial Sequence
  Description of Artificial Sequence: Synthetic oligonucleotide
agaccaccaauaaguuaga

SEQ ID NO: 1949462 - RNA, 19 nt, Artificial Sequence
  Description of Artificial Sequence: Synthetic oligonucleotide
acgaugagauggcggggua

SEQ ID NO: 1949463 - RNA, 19 nt, Artificial Sequence
  Description of Artificial Sequence: Synthetic oligonucleotide
cugcccacggguugucuca

SEQ ID NO: 1949464 - RNA, 19 nt, Artificial Sequence
  Description of Artificial Sequence: Synthetic oligonucleotide
cgcagcgucucuucucucg

SEQ ID NO: 1949465 - RNA, 19 nt, Artificial Sequence
  Description of Artificial Sequence: Synthetic oligonucleotide
gcugcucugacgaugagau

SEQ ID NO: 1949466 - RNA, 19 nt, Artificial Sequence
  Description of Artificial Sequence: Synthetic oligonucleotide
ggucgcucagacuggguaa

SEQ ID NO: 1949467 - RNA, 19 nt, Artificial Sequence
  Description of Artificial Sequence: Synthetic oligonucleotide
gaugagauggcgggguauu

SEQ ID NO: 1949468 - RNA, 19 nt, Artificial Sequence
  Description of Artificial Sequence: Synthetic oligonucleotide
ggcaaaagugaagacugua

SEQ ID NO: 1949469 - RNA, 19 nt, Artificial Sequence
  Description of Artificial Sequence: Synthetic oligonucleotide
gcgguucaccugcuuagug

SEQ ID NO: 1949470 - RNA, 19 nt, Artificial Sequence
  Description of Artificial Sequence: Synthetic oligonucleotide
ccgaguucauagaaaagua

SEQ ID NO: 1949471 - RNA, 19 nt, Artificial Sequence
  Description of Artificial Sequence: Synthetic oligonucleotide
cccacggguugucucauac

SEQ ID NO: 1949472 - RNA, 19 nt, Artificial Sequence
  Description of Artificial Sequence: Synthetic oligonucleotide
caacugccgcuggucauac

SEQ ID NO: 1949473 - RNA, 19 nt, Artificial Sequence
  Description of Artificial Sequence: Synthetic oligonucleotide
cgugcuagggccaggccug

SEQ ID NO: 1949474 - RNA, 19 nt, Artificial Sequence
  Description of Artificial Sequence: Synthetic oligonucleotide
gguucccagaaaggguccc

SEQ ID NO: 1949475 - RNA, 19 nt, Artificial Sequence
  Description of Artificial Sequence: Synthetic oligonucleotide
ggcacagaguagaaaaggu

SEQ ID NO: 1949476 - RNA, 19 nt, Artificial Sequence
  Description of Artificial Sequence: Synthetic oligonucleotide
cagccucagugugacauga

SEQ ID NO: 1949477 - RNA, 19 nt, Artificial Sequence
  Description of Artificial Sequence: Synthetic oligonucleotide
cuggcacaggcuccauuca

SEQ ID NO: 1949478 - RNA, 19 nt, Artificial Sequence
  Description of Artificial Sequence: Synthetic oligonucleotide
aggcuaaggugaggggcug

SEQ ID NO: 1949479 - RNA, 19 nt, Artificial Sequence
  Description of Artificial Sequence: Synthetic oligonucleotide
gagcugcagugaccuugcc

SEQ ID NO: 1949480 - RNA, 19 nt, Artificial Sequence
  Description of Artificial Sequence: Synthetic oligonucleotide
agggccgaguucauagaaa

SEQ ID NO: 1949481 - RNA, 19 nt, Artificial Sequence
  Description of Artificial Sequence: Synthetic oligonucleotide
ccaauaaguuagacuaucu

SEQ ID NO: 1949482 - RNA, 19 nt, Artificial Sequence
  Description of Artificial Sequence: Synthetic oligonucleotide
guucaccugcuuagugcac

SEQ ID NO: 1949483 - RNA, 19 nt, Artificial Sequence
  Description of Artificial Sequence: Synthetic oligonucleotide
ccuagugcaucugggagca

SEQ ID NO: 1949484 - RNA, 19 nt, Artificial Sequence
  Description of Artificial Sequence: Synthetic oligonucleotide
ggcgcugccucuccuguca

SEQ ID NO: 1949485 - RNA, 19 nt, Artificial Sequence
  Description of Artificial Sequence: Synthetic oligonucleotide
ggacuucuucuugggucgg

SEQ ID NO: 1949486 - RNA, 19 nt, Artificial Sequence
  Description of Artificial Sequence: Synthetic oligonucleotide
gggacgcagcugcugaaga

SEQ ID NO: 1949487 - RNA, 19 nt, Artificial Sequence
  Description of Artificial Sequence: Synthetic oligonucleotide
cuccgauacucauuguauu

SEQ ID NO: 1949488 - RNA, 19 nt, Artificial Sequence
  Description of Artificial Sequence: Synthetic oligonucleotide
ugcgcgcaugcaggcuccg

SEQ ID NO: 1949489 - RNA, 19 nt, Artificial Sequence
  Description of Artificial Sequence: Synthetic oligonucleotide
cgugaucugcucgaugcgc

SEQ ID NO: 1949490 - RNA, 19 nt, Artificial Sequence
  Description of Artificial Sequence: Synthetic oligonucleotide
gcucugacgcugcucugac

SEQ ID NO: 1949491 - RNA, 19 nt, Artificial Sequence
  Description of Artificial Sequence: Synthetic oligonucleotide
ugggucggcuauggaugug

SEQ ID NO: 1949492 - RNA, 19 nt, Artificial Sequence
  Description of Artificial Sequence: Synthetic oligonucleotide
ggcuaaggugaggggcugg

SEQ ID NO: 1949493 - RNA, 19 nt, Artificial Sequence
  Description of Artificial Sequence: Synthetic oligonucleotide
gucgcucagacuggguaaa

SEQ ID NO: 1949494 - RNA, 19 nt, Artificial Sequence
  Description of Artificial Sequence: Synthetic oligonucleotide
cucugcgaugaggcgcuug

SEQ ID NO: 1949495 - RNA, 19 nt, Artificial Sequence
  Description of Artificial Sequence: Synthetic oligonucleotide
caccaauaaguuagacuau

SEQ ID NO: 1949496 - RNA, 19 nt, Artificial Sequence
  Description of Artificial Sequence: Synthetic oligonucleotide
aggucaaugcggagggcuu

SEQ ID NO: 1949497 - RNA, 19 nt, Artificial Sequence
  Description of Artificial Sequence: Synthetic oligonucleotide
gccucuaacccuggaggug

SEQ ID NO: 1949498 - RNA, 19 nt, Artificial Sequence
  Description of Artificial Sequence: Synthetic oligonucleotide
cagagaccaccaauaaguu

SEQ ID NO: 1949499 - RNA, 19 nt, Artificial Sequence
  Description of Artificial Sequence: Synthetic oligonucleotide
ggggacgcagcugcugaag

SEQ ID NO: 1949500 - RNA, 19 nt, Artificial Sequence
  Description of Artificial Sequence: Synthetic oligonucleotide
aggcuccgauacucauugu

SEQ ID NO: 1949501 - RNA, 19 nt, Artificial Sequence
  Description of Artificial Sequence: Synthetic oligonucleotide
gcugugugaaccugcgcgu

SEQ ID NO: 1949502 - RNA, 19 nt, Artificial Sequence
  Description of Artificial Sequence: Synthetic oligonucleotide
cucggagccuuggcucagc

SEQ ID NO: 1949503 - RNA, 19 nt, Artificial Sequence
  Description of Artificial Sequence: Synthetic oligonucleotide
caacuccauggcucaaagu

SEQ ID NO: 1949504 - RNA, 19 nt, Artificial Sequence
  Description of Artificial Sequence: Synthetic oligonucleotide
cggcgguucaccugcuuag

SEQ ID NO: 1949505 - RNA, 19 nt, Artificial Sequence
  Description of Artificial Sequence: Synthetic oligonucleotide
gucccggggaggcgcugcc

SEQ ID NO: 1949506 - RNA, 19 nt, Artificial Sequence
  Description of Artificial Sequence: Synthetic oligonucleotide
ggucggcuauggaugugug

SEQ ID NO: 1949507 - RNA, 19 nt, Artificial Sequence
  Description of Artificial Sequence: Synthetic oligonucleotide
aucugcccacggguugucu

SEQ ID NO: 1949508 - RNA, 19 nt, Artificial Sequence
  Description of Artificial Sequence: Synthetic oligonucleotide
gcgugcuagggccaggccu

SEQ ID NO: 1949509 - RNA, 19 nt, Artificial Sequence
  Description of Artificial Sequence: Synthetic oligonucleotide
agucucugcggcagccaaa

SEQ ID NO: 1949510 - RNA, 19 nt, Artificial Sequence
  Description of Artificial Sequence: Synthetic oligonucleotide
caggaccuggcacucugcu

SEQ ID NO: 1949511 - RNA, 19 nt, Artificial Sequence
  Description of Artificial Sequence: Synthetic oligonucleotide
cuggcgugcuagggccagg

SEQ ID NO: 1949512 - RNA, 19 nt, Artificial Sequence
  Description of Artificial Sequence: Synthetic oligonucleotide
cuagugcaucugggagcag

SEQ ID NO: 1949513 - RNA, 19 nt, Artificial Sequence
  Description of Artificial Sequence: Synthetic oligonucleotide
ugcccacggguugucucau

SEQ ID NO: 1949514 - RNA, 19 nt, Artificial Sequence
  Description of Artificial Sequence: Synthetic oligonucleotide
gcuccgauacucauuguau

SEQ ID NO: 1949515 - RNA, 19 nt, Artificial Sequence
  Description of Artificial Sequence: Synthetic oligonucleotide
ggcgugcuagggccaggcc

SEQ ID NO: 1949516 - RNA, 19 nt, Artificial Sequence
  Description of Artificial Sequence: Synthetic oligonucleotide
cagacuggguaaaguccgu

SEQ ID NO: 1949517 - RNA, 19 nt, Artificial Sequence
  Description of Artificial Sequence: Synthetic oligonucleotide
gccgcuggucauacucugc

SEQ ID NO: 1949518 - RNA, 19 nt, Artificial Sequence
  Description of Artificial Sequence: Synthetic oligonucleotide
gugcgccagcuugcggugc

SEQ ID NO: 1949519 - RNA, 19 nt, Artificial Sequence
  Description of Artificial Sequence: Synthetic oligonucleotide
gcaggaccuggcacucugc

SEQ ID NO: 1949520 - RNA, 19 nt, Artificial Sequence
  Description of Artificial Sequence: Synthetic oligonucleotide
gugugaaccugcgcgugau

SEQ ID NO: 1949521 - RNA, 19 nt, Artificial Sequence
  Description of Artificial Sequence: Synthetic oligonucleotide
ugccugagcugggcaucaa

SEQ ID NO: 1949522 - RNA, 19 nt, Artificial Sequence
  Description of Artificial Sequence: Synthetic oligonucleotide
ccucuaacccuggaggugu

SEQ ID NO: 1949523 - RNA, 19 nt, Artificial Sequence
  Description of Artificial Sequence: Synthetic oligonucleotide
gggucggcuauggaugugu

SEQ ID NO: 1949524 - RNA, 19 nt, Artificial Sequence
  Description of Artificial Sequence: Synthetic oligonucleotide
caggcuccauucagaccua

SEQ ID NO: 1949525 - RNA, 19 nt, Artificial Sequence
  Description of Artificial Sequence: Synthetic oligonucleotide
gguacucgcagcgucucuu

SEQ ID NO: 1949526 - RNA, 19 nt, Artificial Sequence
  Description of Artificial Sequence: Synthetic oligonucleotide
gcugccucuccugucaauu

SEQ ID NO: 1949527 - RNA, 19 nt, Artificial Sequence
  Description of Artificial Sequence: Synthetic oligonucleotide
cugacgcugcucugacgau

SEQ ID NO: 1949528 - RNA, 19 nt, Artificial Sequence
  Description of Artificial Sequence: Synthetic oligonucleotide
ccauggcucaaaguagacu

SEQ ID NO: 1949529 - RNA, 19 nt, Artificial Sequence
  Description of Artificial Sequence: Synthetic oligonucleotide
ggcuguaguugguguuggu

SEQ ID NO: 1949530 - RNA, 19 nt, Artificial Sequence
  Description of Artificial Sequence: Synthetic oligonucleotide
agggucccggggaggcgcu

SEQ ID NO: 1949531 - RNA, 19 nt, Artificial Sequence
  Description of Artificial Sequence: Synthetic oligonucleotide
caccugcuuagugcacaaa

SEQ ID NO: 1949532 - RNA, 19 nt, Artificial Sequence
  Description of Artificial Sequence: Synthetic oligonucleotide
gugcagguacucgcagcgu

SEQ ID NO: 1949533 - RNA, 19 nt, Artificial Sequence
  Description of Artificial Sequence: Synthetic oligonucleotide
caggucgcucagacugggu

SEQ ID NO: 1949534 - RNA, 19 nt, Artificial Sequence
  Description of Artificial Sequence: Synthetic oligonucleotide
ccucggagccuuggcucag

SEQ ID NO: 1949535 - RNA, 19 nt, Artificial Sequence
  Description of Artificial Sequence: Synthetic oligonucleotide
gggccguggaggaggcaca

SEQ ID NO: 1949536 - RNA, 19 nt, Artificial Sequence
  Description of Artificial Sequence: Synthetic oligonucleotide
auucggcauugaagucguu

SEQ ID NO: 1949537 - RNA, 19 nt, Artificial Sequence
  Description of Artificial Sequence: Synthetic oligonucleotide
caccaacuccauggcucaa

SEQ ID NO: 1949538 - RNA, 19 nt, Artificial Sequence
  Description of Artificial Sequence: Synthetic oligonucleotide
ggcgguucaccugcuuagu

SEQ ID NO: 1949539 - RNA, 19 nt, Artificial Sequence
  Description of Artificial Sequence: Synthetic oligonucleotide
ggucaaugcggagggcuuu

SEQ ID NO: 1949540 - RNA, 19 nt, Artificial Sequence
  Description of Artificial Sequence: Synthetic oligonucleotide
cgggguauuucagcaagua

SEQ ID NO: 1949541 - RNA, 19 nt, Artificial Sequence
  Description of Artificial Sequence: Synthetic oligonucleotide
gcgggguauuucagcaagu

SEQ ID NO: 1949542 - RNA, 19 nt, Artificial Sequence
  Description of Artificial Sequence: Synthetic oligonucleotide
gucggcgguucaccugcuu

SEQ ID NO: 1949543 - RNA, 19 nt, Artificial Sequence
  Description of Artificial Sequence: Synthetic oligonucleotide
gccucuccugucaauuguu

SEQ ID NO: 1949544 - RNA, 19 nt, Artificial Sequence
  Description of Artificial Sequence: Synthetic oligonucleotide
gugggccguggaggaggca

SEQ ID NO: 1949545 - RNA, 19 nt, Artificial Sequence
  Description of Artificial Sequence: Synthetic oligonucleotide
gcgcugccucuccugucaa

SEQ ID NO: 1949546 - RNA, 19 nt, Artificial Sequence
  Description of Artificial Sequence: Synthetic oligonucleotide
gccguggaggaggcacaga

SEQ ID NO: 1949547 - RNA, 19 nt, Artificial Sequence
  Description of Artificial Sequence: Synthetic oligonucleotide
cugcgaugaggcgcuugau

SEQ ID NO: 1949548 - RNA, 19 nt, Artificial Sequence
  Description of Artificial Sequence: Synthetic oligonucleotide
cacagcccacuggcgugcu

SEQ ID NO: 1949549 - RNA, 19 nt, Artificial Sequence
  Description of Artificial Sequence: Synthetic oligonucleotide
cgcucagacuggguaaagu

SEQ ID NO: 1949550 - RNA, 19 nt, Artificial Sequence
  Description of Artificial Sequence: Synthetic oligonucleotide
gcccacggguugucucaua

SEQ ID NO: 1949551 - RNA, 19 nt, Artificial Sequence
  Description of Artificial Sequence: Synthetic oligonucleotide
gcgcgcaugcaggcuccga

SEQ ID NO: 1949552 - RNA, 19 nt, Artificial Sequence
  Description of Artificial Sequence: Synthetic oligonucleotide
gccaaagggccgaguucau

SEQ ID NO: 1949553 - RNA, 19 nt, Artificial Sequence
  Description of Artificial Sequence: Synthetic oligonucleotide
ggggccgcuccuuguccuu

SEQ ID NO: 1949554 - RNA, 19 nt, Artificial Sequence
  Description of Artificial Sequence: Synthetic oligonucleotide
cgaugagauggcgggguau

SEQ ID NO: 1949555 - RNA, 19 nt, Artificial Sequence
  Description of Artificial Sequence: Synthetic oligonucleotide
ccgucagcaggggcaggcu

SEQ ID NO: 1949556 - RNA, 19 nt, Artificial Sequence
  Description of Artificial Sequence: Synthetic oligonucleotide
cgaugcgcgcaugcaggcu

SEQ ID NO: 1949557 - RNA, 19 nt, Artificial Sequence
  Description of Artificial Sequence: Synthetic oligonucleotide
aacaagauaagcuauuacc

SEQ ID NO: 1949558 - RNA, 19 nt, Artificial Sequence
  Description of Artificial Sequence: Synthetic oligonucleotide
aauuauucgacugacauag

SEQ ID NO: 1949559 - RNA, 19 nt, Artificial Sequence
  Description of Artificial Sequence: Synthetic oligonucleotide
aaucgaaagaguucgggcc

SEQ ID NO: 1949560 - RNA, 19 nt, Artificial Sequence
  Description of Artificial Sequence: Synthetic oligonucleotide
aacucaagaacccuuaauc

SEQ ID NO: 1949561 - RNA, 19 nt, Artificial Sequence
  Description of Artificial Sequence: Synthetic oligonucleotide
uugauuaacaagcugaaca

SEQ ID NO: 1949562 - RNA, 19 nt, Artificial Sequence
  Description of Artificial Sequence: Synthetic oligonucleotide
ugcauuuaacucaagaacc

SEQ ID NO: 1949563 - RNA, 19 nt, Artificial Sequence
  Description of Artificial Sequence: Synthetic oligonucleotide
cauagaaucugcuucaucc

SEQ ID NO: 1949564 - RNA, 19 nt, Artificial Sequence
  Description of Artificial Sequence: Synthetic oligonucleotide
augcauuuaacucaagaac

SEQ ID NO: 1949565 - RNA, 19 nt, Artificial Sequence
  Description of Artificial Sequence: Synthetic oligonucleotide
auucgacugacauaguugc

SEQ ID NO: 1949566 - RNA, 19 nt, Artificial Sequence
  Description of Artificial Sequence: Synthetic oligonucleotide
gaauuacaaucuuaaaggg

SEQ ID NO: 1949567 - RNA, 19 nt, Artificial Sequence
  Description of Artificial Sequence: Synthetic oligonucleotide
agcaauauccaguaaucgc

SEQ ID NO: 1949568 - RNA, 19 nt, Artificial Sequence
  Description of Artificial Sequence: Synthetic oligonucleotide
ugauuaacaagcugaacag

SEQ ID NO: 1949569 - RNA, 19 nt, Artificial Sequence
  Description of Artificial Sequence: Synthetic oligonucleotide
aauauccaguaaucgcucc

SEQ ID NO: 1949570 - RNA, 19 nt, Artificial Sequence
  Description of Artificial Sequence: Synthetic oligonucleotide
aagauaagcuauuaccuca

SEQ ID NO: 1949571 - RNA, 19 nt, Artificial Sequence
  Description of Artificial Sequence: Synthetic oligonucleotide
aucuauuagguccuuuacc

SEQ ID NO: 1949572 - RNA, 19 nt, Artificial Sequence
  Description of Artificial Sequence: Synthetic oligonucleotide
ucaauuauucgacugacau

SEQ ID NO: 1949573 - RNA, 19 nt, Artificial Sequence
  Description of Artificial Sequence: Synthetic oligonucleotide
uuuucuguaaugauagacu

SEQ ID NO: 1949574 - RNA, 19 nt, Artificial Sequence
  Description of Artificial Sequence: Synthetic oligonucleotide
auaagcuauuaccucaugg

SEQ ID NO: 1949575 - RNA, 19 nt, Artificial Sequence
  Description of Artificial Sequence: Synthetic oligonucleotide
aauguaauggcuuuccgua

SEQ ID NO: 1949576 - RNA, 19 nt, Artificial Sequence
  Description of Artificial Sequence: Synthetic oligonucleotide
ucuuaaaggguggacaugg

SEQ ID NO: 1949577 - RNA, 19 nt, Artificial Sequence
  Description of Artificial Sequence: Synthetic oligonucleotide
auuacaaucuuaaagggug

SEQ ID NO: 1949578 - RNA, 19 nt, Artificial Sequence
  Description of Artificial Sequence: Synthetic oligonucleotide
aaugauagacuucuguuua

SEQ ID NO: 1949579 - RNA, 19 nt, Artificial Sequence
  Description of Artificial Sequence: Synthetic oligonucleotide
aacaucuagaagugagggg

SEQ ID NO: 1949580 - RNA, 19 nt, Artificial Sequence
  Description of Artificial Sequence: Synthetic oligonucleotide
ugaacaucuagaagugagg

SEQ ID NO: 1949581 - RNA, 19 nt, Artificial Sequence
  Description of Artificial Sequence: Synthetic oligonucleotide
uauucgacugacauaguug

SEQ ID NO: 1949582 - RNA, 19 nt, Artificial Sequence
  Description of Artificial Sequence: Synthetic oligonucleotide
aaaggguggacauggcuuc

SEQ ID NO: 1949583 - RNA, 19 nt, Artificial Sequence
  Description of Artificial Sequence: Synthetic oligonucleotide
gaaugcggaacuuugaaca

SEQ ID NO: 1949584 - RNA, 19 nt, Artificial Sequence
  Description of Artificial Sequence: Synthetic oligonucleotide
gucugcuaaacauuuaucc

SEQ ID NO: 1949585 - RNA, 19 nt, Artificial Sequence
  Description of Artificial Sequence: Synthetic oligonucleotide
aaagaguucgggcccaaag

SEQ ID NO: 1949586 - RNA, 19 nt, Artificial Sequence
  Description of Artificial Sequence: Synthetic oligonucleotide
aaucgcucccgcugaaugc

SEQ ID NO: 1949587 - RNA, 19 nt, Artificial Sequence
  Description of Artificial Sequence: Synthetic oligonucleotide
uccagaauuacaaucuuaa

SEQ ID NO: 1949588 - RNA, 19 nt, Artificial Sequence
  Description of Artificial Sequence: Synthetic oligonucleotide
uuuaaguacugcaaccacu

SEQ ID NO: 1949589 - RNA, 19 nt, Artificial Sequence
  Description of Artificial Sequence: Synthetic oligonucleotide
agagauuaggaagaucagc

SEQ ID NO: 1949590 - RNA, 19 nt, Artificial Sequence
  Description of Artificial Sequence: Synthetic oligonucleotide
ucuaacaauucugagucag

SEQ ID NO: 1949591 - RNA, 19 nt, Artificial Sequence
  Description of Artificial Sequence: Synthetic oligonucleotide
ucccucaucuauuaggucc

SEQ ID NO: 1949592 - RNA, 19 nt, Artificial Sequence
  Description of Artificial Sequence: Synthetic oligonucleotide
uuccacguucaucagaugc

SEQ ID NO: 1949593 - RNA, 19 nt, Artificial Sequence
  Description of Artificial Sequence: Synthetic oligonucleotide
uuaaucgaaagaguucggg

SEQ ID NO: 1949594 - RNA, 19 nt, Artificial Sequence
  Description of Artificial Sequence: Synthetic oligonucleotide
aguuugucaaaagagccac

SEQ ID NO: 1949595 - RNA, 19 nt, Artificial Sequence
  Description of Artificial Sequence: Synthetic oligonucleotide
aaucuuaaaggguggacau

SEQ ID NO: 1949596 - RNA, 19 nt, Artificial Sequence
  Description of Artificial Sequence: Synthetic oligonucleotide
ucuacuaccacaucaugaa

SEQ ID NO: 1949597 - RNA, 19 nt, Artificial Sequence
  Description of Artificial Sequence: Synthetic oligonucleotide
uaccucauggcuaauuuug

SEQ ID NO: 1949598 - RNA, 19 nt, Artificial Sequence
  Description of Artificial Sequence: Synthetic oligonucleotide
aauauuccaucaaugguug

SEQ ID NO: 1949599 - RNA, 19 nt, Artificial Sequence
  Description of Artificial Sequence: Synthetic oligonucleotide
uucuacuaccacaucauga

SEQ ID NO: 1949600 - RNA, 19 nt, Artificial Sequence
  Description of Artificial Sequence: Synthetic oligonucleotide
uccaugguacgucuuaaag

SEQ ID NO: 1949601 - RNA, 19 nt, Artificial Sequence
  Description of Artificial Sequence: Synthetic oligonucleotide
uaaucgaaagaguucgggc

SEQ ID NO: 1949602 - RNA, 19 nt, Artificial Sequence
  Description of Artificial Sequence: Synthetic oligonucleotide
auauccaguaaucgcuccc

SEQ ID NO: 1949603 - RNA, 19 nt, Artificial Sequence
  Description of Artificial Sequence: Synthetic oligonucleotide
uauuagguccuuuaccaca

SEQ ID NO: 1949604 - RNA, 19 nt, Artificial Sequence
  Description of Artificial Sequence: Synthetic oligonucleotide
agaugugccuuuuagaaaa

SEQ ID NO: 1949605 - RNA, 19 nt, Artificial Sequence
  Description of Artificial Sequence: Synthetic oligonucleotide
ucaagaacccuuaaucgaa

SEQ ID NO: 1949606 - RNA, 19 nt, Artificial Sequence
  Description of Artificial Sequence: Synthetic oligonucleotide
gacauaguugcagaugagg

SEQ ID NO: 1949607 - RNA, 19 nt, Artificial Sequence
  Description of Artificial Sequence: Synthetic oligonucleotide
uacgucuuaaagcugccug

SEQ ID NO: 1949608 - RNA, 19 nt, Artificial Sequence
  Description of Artificial Sequence: Synthetic oligonucleotide
guagaucuccuucugauac

SEQ ID NO: 1949609 - RNA, 19 nt, Artificial Sequence
  Description of Artificial Sequence: Synthetic oligonucleotide
ucauggcuaauuuugacau

SEQ ID NO: 1949610 - RNA, 19 nt, Artificial Sequence
  Description of Artificial Sequence: Synthetic oligonucleotide
uuuuaaguacugcaaccac

SEQ ID NO: 1949611 - RNA, 19 nt, Artificial Sequence
  Description of Artificial Sequence: Synthetic oligonucleotide
gaauaagagauuaggaaga

SEQ ID NO: 1949612 - RNA, 19 nt, Artificial Sequence
  Description of Artificial Sequence: Synthetic oligonucleotide
cacaguugcacaaaggcuc

SEQ ID NO: 1949613 - RNA, 19 nt, Artificial Sequence
  Description of Artificial Sequence: Synthetic oligonucleotide
ggucuaacaauucugaguc

SEQ ID NO: 1949614 - RNA, 19 nt, Artificial Sequence
  Description of Artificial Sequence: Synthetic oligonucleotide
uggucuaacaauucugagu

SEQ ID NO: 1949615 - RNA, 19 nt, Artificial Sequence
  Description of Artificial Sequence: Synthetic oligonucleotide
aagaacccuuaaucgaaag

SEQ ID NO: 1949616 - RNA, 19 nt, Artificial Sequence
  Description of Artificial Sequence: Synthetic oligonucleotide
ugagggguucaauuauucg

SEQ ID NO: 1949617 - RNA, 19 nt, Artificial Sequence
  Description of Artificial Sequence: Synthetic oligonucleotide
uuuaacaagauaagcuauu

SEQ ID NO: 1949618 - RNA, 19 nt, Artificial Sequence
  Description of Artificial Sequence: Synthetic oligonucleotide
uuaaaggguggacauggcu

SEQ ID NO: 1949619 - RNA, 19 nt, Artificial Sequence
  Description of Artificial Sequence: Synthetic oligonucleotide
acaagauaagcuauuaccu

SEQ ID NO: 1949620 - RNA, 19 nt, Artificial Sequence
  Description of Artificial Sequence: Synthetic oligonucleotide
ucugauacuuuaacaagau

SEQ ID NO: 1949621 - RNA, 19 nt, Artificial Sequence
  Description of Artificial Sequence: Synthetic oligonucleotide
uuuaacucaagaacccuua

SEQ ID NO: 1949622 - RNA, 19 nt, Artificial Sequence
  Description of Artificial Sequence: Synthetic oligonucleotide
agauuaggaagaucagcuc

SEQ ID NO: 1949623 - RNA, 19 nt, Artificial Sequence
  Description of Artificial Sequence: Synthetic oligonucleotide
uucuguuuaucagaaaggu

SEQ ID NO: 1949624 - RNA, 19 nt, Artificial Sequence
  Description of Artificial Sequence: Synthetic oligonucleotide
uguaauggcuuuccguaga

SEQ ID NO: 1949625 - RNA, 19 nt, Artificial Sequence
  Description of Artificial Sequence: Synthetic oligonucleotide
uaaugauagacuucuguuu

SEQ ID NO: 1949626 - RNA, 19 nt, Artificial Sequence
  Description of Artificial Sequence: Synthetic oligonucleotide
uuucucucggacuacuugu

SEQ ID NO: 1949627 - RNA, 19 nt, Artificial Sequence
  Description of Artificial Sequence: Synthetic oligonucleotide
uucucagucgccaccgucc

SEQ ID NO: 1949628 - RNA, 19 nt, Artificial Sequence
  Description of Artificial Sequence: Synthetic oligonucleotide
ugucccucaucuauuaggu

SEQ ID NO: 1949629 - RNA, 19 nt, Artificial Sequence
  Description of Artificial Sequence: Synthetic oligonucleotide
ugcggaacuuugaacaucu

SEQ ID NO: 1949630 - RNA, 19 nt, Artificial Sequence
  Description of Artificial Sequence: Synthetic oligonucleotide
aaacauuuauccacuucag

SEQ ID NO: 1949631 - RNA, 19 nt, Artificial Sequence
  Description of Artificial Sequence: Synthetic oligonucleotide
uauuccaucaaugguugug

SEQ ID NO: 1949632 - RNA, 19 nt, Artificial Sequence
  Description of Artificial Sequence: Synthetic oligonucleotide
ucgacugacauaguugcag

SEQ ID NO: 1949633 - RNA, 19 nt, Artificial Sequence
  Description of Artificial Sequence: Synthetic oligonucleotide
uuuagugcugacagaugug

SEQ ID NO: 1949634 - RNA, 19 nt, Artificial Sequence
  Description of Artificial Sequence: Synthetic oligonucleotide
uuugacaugcagugaauau

SEQ ID NO: 1949635 - RNA, 19 nt, Artificial Sequence
  Description of Artificial Sequence: Synthetic oligonucleotide
caagauaagcuauuaccuc

SEQ ID NO: 1949636 - RNA, 19 nt, Artificial Sequence
  Description of Artificial Sequence: Synthetic oligonucleotide
uuauucgacugacauaguu

SEQ ID NO: 1949637 - RNA, 19 nt, Artificial Sequence
  Description of Artificial Sequence: Synthetic oligonucleotide
uguagguauugcccggucc

SEQ ID NO: 1949638 - RNA, 19 nt, Artificial Sequence
  Description of Artificial Sequence: Synthetic oligonucleotide
aagaucagcuccuucuaaa

SEQ ID NO: 1949639 - RNA, 19 nt, Artificial Sequence
  Description of Artificial Sequence: Synthetic oligonucleotide
ugguauuaccccagcaaug

SEQ ID NO: 1949640 - RNA, 19 nt, Artificial Sequence
  Description of Artificial Sequence: Synthetic oligonucleotide
ucuguuuaucagaaagguc

SEQ ID NO: 1949641 - RNA, 19 nt, Artificial Sequence
  Description of Artificial Sequence: Synthetic oligonucleotide
ucguuuucuacuaccacau

SEQ ID NO: 1949642 - RNA, 19 nt, Artificial Sequence
  Description of Artificial Sequence: Synthetic oligonucleotide
uggcccauagaauaagaga

SEQ ID NO: 1949643 - RNA, 19 nt, Artificial Sequence
  Description of Artificial Sequence: Synthetic oligonucleotide
uauccaguaaucgcucccg

SEQ ID NO: 1949644 - RNA, 19 nt, Artificial Sequence
  Description of Artificial Sequence: Synthetic oligonucleotide
augcagugaauauuccauc

SEQ ID NO: 1949645 - RNA, 19 nt, Artificial Sequence
  Description of Artificial Sequence: Synthetic oligonucleotide
uccacguucaucagaugca

SEQ ID NO: 1949646 - RNA, 19 nt, Artificial Sequence
  Description of Artificial Sequence: Synthetic oligonucleotide
ugugaucacaucccucaug

SEQ ID NO: 1949647 - RNA, 19 nt, Artificial Sequence
  Description of Artificial Sequence: Synthetic oligonucleotide
cugaacgacuuccugacac

SEQ ID NO: 1949648 - RNA, 19 nt, Artificial Sequence
  Description of Artificial Sequence: Synthetic oligonucleotide
uauggguggucuaacaauu

SEQ ID NO: 1949649 - RNA, 19 nt, Artificial Sequence
  Description of Artificial Sequence: Synthetic oligonucleotide
ugaaugcggaacuuugaac

SEQ ID NO: 1949650 - RNA, 19 nt, Artificial Sequence
  Description of Artificial Sequence: Synthetic oligonucleotide
ucucggacuacuuguauuc

SEQ ID NO: 1949651 - RNA, 19 nt, Artificial Sequence
  Description of Artificial Sequence: Synthetic oligonucleotide
ggugaauugugguuuagug

SEQ ID NO: 1949652 - RNA, 19 nt, Artificial Sequence
  Description of Artificial Sequence: Synthetic oligonucleotide
aaugcggaacuuugaacau

SEQ ID NO: 1949653 - RNA, 19 nt, Artificial Sequence
  Description of Artificial Sequence: Synthetic oligonucleotide
cuuaaucgaaagaguucgg

SEQ ID NO: 1949654 - RNA, 19 nt, Artificial Sequence
  Description of Artificial Sequence: Synthetic oligonucleotide
uuuccguagaucuccuucu

SEQ ID NO: 1949655 - RNA, 19 nt, Artificial Sequence
  Description of Artificial Sequence: Synthetic oligonucleotide
acaaucuuaaaggguggac

SEQ ID NO: 1949656 - RNA, 19 nt, Artificial Sequence
  Description of Artificial Sequence: Synthetic oligonucleotide
cuacuuguauuccacguuc

SEQ ID NO: 1949657 - RNA, 19 nt, Artificial Sequence
  Description of Artificial Sequence: Synthetic oligonucleotide
cuaacaauucugagucagc

SEQ ID NO: 1949658 - RNA, 19 nt, Artificial Sequence
  Description of Artificial Sequence: Synthetic oligonucleotide
caucacaguugcacaaagg

SEQ ID NO: 1949659 - RNA, 19 nt, Artificial Sequence
  Description of Artificial Sequence: Synthetic oligonucleotide
uuuuccaugguacgucuua

SEQ ID NO: 1949660 - RNA, 19 nt, Artificial Sequence
  Description of Artificial Sequence: Synthetic oligonucleotide
agaacccuuaaucgaaaga

SEQ ID NO: 1949661 - RNA, 19 nt, Artificial Sequence
  Description of Artificial Sequence: Synthetic oligonucleotide
aauugugguuuagugcuga

SEQ ID NO: 1949662 - RNA, 19 nt, Artificial Sequence
  Description of Artificial Sequence: Synthetic oligonucleotide
gagauuaggaagaucagcu

SEQ ID NO: 1949663 - RNA, 19 nt, Artificial Sequence
  Description of Artificial Sequence: Synthetic oligonucleotide
caaaagagccacuuugaca

SEQ ID NO: 1949664 - RNA, 19 nt, Artificial Sequence
  Description of Artificial Sequence: Synthetic oligonucleotide
uaacucaagaacccuuaau

SEQ ID NO: 1949665 - RNA, 19 nt, Artificial Sequence
  Description of Artificial Sequence: Synthetic oligonucleotide
ugguuuagugcugacagau

SEQ ID NO: 1949666 - RNA, 19 nt, Artificial Sequence
  Description of Artificial Sequence: Synthetic oligonucleotide
auaagagauuaggaagauc

SEQ ID NO: 1949667 - RNA, 19 nt, Artificial Sequence
  Description of Artificial Sequence: Synthetic oligonucleotide
uguggcugguauuacccca

SEQ ID NO: 1949668 - RNA, 19 nt, Artificial Sequence
  Description of Artificial Sequence: Synthetic oligonucleotide
ucaugacuuccuuuccacc

SEQ ID NO: 1949669 - RNA, 19 nt, Artificial Sequence
  Description of Artificial Sequence: Synthetic oligonucleotide
guugcacaaaggcucauca

SEQ ID NO: 1949670 - RNA, 19 nt, Artificial Sequence
  Description of Artificial Sequence: Synthetic oligonucleotide
cuuuccacccguaagucga

SEQ ID NO: 1949671 - RNA, 19 nt, Artificial Sequence
  Description of Artificial Sequence: Synthetic oligonucleotide
cucaugacuuccuuuccac

SEQ ID NO: 1949672 - RNA, 19 nt, Artificial Sequence
  Description of Artificial Sequence: Synthetic oligonucleotide
guuuagugcugacagaugu

SEQ ID NO: 1949673 - RNA, 19 nt, Artificial Sequence
  Description of Artificial Sequence: Synthetic oligonucleotide
auccaguaaucgcucccgc

SEQ ID NO: 1949674 - RNA, 19 nt, Artificial Sequence
  Description of Artificial Sequence: Synthetic oligonucleotide
auugugguuuagugcugac

SEQ ID NO: 1949675 - RNA, 19 nt, Artificial Sequence
  Description of Artificial Sequence: Synthetic oligonucleotide
cagcaauauccaguaaucg

SEQ ID NO: 1949676 - RNA, 19 nt, Artificial Sequence
  Description of Artificial Sequence: Synthetic oligonucleotide
cuauuagguccuuuaccac

SEQ ID NO: 1949677 - RNA, 19 nt, Artificial Sequence
  Description of Artificial Sequence: Synthetic oligonucleotide
gccaccgucccucagaugc

SEQ ID NO: 1949678 - RNA, 19 nt, Artificial Sequence
  Description of Artificial Sequence: Synthetic oligonucleotide
uauugcccgguccuuggug

SEQ ID NO: 1949679 - RNA, 19 nt, Artificial Sequence
  Description of Artificial Sequence: Synthetic oligonucleotide
gauaagcuauuaccucaug

SEQ ID NO: 1949680 - RNA, 19 nt, Artificial Sequence
  Description of Artificial Sequence: Synthetic oligonucleotide
acgacuuccugacacaguu

SEQ ID NO: 1949681 - RNA, 19 nt, Artificial Sequence
  Description of Artificial Sequence: Synthetic oligonucleotide
ccuuuuagaaaaugccugc

SEQ ID NO: 1949682 - RNA, 19 nt, Artificial Sequence
  Description of Artificial Sequence: Synthetic oligonucleotide
aaaggcucaucaacugcag

SEQ ID NO: 1949683 - RNA, 19 nt, Artificial Sequence
  Description of Artificial Sequence: Synthetic oligonucleotide
ccaugguacgucuuaaagc

SEQ ID NO: 1949684 - RNA, 19 nt, Artificial Sequence
  Description of Artificial Sequence: Synthetic oligonucleotide
ucauagaaucugcuucauc

SEQ ID NO: 1949685 - RNA, 19 nt, Artificial Sequence
  Description of Artificial Sequence: Synthetic oligonucleotide
guucaauuauucgacugac

SEQ ID NO: 1949686 - RNA, 19 nt, Artificial Sequence
  Description of Artificial Sequence: Synthetic oligonucleotide
uuguauggguggucuaaca

SEQ ID NO: 1949687 - RNA, 19 nt, Artificial Sequence
  Description of Artificial Sequence: Synthetic oligonucleotide
uggcuuuccguagaucucc

SEQ ID NO: 1949688 - RNA, 19 nt, Artificial Sequence
  Description of Artificial Sequence: Synthetic oligonucleotide
acgucuuaaagcugccuga

SEQ ID NO: 1949689 - RNA, 19 nt, Artificial Sequence
  Description of Artificial Sequence: Synthetic oligonucleotide
ucggacuacuuguauucca

SEQ ID NO: 1949690 - RNA, 19 nt, Artificial Sequence
  Description of Artificial Sequence: Synthetic oligonucleotide
caaucuuaaaggguggaca

SEQ ID NO: 1949691 - RNA, 19 nt, Artificial Sequence
  Description of Artificial Sequence: Synthetic oligonucleotide
cuuaaaggguggacauggc

SEQ ID NO: 1949692 - RNA, 19 nt, Artificial Sequence
  Description of Artificial Sequence: Synthetic oligonucleotide
uugacaugcagugaauauu

SEQ ID NO: 1949693 - RNA, 19 nt, Artificial Sequence
  Description of Artificial Sequence: Synthetic oligonucleotide
acuacuuguauuccacguu

SEQ ID NO: 1949694 - RNA, 19 nt, Artificial Sequence
  Description of Artificial Sequence: Synthetic oligonucleotide
aacccuuaaucgaaagagu

SEQ ID NO: 1949695 - RNA, 19 nt, Artificial Sequence
  Description of Artificial Sequence: Synthetic oligonucleotide
gcugccaaaauuguggaug

SEQ ID NO: 1949696 - RNA, 19 nt, Artificial Sequence
  Description of Artificial Sequence: Synthetic oligonucleotide
cuacuaccacaucaugaag

SEQ ID NO: 1949697 - RNA, 19 nt, Artificial Sequence
  Description of Artificial Sequence: Synthetic oligonucleotide
uuuguauggguggucuaac

SEQ ID NO: 1949698 - RNA, 19 nt, Artificial Sequence
  Description of Artificial Sequence: Synthetic oligonucleotide
ugauagacuucuguuuauc

SEQ ID NO: 1949699 - RNA, 19 nt, Artificial Sequence
  Description of Artificial Sequence: Synthetic oligonucleotide
aucgcucccgcugaaugcg

SEQ ID NO: 1949700 - RNA, 19 nt, Artificial Sequence
  Description of Artificial Sequence: Synthetic oligonucleotide
aucuagaagugagggguuc

SEQ ID NO: 1949701 - RNA, 19 nt, Artificial Sequence
  Description of Artificial Sequence: Synthetic oligonucleotide
aguugcacaaaggcucauc

SEQ ID NO: 1949702 - RNA, 19 nt, Artificial Sequence
  Description of Artificial Sequence: Synthetic oligonucleotide
aacagcugcuugucccuca

SEQ ID NO: 1949703 - RNA, 19 nt, Artificial Sequence
  Description of Artificial Sequence: Synthetic oligonucleotide
uuuccacccguaagucgag

SEQ ID NO: 1949704 - RNA, 19 nt, Artificial Sequence
  Description of Artificial Sequence: Synthetic oligonucleotide
gacuacuuguauuccacgu

SEQ ID NO: 1949705 - RNA, 19 nt, Artificial Sequence
  Description of Artificial Sequence: Synthetic oligonucleotide
uccaguaaucgcucccgcu

SEQ ID NO: 1949706 - RNA, 19 nt, Artificial Sequence
  Description of Artificial Sequence: Synthetic oligonucleotide
ugccccgucugcuaaacau

SEQ ID NO: 1949707 - RNA, 19 nt, Artificial Sequence
  Description of Artificial Sequence: Synthetic oligonucleotide
cacuuugacaugcagugaa

SEQ ID NO: 1949708 - RNA, 19 nt, Artificial Sequence
  Description of Artificial Sequence: Synthetic oligonucleotide
uagaucuccuucugauacu

SEQ ID NO: 1949709 - RNA, 19 nt, Artificial Sequence
  Description of Artificial Sequence: Synthetic oligonucleotide
uuaccucauggcuaauuuu

SEQ ID NO: 1949710 - RNA, 19 nt, Artificial Sequence
  Description of Artificial Sequence: Synthetic oligonucleotide
ggucauagaaucugcuuca

SEQ ID NO: 1949711 - RNA, 19 nt, Artificial Sequence
  Description of Artificial Sequence: Synthetic oligonucleotide
aagucgaguagcacuuuga

SEQ ID NO: 1949712 - RNA, 19 nt, Artificial Sequence
  Description of Artificial Sequence: Synthetic oligonucleotide
ucugaacgacuuccugaca

SEQ ID NO: 1949713 - RNA, 19 nt, Artificial Sequence
  Description of Artificial Sequence: Synthetic oligonucleotide
uucgacugacauaguugca

SEQ ID NO: 1949714 - RNA, 19 nt, Artificial Sequence
  Description of Artificial Sequence: Synthetic oligonucleotide
ggacuacuuguauuccacg

SEQ ID NO: 1949715 - RNA, 19 nt, Artificial Sequence
  Description of Artificial Sequence: Synthetic oligonucleotide
uugucaaaagagccacuuu

SEQ ID NO: 1949716 - RNA, 19 nt, Artificial Sequence
  Description of Artificial Sequence: Synthetic oligonucleotide
ggcccaaagaguucucuag

SEQ ID NO: 1949717 - RNA, 19 nt, Artificial Sequence
  Description of Artificial Sequence: Synthetic oligonucleotide
gguauugcccgguccuugg

SEQ ID NO: 1949718 - RNA, 19 nt, Artificial Sequence
  Description of Artificial Sequence: Synthetic oligonucleotide
augauagacuucuguuuau

SEQ ID NO: 1949719 - RNA, 19 nt, Artificial Sequence
  Description of Artificial Sequence: Synthetic oligonucleotide
gaaaaugccugcaugguuu

SEQ ID NO: 1949720 - RNA, 19 nt, Artificial Sequence
  Description of Artificial Sequence: Synthetic oligonucleotide
auuuaacucaagaacccuu

SEQ ID NO: 1949721 - RNA, 19 nt, Artificial Sequence
  Description of Artificial Sequence: Synthetic oligonucleotide
acaguuaacugagcaaaau

SEQ ID NO: 1949722 - RNA, 19 nt, Artificial Sequence
  Description of Artificial Sequence: Synthetic oligonucleotide
uccuuggugaauugugguu

SEQ ID NO: 1949723 - RNA, 19 nt, Artificial Sequence
  Description of Artificial Sequence: Synthetic oligonucleotide
aggucuucguuuucuacua

SEQ ID NO: 1949724 - RNA, 19 nt, Artificial Sequence
  Description of Artificial Sequence: Synthetic oligonucleotide
gucaaaagagccacuuuga

SEQ ID NO: 1949725 - RNA, 19 nt, Artificial Sequence
  Description of Artificial Sequence: Synthetic oligonucleotide
acuuguauuccacguucau

SEQ ID NO: 1949726 - RNA, 19 nt, Artificial Sequence
  Description of Artificial Sequence: Synthetic oligonucleotide
ucaucaacugcagguguuc

SEQ ID NO: 1949727 - RNA, 19 nt, Artificial Sequence
  Description of Artificial Sequence: Synthetic oligonucleotide
cuugucccucaucuauuag

SEQ ID NO: 1949728 - RNA, 19 nt, Artificial Sequence
  Description of Artificial Sequence: Synthetic oligonucleotide
ucccucagaugcugccucg

SEQ ID NO: 1949729 - RNA, 19 nt, Artificial Sequence
  Description of Artificial Sequence: Synthetic oligonucleotide
guggcccauagaauaagag

SEQ ID NO: 1949730 - RNA, 19 nt, Artificial Sequence
  Description of Artificial Sequence: Synthetic oligonucleotide
ucccgcugaaugcggaacu

SEQ ID NO: 1949731 - RNA, 19 nt, Artificial Sequence
  Description of Artificial Sequence: Synthetic oligonucleotide
augcggaacuuugaacauc

SEQ ID NO: 1949732 - RNA, 19 nt, Artificial Sequence
  Description of Artificial Sequence: Synthetic oligonucleotide
gaauugugguuuagugcug

SEQ ID NO: 1949733 - RNA, 19 nt, Artificial Sequence
  Description of Artificial Sequence: Synthetic oligonucleotide
ucucucggacuacuuguau

SEQ ID NO: 1949734 - RNA, 19 nt, Artificial Sequence
  Description of Artificial Sequence: Synthetic oligonucleotide
uggugaauugugguuuagu

SEQ ID NO: 1949735 - RNA, 19 nt, Artificial Sequence
  Description of Artificial Sequence: Synthetic oligonucleotide
ccagcaaugucugugauca

SEQ ID NO: 1949736 - RNA, 19 nt, Artificial Sequence
  Description of Artificial Sequence: Synthetic oligonucleotide
caaggaacuggcuugacuu

SEQ ID NO: 1949737 - RNA, 19 nt, Artificial Sequence
  Description of Artificial Sequence: Synthetic oligonucleotide
cacccguaagucgaguagc

SEQ ID NO: 1949738 - RNA, 19 nt, Artificial Sequence
  Description of Artificial Sequence: Synthetic oligonucleotide
gcagguguucaucugcccc

SEQ ID NO: 1949739 - RNA, 19 nt, Artificial Sequence
  Description of Artificial Sequence: Synthetic oligonucleotide
aguucgggcccaaagaguu

SEQ ID NO: 1949740 - RNA, 19 nt, Artificial Sequence
  Description of Artificial Sequence: Synthetic oligonucleotide
cugaaugcggaacuuugaa

SEQ ID NO: 1949741 - RNA, 19 nt, Artificial Sequence
  Description of Artificial Sequence: Synthetic oligonucleotide
ucagucgccaccgucccuc

SEQ ID NO: 1949742 - RNA, 19 nt, Artificial Sequence
  Description of Artificial Sequence: Synthetic oligonucleotide
aucuuaaaggguggacaug

SEQ ID NO: 1949743 - RNA, 19 nt, Artificial Sequence
  Description of Artificial Sequence: Synthetic oligonucleotide
caauuauucgacugacaua

SEQ ID NO: 1949744 - RNA, 19 nt, Artificial Sequence
  Description of Artificial Sequence: Synthetic oligonucleotide
guagguauugcccgguccu

SEQ ID NO: 1949745 - RNA, 19 nt, Artificial Sequence
  Description of Artificial Sequence: Synthetic oligonucleotide
agauaagcuauuaccucau

SEQ ID NO: 1949746 - RNA, 19 nt, Artificial Sequence
  Description of Artificial Sequence: Synthetic oligonucleotide
ugcuugucccucaucuauu

SEQ ID NO: 1949747 - RNA, 19 nt, Artificial Sequence
  Description of Artificial Sequence: Synthetic oligonucleotide
ugaucacaucccucaugac

SEQ ID NO: 1949748 - RNA, 19 nt, Artificial Sequence
  Description of Artificial Sequence: Synthetic oligonucleotide
gguggucuaacaauucuga

SEQ ID NO: 1949749 - RNA, 19 nt, Artificial Sequence
  Description of Artificial Sequence: Synthetic oligonucleotide
ccaguaaucgcucccgcug

SEQ ID NO: 1949750 - RNA, 19 nt, Artificial Sequence
  Description of Artificial Sequence: Synthetic oligonucleotide
acuuccugacacaguuaac

SEQ ID NO: 1949751 - RNA, 19 nt, Artificial Sequence
  Description of Artificial Sequence: Synthetic oligonucleotide
cucggacuacuuguauucc

SEQ ID NO: 1949752 - RNA, 19 nt, Artificial Sequence
  Description of Artificial Sequence: Synthetic oligonucleotide
ucgaaagaguucgggccca

SEQ ID NO: 1949753 - RNA, 19 nt, Artificial Sequence
  Description of Artificial Sequence: Synthetic oligonucleotide
uccacccguaagucgagua

SEQ ID NO: 1949754 - RNA, 19 nt, Artificial Sequence
  Description of Artificial Sequence: Synthetic oligonucleotide
acaguugcacaaaggcuca

SEQ ID NO: 1949755 - RNA, 19 nt, Artificial Sequence
  Description of Artificial Sequence: Synthetic oligonucleotide
gcugguauuaccccagcaa

SEQ ID NO: 1949756 - RNA, 19 nt, Artificial Sequence
  Description of Artificial Sequence: Synthetic oligonucleotide
guagcacuuugaagaaaug

SEQ ID NO: 1949757 - RNA, 19 nt, Artificial Sequence
  Description of Artificial Sequence: Synthetic oligonucleotide
acacauuuuggacgauauu

SEQ ID NO: 1949758 - RNA, 19 nt, Artificial Sequence
  Description of Artificial Sequence: Synthetic oligonucleotide
ucgcucccgcugaaugcgg

SEQ ID NO: 1949759 - RNA, 19 nt, Artificial Sequence
  Description of Artificial Sequence: Synthetic oligonucleotide
aacgacuuccugacacagu

SEQ ID NO: 1949760 - RNA, 19 nt, Artificial Sequence
  Description of Artificial Sequence: Synthetic oligonucleotide
cuaccacaucaugaaguug

SEQ ID NO: 1949761 - RNA, 19 nt, Artificial Sequence
  Description of Artificial Sequence: Synthetic oligonucleotide
uggcuaauuuugacauuuu

SEQ ID NO: 1949762 - RNA, 19 nt, Artificial Sequence
  Description of Artificial Sequence: Synthetic oligonucleotide
caagaacccuuaaucgaaa

SEQ ID NO: 1949763 - RNA, 19 nt, Artificial Sequence
  Description of Artificial Sequence: Synthetic oligonucleotide
gucuaacaauucugaguca

SEQ ID NO: 1949764 - RNA, 19 nt, Artificial Sequence
  Description of Artificial Sequence: Synthetic oligonucleotide
agguauugcccgguccuug

SEQ ID NO: 1949765 - RNA, 19 nt, Artificial Sequence
  Description of Artificial Sequence: Synthetic oligonucleotide
ggguggucuaacaauucug

SEQ ID NO: 1949766 - RNA, 19 nt, Artificial Sequence
  Description of Artificial Sequence: Synthetic oligonucleotide
gguauuaccccagcaaugu

SEQ ID NO: 1949767 - RNA, 19 nt, Artificial Sequence
  Description of Artificial Sequence: Synthetic oligonucleotide
gugguuuagugcugacaga

SEQ ID NO: 1949768 - RNA, 19 nt, Artificial Sequence
  Description of Artificial Sequence: Synthetic oligonucleotide
accucauggcuaauuuuga

SEQ ID NO: 1949769 - RNA, 19 nt, Artificial Sequence
  Description of Artificial Sequence: Synthetic oligonucleotide
ucgccaccgucccucagau

SEQ ID NO: 1949770 - RNA, 19 nt, Artificial Sequence
  Description of Artificial Sequence: Synthetic oligonucleotide
cugguauuaccccagcaau

SEQ ID NO: 1949771 - RNA, 19 nt, Artificial Sequence
  Description of Artificial Sequence: Synthetic oligonucleotide
cacacauuuuggacgauau

SEQ ID NO: 1949772 - RNA, 19 nt, Artificial Sequence
  Description of Artificial Sequence: Synthetic oligonucleotide
caguaaucgcucccgcuga

SEQ ID NO: 1949773 - RNA, 19 nt, Artificial Sequence
  Description of Artificial Sequence: Synthetic oligonucleotide
cagaugcauuuaacucaag

SEQ ID NO: 1949774 - RNA, 19 nt, Artificial Sequence
  Description of Artificial Sequence: Synthetic oligonucleotide
ucugccccgucugcuaaac

SEQ ID NO: 1949775 - RNA, 19 nt, Artificial Sequence
  Description of Artificial Sequence: Synthetic oligonucleotide
cugccaaaauuguggaugu

SEQ ID NO: 1949776 - RNA, 19 nt, Artificial Sequence
  Description of Artificial Sequence: Synthetic oligonucleotide
accgucccucagaugcugc

SEQ ID NO: 1949777 - RNA, 19 nt, Artificial Sequence
  Description of Artificial Sequence: Synthetic oligonucleotide
guacugcaaccacuucuuc

SEQ ID NO: 1949778 - RNA, 19 nt, Artificial Sequence
  Description of Artificial Sequence: Synthetic oligonucleotide
gguuuagugcugacagaug

SEQ ID NO: 1949779 - RNA, 19 nt, Artificial Sequence
  Description of Artificial Sequence: Synthetic oligonucleotide
cuguagguauugcccgguc

SEQ ID NO: 1949780 - RNA, 19 nt, Artificial Sequence
  Description of Artificial Sequence: Synthetic oligonucleotide
gucgccaccgucccucaga

SEQ ID NO: 1949781 - RNA, 19 nt, Artificial Sequence
  Description of Artificial Sequence: Synthetic oligonucleotide
agcugaggucauagaaucu

SEQ ID NO: 1949782 - RNA, 19 nt, Artificial Sequence
  Description of Artificial Sequence: Synthetic oligonucleotide
ccacccguaagucgaguag

SEQ ID NO: 1949783 - RNA, 19 nt, Artificial Sequence
  Description of Artificial Sequence: Synthetic oligonucleotide
auuauucgacugacauagu

SEQ ID NO: 1949784 - RNA, 19 nt, Artificial Sequence
  Description of Artificial Sequence: Synthetic oligonucleotide
acccguaagucgaguagca

SEQ ID NO: 1949785 - RNA, 19 nt, Artificial Sequence
  Description of Artificial Sequence: Synthetic oligonucleotide
gucccucaucuauuagguc

SEQ ID NO: 1949786 - RNA, 19 nt, Artificial Sequence
  Description of Artificial Sequence: Synthetic oligonucleotide
gguacgucuuaaagcugcc

SEQ ID NO: 1949787 - RNA, 19 nt, Artificial Sequence
  Description of Artificial Sequence: Synthetic oligonucleotide
guaauggcuuuccguagau

SEQ ID NO: 1949788 - RNA, 19 nt, Artificial Sequence
  Description of Artificial Sequence: Synthetic oligonucleotide
uagguauugcccgguccuu

SEQ ID NO: 1949789 - RNA, 19 nt, Artificial Sequence
  Description of Artificial Sequence: Synthetic oligonucleotide
agucgccaccgucccucag

SEQ ID NO: 1949790 - RNA, 19 nt, Artificial Sequence
  Description of Artificial Sequence: Synthetic oligonucleotide
uugcccgguccuuggugaa

SEQ ID NO: 1949791 - RNA, 19 nt, Artificial Sequence
  Description of Artificial Sequence: Synthetic oligonucleotide
gcugaaugcggaacuuuga

SEQ ID NO: 1949792 - RNA, 19 nt, Artificial Sequence
  Description of Artificial Sequence: Synthetic oligonucleotide
uuccacccguaagucgagu

SEQ ID NO: 1949793 - RNA, 19 nt, Artificial Sequence
  Description of Artificial Sequence: Synthetic oligonucleotide
cugccugagcagcugaggu

SEQ ID NO: 1949794 - RNA, 19 nt, Artificial Sequence
  Description of Artificial Sequence: Synthetic oligonucleotide
cccucaugacuuccuuucc

SEQ ID NO: 1949795 - RNA, 19 nt, Artificial Sequence
  Description of Artificial Sequence: Synthetic oligonucleotide
cgucugcuaaacauuuauc

SEQ ID NO: 1949796 - RNA, 19 nt, Artificial Sequence
  Description of Artificial Sequence: Synthetic oligonucleotide
gaaagaguucgggcccaaa

SEQ ID NO: 1949797 - RNA, 19 nt, Artificial Sequence
  Description of Artificial Sequence: Synthetic oligonucleotide
ggcugguauuaccccagca

SEQ ID NO: 1949798 - RNA, 19 nt, Artificial Sequence
  Description of Artificial Sequence: Synthetic oligonucleotide
cgguccuuggugaauugug

SEQ ID NO: 1949799 - RNA, 19 nt, Artificial Sequence
  Description of Artificial Sequence: Synthetic oligonucleotide
gcuugucccucaucuauua

SEQ ID NO: 1949800 - RNA, 19 nt, Artificial Sequence
  Description of Artificial Sequence: Synthetic oligonucleotide
ucgggcccaaagaguucuc

SEQ ID NO: 1949801 - RNA, 19 nt, Artificial Sequence
  Description of Artificial Sequence: Synthetic oligonucleotide
cgucuuaaagcugccugag

SEQ ID NO: 1949802 - RNA, 19 nt, Artificial Sequence
  Description of Artificial Sequence: Synthetic oligonucleotide
ccucaugacuuccuuucca

SEQ ID NO: 1949803 - RNA, 19 nt, Artificial Sequence
  Description of Artificial Sequence: Synthetic oligonucleotide
caccgucccucagaugcug

SEQ ID NO: 1949804 - RNA, 19 nt, Artificial Sequence
  Description of Artificial Sequence: Synthetic oligonucleotide
ccguaagucgaguagcacu

SEQ ID NO: 1949805 - RNA, 19 nt, Artificial Sequence
  Description of Artificial Sequence: Synthetic oligonucleotide
gggguucaauuauucgacu

SEQ ID NO: 1949806 - RNA, 19 nt, Artificial Sequence
  Description of Artificial Sequence: Synthetic oligonucleotide
cccaaagaguucucuagcu

SEQ ID NO: 1949807 - RNA, 19 nt, Artificial Sequence
  Description of Artificial Sequence: Synthetic oligonucleotide
guauugcccgguccuuggu

SEQ ID NO: 1949808 - RNA, 19 nt, Artificial Sequence
  Description of Artificial Sequence: Synthetic oligonucleotide
cauggcuaauuuugacauu

SEQ ID NO: 1949809 - RNA, 19 nt, Artificial Sequence
  Description of Artificial Sequence: Synthetic oligonucleotide
gucauagaaucugcuucau

SEQ ID NO: 1949810 - RNA, 19 nt, Artificial Sequence
  Description of Artificial Sequence: Synthetic oligonucleotide
gggcccaaagaguucucua

SEQ ID NO: 1949811 - RNA, 19 nt, Artificial Sequence
  Description of Artificial Sequence: Synthetic oligonucleotide
ugcccgguccuuggugaau

SEQ ID NO: 1949812 - RNA, 19 nt, Artificial Sequence
  Description of Artificial Sequence: Synthetic oligonucleotide
cccguaagucgaguagcac

SEQ ID NO: 1949813 - RNA, 19 nt, Artificial Sequence
  Description of Artificial Sequence: Synthetic oligonucleotide
cccucaucuauuagguccu

SEQ ID NO: 1949814 - RNA, 19 nt, Artificial Sequence
  Description of Artificial Sequence: Synthetic oligonucleotide
cguaagucgaguagcacuu

SEQ ID NO: 1949815 - RNA, 19 nt, Artificial Sequence
  Description of Artificial Sequence: Synthetic oligonucleotide
ccaaggaacuggcuugacu

SEQ ID NO: 1949816 - RNA, 19 nt, Artificial Sequence
  Description of Artificial Sequence: Synthetic oligonucleotide
gguguucaucugccccguc

SEQ ID NO: 1949817 - RNA, 19 nt, Artificial Sequence
  Description of Artificial Sequence: Synthetic oligonucleotide
cugccccgucugcuaaaca

SEQ ID NO: 1949818 - RNA, 19 nt, Artificial Sequence
  Description of Artificial Sequence: Synthetic oligonucleotide
cagucgccaccgucccuca

SEQ ID NO: 1949819 - RNA, 19 nt, Artificial Sequence
  Description of Artificial Sequence: Synthetic oligonucleotide
guaagucgaguagcacuuu

SEQ ID NO: 1949820 - RNA, 19 nt, Artificial Sequence
  Description of Artificial Sequence: Synthetic oligonucleotide
cccgguccuuggugaauug

SEQ ID NO: 1949821 - RNA, 19 nt, Artificial Sequence
  Description of Artificial Sequence: Synthetic oligonucleotide
gcucccgcugaaugcggaa

SEQ ID NO: 1949822 - RNA, 19 nt, Artificial Sequence
  Description of Artificial Sequence: Synthetic oligonucleotide
gcccauagaauaagagauu

SEQ ID NO: 1949823 - RNA, 19 nt, Artificial Sequence
  Description of Artificial Sequence: Synthetic oligonucleotide
ggcuuuccguagaucuccu

SEQ ID NO: 1949824 - RNA, 19 nt, Artificial Sequence
  Description of Artificial Sequence: Synthetic oligonucleotide
gcuucccaucugaacgacu

SEQ ID NO: 1949825 - RNA, 19 nt, Artificial Sequence
  Description of Artificial Sequence: Synthetic oligonucleotide
cccgucugcuaaacauuua

SEQ ID NO: 1949826 - RNA, 19 nt, Artificial Sequence
  Description of Artificial Sequence: Synthetic oligonucleotide
cuauuaccucauggcuaau

SEQ ID NO: 1949827 - RNA, 19 nt, Artificial Sequence
  Description of Artificial Sequence: Synthetic oligonucleotide
gcugacagaugugccuuuu

SEQ ID NO: 1949828 - RNA, 19 nt, Artificial Sequence
  Description of Artificial Sequence: Synthetic oligonucleotide
caguugcacaaaggcucau

SEQ ID NO: 1949829 - RNA, 19 nt, Artificial Sequence
  Description of Artificial Sequence: Synthetic oligonucleotide
cgcucccgcugaaugcgga

SEQ ID NO: 1949830 - RNA, 19 nt, Artificial Sequence
  Description of Artificial Sequence: Synthetic oligonucleotide
gcggaacuuugaacaucua

SEQ ID NO: 1949831 - RNA, 19 nt, Artificial Sequence
  Description of Artificial Sequence: Synthetic oligonucleotide
ccaccgucccucagaugcu

SEQ ID NO: 1949832 - RNA, 19 nt, Artificial Sequence
  Description of Artificial Sequence: Synthetic oligonucleotide
ccgguccuuggugaauugu

SEQ ID NO: 1949833 - RNA, 19 nt, Artificial Sequence
  Description of Artificial Sequence: Synthetic oligonucleotide
cgccaccgucccucagaug

SEQ ID NO: 1949834 - RNA, 19 nt, Artificial Sequence
  Description of Artificial Sequence: Synthetic oligonucleotide
ccgcugaaugcggaacuuu

SEQ ID NO: 1949835 - RNA, 19 nt, Artificial Sequence
  Description of Artificial Sequence: Synthetic oligonucleotide
cgggcccaaagaguucucu

SEQ ID NO: 1949836 - RNA, 19 nt, Artificial Sequence
  Description of Artificial Sequence: Synthetic oligonucleotide
aaguucauagcauagaggu

SEQ ID NO: 1949837 - RNA, 19 nt, Artificial Sequence
  Description of Artificial Sequence: Synthetic oligonucleotide
aaaccaaccuuucagaaug

SEQ ID NO: 1949838 - RNA, 19 nt, Artificial Sequence
  Description of Artificial Sequence: Synthetic oligonucleotide
uauuuucuagcuuugaucu

SEQ ID NO: 1949839 - RNA, 19 nt, Artificial Sequence
  Description of Artificial Sequence: Synthetic oligonucleotide
uuuucaguaagaauccugc

SEQ ID NO: 1949840 - RNA, 19 nt, Artificial Sequence
  Description of Artificial Sequence: Synthetic oligonucleotide
ugaaauaucacgaggucug

SEQ ID NO: 1949841 - RNA, 19 nt, Artificial Sequence
  Description of Artificial Sequence: Synthetic oligonucleotide
ucaguaagaauccugcuug

SEQ ID NO: 1949842 - RNA, 19 nt, Artificial Sequence
  Description of Artificial Sequence: Synthetic oligonucleotide
agaaaggccaaauuuguuc

SEQ ID NO: 1949843 - RNA, 19 nt, Artificial Sequence
  Description of Artificial Sequence: Synthetic oligonucleotide
auagaguggugucucaucc

SEQ ID NO: 1949844 - RNA, 19 nt, Artificial Sequence
  Description of Artificial Sequence: Synthetic oligonucleotide
aauaucacgaggucugcag

SEQ ID NO: 1949845 - RNA, 19 nt, Artificial Sequence
  Description of Artificial Sequence: Synthetic oligonucleotide
aaugaugggguuaaaguuc

SEQ ID NO: 1949846 - RNA, 19 nt, Artificial Sequence
  Description of Artificial Sequence: Synthetic oligonucleotide
uugcuaaccugcuaaaacg

SEQ ID NO: 1949847 - RNA, 19 nt, Artificial Sequence
  Description of Artificial Sequence: Synthetic oligonucleotide
uuauucauuucccuaagac

SEQ ID NO: 1949848 - RNA, 19 nt, Artificial Sequence
  Description of Artificial Sequence: Synthetic oligonucleotide
gaagagaagagagaaaccc

SEQ ID NO: 1949849 - RNA, 19 nt, Artificial Sequence
  Description of Artificial Sequence: Synthetic oligonucleotide
agagguaauuaaaagaaac

SEQ ID NO: 1949850 - RNA, 19 nt, Artificial Sequence
  Description of Artificial Sequence: Synthetic oligonucleotide
aauacaaucagggcucuuc

SEQ ID NO: 1949851 - RNA, 19 nt, Artificial Sequence
  Description of Artificial Sequence: Synthetic oligonucleotide
ugcccuaaaccacagagag

SEQ ID NO: 1949852 - RNA, 19 nt, Artificial Sequence
  Description of Artificial Sequence: Synthetic oligonucleotide
aauuauucauuucccuaag

SEQ ID NO: 1949853 - RNA, 19 nt, Artificial Sequence
  Description of Artificial Sequence: Synthetic oligonucleotide
uuuucuagcuuugaucugg

SEQ ID NO: 1949854 - RNA, 19 nt, Artificial Sequence
  Description of Artificial Sequence: Synthetic oligonucleotide
uuuaggucaaacaggcugc

SEQ ID NO: 1949855 - RNA, 19 nt, Artificial Sequence
  Description of Artificial Sequence: Synthetic oligonucleotide
aaaugaugggguuaaaguu

SEQ ID NO: 1949856 - RNA, 19 nt, Artificial Sequence
  Description of Artificial Sequence: Synthetic oligonucleotide
ugaacagaguacauggagc

SEQ ID NO: 1949857 - RNA, 19 nt, Artificial Sequence
  Description of Artificial Sequence: Synthetic oligonucleotide
uuuucucagagcaauuccc

SEQ ID NO: 1949858 - RNA, 19 nt, Artificial Sequence
  Description of Artificial Sequence: Synthetic oligonucleotide
aauagaguggugucucauc

SEQ ID NO: 1949859 - RNA, 19 nt, Artificial Sequence
  Description of Artificial Sequence: Synthetic oligonucleotide
acugcucaguaauugaaac

SEQ ID NO: 1949860 - RNA, 19 nt, Artificial Sequence
  Description of Artificial Sequence: Synthetic oligonucleotide
ucugaaugggccaauacaa

SEQ ID NO: 1949861 - RNA, 19 nt, Artificial Sequence
  Description of Artificial Sequence: Synthetic oligonucleotide
uuauuuucuagcuuugauc

SEQ ID NO: 1949862 - RNA, 19 nt, Artificial Sequence
  Description of Artificial Sequence: Synthetic oligonucleotide
guaauugaaaccaggacgc

SEQ ID NO: 1949863 - RNA, 19 nt, Artificial Sequence
  Description of Artificial Sequence: Synthetic oligonucleotide
accaggacgcaucauaaac

SEQ ID NO: 1949864 - RNA, 19 nt, Artificial Sequence
  Description of Artificial Sequence: Synthetic oligonucleotide
gcuaaaacgagucaguccc

SEQ ID NO: 1949865 - RNA, 19 nt, Artificial Sequence
  Description of Artificial Sequence: Synthetic oligonucleotide
uuaauuauucauuucccua

SEQ ID NO: 1949866 - RNA, 19 nt, Artificial Sequence
  Description of Artificial Sequence: Synthetic oligonucleotide
aaaguucauagcauagagg

SEQ ID NO: 1949867 - RNA, 19 nt, Artificial Sequence
  Description of Artificial Sequence: Synthetic oligonucleotide
acaagcacucgcucaaacc

SEQ ID NO: 1949868 - RNA, 19 nt, Artificial Sequence
  Description of Artificial Sequence: Synthetic oligonucleotide
ucaaacaggcugcuuggcg

SEQ ID NO: 1949869 - RNA, 19 nt, Artificial Sequence
  Description of Artificial Sequence: Synthetic oligonucleotide
aaugggccaauacaaucag

SEQ ID NO: 1949870 - RNA, 19 nt, Artificial Sequence
  Description of Artificial Sequence: Synthetic oligonucleotide
aaccuuucagaauggcggg

SEQ ID NO: 1949871 - RNA, 19 nt, Artificial Sequence
  Description of Artificial Sequence: Synthetic oligonucleotide
ugugaaggcaaauucugca

SEQ ID NO: 1949872 - RNA, 19 nt, Artificial Sequence
  Description of Artificial Sequence: Synthetic oligonucleotide
cugaauuggccacaggacg

SEQ ID NO: 1949873 - RNA, 19 nt, Artificial Sequence
  Description of Artificial Sequence: Synthetic oligonucleotide
acgauaucugggcucaggc

SEQ ID NO: 1949874 - RNA, 19 nt, Artificial Sequence
  Description of Artificial Sequence: Synthetic oligonucleotide
uauaugcuaguguugacuc

SEQ ID NO: 1949875 - RNA, 19 nt, Artificial Sequence
  Description of Artificial Sequence: Synthetic oligonucleotide
aauggcgggcacuccaaac

SEQ ID NO: 1949876 - RNA, 19 nt, Artificial Sequence
  Description of Artificial Sequence: Synthetic oligonucleotide
  modified_base (5)..(5): a, c, u, g, unknown or other
ucggngacaagccagucac

SEQ ID NO: 1949877 - RNA, 19 nt, Artificial Sequence
  Description of Artificial Sequence: Synthetic oligonucleotide
acagaguacauggagccgc

SEQ ID NO: 1949878 - RNA, 19 nt, Artificial Sequence
  Description of Artificial Sequence: Synthetic oligonucleotide
auaucacgaggucugcagc

SEQ ID NO: 1949879 - RNA, 19 nt, Artificial Sequence
  Description of Artificial Sequence: Synthetic oligonucleotide
aaacgagucagucccucag

SEQ ID NO: 1949880 - RNA, 19 nt, Artificial Sequence
  Description of Artificial Sequence: Synthetic oligonucleotide
uguucagccacgauaucug

SEQ ID NO: 1949881 - RNA, 19 nt, Artificial Sequence
  Description of Artificial Sequence: Synthetic oligonucleotide
agauguugagggcggaucg

SEQ ID NO: 1949882 - RNA, 19 nt, Artificial Sequence
  Description of Artificial Sequence: Synthetic oligonucleotide
ugugauauccuuucuggaa

SEQ ID NO: 1949883 - RNA, 19 nt, Artificial Sequence
  Description of Artificial Sequence: Synthetic oligonucleotide
guacugaaaguucucugcg

SEQ ID NO: 1949884 - RNA, 19 nt, Artificial Sequence
  Description of Artificial Sequence: Synthetic oligonucleotide
uaaccugcuaaaacgaguc

SEQ ID NO: 1949885 - RNA, 19 nt, Artificial Sequence
  Description of Artificial Sequence: Synthetic oligonucleotide
uucccuaagaccugugugc

SEQ ID NO: 1949886 - RNA, 19 nt, Artificial Sequence
  Description of Artificial Sequence: Synthetic oligonucleotide
uucuguucagccacgauau

SEQ ID NO: 1949887 - RNA, 19 nt, Artificial Sequence
  Description of Artificial Sequence: Synthetic oligonucleotide
auggcgggcacuccaaacc

SEQ ID NO: 1949888 - RNA, 19 nt, Artificial Sequence
  Description of Artificial Sequence: Synthetic oligonucleotide
ggugucucaucccagauag

SEQ ID NO: 1949889 - RNA, 19 nt, Artificial Sequence
  Description of Artificial Sequence: Synthetic oligonucleotide
cucugaaguguacugaaag

SEQ ID NO: 1949890 - RNA, 19 nt, Artificial Sequence
  Description of Artificial Sequence: Synthetic oligonucleotide
ugcuuggcgcaaaauagag

SEQ ID NO: 1949891 - RNA, 19 nt, Artificial Sequence
  Description of Artificial Sequence: Synthetic oligonucleotide
acgauguccucucugaaug

SEQ ID NO: 1949892 - RNA, 19 nt, Artificial Sequence
  Description of Artificial Sequence: Synthetic oligonucleotide
cuugaaagggccuuuguca

SEQ ID NO: 1949893 - RNA, 19 nt, Artificial Sequence
  Description of Artificial Sequence: Synthetic oligonucleotide
aguugaacgauguccucuc

SEQ ID NO: 1949894 - RNA, 19 nt, Artificial Sequence
  Description of Artificial Sequence: Synthetic oligonucleotide
uuauaugcuaguguugacu

SEQ ID NO: 1949895 - RNA, 19 nt, Artificial Sequence
  Description of Artificial Sequence: Synthetic oligonucleotide
ucagccacgauaucugggc

SEQ ID NO: 1949896 - RNA, 19 nt, Artificial Sequence
  Description of Artificial Sequence: Synthetic oligonucleotide
uucagagucucuacagcag

SEQ ID NO: 1949897 - RNA, 19 nt, Artificial Sequence
  Description of Artificial Sequence: Synthetic oligonucleotide
aaauguagagugccacucu

SEQ ID NO: 1949898 - RNA, 19 nt, Artificial Sequence
  Description of Artificial Sequence: Synthetic oligonucleotide
aggucaaacaggcugcuug

SEQ ID NO: 1949899 - RNA, 19 nt, Artificial Sequence
  Description of Artificial Sequence: Synthetic oligonucleotide
ugcuaaaacgagucagucc

SEQ ID NO: 1949900 - RNA, 19 nt, Artificial Sequence
  Description of Artificial Sequence: Synthetic oligonucleotide
gaguacauggagccgcugg

SEQ ID NO: 1949901 - RNA, 19 nt, Artificial Sequence
  Description of Artificial Sequence: Synthetic oligonucleotide
aagaauccugcuuggaaau

SEQ ID NO: 1949902 - RNA, 19 nt, Artificial Sequence
  Description of Artificial Sequence: Synthetic oligonucleotide
agcuggaauggacuugccc

SEQ ID NO: 1949903 - RNA, 19 nt, Artificial Sequence
  Description of Artificial Sequence: Synthetic oligonucleotide
ugcuaaccugcuaaaacga

SEQ ID NO: 1949904 - RNA, 19 nt, Artificial Sequence
  Description of Artificial Sequence: Synthetic oligonucleotide
ugaaugggccaauacaauc

SEQ ID NO: 1949905 - RNA, 19 nt, Artificial Sequence
  Description of Artificial Sequence: Synthetic oligonucleotide
caaacaggcugcuuggcgc

SEQ ID NO: 1949906 - RNA, 19 nt, Artificial Sequence
  Description of Artificial Sequence: Synthetic oligonucleotide
ucuaggaucugaguccggg

SEQ ID NO: 1949907 - RNA, 19 nt, Artificial Sequence
  Description of Artificial Sequence: Synthetic oligonucleotide
guuuucucagagcaauucc

SEQ ID NO: 1949908 - RNA, 19 nt, Artificial Sequence
  Description of Artificial Sequence: Synthetic oligonucleotide
cuucuuaccgccauugcuc

SEQ ID NO: 1949909 - RNA, 19 nt, Artificial Sequence
  Description of Artificial Sequence: Synthetic oligonucleotide
accuguuuuaauuauucau

SEQ ID NO: 1949910 - RNA, 19 nt, Artificial Sequence
  Description of Artificial Sequence: Synthetic oligonucleotide
uucaguaagaauccugcuu

SEQ ID NO: 1949911 - RNA, 19 nt, Artificial Sequence
  Description of Artificial Sequence: Synthetic oligonucleotide
gggccuuugucauacaugg

SEQ ID NO: 1949912 - RNA, 19 nt, Artificial Sequence
  Description of Artificial Sequence: Synthetic oligonucleotide
auugaaaccaggacgcauc

SEQ ID NO: 1949913 - RNA, 19 nt, Artificial Sequence
  Description of Artificial Sequence: Synthetic oligonucleotide
uaugcuaguguugacucug

SEQ ID NO: 1949914 - RNA, 19 nt, Artificial Sequence
  Description of Artificial Sequence: Synthetic oligonucleotide
gccacagaaauguagagug

SEQ ID NO: 1949915 - RNA, 19 nt, Artificial Sequence
  Description of Artificial Sequence: Synthetic oligonucleotide
uucagccacgauaucuggg

SEQ ID NO: 1949916 - RNA, 19 nt, Artificial Sequence
  Description of Artificial Sequence: Synthetic oligonucleotide
uuccuuauaugcuaguguu

SEQ ID NO: 1949917 - RNA, 19 nt, Artificial Sequence
  Description of Artificial Sequence: Synthetic oligonucleotide
uuaccugugauauccuuuc

SEQ ID NO: 1949918 - RNA, 19 nt, Artificial Sequence
  Description of Artificial Sequence: Synthetic oligonucleotide
agcaauuccccucugcccu

SEQ ID NO: 1949919 - RNA, 19 nt, Artificial Sequence
  Description of Artificial Sequence: Synthetic oligonucleotide
cugguugccaggacgaccc

SEQ ID NO: 1949920 - RNA, 19 nt, Artificial Sequence
  Description of Artificial Sequence: Synthetic oligonucleotide
uuccccucugcccuaaacc

SEQ ID NO: 1949921 - RNA, 19 nt, Artificial Sequence
  Description of Artificial Sequence: Synthetic oligonucleotide
caggacgcaucauaaacag

SEQ ID NO: 1949922 - RNA, 19 nt, Artificial Sequence
  Description of Artificial Sequence: Synthetic oligonucleotide
uguagagugccacucugaa

SEQ ID NO: 1949923 - RNA, 19 nt, Artificial Sequence
  Description of Artificial Sequence: Synthetic oligonucleotide
aggacgacguucauguccc

SEQ ID NO: 1949924 - RNA, 19 nt, Artificial Sequence
  Description of Artificial Sequence: Synthetic oligonucleotide
uuggcgcaaaauagagugg

SEQ ID NO: 1949925 - RNA, 19 nt, Artificial Sequence
  Description of Artificial Sequence: Synthetic oligonucleotide
uccuuauaugcuaguguug

SEQ ID NO: 1949926 - RNA, 19 nt, Artificial Sequence
  Description of Artificial Sequence: Synthetic oligonucleotide
uaaacaggcuucagcuugc

SEQ ID NO: 1949927 - RNA, 19 nt, Artificial Sequence
  Description of Artificial Sequence: Synthetic oligonucleotide
uccaagaccuggaagccac

SEQ ID NO: 1949928 - RNA, 19 nt, Artificial Sequence
  Description of Artificial Sequence: Synthetic oligonucleotide
aacagaguacauggagccg

SEQ ID NO: 1949929 - RNA, 19 nt, Artificial Sequence
  Description of Artificial Sequence: Synthetic oligonucleotide
cagcuuaccugugauaucc

SEQ ID NO: 1949930 - RNA, 19 nt, Artificial Sequence
  Description of Artificial Sequence: Synthetic oligonucleotide
gaaauguagagugccacuc

SEQ ID NO: 1949931 - RNA, 19 nt, Artificial Sequence
  Description of Artificial Sequence: Synthetic oligonucleotide
gggguuaaaguucauagca

SEQ ID NO: 1949932 - RNA, 19 nt, Artificial Sequence
  Description of Artificial Sequence: Synthetic oligonucleotide
acuugcccaagugauggcc

SEQ ID NO: 1949933 - RNA, 19 nt, Artificial Sequence
  Description of Artificial Sequence: Synthetic oligonucleotide
caggacgacguucaugucc

SEQ ID NO: 1949934 - RNA, 19 nt, Artificial Sequence
  Description of Artificial Sequence: Synthetic oligonucleotide
cugcucaguaauugaaacc

SEQ ID NO: 1949935 - RNA, 19 nt, Artificial Sequence
  Description of Artificial Sequence: Synthetic oligonucleotide
aaagcaaggucuucuuauu

SEQ ID NO: 1949936 - RNA, 19 nt, Artificial Sequence
  Description of Artificial Sequence: Synthetic oligonucleotide
ugucucaucccagauaguc

SEQ ID NO: 1949937 - RNA, 19 nt, Artificial Sequence
  Description of Artificial Sequence: Synthetic oligonucleotide
aaaacgagucagucccuca

SEQ ID NO: 1949938 - RNA, 19 nt, Artificial Sequence
  Description of Artificial Sequence: Synthetic oligonucleotide
uucuuaccgccauugcucc

SEQ ID NO: 1949939 - RNA, 19 nt, Artificial Sequence
  Description of Artificial Sequence: Synthetic oligonucleotide
uucauagcauagaggucag

SEQ ID NO: 1949940 - RNA, 19 nt, Artificial Sequence
  Description of Artificial Sequence: Synthetic oligonucleotide
gaguccgggcaucuggugg

SEQ ID NO: 1949941 - RNA, 19 nt, Artificial Sequence
  Description of Artificial Sequence: Synthetic oligonucleotide
gaaugggccaauacaauca

SEQ ID NO: 1949942 - RNA, 19 nt, Artificial Sequence
  Description of Artificial Sequence: Synthetic oligonucleotide
uucauuucccuaagaccug

SEQ ID NO: 1949943 - RNA, 19 nt, Artificial Sequence
  Description of Artificial Sequence: Synthetic oligonucleotide
gaauggacuugcccaagug

SEQ ID NO: 1949944 - RNA, 19 nt, Artificial Sequence
  Description of Artificial Sequence: Synthetic oligonucleotide
aaacaggcugcuuggcgca

SEQ ID NO: 1949945 - RNA, 19 nt, Artificial Sequence
  Description of Artificial Sequence: Synthetic oligonucleotide
acgagucagucccucaguc

SEQ ID NO: 1949946 - RNA, 19 nt, Artificial Sequence
  Description of Artificial Sequence: Synthetic oligonucleotide
uuucaguaagaauccugcu

SEQ ID NO: 1949947 - RNA, 19 nt, Artificial Sequence
  Description of Artificial Sequence: Synthetic oligonucleotide
accaagugcugauuggcug

SEQ ID NO: 1949948 - RNA, 19 nt, Artificial Sequence
  Description of Artificial Sequence: Synthetic oligonucleotide
ucacugcucaguaauugaa

SEQ ID NO: 1949949 - RNA, 19 nt, Artificial Sequence
  Description of Artificial Sequence: Synthetic oligonucleotide
caaaauagaguggugucuc

SEQ ID NO: 1949950 - RNA, 19 nt, Artificial Sequence
  Description of Artificial Sequence: Synthetic oligonucleotide
agaguggugucucauccca

SEQ ID NO: 1949951 - RNA, 19 nt, Artificial Sequence
  Description of Artificial Sequence: Synthetic oligonucleotide
uaucacgaggucugcagcu

SEQ ID NO: 1949952 - RNA, 19 nt, Artificial Sequence
  Description of Artificial Sequence: Synthetic oligonucleotide
cuucuaggaucugaguccg

SEQ ID NO: 1949953 - RNA, 19 nt, Artificial Sequence
  Description of Artificial Sequence: Synthetic oligonucleotide
auacaaucagggcucuucu

SEQ ID NO: 1949954 - RNA, 19 nt, Artificial Sequence
  Description of Artificial Sequence: Synthetic oligonucleotide
cuucagagucucuacagca

SEQ ID NO: 1949955 - RNA, 19 nt, Artificial Sequence
  Description of Artificial Sequence: Synthetic oligonucleotide
ccgugaacagaguacaugg

SEQ ID NO: 1949956 - RNA, 19 nt, Artificial Sequence
  Description of Artificial Sequence: Synthetic oligonucleotide
acaaucagggcucuucuua

SEQ ID NO: 1949957 - RNA, 19 nt, Artificial Sequence
  Description of Artificial Sequence: Synthetic oligonucleotide
accugcuaaaacgagucag

SEQ ID NO: 1949958 - RNA, 19 nt, Artificial Sequence
  Description of Artificial Sequence: Synthetic oligonucleotide
caagcacucgcucaaacca

SEQ ID NO: 1949959 - RNA, 19 nt, Artificial Sequence
  Description of Artificial Sequence: Synthetic oligonucleotide
ugaaaguucucugcguccu

SEQ ID NO: 1949960 - RNA, 19 nt, Artificial Sequence
  Description of Artificial Sequence: Synthetic oligonucleotide
ucucugaaugggccaauac

SEQ ID NO: 1949961 - RNA, 19 nt, Artificial Sequence
  Description of Artificial Sequence: Synthetic oligonucleotide
ucccagauagucuccaguc

SEQ ID NO: 1949962 - RNA, 19 nt, Artificial Sequence
  Description of Artificial Sequence: Synthetic oligonucleotide
acugguugccaggacgacc

SEQ ID NO: 1949963 - RNA, 19 nt, Artificial Sequence
  Description of Artificial Sequence: Synthetic oligonucleotide
uguacaccagcugugguuc

SEQ ID NO: 1949964 - RNA, 19 nt, Artificial Sequence
  Description of Artificial Sequence: Synthetic oligonucleotide
cauugcuccagauguugag

SEQ ID NO: 1949965 - RNA, 19 nt, Artificial Sequence
  Description of Artificial Sequence: Synthetic oligonucleotide
agucucuacagcagccucc

SEQ ID NO: 1949966 - RNA, 19 nt, Artificial Sequence
  Description of Artificial Sequence: Synthetic oligonucleotide
aguccgggcaucugguggg

SEQ ID NO: 1949967 - RNA, 19 nt, Artificial Sequence
  Description of Artificial Sequence: Synthetic oligonucleotide
gagcaauuccccucugccc

SEQ ID NO: 1949968 - RNA, 19 nt, Artificial Sequence
  Description of Artificial Sequence: Synthetic oligonucleotide
  modified_base (2)..(2): a, c, u, g, unknown or other
gngacaagccagucacugc

SEQ ID NO: 1949969 - RNA, 19 nt, Artificial Sequence
  Description of Artificial Sequence: Synthetic oligonucleotide
uucauguccccguggacac

SEQ ID NO: 1949970 - RNA, 19 nt, Artificial Sequence
  Description of Artificial Sequence: Synthetic oligonucleotide
gccuuugucauacauggug

SEQ ID NO: 1949971 - RNA, 19 nt, Artificial Sequence
  Description of Artificial Sequence: Synthetic oligonucleotide
gaaagcaaggucuucuuau

SEQ ID NO: 1949972 - RNA, 19 nt, Artificial Sequence
  Description of Artificial Sequence: Synthetic oligonucleotide
gaucguaguaccaagugcu

SEQ ID NO: 1949973 - RNA, 19 nt, Artificial Sequence
  Description of Artificial Sequence: Synthetic oligonucleotide
cuugcccaagugauggccc

SEQ ID NO: 1949974 - RNA, 19 nt, Artificial Sequence
  Description of Artificial Sequence: Synthetic oligonucleotide
uccccucugcccuaaacca

SEQ ID NO: 1949975 - RNA, 19 nt, Artificial Sequence
  Description of Artificial Sequence: Synthetic oligonucleotide
uaguugaacgauguccucu

SEQ ID NO: 1949976 - RNA, 19 nt, Artificial Sequence
  Description of Artificial Sequence: Synthetic oligonucleotide
aaauaucacgaggucugca

SEQ ID NO: 1949977 - RNA, 19 nt, Artificial Sequence
  Description of Artificial Sequence: Synthetic oligonucleotide
aacgagucagucccucagu

SEQ ID NO: 1949978 - RNA, 19 nt, Artificial Sequence
  Description of Artificial Sequence: Synthetic oligonucleotide
guaagaauccugcuuggaa

SEQ ID NO: 1949979 - RNA, 19 nt, Artificial Sequence
  Description of Artificial Sequence: Synthetic oligonucleotide
auuccccucugcccuaaac

SEQ ID NO: 1949980 - RNA, 19 nt, Artificial Sequence
  Description of Artificial Sequence: Synthetic oligonucleotide
caaucagggcucuucuuac

SEQ ID NO: 1949981 - RNA, 19 nt, Artificial Sequence
  Description of Artificial Sequence: Synthetic oligonucleotide
aaauagaguggugucucau

SEQ ID NO: 1949982 - RNA, 19 nt, Artificial Sequence
  Description of Artificial Sequence: Synthetic oligonucleotide
guguacugaaaguucucug

SEQ ID NO: 1949983 - RNA, 19 nt, Artificial Sequence
  Description of Artificial Sequence: Synthetic oligonucleotide
aagaccuggaagccacaga

SEQ ID NO: 1949984 - RNA, 19 nt, Artificial Sequence
  Description of Artificial Sequence: Synthetic oligonucleotide
ggucaaacaggcugcuugg

SEQ ID NO: 1949985 - RNA, 19 nt, Artificial Sequence
  Description of Artificial Sequence: Synthetic oligonucleotide
aaccugcuaaaacgaguca

SEQ ID NO: 1949986 - RNA, 19 nt, Artificial Sequence
  Description of Artificial Sequence: Synthetic oligonucleotide
ggaucguaguaccaagugc

SEQ ID NO: 1949987 - RNA, 19 nt, Artificial Sequence
  Description of Artificial Sequence: Synthetic oligonucleotide
cuuauaugcuaguguugac

SEQ ID NO: 1949988 - RNA, 19 nt, Artificial Sequence
  Description of Artificial Sequence: Synthetic oligonucleotide
aaguucucugcguccuuca

SEQ ID NO: 1949989 - RNA, 19 nt, Artificial Sequence
  Description of Artificial Sequence: Synthetic oligonucleotide
gacaccgugaacagaguac

SEQ ID NO: 1949990 - RNA, 19 nt, Artificial Sequence
  Description of Artificial Sequence: Synthetic oligonucleotide
uaccaagugcugauuggcu

SEQ ID NO: 1949991 - RNA, 19 nt, Artificial Sequence
  Description of Artificial Sequence: Synthetic oligonucleotide
ggacuugcccaagugaugg

SEQ ID NO: 1949992 - RNA, 19 nt, Artificial Sequence
  Description of Artificial Sequence: Synthetic oligonucleotide
cucugaaugggccaauaca

SEQ ID NO: 1949993 - RNA, 19 nt, Artificial Sequence
  Description of Artificial Sequence: Synthetic oligonucleotide
gacguucauguccccgugg

SEQ ID NO: 1949994 - RNA, 19 nt, Artificial Sequence
  Description of Artificial Sequence: Synthetic oligonucleotide
uggcguaguugaacgaugu

SEQ ID NO: 1949995 - RNA, 19 nt, Artificial Sequence
  Description of Artificial Sequence: Synthetic oligonucleotide
uggacuugcccaagugaug

SEQ ID NO: 1949996 - RNA, 19 nt, Artificial Sequence
  Description of Artificial Sequence: Synthetic oligonucleotide
uagaguggugucucauccc

SEQ ID NO: 1949997 - RNA, 19 nt, Artificial Sequence
  Description of Artificial Sequence: Synthetic oligonucleotide
auagcauagaggucagauu

SEQ ID NO: 1949998 - RNA, 19 nt, Artificial Sequence
  Description of Artificial Sequence: Synthetic oligonucleotide
uggcgcaaaauagaguggu

SEQ ID NO: 1949999 - RNA, 19 nt, Artificial Sequence
  Description of Artificial Sequence: Synthetic oligonucleotide
auaucugggcucaggcggc

SEQ ID NO: 1950000 - RNA, 19 nt, Artificial Sequence
  Description of Artificial Sequence: Synthetic oligonucleotide
gcuaguguugacucugaag

SEQ ID NO: 1950001 - RNA, 19 nt, Artificial Sequence
  Description of Artificial Sequence: Synthetic oligonucleotide
ugauggaaagcaaggucuu

SEQ ID NO: 1950002 - RNA, 19 nt, Artificial Sequence
  Description of Artificial Sequence: Synthetic oligonucleotide
cuuccacccuucuaggauc

SEQ ID NO: 1950003 - RNA, 19 nt, Artificial Sequence
  Description of Artificial Sequence: Synthetic oligonucleotide
cagagaagagaagagagaa

SEQ ID NO: 1950004 - RNA, 19 nt, Artificial Sequence
  Description of Artificial Sequence: Synthetic oligonucleotide
ccaaccuuucagaauggcg

SEQ ID NO: 1950005 - RNA, 19 nt, Artificial Sequence
  Description of Artificial Sequence: Synthetic oligonucleotide
auaugcuaguguugacucu

SEQ ID NO: 1950006 - RNA, 19 nt, Artificial Sequence
  Description of Artificial Sequence: Synthetic oligonucleotide
uggcauaugugaaggcaaa

SEQ ID NO: 1950007 - RNA, 19 nt, Artificial Sequence
  Description of Artificial Sequence: Synthetic oligonucleotide
gagggcggaucguaguacc

SEQ ID NO: 1950008 - RNA, 19 nt, Artificial Sequence
  Description of Artificial Sequence: Synthetic oligonucleotide
cuccagauguugagggcgg

SEQ ID NO: 1950009 - RNA, 19 nt, Artificial Sequence
  Description of Artificial Sequence: Synthetic oligonucleotide
uuauucuugaaagggccuu

SEQ ID NO: 1950010 - RNA, 19 nt, Artificial Sequence
  Description of Artificial Sequence: Synthetic oligonucleotide
aauuuaggucaaacaggcu

SEQ ID NO: 1950011 - RNA, 19 nt, Artificial Sequence
  Description of Artificial Sequence: Synthetic oligonucleotide
aaccaaccuuucagaaugg

SEQ ID NO: 1950012 - RNA, 19 nt, Artificial Sequence
  Description of Artificial Sequence: Synthetic oligonucleotide
gaaguguacugaaaguucu

SEQ ID NO: 1950013 - RNA, 19 nt, Artificial Sequence
  Description of Artificial Sequence: Synthetic oligonucleotide
cacccuucuaggaucugag

SEQ ID NO: 1950014 - RNA, 19 nt, Artificial Sequence
  Description of Artificial Sequence: Synthetic oligonucleotide
uucagaauggcgggcacuc

SEQ ID NO: 1950015 - RNA, 19 nt, Artificial Sequence
  Description of Artificial Sequence: Synthetic oligonucleotide
aaaggccaaauuuguucuu

SEQ ID NO: 1950016 - RNA, 19 nt, Artificial Sequence
  Description of Artificial Sequence: Synthetic oligonucleotide
cuuaccgccauugcuccag

SEQ ID NO: 1950017 - RNA, 19 nt, Artificial Sequence
  Description of Artificial Sequence: Synthetic oligonucleotide
cacaggacgacguucaugu

SEQ ID NO: 1950018 - RNA, 19 nt, Artificial Sequence
  Description of Artificial Sequence: Synthetic oligonucleotide
acaccgugaacagaguaca

SEQ ID NO: 1950019 - RNA, 19 nt, Artificial Sequence
  Description of Artificial Sequence: Synthetic oligonucleotide
gacgacguucauguccccg

SEQ ID NO: 1950020 - RNA, 19 nt, Artificial Sequence
  Description of Artificial Sequence: Synthetic oligonucleotide
agcaacugguugccaggac

SEQ ID NO: 1950021 - RNA, 19 nt, Artificial Sequence
  Description of Artificial Sequence: Synthetic oligonucleotide
ucugcguccuucagcuuac

SEQ ID NO: 1950022 - RNA, 19 nt, Artificial Sequence
  Description of Artificial Sequence: Synthetic oligonucleotide
ucuggaaaugaugggguua

SEQ ID NO: 1950023 - RNA, 19 nt, Artificial Sequence
  Description of Artificial Sequence: Synthetic oligonucleotide
gcuuugaucuggcugucag

SEQ ID NO: 1950024 - RNA, 19 nt, Artificial Sequence
  Description of Artificial Sequence: Synthetic oligonucleotide
aacugguugccaggacgac

SEQ ID NO: 1950025 - RNA, 19 nt, Artificial Sequence
  Description of Artificial Sequence: Synthetic oligonucleotide
ucguaguaccaagugcuga

SEQ ID NO: 1950026 - RNA, 19 nt, Artificial Sequence
  Description of Artificial Sequence: Synthetic oligonucleotide
gcguaguugaacgaugucc

SEQ ID NO: 1950027 - RNA, 19 nt, Artificial Sequence
  Description of Artificial Sequence: Synthetic oligonucleotide
uggugauggaaagcaaggu

SEQ ID NO: 1950028 - RNA, 19 nt, Artificial Sequence
  Description of Artificial Sequence: Synthetic oligonucleotide
cauguccccguggacaccg

SEQ ID NO: 1950029 - RNA, 19 nt, Artificial Sequence
  Description of Artificial Sequence: Synthetic oligonucleotide
accgugaacagaguacaug

SEQ ID NO: 1950030 - RNA, 19 nt, Artificial Sequence
  Description of Artificial Sequence: Synthetic oligonucleotide
uaauugaaaccaggacgca

SEQ ID NO: 1950031 - RNA, 19 nt, Artificial Sequence
  Description of Artificial Sequence: Synthetic oligonucleotide
acguucauguccccgugga

SEQ ID NO: 1950032 - RNA, 19 nt, Artificial Sequence
  Description of Artificial Sequence: Synthetic oligonucleotide
acgacguucauguccccgu

SEQ ID NO: 1950033 - RNA, 19 nt, Artificial Sequence
  Description of Artificial Sequence: Synthetic oligonucleotide
ugcuccagauguugagggc

SEQ ID NO: 1950034 - RNA, 19 nt, Artificial Sequence
  Description of Artificial Sequence: Synthetic oligonucleotide
aaccaggacgcaucauaaa

SEQ ID NO: 1950035 - RNA, 19 nt, Artificial Sequence
  Description of Artificial Sequence: Synthetic oligonucleotide
acagagaagagaagagaga

SEQ ID NO: 1950036 - RNA, 19 nt, Artificial Sequence
  Description of Artificial Sequence: Synthetic oligonucleotide
ucccuaagaccugugugca

SEQ ID NO: 1950037 - RNA, 19 nt, Artificial Sequence
  Description of Artificial Sequence: Synthetic oligonucleotide
ucauuucccuaagaccugu

SEQ ID NO: 1950038 - RNA, 19 nt, Artificial Sequence
  Description of Artificial Sequence: Synthetic oligonucleotide
uugagggcggaucguagua

SEQ ID NO: 1950039 - RNA, 19 nt, Artificial Sequence
  Description of Artificial Sequence: Synthetic oligonucleotide
  modified_base (3)..(3): a, c, u, g, unknown or other
ggngacaagccagucacug

SEQ ID NO: 1950040 - RNA, 19 nt, Artificial Sequence
  Description of Artificial Sequence: Synthetic oligonucleotide
ugucauacaugguggcaua

SEQ ID NO: 1950041 - RNA, 19 nt, Artificial Sequence
  Description of Artificial Sequence: Synthetic oligonucleotide
gagugccacucugaauugg

SEQ ID NO: 1950042 - RNA, 19 nt, Artificial Sequence
  Description of Artificial Sequence: Synthetic oligonucleotide
cuaagaccugugugcacug

SEQ ID NO: 1950043 - RNA, 19 nt, Artificial Sequence
  Description of Artificial Sequence: Synthetic oligonucleotide
aguaagaauccugcuugga

SEQ ID NO: 1950044 - RNA, 19 nt, Artificial Sequence
  Description of Artificial Sequence: Synthetic oligonucleotide
agcacucgcucaaaccaac

SEQ ID NO: 1950045 - RNA, 19 nt, Artificial Sequence
  Description of Artificial Sequence: Synthetic oligonucleotide
gcuccagauguugagggcg

SEQ ID NO: 1950046 - RNA, 19 nt, Artificial Sequence
  Description of Artificial Sequence: Synthetic oligonucleotide
cagagcaauuccccucugc

SEQ ID NO: 1950047 - RNA, 19 nt, Artificial Sequence
  Description of Artificial Sequence: Synthetic oligonucleotide
auggacuugcccaagugau

SEQ ID NO: 1950048 - RNA, 19 nt, Artificial Sequence
  Description of Artificial Sequence: Synthetic oligonucleotide
gagucucuacagcagccuc

SEQ ID NO: 1950049 - RNA, 19 nt, Artificial Sequence
  Description of Artificial Sequence: Synthetic oligonucleotide
acucugaauuggccacagg

SEQ ID NO: 1950050 - RNA, 19 nt, Artificial Sequence
  Description of Artificial Sequence: Synthetic oligonucleotide
acgcaucauaaacaggcuu

SEQ ID NO: 1950051 - RNA, 19 nt, Artificial Sequence
  Description of Artificial Sequence: Synthetic oligonucleotide
caacugguugccaggacga

SEQ ID NO: 1950052 - RNA, 19 nt, Artificial Sequence
  Description of Artificial Sequence: Synthetic oligonucleotide
cuuucagaauggcgggcac

SEQ ID NO: 1950053 - RNA, 19 nt, Artificial Sequence
  Description of Artificial Sequence: Synthetic oligonucleotide
uuaggucaaacaggcugcu

SEQ ID NO: 1950054 - RNA, 19 nt, Artificial Sequence
  Description of Artificial Sequence: Synthetic oligonucleotide
cugcuaaaacgagucaguc

SEQ ID NO: 1950055 - RNA, 19 nt, Artificial Sequence
  Description of Artificial Sequence: Synthetic oligonucleotide
cacgauaucugggcucagg

SEQ ID NO: 1950056 - RNA, 19 nt, Artificial Sequence
  Description of Artificial Sequence: Synthetic oligonucleotide
guggccaaugcuguacacc

SEQ ID NO: 1950057 - RNA, 19 nt, Artificial Sequence
  Description of Artificial Sequence: Synthetic oligonucleotide
cuaaccugcuaaaacgagu

SEQ ID NO: 1950058 - RNA, 19 nt, Artificial Sequence
  Description of Artificial Sequence: Synthetic oligonucleotide
ugcguccuucagcuuaccu

SEQ ID NO: 1950059 - RNA, 19 nt, Artificial Sequence
  Description of Artificial Sequence: Synthetic oligonucleotide
ggcggccuuccuuauaugc

SEQ ID NO: 1950060 - RNA, 19 nt, Artificial Sequence
  Description of Artificial Sequence: Synthetic oligonucleotide
cuuccuuauaugcuagugu

SEQ ID NO: 1950061 - RNA, 19 nt, Artificial Sequence
  Description of Artificial Sequence: Synthetic oligonucleotide
gauggcccacagaaaggcc

SEQ ID NO: 1950062 - RNA, 19 nt, Artificial Sequence
  Description of Artificial Sequence: Synthetic oligonucleotide
gccaauacaaucagggcuc

SEQ ID NO: 1950063 - RNA, 19 nt, Artificial Sequence
  Description of Artificial Sequence: Synthetic oligonucleotide
agagucucuacagcagccu

SEQ ID NO: 1950064 - RNA, 19 nt, Artificial Sequence
  Description of Artificial Sequence: Synthetic oligonucleotide
uauucuugaaagggccuuu

SEQ ID NO: 1950065 - RNA, 19 nt, Artificial Sequence
  Description of Artificial Sequence: Synthetic oligonucleotide
aauccugcuuggaaauuua

SEQ ID NO: 1950066 - RNA, 19 nt, Artificial Sequence
  Description of Artificial Sequence: Synthetic oligonucleotide
cuuauucuugaaagggccu

SEQ ID NO: 1950067 - RNA, 19 nt, Artificial Sequence
  Description of Artificial Sequence: Synthetic oligonucleotide
gacuugcccaagugauggc

SEQ ID NO: 1950068 - RNA, 19 nt, Artificial Sequence
  Description of Artificial Sequence: Synthetic oligonucleotide
ugagggcggaucguaguac

SEQ ID NO: 1950069 - RNA, 19 nt, Artificial Sequence
  Description of Artificial Sequence: Synthetic oligonucleotide
acaggacgacguucauguc

SEQ ID NO: 1950070 - RNA, 19 nt, Artificial Sequence
  Description of Artificial Sequence: Synthetic oligonucleotide
aggacgcaucauaaacagg

SEQ ID NO: 1950071 - RNA, 19 nt, Artificial Sequence
  Description of Artificial Sequence: Synthetic oligonucleotide
agcauagaggucagauuca

SEQ ID NO: 1950072 - RNA, 19 nt, Artificial Sequence
  Description of Artificial Sequence: Synthetic oligonucleotide
cagauguugagggcggauc

SEQ ID NO: 1950073 - RNA, 19 nt, Artificial Sequence
  Description of Artificial Sequence: Synthetic oligonucleotide
cuccagucguuucuuccac

SEQ ID NO: 1950074 - RNA, 19 nt, Artificial Sequence
  Description of Artificial Sequence: Synthetic oligonucleotide
guacauggagccgcuggcc

SEQ ID NO: 1950075 - RNA, 19 nt, Artificial Sequence
  Description of Artificial Sequence: Synthetic oligonucleotide
ucuguucagccacgauauc

SEQ ID NO: 1950076 - RNA, 19 nt, Artificial Sequence
  Description of Artificial Sequence: Synthetic oligonucleotide
auuggccacaggacgacgu

SEQ ID NO: 1950077 - RNA, 19 nt, Artificial Sequence
  Description of Artificial Sequence: Synthetic oligonucleotide
agagaagagaagagagaaa

SEQ ID NO: 1950078 - RNA, 19 nt, Artificial Sequence
  Description of Artificial Sequence: Synthetic oligonucleotide
cugauuggcugagcaacug

SEQ ID NO: 1950079 - RNA, 19 nt, Artificial Sequence
  Description of Artificial Sequence: Synthetic oligonucleotide
cgcaucauaaacaggcuuc

SEQ ID NO: 1950080 - RNA, 19 nt, Artificial Sequence
  Description of Artificial Sequence: Synthetic oligonucleotide
ccuuauaugcuaguguuga

SEQ ID NO: 1950081 - RNA, 19 nt, Artificial Sequence
  Description of Artificial Sequence: Synthetic oligonucleotide
ggcggaucguaguaccaag

SEQ ID NO: 1950082 - RNA, 19 nt, Artificial Sequence
  Description of Artificial Sequence: Synthetic oligonucleotide
gcuaaccugcuaaaacgag

SEQ ID NO: 1950083 - RNA, 19 nt, Artificial Sequence
  Description of Artificial Sequence: Synthetic oligonucleotide
aagcacucgcucaaaccaa

SEQ ID NO: 1950084 - RNA, 19 nt, Artificial Sequence
  Description of Artificial Sequence: Synthetic oligonucleotide
auggcguaguugaacgaug

SEQ ID NO: 1950085 - RNA, 19 nt, Artificial Sequence
  Description of Artificial Sequence: Synthetic oligonucleotide
cccagauagucuccagucg

SEQ ID NO: 1950086 - RNA, 19 nt, Artificial Sequence
  Description of Artificial Sequence: Synthetic oligonucleotide
cugcaaagggaacugaaau

SEQ ID NO: 1950087 - RNA, 19 nt, Artificial Sequence
  Description of Artificial Sequence: Synthetic oligonucleotide
uguccccguggacaccgug

SEQ ID NO: 1950088 - RNA, 19 nt, Artificial Sequence
  Description of Artificial Sequence: Synthetic oligonucleotide
ucagaauggcgggcacucc

SEQ ID NO: 1950089 - RNA, 19 nt, Artificial Sequence
  Description of Artificial Sequence: Synthetic oligonucleotide
agcuugcuaaccugcuaaa

SEQ ID NO: 1950090 - RNA, 19 nt, Artificial Sequence
  Description of Artificial Sequence: Synthetic oligonucleotide
aucguaguaccaagugcug

SEQ ID NO: 1950091 - RNA, 19 nt, Artificial Sequence
  Description of Artificial Sequence: Synthetic oligonucleotide
cauagcauagaggucagau

SEQ ID NO: 1950092 - RNA, 19 nt, Artificial Sequence
  Description of Artificial Sequence: Synthetic oligonucleotide
  modified_base (6)..(6): a, c, u, g, unknown or other
cucggngacaagccaguca

SEQ ID NO: 1950093 - RNA, 19 nt, Artificial Sequence
  Description of Artificial Sequence: Synthetic oligonucleotide
cugcccuaaaccacagaga

SEQ ID NO: 1950094 - RNA, 19 nt, Artificial Sequence
  Description of Artificial Sequence: Synthetic oligonucleotide
ucuuaccgccauugcucca

SEQ ID NO: 1950095 - RNA, 19 nt, Artificial Sequence
  Description of Artificial Sequence: Synthetic oligonucleotide
cagaauggcgggcacucca

SEQ ID NO: 1950096 - RNA, 19 nt, Artificial Sequence
  Description of Artificial Sequence: Synthetic oligonucleotide
uggacaccgugaacagagu

SEQ ID NO: 1950097 - RNA, 19 nt, Artificial Sequence
  Description of Artificial Sequence: Synthetic oligonucleotide
aaacaggcuucagcuugcu

SEQ ID NO: 1950098 - RNA, 19 nt, Artificial Sequence
  Description of Artificial Sequence: Synthetic oligonucleotide
guggcauaugugaaggcaa

SEQ ID NO: 1950099 - RNA, 19 nt, Artificial Sequence
  Description of Artificial Sequence: Synthetic oligonucleotide
cacuccaaaccacugcaaa

SEQ ID NO: 1950100 - RNA, 19 nt, Artificial Sequence
  Description of Artificial Sequence: Synthetic oligonucleotide
gucagcuggaauggacuug

SEQ ID NO: 1950101 - RNA, 19 nt, Artificial Sequence
  Description of Artificial Sequence: Synthetic oligonucleotide
cuggaauggacuugcccaa

SEQ ID NO: 1950102 - RNA, 19 nt, Artificial Sequence
  Description of Artificial Sequence: Synthetic oligonucleotide
gaguggugucucaucccag

SEQ ID NO: 1950103 - RNA, 19 nt, Artificial Sequence
  Description of Artificial Sequence: Synthetic oligonucleotide
acccuucuaggaucugagu

SEQ ID NO: 1950104 - RNA, 19 nt, Artificial Sequence
  Description of Artificial Sequence: Synthetic oligonucleotide
aggccaaauuuguucuuuu

SEQ ID NO: 1950105 - RNA, 19 nt, Artificial Sequence
  Description of Artificial Sequence: Synthetic oligonucleotide
uuaccgccauugcuccaga

SEQ ID NO: 1950106 - RNA, 19 nt, Artificial Sequence
  Description of Artificial Sequence: Synthetic oligonucleotide
cacugcaaagggaacugaa

SEQ ID NO: 1950107 - RNA, 19 nt, Artificial Sequence
  Description of Artificial Sequence: Synthetic oligonucleotide
gucaaacaggcugcuuggc

SEQ ID NO: 1950108 - RNA, 19 nt, Artificial Sequence
  Description of Artificial Sequence: Synthetic oligonucleotide
gcaaagggaacugaaauau

SEQ ID NO: 1950109 - RNA, 19 nt, Artificial Sequence
  Description of Artificial Sequence: Synthetic oligonucleotide
cuuaccugugauauccuuu

SEQ ID NO: 1950110 - RNA, 19 nt, Artificial Sequence
  Description of Artificial Sequence: Synthetic oligonucleotide
guacaccagcugugguucc

SEQ ID NO: 1950111 - RNA, 19 nt, Artificial Sequence
  Description of Artificial Sequence: Synthetic oligonucleotide
gguguggccaaugcuguac

SEQ ID NO: 1950112 - RNA, 19 nt, Artificial Sequence
  Description of Artificial Sequence: Synthetic oligonucleotide
ccaggacgcaucauaaaca

SEQ ID NO: 1950113 - RNA, 19 nt, Artificial Sequence
  Description of Artificial Sequence: Synthetic oligonucleotide
gaccugugugcacugugua

SEQ ID NO: 1950114 - RNA, 19 nt, Artificial Sequence
  Description of Artificial Sequence: Synthetic oligonucleotide
gagcaacugguugccagga

SEQ ID NO: 1950115 - RNA, 19 nt, Artificial Sequence
  Description of Artificial Sequence: Synthetic oligonucleotide
gaauccugcuuggaaauuu

SEQ ID NO: 1950116 - RNA, 19 nt, Artificial Sequence
  Description of Artificial Sequence: Synthetic oligonucleotide
ccuuccuuauaugcuagug

SEQ ID NO: 1950117 - RNA, 19 nt, Artificial Sequence
  Description of Artificial Sequence: Synthetic oligonucleotide
uaucugggcucaggcggcc

SEQ ID NO: 1950118 - RNA, 19 nt, Artificial Sequence
  Description of Artificial Sequence: Synthetic oligonucleotide
ccaguggugauggaaagca

SEQ ID NO: 1950119 - RNA, 19 nt, Artificial Sequence
  Description of Artificial Sequence: Synthetic oligonucleotide
gaauggcgggcacuccaaa

SEQ ID NO: 1950120 - RNA, 19 nt, Artificial Sequence
  Description of Artificial Sequence: Synthetic oligonucleotide
aauuccccucugcccuaaa

SEQ ID NO: 1950121 - RNA, 19 nt, Artificial Sequence
  Description of Artificial Sequence: Synthetic oligonucleotide
gcaucauaaacaggcuuca

SEQ ID NO: 1950122 - RNA, 19 nt, Artificial Sequence
  Description of Artificial Sequence: Synthetic oligonucleotide
uccagauguugagggcgga

SEQ ID NO: 1950123 - RNA, 19 nt, Artificial Sequence
  Description of Artificial Sequence: Synthetic oligonucleotide
ggaaagcaaggucuucuua

SEQ ID NO: 1950124 - RNA, 19 nt, Artificial Sequence
  Description of Artificial Sequence: Synthetic oligonucleotide
ccaagugcugauuggcuga

SEQ ID NO: 1950125 - RNA, 19 nt, Artificial Sequence
  Description of Artificial Sequence: Synthetic oligonucleotide
cauaaacaggcuucagcuu

SEQ ID NO: 1950126 - RNA, 19 nt, Artificial Sequence
  Description of Artificial Sequence: Synthetic oligonucleotide
ucauguccccguggacacc

SEQ ID NO: 1950127 - RNA, 19 nt, Artificial Sequence
  Description of Artificial Sequence: Synthetic oligonucleotide
gcugucagcuggaauggac

SEQ ID NO: 1950128 - RNA, 19 nt, Artificial Sequence
  Description of Artificial Sequence: Synthetic oligonucleotide
gacgcaucauaaacaggcu

SEQ ID NO: 1950129 - RNA, 19 nt, Artificial Sequence
  Description of Artificial Sequence: Synthetic oligonucleotide
agaguacauggagccgcug

SEQ ID NO: 1950130 - RNA, 19 nt, Artificial Sequence
  Description of Artificial Sequence: Synthetic oligonucleotide
  modified_base (9)..(9): a, c, u, g, unknown or other
ccccucggngacaagccag

SEQ ID NO: 1950131 - RNA, 19 nt, Artificial Sequence
  Description of Artificial Sequence: Synthetic oligonucleotide
cugaaugggccaauacaau

SEQ ID NO: 1950132 - RNA, 19 nt, Artificial Sequence
  Description of Artificial Sequence: Synthetic oligonucleotide
agaauggcgggcacuccaa

SEQ ID NO: 1950133 - RNA, 19 nt, Artificial Sequence
  Description of Artificial Sequence: Synthetic oligonucleotide
ggccuuccuuauaugcuag

SEQ ID NO: 1950134 - RNA, 19 nt, Artificial Sequence
  Description of Artificial Sequence: Synthetic oligonucleotide
cuaaaacgagucagucccu

SEQ ID NO: 1950135 - RNA, 19 nt, Artificial Sequence
  Description of Artificial Sequence: Synthetic oligonucleotide
gcccuaaaccacagagagg

SEQ ID NO: 1950136 - RNA, 19 nt, Artificial Sequence
  Description of Artificial Sequence: Synthetic oligonucleotide
cgauguccucucugaaugg

SEQ ID NO: 1950137 - RNA, 19 nt, Artificial Sequence
  Description of Artificial Sequence: Synthetic oligonucleotide
gauguugagggcggaucgu

SEQ ID NO: 1950138 - RNA, 19 nt, Artificial Sequence
  Description of Artificial Sequence: Synthetic oligonucleotide
cggaucguaguaccaagug

SEQ ID NO: 1950139 - RNA, 19 nt, Artificial Sequence
  Description of Artificial Sequence: Synthetic oligonucleotide
guagagugccacucugaau

SEQ ID NO: 1950140 - RNA, 19 nt, Artificial Sequence
  Description of Artificial Sequence: Synthetic oligonucleotide
cccguggacaccgugaaca

SEQ ID NO: 1950141 - RNA, 19 nt, Artificial Sequence
  Description of Artificial Sequence: Synthetic oligonucleotide
ggacaccgugaacagagua

SEQ ID NO: 1950142 - RNA, 19 nt, Artificial Sequence
  Description of Artificial Sequence: Synthetic oligonucleotide
cuguacaccagcugugguu

SEQ ID NO: 1950143 - RNA, 19 nt, Artificial Sequence
  Description of Artificial Sequence: Synthetic oligonucleotide
cguaguugaacgauguccu

SEQ ID NO: 1950144 - RNA, 19 nt, Artificial Sequence
  Description of Artificial Sequence: Synthetic oligonucleotide
gaccuggaagccacagaaa

SEQ ID NO: 1950145 - RNA, 19 nt, Artificial Sequence
  Description of Artificial Sequence: Synthetic oligonucleotide
aacaggcugcuuggcgcaa

SEQ ID NO: 1950146 - RNA, 19 nt, Artificial Sequence
  Description of Artificial Sequence: Synthetic oligonucleotide
augcuaguguugacucuga

SEQ ID NO: 1950147 - RNA, 19 nt, Artificial Sequence
  Description of Artificial Sequence: Synthetic oligonucleotide
agcuuaccugugauauccu

SEQ ID NO: 1950148 - RNA, 19 nt, Artificial Sequence
  Description of Artificial Sequence: Synthetic oligonucleotide
ggcgcaaaauagaguggug

SEQ ID NO: 1950149 - RNA, 19 nt, Artificial Sequence
  Description of Artificial Sequence: Synthetic oligonucleotide
cuuggaaauuuaggucaaa

SEQ ID NO: 1950150 - RNA, 19 nt, Artificial Sequence
  Description of Artificial Sequence: Synthetic oligonucleotide
guugaacgauguccucucu

SEQ ID NO: 1950151 - RNA, 19 nt, Artificial Sequence
  Description of Artificial Sequence: Synthetic oligonucleotide
ggcguaguugaacgauguc

SEQ ID NO: 1950152 - RNA, 19 nt, Artificial Sequence
  Description of Artificial Sequence: Synthetic oligonucleotide
gccacgauaucugggcuca

SEQ ID NO: 1950153 - RNA, 19 nt, Artificial Sequence
  Description of Artificial Sequence: Synthetic oligonucleotide
acgaggucugcagcuucca

SEQ ID NO: 1950154 - RNA, 19 nt, Artificial Sequence
  Description of Artificial Sequence: Synthetic oligonucleotide
cauggcguaguugaacgau

SEQ ID NO: 1950155 - RNA, 19 nt, Artificial Sequence
  Description of Artificial Sequence: Synthetic oligonucleotide
uaccgccauugcuccagau

SEQ ID NO: 1950156 - RNA, 19 nt, Artificial Sequence
  Description of Artificial Sequence: Synthetic oligonucleotide
gcgcaaaauagaguggugu

SEQ ID NO: 1950157 - RNA, 19 nt, Artificial Sequence
  Description of Artificial Sequence: Synthetic oligonucleotide
ggaauggacuugcccaagu

SEQ ID NO: 1950158 - RNA, 19 nt, Artificial Sequence
  Description of Artificial Sequence: Synthetic oligonucleotide
cagaaaggccaaauuuguu

SEQ ID NO: 1950159 - RNA, 19 nt, Artificial Sequence
  Description of Artificial Sequence: Synthetic oligonucleotide
cugaguccgggcaucuggu

SEQ ID NO: 1950160 - RNA, 19 nt, Artificial Sequence
  Description of Artificial Sequence: Synthetic oligonucleotide
guccccguggacaccguga

SEQ ID NO: 1950161 - RNA, 19 nt, Artificial Sequence
  Description of Artificial Sequence: Synthetic oligonucleotide
ccagauagucuccagucgu

SEQ ID NO: 1950162 - RNA, 19 nt, Artificial Sequence
  Description of Artificial Sequence: Synthetic oligonucleotide
ccucagucaugguuuucuc

SEQ ID NO: 1950163 - RNA, 19 nt, Artificial Sequence
  Description of Artificial Sequence: Synthetic oligonucleotide
uccacccuucuaggaucug

SEQ ID NO: 1950164 - RNA, 19 nt, Artificial Sequence
  Description of Artificial Sequence: Synthetic oligonucleotide
guccgggcaucuggugggg

SEQ ID NO: 1950165 - RNA, 19 nt, Artificial Sequence
  Description of Artificial Sequence: Synthetic oligonucleotide
ccugcuaaaacgagucagu

SEQ ID NO: 1950166 - RNA, 19 nt, Artificial Sequence
  Description of Artificial Sequence: Synthetic oligonucleotide
gcacucgcucaaaccaacc

SEQ ID NO: 1950167 - RNA, 19 nt, Artificial Sequence
  Description of Artificial Sequence: Synthetic oligonucleotide
ccgccauugcuccagaugu

SEQ ID NO: 1950168 - RNA, 19 nt, Artificial Sequence
  Description of Artificial Sequence: Synthetic oligonucleotide
gcuuggaaauuuaggucaa

SEQ ID NO: 1950169 - RNA, 19 nt, Artificial Sequence
  Description of Artificial Sequence: Synthetic oligonucleotide
cagaguacauggagccgcu

SEQ ID NO: 1950170 - RNA, 19 nt, Artificial Sequence
  Description of Artificial Sequence: Synthetic oligonucleotide
ccagucacugcucaguaau

SEQ ID NO: 1950171 - RNA, 19 nt, Artificial Sequence
  Description of Artificial Sequence: Synthetic oligonucleotide
gcauaugugaaggcaaauu

SEQ ID NO: 1950172 - RNA, 19 nt, Artificial Sequence
  Description of Artificial Sequence: Synthetic oligonucleotide
ucccucagucaugguuuuc

SEQ ID NO: 1950173 - RNA, 19 nt, Artificial Sequence
  Description of Artificial Sequence: Synthetic oligonucleotide
cagauagucuccagucguu

SEQ ID NO: 1950174 - RNA, 19 nt, Artificial Sequence
  Description of Artificial Sequence: Synthetic oligonucleotide
cccuaagaccugugugcac

SEQ ID NO: 1950175 - RNA, 19 nt, Artificial Sequence
  Description of Artificial Sequence: Synthetic oligonucleotide
cgugaacagaguacaugga

SEQ ID NO: 1950176 - RNA, 19 nt, Artificial Sequence
  Description of Artificial Sequence: Synthetic oligonucleotide
ccaagugauggcccacaga

SEQ ID NO: 1950177 - RNA, 19 nt, Artificial Sequence
  Description of Artificial Sequence: Synthetic oligonucleotide
guaguaccaagugcugauu

SEQ ID NO: 1950178 - RNA, 19 nt, Artificial Sequence
  Description of Artificial Sequence: Synthetic oligonucleotide
caggcugcuuggcgcaaaa

SEQ ID NO: 1950179 - RNA, 19 nt, Artificial Sequence
  Description of Artificial Sequence: Synthetic oligonucleotide
cugcguccuucagcuuacc

SEQ ID NO: 1950180 - RNA, 19 nt, Artificial Sequence
  Description of Artificial Sequence: Synthetic oligonucleotide
ggacgacguucaugucccc

SEQ ID NO: 1950181 - RNA, 19 nt, Artificial Sequence
  Description of Artificial Sequence: Synthetic oligonucleotide
cagccacgauaucugggcu

SEQ ID NO: 1950182 - RNA, 19 nt, Artificial Sequence
  Description of Artificial Sequence: Synthetic oligonucleotide
cguucauguccccguggac

SEQ ID NO: 1950183 - RNA, 19 nt, Artificial Sequence
  Description of Artificial Sequence: Synthetic oligonucleotide
gcugauuggcugagcaacu

SEQ ID NO: 1950184 - RNA, 19 nt, Artificial Sequence
  Description of Artificial Sequence: Synthetic oligonucleotide
gcuuaccugugauauccuu

SEQ ID NO: 1950185 - RNA, 19 nt, Artificial Sequence
  Description of Artificial Sequence: Synthetic oligonucleotide
cagucacugcucaguaauu

SEQ ID NO: 1950186 - RNA, 19 nt, Artificial Sequence
  Description of Artificial Sequence: Synthetic oligonucleotide
gggcggaucguaguaccaa

SEQ ID NO: 1950187 - RNA, 19 nt, Artificial Sequence
  Description of Artificial Sequence: Synthetic oligonucleotide
cguaguaccaagugcugau

SEQ ID NO: 1950188 - RNA, 19 nt, Artificial Sequence
  Description of Artificial Sequence: Synthetic oligonucleotide
caauuccccucugcccuaa

SEQ ID NO: 1950189 - RNA, 19 nt, Artificial Sequence
  Description of Artificial Sequence: Synthetic oligonucleotide
  modified_base (7)..(7): a, c, u, g, unknown or other
ccucggngacaagccaguc

SEQ ID NO: 1950190 - RNA, 19 nt, Artificial Sequence
  Description of Artificial Sequence: Synthetic oligonucleotide
gcuuggcgcaaaauagagu

SEQ ID NO: 1950191 - RNA, 19 nt, Artificial Sequence
  Description of Artificial Sequence: Synthetic oligonucleotide
gcaauuccccucugcccua

SEQ ID NO: 1950192 - RNA, 19 nt, Artificial Sequence
  Description of Artificial Sequence: Synthetic oligonucleotide
ggccccaguggugauggaa

SEQ ID NO: 1950193 - RNA, 19 nt, Artificial Sequence
  Description of Artificial Sequence: Synthetic oligonucleotide
ccacccuucuaggaucuga

SEQ ID NO: 1950194 - RNA, 19 nt, Artificial Sequence
  Description of Artificial Sequence: Synthetic oligonucleotide
caccgugaacagaguacau

SEQ ID NO: 1950195 - RNA, 19 nt, Artificial Sequence
  Description of Artificial Sequence: Synthetic oligonucleotide
auggagccgcuggccccag

SEQ ID NO: 1950196 - RNA, 19 nt, Artificial Sequence
  Description of Artificial Sequence: Synthetic oligonucleotide
gcugagcaacugguugcca

SEQ ID NO: 1950197 - RNA, 19 nt, Artificial Sequence
  Description of Artificial Sequence: Synthetic oligonucleotide
gcggaucguaguaccaagu

SEQ ID NO: 1950198 - RNA, 19 nt, Artificial Sequence
  Description of Artificial Sequence: Synthetic oligonucleotide
cuacagcagccuccuucau

SEQ ID NO: 1950199 - RNA, 19 nt, Artificial Sequence
  Description of Artificial Sequence: Synthetic oligonucleotide
  modified_base (8)..(8): a, c, u, g, unknown or other
cccucggngacaagccagu

SEQ ID NO: 1950200 - RNA, 19 nt, Artificial Sequence
  Description of Artificial Sequence: Synthetic oligonucleotide
gcccacagaaaggccaaau

SEQ ID NO: 1950201 - RNA, 19 nt, Artificial Sequence
  Description of Artificial Sequence: Synthetic oligonucleotide
caauacaaucagggcucuu

SEQ ID NO: 1950202 - RNA, 19 nt, Artificial Sequence
  Description of Artificial Sequence: Synthetic oligonucleotide
ccacgauaucugggcucag

SEQ ID NO: 1950203 - RNA, 19 nt, Artificial Sequence
  Description of Artificial Sequence: Synthetic oligonucleotide
ccaauacaaucagggcucu

SEQ ID NO: 1950204 - RNA, 19 nt, Artificial Sequence
  Description of Artificial Sequence: Synthetic oligonucleotide
ggccuuugucauacauggu

SEQ ID NO: 1950205 - RNA, 19 nt, Artificial Sequence
  Description of Artificial Sequence: Synthetic oligonucleotide
ggcucuucuuaccgccauu

SEQ ID NO: 1950206 - RNA, 19 nt, Artificial Sequence
  Description of Artificial Sequence: Synthetic oligonucleotide
ccgcuggccccagugguga

SEQ ID NO: 1950207 - RNA, 19 nt, Artificial Sequence
  Description of Artificial Sequence: Synthetic oligonucleotide
cguggacaccgugaacaga

SEQ ID NO: 1950208 - RNA, 19 nt, Artificial Sequence
  Description of Artificial Sequence: Synthetic oligonucleotide
  modified_base (4)..(4): a, c, u, g, unknown or other
cggngacaagccagucacu

SEQ ID NO: 1950209 - RNA, 19 nt, Artificial Sequence
  Description of Artificial Sequence: Synthetic oligonucleotide
gggcucaggcggccuuccu

SEQ ID NO: 1950210 - RNA, 19 nt, Artificial Sequence
  Description of Artificial Sequence: Synthetic oligonucleotide
ucugaaagaacauugcucg

SEQ ID NO: 1950211 - RNA, 19 nt, Artificial Sequence
  Description of Artificial Sequence: Synthetic oligonucleotide
agugcuuuuauaugaaucc

SEQ ID NO: 1950212 - RNA, 19 nt, Artificial Sequence
  Description of Artificial Sequence: Synthetic oligonucleotide
aaagauaacugucuugguc

SEQ ID NO: 1950213 - RNA, 19 nt, Artificial Sequence
  Description of Artificial Sequence: Synthetic oligonucleotide
aaacgcauccaguuuagcc

SEQ ID NO: 1950214 - RNA, 19 nt, Artificial Sequence
  Description of Artificial Sequence: Synthetic oligonucleotide
uuuuauaugaauccaugca

SEQ ID NO: 1950215 - RNA, 19 nt, Artificial Sequence
  Description of Artificial Sequence: Synthetic oligonucleotide
uguuauauaagugaccaag

SEQ ID NO: 1950216 - RNA, 19 nt, Artificial Sequence
  Description of Artificial Sequence: Synthetic oligonucleotide
uauauaagugaccaaguca

SEQ ID NO: 1950217 - RNA, 19 nt, Artificial Sequence
  Description of Artificial Sequence: Synthetic oligonucleotide
uggauauuuggccauaucc

SEQ ID NO: 1950218 - RNA, 19 nt, Artificial Sequence
  Description of Artificial Sequence: Synthetic oligonucleotide
cauaccuuaaaacagacuc

SEQ ID NO: 1950219 - RNA, 19 nt, Artificial Sequence
  Description of Artificial Sequence: Synthetic oligonucleotide
gaauccaugcaauaaacgc

SEQ ID NO: 1950220 - RNA, 19 nt, Artificial Sequence
  Description of Artificial Sequence: Synthetic oligonucleotide
uaagccaccgcacaagugg

SEQ ID NO: 1950221 - RNA, 19 nt, Artificial Sequence
  Description of Artificial Sequence: Synthetic oligonucleotide
aacagacucgacgaaaacc

SEQ ID NO: 1950222 - RNA, 19 nt, Artificial Sequence
  Description of Artificial Sequence: Synthetic oligonucleotide
aagugaccaagucaacucc

SEQ ID NO: 1950223 - RNA, 19 nt, Artificial Sequence
  Description of Artificial Sequence: Synthetic oligonucleotide
ucgacgaaaacccuuagug

SEQ ID NO: 1950224 - RNA, 19 nt, Artificial Sequence
  Description of Artificial Sequence: Synthetic oligonucleotide
uauugcuuaauccagucgu

SEQ ID NO: 1950225 - RNA, 19 nt, Artificial Sequence
  Description of Artificial Sequence: Synthetic oligonucleotide
ugaacuuugucuuugcugu

SEQ ID NO: 1950226 - RNA, 19 nt, Artificial Sequence
  Description of Artificial Sequence: Synthetic oligonucleotide
ugaaauucacuuuaagcca

SEQ ID NO: 1950227 - RNA, 19 nt, Artificial Sequence
  Description of Artificial Sequence: Synthetic oligonucleotide
uauacuggaagucacgaac

SEQ ID NO: 1950228 - RNA, 19 nt, Artificial Sequence
  Description of Artificial Sequence: Synthetic oligonucleotide
aaccuuguuauauaaguga

SEQ ID NO: 1950229 - RNA, 19 nt, Artificial Sequence
  Description of Artificial Sequence: Synthetic oligonucleotide
aguuuuacuacacugcugu

SEQ ID NO: 1950230 - RNA, 19 nt, Artificial Sequence
  Description of Artificial Sequence: Synthetic oligonucleotide
aaugugccaaccuuuaagu

SEQ ID NO: 1950231 - RNA, 19 nt, Artificial Sequence
  Description of Artificial Sequence: Synthetic oligonucleotide
ugaauccaugcaauaaacg

SEQ ID NO: 1950232 - RNA, 19 nt, Artificial Sequence
  Description of Artificial Sequence: Synthetic oligonucleotide
ucaguugacagccuguuca

SEQ ID NO: 1950233 - RNA, 19 nt, Artificial Sequence
  Description of Artificial Sequence: Synthetic oligonucleotide
uuuguuaccucucuggaaa

SEQ ID NO: 1950234 - RNA, 19 nt, Artificial Sequence
  Description of Artificial Sequence: Synthetic oligonucleotide
aacguuacaaagauaacug

SEQ ID NO: 1950235 - RNA, 19 nt, Artificial Sequence
  Description of Artificial Sequence: Synthetic oligonucleotide
cuuuuauaugaauccaugc

SEQ ID NO: 1950236 - RNA, 19 nt, Artificial Sequence
  Description of Artificial Sequence: Synthetic oligonucleotide
acagacucgacgaaaaccc

SEQ ID NO: 1950237 - RNA, 19 nt, Artificial Sequence
  Description of Artificial Sequence: Synthetic oligonucleotide
aacgcauccaguuuagcca

SEQ ID NO: 1950238 - RNA, 19 nt, Artificial Sequence
  Description of Artificial Sequence: Synthetic oligonucleotide
acaagguaacguuacaaag

SEQ ID NO: 1950239 - RNA, 19 nt, Artificial Sequence
  Description of Artificial Sequence: Synthetic oligonucleotide
aaacgccucacugaaauuc

SEQ ID NO: 1950240 - RNA, 19 nt, Artificial Sequence
  Description of Artificial Sequence: Synthetic oligonucleotide
aaccaagacauccaaugug

SEQ ID NO: 1950241 - RNA, 19 nt, Artificial Sequence
  Description of Artificial Sequence: Synthetic oligonucleotide
aagguaacguuacaaagau

SEQ ID NO: 1950242 - RNA, 19 nt, Artificial Sequence
  Description of Artificial Sequence: Synthetic oligonucleotide
gaagucacgaacuauguaa

SEQ ID NO: 1950243 - RNA, 19 nt, Artificial Sequence
  Description of Artificial Sequence: Synthetic oligonucleotide
ugugccaaccuuuaaguca

SEQ ID NO: 1950244 - RNA, 19 nt, Artificial Sequence
  Description of Artificial Sequence: Synthetic oligonucleotide
ucaacugucuuuucuaaac

SEQ ID NO: 1950245 - RNA, 19 nt, Artificial Sequence
  Description of Artificial Sequence: Synthetic oligonucleotide
uuaggcugaaggagcaucg

SEQ ID NO: 1950246 - RNA, 19 nt, Artificial Sequence
  Description of Artificial Sequence: Synthetic oligonucleotide
aguuuagccaguucauccg

SEQ ID NO: 1950247 - RNA, 19 nt, Artificial Sequence
  Description of Artificial Sequence: Synthetic oligonucleotide
ugugucugaaaucaucaac

SEQ ID NO: 1950248 - RNA, 19 nt, Artificial Sequence
  Description of Artificial Sequence: Synthetic oligonucleotide
ucagauuauuguaugcaga

SEQ ID NO: 1950249 - RNA, 19 nt, Artificial Sequence
  Description of Artificial Sequence: Synthetic oligonucleotide
acucagucauguuuguuac

SEQ ID NO: 1950250 - RNA, 19 nt, Artificial Sequence
  Description of Artificial Sequence: Synthetic oligonucleotide
gaaaucagcggagaagccg

SEQ ID NO: 1950251 - RNA, 19 nt, Artificial Sequence
  Description of Artificial Sequence: Synthetic oligonucleotide
aaaucagcggagaagccgg

SEQ ID NO: 1950252 - RNA, 19 nt, Artificial Sequence
  Description of Artificial Sequence: Synthetic oligonucleotide
gaaagaacauugcucgacc

SEQ ID NO: 1950253 - RNA, 19 nt, Artificial Sequence
  Description of Artificial Sequence: Synthetic oligonucleotide
cuuguauagcucaugcagc

SEQ ID NO: 1950254 - RNA, 19 nt, Artificial Sequence
  Description of Artificial Sequence: Synthetic oligonucleotide
uuucuaaacaagguaacgu

SEQ ID NO: 1950255 - RNA, 19 nt, Artificial Sequence
  Description of Artificial Sequence: Synthetic oligonucleotide
aacucagucauguuuguua

SEQ ID NO: 1950256 - RNA, 19 nt, Artificial Sequence
  Description of Artificial Sequence: Synthetic oligonucleotide
aacuccacuggccaacaag

SEQ ID NO: 1950257 - RNA, 19 nt, Artificial Sequence
  Description of Artificial Sequence: Synthetic oligonucleotide
gauauuuggccauauccca

SEQ ID NO: 1950258 - RNA, 19 nt, Artificial Sequence
  Description of Artificial Sequence: Synthetic oligonucleotide
agaacauugcucgaccucg

SEQ ID NO: 1950259 - RNA, 19 nt, Artificial Sequence
  Description of Artificial Sequence: Synthetic oligonucleotide
ucuacaaacgcauccaguu

SEQ ID NO: 1950260 - RNA, 19 nt, Artificial Sequence
  Description of Artificial Sequence: Synthetic oligonucleotide
ucacgaacuauguaacuug

SEQ ID NO: 1950261 - RNA, 19 nt, Artificial Sequence
  Description of Artificial Sequence: Synthetic oligonucleotide
cagauuauuguaugcagac

SEQ ID NO: 1950262 - RNA, 19 nt, Artificial Sequence
  Description of Artificial Sequence: Synthetic oligonucleotide
uuucagauuauuguaugca

SEQ ID NO: 1950263 - RNA, 19 nt, Artificial Sequence
  Description of Artificial Sequence: Synthetic oligonucleotide
aagucacgaacuauguaac

SEQ ID NO: 1950264 - RNA, 19 nt, Artificial Sequence
  Description of Artificial Sequence: Synthetic oligonucleotide
cuuucagauuauuguaugc

SEQ ID NO: 1950265 - RNA, 19 nt, Artificial Sequence
  Description of Artificial Sequence: Synthetic oligonucleotide
auauaagugaccaagucaa

SEQ ID NO: 1950266 - RNA, 19 nt, Artificial Sequence
  Description of Artificial Sequence: Synthetic oligonucleotide
ucuaaacaagguaacguua

SEQ ID NO: 1950267 - RNA, 19 nt, Artificial Sequence
  Description of Artificial Sequence: Synthetic oligonucleotide
caguuuagccaguucaucc

SEQ ID NO: 1950268 - RNA, 19 nt, Artificial Sequence
  Description of Artificial Sequence: Synthetic oligonucleotide
auucacuuuaagccaccgc

SEQ ID NO: 1950269 - RNA, 19 nt, Artificial Sequence
  Description of Artificial Sequence: Synthetic oligonucleotide
cuuguuauauaagugacca

SEQ ID NO: 1950270 - RNA, 19 nt, Artificial Sequence
  Description of Artificial Sequence: Synthetic oligonucleotide
uguuuguuaccucucugga

SEQ ID NO: 1950271 - RNA, 19 nt, Artificial Sequence
  Description of Artificial Sequence: Synthetic oligonucleotide
gcuuguauagcucaugcag

SEQ ID NO: 1950272 - RNA, 19 nt, Artificial Sequence
  Description of Artificial Sequence: Synthetic oligonucleotide
uacaaagauaacugucuug

SEQ ID NO: 1950273 - RNA, 19 nt, Artificial Sequence
  Description of Artificial Sequence: Synthetic oligonucleotide
uaagugaccaagucaacuc

SEQ ID NO: 1950274 - RNA, 19 nt, Artificial Sequence
  Description of Artificial Sequence: Synthetic oligonucleotide
gucaaucugagucacuccc

SEQ ID NO: 1950275 - RNA, 19 nt, Artificial Sequence
  Description of Artificial Sequence: Synthetic oligonucleotide
agaacaaagucaucuuucu

SEQ ID NO: 1950276 - RNA, 19 nt, Artificial Sequence
  Description of Artificial Sequence: Synthetic oligonucleotide
aggagcaucgcuuggaagu

SEQ ID NO: 1950277 - RNA, 19 nt, Artificial Sequence
  Description of Artificial Sequence: Synthetic oligonucleotide
aaauucacuuuaagccacc

SEQ ID NO: 1950278 - RNA, 19 nt, Artificial Sequence
  Description of Artificial Sequence: Synthetic oligonucleotide
uacaaacgcauccaguuua

SEQ ID NO: 1950279 - RNA, 19 nt, Artificial Sequence
  Description of Artificial Sequence: Synthetic oligonucleotide
cuuaauccagucguugugg

SEQ ID NO: 1950280 - RNA, 19 nt, Artificial Sequence
  Description of Artificial Sequence: Synthetic oligonucleotide
uucuaaacaagguaacguu

SEQ ID NO: 1950281 - RNA, 19 nt, Artificial Sequence
  Description of Artificial Sequence: Synthetic oligonucleotide
caagccaaccaagacaucc

SEQ ID NO: 1950282 - RNA, 19 nt, Artificial Sequence
  Description of Artificial Sequence: Synthetic oligonucleotide
cuccgagucagcaaacucc

SEQ ID NO: 1950283 - RNA, 19 nt, Artificial Sequence
  Description of Artificial Sequence: Synthetic oligonucleotide
aauucacuuuaagccaccg

SEQ ID NO: 1950284 - RNA, 19 nt, Artificial Sequence
  Description of Artificial Sequence: Synthetic oligonucleotide
uacuacacugcugucuugg

SEQ ID NO: 1950285 - RNA, 19 nt, Artificial Sequence
  Description of Artificial Sequence: Synthetic oligonucleotide
aaacuccccgcuucuuucg

SEQ ID NO: 1950286 - RNA, 19 nt, Artificial Sequence
  Description of Artificial Sequence: Synthetic oligonucleotide
ugaacuuggaagagaccgc

SEQ ID NO: 1950287 - RNA, 19 nt, Artificial Sequence
  Description of Artificial Sequence: Synthetic oligonucleotide
uccgagucagcaaacuccc

SEQ ID NO: 1950288 - RNA, 19 nt, Artificial Sequence
  Description of Artificial Sequence: Synthetic oligonucleotide
gguaacguuacaaagauaa

SEQ ID NO: 1950289 - RNA, 19 nt, Artificial Sequence
  Description of Artificial Sequence: Synthetic oligonucleotide
accuuguuauauaagugac

SEQ ID NO: 1950290 - RNA, 19 nt, Artificial Sequence
  Description of Artificial Sequence: Synthetic oligonucleotide
agacgcucgagauuucagg

SEQ ID NO: 1950291 - RNA, 19 nt, Artificial Sequence
  Description of Artificial Sequence: Synthetic oligonucleotide
ucaugcagcacuucucuga

SEQ ID NO: 1950292 - RNA, 19 nt, Artificial Sequence
  Description of Artificial Sequence: Synthetic oligonucleotide
ugagagcguuuucauauug

SEQ ID NO: 1950293 - RNA, 19 nt, Artificial Sequence
  Description of Artificial Sequence: Synthetic oligonucleotide
gucguugugguucaacuug

SEQ ID NO: 1950294 - RNA, 19 nt, Artificial Sequence
  Description of Artificial Sequence: Synthetic oligonucleotide
auaccuuaaaacagacucg

SEQ ID NO: 1950295 - RNA, 19 nt, Artificial Sequence
  Description of Artificial Sequence: Synthetic oligonucleotide
aacauugcucgaccucggg

SEQ ID NO: 1950296 - RNA, 19 nt, Artificial Sequence
  Description of Artificial Sequence: Synthetic oligonucleotide
gaaggugucucacgcggcg

SEQ ID NO: 1950297 - RNA, 19 nt, Artificial Sequence
  Description of Artificial Sequence: Synthetic oligonucleotide
cuuagcaauuauuucagaa

SEQ ID NO: 1950298 - RNA, 19 nt, Artificial Sequence
  Description of Artificial Sequence: Synthetic oligonucleotide
uuaaaacagacucgacgaa

SEQ ID NO: 1950299 - RNA, 19 nt, Artificial Sequence
  Description of Artificial Sequence: Synthetic oligonucleotide
gacgaaaacccuuagugcu

SEQ ID NO: 1950300 - RNA, 19 nt, Artificial Sequence
  Description of Artificial Sequence: Synthetic oligonucleotide
agagcguuuucauauugcu

SEQ ID NO: 1950301 - RNA, 19 nt, Artificial Sequence
  Description of Artificial Sequence: Synthetic oligonucleotide
cacaagugguccaaacugc

SEQ ID NO: 1950302 - RNA, 19 nt, Artificial Sequence
  Description of Artificial Sequence: Synthetic oligonucleotide
aaacccuuagugcuuuuau

SEQ ID NO: 1950303 - RNA, 19 nt, Artificial Sequence
  Description of Artificial Sequence: Synthetic oligonucleotide
agauuauuguaugcagacg

SEQ ID NO: 1950304 - RNA, 19 nt, Artificial Sequence
  Description of Artificial Sequence: Synthetic oligonucleotide
uaguuuuacuacacugcug

SEQ ID NO: 1950305 - RNA, 19 nt, Artificial Sequence
  Description of Artificial Sequence: Synthetic oligonucleotide
uguaugcagacgcucgaga

SEQ ID NO: 1950306 - RNA, 19 nt, Artificial Sequence
  Description of Artificial Sequence: Synthetic oligonucleotide
cauugcucgaccucgggac

SEQ ID NO: 1950307 - RNA, 19 nt, Artificial Sequence
  Description of Artificial Sequence: Synthetic oligonucleotide
auugcucgaccucgggacc

SEQ ID NO: 1950308 - RNA, 19 nt, Artificial Sequence
  Description of Artificial Sequence: Synthetic oligonucleotide
auuauacuggaagucacga

SEQ ID NO: 1950309 - RNA, 19 nt, Artificial Sequence
  Description of Artificial Sequence: Synthetic oligonucleotide
gauguugaacuuggaagag

SEQ ID NO: 1950310 - RNA, 19 nt, Artificial Sequence
  Description of Artificial Sequence: Synthetic oligonucleotide
acccuuagugcuuuuauau

SEQ ID NO: 1950311 - RNA, 19 nt, Artificial Sequence
  Description of Artificial Sequence: Synthetic oligonucleotide
ucagcaaacuccccgcuuc

SEQ ID NO: 1950312 - RNA, 19 nt, Artificial Sequence
  Description of Artificial Sequence: Synthetic oligonucleotide
auaagugaccaagucaacu

SEQ ID NO: 1950313 - RNA, 19 nt, Artificial Sequence
  Description of Artificial Sequence: Synthetic oligonucleotide
uuauuguucuugguaguug

SEQ ID NO: 1950314 - RNA, 19 nt, Artificial Sequence
  Description of Artificial Sequence: Synthetic oligonucleotide
uucuacaaacgcauccagu

SEQ ID NO: 1950315 - RNA, 19 nt, Artificial Sequence
  Description of Artificial Sequence: Synthetic oligonucleotide
uucacgauuucugccaggc

SEQ ID NO: 1950316 - RNA, 19 nt, Artificial Sequence
  Description of Artificial Sequence: Synthetic oligonucleotide
gguacucugagucaagaac

SEQ ID NO: 1950317 - RNA, 19 nt, Artificial Sequence
  Description of Artificial Sequence: Synthetic oligonucleotide
aaggagcaucgcuuggaag

SEQ ID NO: 1950318 - RNA, 19 nt, Artificial Sequence
  Description of Artificial Sequence: Synthetic oligonucleotide
uaaaacagacucgacgaaa

SEQ ID NO: 1950319 - RNA, 19 nt, Artificial Sequence
  Description of Artificial Sequence: Synthetic oligonucleotide
uggaagucacgaacuaugu

SEQ ID NO: 1950320 - RNA, 19 nt, Artificial Sequence
  Description of Artificial Sequence: Synthetic oligonucleotide
ugcuuaauccagucguugu

SEQ ID NO: 1950321 - RNA, 19 nt, Artificial Sequence
  Description of Artificial Sequence: Synthetic oligonucleotide
agcgugaccagguacucug

SEQ ID NO: 1950322 - RNA, 19 nt, Artificial Sequence
  Description of Artificial Sequence: Synthetic oligonucleotide
accgcaagguuauuguucu

SEQ ID NO: 1950323 - RNA, 19 nt, Artificial Sequence
  Description of Artificial Sequence: Synthetic oligonucleotide
uccgacaagccaaccaaga

SEQ ID NO: 1950324 - RNA, 19 nt, Artificial Sequence
  Description of Artificial Sequence: Synthetic oligonucleotide
uugaccacgccuucuacaa

SEQ ID NO: 1950325 - RNA, 19 nt, Artificial Sequence
  Description of Artificial Sequence: Synthetic oligonucleotide
ggauauuuggccauauccc

SEQ ID NO: 1950326 - RNA, 19 nt, Artificial Sequence
  Description of Artificial Sequence: Synthetic oligonucleotide
ggauguugaacuuggaaga

SEQ ID NO: 1950327 - RNA, 19 nt, Artificial Sequence
  Description of Artificial Sequence: Synthetic oligonucleotide
gaccacgccuucuacaaac

SEQ ID NO: 1950328 - RNA, 19 nt, Artificial Sequence
  Description of Artificial Sequence: Synthetic oligonucleotide
cugagucaagaacaaaguc

SEQ ID NO: 1950329 - RNA, 19 nt, Artificial Sequence
  Description of Artificial Sequence: Synthetic oligonucleotide
uauaagugaccaagucaac

SEQ ID NO: 1950330 - RNA, 19 nt, Artificial Sequence
  Description of Artificial Sequence: Synthetic oligonucleotide
acguuacaaagauaacugu

SEQ ID NO: 1950331 - RNA, 19 nt, Artificial Sequence
  Description of Artificial Sequence: Synthetic oligonucleotide
caugcaauaaacgccucac

SEQ ID NO: 1950332 - RNA, 19 nt, Artificial Sequence
  Description of Artificial Sequence: Synthetic oligonucleotide
uuaauccagucguuguggu

SEQ ID NO: 1950333 - RNA, 19 nt, Artificial Sequence
  Description of Artificial Sequence: Synthetic oligonucleotide
uuaagccaccgcacaagug

SEQ ID NO: 1950334 - RNA, 19 nt, Artificial Sequence
  Description of Artificial Sequence: Synthetic oligonucleotide
ucgcuuggaaguucacggg

SEQ ID NO: 1950335 - RNA, 19 nt, Artificial Sequence
  Description of Artificial Sequence: Synthetic oligonucleotide
uuggaagagaccgcaaggu

SEQ ID NO: 1950336 - RNA, 19 nt, Artificial Sequence
  Description of Artificial Sequence: Synthetic oligonucleotide
ccaaccaagacauccaaug

SEQ ID NO: 1950337 - RNA, 19 nt, Artificial Sequence
  Description of Artificial Sequence: Synthetic oligonucleotide
guacucugagucaagaaca

SEQ ID NO: 1950338 - RNA, 19 nt, Artificial Sequence
  Description of Artificial Sequence: Synthetic oligonucleotide
ucgagauuucaggucauug

SEQ ID NO: 1950339 - RNA, 19 nt, Artificial Sequence
  Description of Artificial Sequence: Synthetic oligonucleotide
ugggugcuuguauagcuca

SEQ ID NO: 1950340 - RNA, 19 nt, Artificial Sequence
  Description of Artificial Sequence: Synthetic oligonucleotide
uuucgcuccaaguucugaa

SEQ ID NO: 1950341 - RNA, 19 nt, Artificial Sequence
  Description of Artificial Sequence: Synthetic oligonucleotide
uuauacuggaagucacgaa

SEQ ID NO: 1950342 - RNA, 19 nt, Artificial Sequence
  Description of Artificial Sequence: Synthetic oligonucleotide
uuauuguaugcagacgcuc

SEQ ID NO: 1950343 - RNA, 19 nt, Artificial Sequence
  Description of Artificial Sequence: Synthetic oligonucleotide
agauugcuugauuggauau

SEQ ID NO: 1950344 - RNA, 19 nt, Artificial Sequence
  Description of Artificial Sequence: Synthetic oligonucleotide
gcacaagugguccaaacug

SEQ ID NO: 1950345 - RNA, 19 nt, Artificial Sequence
  Description of Artificial Sequence: Synthetic oligonucleotide
uggccaacaaguucuccug

SEQ ID NO: 1950346 - RNA, 19 nt, Artificial Sequence
  Description of Artificial Sequence: Synthetic oligonucleotide
cuuuaagccaccgcacaag

SEQ ID NO: 1950347 - RNA, 19 nt, Artificial Sequence
  Description of Artificial Sequence: Synthetic oligonucleotide
cagauaugagccagaacuc

SEQ ID NO: 1950348 - RNA, 19 nt, Artificial Sequence
  Description of Artificial Sequence: Synthetic oligonucleotide
agauaugagccagaacuca

SEQ ID NO: 1950349 - RNA, 19 nt, Artificial Sequence
  Description of Artificial Sequence: Synthetic oligonucleotide
ucgcuccaaguucugaaga

SEQ ID NO: 1950350 - RNA, 19 nt, Artificial Sequence
  Description of Artificial Sequence: Synthetic oligonucleotide
aggugucucacgcggcggc

SEQ ID NO: 1950351 - RNA, 19 nt, Artificial Sequence
  Description of Artificial Sequence: Synthetic oligonucleotide
uuagugcuuuuauaugaau

SEQ ID NO: 1950352 - RNA, 19 nt, Artificial Sequence
  Description of Artificial Sequence: Synthetic oligonucleotide
uccaguuuagccaguucau

SEQ ID NO: 1950353 - RNA, 19 nt, Artificial Sequence
  Description of Artificial Sequence: Synthetic oligonucleotide
ugcuuguauagcucaugca

SEQ ID NO: 1950354 - RNA, 19 nt, Artificial Sequence
  Description of Artificial Sequence: Synthetic oligonucleotide
acuauguaacuuguuuucu

SEQ ID NO: 1950355 - RNA, 19 nt, Artificial Sequence
  Description of Artificial Sequence: Synthetic oligonucleotide
agauaacugucuugguccu

SEQ ID NO: 1950356 - RNA, 19 nt, Artificial Sequence
  Description of Artificial Sequence: Synthetic oligonucleotide
aggccauaccuuaaaacag

SEQ ID NO: 1950357 - RNA, 19 nt, Artificial Sequence
  Description of Artificial Sequence: Synthetic oligonucleotide
agacauccaaugugccaac

SEQ ID NO: 1950358 - RNA, 19 nt, Artificial Sequence
  Description of Artificial Sequence: Synthetic oligonucleotide
auccaugcaauaaacgccu

SEQ ID NO: 1950359 - RNA, 19 nt, Artificial Sequence
  Description of Artificial Sequence: Synthetic oligonucleotide
cucauuauacuggaaguca

SEQ ID NO: 1950360 - RNA, 19 nt, Artificial Sequence
  Description of Artificial Sequence: Synthetic oligonucleotide
aacccuuagugcuuuuaua

SEQ ID NO: 1950361 - RNA, 19 nt, Artificial Sequence
  Description of Artificial Sequence: Synthetic oligonucleotide
uauagcucaugcagcacuu

SEQ ID NO: 1950362 - RNA, 19 nt, Artificial Sequence
  Description of Artificial Sequence: Synthetic oligonucleotide
caauaaacgccucacugaa

SEQ ID NO: 1950363 - RNA, 19 nt, Artificial Sequence
  Description of Artificial Sequence: Synthetic oligonucleotide
gagagcguuuucauauugc

SEQ ID NO: 1950364 - RNA, 19 nt, Artificial Sequence
  Description of Artificial Sequence: Synthetic oligonucleotide
ugaccaagucaacuccacu

SEQ ID NO: 1950365 - RNA, 19 nt, Artificial Sequence
  Description of Artificial Sequence: Synthetic oligonucleotide
cuuggaaguucacgggcag

SEQ ID NO: 1950366 - RNA, 19 nt, Artificial Sequence
  Description of Artificial Sequence: Synthetic oligonucleotide
agugguccaaacugcuucu

SEQ ID NO: 1950367 - RNA, 19 nt, Artificial Sequence
  Description of Artificial Sequence: Synthetic oligonucleotide
gagauugcuugauuggaua

SEQ ID NO: 1950368 - RNA, 19 nt, Artificial Sequence
  Description of Artificial Sequence: Synthetic oligonucleotide
ucucuggucuuugugucug

SEQ ID NO: 1950369 - RNA, 19 nt, Artificial Sequence
  Description of Artificial Sequence: Synthetic oligonucleotide
agucacgaacuauguaacu

SEQ ID NO: 1950370 - RNA, 19 nt, Artificial Sequence
  Description of Artificial Sequence: Synthetic oligonucleotide
uaugcagacgcucgagauu

SEQ ID NO: 1950371 - RNA, 19 nt, Artificial Sequence
  Description of Artificial Sequence: Synthetic oligonucleotide
ucagcggagaagccgggaa

SEQ ID NO: 1950372 - RNA, 19 nt, Artificial Sequence
  Description of Artificial Sequence: Synthetic oligonucleotide
caucgcuuggaaguucacg

SEQ ID NO: 1950373 - RNA, 19 nt, Artificial Sequence
  Description of Artificial Sequence: Synthetic oligonucleotide
uuguuauauaagugaccaa

SEQ ID NO: 1950374 - RNA, 19 nt, Artificial Sequence
  Description of Artificial Sequence: Synthetic oligonucleotide
ucuugggugcuuguauagc

SEQ ID NO: 1950375 - RNA, 19 nt, Artificial Sequence
  Description of Artificial Sequence: Synthetic oligonucleotide
uuguaugcagacgcucgag

SEQ ID NO: 1950376 - RNA, 19 nt, Artificial Sequence
  Description of Artificial Sequence: Synthetic oligonucleotide
acauugcucgaccucggga

SEQ ID NO: 1950377 - RNA, 19 nt, Artificial Sequence
  Description of Artificial Sequence: Synthetic oligonucleotide
cucccuuagcaauuauuuc

SEQ ID NO: 1950378 - RNA, 19 nt, Artificial Sequence
  Description of Artificial Sequence: Synthetic oligonucleotide
auacuggaagucacgaacu

SEQ ID NO: 1950379 - RNA, 19 nt, Artificial Sequence
  Description of Artificial Sequence: Synthetic oligonucleotide
gcaauaaacgccucacuga

SEQ ID NO: 1950380 - RNA, 19 nt, Artificial Sequence
  Description of Artificial Sequence: Synthetic oligonucleotide
ccuuguuauauaagugacc

SEQ ID NO: 1950381 - RNA, 19 nt, Artificial Sequence
  Description of Artificial Sequence: Synthetic oligonucleotide
gacaagccaaccaagacau

SEQ ID NO: 1950382 - RNA, 19 nt, Artificial Sequence
  Description of Artificial Sequence: Synthetic oligonucleotide
augcaauaaacgccucacu

SEQ ID NO: 1950383 - RNA, 19 nt, Artificial Sequence
  Description of Artificial Sequence: Synthetic oligonucleotide
uugggugcuuguauagcuc

SEQ ID NO: 1950384 - RNA, 19 nt, Artificial Sequence
  Description of Artificial Sequence: Synthetic oligonucleotide
uggaagagaccgcaagguu

SEQ ID NO: 1950385 - RNA, 19 nt, Artificial Sequence
  Description of Artificial Sequence: Synthetic oligonucleotide
aacgccucacugaaauuca

SEQ ID NO: 1950386 - RNA, 19 nt, Artificial Sequence
  Description of Artificial Sequence: Synthetic oligonucleotide
gaacauugcucgaccucgg

SEQ ID NO: 1950387 - RNA, 19 nt, Artificial Sequence
  Description of Artificial Sequence: Synthetic oligonucleotide
acuggaaccuuguuauaua

SEQ ID NO: 1950388 - RNA, 19 nt, Artificial Sequence
  Description of Artificial Sequence: Synthetic oligonucleotide
ugguccaaacugcuucuuc

SEQ ID NO: 1950389 - RNA, 19 nt, Artificial Sequence
  Description of Artificial Sequence: Synthetic oligonucleotide
ugcauggaguuucucccau

SEQ ID NO: 1950390 - RNA, 19 nt, Artificial Sequence
  Description of Artificial Sequence: Synthetic oligonucleotide
guuuagccaguucauccga

SEQ ID NO: 1950391 - RNA, 19 nt, Artificial Sequence
  Description of Artificial Sequence: Synthetic oligonucleotide
gaccgcaagguuauuguuc

SEQ ID NO: 1950392 - RNA, 19 nt, Artificial Sequence
  Description of Artificial Sequence: Synthetic oligonucleotide
ccuuucagauuauuguaug

SEQ ID NO: 1950393 - RNA, 19 nt, Artificial Sequence
  Description of Artificial Sequence: Synthetic oligonucleotide
guauagcucaugcagcacu

SEQ ID NO: 1950394 - RNA, 19 nt, Artificial Sequence
  Description of Artificial Sequence: Synthetic oligonucleotide
aaaacccuuagugcuuuua

SEQ ID NO: 1950395 - RNA, 19 nt, Artificial Sequence
  Description of Artificial Sequence: Synthetic oligonucleotide
acucgacgaaaacccuuag

SEQ ID NO: 1950396 - RNA, 19 nt, Artificial Sequence
  Description of Artificial Sequence: Synthetic oligonucleotide
acaaacgcauccaguuuag

SEQ ID NO: 1950397 - RNA, 19 nt, Artificial Sequence
  Description of Artificial Sequence: Synthetic oligonucleotide
guuaggcugaaggagcauc

SEQ ID NO: 1950398 - RNA, 19 nt, Artificial Sequence
  Description of Artificial Sequence: Synthetic oligonucleotide
agucguugugguucaacuu

SEQ ID NO: 1950399 - RNA, 19 nt, Artificial Sequence
  Description of Artificial Sequence: Synthetic oligonucleotide
cugagucacucccuuagca

SEQ ID NO: 1950400 - RNA, 19 nt, Artificial Sequence
  Description of Artificial Sequence: Synthetic oligonucleotide
cagacgcucgagauuucag

SEQ ID NO: 1950401 - RNA, 19 nt, Artificial Sequence
  Description of Artificial Sequence: Synthetic oligonucleotide
aauaaacgccucacugaaa

SEQ ID NO: 1950402 - RNA, 19 nt, Artificial Sequence
  Description of Artificial Sequence: Synthetic oligonucleotide
gacgcucgagauuucaggu

SEQ ID NO: 1950403 - RNA, 19 nt, Artificial Sequence
  Description of Artificial Sequence: Synthetic oligonucleotide
cauccgacaagccaaccaa

SEQ ID NO: 1950404 - RNA, 19 nt, Artificial Sequence
  Description of Artificial Sequence: Synthetic oligonucleotide
aaucagcggagaagccggg

SEQ ID NO: 1950405 - RNA, 19 nt, Artificial Sequence
  Description of Artificial Sequence: Synthetic oligonucleotide
gagaccgcaagguuauugu

SEQ ID NO: 1950406 - RNA, 19 nt, Artificial Sequence
  Description of Artificial Sequence: Synthetic oligonucleotide
guaacguuacaaagauaac

SEQ ID NO: 1950407 - RNA, 19 nt, Artificial Sequence
  Description of Artificial Sequence: Synthetic oligonucleotide
auaugagccagaacucagu

SEQ ID NO: 1950408 - RNA, 19 nt, Artificial Sequence
  Description of Artificial Sequence: Synthetic oligonucleotide
agucagcaaacuccccgcu

SEQ ID NO: 1950409 - RNA, 19 nt, Artificial Sequence
  Description of Artificial Sequence: Synthetic oligonucleotide
uggggacuaccaccaggag

SEQ ID NO: 1950410 - RNA, 19 nt, Artificial Sequence
  Description of Artificial Sequence: Synthetic oligonucleotide
ucuugucaguugacagccu

SEQ ID NO: 1950411 - RNA, 19 nt, Artificial Sequence
  Description of Artificial Sequence: Synthetic oligonucleotide
uguuaccucucuggaaauc

SEQ ID NO: 1950412 - RNA, 19 nt, Artificial Sequence
  Description of Artificial Sequence: Synthetic oligonucleotide
gaagauucccuuucagauu

SEQ ID NO: 1950413 - RNA, 19 nt, Artificial Sequence
  Description of Artificial Sequence: Synthetic oligonucleotide
aaguucuccugaacuuugu

SEQ ID NO: 1950414 - RNA, 19 nt, Artificial Sequence
  Description of Artificial Sequence: Synthetic oligonucleotide
aagccgggaaggugucuca

SEQ ID NO: 1950415 - RNA, 19 nt, Artificial Sequence
  Description of Artificial Sequence: Synthetic oligonucleotide
agagauugcuugauuggau

SEQ ID NO: 1950416 - RNA, 19 nt, Artificial Sequence
  Description of Artificial Sequence: Synthetic oligonucleotide
ugucucacgcggcggcggc

SEQ ID NO: 1950417 - RNA, 19 nt, Artificial Sequence
  Description of Artificial Sequence: Synthetic oligonucleotide
cuugggugcuuguauagcu

SEQ ID NO: 1950418 - RNA, 19 nt, Artificial Sequence
  Description of Artificial Sequence: Synthetic oligonucleotide
acuggaagucacgaacuau

SEQ ID NO: 1950419 - RNA, 19 nt, Artificial Sequence
  Description of Artificial Sequence: Synthetic oligonucleotide
cgacgaaaacccuuagugc

SEQ ID NO: 1950420 - RNA, 19 nt, Artificial Sequence
  Description of Artificial Sequence: Synthetic oligonucleotide
agccaaccaagacauccaa

SEQ ID NO: 1950421 - RNA, 19 nt, Artificial Sequence
  Description of Artificial Sequence: Synthetic oligonucleotide
cugaaagaacauugcucga

SEQ ID NO: 1950422 - RNA, 19 nt, Artificial Sequence
  Description of Artificial Sequence: Synthetic oligonucleotide
ugucaguugacagccuguu

SEQ ID NO: 1950423 - RNA, 19 nt, Artificial Sequence
  Description of Artificial Sequence: Synthetic oligonucleotide
accagguacucugagucaa

SEQ ID NO: 1950424 - RNA, 19 nt, Artificial Sequence
  Description of Artificial Sequence: Synthetic oligonucleotide
uaaacgccucacugaaauu

SEQ ID NO: 1950425 - RNA, 19 nt, Artificial Sequence
  Description of Artificial Sequence: Synthetic oligonucleotide
cagcggagaagccgggaag

SEQ ID NO: 1950426 - RNA, 19 nt, Artificial Sequence
  Description of Artificial Sequence: Synthetic oligonucleotide
guaguugcugcauggaguu

SEQ ID NO: 1950427 - RNA, 19 nt, Artificial Sequence
  Description of Artificial Sequence: Synthetic oligonucleotide
uaacugucuugguccucug

SEQ ID NO: 1950428 - RNA, 19 nt, Artificial Sequence
  Description of Artificial Sequence: Synthetic oligonucleotide
acgccuucuacaaacgcau

SEQ ID NO: 1950429 - RNA, 19 nt, Artificial Sequence
  Description of Artificial Sequence: Synthetic oligonucleotide
gaagagaccgcaagguuau

SEQ ID NO: 1950430 - RNA, 19 nt, Artificial Sequence
  Description of Artificial Sequence: Synthetic oligonucleotide
aagccaccgcacaaguggu

SEQ ID NO: 1950431 - RNA, 19 nt, Artificial Sequence
  Description of Artificial Sequence: Synthetic oligonucleotide
agcaucgcuuggaaguuca

SEQ ID NO: 1950432 - RNA, 19 nt, Artificial Sequence
  Description of Artificial Sequence: Synthetic oligonucleotide
agucaacuccacuggccaa

SEQ ID NO: 1950433 - RNA, 19 nt, Artificial Sequence
  Description of Artificial Sequence: Synthetic oligonucleotide
agaccgcaagguuauuguu

SEQ ID NO: 1950434 - RNA, 19 nt, Artificial Sequence
  Description of Artificial Sequence: Synthetic oligonucleotide
auccgacaagccaaccaag

SEQ ID NO: 1950435 - RNA, 19 nt, Artificial Sequence
  Description of Artificial Sequence: Synthetic oligonucleotide
gacucgacgaaaacccuua

SEQ ID NO: 1950436 - RNA, 19 nt, Artificial Sequence
  Description of Artificial Sequence: Synthetic oligonucleotide
caaacgcauccaguuuagc

SEQ ID NO: 1950437 - RNA, 19 nt, Artificial Sequence
  Description of Artificial Sequence: Synthetic oligonucleotide
ugaccacgccuucuacaaa

SEQ ID NO: 1950438 - RNA, 19 nt, Artificial Sequence
  Description of Artificial Sequence: Synthetic oligonucleotide
guaugcagacgcucgagau

SEQ ID NO: 1950439 - RNA, 19 nt, Artificial Sequence
  Description of Artificial Sequence: Synthetic oligonucleotide
cauggaguuucucccaugu

SEQ ID NO: 1950440 - RNA, 19 nt, Artificial Sequence
  Description of Artificial Sequence: Synthetic oligonucleotide
cccuuagugcuuuuauaug

SEQ ID NO: 1950441 - RNA, 19 nt, Artificial Sequence
  Description of Artificial Sequence: Synthetic oligonucleotide
gucaguugacagccuguuc

SEQ ID NO: 1950442 - RNA, 19 nt, Artificial Sequence
  Description of Artificial Sequence: Synthetic oligonucleotide
acgggcaggccauaccuua

SEQ ID NO: 1950443 - RNA, 19 nt, Artificial Sequence
  Description of Artificial Sequence: Synthetic oligonucleotide
auaucccacuggaaccuug

SEQ ID NO: 1950444 - RNA, 19 nt, Artificial Sequence
  Description of Artificial Sequence: Synthetic oligonucleotide
gguuuucuccccaggagca

SEQ ID NO: 1950445 - RNA, 19 nt, Artificial Sequence
  Description of Artificial Sequence: Synthetic oligonucleotide
ggaagagaccgcaagguua

SEQ ID NO: 1950446 - RNA, 19 nt, Artificial Sequence
  Description of Artificial Sequence: Synthetic oligonucleotide
gccaaccuuuaagucaggg

SEQ ID NO: 1950447 - RNA, 19 nt, Artificial Sequence
  Description of Artificial Sequence: Synthetic oligonucleotide
ucgaccucgggaccaccau

SEQ ID NO: 1950448 - RNA, 19 nt, Artificial Sequence
  Description of Artificial Sequence: Synthetic oligonucleotide
uucucccauguuugcugac

SEQ ID NO: 1950449 - RNA, 19 nt, Artificial Sequence
  Description of Artificial Sequence: Synthetic oligonucleotide
acgccucacugaaauucac

SEQ ID NO: 1950450 - RNA, 19 nt, Artificial Sequence
  Description of Artificial Sequence: Synthetic oligonucleotide
caaccaagacauccaaugu

SEQ ID NO: 1950451 - RNA, 19 nt, Artificial Sequence
  Description of Artificial Sequence: Synthetic oligonucleotide
gguccaaacugcuucuucu

SEQ ID NO: 1950452 - RNA, 19 nt, Artificial Sequence
  Description of Artificial Sequence: Synthetic oligonucleotide
aacuuggaagagaccgcaa

SEQ ID NO: 1950453 - RNA, 19 nt, Artificial Sequence
  Description of Artificial Sequence: Synthetic oligonucleotide
gagcagauaugagccagaa

SEQ ID NO: 1950454 - RNA, 19 nt, Artificial Sequence
  Description of Artificial Sequence: Synthetic oligonucleotide
ccucauuauacuggaaguc

SEQ ID NO: 1950455 - RNA, 19 nt, Artificial Sequence
  Description of Artificial Sequence: Synthetic oligonucleotide
cugacagguuuucucccca

SEQ ID NO: 1950456 - RNA, 19 nt, Artificial Sequence
  Description of Artificial Sequence: Synthetic oligonucleotide
ccgggaaggugucucacgc

SEQ ID NO: 1950457 - RNA, 19 nt, Artificial Sequence
  Description of Artificial Sequence: Synthetic oligonucleotide
cacgaacuauguaacuugu

SEQ ID NO: 1950458 - RNA, 19 nt, Artificial Sequence
  Description of Artificial Sequence: Synthetic oligonucleotide
cagucguugugguucaacu

SEQ ID NO: 1950459 - RNA, 19 nt, Artificial Sequence
  Description of Artificial Sequence: Synthetic oligonucleotide
ucgggaccaccaucucuga

SEQ ID NO: 1950460 - RNA, 19 nt, Artificial Sequence
  Description of Artificial Sequence: Synthetic oligonucleotide
ccgacaagccaaccaagac

SEQ ID NO: 1950461 - RNA, 19 nt, Artificial Sequence
  Description of Artificial Sequence: Synthetic oligonucleotide
gguuauuguucuugguagu

SEQ ID NO: 1950462 - RNA, 19 nt, Artificial Sequence
  Description of Artificial Sequence: Synthetic oligonucleotide
gucacgaacuauguaacuu

SEQ ID NO: 1950463 - RNA, 19 nt, Artificial Sequence
  Description of Artificial Sequence: Synthetic oligonucleotide
gugucucacgcggcggcgg

SEQ ID NO: 1950464 - RNA, 19 nt, Artificial Sequence
  Description of Artificial Sequence: Synthetic oligonucleotide
gguaguugcugcauggagu

SEQ ID NO: 1950465 - RNA, 19 nt, Artificial Sequence
  Description of Artificial Sequence: Synthetic oligonucleotide
guuauuguucuugguaguu

SEQ ID NO: 1950466 - RNA, 19 nt, Artificial Sequence
  Description of Artificial Sequence: Synthetic oligonucleotide
gaccaccaucucugagagc

SEQ ID NO: 1950467 - RNA, 19 nt, Artificial Sequence
  Description of Artificial Sequence: Synthetic oligonucleotide
agacucgacgaaaacccuu

SEQ ID NO: 1950468 - RNA, 19 nt, Artificial Sequence
  Description of Artificial Sequence: Synthetic oligonucleotide
gccgggaaggugucucacg

SEQ ID NO: 1950469 - RNA, 19 nt, Artificial Sequence
  Description of Artificial Sequence: Synthetic oligonucleotide
acaagccaaccaagacauc

SEQ ID NO: 1950470 - RNA, 19 nt, Artificial Sequence
  Description of Artificial Sequence: Synthetic oligonucleotide
ggaagucacgaacuaugua

SEQ ID NO: 1950471 - RNA, 19 nt, Artificial Sequence
  Description of Artificial Sequence: Synthetic oligonucleotide
gaccucgggaccaccaucu

SEQ ID NO: 1950472 - RNA, 19 nt, Artificial Sequence
  Description of Artificial Sequence: Synthetic oligonucleotide
agucacucccuuagcaauu

SEQ ID NO: 1950473 - RNA, 19 nt, Artificial Sequence
  Description of Artificial Sequence: Synthetic oligonucleotide
cgcuuggaaguucacgggc

SEQ ID NO: 1950474 - RNA, 19 nt, Artificial Sequence
  Description of Artificial Sequence: Synthetic oligonucleotide
gugaccagguacucugagu

SEQ ID NO: 1950475 - RNA, 19 nt, Artificial Sequence
  Description of Artificial Sequence: Synthetic oligonucleotide
cucgaccucgggaccacca

SEQ ID NO: 1950476 - RNA, 19 nt, Artificial Sequence
  Description of Artificial Sequence: Synthetic oligonucleotide
ugcagacgcucgagauuuc

SEQ ID NO: 1950477 - RNA, 19 nt, Artificial Sequence
  Description of Artificial Sequence: Synthetic oligonucleotide
gagaagccgggaagguguc

SEQ ID NO: 1950478 - RNA, 19 nt, Artificial Sequence
  Description of Artificial Sequence: Synthetic oligonucleotide
cgcaagguuauuguucuug

SEQ ID NO: 1950479 - RNA, 19 nt, Artificial Sequence
  Description of Artificial Sequence: Synthetic oligonucleotide
gcuuggaaguucacgggca

SEQ ID NO: 1950480 - RNA, 19 nt, Artificial Sequence
  Description of Artificial Sequence: Synthetic oligonucleotide
aucagcggagaagccggga

SEQ ID NO: 1950481 - RNA, 19 nt, Artificial Sequence
  Description of Artificial Sequence: Synthetic oligonucleotide
cucgacgaaaacccuuagu

SEQ ID NO: 1950482 - RNA, 19 nt, Artificial Sequence
  Description of Artificial Sequence: Synthetic oligonucleotide
ggugucucacgcggcggcg

SEQ ID NO: 1950483 - RNA, 19 nt, Artificial Sequence
  Description of Artificial Sequence: Synthetic oligonucleotide
cuaccaccaggagcgugac

SEQ ID NO: 1950484 - RNA, 19 nt, Artificial Sequence
  Description of Artificial Sequence: Synthetic oligonucleotide
acgaacuauguaacuuguu

SEQ ID NO: 1950485 - RNA, 19 nt, Artificial Sequence
  Description of Artificial Sequence: Synthetic oligonucleotide
gacuucuuguuaggcugaa

SEQ ID NO: 1950486 - RNA, 19 nt, Artificial Sequence
  Description of Artificial Sequence: Synthetic oligonucleotide
ggccaacaaguucuccuga

SEQ ID NO: 1950487 - RNA, 19 nt, Artificial Sequence
  Description of Artificial Sequence: Synthetic oligonucleotide
ccagguacucugagucaag

SEQ ID NO: 1950488 - RNA, 19 nt, Artificial Sequence
  Description of Artificial Sequence: Synthetic oligonucleotide
cugucuugggugcuuguau

SEQ ID NO: 1950489 - RNA, 19 nt, Artificial Sequence
  Description of Artificial Sequence: Synthetic oligonucleotide
ccaugcaauaaacgccuca

SEQ ID NO: 1950490 - RNA, 19 nt, Artificial Sequence
  Description of Artificial Sequence: Synthetic oligonucleotide
gucacucccuuagcaauua

SEQ ID NO: 1950491 - RNA, 19 nt, Artificial Sequence
  Description of Artificial Sequence: Synthetic oligonucleotide
caaucugagucacucccuu

SEQ ID NO: 1950492 - RNA, 19 nt, Artificial Sequence
  Description of Artificial Sequence: Synthetic oligonucleotide
agguaacguuacaaagaua

SEQ ID NO: 1950493 - RNA, 19 nt, Artificial Sequence
  Description of Artificial Sequence: Synthetic oligonucleotide
ugcucgaccucgggaccac

SEQ ID NO: 1950494 - RNA, 19 nt, Artificial Sequence
  Description of Artificial Sequence: Synthetic oligonucleotide
cagacucgacgaaaacccu

SEQ ID NO: 1950495 - RNA, 19 nt, Artificial Sequence
  Description of Artificial Sequence: Synthetic oligonucleotide
ccgcacaagugguccaaac

SEQ ID NO: 1950496 - RNA, 19 nt, Artificial Sequence
  Description of Artificial Sequence: Synthetic oligonucleotide
cacucccuuagcaauuauu

SEQ ID NO: 1950497 - RNA, 19 nt, Artificial Sequence
  Description of Artificial Sequence: Synthetic oligonucleotide
ggagcagauaugagccaga

SEQ ID NO: 1950498 - RNA, 19 nt, Artificial Sequence
  Description of Artificial Sequence: Synthetic oligonucleotide
cuuccuuaucugcuuucau

SEQ ID NO: 1950499 - RNA, 19 nt, Artificial Sequence
  Description of Artificial Sequence: Synthetic oligonucleotide
cgagauuucaggucauugu

SEQ ID NO: 1950500 - RNA, 19 nt, Artificial Sequence
  Description of Artificial Sequence: Synthetic oligonucleotide
cgggaaggugucucacgcg

SEQ ID NO: 1950501 - RNA, 19 nt, Artificial Sequence
  Description of Artificial Sequence: Synthetic oligonucleotide
gcagacgcucgagauuuca

SEQ ID NO: 1950502 - RNA, 19 nt, Artificial Sequence
  Description of Artificial Sequence: Synthetic oligonucleotide
ccgagucagcaaacucccc

SEQ ID NO: 1950503 - RNA, 19 nt, Artificial Sequence
  Description of Artificial Sequence: Synthetic oligonucleotide
ccagucguugugguucaac

SEQ ID NO: 1950504 - RNA, 19 nt, Artificial Sequence
  Description of Artificial Sequence: Synthetic oligonucleotide
cccuuucagauuauuguau

SEQ ID NO: 1950505 - RNA, 19 nt, Artificial Sequence
  Description of Artificial Sequence: Synthetic oligonucleotide
ggagcgugaccagguacuc

SEQ ID NO: 1950506 - RNA, 19 nt, Artificial Sequence
  Description of Artificial Sequence: Synthetic oligonucleotide
accgcacaagugguccaaa

SEQ ID NO: 1950507 - RNA, 19 nt, Artificial Sequence
  Description of Artificial Sequence: Synthetic oligonucleotide
cugagagcguuuucauauu

SEQ ID NO: 1950508 - RNA, 19 nt, Artificial Sequence
  Description of Artificial Sequence: Synthetic oligonucleotide
ccauaccuuaaaacagacu

SEQ ID NO: 1950509 - RNA, 19 nt, Artificial Sequence
  Description of Artificial Sequence: Synthetic oligonucleotide
aguucacgggcaggccaua

SEQ ID NO: 1950510 - RNA, 19 nt, Artificial Sequence
  Description of Artificial Sequence: Synthetic oligonucleotide
caccgcacaagugguccaa

SEQ ID NO: 1950511 - RNA, 19 nt, Artificial Sequence
  Description of Artificial Sequence: Synthetic oligonucleotide
acgcggcggcggcggcggc

SEQ ID NO: 1950512 - RNA, 19 nt, Artificial Sequence
  Description of Artificial Sequence: Synthetic oligonucleotide
cgcacaagugguccaaacu

SEQ ID NO: 1950513 - RNA, 19 nt, Artificial Sequence
  Description of Artificial Sequence: Synthetic oligonucleotide
cgaccucgggaccaccauc

SEQ ID NO: 1950514 - RNA, 19 nt, Artificial Sequence
  Description of Artificial Sequence: Synthetic oligonucleotide
caccaucucugagagcguu

SEQ ID NO: 1950515 - RNA, 19 nt, Artificial Sequence
  Description of Artificial Sequence: Synthetic oligonucleotide
ccaccgcacaaguggucca

SEQ ID NO: 1950516 - RNA, 19 nt, Artificial Sequence
  Description of Artificial Sequence: Synthetic oligonucleotide
cgccuucuacaaacgcauc

SEQ ID NO: 1950517 - RNA, 19 nt, Artificial Sequence
  Description of Artificial Sequence: Synthetic oligonucleotide
gcggcggcggcggcggcgg

SEQ ID NO: 1950518 - RNA, 19 nt, Artificial Sequence
  Description of Artificial Sequence: Synthetic oligonucleotide
ggcuccgagucagcaaacu

SEQ ID NO: 1950519 - RNA, 19 nt, Artificial Sequence
  Description of Artificial Sequence: Synthetic oligonucleotide
cucgagauuucaggucauu

SEQ ID NO: 1950520 - RNA, 19 nt, Artificial Sequence
  Description of Artificial Sequence: Synthetic oligonucleotide
gcgugaccagguacucuga

SEQ ID NO: 1950521 - RNA, 19 nt, Artificial Sequence
  Description of Artificial Sequence: Synthetic oligonucleotide
gccaaccaagacauccaau

SEQ ID NO: 1950522 - RNA, 19 nt, Artificial Sequence
  Description of Artificial Sequence: Synthetic oligonucleotide
cgccucacugaaauucacu

SEQ ID NO: 1950523 - RNA, 19 nt, Artificial Sequence
  Description of Artificial Sequence: Synthetic oligonucleotide
cgcuccaaguucugaagau

SEQ ID NO: 1950524 - RNA, 19 nt, Artificial Sequence
  Description of Artificial Sequence: Synthetic oligonucleotide
gcucgagauuucaggucau

SEQ ID NO: 1950525 - RNA, 19 nt, Artificial Sequence
  Description of Artificial Sequence: Synthetic oligonucleotide
cgcggcggcggcggcggcg

SEQ ID NO: 1950526 - RNA, 19 nt, Artificial Sequence
  Description of Artificial Sequence: Synthetic oligonucleotide
ccgcaagguuauuguucuu

SEQ ID NO: 1950527 - RNA, 19 nt, Artificial Sequence
  Description of Artificial Sequence: Synthetic oligonucleotide
ggcggcggcggcggcgggu

SEQ ID NO: 1950528 - RNA, 19 nt, Artificial Sequence
  Description of Artificial Sequence: Synthetic oligonucleotide
cggcggcggcggcggcggg

SEQ ID NO: 1950529 - RNA, 19 nt, Artificial Sequence
  Description of Artificial Sequence: Synthetic oligonucleotide
uuuguugacauccucaggg

SEQ ID NO: 1950530 - RNA, 19 nt, Artificial Sequence
  Description of Artificial Sequence: Synthetic oligonucleotide
aauauccuggcauacucgc

SEQ ID NO: 1950531 - RNA, 19 nt, Artificial Sequence
  Description of Artificial Sequence: Synthetic oligonucleotide
aauuucauggguaucaggg

SEQ ID NO: 1950532 - RNA, 19 nt, Artificial Sequence
  Description of Artificial Sequence: Synthetic oligonucleotide
cuaagaguuguuuugaccc

SEQ ID NO: 1950533 - RNA, 19 nt, Artificial Sequence
  Description of Artificial Sequence: Synthetic oligonucleotide
uucuuguagaugaagaccc

SEQ ID NO: 1950534 - RNA, 19 nt, Artificial Sequence
  Description of Artificial Sequence: Synthetic oligonucleotide
uuaccccuaaauuucaugg

SEQ ID NO: 1950535 - RNA, 19 nt, Artificial Sequence
  Description of Artificial Sequence: Synthetic oligonucleotide
ugaagacccagacacaagg

SEQ ID NO: 1950536 - RNA, 19 nt, Artificial Sequence
  Description of Artificial Sequence: Synthetic oligonucleotide
aguccauuuguugacaucc

SEQ ID NO: 1950537 - RNA, 19 nt, Artificial Sequence
  Description of Artificial Sequence: Synthetic oligonucleotide
guaucagggaguaugaugg

SEQ ID NO: 1950538 - RNA, 19 nt, Artificial Sequence
  Description of Artificial Sequence: Synthetic oligonucleotide
uguuuugacccugaaaggg

SEQ ID NO: 1950539 - RNA, 19 nt, Artificial Sequence
  Description of Artificial Sequence: Synthetic oligonucleotide
auuaagacuccccuuuugg

SEQ ID NO: 1950540 - RNA, 19 nt, Artificial Sequence
  Description of Artificial Sequence: Synthetic oligonucleotide
ucuacaguccauuuguuga

SEQ ID NO: 1950541 - RNA, 19 nt, Artificial Sequence
  Description of Artificial Sequence: Synthetic oligonucleotide
uuauuguuacagcacaaca

SEQ ID NO: 1950542 - RNA, 19 nt, Artificial Sequence
  Description of Artificial Sequence: Synthetic oligonucleotide
auuguuacagcacaacaga

SEQ ID NO: 1950543 - RNA, 19 nt, Artificial Sequence
  Description of Artificial Sequence: Synthetic oligonucleotide
aagacuccccuuuuggguc

SEQ ID NO: 1950544 - RNA, 19 nt, Artificial Sequence
  Description of Artificial Sequence: Synthetic oligonucleotide
ugugcuaagaguuguuuug

SEQ ID NO: 1950545 - RNA, 19 nt, Artificial Sequence
  Description of Artificial Sequence: Synthetic oligonucleotide
acucgcuacagccagacag

SEQ ID NO: 1950546 - RNA, 19 nt, Artificial Sequence
  Description of Artificial Sequence: Synthetic oligonucleotide
ugcuagaucauuagagaag

SEQ ID NO: 1950547 - RNA, 19 nt, Artificial Sequence
  Description of Artificial Sequence: Synthetic oligonucleotide
uuaagacuccccuuuuggg

SEQ ID NO: 1950548 - RNA, 19 nt, Artificial Sequence
  Description of Artificial Sequence: Synthetic oligonucleotide
agaucauuagagaagcugg

SEQ ID NO: 1950549 - RNA, 19 nt, Artificial Sequence
  Description of Artificial Sequence: Synthetic oligonucleotide
ucugacuuugguuugucug

SEQ ID NO: 1950550 - RNA, 19 nt, Artificial Sequence
  Description of Artificial Sequence: Synthetic oligonucleotide
aguugcagacaucaucuac

SEQ ID NO: 1950551 - RNA, 19 nt, Artificial Sequence
  Description of Artificial Sequence: Synthetic oligonucleotide
agagcuauggucccugauc

SEQ ID NO: 1950552 - RNA, 19 nt, Artificial Sequence
  Description of Artificial Sequence: Synthetic oligonucleotide
ucagggaguaugaugguug

SEQ ID NO: 1950553 - RNA, 19 nt, Artificial Sequence
  Description of Artificial Sequence: Synthetic oligonucleotide
ugaauauccuggcauacuc

SEQ ID NO: 1950554 - RNA, 19 nt, Artificial Sequence
  Description of Artificial Sequence: Synthetic oligonucleotide
uguuacagcacaacagaac

SEQ ID NO: 1950555 - RNA, 19 nt, Artificial Sequence
  Description of Artificial Sequence: Synthetic oligonucleotide
agggcuuuauuguuacagc

SEQ ID NO: 1950556 - RNA, 19 nt, Artificial Sequence
  Description of Artificial Sequence: Synthetic oligonucleotide
cauuagagaagcugggaag

SEQ ID NO: 1950557 - RNA, 19 nt, Artificial Sequence
  Description of Artificial Sequence: Synthetic oligonucleotide
aggggcugugguuucaucc

SEQ ID NO: 1950558 - RNA, 19 nt, Artificial Sequence
  Description of Artificial Sequence: Synthetic oligonucleotide
uagaucauuagagaagcug

SEQ ID NO: 1950559 - RNA, 19 nt, Artificial Sequence
  Description of Artificial Sequence: Synthetic oligonucleotide
uggaaguaggggcugacug

SEQ ID NO: 1950560 - RNA, 19 nt, Artificial Sequence
  Description of Artificial Sequence: Synthetic oligonucleotide
aucuccuuagguucgcugg

SEQ ID NO: 1950561 - RNA, 19 nt, Artificial Sequence
  Description of Artificial Sequence: Synthetic oligonucleotide
cuugaggccaacaacugug

SEQ ID NO: 1950562 - RNA, 19 nt, Artificial Sequence
  Description of Artificial Sequence: Synthetic oligonucleotide
aagagucccugcauggugc

SEQ ID NO: 1950563 - RNA, 19 nt, Artificial Sequence
  Description of Artificial Sequence: Synthetic oligonucleotide
uggcauacucgcuacagcc

SEQ ID NO: 1950564 - RNA, 19 nt, Artificial Sequence
  Description of Artificial Sequence: Synthetic oligonucleotide
uuuaucugacuuugguuug

SEQ ID NO: 1950565 - RNA, 19 nt, Artificial Sequence
  Description of Artificial Sequence: Synthetic oligonucleotide
ugcaguuaccccuaaauuu

SEQ ID NO: 1950566 - RNA, 19 nt, Artificial Sequence
  Description of Artificial Sequence: Synthetic oligonucleotide
uucagcucucagaagagga

SEQ ID NO: 1950567 - RNA, 19 nt, Artificial Sequence
  Description of Artificial Sequence: Synthetic oligonucleotide
ucugcaguuaccccuaaau

SEQ ID NO: 1950568 - RNA, 19 nt, Artificial Sequence
  Description of Artificial Sequence: Synthetic oligonucleotide
ucauauggggagguggugg

SEQ ID NO: 1950569 - RNA, 19 nt, Artificial Sequence
  Description of Artificial Sequence: Synthetic oligonucleotide
aggccaacaacugugcagc

SEQ ID NO: 1950570 - RNA, 19 nt, Artificial Sequence
  Description of Artificial Sequence: Synthetic oligonucleotide
aagacccagacacaagggu

SEQ ID NO: 1950571 - RNA, 19 nt, Artificial Sequence
  Description of Artificial Sequence: Synthetic oligonucleotide
uccacuuuaucugacuuug

SEQ ID NO: 1950572 - RNA, 19 nt, Artificial Sequence
  Description of Artificial Sequence: Synthetic oligonucleotide
agcacaacagaaccaacug

SEQ ID NO: 1950573 - RNA, 19 nt, Artificial Sequence
  Description of Artificial Sequence: Synthetic oligonucleotide
gaucauuagagaagcuggg

SEQ ID NO: 1950574 - RNA, 19 nt, Artificial Sequence
  Description of Artificial Sequence: Synthetic oligonucleotide
ugaccugcagaguaguccc

SEQ ID NO: 1950575 - RNA, 19 nt, Artificial Sequence
  Description of Artificial Sequence: Synthetic oligonucleotide
uguugacauccucaggggc

SEQ ID NO: 1950576 - RNA, 19 nt, Artificial Sequence
  Description of Artificial Sequence: Synthetic oligonucleotide
uaccccuaaauuucauggg

SEQ ID NO: 1950577 - RNA, 19 nt, Artificial Sequence
  Description of Artificial Sequence: Synthetic oligonucleotide
gauccauucuccugcuuag

SEQ ID NO: 1950578 - RNA, 19 nt, Artificial Sequence
  Description of Artificial Sequence: Synthetic oligonucleotide
ucuucagcucucagaagag

SEQ ID NO: 1950579 - RNA, 19 nt, Artificial Sequence
  Description of Artificial Sequence: Synthetic oligonucleotide
gaggccaacaacugugcag

SEQ ID NO: 1950580 - RNA, 19 nt, Artificial Sequence
  Description of Artificial Sequence: Synthetic oligonucleotide
gaacugguucugcauagcc

SEQ ID NO: 1950581 - RNA, 19 nt, Artificial Sequence
  Description of Artificial Sequence: Synthetic oligonucleotide
acccgaagugaacuguggc

SEQ ID NO: 1950582 - RNA, 19 nt, Artificial Sequence
  Description of Artificial Sequence: Synthetic oligonucleotide
ucuuuaggaggcguagggg

SEQ ID NO: 1950583 - RNA, 19 nt, Artificial Sequence
  Description of Artificial Sequence: Synthetic oligonucleotide
auuccuugcucucugaaua

SEQ ID NO: 1950584 - RNA, 19 nt, Artificial Sequence
  Description of Artificial Sequence: Synthetic oligonucleotide
ugauccauucuccugcuua

SEQ ID NO: 1950585 - RNA, 19 nt, Artificial Sequence
  Description of Artificial Sequence: Synthetic oligonucleotide
aacaacugugcagcaagag

SEQ ID NO: 1950586 - RNA, 19 nt, Artificial Sequence
  Description of Artificial Sequence: Synthetic oligonucleotide
auggguaucagggaguaug

SEQ ID NO: 1950587 - RNA, 19 nt, Artificial Sequence
  Description of Artificial Sequence: Synthetic oligonucleotide
cuuggauggcuccucagag

SEQ ID NO: 1950588 - RNA, 19 nt, Artificial Sequence
  Description of Artificial Sequence: Synthetic oligonucleotide
uuccacaggggaauccuag

SEQ ID NO: 1950589 - RNA, 19 nt, Artificial Sequence
  Description of Artificial Sequence: Synthetic oligonucleotide
gagcucaggggcuugcagg

SEQ ID NO: 1950590 - RNA, 19 nt, Artificial Sequence
  Description of Artificial Sequence: Synthetic oligonucleotide
agacacagggcuuuauugu

SEQ ID NO: 1950591 - RNA, 19 nt, Artificial Sequence
  Description of Artificial Sequence: Synthetic oligonucleotide
gagcccagaggcuaggccc

SEQ ID NO: 1950592 - RNA, 19 nt, Artificial Sequence
  Description of Artificial Sequence: Synthetic oligonucleotide
auagccuucuguugcagga

SEQ ID NO: 1950593 - RNA, 19 nt, Artificial Sequence
  Description of Artificial Sequence: Synthetic oligonucleotide
uuguuacagcacaacagaa

SEQ ID NO: 1950594 - RNA, 19 nt, Artificial Sequence
  Description of Artificial Sequence: Synthetic oligonucleotide
agcugcuaucucugggucc

SEQ ID NO: 1950595 - RNA, 19 nt, Artificial Sequence
  Description of Artificial Sequence: Synthetic oligonucleotide
cagacacagggcuuuauug

SEQ ID NO: 1950596 - RNA, 19 nt, Artificial Sequence
  Description of Artificial Sequence: Synthetic oligonucleotide
uugacccugagagaggccc

SEQ ID NO: 1950597 - RNA, 19 nt, Artificial Sequence
  Description of Artificial Sequence: Synthetic oligonucleotide
gguggggcccaucauaugg

SEQ ID NO: 1950598 - RNA, 19 nt, Artificial Sequence
  Description of Artificial Sequence: Synthetic oligonucleotide
cuccugacaggucucagag

SEQ ID NO: 1950599 - RNA, 19 nt, Artificial Sequence
  Description of Artificial Sequence: Synthetic oligonucleotide
guuaccccuaaauuucaug

SEQ ID NO: 1950600 - RNA, 19 nt, Artificial Sequence
  Description of Artificial Sequence: Synthetic oligonucleotide
cucgcuacagccagacagg

SEQ ID NO: 1950601 - RNA, 19 nt, Artificial Sequence
  Description of Artificial Sequence: Synthetic oligonucleotide
gaagacccagacacaaggg

SEQ ID NO: 1950602 - RNA, 19 nt, Artificial Sequence
  Description of Artificial Sequence: Synthetic oligonucleotide
gguaucagggaguaugaug

SEQ ID NO: 1950603 - RNA, 19 nt, Artificial Sequence
  Description of Artificial Sequence: Synthetic oligonucleotide
cacaggggaauccuagggg

SEQ ID NO: 1950604 - RNA, 19 nt, Artificial Sequence
  Description of Artificial Sequence: Synthetic oligonucleotide
uguugacccugagagaggc

SEQ ID NO: 1950605 - RNA, 19 nt, Artificial Sequence
  Description of Artificial Sequence: Synthetic oligonucleotide
agaccucugcaguuacccc

SEQ ID NO: 1950606 - RNA, 19 nt, Artificial Sequence
  Description of Artificial Sequence: Synthetic oligonucleotide
ucuccaucugaguccuugg

SEQ ID NO: 1950607 - RNA, 19 nt, Artificial Sequence
  Description of Artificial Sequence: Synthetic oligonucleotide
ugagagaggccccuuuccu

SEQ ID NO: 1950608 - RNA, 19 nt, Artificial Sequence
  Description of Artificial Sequence: Synthetic oligonucleotide
uacagcacaacagaaccaa

SEQ ID NO: 1950609 - RNA, 19 nt, Artificial Sequence
  Description of Artificial Sequence: Synthetic oligonucleotide
uucauggguaucagggagu

SEQ ID NO: 1950610 - RNA, 19 nt, Artificial Sequence
  Description of Artificial Sequence: Synthetic oligonucleotide
accccuaaauuucaugggu

SEQ ID NO: 1950611 - RNA, 19 nt, Artificial Sequence
  Description of Artificial Sequence: Synthetic oligonucleotide
ccugacaggucucagaggc

SEQ ID NO: 1950612 - RNA, 19 nt, Artificial Sequence
  Description of Artificial Sequence: Synthetic oligonucleotide
uccacaggggaauccuagg

SEQ ID NO: 1950613 - RNA, 19 nt, Artificial Sequence
  Description of Artificial Sequence: Synthetic oligonucleotide
gcuagaucauuagagaagc

SEQ ID NO: 1950614 - RNA, 19 nt, Artificial Sequence
  Description of Artificial Sequence: Synthetic oligonucleotide
aggaucuucagcucucaga

SEQ ID NO: 1950615 - RNA, 19 nt, Artificial Sequence
  Description of Artificial Sequence: Synthetic oligonucleotide
aauccuaggggcaguggag

SEQ ID NO: 1950616 - RNA, 19 nt, Artificial Sequence
  Description of Artificial Sequence: Synthetic oligonucleotide
uccuuagguucgcuggucc

SEQ ID NO: 1950617 - RNA, 19 nt, Artificial Sequence
  Description of Artificial Sequence: Synthetic oligonucleotide
gacccugaaagggaacugg

SEQ ID NO: 1950618 - RNA, 19 nt, Artificial Sequence
  Description of Artificial Sequence: Synthetic oligonucleotide
ucgggcagacucuuuagga

SEQ ID NO: 1950619 - RNA, 19 nt, Artificial Sequence
  Description of Artificial Sequence: Synthetic oligonucleotide
uccgugaagagucccugca

SEQ ID NO: 1950620 - RNA, 19 nt, Artificial Sequence
  Description of Artificial Sequence: Synthetic oligonucleotide
cugacccugaccugcagag

SEQ ID NO: 1950621 - RNA, 19 nt, Artificial Sequence
  Description of Artificial Sequence: Synthetic oligonucleotide
uugccugcuagaucauuag

SEQ ID NO: 1950622 - RNA, 19 nt, Artificial Sequence
  Description of Artificial Sequence: Synthetic oligonucleotide
uuguugacccugagagagg

SEQ ID NO: 1950623 - RNA, 19 nt, Artificial Sequence
  Description of Artificial Sequence: Synthetic oligonucleotide
gaguaugaugguugccugc

SEQ ID NO: 1950624 - RNA, 19 nt, Artificial Sequence
  Description of Artificial Sequence: Synthetic oligonucleotide
cuacaguccauuuguugac

SEQ ID NO: 1950625 - RNA, 19 nt, Artificial Sequence
  Description of Artificial Sequence: Synthetic oligonucleotide
uggguaucagggaguauga

SEQ ID NO: 1950626 - RNA, 19 nt, Artificial Sequence
  Description of Artificial Sequence: Synthetic oligonucleotide
gaugaagacccagacacaa

SEQ ID NO: 1950627 - RNA, 19 nt, Artificial Sequence
  Description of Artificial Sequence: Synthetic oligonucleotide
ugcagaguagucccaguuc

SEQ ID NO: 1950628 - RNA, 19 nt, Artificial Sequence
  Description of Artificial Sequence: Synthetic oligonucleotide
auccgugaagagucccugc

SEQ ID NO: 1950629 - RNA, 19 nt, Artificial Sequence
  Description of Artificial Sequence: Synthetic oligonucleotide
aagaggacugagggccucc

SEQ ID NO: 1950630 - RNA, 19 nt, Artificial Sequence
  Description of Artificial Sequence: Synthetic oligonucleotide
auacucgcuacagccagac

SEQ ID NO: 1950631 - RNA, 19 nt, Artificial Sequence
  Description of Artificial Sequence: Synthetic oligonucleotide
agaggcuaggcccuguuau

SEQ ID NO: 1950632 - RNA, 19 nt, Artificial Sequence
  Description of Artificial Sequence: Synthetic oligonucleotide
aagggaacugguucugcau

SEQ ID NO: 1950633 - RNA, 19 nt, Artificial Sequence
  Description of Artificial Sequence: Synthetic oligonucleotide
gaggcuugaggccaacaac

SEQ ID NO: 1950634 - RNA, 19 nt, Artificial Sequence
  Description of Artificial Sequence: Synthetic oligonucleotide
cauagccuucuguugcagg

SEQ ID NO: 1950635 - RNA, 19 nt, Artificial Sequence
  Description of Artificial Sequence: Synthetic oligonucleotide
uguagcggcuauuccuugc

SEQ ID NO: 1950636 - RNA, 19 nt, Artificial Sequence
  Description of Artificial Sequence: Synthetic oligonucleotide
aguagucccaguucacagu

SEQ ID NO: 1950637 - RNA, 19 nt, Artificial Sequence
  Description of Artificial Sequence: Synthetic oligonucleotide
aguuguuuugacccugaaa

SEQ ID NO: 1950638 - RNA, 19 nt, Artificial Sequence
  Description of Artificial Sequence: Synthetic oligonucleotide
ucuccacuuuaucugacuu

SEQ ID NO: 1950639 - RNA, 19 nt, Artificial Sequence
  Description of Artificial Sequence: Synthetic oligonucleotide
cugaccugcagaguagucc

SEQ ID NO: 1950640 - RNA, 19 nt, Artificial Sequence
  Description of Artificial Sequence: Synthetic oligonucleotide
uauuccuugcucucugaau

SEQ ID NO: 1950641 - RNA, 19 nt, Artificial Sequence
  Description of Artificial Sequence: Synthetic oligonucleotide
ugagcccagaggcuaggcc

SEQ ID NO: 1950642 - RNA, 19 nt, Artificial Sequence
  Description of Artificial Sequence: Synthetic oligonucleotide
uuucauccgugaagagucc

SEQ ID NO: 1950643 - RNA, 19 nt, Artificial Sequence
  Description of Artificial Sequence: Synthetic oligonucleotide
aguaugaugguugccugcu

SEQ ID NO: 1950644 - RNA, 19 nt, Artificial Sequence
  Description of Artificial Sequence: Synthetic oligonucleotide
gacucuuuaggaggcguag

SEQ ID NO: 1950645 - RNA, 19 nt, Artificial Sequence
  Description of Artificial Sequence: Synthetic oligonucleotide
ucuccugcuuaggugaggc

SEQ ID NO: 1950646 - RNA, 19 nt, Artificial Sequence
  Description of Artificial Sequence: Synthetic oligonucleotide
ucccaguucacaguuggga

SEQ ID NO: 1950647 - RNA, 19 nt, Artificial Sequence
  Description of Artificial Sequence: Synthetic oligonucleotide
guagaugaagacccagaca

SEQ ID NO: 1950648 - RNA, 19 nt, Artificial Sequence
  Description of Artificial Sequence: Synthetic oligonucleotide
ugcuaagaguuguuuugac

SEQ ID NO: 1950649 - RNA, 19 nt, Artificial Sequence
  Description of Artificial Sequence: Synthetic oligonucleotide
cuuagguucgcugguccgg

SEQ ID NO: 1950650 - RNA, 19 nt, Artificial Sequence
  Description of Artificial Sequence: Synthetic oligonucleotide
ucauccgugaagagucccu

SEQ ID NO: 1950651 - RNA, 19 nt, Artificial Sequence
  Description of Artificial Sequence: Synthetic oligonucleotide
cagaccucugcaguuaccc

SEQ ID NO: 1950652 - RNA, 19 nt, Artificial Sequence
  Description of Artificial Sequence: Synthetic oligonucleotide
ugaaagggaacugguucug

SEQ ID NO: 1950653 - RNA, 19 nt, Artificial Sequence
  Description of Artificial Sequence: Synthetic oligonucleotide
ugccuguguggaaguaggg

SEQ ID NO: 1950654 - RNA, 19 nt, Artificial Sequence
  Description of Artificial Sequence: Synthetic oligonucleotide
aacugguucugcauagccu

SEQ ID NO: 1950655 - RNA, 19 nt, Artificial Sequence
  Description of Artificial Sequence: Synthetic oligonucleotide
uugacccugaaagggaacu

SEQ ID NO: 1950656 - RNA, 19 nt, Artificial Sequence
  Description of Artificial Sequence: Synthetic oligonucleotide
uuugacccugaaagggaac

SEQ ID NO: 1950657 - RNA, 19 nt, Artificial Sequence
  Description of Artificial Sequence: Synthetic oligonucleotide
cacagggcuuuauuguuac

SEQ ID NO: 1950658 - RNA, 19 nt, Artificial Sequence
  Description of Artificial Sequence: Synthetic oligonucleotide
gguggcgagggccagguag

SEQ ID NO: 1950659 - RNA, 19 nt, Artificial Sequence
  Description of Artificial Sequence: Synthetic oligonucleotide
aggcuugguggcuguagcg

SEQ ID NO: 1950660 - RNA, 19 nt, Artificial Sequence
  Description of Artificial Sequence: Synthetic oligonucleotide
uggggcccaucauaugggg

SEQ ID NO: 1950661 - RNA, 19 nt, Artificial Sequence
  Description of Artificial Sequence: Synthetic oligonucleotide
agaggcuugaggccaacaa

SEQ ID NO: 1950662 - RNA, 19 nt, Artificial Sequence
  Description of Artificial Sequence: Synthetic oligonucleotide
agcggcuauuccuugcucu

SEQ ID NO: 1950663 - RNA, 19 nt, Artificial Sequence
  Description of Artificial Sequence: Synthetic oligonucleotide
gaugguugccugcuagauc

SEQ ID NO: 1950664 - RNA, 19 nt, Artificial Sequence
  Description of Artificial Sequence: Synthetic oligonucleotide
uccugacaggucucagagg

SEQ ID NO: 1950665 - RNA, 19 nt, Artificial Sequence
  Description of Artificial Sequence: Synthetic oligonucleotide
accaacugugcuaagaguu

SEQ ID NO: 1950666 - RNA, 19 nt, Artificial Sequence
  Description of Artificial Sequence: Synthetic oligonucleotide
cagacacaaggguggaccc

SEQ ID NO: 1950667 - RNA, 19 nt, Artificial Sequence
  Description of Artificial Sequence: Synthetic oligonucleotide
gugguuucauccgugaaga

SEQ ID NO: 1950668 - RNA, 19 nt, Artificial Sequence
  Description of Artificial Sequence: Synthetic oligonucleotide
cagggaguaugaugguugc

SEQ ID NO: 1950669 - RNA, 19 nt, Artificial Sequence
  Description of Artificial Sequence: Synthetic oligonucleotide
cugcuagaucauuagagaa

SEQ ID NO: 1950670 - RNA, 19 nt, Artificial Sequence
  Description of Artificial Sequence: Synthetic oligonucleotide
aucauuagagaagcuggga

SEQ ID NO: 1950671 - RNA, 19 nt, Artificial Sequence
  Description of Artificial Sequence: Synthetic oligonucleotide
ugccugcuagaucauuaga

SEQ ID NO: 1950672 - RNA, 19 nt, Artificial Sequence
  Description of Artificial Sequence: Synthetic oligonucleotide
ucugaguccuuggauggcu

SEQ ID NO: 1950673 - RNA, 19 nt, Artificial Sequence
  Description of Artificial Sequence: Synthetic oligonucleotide
ccugaaagggaacugguuc

SEQ ID NO: 1950674 - RNA, 19 nt, Artificial Sequence
  Description of Artificial Sequence: Synthetic oligonucleotide
agacccagacacaagggug

SEQ ID NO: 1950675 - RNA, 19 nt, Artificial Sequence
  Description of Artificial Sequence: Synthetic oligonucleotide
gaaagggaacugguucugc

SEQ ID NO: 1950676 - RNA, 19 nt, Artificial Sequence
  Description of Artificial Sequence: Synthetic oligonucleotide
ugacuuugguuugucugca

SEQ ID NO: 1950677 - RNA, 19 nt, Artificial Sequence
  Description of Artificial Sequence: Synthetic oligonucleotide
cugcauggugccugugugg

SEQ ID NO: 1950678 - RNA, 19 nt, Artificial Sequence
  Description of Artificial Sequence: Synthetic oligonucleotide
cuucgggcagacucuuuag

SEQ ID NO: 1950679 - RNA, 19 nt, Artificial Sequence
  Description of Artificial Sequence: Synthetic oligonucleotide
uuagguucgcugguccggc

SEQ ID NO: 1950680 - RNA, 19 nt, Artificial Sequence
  Description of Artificial Sequence: Synthetic oligonucleotide
uucauccgugaagaguccc

SEQ ID NO: 1950681 - RNA, 19 nt, Artificial Sequence
  Description of Artificial Sequence: Synthetic oligonucleotide
gcauacucgcuacagccag

SEQ ID NO: 1950682 - RNA, 19 nt, Artificial Sequence
  Description of Artificial Sequence: Synthetic oligonucleotide
agaagagcuauggucccug

SEQ ID NO: 1950683 - RNA, 19 nt, Artificial Sequence
  Description of Artificial Sequence: Synthetic oligonucleotide
gccugcuagaucauuagag

SEQ ID NO: 1950684 - RNA, 19 nt, Artificial Sequence
  Description of Artificial Sequence: Synthetic oligonucleotide
ccaucugaguccuuggaug

SEQ ID NO: 1950685 - RNA, 19 nt, Artificial Sequence
  Description of Artificial Sequence: Synthetic oligonucleotide
ugcagaccucugcaguuac

SEQ ID NO: 1950686 - RNA, 19 nt, Artificial Sequence
  Description of Artificial Sequence: Synthetic oligonucleotide
gacccgaagugaacugugg

SEQ ID NO: 1950687 - RNA, 19 nt, Artificial Sequence
  Description of Artificial Sequence: Synthetic oligonucleotide
uacaguccauuuguugaca

SEQ ID NO: 1950688 - RNA, 19 nt, Artificial Sequence
  Description of Artificial Sequence: Synthetic oligonucleotide
ugaagagucccugcauggu

SEQ ID NO: 1950689 - RNA, 19 nt, Artificial Sequence
  Description of Artificial Sequence: Synthetic oligonucleotide
agggaguaugaugguugcc

SEQ ID NO: 1950690 - RNA, 19 nt, Artificial Sequence
  Description of Artificial Sequence: Synthetic oligonucleotide
ugguuucauccgugaagag

SEQ ID NO: 1950691 - RNA, 19 nt, Artificial Sequence
  Description of Artificial Sequence: Synthetic oligonucleotide
uaucagggaguaugauggu

SEQ ID NO: 1950692 - RNA, 19 nt, Artificial Sequence
  Description of Artificial Sequence: Synthetic oligonucleotide
gcagaguagucccaguuca

SEQ ID NO: 1950693 - RNA, 19 nt, Artificial Sequence
  Description of Artificial Sequence: Synthetic oligonucleotide
ugaugguugccugcuagau

SEQ ID NO: 1950694 - RNA, 19 nt, Artificial Sequence
  Description of Artificial Sequence: Synthetic oligonucleotide
aagugaacuguggcagcug

SEQ ID NO: 1950695 - RNA, 19 nt, Artificial Sequence
  Description of Artificial Sequence: Synthetic oligonucleotide
ggaguaugaugguugccug

SEQ ID NO: 1950696 - RNA, 19 nt, Artificial Sequence
  Description of Artificial Sequence: Synthetic oligonucleotide
uccuaggggcaguggagug

SEQ ID NO: 1950697 - RNA, 19 nt, Artificial Sequence
  Description of Artificial Sequence: Synthetic oligonucleotide
ugcagacaucaucuacagu

SEQ ID NO: 1950698 - RNA, 19 nt, Artificial Sequence
  Description of Artificial Sequence: Synthetic oligonucleotide
gacccugaccugcagagua

SEQ ID NO: 1950699 - RNA, 19 nt, Artificial Sequence
  Description of Artificial Sequence: Synthetic oligonucleotide
aucugacuuugguuugucu

SEQ ID NO: 1950700 - RNA, 19 nt, Artificial Sequence
  Description of Artificial Sequence: Synthetic oligonucleotide
ugacaggucucagaggcuu

SEQ ID NO: 1950701 - RNA, 19 nt, Artificial Sequence
  Description of Artificial Sequence: Synthetic oligonucleotide
agggaacugguucugcaua

SEQ ID NO: 1950702 - RNA, 19 nt, Artificial Sequence
  Description of Artificial Sequence: Synthetic oligonucleotide
ggcccuguuaucuccuuag

SEQ ID NO: 1950703 - RNA, 19 nt, Artificial Sequence
  Description of Artificial Sequence: Synthetic oligonucleotide
uggcuguagcggcuauucc

SEQ ID NO: 1950704 - RNA, 19 nt, Artificial Sequence
  Description of Artificial Sequence: Synthetic oligonucleotide
uggggcuccugggagaaga

SEQ ID NO: 1950705 - RNA, 19 nt, Artificial Sequence
  Description of Artificial Sequence: Synthetic oligonucleotide
ugacccugaaagggaacug

SEQ ID NO: 1950706 - RNA, 19 nt, Artificial Sequence
  Description of Artificial Sequence: Synthetic oligonucleotide
cccugauccauucuccugc

SEQ ID NO: 1950707 - RNA, 19 nt, Artificial Sequence
  Description of Artificial Sequence: Synthetic oligonucleotide
ccaucauauggggaggugg

SEQ ID NO: 1950708 - RNA, 19 nt, Artificial Sequence
  Description of Artificial Sequence: Synthetic oligonucleotide
agggaccacaggaugagcu

SEQ ID NO: 1950709 - RNA, 19 nt, Artificial Sequence
  Description of Artificial Sequence: Synthetic oligonucleotide
cugaaagggaacugguucu

SEQ ID NO: 1950710 - RNA, 19 nt, Artificial Sequence
  Description of Artificial Sequence: Synthetic oligonucleotide
ucauggguaucagggagua

SEQ ID NO: 1950711 - RNA, 19 nt, Artificial Sequence
  Description of Artificial Sequence: Synthetic oligonucleotide
acuguuccacaggggaauc

SEQ ID NO: 1950712 - RNA, 19 nt, Artificial Sequence
  Description of Artificial Sequence: Synthetic oligonucleotide
gaggcuaggcccuguuauc

SEQ ID NO: 1950713 - RNA, 19 nt, Artificial Sequence
  Description of Artificial Sequence: Synthetic oligonucleotide
uccccuuuugggucaggcu

SEQ ID NO: 1950714 - RNA, 19 nt, Artificial Sequence
  Description of Artificial Sequence: Synthetic oligonucleotide
cagaguagucccaguucac

SEQ ID NO: 1950715 - RNA, 19 nt, Artificial Sequence
  Description of Artificial Sequence: Synthetic oligonucleotide
uucuccugcuuaggugagg

SEQ ID NO: 1950716 - RNA, 19 nt, Artificial Sequence
  Description of Artificial Sequence: Synthetic oligonucleotide
uggacccgaagugaacugu

SEQ ID NO: 1950717 - RNA, 19 nt, Artificial Sequence
  Description of Artificial Sequence: Synthetic oligonucleotide
cauuguugacccugagaga

SEQ ID NO: 1950718 - RNA, 19 nt, Artificial Sequence
  Description of Artificial Sequence: Synthetic oligonucleotide
cccaguucacaguugggag

SEQ ID NO: 1950719 - RNA, 19 nt, Artificial Sequence
  Description of Artificial Sequence: Synthetic oligonucleotide
guuaucuccuuagguucgc

SEQ ID NO: 1950720 - RNA, 19 nt, Artificial Sequence
  Description of Artificial Sequence: Synthetic oligonucleotide
augaagacccagacacaag

SEQ ID NO: 1950721 - RNA, 19 nt, Artificial Sequence
  Description of Artificial Sequence: Synthetic oligonucleotide
gcuaggcccuguuaucucc

SEQ ID NO: 1950722 - RNA, 19 nt, Artificial Sequence
  Description of Artificial Sequence: Synthetic oligonucleotide
guggacccgaagugaacug

SEQ ID NO: 1950723 - RNA, 19 nt, Artificial Sequence
  Description of Artificial Sequence: Synthetic oligonucleotide
uugggaggguggcuccaug

SEQ ID NO: 1950724 - RNA, 19 nt, Artificial Sequence
  Description of Artificial Sequence: Synthetic oligonucleotide
cagguaguggugcugagcu

SEQ ID NO: 1950725 - RNA, 19 nt, Artificial Sequence
  Description of Artificial Sequence: Synthetic oligonucleotide
ccgaagugaacuguggcag

SEQ ID NO: 1950726 - RNA, 19 nt, Artificial Sequence
  Description of Artificial Sequence: Synthetic oligonucleotide
ggcuugguggcuguagcgg

SEQ ID NO: 1950727 - RNA, 19 nt, Artificial Sequence
  Description of Artificial Sequence: Synthetic oligonucleotide
gaggccccgccccuggcag

SEQ ID NO: 1950728 - RNA, 19 nt, Artificial Sequence
  Description of Artificial Sequence: Synthetic oligonucleotide
acugugcuaagaguuguuu

SEQ ID NO: 1950729 - RNA, 19 nt, Artificial Sequence
  Description of Artificial Sequence: Synthetic oligonucleotide
agacuccccuuuuggguca

SEQ ID NO: 1950730 - RNA, 19 nt, Artificial Sequence
  Description of Artificial Sequence: Synthetic oligonucleotide
aggcuaggcccuguuaucu

SEQ ID NO: 1950731 - RNA, 19 nt, Artificial Sequence
  Description of Artificial Sequence: Synthetic oligonucleotide
caguuaccccuaaauuuca

SEQ ID NO: 1950732 - RNA, 19 nt, Artificial Sequence
  Description of Artificial Sequence: Synthetic oligonucleotide
gugcuaagaguuguuuuga

SEQ ID NO: 1950733 - RNA, 19 nt, Artificial Sequence
  Description of Artificial Sequence: Synthetic oligonucleotide
uguggaaguaggggcugac

SEQ ID NO: 1950734 - RNA, 19 nt, Artificial Sequence
  Description of Artificial Sequence: Synthetic oligonucleotide
gaagagcuauggucccuga

SEQ ID NO: 1950735 - RNA, 19 nt, Artificial Sequence
  Description of Artificial Sequence: Synthetic oligonucleotide
auccuaggggcaguggagu

SEQ ID NO: 1950736 - RNA, 19 nt, Artificial Sequence
  Description of Artificial Sequence: Synthetic oligonucleotide
cuugagcccagaggcuagg

SEQ ID NO: 1950737 - RNA, 19 nt, Artificial Sequence
  Description of Artificial Sequence: Synthetic oligonucleotide
uuaucuccuuagguucgcu

SEQ ID NO: 1950738 - RNA, 19 nt, Artificial Sequence
  Description of Artificial Sequence: Synthetic oligonucleotide
agguaguggugcugagcug

SEQ ID NO: 1950739 - RNA, 19 nt, Artificial Sequence
  Description of Artificial Sequence: Synthetic oligonucleotide
ggcuauuccuugcucucug

SEQ ID NO: 1950740 - RNA, 19 nt, Artificial Sequence
  Description of Artificial Sequence: Synthetic oligonucleotide
uccuggcauacucgcuaca

SEQ ID NO: 1950741 - RNA, 19 nt, Artificial Sequence
  Description of Artificial Sequence: Synthetic oligonucleotide
guggcuguagcggcuauuc

SEQ ID NO: 1950742 - RNA, 19 nt, Artificial Sequence
  Description of Artificial Sequence: Synthetic oligonucleotide
caucauauggggagguggu

SEQ ID NO: 1950743 - RNA, 19 nt, Artificial Sequence
  Description of Artificial Sequence: Synthetic oligonucleotide
gcuugguggcuguagcggc

SEQ ID NO: 1950744 - RNA, 19 nt, Artificial Sequence
  Description of Artificial Sequence: Synthetic oligonucleotide
agaugaagacccagacaca

SEQ ID NO: 1950745 - RNA, 19 nt, Artificial Sequence
  Description of Artificial Sequence: Synthetic oligonucleotide
ccuuagguucgcugguccg

SEQ ID NO: 1950746 - RNA, 19 nt, Artificial Sequence
  Description of Artificial Sequence: Synthetic oligonucleotide
guugccugcuagaucauua

SEQ ID NO: 1950747 - RNA, 19 nt, Artificial Sequence
  Description of Artificial Sequence: Synthetic oligonucleotide
agaguuguuuugacccuga

SEQ ID NO: 1950748 - RNA, 19 nt, Artificial Sequence
  Description of Artificial Sequence: Synthetic oligonucleotide
uacucgcuacagccagaca

SEQ ID NO: 1950749 - RNA, 19 nt, Artificial Sequence
  Description of Artificial Sequence: Synthetic oligonucleotide
gucccugggguggcgaggg

SEQ ID NO: 1950750 - RNA, 19 nt, Artificial Sequence
  Description of Artificial Sequence: Synthetic oligonucleotide
ggugccuguguggaaguag

SEQ ID NO: 1950751 - RNA, 19 nt, Artificial Sequence
  Description of Artificial Sequence: Synthetic oligonucleotide
ggcagcauuaagacucccc

SEQ ID NO: 1950752 - RNA, 19 nt, Artificial Sequence
  Description of Artificial Sequence: Synthetic oligonucleotide
aucagggaguaugaugguu

SEQ ID NO: 1950753 - RNA, 19 nt, Artificial Sequence
  Description of Artificial Sequence: Synthetic oligonucleotide
auucuccugcuuaggugag

SEQ ID NO: 1950754 - RNA, 19 nt, Artificial Sequence
  Description of Artificial Sequence: Synthetic oligonucleotide
cagcugcuaucucuggguc

SEQ ID NO: 1950755 - RNA, 19 nt, Artificial Sequence
  Description of Artificial Sequence: Synthetic oligonucleotide
uuccgcucugguuccuccu

SEQ ID NO: 1950756 - RNA, 19 nt, Artificial Sequence
  Description of Artificial Sequence: Synthetic oligonucleotide
uagguucgcugguccggcc

SEQ ID NO: 1950757 - RNA, 19 nt, Artificial Sequence
  Description of Artificial Sequence: Synthetic oligonucleotide
auauccuggcauacucgcu

SEQ ID NO: 1950758 - RNA, 19 nt, Artificial Sequence
  Description of Artificial Sequence: Synthetic oligonucleotide
uagcggcuauuccuugcuc

SEQ ID NO: 1950759 - RNA, 19 nt, Artificial Sequence
  Description of Artificial Sequence: Synthetic oligonucleotide
aacugugcuaagaguuguu

SEQ ID NO: 1950760 - RNA, 19 nt, Artificial Sequence
  Description of Artificial Sequence: Synthetic oligonucleotide
agggccagguaguggugcu

SEQ ID NO: 1950761 - RNA, 19 nt, Artificial Sequence
  Description of Artificial Sequence: Synthetic oligonucleotide
ggucccugauccauucucc

SEQ ID NO: 1950762 - RNA, 19 nt, Artificial Sequence
  Description of Artificial Sequence: Synthetic oligonucleotide
gaguuguuuugacccugaa

SEQ ID NO: 1950763 - RNA, 19 nt, Artificial Sequence
  Description of Artificial Sequence: Synthetic oligonucleotide
ccacuuuaucugacuuugg

SEQ ID NO: 1950764 - RNA, 19 nt, Artificial Sequence
  Description of Artificial Sequence: Synthetic oligonucleotide
cuguguggaaguaggggcu

SEQ ID NO: 1950765 - RNA, 19 nt, Artificial Sequence
  Description of Artificial Sequence: Synthetic oligonucleotide
acccugaaagggaacuggu

SEQ ID NO: 1950766 - RNA, 19 nt, Artificial Sequence
  Description of Artificial Sequence: Synthetic oligonucleotide
cuccaucugaguccuugga

SEQ ID NO: 1950767 - RNA, 19 nt, Artificial Sequence
  Description of Artificial Sequence: Synthetic oligonucleotide
agaagaggacugagggccu

SEQ ID NO: 1950768 - RNA, 19 nt, Artificial Sequence
  Description of Artificial Sequence: Synthetic oligonucleotide
guaggggcugacuguucca

SEQ ID NO: 1950769 - RNA, 19 nt, Artificial Sequence
  Description of Artificial Sequence: Synthetic oligonucleotide
gcccuguuaucuccuuagg

SEQ ID NO: 1950770 - RNA, 19 nt, Artificial Sequence
  Description of Artificial Sequence: Synthetic oligonucleotide
ggaauccuaggggcagugg

SEQ ID NO: 1950771 - RNA, 19 nt, Artificial Sequence
  Description of Artificial Sequence: Synthetic oligonucleotide
gaagaggacugagggccuc

SEQ ID NO: 1950772 - RNA, 19 nt, Artificial Sequence
  Description of Artificial Sequence: Synthetic oligonucleotide
guagcggcuauuccuugcu

SEQ ID NO: 1950773 - RNA, 19 nt, Artificial Sequence
  Description of Artificial Sequence: Synthetic oligonucleotide
cagaaccaacugugcuaag

SEQ ID NO: 1950774 - RNA, 19 nt, Artificial Sequence
  Description of Artificial Sequence: Synthetic oligonucleotide
gggaguaugaugguugccu

SEQ ID NO: 1950775 - RNA, 19 nt, Artificial Sequence
  Description of Artificial Sequence: Synthetic oligonucleotide
ccuggcauacucgcuacag

SEQ ID NO: 1950776 - RNA, 19 nt, Artificial Sequence
  Description of Artificial Sequence: Synthetic oligonucleotide
cauacucgcuacagccaga

SEQ ID NO: 1950777 - RNA, 19 nt, Artificial Sequence
  Description of Artificial Sequence: Synthetic oligonucleotide
gguuucauccgugaagagu

SEQ ID NO: 1950778 - RNA, 19 nt, Artificial Sequence
  Description of Artificial Sequence: Synthetic oligonucleotide
gguaguggugcugagcugu

SEQ ID NO: 1950779 - RNA, 19 nt, Artificial Sequence
  Description of Artificial Sequence: Synthetic oligonucleotide
cuggaggaucuucagcucu

SEQ ID NO: 1950780 - RNA, 19 nt, Artificial Sequence
  Description of Artificial Sequence: Synthetic oligonucleotide
gaaguaggggcugacuguu

SEQ ID NO: 1950781 - RNA, 19 nt, Artificial Sequence
  Description of Artificial Sequence: Synthetic oligonucleotide
cauauggggaggugguggu

SEQ ID NO: 1950782 - RNA, 19 nt, Artificial Sequence
  Description of Artificial Sequence: Synthetic oligonucleotide
ccuaaauuucauggguauc

SEQ ID NO: 1950783 - RNA, 19 nt, Artificial Sequence
  Description of Artificial Sequence: Synthetic oligonucleotide
aguuaccccuaaauuucau

SEQ ID NO: 1950784 - RNA, 19 nt, Artificial Sequence
  Description of Artificial Sequence: Synthetic oligonucleotide
ggaacugguucugcauagc

SEQ ID NO: 1950785 - RNA, 19 nt, Artificial Sequence
  Description of Artificial Sequence: Synthetic oligonucleotide
auccucaggggcugugguu

SEQ ID NO: 1950786 - RNA, 19 nt, Artificial Sequence
  Description of Artificial Sequence: Synthetic oligonucleotide
ggcuugaggccaacaacug

SEQ ID NO: 1950787 - RNA, 19 nt, Artificial Sequence
  Description of Artificial Sequence: Synthetic oligonucleotide
gaccacaggaugagcugga

SEQ ID NO: 1950788 - RNA, 19 nt, Artificial Sequence
  Description of Artificial Sequence: Synthetic oligonucleotide
guaguggugcugagcugug

SEQ ID NO: 1950789 - RNA, 19 nt, Artificial Sequence
  Description of Artificial Sequence: Synthetic oligonucleotide
cuagaucauuagagaagcu

SEQ ID NO: 1950790 - RNA, 19 nt, Artificial Sequence
  Description of Artificial Sequence: Synthetic oligonucleotide
cuuuugggucaggcuucgg

SEQ ID NO: 1950791 - RNA, 19 nt, Artificial Sequence
  Description of Artificial Sequence: Synthetic oligonucleotide
acacagggcuuuauuguua

SEQ ID NO: 1950792 - RNA, 19 nt, Artificial Sequence
  Description of Artificial Sequence: Synthetic oligonucleotide
cccgaagugaacuguggca

SEQ ID NO: 1950793 - RNA, 19 nt, Artificial Sequence
  Description of Artificial Sequence: Synthetic oligonucleotide
cauagaggccccgccccug

SEQ ID NO: 1950794 - RNA, 19 nt, Artificial Sequence
  Description of Artificial Sequence: Synthetic oligonucleotide
agugggcauuguugacccu

SEQ ID NO: 1950795 - RNA, 19 nt, Artificial Sequence
  Description of Artificial Sequence: Synthetic oligonucleotide
ccuaggggcaguggagugg

SEQ ID NO: 1950796 - RNA, 19 nt, Artificial Sequence
  Description of Artificial Sequence: Synthetic oligonucleotide
ggacccgaagugaacugug

SEQ ID NO: 1950797 - RNA, 19 nt, Artificial Sequence
  Description of Artificial Sequence: Synthetic oligonucleotide
guugacccugagagaggcc

SEQ ID NO: 1950798 - RNA, 19 nt, Artificial Sequence
  Description of Artificial Sequence: Synthetic oligonucleotide
ccuguuaucuccuuagguu

SEQ ID NO: 1950799 - RNA, 19 nt, Artificial Sequence
  Description of Artificial Sequence: Synthetic oligonucleotide
gccucuccacuuuaucuga

SEQ ID NO: 1950800 - RNA, 19 nt, Artificial Sequence
  Description of Artificial Sequence: Synthetic oligonucleotide
aggguggacccgaagugaa

SEQ ID NO: 1950801 - RNA, 19 nt, Artificial Sequence
  Description of Artificial Sequence: Synthetic oligonucleotide
uucgcugguccggccugag

SEQ ID NO: 1950802 - RNA, 19 nt, Artificial Sequence
  Description of Artificial Sequence: Synthetic oligonucleotide
gagagaggccccuuuccuu

SEQ ID NO: 1950803 - RNA, 19 nt, Artificial Sequence
  Description of Artificial Sequence: Synthetic oligonucleotide
cugugcuaagaguuguuuu

SEQ ID NO: 1950804 - RNA, 19 nt, Artificial Sequence
  Description of Artificial Sequence: Synthetic oligonucleotide
agacucuuuaggaggcgua

SEQ ID NO: 1950805 - RNA, 19 nt, Artificial Sequence
  Description of Artificial Sequence: Synthetic oligonucleotide
gcagacucuuuaggaggcg

SEQ ID NO: 1950806 - RNA, 19 nt, Artificial Sequence
  Description of Artificial Sequence: Synthetic oligonucleotide
aguugggaggguggcucca

SEQ ID NO: 1950807 - RNA, 19 nt, Artificial Sequence
  Description of Artificial Sequence: Synthetic oligonucleotide
aggcucggccugugggcag

SEQ ID NO: 1950808 - RNA, 19 nt, Artificial Sequence
  Description of Artificial Sequence: Synthetic oligonucleotide
cagagacaucuugagccca

SEQ ID NO: 1950809 - RNA, 19 nt, Artificial Sequence
  Description of Artificial Sequence: Synthetic oligonucleotide
cugcaguuaccccuaaauu

SEQ ID NO: 1950810 - RNA, 19 nt, Artificial Sequence
  Description of Artificial Sequence: Synthetic oligonucleotide
caucuugagcccagaggcu

SEQ ID NO: 1950811 - RNA, 19 nt, Artificial Sequence
  Description of Artificial Sequence: Synthetic oligonucleotide
ggcauacucgcuacagcca

SEQ ID NO: 1950812 - RNA, 19 nt, Artificial Sequence
  Description of Artificial Sequence: Synthetic oligonucleotide
aggcccuguuaucuccuua

SEQ ID NO: 1950813 - RNA, 19 nt, Artificial Sequence
  Description of Artificial Sequence: Synthetic oligonucleotide
gcggcuauuccuugcucuc

SEQ ID NO: 1950814 - RNA, 19 nt, Artificial Sequence
  Description of Artificial Sequence: Synthetic oligonucleotide
gcuucgggcagacucuuua

SEQ ID NO: 1950815 - RNA, 19 nt, Artificial Sequence
  Description of Artificial Sequence: Synthetic oligonucleotide
cugaauauccuggcauacu

SEQ ID NO: 1950816 - RNA, 19 nt, Artificial Sequence
  Description of Artificial Sequence: Synthetic oligonucleotide
gacuccccuuuugggucag

SEQ ID NO: 1950817 - RNA, 19 nt, Artificial Sequence
  Description of Artificial Sequence: Synthetic oligonucleotide
uggcgagggccagguagug

SEQ ID NO: 1950818 - RNA, 19 nt, Artificial Sequence
  Description of Artificial Sequence: Synthetic oligonucleotide
ccuuuugggucaggcuucg

SEQ ID NO: 1950819 - RNA, 19 nt, Artificial Sequence
  Description of Artificial Sequence: Synthetic oligonucleotide
gcugacccugaccugcaga

SEQ ID NO: 1950820 - RNA, 19 nt, Artificial Sequence
  Description of Artificial Sequence: Synthetic oligonucleotide
caacugugcuaagaguugu

SEQ ID NO: 1950821 - RNA, 19 nt, Artificial Sequence
  Description of Artificial Sequence: Synthetic oligonucleotide
cuugguggcuguagcggcu

SEQ ID NO: 1950822 - RNA, 19 nt, Artificial Sequence
  Description of Artificial Sequence: Synthetic oligonucleotide
gguggacccgaagugaacu

SEQ ID NO: 1950823 - RNA, 19 nt, Artificial Sequence
  Description of Artificial Sequence: Synthetic oligonucleotide
gagaagagcuauggucccu

SEQ ID NO: 1950824 - RNA, 19 nt, Artificial Sequence
  Description of Artificial Sequence: Synthetic oligonucleotide
gcucugguuccuccugcug

SEQ ID NO: 1950825 - RNA, 19 nt, Artificial Sequence
  Description of Artificial Sequence: Synthetic oligonucleotide
caucaucuacaguccauuu

SEQ ID NO: 1950826 - RNA, 19 nt, Artificial Sequence
  Description of Artificial Sequence: Synthetic oligonucleotide
gggaauccuaggggcagug

SEQ ID NO: 1950827 - RNA, 19 nt, Artificial Sequence
  Description of Artificial Sequence: Synthetic oligonucleotide
ggcgagggccagguagugg

SEQ ID NO: 1950828 - RNA, 19 nt, Artificial Sequence
  Description of Artificial Sequence: Synthetic oligonucleotide
cagguggggcccaucauau

SEQ ID NO: 1950829 - RNA, 19 nt, Artificial Sequence
  Description of Artificial Sequence: Synthetic oligonucleotide
gggcauuguugacccugag

SEQ ID NO: 1950830 - RNA, 19 nt, Artificial Sequence
  Description of Artificial Sequence: Synthetic oligonucleotide
ggcuaggcccuguuaucuc

SEQ ID NO: 1950831 - RNA, 19 nt, Artificial Sequence
  Description of Artificial Sequence: Synthetic oligonucleotide
ccucuccacuuuaucugac

SEQ ID NO: 1950832 - RNA, 19 nt, Artificial Sequence
  Description of Artificial Sequence: Synthetic oligonucleotide
ggcugugguuucauccgug

SEQ ID NO: 1950833 - RNA, 19 nt, Artificial Sequence
  Description of Artificial Sequence: Synthetic oligonucleotide
cuaggcccuguuaucuccu

SEQ ID NO: 1950834 - RNA, 19 nt, Artificial Sequence
  Description of Artificial Sequence: Synthetic oligonucleotide
gccuucuguugcaggaggc

SEQ ID NO: 1950835 - RNA, 19 nt, Artificial Sequence
  Description of Artificial Sequence: Synthetic oligonucleotide
cugggagaagagcuauggu

SEQ ID NO: 1950836 - RNA, 19 nt, Artificial Sequence
  Description of Artificial Sequence: Synthetic oligonucleotide
gaccugcagaguaguccca

SEQ ID NO: 1950837 - RNA, 19 nt, Artificial Sequence
  Description of Artificial Sequence: Synthetic oligonucleotide
ccccuaaauuucaugggua

SEQ ID NO: 1950838 - RNA, 19 nt, Artificial Sequence
  Description of Artificial Sequence: Synthetic oligonucleotide
gggcagguggggcccauca

SEQ ID NO: 1950839 - RNA, 19 nt, Artificial Sequence
  Description of Artificial Sequence: Synthetic oligonucleotide
cugcagaguagucccaguu

SEQ ID NO: 1950840 - RNA, 19 nt, Artificial Sequence
  Description of Artificial Sequence: Synthetic oligonucleotide
ccugaccugcagaguaguc

SEQ ID NO: 1950841 - RNA, 19 nt, Artificial Sequence
  Description of Artificial Sequence: Synthetic oligonucleotide
ggaggaucuucagcucuca

SEQ ID NO: 1950842 - RNA, 19 nt, Artificial Sequence
  Description of Artificial Sequence: Synthetic oligonucleotide
uggugccuguguggaagua

SEQ ID NO: 1950843 - RNA, 19 nt, Artificial Sequence
  Description of Artificial Sequence: Synthetic oligonucleotide
cagacucuuuaggaggcgu

SEQ ID NO: 1950844 - RNA, 19 nt, Artificial Sequence
  Description of Artificial Sequence: Synthetic oligonucleotide
ccuccugacaggucucaga

SEQ ID NO: 1950845 - RNA, 19 nt, Artificial Sequence
  Description of Artificial Sequence: Synthetic oligonucleotide
cccuaaauuucauggguau

SEQ ID NO: 1950846 - RNA, 19 nt, Artificial Sequence
  Description of Artificial Sequence: Synthetic oligonucleotide
cugacaggucucagaggcu

SEQ ID NO: 1950847 - RNA, 19 nt, Artificial Sequence
  Description of Artificial Sequence: Synthetic oligonucleotide
cccacgaaguugcagacau

SEQ ID NO: 1950848 - RNA, 19 nt, Artificial Sequence
  Description of Artificial Sequence: Synthetic oligonucleotide
cagcauuaagacuccccuu

SEQ ID NO: 1950849 - RNA, 19 nt, Artificial Sequence
  Description of Artificial Sequence: Synthetic oligonucleotide
cagaggcuaggcccuguua

SEQ ID NO: 1950850 - RNA, 19 nt, Artificial Sequence
  Description of Artificial Sequence: Synthetic oligonucleotide
ggacaggaguugcuguccu

SEQ ID NO: 1950851 - RNA, 19 nt, Artificial Sequence
  Description of Artificial Sequence: Synthetic oligonucleotide
gcagaccucugcaguuacc

SEQ ID NO: 1950852 - RNA, 19 nt, Artificial Sequence
  Description of Artificial Sequence: Synthetic oligonucleotide
cgcuacagccagacaggcc

SEQ ID NO: 1950853 - RNA, 19 nt, Artificial Sequence
  Description of Artificial Sequence: Synthetic oligonucleotide
cagaggcuugaggccaaca

SEQ ID NO: 1950854 - RNA, 19 nt, Artificial Sequence
  Description of Artificial Sequence: Synthetic oligonucleotide
cauggccucuccacuuuau

SEQ ID NO: 1950855 - RNA, 19 nt, Artificial Sequence
  Description of Artificial Sequence: Synthetic oligonucleotide
ggccaacaacugugcagca

SEQ ID NO: 1950856 - RNA, 19 nt, Artificial Sequence
  Description of Artificial Sequence: Synthetic oligonucleotide
cugcagaccucugcaguua

SEQ ID NO: 1950857 - RNA, 19 nt, Artificial Sequence
  Description of Artificial Sequence: Synthetic oligonucleotide
ucccugcauggugccugug

SEQ ID NO: 1950858 - RNA, 19 nt, Artificial Sequence
  Description of Artificial Sequence: Synthetic oligonucleotide
cccuguuaucuccuuaggu

SEQ ID NO: 1950859 - RNA, 19 nt, Artificial Sequence
  Description of Artificial Sequence: Synthetic oligonucleotide
cccaucauauggggaggug

SEQ ID NO: 1950860 - RNA, 19 nt, Artificial Sequence
  Description of Artificial Sequence: Synthetic oligonucleotide
guucgcugguccggccuga

SEQ ID NO: 1950861 - RNA, 19 nt, Artificial Sequence
  Description of Artificial Sequence: Synthetic oligonucleotide
gcauuaagacuccccuuuu

SEQ ID NO: 1950862 - RNA, 19 nt, Artificial Sequence
  Description of Artificial Sequence: Synthetic oligonucleotide
ggguggacccgaagugaac

SEQ ID NO: 1950863 - RNA, 19 nt, Artificial Sequence
  Description of Artificial Sequence: Synthetic oligonucleotide
ccacgaaguugcagacauc

SEQ ID NO: 1950864 - RNA, 19 nt, Artificial Sequence
  Description of Artificial Sequence: Synthetic oligonucleotide
cuccugggagaagagcuau

SEQ ID NO: 1950865 - RNA, 19 nt, Artificial Sequence
  Description of Artificial Sequence: Synthetic oligonucleotide
ggggcccaucauaugggga

SEQ ID NO: 1950866 - RNA, 19 nt, Artificial Sequence
  Description of Artificial Sequence: Synthetic oligonucleotide
gcuguagcggcuauuccuu

SEQ ID NO: 1950867 - RNA, 19 nt, Artificial Sequence
  Description of Artificial Sequence: Synthetic oligonucleotide
ggucaggcuucgggcagac

SEQ ID NO: 1950868 - RNA, 19 nt, Artificial Sequence
  Description of Artificial Sequence: Synthetic oligonucleotide
ccccuuuugggucaggcuu

SEQ ID NO: 1950869 - RNA, 19 nt, Artificial Sequence
  Description of Artificial Sequence: Synthetic oligonucleotide
ggauggcuccucagagaca

SEQ ID NO: 1950870 - RNA, 19 nt, Artificial Sequence
  Description of Artificial Sequence: Synthetic oligonucleotide
ccucaggggcugugguuuc

SEQ ID NO: 1950871 - RNA, 19 nt, Artificial Sequence
  Description of Artificial Sequence: Synthetic oligonucleotide
ccccuuuccuuccgcucug

SEQ ID NO: 1950872 - RNA, 19 nt, Artificial Sequence
  Description of Artificial Sequence: Synthetic oligonucleotide
gucccugcauggugccugu

SEQ ID NO: 1950873 - RNA, 19 nt, Artificial Sequence
  Description of Artificial Sequence: Synthetic oligonucleotide
gggcugugguuucauccgu

SEQ ID NO: 1950874 - RNA, 19 nt, Artificial Sequence
  Description of Artificial Sequence: Synthetic oligonucleotide
cuccugcuuaggugaggcu

SEQ ID NO: 1950875 - RNA, 19 nt, Artificial Sequence
  Description of Artificial Sequence: Synthetic oligonucleotide
gguccggccugaggcagca

SEQ ID NO: 1950876 - RNA, 19 nt, Artificial Sequence
  Description of Artificial Sequence: Synthetic oligonucleotide
caguggagugggcauuguu

SEQ ID NO: 1950877 - RNA, 19 nt, Artificial Sequence
  Description of Artificial Sequence: Synthetic oligonucleotide
gggucaggcuucgggcaga

SEQ ID NO: 1950878 - RNA, 19 nt, Artificial Sequence
  Description of Artificial Sequence: Synthetic oligonucleotide
cgagggccagguaguggug

SEQ ID NO: 1950879 - RNA, 19 nt, Artificial Sequence
  Description of Artificial Sequence: Synthetic oligonucleotide
ccggccugaggcagcauua

SEQ ID NO: 1950880 - RNA, 19 nt, Artificial Sequence
  Description of Artificial Sequence: Synthetic oligonucleotide
ggguaucagggaguaugau

SEQ ID NO: 1950881 - RNA, 19 nt, Artificial Sequence
  Description of Artificial Sequence: Synthetic oligonucleotide
cauggguaucagggaguau

SEQ ID NO: 1950882 - RNA, 19 nt, Artificial Sequence
  Description of Artificial Sequence: Synthetic oligonucleotide
gcuugcaggcuugguggcu

SEQ ID NO: 1950883 - RNA, 19 nt, Artificial Sequence
  Description of Artificial Sequence: Synthetic oligonucleotide
gcccaucauauggggaggu

SEQ ID NO: 1950884 - RNA, 19 nt, Artificial Sequence
  Description of Artificial Sequence: Synthetic oligonucleotide
ggcagguggggcccaucau

SEQ ID NO: 1950885 - RNA, 19 nt, Artificial Sequence
  Description of Artificial Sequence: Synthetic oligonucleotide
gguugccugcuagaucauu

SEQ ID NO: 1950886 - RNA, 19 nt, Artificial Sequence
  Description of Artificial Sequence: Synthetic oligonucleotide
ggggucccugggguggcga

SEQ ID NO: 1950887 - RNA, 19 nt, Artificial Sequence
  Description of Artificial Sequence: Synthetic oligonucleotide
ccccacgaaguugcagaca

SEQ ID NO: 1950888 - RNA, 19 nt, Artificial Sequence
  Description of Artificial Sequence: Synthetic oligonucleotide
ccgugaagagucccugcau

SEQ ID NO: 1950889 - RNA, 19 nt, Artificial Sequence
  Description of Artificial Sequence: Synthetic oligonucleotide
gucaggcuucgggcagacu

SEQ ID NO: 1950890 - RNA, 19 nt, Artificial Sequence
  Description of Artificial Sequence: Synthetic oligonucleotide
ccucugcaguuaccccuaa

SEQ ID NO: 1950891 - RNA, 19 nt, Artificial Sequence
  Description of Artificial Sequence: Synthetic oligonucleotide
cccugaccugcagaguagu

SEQ ID NO: 1950892 - RNA, 19 nt, Artificial Sequence
  Description of Artificial Sequence: Synthetic oligonucleotide
gcucaggggcuugcaggcu

SEQ ID NO: 1950893 - RNA, 19 nt, Artificial Sequence
  Description of Artificial Sequence: Synthetic oligonucleotide
ggccccgccccuggcagcu

SEQ ID NO: 1950894 - RNA, 19 nt, Artificial Sequence
  Description of Artificial Sequence: Synthetic oligonucleotide
cccugagagaggccccuuu

SEQ ID NO: 1950895 - RNA, 19 nt, Artificial Sequence
  Description of Artificial Sequence: Synthetic oligonucleotide
gggcugagcucaggggcuu

SEQ ID NO: 1950896 - RNA, 19 nt, Artificial Sequence
  Description of Artificial Sequence: Synthetic oligonucleotide
ggcuucgggcagacucuuu

SEQ ID NO: 1950897 - RNA, 19 nt, Artificial Sequence
  Description of Artificial Sequence: Synthetic oligonucleotide
guccggccugaggcagcau

SEQ ID NO: 1950898 - RNA, 19 nt, Artificial Sequence
  Description of Artificial Sequence: Synthetic oligonucleotide
cccgccccuggcagcugcu

SEQ ID NO: 1950899 - RNA, 19 nt, Artificial Sequence
  Description of Artificial Sequence: Synthetic oligonucleotide
ccgccccuggcagcugcua

SEQ ID NO: 1950900 - RNA, 19 nt, Artificial Sequence
  Description of Artificial Sequence: Synthetic oligonucleotide
gaugauauccaucacuagc

SEQ ID NO: 1950901 - RNA, 19 nt, Artificial Sequence
  Description of Artificial Sequence: Synthetic oligonucleotide
aaaguuuugcggcaacuuc

SEQ ID NO: 1950902 - RNA, 19 nt, Artificial Sequence
  Description of Artificial Sequence: Synthetic oligonucleotide
ugucuugccaaccaggcgc

SEQ ID NO: 1950903 - RNA, 19 nt, Artificial Sequence
  Description of Artificial Sequence: Synthetic oligonucleotide
augauauccaucacuagcc

SEQ ID NO: 1950904 - RNA, 19 nt, Artificial Sequence
  Description of Artificial Sequence: Synthetic oligonucleotide
aaccacgcaguccaccugc

SEQ ID NO: 1950905 - RNA, 19 nt, Artificial Sequence
  Description of Artificial Sequence: Synthetic oligonucleotide
uccaucacuagcccgagcc

SEQ ID NO: 1950906 - RNA, 19 nt, Artificial Sequence
  Description of Artificial Sequence: Synthetic oligonucleotide
acuagcccgagccauaagg

SEQ ID NO: 1950907 - RNA, 19 nt, Artificial Sequence
  Description of Artificial Sequence: Synthetic oligonucleotide
uuugcggcaacuuccugcg

SEQ ID NO: 1950908 - RNA, 19 nt, Artificial Sequence
  Description of Artificial Sequence: Synthetic oligonucleotide
gauauccaucacuagcccg

SEQ ID NO: 1950909 - RNA, 19 nt, Artificial Sequence
  Description of Artificial Sequence: Synthetic oligonucleotide
uuuugcggcaacuuccugc

SEQ ID NO: 1950910 - RNA, 19 nt, Artificial Sequence
  Description of Artificial Sequence: Synthetic oligonucleotide
aacuggucgggccgguucc

SEQ ID NO: 1950911 - RNA, 19 nt, Artificial Sequence
  Description of Artificial Sequence: Synthetic oligonucleotide
aacuuucccacgcgugccc

SEQ ID NO: 1950912 - RNA, 19 nt, Artificial Sequence
  Description of Artificial Sequence: Synthetic oligonucleotide
acgcaguccaccugcagcc

SEQ ID NO: 1950913 - RNA, 19 nt, Artificial Sequence
  Description of Artificial Sequence: Synthetic oligonucleotide
uugaacacgccguagugcu

SEQ ID NO: 1950914 - RNA, 19 nt, Artificial Sequence
  Description of Artificial Sequence: Synthetic oligonucleotide
auggguacugggcacgcac

SEQ ID NO: 1950915 - RNA, 19 nt, Artificial Sequence
  Description of Artificial Sequence: Synthetic oligonucleotide
ggucagaaaggccacaagc

SEQ ID NO: 1950916 - RNA, 19 nt, Artificial Sequence
  Description of Artificial Sequence: Synthetic oligonucleotide
uccaugaaggccaccgcgc

SEQ ID NO: 1950917 - RNA, 19 nt, Artificial Sequence
  Description of Artificial Sequence: Synthetic oligonucleotide
cugacaguagcaugucccg

SEQ ID NO: 1950918 - RNA, 19 nt, Artificial Sequence
  Description of Artificial Sequence: Synthetic oligonucleotide
cuuguccccgcaaaccacg

SEQ ID NO: 1950919 - RNA, 19 nt, Artificial Sequence
  Description of Artificial Sequence: Synthetic oligonucleotide
guucgugucgccuccgggg

SEQ ID NO: 1950920 - RNA, 19 nt, Artificial Sequence
  Description of Artificial Sequence: Synthetic oligonucleotide
gaaggcgcgcaccuggucc

SEQ ID NO: 1950921 - RNA, 19 nt, Artificial Sequence
  Description of Artificial Sequence: Synthetic oligonucleotide
aguccuggggacccggugg

SEQ ID NO: 1950922 - RNA, 19 nt, Artificial Sequence
  Description of Artificial Sequence: Synthetic oligonucleotide
agcgcugaggcugcgaugg

SEQ ID NO: 1950923 - RNA, 19 nt, Artificial Sequence
  Description of Artificial Sequence: Synthetic oligonucleotide
ugcggcaacuuccugcggc

SEQ ID NO: 1950924 - RNA, 19 nt, Artificial Sequence
  Description of Artificial Sequence: Synthetic oligonucleotide
cuagcccgagccauaaggc

SEQ ID NO: 1950925 - RNA, 19 nt, Artificial Sequence
  Description of Artificial Sequence: Synthetic oligonucleotide
aaaaguuuugcggcaacuu

SEQ ID NO: 1950926 - RNA, 19 nt, Artificial Sequence
  Description of Artificial Sequence: Synthetic oligonucleotide
gcagcaggcgcccaaagcg

SEQ ID NO: 1950927 - RNA, 19 nt, Artificial Sequence
  Description of Artificial Sequence: Synthetic oligonucleotide
acguggguagcucccaccg

SEQ ID NO: 1950928 - RNA, 19 nt, Artificial Sequence
  Description of Artificial Sequence: Synthetic oligonucleotide
agcaugucccggaugagcg

SEQ ID NO: 1950929 - RNA, 19 nt, Artificial Sequence
  Description of Artificial Sequence: Synthetic oligonucleotide
ugguugaacacgccguagu

SEQ ID NO: 1950930 - RNA, 19 nt, Artificial Sequence
  Description of Artificial Sequence: Synthetic oligonucleotide
gagccauaaggccaguuga

SEQ ID NO: 1950931 - RNA, 19 nt, Artificial Sequence
  Description of Artificial Sequence: Synthetic oligonucleotide
cucgguugcacguggguag

SEQ ID NO: 1950932 - RNA, 19 nt, Artificial Sequence
  Description of Artificial Sequence: Synthetic oligonucleotide
aacacgccguagugcuugc

SEQ ID NO: 1950933 - RNA, 19 nt, Artificial Sequence
  Description of Artificial Sequence: Synthetic oligonucleotide
acgccguagugcuugccgc

SEQ ID NO: 1950934 - RNA, 19 nt, Artificial Sequence
  Description of Artificial Sequence: Synthetic oligonucleotide
cuacaaggucccagcaucc

SEQ ID NO: 1950935 - RNA, 19 nt, Artificial Sequence
  Description of Artificial Sequence: Synthetic oligonucleotide
gcaucaggcgugaagagcg

SEQ ID NO: 1950936 - RNA, 19 nt, Artificial Sequence
  Description of Artificial Sequence: Synthetic oligonucleotide
auauccaucacuagcccga

SEQ ID NO: 1950937 - RNA, 19 nt, Artificial Sequence
  Description of Artificial Sequence: Synthetic oligonucleotide
aaggccaccgcgcgcucgg

SEQ ID NO: 1950938 - RNA, 19 nt, Artificial Sequence
  Description of Artificial Sequence: Synthetic oligonucleotide
gacuuguccccgcaaacca

SEQ ID NO: 1950939 - RNA, 19 nt, Artificial Sequence
  Description of Artificial Sequence: Synthetic oligonucleotide
aggcgcaugaagaaaagcu

SEQ ID NO: 1950940 - RNA, 19 nt, Artificial Sequence
  Description of Artificial Sequence: Synthetic oligonucleotide
uuguccacgccguucgugu

SEQ ID NO: 1950941 - RNA, 19 nt, Artificial Sequence
  Description of Artificial Sequence: Synthetic oligonucleotide
ugggugucuugccaaccag

SEQ ID NO: 1950942 - RNA, 19 nt, Artificial Sequence
  Description of Artificial Sequence: Synthetic oligonucleotide
aaaccacgcaguccaccug

SEQ ID NO: 1950943 - RNA, 19 nt, Artificial Sequence
  Description of Artificial Sequence: Synthetic oligonucleotide
guugaacacgccguagugc

SEQ ID NO: 1950944 - RNA, 19 nt, Artificial Sequence
  Description of Artificial Sequence: Synthetic oligonucleotide
caccugguugaacacgccg

SEQ ID NO: 1950945 - RNA, 19 nt, Artificial Sequence
  Description of Artificial Sequence: Synthetic oligonucleotide
caaggucccagcauccgug

SEQ ID NO: 1950946 - RNA, 19 nt, Artificial Sequence
  Description of Artificial Sequence: Synthetic oligonucleotide
ugguccggaguccugggga

SEQ ID NO: 1950947 - RNA, 19 nt, Artificial Sequence
  Description of Artificial Sequence: Synthetic oligonucleotide
uagcccgagccauaaggcc

SEQ ID NO: 1950948 - RNA, 19 nt, Artificial Sequence
  Description of Artificial Sequence: Synthetic oligonucleotide
uggacuuguccccgcaaac

SEQ ID NO: 1950949 - RNA, 19 nt, Artificial Sequence
  Description of Artificial Sequence: Synthetic oligonucleotide
guccccgcaaaccacgcag

SEQ ID NO: 1950950 - RNA, 19 nt, Artificial Sequence
  Description of Artificial Sequence: Synthetic oligonucleotide
cacguacucggugagggcc

SEQ ID NO: 1950951 - RNA, 19 nt, Artificial Sequence
  Description of Artificial Sequence: Synthetic oligonucleotide
cacgccguagugcuugccg

SEQ ID NO: 1950952 - RNA, 19 nt, Artificial Sequence
  Description of Artificial Sequence: Synthetic oligonucleotide
gugucuugccaaccaggcg

SEQ ID NO: 1950953 - RNA, 19 nt, Artificial Sequence
  Description of Artificial Sequence: Synthetic oligonucleotide
gacccggcuaccccgcgcg

SEQ ID NO: 1950954 - RNA, 19 nt, Artificial Sequence
  Description of Artificial Sequence: Synthetic oligonucleotide
ucgaugggugucuugccaa

SEQ ID NO: 1950955 - RNA, 19 nt, Artificial Sequence
  Description of Artificial Sequence: Synthetic oligonucleotide
acugggcacgcacguacuc

SEQ ID NO: 1950956 - RNA, 19 nt, Artificial Sequence
  Description of Artificial Sequence: Synthetic oligonucleotide
acaaggucccagcauccgu

SEQ ID NO: 1950957 - RNA, 19 nt, Artificial Sequence
  Description of Artificial Sequence: Synthetic oligonucleotide
augggugucuugccaacca

SEQ ID NO: 1950958 - RNA, 19 nt, Artificial Sequence
  Description of Artificial Sequence: Synthetic oligonucleotide
gucccuacaaggucccagc

SEQ ID NO: 1950959 - RNA, 19 nt, Artificial Sequence
  Description of Artificial Sequence: Synthetic oligonucleotide
ugagcgucucgaugggugu

SEQ ID NO: 1950960 - RNA, 19 nt, Artificial Sequence
  Description of Artificial Sequence: Synthetic oligonucleotide
ucggugagggccaccugug

SEQ ID NO: 1950961 - RNA, 19 nt, Artificial Sequence
  Description of Artificial Sequence: Synthetic oligonucleotide
agucguccucgguugcacg

SEQ ID NO: 1950962 - RNA, 19 nt, Artificial Sequence
  Description of Artificial Sequence: Synthetic oligonucleotide
aaggcgcgcaccuggucca

SEQ ID NO: 1950963 - RNA, 19 nt, Artificial Sequence
  Description of Artificial Sequence: Synthetic oligonucleotide
guuccaggccaacuuuccc

SEQ ID NO: 1950964 - RNA, 19 nt, Artificial Sequence
  Description of Artificial Sequence: Synthetic oligonucleotide
gguugaacacgccguagug

SEQ ID NO: 1950965 - RNA, 19 nt, Artificial Sequence
  Description of Artificial Sequence: Synthetic oligonucleotide
agucccuacaaggucccag

SEQ ID NO: 1950966 - RNA, 19 nt, Artificial Sequence
  Description of Artificial Sequence: Synthetic oligonucleotide
ggaugauauccaucacuag

SEQ ID NO: 1950967 - RNA, 19 nt, Artificial Sequence
  Description of Artificial Sequence: Synthetic oligonucleotide
guugaaggugcucccugac

SEQ ID NO: 1950968 - RNA, 19 nt, Artificial Sequence
  Description of Artificial Sequence: Synthetic oligonucleotide
ucccuacaaggucccagca

SEQ ID NO: 1950969 - RNA, 19 nt, Artificial Sequence
  Description of Artificial Sequence: Synthetic oligonucleotide
ccuacaaggucccagcauc

SEQ ID NO: 1950970 - RNA, 19 nt, Artificial Sequence
  Description of Artificial Sequence: Synthetic oligonucleotide
uuucccacgcgugcccgcg

SEQ ID NO: 1950971 - RNA, 19 nt, Artificial Sequence
  Description of Artificial Sequence: Synthetic oligonucleotide
augagcgucucgaugggug

SEQ ID NO: 1950972 - RNA, 19 nt, Artificial Sequence
  Description of Artificial Sequence: Synthetic oligonucleotide
gcaggaacuggucgggccg

SEQ ID NO: 1950973 - RNA, 19 nt, Artificial Sequence
  Description of Artificial Sequence: Synthetic oligonucleotide
guccacgccguucgugucg

SEQ ID NO: 1950974 - RNA, 19 nt, Artificial Sequence
  Description of Artificial Sequence: Synthetic oligonucleotide
uaccccgcgcgcaugcagc

SEQ ID NO: 1950975 - RNA, 19 nt, Artificial Sequence
  Description of Artificial Sequence: Synthetic oligonucleotide
gaacuggucgggccgguuc

SEQ ID NO: 1950976 - RNA, 19 nt, Artificial Sequence
  Description of Artificial Sequence: Synthetic oligonucleotide
aaggugcucccugacagua

SEQ ID NO: 1950977 - RNA, 19 nt, Artificial Sequence
  Description of Artificial Sequence: Synthetic oligonucleotide
aagcgcugaggcugcgaug

SEQ ID NO: 1950978 - RNA, 19 nt, Artificial Sequence
  Description of Artificial Sequence: Synthetic oligonucleotide
aucaggcgugaagagcgcg

SEQ ID NO: 1950979 - RNA, 19 nt, Artificial Sequence
  Description of Artificial Sequence: Synthetic oligonucleotide
augaaggccaccgcgcgcu

SEQ ID NO: 1950980 - RNA, 19 nt, Artificial Sequence
  Description of Artificial Sequence: Synthetic oligonucleotide
uuguccccgcaaaccacgc

SEQ ID NO: 1950981 - RNA, 19 nt, Artificial Sequence
  Description of Artificial Sequence: Synthetic oligonucleotide
aguuuugcggcaacuuccu

SEQ ID NO: 1950982 - RNA, 19 nt, Artificial Sequence
  Description of Artificial Sequence: Synthetic oligonucleotide
ggcgcaugaagaaaagcug

SEQ ID NO: 1950983 - RNA, 19 nt, Artificial Sequence
  Description of Artificial Sequence: Synthetic oligonucleotide
ggugucuugccaaccaggc

SEQ ID NO: 1950984 - RNA, 19 nt, Artificial Sequence
  Description of Artificial Sequence: Synthetic oligonucleotide
caugaaggccaccgcgcgc

SEQ ID NO: 1950985 - RNA, 19 nt, Artificial Sequence
  Description of Artificial Sequence: Synthetic oligonucleotide
cugggcacgcacguacucg

SEQ ID NO: 1950986 - RNA, 19 nt, Artificial Sequence
  Description of Artificial Sequence: Synthetic oligonucleotide
acgccguucgugucgccuc

SEQ ID NO: 1950987 - RNA, 19 nt, Artificial Sequence
  Description of Artificial Sequence: Synthetic oligonucleotide
gacgccgagucguccucgg

SEQ ID NO: 1950988 - RNA, 19 nt, Artificial Sequence
  Description of Artificial Sequence: Synthetic oligonucleotide
uacugggcacgcacguacu

SEQ ID NO: 1950989 - RNA, 19 nt, Artificial Sequence
  Description of Artificial Sequence: Synthetic oligonucleotide
uccucgguugcacgugggu

SEQ ID NO: 1950990 - RNA, 19 nt, Artificial Sequence
  Description of Artificial Sequence: Synthetic oligonucleotide
acuuucccacgcgugcccg

SEQ ID NO: 1950991 - RNA, 19 nt, Artificial Sequence
  Description of Artificial Sequence: Synthetic oligonucleotide
accccgcgcgcaugcagcc

SEQ ID NO: 1950992 - RNA, 19 nt, Artificial Sequence
  Description of Artificial Sequence: Synthetic oligonucleotide
acaguagcaugucccggau

SEQ ID NO: 1950993 - RNA, 19 nt, Artificial Sequence
  Description of Artificial Sequence: Synthetic oligonucleotide
agggccggcagucgcagca

SEQ ID NO: 1950994 - RNA, 19 nt, Artificial Sequence
  Description of Artificial Sequence: Synthetic oligonucleotide
uggucgggccgguuccagg

SEQ ID NO: 1950995 - RNA, 19 nt, Artificial Sequence
  Description of Artificial Sequence: Synthetic oligonucleotide
aaccaggcgcaugaagaaa

SEQ ID NO: 1950996 - RNA, 19 nt, Artificial Sequence
  Description of Artificial Sequence: Synthetic oligonucleotide
caggcgcaugaagaaaagc

SEQ ID NO: 1950997 - RNA, 19 nt, Artificial Sequence
  Description of Artificial Sequence: Synthetic oligonucleotide
ccaaccaggcgcaugaaga

SEQ ID NO: 1950998 - RNA, 19 nt, Artificial Sequence
  Description of Artificial Sequence: Synthetic oligonucleotide
gcgcccaaagcgcugaggc

SEQ ID NO: 1950999 - RNA, 19 nt, Artificial Sequence
  Description of Artificial Sequence: Synthetic oligonucleotide
caucaggcgugaagagcgc

SEQ ID NO: 1951000 - RNA, 19 nt, Artificial Sequence
  Description of Artificial Sequence: Synthetic oligonucleotide
uccggaguccuggggaccc

SEQ ID NO: 1951001 - RNA, 19 nt, Artificial Sequence
  Description of Artificial Sequence: Synthetic oligonucleotide
ggaugagcgucucgauggg

SEQ ID NO: 1951002 - RNA, 19 nt, Artificial Sequence
  Description of Artificial Sequence: Synthetic oligonucleotide
gaguccuggggacccggug

SEQ ID NO: 1951003 - RNA, 19 nt, Artificial Sequence
  Description of Artificial Sequence: Synthetic oligonucleotide
accaggcgcaugaagaaaa

SEQ ID NO: 1951004 - RNA, 19 nt, Artificial Sequence
  Description of Artificial Sequence: Synthetic oligonucleotide
cugcgccgcguucagcacg

SEQ ID NO: 1951005 - RNA, 19 nt, Artificial Sequence
  Description of Artificial Sequence: Synthetic oligonucleotide
uccccgcaaaccacgcagu

SEQ ID NO: 1951006 - RNA, 19 nt, Artificial Sequence
  Description of Artificial Sequence: Synthetic oligonucleotide
caugucccggaugagcguc

SEQ ID NO: 1951007 - RNA, 19 nt, Artificial Sequence
  Description of Artificial Sequence: Synthetic oligonucleotide
uugcggcaacuuccugcgg

SEQ ID NO: 1951008 - RNA, 19 nt, Artificial Sequence
  Description of Artificial Sequence: Synthetic oligonucleotide
guuuugcggcaacuuccug

SEQ ID NO: 1951009 - RNA, 19 nt, Artificial Sequence
  Description of Artificial Sequence: Synthetic oligonucleotide
agcccgagccauaaggcca

SEQ ID NO: 1951010 - RNA, 19 nt, Artificial Sequence
  Description of Artificial Sequence: Synthetic oligonucleotide
cacgcacguacucggugag

SEQ ID NO: 1951011 - RNA, 19 nt, Artificial Sequence
  Description of Artificial Sequence: Synthetic oligonucleotide
ucacuagcccgagccauaa

SEQ ID NO: 1951012 - RNA, 19 nt, Artificial Sequence
  Description of Artificial Sequence: Synthetic oligonucleotide
gggugucuugccaaccagg

SEQ ID NO: 1951013 - RNA, 19 nt, Artificial Sequence
  Description of Artificial Sequence: Synthetic oligonucleotide
cugcgauggguacugggca

SEQ ID NO: 1951014 - RNA, 19 nt, Artificial Sequence
  Description of Artificial Sequence: Synthetic oligonucleotide
ccagcauccgugugugucc

SEQ ID NO: 1951015 - RNA, 19 nt, Artificial Sequence
  Description of Artificial Sequence: Synthetic oligonucleotide
cuagaggcgcgggucuggg

SEQ ID NO: 1951016 - RNA, 19 nt, Artificial Sequence
  Description of Artificial Sequence: Synthetic oligonucleotide
ugagccgcagcagcgccac

SEQ ID NO: 1951017 - RNA, 19 nt, Artificial Sequence
  Description of Artificial Sequence: Synthetic oligonucleotide
cuuucccacgcgugcccgc

SEQ ID NO: 1951018 - RNA, 19 nt, Artificial Sequence
  Description of Artificial Sequence: Synthetic oligonucleotide
ucgguugcacguggguagc

SEQ ID NO: 1951019 - RNA, 19 nt, Artificial Sequence
  Description of Artificial Sequence: Synthetic oligonucleotide
gacccgguggggacgcgcg

SEQ ID NO: 1951020 - RNA, 19 nt, Artificial Sequence
  Description of Artificial Sequence: Synthetic oligonucleotide
gcauccguguguguccugg

SEQ ID NO: 1951021 - RNA, 19 nt, Artificial Sequence
  Description of Artificial Sequence: Synthetic oligonucleotide
gcccaaagcgcugaggcug

SEQ ID NO: 1951022 - RNA, 19 nt, Artificial Sequence
  Description of Artificial Sequence: Synthetic oligonucleotide
ggucgggccgguuccaggc

SEQ ID NO: 1951023 - RNA, 19 nt, Artificial Sequence
  Description of Artificial Sequence: Synthetic oligonucleotide
ucgugucgccuccggggcc

SEQ ID NO: 1951024 - RNA, 19 nt, Artificial Sequence
  Description of Artificial Sequence: Synthetic oligonucleotide
uccacgccguucgugucgc

SEQ ID NO: 1951025 - RNA, 19 nt, Artificial Sequence
  Description of Artificial Sequence: Synthetic oligonucleotide
uucccacgcgugcccgcgg

SEQ ID NO: 1951026 - RNA, 19 nt, Artificial Sequence
  Description of Artificial Sequence: Synthetic oligonucleotide
agcagcggcgccgugugca

SEQ ID NO: 1951027 - RNA, 19 nt, Artificial Sequence
  Description of Artificial Sequence: Synthetic oligonucleotide
auccguguguguccuggau

SEQ ID NO: 1951028 - RNA, 19 nt, Artificial Sequence
  Description of Artificial Sequence: Synthetic oligonucleotide
cuaccccgcgcgcaugcag

SEQ ID NO: 1951029 - RNA, 19 nt, Artificial Sequence
  Description of Artificial Sequence: Synthetic oligonucleotide
gguuccaggccaacuuucc

SEQ ID NO: 1951030 - RNA, 19 nt, Artificial Sequence
  Description of Artificial Sequence: Synthetic oligonucleotide
gggucagaaaggccacaag

SEQ ID NO: 1951031 - RNA, 19 nt, Artificial Sequence
  Description of Artificial Sequence: Synthetic oligonucleotide
agccguacucggcggcguc

SEQ ID NO: 1951032 - RNA, 19 nt, Artificial Sequence
  Description of Artificial Sequence: Synthetic oligonucleotide
ugaacacgccguagugcuu

SEQ ID NO: 1951033 - RNA, 19 nt, Artificial Sequence
  Description of Artificial Sequence: Synthetic oligonucleotide
ucguccucgguugcacgug

SEQ ID NO: 1951034 - RNA, 19 nt, Artificial Sequence
  Description of Artificial Sequence: Synthetic oligonucleotide
gaggcagcgccgccugcgc

SEQ ID NO: 1951035 - RNA, 19 nt, Artificial Sequence
  Description of Artificial Sequence: Synthetic oligonucleotide
ucgucucccggcuccgcgu

SEQ ID NO: 1951036 - RNA, 19 nt, Artificial Sequence
  Description of Artificial Sequence: Synthetic oligonucleotide
gccgagucguccucgguug

SEQ ID NO: 1951037 - RNA, 19 nt, Artificial Sequence
  Description of Artificial Sequence: Synthetic oligonucleotide
caguagcaugucccggaug

SEQ ID NO: 1951038 - RNA, 19 nt, Artificial Sequence
  Description of Artificial Sequence: Synthetic oligonucleotide
gugcccgcggccgacgggg

SEQ ID NO: 1951039 - RNA, 19 nt, Artificial Sequence
  Description of Artificial Sequence: Synthetic oligonucleotide
guagcaugucccggaugag

SEQ ID NO: 1951040 - RNA, 19 nt, Artificial Sequence
  Description of Artificial Sequence: Synthetic oligonucleotide
gccgcguucagcacgaaga

SEQ ID NO: 1951041 - RNA, 19 nt, Artificial Sequence
  Description of Artificial Sequence: Synthetic oligonucleotide
cuuccugcggccgguccgc

SEQ ID NO: 1951042 - RNA, 19 nt, Artificial Sequence
  Description of Artificial Sequence: Synthetic oligonucleotide
uguccacgccguucguguc

SEQ ID NO: 1951043 - RNA, 19 nt, Artificial Sequence
  Description of Artificial Sequence: Synthetic oligonucleotide
agcgucucgaugggugucu

SEQ ID NO: 1951044 - RNA, 19 nt, Artificial Sequence
  Description of Artificial Sequence: Synthetic oligonucleotide
guacucggcggcguccacc

SEQ ID NO: 1951045 - RNA, 19 nt, Artificial Sequence
  Description of Artificial Sequence: Synthetic oligonucleotide
aggucccagcauccgugug

SEQ ID NO: 1951046 - RNA, 19 nt, Artificial Sequence
  Description of Artificial Sequence: Synthetic oligonucleotide
uccucgucucccggcuccg

SEQ ID NO: 1951047 - RNA, 19 nt, Artificial Sequence
  Description of Artificial Sequence: Synthetic oligonucleotide
accccgggaggcgacgccg

SEQ ID NO: 1951048 - RNA, 19 nt, Artificial Sequence
  Description of Artificial Sequence: Synthetic oligonucleotide
cuggacuuguccccgcaaa

SEQ ID NO: 1951049 - RNA, 19 nt, Artificial Sequence
  Description of Artificial Sequence: Synthetic oligonucleotide
gaaggugcucccugacagu

SEQ ID NO: 1951050 - RNA, 19 nt, Artificial Sequence
  Description of Artificial Sequence: Synthetic oligonucleotide
caugggcgcggcgugcagc

SEQ ID NO: 1951051 - RNA, 19 nt, Artificial Sequence
  Description of Artificial Sequence: Synthetic oligonucleotide
ccgcaaaccacgcagucca

SEQ ID NO: 1951052 - RNA, 19 nt, Artificial Sequence
  Description of Artificial Sequence: Synthetic oligonucleotide
acaugggcugggucagaaa

SEQ ID NO: 1951053 - RNA, 19 nt, Artificial Sequence
  Description of Artificial Sequence: Synthetic oligonucleotide
cgagccauaaggccaguug

SEQ ID NO: 1951054 - RNA, 19 nt, Artificial Sequence
  Description of Artificial Sequence: Synthetic oligonucleotide
gcaaaccacgcaguccacc

SEQ ID NO: 1951055 - RNA, 19 nt, Artificial Sequence
  Description of Artificial Sequence: Synthetic oligonucleotide
gugagggccaccugugccu

SEQ ID NO: 1951056 - RNA, 19 nt, Artificial Sequence
  Description of Artificial Sequence: Synthetic oligonucleotide
uccgggcacgccuggcgac

SEQ ID NO: 1951057 - RNA, 19 nt, Artificial Sequence
  Description of Artificial Sequence: Synthetic oligonucleotide
aggcgacgccgagucgucc

SEQ ID NO: 1951058 - RNA, 19 nt, Artificial Sequence
  Description of Artificial Sequence: Synthetic oligonucleotide
acgcacguacucggugagg

SEQ ID NO: 1951059 - RNA, 19 nt, Artificial Sequence
  Description of Artificial Sequence: Synthetic oligonucleotide
acccggcuaccccgcgcgc

SEQ ID NO: 1951060 - RNA, 19 nt, Artificial Sequence
  Description of Artificial Sequence: Synthetic oligonucleotide
cucggugagggccaccugu

SEQ ID NO: 1951061 - RNA, 19 nt, Artificial Sequence
  Description of Artificial Sequence: Synthetic oligonucleotide
gaggcuggcacagcgcgua

SEQ ID NO: 1951062 - RNA, 19 nt, Artificial Sequence
  Description of Artificial Sequence: Synthetic oligonucleotide
auggcccggccccgccgcc

SEQ ID NO: 1951063 - RNA, 19 nt, Artificial Sequence
  Description of Artificial Sequence: Synthetic oligonucleotide
guagugcuugccgcuggac

SEQ ID NO: 1951064 - RNA, 19 nt, Artificial Sequence
  Description of Artificial Sequence: Synthetic oligonucleotide
gccaccgcgcgcucggcgg

SEQ ID NO: 1951065 - RNA, 19 nt, Artificial Sequence
  Description of Artificial Sequence: Synthetic oligonucleotide
gcgauggguacugggcacg

SEQ ID NO: 1951066 - RNA, 19 nt, Artificial Sequence
  Description of Artificial Sequence: Synthetic oligonucleotide
acucggugagggccaccug

SEQ ID NO: 1951067 - RNA, 19 nt, Artificial Sequence
  Description of Artificial Sequence: Synthetic oligonucleotide
gugcuugccgcuggacuug

SEQ ID NO: 1951068 - RNA, 19 nt, Artificial Sequence
  Description of Artificial Sequence: Synthetic oligonucleotide
gccaacuuucccacgcgug

SEQ ID NO: 1951069 - RNA, 19 nt, Artificial Sequence
  Description of Artificial Sequence: Synthetic oligonucleotide
gguccggaguccuggggac

SEQ ID NO: 1951070 - RNA, 19 nt, Artificial Sequence
  Description of Artificial Sequence: Synthetic oligonucleotide
acccgguggggacgcgcgg

SEQ ID NO: 1951071 - RNA, 19 nt, Artificial Sequence
  Description of Artificial Sequence: Synthetic oligonucleotide
cagcgcguagggccggcag

SEQ ID NO: 1951072 - RNA, 19 nt, Artificial Sequence
  Description of Artificial Sequence: Synthetic oligonucleotide
cccaaagcgcugaggcugc

SEQ ID NO: 1951073 - RNA, 19 nt, Artificial Sequence
  Description of Artificial Sequence: Synthetic oligonucleotide
acguacucggugagggcca

SEQ ID NO: 1951074 - RNA, 19 nt, Artificial Sequence
  Description of Artificial Sequence: Synthetic oligonucleotide
cgugugcagaggcagcgcc

SEQ ID NO: 1951075 - RNA, 19 nt, Artificial Sequence
  Description of Artificial Sequence: Synthetic oligonucleotide
gucgggccgguuccaggcc

SEQ ID NO: 1951076 - RNA, 19 nt, Artificial Sequence
  Description of Artificial Sequence: Synthetic oligonucleotide
cgugaagagcgcgauggcc

SEQ ID NO: 1951077 - RNA, 19 nt, Artificial Sequence
  Description of Artificial Sequence: Synthetic oligonucleotide
ccugcggccgguccgcgcg

SEQ ID NO: 1951078 - RNA, 19 nt, Artificial Sequence
  Description of Artificial Sequence: Synthetic oligonucleotide
gauggguacugggcacgca

SEQ ID NO: 1951079 - RNA, 19 nt, Artificial Sequence
  Description of Artificial Sequence: Synthetic oligonucleotide
ccgcguucagcacgaagag

SEQ ID NO: 1951080 - RNA, 19 nt, Artificial Sequence
  Description of Artificial Sequence: Synthetic oligonucleotide
gcuagaggcgcgggucugg

SEQ ID NO: 1951081 - RNA, 19 nt, Artificial Sequence
  Description of Artificial Sequence: Synthetic oligonucleotide
cgccuggcgaccccgaggg

SEQ ID NO: 1951082 - RNA, 19 nt, Artificial Sequence
  Description of Artificial Sequence: Synthetic oligonucleotide
gcgggucuggggcacccgg

SEQ ID NO: 1951083 - RNA, 19 nt, Artificial Sequence
  Description of Artificial Sequence: Synthetic oligonucleotide
augcagcccgcgcgcucgg

SEQ ID NO: 1951084 - RNA, 19 nt, Artificial Sequence
  Description of Artificial Sequence: Synthetic oligonucleotide
gagcgucucgauggguguc

SEQ ID NO: 1951085 - RNA, 19 nt, Artificial Sequence
  Description of Artificial Sequence: Synthetic oligonucleotide
gucguccucgguugcacgu

SEQ ID NO: 1951086 - RNA, 19 nt, Artificial Sequence
  Description of Artificial Sequence: Synthetic oligonucleotide
cccugacaguagcaugucc

SEQ ID NO: 1951087 - RNA, 19 nt, Artificial Sequence
  Description of Artificial Sequence: Synthetic oligonucleotide
gacggcggggccggggcgc

SEQ ID NO: 1951088 - RNA, 19 nt, Artificial Sequence
  Description of Artificial Sequence: Synthetic oligonucleotide
ugcuugccgcuggacuugu

SEQ ID NO: 1951089 - RNA, 19 nt, Artificial Sequence
  Description of Artificial Sequence: Synthetic oligonucleotide
cgcgcaugcagcccgcgcg

SEQ ID NO: 1951090 - RNA, 19 nt, Artificial Sequence
  Description of Artificial Sequence: Synthetic oligonucleotide
gccgcuggacuuguccccg

SEQ ID NO: 1951091 - RNA, 19 nt, Artificial Sequence
  Description of Artificial Sequence: Synthetic oligonucleotide
cauccguguguguccugga

SEQ ID NO: 1951092 - RNA, 19 nt, Artificial Sequence
  Description of Artificial Sequence: Synthetic oligonucleotide
gcacguacucggugagggc

SEQ ID NO: 1951093 - RNA, 19 nt, Artificial Sequence
  Description of Artificial Sequence: Synthetic oligonucleotide
cacgccuggcgaccccgag

SEQ ID NO: 1951094 - RNA, 19 nt, Artificial Sequence
  Description of Artificial Sequence: Synthetic oligonucleotide
ggcuaccccgcgcgcaugc

SEQ ID NO: 1951095 - RNA, 19 nt, Artificial Sequence
  Description of Artificial Sequence: Synthetic oligonucleotide
aucacuagcccgagccaua

SEQ ID NO: 1951096 - RNA, 19 nt, Artificial Sequence
  Description of Artificial Sequence: Synthetic oligonucleotide
cccgcaaaccacgcagucc

SEQ ID NO: 1951097 - RNA, 19 nt, Artificial Sequence
  Description of Artificial Sequence: Synthetic oligonucleotide
gaugagcgucucgaugggu

SEQ ID NO: 1951098 - RNA, 19 nt, Artificial Sequence
  Description of Artificial Sequence: Synthetic oligonucleotide
aggcgcccaaagcgcugag

SEQ ID NO: 1951099 - RNA, 19 nt, Artificial Sequence
  Description of Artificial Sequence: Synthetic oligonucleotide
guccggaguccuggggacc

SEQ ID NO: 1951100 - RNA, 19 nt, Artificial Sequence
  Description of Artificial Sequence: Synthetic oligonucleotide
ggcuggcacagcgcguagg

SEQ ID NO: 1951101 - RNA, 19 nt, Artificial Sequence
  Description of Artificial Sequence: Synthetic oligonucleotide
ccguagugcuugccgcugg

SEQ ID NO: 1951102 - RNA, 19 nt, Artificial Sequence
  Description of Artificial Sequence: Synthetic oligonucleotide
gguugcacguggguagcuc

SEQ ID NO: 1951103 - RNA, 19 nt, Artificial Sequence
  Description of Artificial Sequence: Synthetic oligonucleotide
ggcacgccuggcgaccccg

SEQ ID NO: 1951104 - RNA, 19 nt, Artificial Sequence
  Description of Artificial Sequence: Synthetic oligonucleotide
ggcgcccaaagcgcugagg

SEQ ID NO: 1951105 - RNA, 19 nt, Artificial Sequence
  Description of Artificial Sequence: Synthetic oligonucleotide
ccaccggccuuguccacgc

SEQ ID NO: 1951106 - RNA, 19 nt, Artificial Sequence
  Description of Artificial Sequence: Synthetic oligonucleotide
cuggucgggccgguuccag

SEQ ID NO: 1951107 - RNA, 19 nt, Artificial Sequence
  Description of Artificial Sequence: Synthetic oligonucleotide
gcgcucggcggccaugggc

SEQ ID NO: 1951108 - RNA, 19 nt, Artificial Sequence
  Description of Artificial Sequence: Synthetic oligonucleotide
cacaugggcugggucagaa

SEQ ID NO: 1951109 - RNA, 19 nt, Artificial Sequence
  Description of Artificial Sequence: Synthetic oligonucleotide
gaggcgacgccgagucguc

SEQ ID NO: 1951110 - RNA, 19 nt, Artificial Sequence
  Description of Artificial Sequence: Synthetic oligonucleotide
caucacuagcccgagccau

SEQ ID NO: 1951111 - RNA, 19 nt, Artificial Sequence
  Description of Artificial Sequence: Synthetic oligonucleotide
gcgaguccguccccuccgg

SEQ ID NO: 1951112 - RNA, 19 nt, Artificial Sequence
  Description of Artificial Sequence: Synthetic oligonucleotide
acgccgagucguccucggu

SEQ ID NO: 1951113 - RNA, 19 nt, Artificial Sequence
  Description of Artificial Sequence: Synthetic oligonucleotide
gguccgcgcgcccggcagg

SEQ ID NO: 1951114 - RNA, 19 nt, Artificial Sequence
  Description of Artificial Sequence: Synthetic oligonucleotide
cccggggcgaguccguccc

SEQ ID NO: 1951115 - RNA, 19 nt, Artificial Sequence
  Description of Artificial Sequence: Synthetic oligonucleotide
acuggucgggccgguucca

SEQ ID NO: 1951116 - RNA, 19 nt, Artificial Sequence
  Description of Artificial Sequence: Synthetic oligonucleotide
gcgccgugugcagaggcag

SEQ ID NO: 1951117 - RNA, 19 nt, Artificial Sequence
  Description of Artificial Sequence: Synthetic oligonucleotide
cguucgugucgccuccggg

SEQ ID NO: 1951118 - RNA, 19 nt, Artificial Sequence
  Description of Artificial Sequence: Synthetic oligonucleotide
gcgcaugcagcccgcgcgc

SEQ ID NO: 1951119 - RNA, 19 nt, Artificial Sequence
  Description of Artificial Sequence: Synthetic oligonucleotide
gggcgcuccucgucucccg

SEQ ID NO: 1951120 - RNA, 19 nt, Artificial Sequence
  Description of Artificial Sequence: Synthetic oligonucleotide
ccgugguccggaguccugg

SEQ ID NO: 1951121 - RNA, 19 nt, Artificial Sequence
  Description of Artificial Sequence: Synthetic oligonucleotide
caaagcgcugaggcugcga

SEQ ID NO: 1951122 - RNA, 19 nt, Artificial Sequence
  Description of Artificial Sequence: Synthetic oligonucleotide
guccguccccuccgggcac

SEQ ID NO: 1951123 - RNA, 19 nt, Artificial Sequence
  Description of Artificial Sequence: Synthetic oligonucleotide
ucuugccaaccaggcgcau

SEQ ID NO: 1951124 - RNA, 19 nt, Artificial Sequence
  Description of Artificial Sequence: Synthetic oligonucleotide
ucccggcuccgcgucgcug

SEQ ID NO: 1951125 - RNA, 19 nt, Artificial Sequence
  Description of Artificial Sequence: Synthetic oligonucleotide
ggggacgcgcgggccaugg

SEQ ID NO: 1951126 - RNA, 19 nt, Artificial Sequence
  Description of Artificial Sequence: Synthetic oligonucleotide
ugccaaccaggcgcaugaa

SEQ ID NO: 1951127 - RNA, 19 nt, Artificial Sequence
  Description of Artificial Sequence: Synthetic oligonucleotide
cguccucgguugcacgugg

SEQ ID NO: 1951128 - RNA, 19 nt, Artificial Sequence
  Description of Artificial Sequence: Synthetic oligonucleotide
ucccaccggccuuguccac

SEQ ID NO: 1951129 - RNA, 19 nt, Artificial Sequence
  Description of Artificial Sequence: Synthetic oligonucleotide
ggacccggcuaccccgcgc

SEQ ID NO: 1951130 - RNA, 19 nt, Artificial Sequence
  Description of Artificial Sequence: Synthetic oligonucleotide
ggaggcgacgccgagucgu

SEQ ID NO: 1951131 - RNA, 19 nt, Artificial Sequence
  Description of Artificial Sequence: Synthetic oligonucleotide
ccggcaggaacuggucggg

SEQ ID NO: 1951132 - RNA, 19 nt, Artificial Sequence
  Description of Artificial Sequence: Synthetic oligonucleotide
ggucuggggcacccggguc

SEQ ID NO: 1951133 - RNA, 19 nt, Artificial Sequence
  Description of Artificial Sequence: Synthetic oligonucleotide
cgaugggugucuugccaac

SEQ ID NO: 1951134 - RNA, 19 nt, Artificial Sequence
  Description of Artificial Sequence: Synthetic oligonucleotide
cccaccggccuuguccacg

SEQ ID NO: 1951135 - RNA, 19 nt, Artificial Sequence
  Description of Artificial Sequence: Synthetic oligonucleotide
ggacggcggggccggggcg

SEQ ID NO: 1951136 - RNA, 19 nt, Artificial Sequence
  Description of Artificial Sequence: Synthetic oligonucleotide
gcgugcagccccgcggcgg

SEQ ID NO: 1951137 - RNA, 19 nt, Artificial Sequence
  Description of Artificial Sequence: Synthetic oligonucleotide
acgcgugcccgcggccgac

SEQ ID NO: 1951138 - RNA, 19 nt, Artificial Sequence
  Description of Artificial Sequence: Synthetic oligonucleotide
cgcgucgcuggccaccccg

SEQ ID NO: 1951139 - RNA, 19 nt, Artificial Sequence
  Description of Artificial Sequence: Synthetic oligonucleotide
gccguagugcuugccgcug

SEQ ID NO: 1951140 - RNA, 19 nt, Artificial Sequence
  Description of Artificial Sequence: Synthetic oligonucleotide
gagucccuacaagguccca

SEQ ID NO: 1951141 - RNA, 19 nt, Artificial Sequence
  Description of Artificial Sequence: Synthetic oligonucleotide
cacagcgcguagggccggc

SEQ ID NO: 1951142 - RNA, 19 nt, Artificial Sequence
  Description of Artificial Sequence: Synthetic oligonucleotide
caacuuccugcggccgguc

SEQ ID NO: 1951143 - RNA, 19 nt, Artificial Sequence
  Description of Artificial Sequence: Synthetic oligonucleotide
gggacccggcuaccccgcg

SEQ ID NO: 1951144 - RNA, 19 nt, Artificial Sequence
  Description of Artificial Sequence: Synthetic oligonucleotide
ccaucacuagcccgagcca

SEQ ID NO: 1951145 - RNA, 19 nt, Artificial Sequence
  Description of Artificial Sequence: Synthetic oligonucleotide
ggccggcagucgcagcagc

SEQ ID NO: 1951146 - RNA, 19 nt, Artificial Sequence
  Description of Artificial Sequence: Synthetic oligonucleotide
ccguucgugucgccuccgg

SEQ ID NO: 1951147 - RNA, 19 nt, Artificial Sequence
  Description of Artificial Sequence: Synthetic oligonucleotide
ggcgcgcuagaggcgcggg

SEQ ID NO: 1951148 - RNA, 19 nt, Artificial Sequence
  Description of Artificial Sequence: Synthetic oligonucleotide
acagcgcguagggccggca

SEQ ID NO: 1951149 - RNA, 19 nt, Artificial Sequence
  Description of Artificial Sequence: Synthetic oligonucleotide
ccgagucguccucgguugc

SEQ ID NO: 1951150 - RNA, 19 nt, Artificial Sequence
  Description of Artificial Sequence: Synthetic oligonucleotide
gcgcgcucggcggccaugg

SEQ ID NO: 1951151 - RNA, 19 nt, Artificial Sequence
  Description of Artificial Sequence: Synthetic oligonucleotide
ccacgcaguccaccugcag

SEQ ID NO: 1951152 - RNA, 19 nt, Artificial Sequence
  Description of Artificial Sequence: Synthetic oligonucleotide
gcuggacuuguccccgcaa

SEQ ID NO: 1951153 - RNA, 19 nt, Artificial Sequence
  Description of Artificial Sequence: Synthetic oligonucleotide
gcgccaccugguugaacac

SEQ ID NO: 1951154 - RNA, 19 nt, Artificial Sequence
  Description of Artificial Sequence: Synthetic oligonucleotide
ggacccgguggggacgcgc

SEQ ID NO: 1951155 - RNA, 19 nt, Artificial Sequence
  Description of Artificial Sequence: Synthetic oligonucleotide
caccggccuuguccacgcc

SEQ ID NO: 1951156 - RNA, 19 nt, Artificial Sequence
  Description of Artificial Sequence: Synthetic oligonucleotide
gccguacucggcggcgucc

SEQ ID NO: 1951157 - RNA, 19 nt, Artificial Sequence
  Description of Artificial Sequence: Synthetic oligonucleotide
cgugucgccuccggggccg

SEQ ID NO: 1951158 - RNA, 19 nt, Artificial Sequence
  Description of Artificial Sequence: Synthetic oligonucleotide
ccccgcaaaccacgcaguc

SEQ ID NO: 1951159 - RNA, 19 nt, Artificial Sequence
  Description of Artificial Sequence: Synthetic oligonucleotide
gcgugcccgcggccgacgg

SEQ ID NO: 1951160 - RNA, 19 nt, Artificial Sequence
  Description of Artificial Sequence: Synthetic oligonucleotide
ugucgccuccggggccgcc

SEQ ID NO: 1951161 - RNA, 19 nt, Artificial Sequence
  Description of Artificial Sequence: Synthetic oligonucleotide
cccgguggggacgcgcggg

SEQ ID NO: 1951162 - RNA, 19 nt, Artificial Sequence
  Description of Artificial Sequence: Synthetic oligonucleotide
ggccgguccgcgcgcccgg

SEQ ID NO: 1951163 - RNA, 19 nt, Artificial Sequence
  Description of Artificial Sequence: Synthetic oligonucleotide
ggcgacgccgagucguccu

SEQ ID NO: 1951164 - RNA, 19 nt, Artificial Sequence
  Description of Artificial Sequence: Synthetic oligonucleotide
gcgcgcaugcagcccgcgc

SEQ ID NO: 1951165 - RNA, 19 nt, Artificial Sequence
  Description of Artificial Sequence: Synthetic oligonucleotide
uggggacgcgcgggccaug

SEQ ID NO: 1951166 - RNA, 19 nt, Artificial Sequence
  Description of Artificial Sequence: Synthetic oligonucleotide
gcaggcgcccaaagcgcug

SEQ ID NO: 1951167 - RNA, 19 nt, Artificial Sequence
  Description of Artificial Sequence: Synthetic oligonucleotide
gccguucgugucgccuccg

SEQ ID NO: 1951168 - RNA, 19 nt, Artificial Sequence
  Description of Artificial Sequence: Synthetic oligonucleotide
gcaugcagcccgcgcgcuc

SEQ ID NO: 1951169 - RNA, 19 nt, Artificial Sequence
  Description of Artificial Sequence: Synthetic oligonucleotide
cgugcagccccgcggcggc

SEQ ID NO: 1951170 - RNA, 19 nt, Artificial Sequence
  Description of Artificial Sequence: Synthetic oligonucleotide
gccgguuccaggccaacuu

SEQ ID NO: 1951171 - RNA, 19 nt, Artificial Sequence
  Description of Artificial Sequence: Synthetic oligonucleotide
cacgcgugcccgcggccga

SEQ ID NO: 1951172 - RNA, 19 nt, Artificial Sequence
  Description of Artificial Sequence: Synthetic oligonucleotide
gcgcguagggccggcaguc

SEQ ID NO: 1951173 - RNA, 19 nt, Artificial Sequence
  Description of Artificial Sequence: Synthetic oligonucleotide
gcacagcgcguagggccgg

SEQ ID NO: 1951174 - RNA, 19 nt, Artificial Sequence
  Description of Artificial Sequence: Synthetic oligonucleotide
ccaaagcgcugaggcugcg

SEQ ID NO: 1951175 - RNA, 19 nt, Artificial Sequence
  Description of Artificial Sequence: Synthetic oligonucleotide
gggccggcagucgcagcag

SEQ ID NO: 1951176 - RNA, 19 nt, Artificial Sequence
  Description of Artificial Sequence: Synthetic oligonucleotide
ccgguggggacgcgcgggc

SEQ ID NO: 1951177 - RNA, 19 nt, Artificial Sequence
  Description of Artificial Sequence: Synthetic oligonucleotide
ggggacccggcuaccccgc

SEQ ID NO: 1951178 - RNA, 19 nt, Artificial Sequence
  Description of Artificial Sequence: Synthetic oligonucleotide
uagcucccaccggccuugu

SEQ ID NO: 1951179 - RNA, 19 nt, Artificial Sequence
  Description of Artificial Sequence: Synthetic oligonucleotide
cagcgccaccugguugaac

SEQ ID NO: 1951180 - RNA, 19 nt, Artificial Sequence
  Description of Artificial Sequence: Synthetic oligonucleotide
cgaguccguccccuccggg

SEQ ID NO: 1951181 - RNA, 19 nt, Artificial Sequence
  Description of Artificial Sequence: Synthetic oligonucleotide
cgauggguacugggcacgc

SEQ ID NO: 1951182 - RNA, 19 nt, Artificial Sequence
  Description of Artificial Sequence: Synthetic oligonucleotide
gggucuggggcacccgggu

SEQ ID NO: 1951183 - RNA, 19 nt, Artificial Sequence
  Description of Artificial Sequence: Synthetic oligonucleotide
ggcgccgugugcagaggca

SEQ ID NO: 1951184 - RNA, 19 nt, Artificial Sequence
  Description of Artificial Sequence: Synthetic oligonucleotide
cacgccguucgugucgccu

SEQ ID NO: 1951185 - RNA, 19 nt, Artificial Sequence
  Description of Artificial Sequence: Synthetic oligonucleotide
gcgacgccgagucguccuc

SEQ ID NO: 1951186 - RNA, 19 nt, Artificial Sequence
  Description of Artificial Sequence: Synthetic oligonucleotide
gccuggcgaccccgagggg

SEQ ID NO: 1951187 - RNA, 19 nt, Artificial Sequence
  Description of Artificial Sequence: Synthetic oligonucleotide
gccaccccgggaggcgacg

SEQ ID NO: 1951188 - RNA, 19 nt, Artificial Sequence
  Description of Artificial Sequence: Synthetic oligonucleotide
cgucucgaugggugucuug

SEQ ID NO: 1951189 - RNA, 19 nt, Artificial Sequence
  Description of Artificial Sequence: Synthetic oligonucleotide
guccgcgcgcccggcagga

SEQ ID NO: 1951190 - RNA, 19 nt, Artificial Sequence
  Description of Artificial Sequence: Synthetic oligonucleotide
cgcgcuagaggcgcggguc

SEQ ID NO: 1951191 - RNA, 19 nt, Artificial Sequence
  Description of Artificial Sequence: Synthetic oligonucleotide
ggggcgaguccguccccuc

SEQ ID NO: 1951192 - RNA, 19 nt, Artificial Sequence
  Description of Artificial Sequence: Synthetic oligonucleotide
cgccguucgugucgccucc

SEQ ID NO: 1951193 - RNA, 19 nt, Artificial Sequence
  Description of Artificial Sequence: Synthetic oligonucleotide
caggcgugaagagcgcgau

SEQ ID NO: 1951194 - RNA, 19 nt, Artificial Sequence
  Description of Artificial Sequence: Synthetic oligonucleotide
ccgcuggacuuguccccgc

SEQ ID NO: 1951195 - RNA, 19 nt, Artificial Sequence
  Description of Artificial Sequence: Synthetic oligonucleotide
ccaccgcgcgcucggcggc

SEQ ID NO: 1951196 - RNA, 19 nt, Artificial Sequence
  Description of Artificial Sequence: Synthetic oligonucleotide
cgccgcguucagcacgaag

SEQ ID NO: 1951197 - RNA, 19 nt, Artificial Sequence
  Description of Artificial Sequence: Synthetic oligonucleotide
ccgggcgcuccucgucucc

SEQ ID NO: 1951198 - RNA, 19 nt, Artificial Sequence
  Description of Artificial Sequence: Synthetic oligonucleotide
cggcgccgugugcagaggc

SEQ ID NO: 1951199 - RNA, 19 nt, Artificial Sequence
  Description of Artificial Sequence: Synthetic oligonucleotide
ggggcucgggucgcacccc

SEQ ID NO: 1951200 - RNA, 19 nt, Artificial Sequence
  Description of Artificial Sequence: Synthetic oligonucleotide
ccgggcacgccuggcgacc

SEQ ID NO: 1951201 - RNA, 19 nt, Artificial Sequence
  Description of Artificial Sequence: Synthetic oligonucleotide
ccucgguugcacgugggua

SEQ ID NO: 1951202 - RNA, 19 nt, Artificial Sequence
  Description of Artificial Sequence: Synthetic oligonucleotide
cccgggacggcggggccgg

SEQ ID NO: 1951203 - RNA, 19 nt, Artificial Sequence
  Description of Artificial Sequence: Synthetic oligonucleotide
ccuggggacccggugggga

SEQ ID NO: 1951204 - RNA, 19 nt, Artificial Sequence
  Description of Artificial Sequence: Synthetic oligonucleotide
gggcacgccuggcgacccc

SEQ ID NO: 1951205 - RNA, 19 nt, Artificial Sequence
  Description of Artificial Sequence: Synthetic oligonucleotide
ggggcgcgcuagaggcgcg

SEQ ID NO: 1951206 - RNA, 19 nt, Artificial Sequence
  Description of Artificial Sequence: Synthetic oligonucleotide
gcgcuagaggcgcgggucu

SEQ ID NO: 1951207 - RNA, 19 nt, Artificial Sequence
  Description of Artificial Sequence: Synthetic oligonucleotide
cgacgccgagucguccucg

SEQ ID NO: 1951208 - RNA, 19 nt, Artificial Sequence
  Description of Artificial Sequence: Synthetic oligonucleotide
cggaguccuggggacccgg

SEQ ID NO: 1951209 - RNA, 19 nt, Artificial Sequence
  Description of Artificial Sequence: Synthetic oligonucleotide
gugucgccuccggggccgc

SEQ ID NO: 1951210 - RNA, 19 nt, Artificial Sequence
  Description of Artificial Sequence: Synthetic oligonucleotide
cccgggaggcgacgccgag

SEQ ID NO: 1951211 - RNA, 19 nt, Artificial Sequence
  Description of Artificial Sequence: Synthetic oligonucleotide
gcggcgccgugugcagagg

SEQ ID NO: 1951212 - RNA, 19 nt, Artificial Sequence
  Description of Artificial Sequence: Synthetic oligonucleotide
ggcgcgcaccugguccaug

SEQ ID NO: 1951213 - RNA, 19 nt, Artificial Sequence
  Description of Artificial Sequence: Synthetic oligonucleotide
uccgcgcgcccggcaggaa

SEQ ID NO: 1951214 - RNA, 19 nt, Artificial Sequence
  Description of Artificial Sequence: Synthetic oligonucleotide
ggcacccgggucccguggu

SEQ ID NO: 1951215 - RNA, 19 nt, Artificial Sequence
  Description of Artificial Sequence: Synthetic oligonucleotide
aggcgcgcaccugguccau

SEQ ID NO: 1951216 - RNA, 19 nt, Artificial Sequence
  Description of Artificial Sequence: Synthetic oligonucleotide
ccggaguccuggggacccg

SEQ ID NO: 1951217 - RNA, 19 nt, Artificial Sequence
  Description of Artificial Sequence: Synthetic oligonucleotide
gccccgggcgcuccucguc

SEQ ID NO: 1951218 - RNA, 19 nt, Artificial Sequence
  Description of Artificial Sequence: Synthetic oligonucleotide
cgugcccgcggccgacggg

SEQ ID NO: 1951219 - RNA, 19 nt, Artificial Sequence
  Description of Artificial Sequence: Synthetic oligonucleotide
gcuccgcgucgcuggccac

SEQ ID NO: 1951220 - RNA, 19 nt, Artificial Sequence
  Description of Artificial Sequence: Synthetic oligonucleotide
gcuaccccgcgcgcaugca

SEQ ID NO: 1951221 - RNA, 19 nt, Artificial Sequence
  Description of Artificial Sequence: Synthetic oligonucleotide
ccucgucucccggcuccgc

SEQ ID NO: 1951222 - RNA, 19 nt, Artificial Sequence
  Description of Artificial Sequence: Synthetic oligonucleotide
ccccuccgggcacgccugg

SEQ ID NO: 1951223 - RNA, 19 nt, Artificial Sequence
  Description of Artificial Sequence: Synthetic oligonucleotide
gcgcgggucuggggcaccc

SEQ ID NO: 1951224 - RNA, 19 nt, Artificial Sequence
  Description of Artificial Sequence: Synthetic oligonucleotide
ccgccugcgccgcguucag

SEQ ID NO: 1951225 - RNA, 19 nt, Artificial Sequence
  Description of Artificial Sequence: Synthetic oligonucleotide
ccguacucggcggcgucca

SEQ ID NO: 1951226 - RNA, 19 nt, Artificial Sequence
  Description of Artificial Sequence: Synthetic oligonucleotide
gggacccgguggggacgcg

SEQ ID NO: 1951227 - RNA, 19 nt, Artificial Sequence
  Description of Artificial Sequence: Synthetic oligonucleotide
cccgggcgcuccucgucuc

SEQ ID NO: 1951228 - RNA, 19 nt, Artificial Sequence
  Description of Artificial Sequence: Synthetic oligonucleotide
cgcuagaggcgcgggucug

SEQ ID NO: 1951229 - RNA, 19 nt, Artificial Sequence
  Description of Artificial Sequence: Synthetic oligonucleotide
ccacgccguucgugucgcc

SEQ ID NO: 1951230 - RNA, 19 nt, Artificial Sequence
  Description of Artificial Sequence: Synthetic oligonucleotide
gggucccgugguccggagu

SEQ ID NO: 1951231 - RNA, 19 nt, Artificial Sequence
  Description of Artificial Sequence: Synthetic oligonucleotide
cagccguacucggcggcgu

SEQ ID NO: 1951232 - RNA, 19 nt, Artificial Sequence
  Description of Artificial Sequence: Synthetic oligonucleotide
guggggacgcgcgggccau

SEQ ID NO: 1951233 - RNA, 19 nt, Artificial Sequence
  Description of Artificial Sequence: Synthetic oligonucleotide
ggccgguuccaggccaacu

SEQ ID NO: 1951234 - RNA, 19 nt, Artificial Sequence
  Description of Artificial Sequence: Synthetic oligonucleotide
ccggggcgaguccgucccc

SEQ ID NO: 1951235 - RNA, 19 nt, Artificial Sequence
  Description of Artificial Sequence: Synthetic oligonucleotide
cccuccgggcacgccuggc

SEQ ID NO: 1951236 - RNA, 19 nt, Artificial Sequence
  Description of Artificial Sequence: Synthetic oligonucleotide
gggccgguuccaggccaac

SEQ ID NO: 1951237 - RNA, 19 nt, Artificial Sequence
  Description of Artificial Sequence: Synthetic oligonucleotide
ccgguuccaggccaacuuu

SEQ ID NO: 1951238 - RNA, 19 nt, Artificial Sequence
  Description of Artificial Sequence: Synthetic oligonucleotide
cgagucguccucgguugca

SEQ ID NO: 1951239 - RNA, 19 nt, Artificial Sequence
  Description of Artificial Sequence: Synthetic oligonucleotide
gcgcgcccggcaggaacug

SEQ ID NO: 1951240 - RNA, 19 nt, Artificial Sequence
  Description of Artificial Sequence: Synthetic oligonucleotide
ccgccccagccgcugguca

SEQ ID NO: 1951241 - RNA, 19 nt, Artificial Sequence
  Description of Artificial Sequence: Synthetic oligonucleotide
cgggcacgccuggcgaccc

SEQ ID NO: 1951242 - RNA, 19 nt, Artificial Sequence
  Description of Artificial Sequence: Synthetic oligonucleotide
gccgccccagccgcugguc

SEQ ID NO: 1951243 - RNA, 19 nt, Artificial Sequence
  Description of Artificial Sequence: Synthetic oligonucleotide
gcgcgcuagaggcgcgggu

SEQ ID NO: 1951244 - RNA, 19 nt, Artificial Sequence
  Description of Artificial Sequence: Synthetic oligonucleotide
cggccgguccgcgcgcccg

SEQ ID NO: 1951245 - RNA, 19 nt, Artificial Sequence
  Description of Artificial Sequence: Synthetic oligonucleotide
cgcgcucggcggccauggg

SEQ ID NO: 1951246 - RNA, 19 nt, Artificial Sequence
  Description of Artificial Sequence: Synthetic oligonucleotide
gggcgccccggggcgaguc

SEQ ID NO: 1951247 - RNA, 19 nt, Artificial Sequence
  Description of Artificial Sequence: Synthetic oligonucleotide
gccgguccgcgcgcccggc

SEQ ID NO: 1951248 - RNA, 19 nt, Artificial Sequence
  Description of Artificial Sequence: Synthetic oligonucleotide
gggcacgcacguacucggu

SEQ ID NO: 1951249 - RNA, 19 nt, Artificial Sequence
  Description of Artificial Sequence: Synthetic oligonucleotide
cgggacggcggggccgggg

SEQ ID NO: 1951250 - RNA, 19 nt, Artificial Sequence
  Description of Artificial Sequence: Synthetic oligonucleotide
ggaacuggucgggccgguu

SEQ ID NO: 1951251 - RNA, 19 nt, Artificial Sequence
  Description of Artificial Sequence: Synthetic oligonucleotide
ccccgggcgcuccucgucu

SEQ ID NO: 1951252 - RNA, 19 nt, Artificial Sequence
  Description of Artificial Sequence: Synthetic oligonucleotide
cgccgagucguccucgguu

SEQ ID NO: 1951253 - RNA, 19 nt, Artificial Sequence
  Description of Artificial Sequence: Synthetic oligonucleotide
ccggcuaccccgcgcgcau

SEQ ID NO: 1951254 - RNA, 19 nt, Artificial Sequence
  Description of Artificial Sequence: Synthetic oligonucleotide
cggcuccgcgucgcuggcc

SEQ ID NO: 1951255 - RNA, 19 nt, Artificial Sequence
  Description of Artificial Sequence: Synthetic oligonucleotide
ccgguccgcgcgcccggca

SEQ ID NO: 1951256 - RNA, 19 nt, Artificial Sequence
  Description of Artificial Sequence: Synthetic oligonucleotide
cgggccgguuccaggccaa

SEQ ID NO: 1951257 - RNA, 19 nt, Artificial Sequence
  Description of Artificial Sequence: Synthetic oligonucleotide
cgcgcgcucggcggccaug

SEQ ID NO: 1951258 - RNA, 19 nt, Artificial Sequence
  Description of Artificial Sequence: Synthetic oligonucleotide
cggcuaccccgcgcgcaug

SEQ ID NO: 1951259 - RNA, 19 nt, Artificial Sequence
  Description of Artificial Sequence: Synthetic oligonucleotide
gcgucucgaugggugucuu

SEQ ID NO: 1951260 - RNA, 19 nt, Artificial Sequence
  Description of Artificial Sequence: Synthetic oligonucleotide
gcgcggcgugcagccccgc

SEQ ID NO: 1951261 - RNA, 19 nt, Artificial Sequence
  Description of Artificial Sequence: Synthetic oligonucleotide
ccgggaggcgacgccgagu

SEQ ID NO: 1951262 - RNA, 19 nt, Artificial Sequence
  Description of Artificial Sequence: Synthetic oligonucleotide
ccgagccauaaggccaguu

SEQ ID NO: 1951263 - RNA, 19 nt, Artificial Sequence
  Description of Artificial Sequence: Synthetic oligonucleotide
gcgccgcguucagcacgaa

SEQ ID NO: 1951264 - RNA, 19 nt, Artificial Sequence
  Description of Artificial Sequence: Synthetic oligonucleotide
ggggcgccccggggcgagu

SEQ ID NO: 1951265 - RNA, 19 nt, Artificial Sequence
  Description of Artificial Sequence: Synthetic oligonucleotide
cgccccggggcgaguccgu

SEQ ID NO: 1951266 - RNA, 19 nt, Artificial Sequence
  Description of Artificial Sequence: Synthetic oligonucleotide
uauccuaagguacagagag

SEQ ID NO: 1951267 - RNA, 19 nt, Artificial Sequence
  Description of Artificial Sequence: Synthetic oligonucleotide
ugaauaguuacgcaggcgg

SEQ ID NO: 1951268 - RNA, 19 nt, Artificial Sequence
  Description of Artificial Sequence: Synthetic oligonucleotide
aacauuuuggcaauguuac

SEQ ID NO: 1951269 - RNA, 19 nt, Artificial Sequence
  Description of Artificial Sequence: Synthetic oligonucleotide
aaccugguaauccagagag

SEQ ID NO: 1951270 - RNA, 19 nt, Artificial Sequence
  Description of Artificial Sequence: Synthetic oligonucleotide
uucaugaauaguuacgcag

SEQ ID NO: 1951271 - RNA, 19 nt, Artificial Sequence
  Description of Artificial Sequence: Synthetic oligonucleotide
ucaugaauaguuacgcagg

SEQ ID NO: 1951272 - RNA, 19 nt, Artificial Sequence
  Description of Artificial Sequence: Synthetic oligonucleotide
gauauccuaagguacagag

SEQ ID NO: 1951273 - RNA, 19 nt, Artificial Sequence
  Description of Artificial Sequence: Synthetic oligonucleotide
ugauaaacgcccuugacca

SEQ ID NO: 1951274 - RNA, 19 nt, Artificial Sequence
  Description of Artificial Sequence: Synthetic oligonucleotide
aguuagaucucccuucagc

SEQ ID NO: 1951275 - RNA, 19 nt, Artificial Sequence
  Description of Artificial Sequence: Synthetic oligonucleotide
agugauaaccugguaaucc

SEQ ID NO: 1951276 - RNA, 19 nt, Artificial Sequence
  Description of Artificial Sequence: Synthetic oligonucleotide
uccagauuagaucugauau

SEQ ID NO: 1951277 - RNA, 19 nt, Artificial Sequence
  Description of Artificial Sequence: Synthetic oligonucleotide
aacccaaugacccauguau

SEQ ID NO: 1951278 - RNA, 19 nt, Artificial Sequence
  Description of Artificial Sequence: Synthetic oligonucleotide
ugacccguaaacauuuugg

SEQ ID NO: 1951279 - RNA, 19 nt, Artificial Sequence
  Description of Artificial Sequence: Synthetic oligonucleotide
gauagagaucaccaaaggc

SEQ ID NO: 1951280 - RNA, 19 nt, Artificial Sequence
  Description of Artificial Sequence: Synthetic oligonucleotide
ucuccaaccgaccaguaag

SEQ ID NO: 1951281 - RNA, 19 nt, Artificial Sequence
  Description of Artificial Sequence: Synthetic oligonucleotide
aagcuuuuaagcaauagca

SEQ ID NO: 1951282 - RNA, 19 nt, Artificial Sequence
  Description of Artificial Sequence: Synthetic oligonucleotide
cacauagcaguccacaucg

SEQ ID NO: 1951283 - RNA, 19 nt, Artificial Sequence
  Description of Artificial Sequence: Synthetic oligonucleotide
aaggcgauaaugugucugg

SEQ ID NO: 1951284 - RNA, 19 nt, Artificial Sequence
  Description of Artificial Sequence: Synthetic oligonucleotide
aagcaauagcaccugacug

SEQ ID NO: 1951285 - RNA, 19 nt, Artificial Sequence
  Description of Artificial Sequence: Synthetic oligonucleotide
uguuaccccaaauaguggc

SEQ ID NO: 1951286 - RNA, 19 nt, Artificial Sequence
  Description of Artificial Sequence: Synthetic oligonucleotide
ucuuaugagaaaaggugga

SEQ ID NO: 1951287 - RNA, 19 nt, Artificial Sequence
  Description of Artificial Sequence: Synthetic oligonucleotide
ugacccauguaucaugaag

SEQ ID NO: 1951288 - RNA, 19 nt, Artificial Sequence
  Description of Artificial Sequence: Synthetic oligonucleotide
aagacacccgacuauuaag

SEQ ID NO: 1951289 - RNA, 19 nt, Artificial Sequence
  Description of Artificial Sequence: Synthetic oligonucleotide
cagauuagaucugauaucc

SEQ ID NO: 1951290 - RNA, 19 nt, Artificial Sequence
  Description of Artificial Sequence: Synthetic oligonucleotide
aguggcagaacccuaagcu

SEQ ID NO: 1951291 - RNA, 19 nt, Artificial Sequence
  Description of Artificial Sequence: Synthetic oligonucleotide
uucguggaaacacugcuug

SEQ ID NO: 1951292 - RNA, 19 nt, Artificial Sequence
  Description of Artificial Sequence: Synthetic oligonucleotide
uuagaucugauauccuaag

SEQ ID NO: 1951293 - RNA, 19 nt, Artificial Sequence
  Description of Artificial Sequence: Synthetic oligonucleotide
aucgucuuguacgugaagc

SEQ ID NO: 1951294 - RNA, 19 nt, Artificial Sequence
  Description of Artificial Sequence: Synthetic oligonucleotide
aauaguggccaaucccuag

SEQ ID NO: 1951295 - RNA, 19 nt, Artificial Sequence
  Description of Artificial Sequence: Synthetic oligonucleotide
gauuccaucugaguaagag

SEQ ID NO: 1951296 - RNA, 19 nt, Artificial Sequence
  Description of Artificial Sequence: Synthetic oligonucleotide
uagaucugauauccuaagg

SEQ ID NO: 1951297 - RNA, 19 nt, Artificial Sequence
  Description of Artificial Sequence: Synthetic oligonucleotide
gacgauguuccccaagggg

SEQ ID NO: 1951298 - RNA, 19 nt, Artificial Sequence
  Description of Artificial Sequence: Synthetic oligonucleotide
agauagagaucaccaaagg

SEQ ID NO: 1951299 - RNA, 19 nt, Artificial Sequence
  Description of Artificial Sequence: Synthetic oligonucleotide
gucuuaugagaaaaggugg

SEQ ID NO: 1951300 - RNA, 19 nt, Artificial Sequence
  Description of Artificial Sequence: Synthetic oligonucleotide
gacuauuaaggucuucagc

SEQ ID NO: 1951301 - RNA, 19 nt, Artificial Sequence
  Description of Artificial Sequence: Synthetic oligonucleotide
uccuuuuggguccugguug

SEQ ID NO: 1951302 - RNA, 19 nt, Artificial Sequence
  Description of Artificial Sequence: Synthetic oligonucleotide
uccuaagguacagagaggc

SEQ ID NO: 1951303 - RNA, 19 nt, Artificial Sequence
  Description of Artificial Sequence: Synthetic oligonucleotide
cuaagguacagagaggccc

SEQ ID NO: 1951304 - RNA, 19 nt, Artificial Sequence
  Description of Artificial Sequence: Synthetic oligonucleotide
gagauagagaucaccaaag

SEQ ID NO: 1951305 - RNA, 19 nt, Artificial Sequence
  Description of Artificial Sequence: Synthetic oligonucleotide
gaggacacaacccaaugac

SEQ ID NO: 1951306 - RNA, 19 nt, Artificial Sequence
  Description of Artificial Sequence: Synthetic oligonucleotide
acuguuaccccaaauagug

SEQ ID NO: 1951307 - RNA, 19 nt, Artificial Sequence
  Description of Artificial Sequence: Synthetic oligonucleotide
acaauucugcccuaggaga

SEQ ID NO: 1951308 - RNA, 19 nt, Artificial Sequence
  Description of Artificial Sequence: Synthetic oligonucleotide
uguacagcugacccuacug

SEQ ID NO: 1951309 - RNA, 19 nt, Artificial Sequence
  Description of Artificial Sequence: Synthetic oligonucleotide
acugauaaacgcccuugac

SEQ ID NO: 1951310 - RNA, 19 nt, Artificial Sequence
  Description of Artificial Sequence: Synthetic oligonucleotide
uuaagcaauagcaccugac

SEQ ID NO: 1951311 - RNA, 19 nt, Artificial Sequence
  Description of Artificial Sequence: Synthetic oligonucleotide
ucauacugcuucuuggucu

SEQ ID NO: 1951312 - RNA, 19 nt, Artificial Sequence
  Description of Artificial Sequence: Synthetic oligonucleotide
gaagcugaccacaaacagg

SEQ ID NO: 1951313 - RNA, 19 nt, Artificial Sequence
  Description of Artificial Sequence: Synthetic oligonucleotide
aaugggucguuucucugug

SEQ ID NO: 1951314 - RNA, 19 nt, Artificial Sequence
  Description of Artificial Sequence: Synthetic oligonucleotide
ucugaguaagagcugugac

SEQ ID NO: 1951315 - RNA, 19 nt, Artificial Sequence
  Description of Artificial Sequence: Synthetic oligonucleotide
gcuuuuaagcaauagcacc

SEQ ID NO: 1951316 - RNA, 19 nt, Artificial Sequence
  Description of Artificial Sequence: Synthetic oligonucleotide
agcaauagcaccugacuga

SEQ ID NO: 1951317 - RNA, 19 nt, Artificial Sequence
  Description of Artificial Sequence: Synthetic oligonucleotide
auaguggccaaucccuagg

SEQ ID NO: 1951318 - RNA, 19 nt, Artificial Sequence
  Description of Artificial Sequence: Synthetic oligonucleotide
gaugcuggaucacuguuac

SEQ ID NO: 1951319 - RNA, 19 nt, Artificial Sequence
  Description of Artificial Sequence: Synthetic oligonucleotide
ggaaaauucauuacugaag

SEQ ID NO: 1951320 - RNA, 19 nt, Artificial Sequence
  Description of Artificial Sequence: Synthetic oligonucleotide
agguggaaaauucauuacu

SEQ ID NO: 1951321 - RNA, 19 nt, Artificial Sequence
  Description of Artificial Sequence: Synthetic oligonucleotide
gaacccuaagcuucccugg

SEQ ID NO: 1951322 - RNA, 19 nt, Artificial Sequence
  Description of Artificial Sequence: Synthetic oligonucleotide
uaaacgcccuugaccaucg

SEQ ID NO: 1951323 - RNA, 19 nt, Artificial Sequence
  Description of Artificial Sequence: Synthetic oligonucleotide
agcuuuuaagcaauagcac

SEQ ID NO: 1951324 - RNA, 19 nt, Artificial Sequence
  Description of Artificial Sequence: Synthetic oligonucleotide
auuuuggcaauguuacaca

SEQ ID NO: 1951325 - RNA, 19 nt, Artificial Sequence
  Description of Artificial Sequence: Synthetic oligonucleotide
caauguuacacacacaaua

SEQ ID NO: 1951326 - RNA, 19 nt, Artificial Sequence
  Description of Artificial Sequence: Synthetic oligonucleotide
caugaauaguuacgcaggc

SEQ ID NO: 1951327 - RNA, 19 nt, Artificial Sequence
  Description of Artificial Sequence: Synthetic oligonucleotide
uuuaagcaauagcaccuga

SEQ ID NO: 1951328 - RNA, 19 nt, Artificial Sequence
  Description of Artificial Sequence: Synthetic oligonucleotide
gauuagaucugauauccua

SEQ ID NO: 1951329 - RNA, 19 nt, Artificial Sequence
  Description of Artificial Sequence: Synthetic oligonucleotide
gagaaaagguggaaaauuc

SEQ ID NO: 1951330 - RNA, 19 nt, Artificial Sequence
  Description of Artificial Sequence: Synthetic oligonucleotide
agaacccuaagcuucccug

SEQ ID NO: 1951331 - RNA, 19 nt, Artificial Sequence
  Description of Artificial Sequence: Synthetic oligonucleotide
uaagacacccgacuauuaa

SEQ ID NO: 1951332 - RNA, 19 nt, Artificial Sequence
  Description of Artificial Sequence: Synthetic oligonucleotide
aacgcccuugaccaucguc

SEQ ID NO: 1951333 - RNA, 19 nt, Artificial Sequence
  Description of Artificial Sequence: Synthetic oligonucleotide
gcaauagucucuccaaccg

SEQ ID NO: 1951334 - RNA, 19 nt, Artificial Sequence
  Description of Artificial Sequence: Synthetic oligonucleotide
acgugaagcugucauacug

SEQ ID NO: 1951335 - RNA, 19 nt, Artificial Sequence
  Description of Artificial Sequence: Synthetic oligonucleotide
acacccgacuauuaagguc

SEQ ID NO: 1951336 - RNA, 19 nt, Artificial Sequence
  Description of Artificial Sequence: Synthetic oligonucleotide
uuuuaagcaauagcaccug

SEQ ID NO: 1951337 - RNA, 19 nt, Artificial Sequence
  Description of Artificial Sequence: Synthetic oligonucleotide
uaagcuucccuggaggccc

SEQ ID NO: 1951338 - RNA, 19 nt, Artificial Sequence
  Description of Artificial Sequence: Synthetic oligonucleotide
cacacaauacaguuagauc

SEQ ID NO: 1951339 - RNA, 19 nt, Artificial Sequence
  Description of Artificial Sequence: Synthetic oligonucleotide
guggaaacacugcuuggcg

SEQ ID NO: 1951340 - RNA, 19 nt, Artificial Sequence
  Description of Artificial Sequence: Synthetic oligonucleotide
uuguacgugaagcugucau

SEQ ID NO: 1951341 - RNA, 19 nt, Artificial Sequence
  Description of Artificial Sequence: Synthetic oligonucleotide
ucugcccuaggagauagag

SEQ ID NO: 1951342 - RNA, 19 nt, Artificial Sequence
  Description of Artificial Sequence: Synthetic oligonucleotide
cugggagucgaucacaguc

SEQ ID NO: 1951343 - RNA, 19 nt, Artificial Sequence
  Description of Artificial Sequence: Synthetic oligonucleotide
cacagcacggcuaggagug

SEQ ID NO: 1951344 - RNA, 19 nt, Artificial Sequence
  Description of Artificial Sequence: Synthetic oligonucleotide
agacacccgacuauuaagg

SEQ ID NO: 1951345 - RNA, 19 nt, Artificial Sequence
  Description of Artificial Sequence: Synthetic oligonucleotide
acggucuuaugagaaaagg

SEQ ID NO: 1951346 - RNA, 19 nt, Artificial Sequence
  Description of Artificial Sequence: Synthetic oligonucleotide
uuaaugggucguuucucug

SEQ ID NO: 1951347 - RNA, 19 nt, Artificial Sequence
  Description of Artificial Sequence: Synthetic oligonucleotide
auaaacgcccuugaccauc

SEQ ID NO: 1951348 - RNA, 19 nt, Artificial Sequence
  Description of Artificial Sequence: Synthetic oligonucleotide
ggcaauguuacacacacaa

SEQ ID NO: 1951349 - RNA, 19 nt, Artificial Sequence
  Description of Artificial Sequence: Synthetic oligonucleotide
uaaugggucguuucucugu

SEQ ID NO: 1951350 - RNA, 19 nt, Artificial Sequence
  Description of Artificial Sequence: Synthetic oligonucleotide
gcgauaaugugucugggag

SEQ ID NO: 1951351 - RNA, 19 nt, Artificial Sequence
  Description of Artificial Sequence: Synthetic oligonucleotide
agaagcuuuuaagcaauag

SEQ ID NO: 1951352 - RNA, 19 nt, Artificial Sequence
  Description of Artificial Sequence: Synthetic oligonucleotide
cuaggagauagagaucacc

SEQ ID NO: 1951353 - RNA, 19 nt, Artificial Sequence
  Description of Artificial Sequence: Synthetic oligonucleotide
ggaguucucccacagacug

SEQ ID NO: 1951354 - RNA, 19 nt, Artificial Sequence
  Description of Artificial Sequence: Synthetic oligonucleotide
aauaguuacgcaggcggau

SEQ ID NO: 1951355 - RNA, 19 nt, Artificial Sequence
  Description of Artificial Sequence: Synthetic oligonucleotide
gagucgaucacagucuuca

SEQ ID NO: 1951356 - RNA, 19 nt, Artificial Sequence
  Description of Artificial Sequence: Synthetic oligonucleotide
acuuggaguucucccacag

SEQ ID NO: 1951357 - RNA, 19 nt, Artificial Sequence
  Description of Artificial Sequence: Synthetic oligonucleotide
aggacacaacccaaugacc

SEQ ID NO: 1951358 - RNA, 19 nt, Artificial Sequence
  Description of Artificial Sequence: Synthetic oligonucleotide
guggccaaucccuaggcug

SEQ ID NO: 1951359 - RNA, 19 nt, Artificial Sequence
  Description of Artificial Sequence: Synthetic oligonucleotide
augaauaguuacgcaggcg

SEQ ID NO: 1951360 - RNA, 19 nt, Artificial Sequence
  Description of Artificial Sequence: Synthetic oligonucleotide
agcacaauucugcccuagg

SEQ ID NO: 1951361 - RNA, 19 nt, Artificial Sequence
  Description of Artificial Sequence: Synthetic oligonucleotide
agacgauguuccccaaggg

SEQ ID NO: 1951362 - RNA, 19 nt, Artificial Sequence
  Description of Artificial Sequence: Synthetic oligonucleotide
accaucgucuuguacguga

SEQ ID NO: 1951363 - RNA, 19 nt, Artificial Sequence
  Description of Artificial Sequence: Synthetic oligonucleotide
uacagcugacccuacugcu

SEQ ID NO: 1951364 - RNA, 19 nt, Artificial Sequence
  Description of Artificial Sequence: Synthetic oligonucleotide
ucgucuuguacgugaagcu

SEQ ID NO: 1951365 - RNA, 19 nt, Artificial Sequence
  Description of Artificial Sequence: Synthetic oligonucleotide
guuagaucucccuucagcu

SEQ ID NO: 1951366 - RNA, 19 nt, Artificial Sequence
  Description of Artificial Sequence: Synthetic oligonucleotide
cuguuaccccaaauagugg

SEQ ID NO: 1951367 - RNA, 19 nt, Artificial Sequence
  Description of Artificial Sequence: Synthetic oligonucleotide
aaucccuaggcugacccgu

SEQ ID NO: 1951368 - RNA, 19 nt, Artificial Sequence
  Description of Artificial Sequence: Synthetic oligonucleotide
gcaaaacugauaaacgccc

SEQ ID NO: 1951369 - RNA, 19 nt, Artificial Sequence
  Description of Artificial Sequence: Synthetic oligonucleotide
ugagagucccuuucucccc

SEQ ID NO: 1951370 - RNA, 19 nt, Artificial Sequence
  Description of Artificial Sequence: Synthetic oligonucleotide
uggaaacacugcuuggcgu

SEQ ID NO: 1951371 - RNA, 19 nt, Artificial Sequence
  Description of Artificial Sequence: Synthetic oligonucleotide
ugaccaucgucuuguacgu

SEQ ID NO: 1951372 - RNA, 19 nt, Artificial Sequence
  Description of Artificial Sequence: Synthetic oligonucleotide
guacgugaagcugucauac

SEQ ID NO: 1951373 - RNA, 19 nt, Artificial Sequence
  Description of Artificial Sequence: Synthetic oligonucleotide
uuagaucucccuucagcuc

SEQ ID NO: 1951374 - RNA, 19 nt, Artificial Sequence
  Description of Artificial Sequence: Synthetic oligonucleotide
auuagaucugauauccuaa

SEQ ID NO: 1951375 - RNA, 19 nt, Artificial Sequence
  Description of Artificial Sequence: Synthetic oligonucleotide
aacccuaagcuucccugga

SEQ ID NO: 1951376 - RNA, 19 nt, Artificial Sequence
  Description of Artificial Sequence: Synthetic oligonucleotide
ccaaauaguggccaauccc

SEQ ID NO: 1951377 - RNA, 19 nt, Artificial Sequence
  Description of Artificial Sequence: Synthetic oligonucleotide
uaguggccaaucccuaggc

SEQ ID NO: 1951378 - RNA, 19 nt, Artificial Sequence
  Description of Artificial Sequence: Synthetic oligonucleotide
caaauaguggccaaucccu

SEQ ID NO: 1951379 - RNA, 19 nt, Artificial Sequence
  Description of Artificial Sequence: Synthetic oligonucleotide
ggacacaacccaaugaccc

SEQ ID NO: 1951380 - RNA, 19 nt, Artificial Sequence
  Description of Artificial Sequence: Synthetic oligonucleotide
cacggcuaggaguggaccg

SEQ ID NO: 1951381 - RNA, 19 nt, Artificial Sequence
  Description of Artificial Sequence: Synthetic oligonucleotide
gaguggaccgcucuguuaa

SEQ ID NO: 1951382 - RNA, 19 nt, Artificial Sequence
  Description of Artificial Sequence: Synthetic oligonucleotide
cucuucguggaaacacugc

SEQ ID NO: 1951383 - RNA, 19 nt, Artificial Sequence
  Description of Artificial Sequence: Synthetic oligonucleotide
aguuacgcaggcggauucc

SEQ ID NO: 1951384 - RNA, 19 nt, Artificial Sequence
  Description of Artificial Sequence: Synthetic oligonucleotide
agucucuccaaccgaccag

SEQ ID NO: 1951385 - RNA, 19 nt, Artificial Sequence
  Description of Artificial Sequence: Synthetic oligonucleotide
gacccuagggugugagggg

SEQ ID NO: 1951386 - RNA, 19 nt, Artificial Sequence
  Description of Artificial Sequence: Synthetic oligonucleotide
uguuaaugggucguuucuc

SEQ ID NO: 1951387 - RNA, 19 nt, Artificial Sequence
  Description of Artificial Sequence: Synthetic oligonucleotide
accgaccaguaagacaccc

SEQ ID NO: 1951388 - RNA, 19 nt, Artificial Sequence
  Description of Artificial Sequence: Synthetic oligonucleotide
ucuuguacgugaagcuguc

SEQ ID NO: 1951389 - RNA, 19 nt, Artificial Sequence
  Description of Artificial Sequence: Synthetic oligonucleotide
uguacgugaagcugucaua

SEQ ID NO: 1951390 - RNA, 19 nt, Artificial Sequence
  Description of Artificial Sequence: Synthetic oligonucleotide
gggcucgucacccacuugg

SEQ ID NO: 1951391 - RNA, 19 nt, Artificial Sequence
  Description of Artificial Sequence: Synthetic oligonucleotide
ugggucguuucucugugaa

SEQ ID NO: 1951392 - RNA, 19 nt, Artificial Sequence
  Description of Artificial Sequence: Synthetic oligonucleotide
uuggguccugguuguacag

SEQ ID NO: 1951393 - RNA, 19 nt, Artificial Sequence
  Description of Artificial Sequence: Synthetic oligonucleotide
ugacccuacugcuuccaga

SEQ ID NO: 1951394 - RNA, 19 nt, Artificial Sequence
  Description of Artificial Sequence: Synthetic oligonucleotide
gacccuauuccccaugucu

SEQ ID NO: 1951395 - RNA, 19 nt, Artificial Sequence
  Description of Artificial Sequence: Synthetic oligonucleotide
aggagauagagaucaccaa

SEQ ID NO: 1951396 - RNA, 19 nt, Artificial Sequence
  Description of Artificial Sequence: Synthetic oligonucleotide
aagcugucauacugcuucu

SEQ ID NO: 1951397 - RNA, 19 nt, Artificial Sequence
  Description of Artificial Sequence: Synthetic oligonucleotide
uaguuacgcaggcggauuc

SEQ ID NO: 1951398 - RNA, 19 nt, Artificial Sequence
  Description of Artificial Sequence: Synthetic oligonucleotide
uggaucacuguuaccccaa

SEQ ID NO: 1951399 - RNA, 19 nt, Artificial Sequence
  Description of Artificial Sequence: Synthetic oligonucleotide
guagacgauguuccccaag

SEQ ID NO: 1951400 - RNA, 19 nt, Artificial Sequence
  Description of Artificial Sequence: Synthetic oligonucleotide
cugauauccuaagguacag

SEQ ID NO: 1951401 - RNA, 19 nt, Artificial Sequence
  Description of Artificial Sequence: Synthetic oligonucleotide
guuaccccaaauaguggcc

SEQ ID NO: 1951402 - RNA, 19 nt, Artificial Sequence
  Description of Artificial Sequence: Synthetic oligonucleotide
ugguuguacagcugacccu

SEQ ID NO: 1951403 - RNA, 19 nt, Artificial Sequence
  Description of Artificial Sequence: Synthetic oligonucleotide
ugacugaagcugaccacaa

SEQ ID NO: 1951404 - RNA, 19 nt, Artificial Sequence
  Description of Artificial Sequence: Synthetic oligonucleotide
ugauauccuaagguacaga

SEQ ID NO: 1951405 - RNA, 19 nt, Artificial Sequence
  Description of Artificial Sequence: Synthetic oligonucleotide
acggcuaggaguggaccgc

SEQ ID NO: 1951406 - RNA, 19 nt, Artificial Sequence
  Description of Artificial Sequence: Synthetic oligonucleotide
agucgcucggcccggagca

SEQ ID NO: 1951407 - RNA, 19 nt, Artificial Sequence
  Description of Artificial Sequence: Synthetic oligonucleotide
ccagagagaacuucacgcc

SEQ ID NO: 1951408 - RNA, 19 nt, Artificial Sequence
  Description of Artificial Sequence: Synthetic oligonucleotide
cuaagcuucccuggaggcc

SEQ ID NO: 1951409 - RNA, 19 nt, Artificial Sequence
  Description of Artificial Sequence: Synthetic oligonucleotide
aaaggcacucacucuccuu

SEQ ID NO: 1951410 - RNA, 19 nt, Artificial Sequence
  Description of Artificial Sequence: Synthetic oligonucleotide
guuaaugggucguuucucu

SEQ ID NO: 1951411 - RNA, 19 nt, Artificial Sequence
  Description of Artificial Sequence: Synthetic oligonucleotide
cugacccguaaacauuuug

SEQ ID NO: 1951412 - RNA, 19 nt, Artificial Sequence
  Description of Artificial Sequence: Synthetic oligonucleotide
cuuggcguuguccggcagc

SEQ ID NO: 1951413 - RNA, 19 nt, Artificial Sequence
  Description of Artificial Sequence: Synthetic oligonucleotide
agagaacuucacgcccugc

SEQ ID NO: 1951414 - RNA, 19 nt, Artificial Sequence
  Description of Artificial Sequence: Synthetic oligonucleotide
caaucccuaggcugacccg

SEQ ID NO: 1951415 - RNA, 19 nt, Artificial Sequence
  Description of Artificial Sequence: Synthetic oligonucleotide
uuguacagcugacccuacu

SEQ ID NO: 1951416 - RNA, 19 nt, Artificial Sequence
  Description of Artificial Sequence: Synthetic oligonucleotide
agucaaaguagacggucuu

SEQ ID NO: 1951417 - RNA, 19 nt, Artificial Sequence
  Description of Artificial Sequence: Synthetic oligonucleotide
acaacccaaugacccaugu

SEQ ID NO: 1951418 - RNA, 19 nt, Artificial Sequence
  Description of Artificial Sequence: Synthetic oligonucleotide
cacccgacuauuaaggucu

SEQ ID NO: 1951419 - RNA, 19 nt, Artificial Sequence
  Description of Artificial Sequence: Synthetic oligonucleotide
gaauaguuacgcaggcgga

SEQ ID NO: 1951420 - RNA, 19 nt, Artificial Sequence
  Description of Artificial Sequence: Synthetic oligonucleotide
aucugaguaagagcuguga

SEQ ID NO: 1951421 - RNA, 19 nt, Artificial Sequence
  Description of Artificial Sequence: Synthetic oligonucleotide
ggucguuucucugugaaga

SEQ ID NO: 1951422 - RNA, 19 nt, Artificial Sequence
  Description of Artificial Sequence: Synthetic oligonucleotide
ucguaguggccuccaguga

SEQ ID NO: 1951423 - RNA, 19 nt, Artificial Sequence
  Description of Artificial Sequence: Synthetic oligonucleotide
agucgaucacagucuucag

SEQ ID NO: 1951424 - RNA, 19 nt, Artificial Sequence
  Description of Artificial Sequence: Synthetic oligonucleotide
acgcaggcggauuccaucu

SEQ ID NO: 1951425 - RNA, 19 nt, Artificial Sequence
  Description of Artificial Sequence: Synthetic oligonucleotide
ggcaagaacugagaguccc

SEQ ID NO: 1951426 - RNA, 19 nt, Artificial Sequence
  Description of Artificial Sequence: Synthetic oligonucleotide
uacgcaggcggauuccauc

SEQ ID NO: 1951427 - RNA, 19 nt, Artificial Sequence
  Description of Artificial Sequence: Synthetic oligonucleotide
auauccuaagguacagaga

SEQ ID NO: 1951428 - RNA, 19 nt, Artificial Sequence
  Description of Artificial Sequence: Synthetic oligonucleotide
aaauaguggccaaucccua

SEQ ID NO: 1951429 - RNA, 19 nt, Artificial Sequence
  Description of Artificial Sequence: Synthetic oligonucleotide
acccuaagcuucccuggag

SEQ ID NO: 1951430 - RNA, 19 nt, Artificial Sequence
  Description of Artificial Sequence: Synthetic oligonucleotide
caccucuucguggaaacac

SEQ ID NO: 1951431 - RNA, 19 nt, Artificial Sequence
  Description of Artificial Sequence: Synthetic oligonucleotide
agacggucuuaugagaaaa

SEQ ID NO: 1951432 - RNA, 19 nt, Artificial Sequence
  Description of Artificial Sequence: Synthetic oligonucleotide
ucacccugugucacacccc

SEQ ID NO: 1951433 - RNA, 19 nt, Artificial Sequence
  Description of Artificial Sequence: Synthetic oligonucleotide
uacgugaagcugucauacu

SEQ ID NO: 1951434 - RNA, 19 nt, Artificial Sequence
  Description of Artificial Sequence: Synthetic oligonucleotide
ugucugggagucgaucaca

SEQ ID NO: 1951435 - RNA, 19 nt, Artificial Sequence
  Description of Artificial Sequence: Synthetic oligonucleotide
aaccgaccaguaagacacc

SEQ ID NO: 1951436 - RNA, 19 nt, Artificial Sequence
  Description of Artificial Sequence: Synthetic oligonucleotide
acccauguaucaugaagua

SEQ ID NO: 1951437 - RNA, 19 nt, Artificial Sequence
  Description of Artificial Sequence: Synthetic oligonucleotide
acccuauuccccaugucug

SEQ ID NO: 1951438 - RNA, 19 nt, Artificial Sequence
  Description of Artificial Sequence: Synthetic oligonucleotide
acgcccuugaccaucgucu

SEQ ID NO: 1951439 - RNA, 19 nt, Artificial Sequence
  Description of Artificial Sequence: Synthetic oligonucleotide
guagacggucuuaugagaa

SEQ ID NO: 1951440 - RNA, 19 nt, Artificial Sequence
  Description of Artificial Sequence: Synthetic oligonucleotide
cccguaaacauuuuggcaa

SEQ ID NO: 1951441 - RNA, 19 nt, Artificial Sequence
  Description of Artificial Sequence: Synthetic oligonucleotide
gaagaagcuuuuaagcaau

SEQ ID NO: 1951442 - RNA, 19 nt, Artificial Sequence
  Description of Artificial Sequence: Synthetic oligonucleotide
agagcuucaugaauaguua

SEQ ID NO: 1951443 - RNA, 19 nt, Artificial Sequence
  Description of Artificial Sequence: Synthetic oligonucleotide
cucgaaggcgauaaugugu

SEQ ID NO: 1951444 - RNA, 19 nt, Artificial Sequence
  Description of Artificial Sequence: Synthetic oligonucleotide
ccagauuagaucugauauc

SEQ ID NO: 1951445 - RNA, 19 nt, Artificial Sequence
  Description of Artificial Sequence: Synthetic oligonucleotide
ccauguaucaugaaguagu

SEQ ID NO: 1951446 - RNA, 19 nt, Artificial Sequence
  Description of Artificial Sequence: Synthetic oligonucleotide
ccaaucccuaggcugaccc

SEQ ID NO: 1951447 - RNA, 19 nt, Artificial Sequence
  Description of Artificial Sequence: Synthetic oligonucleotide
caauagucucuccaaccga

SEQ ID NO: 1951448 - RNA, 19 nt, Artificial Sequence
  Description of Artificial Sequence: Synthetic oligonucleotide
cccggcaagaacuggagac

SEQ ID NO: 1951449 - RNA, 19 nt, Artificial Sequence
  Description of Artificial Sequence: Synthetic oligonucleotide
auccuaagguacagagagg

SEQ ID NO: 1951450 - RNA, 19 nt, Artificial Sequence
  Description of Artificial Sequence: Synthetic oligonucleotide
cuuaugagaaaagguggaa

SEQ ID NO: 1951451 - RNA, 19 nt, Artificial Sequence
  Description of Artificial Sequence: Synthetic oligonucleotide
ucccggcaagaacuggaga

SEQ ID NO: 1951452 - RNA, 19 nt, Artificial Sequence
  Description of Artificial Sequence: Synthetic oligonucleotide
ccuaagcuucccuggaggc

SEQ ID NO: 1951453 - RNA, 19 nt, Artificial Sequence
  Description of Artificial Sequence: Synthetic oligonucleotide
uggcaauguuacacacaca

SEQ ID NO: 1951454 - RNA, 19 nt, Artificial Sequence
  Description of Artificial Sequence: Synthetic oligonucleotide
aggcgauaaugugucuggg

SEQ ID NO: 1951455 - RNA, 19 nt, Artificial Sequence
  Description of Artificial Sequence: Synthetic oligonucleotide
gacccuacugcuuccagau

SEQ ID NO: 1951456 - RNA, 19 nt, Artificial Sequence
  Description of Artificial Sequence: Synthetic oligonucleotide
agcucggcgccccgcaguc

SEQ ID NO: 1951457 - RNA, 19 nt, Artificial Sequence
  Description of Artificial Sequence: Synthetic oligonucleotide
uaggaguggaccgcucugu

SEQ ID NO: 1951458 - RNA, 19 nt, Artificial Sequence
  Description of Artificial Sequence: Synthetic oligonucleotide
aauucugcccuaggagaua

SEQ ID NO: 1951459 - RNA, 19 nt, Artificial Sequence
  Description of Artificial Sequence: Synthetic oligonucleotide
uccaaccgaccaguaagac

SEQ ID NO: 1951460 - RNA, 19 nt, Artificial Sequence
  Description of Artificial Sequence: Synthetic oligonucleotide
gccuccagugauaaccugg

SEQ ID NO: 1951461 - RNA, 19 nt, Artificial Sequence
  Description of Artificial Sequence: Synthetic oligonucleotide
ggcggauuccaucugagua

SEQ ID NO: 1951462 - RNA, 19 nt, Artificial Sequence
  Description of Artificial Sequence: Synthetic oligonucleotide
caucccggcaagaacugga

SEQ ID NO: 1951463 - RNA, 19 nt, Artificial Sequence
  Description of Artificial Sequence: Synthetic oligonucleotide
ucgguccugggccucucga

SEQ ID NO: 1951464 - RNA, 19 nt, Artificial Sequence
  Description of Artificial Sequence: Synthetic oligonucleotide
caauagcaccugacugaag

SEQ ID NO: 1951465 - RNA, 19 nt, Artificial Sequence
  Description of Artificial Sequence: Synthetic oligonucleotide
agauuagaucugauauccu

SEQ ID NO: 1951466 - RNA, 19 nt, Artificial Sequence
  Description of Artificial Sequence: Synthetic oligonucleotide
uuacgcaggcggauuccau

SEQ ID NO: 1951467 - RNA, 19 nt, Artificial Sequence
  Description of Artificial Sequence: Synthetic oligonucleotide
cacaacccaaugacccaug

SEQ ID NO: 1951468 - RNA, 19 nt, Artificial Sequence
  Description of Artificial Sequence: Synthetic oligonucleotide
cuaggcugacccguaaaca

SEQ ID NO: 1951469 - RNA, 19 nt, Artificial Sequence
  Description of Artificial Sequence: Synthetic oligonucleotide
ugacccuauuccccauguc

SEQ ID NO: 1951470 - RNA, 19 nt, Artificial Sequence
  Description of Artificial Sequence: Synthetic oligonucleotide
cuccaaccgaccaguaaga

SEQ ID NO: 1951471 - RNA, 19 nt, Artificial Sequence
  Description of Artificial Sequence: Synthetic oligonucleotide
gacacccgacuauuaaggu

SEQ ID NO: 1951472 - RNA, 19 nt, Artificial Sequence
  Description of Artificial Sequence: Synthetic oligonucleotide
auaguuacgcaggcggauu

SEQ ID NO: 1951473 - RNA, 19 nt, Artificial Sequence
  Description of Artificial Sequence: Synthetic oligonucleotide
caguuagaucucccuucag

SEQ ID NO: 1951474 - RNA, 19 nt, Artificial Sequence
  Description of Artificial Sequence: Synthetic oligonucleotide
agcacggcuaggaguggac

SEQ ID NO: 1951475 - RNA, 19 nt, Artificial Sequence
  Description of Artificial Sequence: Synthetic oligonucleotide
cucggcccggagcaggagc

SEQ ID NO: 1951476 - RNA, 19 nt, Artificial Sequence
  Description of Artificial Sequence: Synthetic oligonucleotide
cucggcgccccgcagucgc

SEQ ID NO: 1951477 - RNA, 19 nt, Artificial Sequence
  Description of Artificial Sequence: Synthetic oligonucleotide
cauagcaguccacaucgua

SEQ ID NO: 1951478 - RNA, 19 nt, Artificial Sequence
  Description of Artificial Sequence: Synthetic oligonucleotide
cccuaggagauagagauca

SEQ ID NO: 1951479 - RNA, 19 nt, Artificial Sequence
  Description of Artificial Sequence: Synthetic oligonucleotide
caaaacugauaaacgcccu

SEQ ID NO: 1951480 - RNA, 19 nt, Artificial Sequence
  Description of Artificial Sequence: Synthetic oligonucleotide
aggcggauuccaucugagu

SEQ ID NO: 1951481 - RNA, 19 nt, Artificial Sequence
  Description of Artificial Sequence: Synthetic oligonucleotide
gcacaauucugcccuagga

SEQ ID NO: 1951482 - RNA, 19 nt, Artificial Sequence
  Description of Artificial Sequence: Synthetic oligonucleotide
cccuauuccccaugucugg

SEQ ID NO: 1951483 - RNA, 19 nt, Artificial Sequence
  Description of Artificial Sequence: Synthetic oligonucleotide
ugcuuggcguuguccggca

SEQ ID NO: 1951484 - RNA, 19 nt, Artificial Sequence
  Description of Artificial Sequence: Synthetic oligonucleotide
accucuucguggaaacacu

SEQ ID NO: 1951485 - RNA, 19 nt, Artificial Sequence
  Description of Artificial Sequence: Synthetic oligonucleotide
ggcgauaaugugucuggga

SEQ ID NO: 1951486 - RNA, 19 nt, Artificial Sequence
  Description of Artificial Sequence: Synthetic oligonucleotide
cuguuaaugggucguuucu

SEQ ID NO: 1951487 - RNA, 19 nt, Artificial Sequence
  Description of Artificial Sequence: Synthetic oligonucleotide
gucguuucucugugaagaa

SEQ ID NO: 1951488 - RNA, 19 nt, Artificial Sequence
  Description of Artificial Sequence: Synthetic oligonucleotide
aucccggcaagaacuggag

SEQ ID NO: 1951489 - RNA, 19 nt, Artificial Sequence
  Description of Artificial Sequence: Synthetic oligonucleotide
uaagagcugugacccuauu

SEQ ID NO: 1951490 - RNA, 19 nt, Artificial Sequence
  Description of Artificial Sequence: Synthetic oligonucleotide
cucccuucacccuguguca

SEQ ID NO: 1951491 - RNA, 19 nt, Artificial Sequence
  Description of Artificial Sequence: Synthetic oligonucleotide
ggaagcgcgagaggccucg

SEQ ID NO: 1951492 - RNA, 19 nt, Artificial Sequence
  Description of Artificial Sequence: Synthetic oligonucleotide
gcggauuccaucugaguaa

SEQ ID NO: 1951493 - RNA, 19 nt, Artificial Sequence
  Description of Artificial Sequence: Synthetic oligonucleotide
cccaaugacccauguauca

SEQ ID NO: 1951494 - RNA, 19 nt, Artificial Sequence
  Description of Artificial Sequence: Synthetic oligonucleotide
gaagaggacacaacccaau

SEQ ID NO: 1951495 - RNA, 19 nt, Artificial Sequence
  Description of Artificial Sequence: Synthetic oligonucleotide
ucccuucacccugugucac

SEQ ID NO: 1951496 - RNA, 19 nt, Artificial Sequence
  Description of Artificial Sequence: Synthetic oligonucleotide
caauucugcccuaggagau

SEQ ID NO: 1951497 - RNA, 19 nt, Artificial Sequence
  Description of Artificial Sequence: Synthetic oligonucleotide
cgacuauuaaggucuucag

SEQ ID NO: 1951498 - RNA, 19 nt, Artificial Sequence
  Description of Artificial Sequence: Synthetic oligonucleotide
gggucguuucucugugaag

SEQ ID NO: 1951499 - RNA, 19 nt, Artificial Sequence
  Description of Artificial Sequence: Synthetic oligonucleotide
augacccauguaucaugaa

SEQ ID NO: 1951500 - RNA, 19 nt, Artificial Sequence
  Description of Artificial Sequence: Synthetic oligonucleotide
ucucuccaaccgaccagua

SEQ ID NO: 1951501 - RNA, 19 nt, Artificial Sequence
  Description of Artificial Sequence: Synthetic oligonucleotide
caccugacugaagcugacc

SEQ ID NO: 1951502 - RNA, 19 nt, Artificial Sequence
  Description of Artificial Sequence: Synthetic oligonucleotide
cccauguaucaugaaguag

SEQ ID NO: 1951503 - RNA, 19 nt, Artificial Sequence
  Description of Artificial Sequence: Synthetic oligonucleotide
ggcagaacccuaagcuucc

SEQ ID NO: 1951504 - RNA, 19 nt, Artificial Sequence
  Description of Artificial Sequence: Synthetic oligonucleotide
ccgaccaguaagacacccg

SEQ ID NO: 1951505 - RNA, 19 nt, Artificial Sequence
  Description of Artificial Sequence: Synthetic oligonucleotide
uucugcccuaggagauaga

SEQ ID NO: 1951506 - RNA, 19 nt, Artificial Sequence
  Description of Artificial Sequence: Synthetic oligonucleotide
ccuauuccccaugucuggg

SEQ ID NO: 1951507 - RNA, 19 nt, Artificial Sequence
  Description of Artificial Sequence: Synthetic oligonucleotide
gaucacuguuaccccaaau

SEQ ID NO: 1951508 - RNA, 19 nt, Artificial Sequence
  Description of Artificial Sequence: Synthetic oligonucleotide
ucccuaggcugacccguaa

SEQ ID NO: 1951509 - RNA, 19 nt, Artificial Sequence
  Description of Artificial Sequence: Synthetic oligonucleotide
ccucucgaaggcgauaaug

SEQ ID NO: 1951510 - RNA, 19 nt, Artificial Sequence
  Description of Artificial Sequence: Synthetic oligonucleotide
aaacgcccuugaccaucgu

SEQ ID NO: 1951511 - RNA, 19 nt, Artificial Sequence
  Description of Artificial Sequence: Synthetic oligonucleotide
gauaaacgcccuugaccau

SEQ ID NO: 1951512 - RNA, 19 nt, Artificial Sequence
  Description of Artificial Sequence: Synthetic oligonucleotide
ccgacuauuaaggucuuca

SEQ ID NO: 1951513 - RNA, 19 nt, Artificial Sequence
  Description of Artificial Sequence: Synthetic oligonucleotide
ggagacccuagggugugag

SEQ ID NO: 1951514 - RNA, 19 nt, Artificial Sequence
  Description of Artificial Sequence: Synthetic oligonucleotide
aguggaccgcucuguuaau

SEQ ID NO: 1951515 - RNA, 19 nt, Artificial Sequence
  Description of Artificial Sequence: Synthetic oligonucleotide
ccaaccgaccaguaagaca

SEQ ID NO: 1951516 - RNA, 19 nt, Artificial Sequence
  Description of Artificial Sequence: Synthetic oligonucleotide
guggcagaacccuaagcuu

SEQ ID NO: 1951517 - RNA, 19 nt, Artificial Sequence
  Description of Artificial Sequence: Synthetic oligonucleotide
gaccgcucuguuaaugggu

SEQ ID NO: 1951518 - RNA, 19 nt, Artificial Sequence
  Description of Artificial Sequence: Synthetic oligonucleotide
guaagacacccgacuauua

SEQ ID NO: 1951519 - RNA, 19 nt, Artificial Sequence
  Description of Artificial Sequence: Synthetic oligonucleotide
cucuccaaccgaccaguaa

SEQ ID NO: 1951520 - RNA, 19 nt, Artificial Sequence
  Description of Artificial Sequence: Synthetic oligonucleotide
ccccaugucugggagaaug

SEQ ID NO: 1951521 - RNA, 19 nt, Artificial Sequence
  Description of Artificial Sequence: Synthetic oligonucleotide
gaccaucgucuuguacgug

SEQ ID NO: 1951522 - RNA, 19 nt, Artificial Sequence
  Description of Artificial Sequence: Synthetic oligonucleotide
gugacccuauuccccaugu

SEQ ID NO: 1951523 - RNA, 19 nt, Artificial Sequence
  Description of Artificial Sequence: Synthetic oligonucleotide
ggaaacacugcuuggcguu

SEQ ID NO: 1951524 - RNA, 19 nt, Artificial Sequence
  Description of Artificial Sequence: Synthetic oligonucleotide
ccggcaagaacuggagacc

SEQ ID NO: 1951525 - RNA, 19 nt, Artificial Sequence
  Description of Artificial Sequence: Synthetic oligonucleotide
aggugagcucggcgccccg

SEQ ID NO: 1951526 - RNA, 19 nt, Artificial Sequence
  Description of Artificial Sequence: Synthetic oligonucleotide
accugguaauccagagaga

SEQ ID NO: 1951527 - RNA, 19 nt, Artificial Sequence
  Description of Artificial Sequence: Synthetic oligonucleotide
accccaaauaguggccaau

SEQ ID NO: 1951528 - RNA, 19 nt, Artificial Sequence
  Description of Artificial Sequence: Synthetic oligonucleotide
cuuguacgugaagcuguca

SEQ ID NO: 1951529 - RNA, 19 nt, Artificial Sequence
  Description of Artificial Sequence: Synthetic oligonucleotide
gcaggcggauuccaucuga

SEQ ID NO: 1951530 - RNA, 19 nt, Artificial Sequence
  Description of Artificial Sequence: Synthetic oligonucleotide
ccgguagacgauguucccc

SEQ ID NO: 1951531 - RNA, 19 nt, Artificial Sequence
  Description of Artificial Sequence: Synthetic oligonucleotide
cuucguggaaacacugcuu

SEQ ID NO: 1951532 - RNA, 19 nt, Artificial Sequence
  Description of Artificial Sequence: Synthetic oligonucleotide
ccuaggagauagagaucac

SEQ ID NO: 1951533 - RNA, 19 nt, Artificial Sequence
  Description of Artificial Sequence: Synthetic oligonucleotide
cgaucacagucuucagagc

SEQ ID NO: 1951534 - RNA, 19 nt, Artificial Sequence
  Description of Artificial Sequence: Synthetic oligonucleotide
aggaagcgcgagaggccuc

SEQ ID NO: 1951535 - RNA, 19 nt, Artificial Sequence
  Description of Artificial Sequence: Synthetic oligonucleotide
gcaagaacuggagacccua

SEQ ID NO: 1951536 - RNA, 19 nt, Artificial Sequence
  Description of Artificial Sequence: Synthetic oligonucleotide
cccgguagacgauguuccc

SEQ ID NO: 1951537 - RNA, 19 nt, Artificial Sequence
  Description of Artificial Sequence: Synthetic oligonucleotide
gaagcgcgagaggccucgc

SEQ ID NO: 1951538 - RNA, 19 nt, Artificial Sequence
  Description of Artificial Sequence: Synthetic oligonucleotide
gcacggcuaggaguggacc

SEQ ID NO: 1951539 - RNA, 19 nt, Artificial Sequence
  Description of Artificial Sequence: Synthetic oligonucleotide
gcuaggaguggaccgcucu

SEQ ID NO: 1951540 - RNA, 19 nt, Artificial Sequence
  Description of Artificial Sequence: Synthetic oligonucleotide
gcccuugaccaucgucuug

SEQ ID NO: 1951541 - RNA, 19 nt, Artificial Sequence
  Description of Artificial Sequence: Synthetic oligonucleotide
cgguagacgauguucccca

SEQ ID NO: 1951542 - RNA, 19 nt, Artificial Sequence
  Description of Artificial Sequence: Synthetic oligonucleotide
cagaacccuaagcuucccu

SEQ ID NO: 1951543 - RNA, 19 nt, Artificial Sequence
  Description of Artificial Sequence: Synthetic oligonucleotide
ggaucacuguuaccccaaa

SEQ ID NO: 1951544 - RNA, 19 nt, Artificial Sequence
  Description of Artificial Sequence: Synthetic oligonucleotide
guccggcagcucgaaggug

SEQ ID NO: 1951545 - RNA, 19 nt, Artificial Sequence
  Description of Artificial Sequence: Synthetic oligonucleotide
gcuuggcguuguccggcag

SEQ ID NO: 1951546 - RNA, 19 nt, Artificial Sequence
  Description of Artificial Sequence: Synthetic oligonucleotide
ccccaucccggcaagaacu

SEQ ID NO: 1951547 - RNA, 19 nt, Artificial Sequence
  Description of Artificial Sequence: Synthetic oligonucleotide
gcagaacccuaagcuuccc

SEQ ID NO: 1951548 - RNA, 19 nt, Artificial Sequence
  Description of Artificial Sequence: Synthetic oligonucleotide
cagcacggcuaggagugga

SEQ ID NO: 1951549 - RNA, 19 nt, Artificial Sequence
  Description of Artificial Sequence: Synthetic oligonucleotide
gucgcucggcccggagcag

SEQ ID NO: 1951550 - RNA, 19 nt, Artificial Sequence
  Description of Artificial Sequence: Synthetic oligonucleotide
gcagucgcucggcccggag

SEQ ID NO: 1951551 - RNA, 19 nt, Artificial Sequence
  Description of Artificial Sequence: Synthetic oligonucleotide
gccaaucccuaggcugacc

SEQ ID NO: 1951552 - RNA, 19 nt, Artificial Sequence
  Description of Artificial Sequence: Synthetic oligonucleotide
gcaccugacugaagcugac

SEQ ID NO: 1951553 - RNA, 19 nt, Artificial Sequence
  Description of Artificial Sequence: Synthetic oligonucleotide
aucccuaggcugacccgua

SEQ ID NO: 1951554 - RNA, 19 nt, Artificial Sequence
  Description of Artificial Sequence: Synthetic oligonucleotide
ggggcucgucacccacuug

SEQ ID NO: 1951555 - RNA, 19 nt, Artificial Sequence
  Description of Artificial Sequence: Synthetic oligonucleotide
ccguaaacauuuuggcaau

SEQ ID NO: 1951556 - RNA, 19 nt, Artificial Sequence
  Description of Artificial Sequence: Synthetic oligonucleotide
uggcguuguccggcagcuc

SEQ ID NO: 1951557 - RNA, 19 nt, Artificial Sequence
  Description of Artificial Sequence: Synthetic oligonucleotide
gucucccgguagacgaugu

SEQ ID NO: 1951558 - RNA, 19 nt, Artificial Sequence
  Description of Artificial Sequence: Synthetic oligonucleotide
cgcgagaggccucgcugcc

SEQ ID NO: 1951559 - RNA, 19 nt, Artificial Sequence
  Description of Artificial Sequence: Synthetic oligonucleotide
cucucccuucacccugugu

SEQ ID NO: 1951560 - RNA, 19 nt, Artificial Sequence
  Description of Artificial Sequence: Synthetic oligonucleotide
ggaggcccagguacuugga

SEQ ID NO: 1951561 - RNA, 19 nt, Artificial Sequence
  Description of Artificial Sequence: Synthetic oligonucleotide
acccgacuauuaaggucuu

SEQ ID NO: 1951562 - RNA, 19 nt, Artificial Sequence
  Description of Artificial Sequence: Synthetic oligonucleotide
ccuagggugugaggggcca

SEQ ID NO: 1951563 - RNA, 19 nt, Artificial Sequence
  Description of Artificial Sequence: Synthetic oligonucleotide
cguaguggccuccagugau

SEQ ID NO: 1951564 - RNA, 19 nt, Artificial Sequence
  Description of Artificial Sequence: Synthetic oligonucleotide
ccaaugacccauguaucau

SEQ ID NO: 1951565 - RNA, 19 nt, Artificial Sequence
  Description of Artificial Sequence: Synthetic oligonucleotide
ggcaagaacuggagacccu

SEQ ID NO: 1951566 - RNA, 19 nt, Artificial Sequence
  Description of Artificial Sequence: Synthetic oligonucleotide
cugugacccuauuccccau

SEQ ID NO: 1951567 - RNA, 19 nt, Artificial Sequence
  Description of Artificial Sequence: Synthetic oligonucleotide
ggcuaggaguggaccgcuc

SEQ ID NO: 1951568 - RNA, 19 nt, Artificial Sequence
  Description of Artificial Sequence: Synthetic oligonucleotide
ggcccggagcaggagcaga

SEQ ID NO: 1951569 - RNA, 19 nt, Artificial Sequence
  Description of Artificial Sequence: Synthetic oligonucleotide
gcucggcgccccgcagucg

SEQ ID NO: 1951570 - RNA, 19 nt, Artificial Sequence
  Description of Artificial Sequence: Synthetic oligonucleotide
cccuaggcugacccguaaa

SEQ ID NO: 1951571 - RNA, 19 nt, Artificial Sequence
  Description of Artificial Sequence: Synthetic oligonucleotide
gcguuguccggcagcucga

SEQ ID NO: 1951572 - RNA, 19 nt, Artificial Sequence
  Description of Artificial Sequence: Synthetic oligonucleotide
cccgacuauuaaggucuuc

SEQ ID NO: 1951573 - RNA, 19 nt, Artificial Sequence
  Description of Artificial Sequence: Synthetic oligonucleotide
cccaagggguccuccacau

SEQ ID NO: 1951574 - RNA, 19 nt, Artificial Sequence
  Description of Artificial Sequence: Synthetic oligonucleotide
cuagggugugaggggccau

SEQ ID NO: 1951575 - RNA, 19 nt, Artificial Sequence
  Description of Artificial Sequence: Synthetic oligonucleotide
cgcucuguuaaugggucgu

SEQ ID NO: 1951576 - RNA, 19 nt, Artificial Sequence
  Description of Artificial Sequence: Synthetic oligonucleotide
ccaagggguccuccacaua

SEQ ID NO: 1951577 - RNA, 19 nt, Artificial Sequence
  Description of Artificial Sequence: Synthetic oligonucleotide
gggccucucgaaggcgaua

SEQ ID NO: 1951578 - RNA, 19 nt, Artificial Sequence
  Description of Artificial Sequence: Synthetic oligonucleotide
cgaaggcgauaaugugucu

SEQ ID NO: 1951579 - RNA, 19 nt, Artificial Sequence
  Description of Artificial Sequence: Synthetic oligonucleotide
gcugacccguaaacauuuu

SEQ ID NO: 1951580 - RNA, 19 nt, Artificial Sequence
  Description of Artificial Sequence: Synthetic oligonucleotide
cguuguccggcagcucgaa

SEQ ID NO: 1951581 - RNA, 19 nt, Artificial Sequence
  Description of Artificial Sequence: Synthetic oligonucleotide
cggcuaggaguggaccgcu

SEQ ID NO: 1951582 - RNA, 19 nt, Artificial Sequence
  Description of Artificial Sequence: Synthetic oligonucleotide
cgcagucgcucggcccgga

SEQ ID NO: 1951583 - RNA, 19 nt, Artificial Sequence
  Description of Artificial Sequence: Synthetic oligonucleotide
aacuauagggccuuucucc

SEQ ID NO: 1951584 - RNA, 19 nt, Artificial Sequence
  Description of Artificial Sequence: Synthetic oligonucleotide
aaaagaguugaauuuugac

SEQ ID NO: 1951585 - RNA, 19 nt, Artificial Sequence
  Description of Artificial Sequence: Synthetic oligonucleotide
uauuuuaucacagucauca

SEQ ID NO: 1951586 - RNA, 19 nt, Artificial Sequence
  Description of Artificial Sequence: Synthetic oligonucleotide
aaagaguugaauuuugacu

SEQ ID NO: 1951587 - RNA, 19 nt, Artificial Sequence
  Description of Artificial Sequence: Synthetic oligonucleotide
aauauuuuaucacagucau

SEQ ID NO: 1951588 - RNA, 19 nt, Artificial Sequence
  Description of Artificial Sequence: Synthetic oligonucleotide
aagcauuacauuuguaagg

SEQ ID NO: 1951589 - RNA, 19 nt, Artificial Sequence
  Description of Artificial Sequence: Synthetic oligonucleotide
cuuaugaauccucugaugg

SEQ ID NO: 1951590 - RNA, 19 nt, Artificial Sequence
  Description of Artificial Sequence: Synthetic oligonucleotide
uguucaauaagguaugagc

SEQ ID NO: 1951591 - RNA, 19 nt, Artificial Sequence
  Description of Artificial Sequence: Synthetic oligonucleotide
auuggaugcaugcauaugg

SEQ ID NO: 1951592 - RNA, 19 nt, Artificial Sequence
  Description of Artificial Sequence: Synthetic oligonucleotide
aaaggagcuacuuucaaca

SEQ ID NO: 1951593 - RNA, 19 nt, Artificial Sequence
  Description of Artificial Sequence: Synthetic oligonucleotide
ugagcuacaaccaaaggcu

SEQ ID NO: 1951594 - RNA, 19 nt, Artificial Sequence
  Description of Artificial Sequence: Synthetic oligonucleotide
aaaaggagcuacuuucaac

SEQ ID NO: 1951595 - RNA, 19 nt, Artificial Sequence
  Description of Artificial Sequence: Synthetic oligonucleotide
ugcuguaucaguuuggagc

SEQ ID NO: 1951596 - RNA, 19 nt, Artificial Sequence
  Description of Artificial Sequence: Synthetic oligonucleotide
ugguaaaugagacuggagc

SEQ ID NO: 1951597 - RNA, 19 nt, Artificial Sequence
  Description of Artificial Sequence: Synthetic oligonucleotide
ucaguuuggagcucaaacg

SEQ ID NO: 1951598 - RNA, 19 nt, Artificial Sequence
  Description of Artificial Sequence: Synthetic oligonucleotide
aaacggaaagcuuucccac

SEQ ID NO: 1951599 - RNA, 19 nt, Artificial Sequence
  Description of Artificial Sequence: Synthetic oligonucleotide
ugugauugcuggcugaagg

SEQ ID NO: 1951600 - RNA, 19 nt, Artificial Sequence
  Description of Artificial Sequence: Synthetic oligonucleotide
ugaauuuugacugaaggcu

SEQ ID NO: 1951601 - RNA, 19 nt, Artificial Sequence
  Description of Artificial Sequence: Synthetic oligonucleotide
agcaugaauuaucuggugc

SEQ ID NO: 1951602 - RNA, 19 nt, Artificial Sequence
  Description of Artificial Sequence: Synthetic oligonucleotide
ugagccgugagcuacaacc

SEQ ID NO: 1951603 - RNA, 19 nt, Artificial Sequence
  Description of Artificial Sequence: Synthetic oligonucleotide
aucaguuuggagcucaaac

SEQ ID NO: 1951604 - RNA, 19 nt, Artificial Sequence
  Description of Artificial Sequence: Synthetic oligonucleotide
  modified_base (16)..(16): a, c, u, g, unknown or other
aaccaaaggcuuuugngca

SEQ ID NO: 1951605 - RNA, 19 nt, Artificial Sequence
  Description of Artificial Sequence: Synthetic oligonucleotide
agcauuacauuuguaaggc

SEQ ID NO: 1951606 - RNA, 19 nt, Artificial Sequence
  Description of Artificial Sequence: Synthetic oligonucleotide
uauaauuaggugugaacgc

SEQ ID NO: 1951607 - RNA, 19 nt, Artificial Sequence
  Description of Artificial Sequence: Synthetic oligonucleotide
uugagcuccgauuaaaagc

SEQ ID NO: 1951608 - RNA, 19 nt, Artificial Sequence
  Description of Artificial Sequence: Synthetic oligonucleotide
uugaauuuugacugaaggc

SEQ ID NO: 1951609 - RNA, 19 nt, Artificial Sequence
  Description of Artificial Sequence: Synthetic oligonucleotide
auaauuaggugugaacgcc

SEQ ID NO: 1951610 - RNA, 19 nt, Artificial Sequence
  Description of Artificial Sequence: Synthetic oligonucleotide
acaaucaacacacuuaaau

SEQ ID NO: 1951611 - RNA, 19 nt, Artificial Sequence
  Description of Artificial Sequence: Synthetic oligonucleotide
guugaauaagaugugagcc

SEQ ID NO: 1951612 - RNA, 19 nt, Artificial Sequence
  Description of Artificial Sequence: Synthetic oligonucleotide
cacaguaccacuuggcucg

SEQ ID NO: 1951613 - RNA, 19 nt, Artificial Sequence
  Description of Artificial Sequence: Synthetic oligonucleotide
agucgucacacacauaagg

SEQ ID NO: 1951614 - RNA, 19 nt, Artificial Sequence
  Description of Artificial Sequence: Synthetic oligonucleotide
ucaauaagguaugagcucc

SEQ ID NO: 1951615 - RNA, 19 nt, Artificial Sequence
  Description of Artificial Sequence: Synthetic oligonucleotide
aguguucacuuucuuagcg

SEQ ID NO: 1951616 - RNA, 19 nt, Artificial Sequence
  Description of Artificial Sequence: Synthetic oligonucleotide
ucauacuaaaggcuuuucc

SEQ ID NO: 1951617 - RNA, 19 nt, Artificial Sequence
  Description of Artificial Sequence: Synthetic oligonucleotide
uugaauaagaugugagccc

SEQ ID NO: 1951618 - RNA, 19 nt, Artificial Sequence
  Description of Artificial Sequence: Synthetic oligonucleotide
ugauggauaaggcuugagc

SEQ ID NO: 1951619 - RNA, 19 nt, Artificial Sequence
  Description of Artificial Sequence: Synthetic oligonucleotide
ugguguauaauuaggugug

SEQ ID NO: 1951620 - RNA, 19 nt, Artificial Sequence
  Description of Artificial Sequence: Synthetic oligonucleotide
aaagcuuugccacaagcau

SEQ ID NO: 1951621 - RNA, 19 nt, Artificial Sequence
  Description of Artificial Sequence: Synthetic oligonucleotide
  modified_base (18)..(18): a, c, u, g, unknown or other
acaaccaaaggcuuuugng

SEQ ID NO: 1951622 - RNA, 19 nt, Artificial Sequence
  Description of Artificial Sequence: Synthetic oligonucleotide
acaagcauuacauuuguaa

SEQ ID NO: 1951623 - RNA, 19 nt, Artificial Sequence
  Description of Artificial Sequence: Synthetic oligonucleotide
aauaagaugugagcccugg

SEQ ID NO: 1951624 - RNA, 19 nt, Artificial Sequence
  Description of Artificial Sequence: Synthetic oligonucleotide
uaagguaugagcuccggcu

SEQ ID NO: 1951625 - RNA, 19 nt, Artificial Sequence
  Description of Artificial Sequence: Synthetic oligonucleotide
gagagauccaccugaaagc

SEQ ID NO: 1951626 - RNA, 19 nt, Artificial Sequence
  Description of Artificial Sequence: Synthetic oligonucleotide
  modified_base (17)..(17): a, c, u, g, unknown or other
caaccaaaggcuuuugngc

SEQ ID NO: 1951627 - RNA, 19 nt, Artificial Sequence
  Description of Artificial Sequence: Synthetic oligonucleotide
acagucgucacacacauaa

SEQ ID NO: 1951628 - RNA, 19 nt, Artificial Sequence
  Description of Artificial Sequence: Synthetic oligonucleotide
uaugagcuccggcugaagg

SEQ ID NO: 1951629 - RNA, 19 nt, Artificial Sequence
  Description of Artificial Sequence: Synthetic oligonucleotide
uuuuacaguguucacuuuc

SEQ ID NO: 1951630 - RNA, 19 nt, Artificial Sequence
  Description of Artificial Sequence: Synthetic oligonucleotide
ugugcucauacuaaaggcu

SEQ ID NO: 1951631 - RNA, 19 nt, Artificial Sequence
  Description of Artificial Sequence: Synthetic oligonucleotide
cuuauggcaggguagggcc

SEQ ID NO: 1951632 - RNA, 19 nt, Artificial Sequence
  Description of Artificial Sequence: Synthetic oligonucleotide
cugaugguaaaugagacug

SEQ ID NO: 1951633 - RNA, 19 nt, Artificial Sequence
  Description of Artificial Sequence: Synthetic oligonucleotide
uagaguugcgcucuggcug

SEQ ID NO: 1951634 - RNA, 19 nt, Artificial Sequence
  Description of Artificial Sequence: Synthetic oligonucleotide
augauacugagcuagaguu

SEQ ID NO: 1951635 - RNA, 19 nt, Artificial Sequence
  Description of Artificial Sequence: Synthetic oligonucleotide
accuaaauauuuuaucaca

SEQ ID NO: 1951636 - RNA, 19 nt, Artificial Sequence
  Description of Artificial Sequence: Synthetic oligonucleotide
auaagguaugagcuccggc

SEQ ID NO: 1951637 - RNA, 19 nt, Artificial Sequence
  Description of Artificial Sequence: Synthetic oligonucleotide
gauacugagcuagaguugc

SEQ ID NO: 1951638 - RNA, 19 nt, Artificial Sequence
  Description of Artificial Sequence: Synthetic oligonucleotide
  modified_base (11)..(11): a, c, u, g, unknown or other
aaggcuuuugngcacuugu

SEQ ID NO: 1951639 - RNA, 19 nt, Artificial Sequence
  Description of Artificial Sequence: Synthetic oligonucleotide
caguuuggagcucaaacgg

SEQ ID NO: 1951640 - RNA, 19 nt, Artificial Sequence
  Description of Artificial Sequence: Synthetic oligonucleotide
aguaugaaucagccugugc

SEQ ID NO: 1951641 - RNA, 19 nt, Artificial Sequence
  Description of Artificial Sequence: Synthetic oligonucleotide
uuuacaguguucacuuucu

SEQ ID NO: 1951642 - RNA, 19 nt, Artificial Sequence
  Description of Artificial Sequence: Synthetic oligonucleotide
auggauaaggcuugagcuc

SEQ ID NO: 1951643 - RNA, 19 nt, Artificial Sequence
  Description of Artificial Sequence: Synthetic oligonucleotide
uaaggcuugagcucugacc

SEQ ID NO: 1951644 - RNA, 19 nt, Artificial Sequence
  Description of Artificial Sequence: Synthetic oligonucleotide
ucgaguguggauucucugg

SEQ ID NO: 1951645 - RNA, 19 nt, Artificial Sequence
  Description of Artificial Sequence: Synthetic oligonucleotide
aaucagccugugcugacuc

SEQ ID NO: 1951646 - RNA, 19 nt, Artificial Sequence
  Description of Artificial Sequence: Synthetic oligonucleotide
gauggauaaggcuugagcu

SEQ ID NO: 1951647 - RNA, 19 nt, Artificial Sequence
  Description of Artificial Sequence: Synthetic oligonucleotide
ugaugguaaaugagacugg

SEQ ID NO: 1951648 - RNA, 19 nt, Artificial Sequence
  Description of Artificial Sequence: Synthetic oligonucleotide
uggauagugagcugugugc

SEQ ID NO: 1951649 - RNA, 19 nt, Artificial Sequence
  Description of Artificial Sequence: Synthetic oligonucleotide
uugaugcuguaucaguuug

SEQ ID NO: 1951650 - RNA, 19 nt, Artificial Sequence
  Description of Artificial Sequence: Synthetic oligonucleotide
uccucugaugguaaaugag

SEQ ID NO: 1951651 - RNA, 19 nt, Artificial Sequence
  Description of Artificial Sequence: Synthetic oligonucleotide
ucugauggcgaaugagccg

SEQ ID NO: 1951652 - RNA, 19 nt, Artificial Sequence
  Description of Artificial Sequence: Synthetic oligonucleotide
cuccugacaacuauagggc

SEQ ID NO: 1951653 - RNA, 19 nt, Artificial Sequence
  Description of Artificial Sequence: Synthetic oligonucleotide
uucacaguaccacuuggcu

SEQ ID NO: 1951654 - RNA, 19 nt, Artificial Sequence
  Description of Artificial Sequence: Synthetic oligonucleotide
aauccucugaugguaaaug

SEQ ID NO: 1951655 - RNA, 19 nt, Artificial Sequence
  Description of Artificial Sequence: Synthetic oligonucleotide
acuuucuuagcguucaaaa

SEQ ID NO: 1951656 - RNA, 19 nt, Artificial Sequence
  Description of Artificial Sequence: Synthetic oligonucleotide
aauuaggugugaacgccac

SEQ ID NO: 1951657 - RNA, 19 nt, Artificial Sequence
  Description of Artificial Sequence: Synthetic oligonucleotide
aagguaugagcuccggcug

SEQ ID NO: 1951658 - RNA, 19 nt, Artificial Sequence
  Description of Artificial Sequence: Synthetic oligonucleotide
ugaauaagaugugagcccu

SEQ ID NO: 1951659 - RNA, 19 nt, Artificial Sequence
  Description of Artificial Sequence: Synthetic oligonucleotide
ugaugcuguaucaguuugg

SEQ ID NO: 1951660 - RNA, 19 nt, Artificial Sequence
  Description of Artificial Sequence: Synthetic oligonucleotide
gagacuggagcucuggcug

SEQ ID NO: 1951661 - RNA, 19 nt, Artificial Sequence
  Description of Artificial Sequence: Synthetic oligonucleotide
aguccucugaugucugacc

SEQ ID NO: 1951662 - RNA, 19 nt, Artificial Sequence
  Description of Artificial Sequence: Synthetic oligonucleotide
uccaaauucacaguaccac

SEQ ID NO: 1951663 - RNA, 19 nt, Artificial Sequence
  Description of Artificial Sequence: Synthetic oligonucleotide
acuuauggcaggguagggc

SEQ ID NO: 1951664 - RNA, 19 nt, Artificial Sequence
  Description of Artificial Sequence: Synthetic oligonucleotide
uucaauaagguaugagcuc

SEQ ID NO: 1951665 - RNA, 19 nt, Artificial Sequence
  Description of Artificial Sequence: Synthetic oligonucleotide
aauaagguaugagcuccgg

SEQ ID NO: 1951666 - RNA, 19 nt, Artificial Sequence
  Description of Artificial Sequence: Synthetic oligonucleotide
aacaguguuuccaaauuca

SEQ ID NO: 1951667 - RNA, 19 nt, Artificial Sequence
  Description of Artificial Sequence: Synthetic oligonucleotide
uaauuaggugugaacgcca

SEQ ID NO: 1951668 - RNA, 19 nt, Artificial Sequence
  Description of Artificial Sequence: Synthetic oligonucleotide
aaugagacuggagcucugg

SEQ ID NO: 1951669 - RNA, 19 nt, Artificial Sequence
  Description of Artificial Sequence: Synthetic oligonucleotide
ucuuugaugcuguaucagu

SEQ ID NO: 1951670 - RNA, 19 nt, Artificial Sequence
  Description of Artificial Sequence: Synthetic oligonucleotide
gaugcaugcauauggcuuc

SEQ ID NO: 1951671 - RNA, 19 nt, Artificial Sequence
  Description of Artificial Sequence: Synthetic oligonucleotide
aaggagcuacuuucaacag

SEQ ID NO: 1951672 - RNA, 19 nt, Artificial Sequence
  Description of Artificial Sequence: Synthetic oligonucleotide
ugauacugagcuagaguug

SEQ ID NO: 1951673 - RNA, 19 nt, Artificial Sequence
  Description of Artificial Sequence: Synthetic oligonucleotide
ugaccaaagguuuucccac

SEQ ID NO: 1951674 - RNA, 19 nt, Artificial Sequence
  Description of Artificial Sequence: Synthetic oligonucleotide
cucugauggcgaaugagcc

SEQ ID NO: 1951675 - RNA, 19 nt, Artificial Sequence
  Description of Artificial Sequence: Synthetic oligonucleotide
uuccaaauucacaguacca

SEQ ID NO: 1951676 - RNA, 19 nt, Artificial Sequence
  Description of Artificial Sequence: Synthetic oligonucleotide
ugguguucaauaagguaug

SEQ ID NO: 1951677 - RNA, 19 nt, Artificial Sequence
  Description of Artificial Sequence: Synthetic oligonucleotide
cucugaugguaaaugagac

SEQ ID NO: 1951678 - RNA, 19 nt, Artificial Sequence
  Description of Artificial Sequence: Synthetic oligonucleotide
aucacagucaucacacugg

SEQ ID NO: 1951679 - RNA, 19 nt, Artificial Sequence
  Description of Artificial Sequence: Synthetic oligonucleotide
uuaggugugaacgccaccu

SEQ ID NO: 1951680 - RNA, 19 nt, Artificial Sequence
  Description of Artificial Sequence: Synthetic oligonucleotide
caccuaaauauuuuaucac

SEQ ID NO: 1951681 - RNA, 19 nt, Artificial Sequence
  Description of Artificial Sequence: Synthetic oligonucleotide
cuucucucccuuaugaauc

SEQ ID NO: 1951682 - RNA, 19 nt, Artificial Sequence
  Description of Artificial Sequence: Synthetic oligonucleotide
acaacuauagggccuuucu

SEQ ID NO: 1951683 - RNA, 19 nt, Artificial Sequence
  Description of Artificial Sequence: Synthetic oligonucleotide
ugaauuaucuggugcugga

SEQ ID NO: 1951684 - RNA, 19 nt, Artificial Sequence
  Description of Artificial Sequence: Synthetic oligonucleotide
uuggaugcaugcauauggc

SEQ ID NO: 1951685 - RNA, 19 nt, Artificial Sequence
  Description of Artificial Sequence: Synthetic oligonucleotide
ccuaaauauuuuaucacag

SEQ ID NO: 1951686 - RNA, 19 nt, Artificial Sequence
  Description of Artificial Sequence: Synthetic oligonucleotide
auuaggugugaacgccacc

SEQ ID NO: 1951687 - RNA, 19 nt, Artificial Sequence
  Description of Artificial Sequence: Synthetic oligonucleotide
gugugcucauacuaaaggc

SEQ ID NO: 1951688 - RNA, 19 nt, Artificial Sequence
  Description of Artificial Sequence: Synthetic oligonucleotide
guaugaaucagccugugcu

SEQ ID NO: 1951689 - RNA, 19 nt, Artificial Sequence
  Description of Artificial Sequence: Synthetic oligonucleotide
ucaacaguguuuccaaauu

SEQ ID NO: 1951690 - RNA, 19 nt, Artificial Sequence
  Description of Artificial Sequence: Synthetic oligonucleotide
ucugaugguaaaugagacu

SEQ ID NO: 1951691 - RNA, 19 nt, Artificial Sequence
  Description of Artificial Sequence: Synthetic oligonucleotide
uccaccugaaagcuuuccc

SEQ ID NO: 1951692 - RNA, 19 nt, Artificial Sequence
  Description of Artificial Sequence: Synthetic oligonucleotide
auucuuugaugcuguauca

SEQ ID NO: 1951693 - RNA, 19 nt, Artificial Sequence
  Description of Artificial Sequence: Synthetic oligonucleotide
augaauuaucuggugcugg

SEQ ID NO: 1951694 - RNA, 19 nt, Artificial Sequence
  Description of Artificial Sequence: Synthetic oligonucleotide
ucgucacacacauaaggcu

SEQ ID NO: 1951695 - RNA, 19 nt, Artificial Sequence
  Description of Artificial Sequence: Synthetic oligonucleotide
ugaacccucugguggauag

SEQ ID NO: 1951696 - RNA, 19 nt, Artificial Sequence
  Description of Artificial Sequence: Synthetic oligonucleotide
uaaaugagacuggagcucu

SEQ ID NO: 1951697 - RNA, 19 nt, Artificial Sequence
  Description of Artificial Sequence: Synthetic oligonucleotide
cacacuuauggcaggguag

SEQ ID NO: 1951698 - RNA, 19 nt, Artificial Sequence
  Description of Artificial Sequence: Synthetic oligonucleotide
  modified_base (19)..(19): a, c, u, g, unknown or other
uacaaccaaaggcuuuugn

SEQ ID NO: 1951699 - RNA, 19 nt, Artificial Sequence
  Description of Artificial Sequence: Synthetic oligonucleotide
ugugaguccucugaugucu

SEQ ID NO: 1951700 - RNA, 19 nt, Artificial Sequence
  Description of Artificial Sequence: Synthetic oligonucleotide
uggauaaggcuugagcucu

SEQ ID NO: 1951701 - RNA, 19 nt, Artificial Sequence
  Description of Artificial Sequence: Synthetic oligonucleotide
uuaucuggugcuggaaaag

SEQ ID NO: 1951702 - RNA, 19 nt, Artificial Sequence
  Description of Artificial Sequence: Synthetic oligonucleotide
  modified_base (15)..(15): a, c, u, g, unknown or other
accaaaggcuuuugngcac

SEQ ID NO: 1951703 - RNA, 19 nt, Artificial Sequence
  Description of Artificial Sequence: Synthetic oligonucleotide
ucugguguucaauaaggua

SEQ ID NO: 1951704 - RNA, 19 nt, Artificial Sequence
  Description of Artificial Sequence: Synthetic oligonucleotide
uguaucaguuuggagcuca

SEQ ID NO: 1951705 - RNA, 19 nt, Artificial Sequence
  Description of Artificial Sequence: Synthetic oligonucleotide
ugccacaagcauuacauuu

SEQ ID NO: 1951706 - RNA, 19 nt, Artificial Sequence
  Description of Artificial Sequence: Synthetic oligonucleotide
uucuuugaugcuguaucag

SEQ ID NO: 1951707 - RNA, 19 nt, Artificial Sequence
  Description of Artificial Sequence: Synthetic oligonucleotide
ucucccuuaugaauccucu

SEQ ID NO: 1951708 - RNA, 19 nt, Artificial Sequence
  Description of Artificial Sequence: Synthetic oligonucleotide
agccugugcugacucaggc

SEQ ID NO: 1951709 - RNA, 19 nt, Artificial Sequence
  Description of Artificial Sequence: Synthetic oligonucleotide
uccugacaacuauagggcc

SEQ ID NO: 1951710 - RNA, 19 nt, Artificial Sequence
  Description of Artificial Sequence: Synthetic oligonucleotide
acaguguuuccaaauucac

SEQ ID NO: 1951711 - RNA, 19 nt, Artificial Sequence
  Description of Artificial Sequence: Synthetic oligonucleotide
acacuuauggcaggguagg

SEQ ID NO: 1951712 - RNA, 19 nt, Artificial Sequence
  Description of Artificial Sequence: Synthetic oligonucleotide
cucugaugauggauaaggc

SEQ ID NO: 1951713 - RNA, 19 nt, Artificial Sequence
  Description of Artificial Sequence: Synthetic oligonucleotide
ugagacuggagcucuggcu

SEQ ID NO: 1951714 - RNA, 19 nt, Artificial Sequence
  Description of Artificial Sequence: Synthetic oligonucleotide
  modified_base (8)..(8): a, c, u, g, unknown or other
gcuuuugngcacuuguugc

SEQ ID NO: 1951715 - RNA, 19 nt, Artificial Sequence
  Description of Artificial Sequence: Synthetic oligonucleotide
ucaugauacugagcuagag

SEQ ID NO: 1951716 - RNA, 19 nt, Artificial Sequence
  Description of Artificial Sequence: Synthetic oligonucleotide
cacuuguugcacuuauaag

SEQ ID NO: 1951717 - RNA, 19 nt, Artificial Sequence
  Description of Artificial Sequence: Synthetic oligonucleotide
ucaucacauuuuaaauggu

SEQ ID NO: 1951718 - RNA, 19 nt, Artificial Sequence
  Description of Artificial Sequence: Synthetic oligonucleotide
uuugaugcuguaucaguuu

SEQ ID NO: 1951719 - RNA, 19 nt, Artificial Sequence
  Description of Artificial Sequence: Synthetic oligonucleotide
gugaacgccaccuaaauau

SEQ ID NO: 1951720 - RNA, 19 nt, Artificial Sequence
  Description of Artificial Sequence: Synthetic oligonucleotide
  modified_base (7)..(7): a, c, u, g, unknown or other
cuuuugngcacuuguugca

SEQ ID NO: 1951721 - RNA, 19 nt, Artificial Sequence
  Description of Artificial Sequence: Synthetic oligonucleotide
caaacggaaagcuuuccca

SEQ ID NO: 1951722 - RNA, 19 nt, Artificial Sequence
  Description of Artificial Sequence: Synthetic oligonucleotide
caauaagguaugagcuccg

SEQ ID NO: 1951723 - RNA, 19 nt, Artificial Sequence
  Description of Artificial Sequence: Synthetic oligonucleotide
ucacaguaccacuuggcuc

SEQ ID NO: 1951724 - RNA, 19 nt, Artificial Sequence
  Description of Artificial Sequence: Synthetic oligonucleotide
gugauugcuggcugaaggc

SEQ ID NO: 1951725 - RNA, 19 nt, Artificial Sequence
  Description of Artificial Sequence: Synthetic oligonucleotide
uggcgaaugagccgugagc

SEQ ID NO: 1951726 - RNA, 19 nt, Artificial Sequence
  Description of Artificial Sequence: Synthetic oligonucleotide
ucaacacacuuaaaugguu

SEQ ID NO: 1951727 - RNA, 19 nt, Artificial Sequence
  Description of Artificial Sequence: Synthetic oligonucleotide
ggagcuacuuucaacagug

SEQ ID NO: 1951728 - RNA, 19 nt, Artificial Sequence
  Description of Artificial Sequence: Synthetic oligonucleotide
gaugguaaaugagacugga

SEQ ID NO: 1951729 - RNA, 19 nt, Artificial Sequence
  Description of Artificial Sequence: Synthetic oligonucleotide
ucucccgguaugaauucgc

SEQ ID NO: 1951730 - RNA, 19 nt, Artificial Sequence
  Description of Artificial Sequence: Synthetic oligonucleotide
  modified_base (5)..(5): a, c, u, g, unknown or other
uuugngcacuuguugcacu

SEQ ID NO: 1951731 - RNA, 19 nt, Artificial Sequence
  Description of Artificial Sequence: Synthetic oligonucleotide
gaaaagaguugaauuuuga

SEQ ID NO: 1951732 - RNA, 19 nt, Artificial Sequence
  Description of Artificial Sequence: Synthetic oligonucleotide
cuugagcucugaccaaagg

SEQ ID NO: 1951733 - RNA, 19 nt, Artificial Sequence
  Description of Artificial Sequence: Synthetic oligonucleotide
guucaauaagguaugagcu

SEQ ID NO: 1951734 - RNA, 19 nt, Artificial Sequence
  Description of Artificial Sequence: Synthetic oligonucleotide
gucgucacacacauaaggc

SEQ ID NO: 1951735 - RNA, 19 nt, Artificial Sequence
  Description of Artificial Sequence: Synthetic oligonucleotide
aucaacacacuuaaauggu

SEQ ID NO: 1951736 - RNA, 19 nt, Artificial Sequence
  Description of Artificial Sequence: Synthetic oligonucleotide
guggauagugagcugugug

SEQ ID NO: 1951737 - RNA, 19 nt, Artificial Sequence
  Description of Artificial Sequence: Synthetic oligonucleotide
  modified_base (6)..(6): a, c, u, g, unknown or other
uuuugngcacuuguugcac

SEQ ID NO: 1951738 - RNA, 19 nt, Artificial Sequence
  Description of Artificial Sequence: Synthetic oligonucleotide
uaaggcuucgucucccggu

SEQ ID NO: 1951739 - RNA, 19 nt, Artificial Sequence
  Description of Artificial Sequence: Synthetic oligonucleotide
acugagcuagaguugcgcu

SEQ ID NO: 1951740 - RNA, 19 nt, Artificial Sequence
  Description of Artificial Sequence: Synthetic oligonucleotide
ugagcugugugcucauacu

SEQ ID NO: 1951741 - RNA, 19 nt, Artificial Sequence
  Description of Artificial Sequence: Synthetic oligonucleotide
aacccucugguggauagug

SEQ ID NO: 1951742 - RNA, 19 nt, Artificial Sequence
  Description of Artificial Sequence: Synthetic oligonucleotide
agagauccaccugaaagcu

SEQ ID NO: 1951743 - RNA, 19 nt, Artificial Sequence
  Description of Artificial Sequence: Synthetic oligonucleotide
cacuccagcaugaauuauc

SEQ ID NO: 1951744 - RNA, 19 nt, Artificial Sequence
  Description of Artificial Sequence: Synthetic oligonucleotide
uuuggagcucaaacggaaa

SEQ ID NO: 1951745 - RNA, 19 nt, Artificial Sequence
  Description of Artificial Sequence: Synthetic oligonucleotide
acucaggcgagagauccac

SEQ ID NO: 1951746 - RNA, 19 nt, Artificial Sequence
  Description of Artificial Sequence: Synthetic oligonucleotide
ugaccagcugugauugcug

SEQ ID NO: 1951747 - RNA, 19 nt, Artificial Sequence
  Description of Artificial Sequence: Synthetic oligonucleotide
cugguguauaauuaggugu

SEQ ID NO: 1951748 - RNA, 19 nt, Artificial Sequence
  Description of Artificial Sequence: Synthetic oligonucleotide
uucacuccagcaugaauua

SEQ ID NO: 1951749 - RNA, 19 nt, Artificial Sequence
  Description of Artificial Sequence: Synthetic oligonucleotide
ugugaacgccaccuaaaua

SEQ ID NO: 1951750 - RNA, 19 nt, Artificial Sequence
  Description of Artificial Sequence: Synthetic oligonucleotide
uggaugcaugcauauggcu

SEQ ID NO: 1951751 - RNA, 19 nt, Artificial Sequence
  Description of Artificial Sequence: Synthetic oligonucleotide
cugaccaaagguuuuccca

SEQ ID NO: 1951752 - RNA, 19 nt, Artificial Sequence
  Description of Artificial Sequence: Synthetic oligonucleotide
ucgucucccgguaugaauu

SEQ ID NO: 1951753 - RNA, 19 nt, Artificial Sequence
  Description of Artificial Sequence: Synthetic oligonucleotide
cacuccucaugauacugag

SEQ ID NO: 1951754 - RNA, 19 nt, Artificial Sequence
  Description of Artificial Sequence: Synthetic oligonucleotide
cuccucaugauacugagcu

SEQ ID NO: 1951755 - RNA, 19 nt, Artificial Sequence
  Description of Artificial Sequence: Synthetic oligonucleotide
cugugugcucauacuaaag

SEQ ID NO: 1951756 - RNA, 19 nt, Artificial Sequence
  Description of Artificial Sequence: Synthetic oligonucleotide
caccugaaagcuuucccac

SEQ ID NO: 1951757 - RNA, 19 nt, Artificial Sequence
  Description of Artificial Sequence: Synthetic oligonucleotide
aggagcuacuuucaacagu

SEQ ID NO: 1951758 - RNA, 19 nt, Artificial Sequence
  Description of Artificial Sequence: Synthetic oligonucleotide
cuuguugcacuuauaaggu

SEQ ID NO: 1951759 - RNA, 19 nt, Artificial Sequence
  Description of Artificial Sequence: Synthetic oligonucleotide
aguaccacuuggcucgagu

SEQ ID NO: 1951760 - RNA, 19 nt, Artificial Sequence
  Description of Artificial Sequence: Synthetic oligonucleotide
auagugagcugugugcuca

SEQ ID NO: 1951761 - RNA, 19 nt, Artificial Sequence
  Description of Artificial Sequence: Synthetic oligonucleotide
cauaaggcuucgucucccg

SEQ ID NO: 1951762 - RNA, 19 nt, Artificial Sequence
  Description of Artificial Sequence: Synthetic oligonucleotide
ugagccuugagcuccgauu

SEQ ID NO: 1951763 - RNA, 19 nt, Artificial Sequence
  Description of Artificial Sequence: Synthetic oligonucleotide
guaccacuuggcucgagug

SEQ ID NO: 1951764 - RNA, 19 nt, Artificial Sequence
  Description of Artificial Sequence: Synthetic oligonucleotide
cgauuaaaagcuuugccac

SEQ ID NO: 1951765 - RNA, 19 nt, Artificial Sequence
  Description of Artificial Sequence: Synthetic oligonucleotide
uaccacuuggcucgagugu

SEQ ID NO: 1951766 - RNA, 19 nt, Artificial Sequence
  Description of Artificial Sequence: Synthetic oligonucleotide
cacauaaggcuucgucucc

SEQ ID NO: 1951767 - RNA, 19 nt, Artificial Sequence
  Description of Artificial Sequence: Synthetic oligonucleotide
acauuggaugcaugcauau

SEQ ID NO: 1951768 - RNA, 19 nt, Artificial Sequence
  Description of Artificial Sequence: Synthetic oligonucleotide
uacugagcuagaguugcgc

SEQ ID NO: 1951769 - RNA, 19 nt, Artificial Sequence
  Description of Artificial Sequence: Synthetic oligonucleotide
  modified_base (9)..(9): a, c, u, g, unknown or other
ggcuuuugngcacuuguug

SEQ ID NO: 1951770 - RNA, 19 nt, Artificial Sequence
  Description of Artificial Sequence: Synthetic oligonucleotide
uccacauuggaugcaugca

SEQ ID NO: 1951771 - RNA, 19 nt, Artificial Sequence
  Description of Artificial Sequence: Synthetic oligonucleotide
ucacacacauaaggcuucg

SEQ ID NO: 1951772 - RNA, 19 nt, Artificial Sequence
  Description of Artificial Sequence: Synthetic oligonucleotide
auauuuuaucacagucauc

SEQ ID NO: 1951773 - RNA, 19 nt, Artificial Sequence
  Description of Artificial Sequence: Synthetic oligonucleotide
agaguugcgcucuggcuga

SEQ ID NO: 1951774 - RNA, 19 nt, Artificial Sequence
  Description of Artificial Sequence: Synthetic oligonucleotide
aggcgagagauccaccuga

SEQ ID NO: 1951775 - RNA, 19 nt, Artificial Sequence
  Description of Artificial Sequence: Synthetic oligonucleotide
guuuccaaauucacaguac

SEQ ID NO: 1951776 - RNA, 19 nt, Artificial Sequence
  Description of Artificial Sequence: Synthetic oligonucleotide
caguguucacuuucuuagc

SEQ ID NO: 1951777 - RNA, 19 nt, Artificial Sequence
  Description of Artificial Sequence: Synthetic oligonucleotide
aauuuugacugaaggcuuu

SEQ ID NO: 1951778 - RNA, 19 nt, Artificial Sequence
  Description of Artificial Sequence: Synthetic oligonucleotide
ccaccuaaauauuuuauca

SEQ ID NO: 1951779 - RNA, 19 nt, Artificial Sequence
  Description of Artificial Sequence: Synthetic oligonucleotide
gguaaaugagacuggagcu

SEQ ID NO: 1951780 - RNA, 19 nt, Artificial Sequence
  Description of Artificial Sequence: Synthetic oligonucleotide
agcuacuuucaacaguguu

SEQ ID NO: 1951781 - RNA, 19 nt, Artificial Sequence
  Description of Artificial Sequence: Synthetic oligonucleotide
ggaaaagaguugaauuuug

SEQ ID NO: 1951782 - RNA, 19 nt, Artificial Sequence
  Description of Artificial Sequence: Synthetic oligonucleotide
gauagugagcugugugcuc

SEQ ID NO: 1951783 - RNA, 19 nt, Artificial Sequence
  Description of Artificial Sequence: Synthetic oligonucleotide
caacuauagggccuuucuc

SEQ ID NO: 1951784 - RNA, 19 nt, Artificial Sequence
  Description of Artificial Sequence: Synthetic oligonucleotide
auggcgaaugagccgugag

SEQ ID NO: 1951785 - RNA, 19 nt, Artificial Sequence
  Description of Artificial Sequence: Synthetic oligonucleotide
ucccacacuccugacaacu

SEQ ID NO: 1951786 - RNA, 19 nt, Artificial Sequence
  Description of Artificial Sequence: Synthetic oligonucleotide
ugugagcccuggacaaagc

SEQ ID NO: 1951787 - RNA, 19 nt, Artificial Sequence
  Description of Artificial Sequence: Synthetic oligonucleotide
agcucaaacggaaagcuuu

SEQ ID NO: 1951788 - RNA, 19 nt, Artificial Sequence
  Description of Artificial Sequence: Synthetic oligonucleotide
gugagcccuggacaaagcc

SEQ ID NO: 1951789 - RNA, 19 nt, Artificial Sequence
  Description of Artificial Sequence: Synthetic oligonucleotide
cuccgauuaaaagcuuugc

SEQ ID NO: 1951790 - RNA, 19 nt, Artificial Sequence
  Description of Artificial Sequence: Synthetic oligonucleotide
ugguggauagugagcugug

SEQ ID NO: 1951791 - RNA, 19 nt, Artificial Sequence
  Description of Artificial Sequence: Synthetic oligonucleotide
ugucugaccagcugugauu

SEQ ID NO: 1951792 - RNA, 19 nt, Artificial Sequence
  Description of Artificial Sequence: Synthetic oligonucleotide
ccucaugauacugagcuag

SEQ ID NO: 1951793 - RNA, 19 nt, Artificial Sequence
  Description of Artificial Sequence: Synthetic oligonucleotide
accacuuggcucgagugug

SEQ ID NO: 1951794 - RNA, 19 nt, Artificial Sequence
  Description of Artificial Sequence: Synthetic oligonucleotide
cacuccugacaacuauagg

SEQ ID NO: 1951795 - RNA, 19 nt, Artificial Sequence
  Description of Artificial Sequence: Synthetic oligonucleotide
augcuguaucaguuuggag

SEQ ID NO: 1951796 - RNA, 19 nt, Artificial Sequence
  Description of Artificial Sequence: Synthetic oligonucleotide
cugagcuagaguugcgcuc

SEQ ID NO: 1951797 - RNA, 19 nt, Artificial Sequence
  Description of Artificial Sequence: Synthetic oligonucleotide
caguguuuccaaauucaca

SEQ ID NO: 1951798 - RNA, 19 nt, Artificial Sequence
  Description of Artificial Sequence: Synthetic oligonucleotide
gagccuugagcuccgauua

SEQ ID NO: 1951799 - RNA, 19 nt, Artificial Sequence
  Description of Artificial Sequence: Synthetic oligonucleotide
ucccacacuccucaugaua

SEQ ID NO: 1951800 - RNA, 19 nt, Artificial Sequence
  Description of Artificial Sequence: Synthetic oligonucleotide
ugaauccucugaugguaaa

SEQ ID NO: 1951801 - RNA, 19 nt, Artificial Sequence
  Description of Artificial Sequence: Synthetic oligonucleotide
  modified_base (4)..(4): a, c, u, g, unknown or other
uugngcacuuguugcacuu

SEQ ID NO: 1951802 - RNA, 19 nt, Artificial Sequence
  Description of Artificial Sequence: Synthetic oligonucleotide
cacacauaaggcuucgucu

SEQ ID NO: 1951803 - RNA, 19 nt, Artificial Sequence
  Description of Artificial Sequence: Synthetic oligonucleotide
augaaucagccugugcuga

SEQ ID NO: 1951804 - RNA, 19 nt, Artificial Sequence
  Description of Artificial Sequence: Synthetic oligonucleotide
ugcucauacuaaaggcuuu

SEQ ID NO: 1951805 - RNA, 19 nt, Artificial Sequence
  Description of Artificial Sequence: Synthetic oligonucleotide
uucgucucccgguaugaau

SEQ ID NO: 1951806 - RNA, 19 nt, Artificial Sequence
  Description of Artificial Sequence: Synthetic oligonucleotide
aacgccaccuaaauauuuu

SEQ ID NO: 1951807 - RNA, 19 nt, Artificial Sequence
  Description of Artificial Sequence: Synthetic oligonucleotide
augguaaaugagacuggag

SEQ ID NO: 1951808 - RNA, 19 nt, Artificial Sequence
  Description of Artificial Sequence: Synthetic oligonucleotide
uacuuucaacaguguuucc

SEQ ID NO: 1951809 - RNA, 19 nt, Artificial Sequence
  Description of Artificial Sequence: Synthetic oligonucleotide
agauccaccugaaagcuuu

SEQ ID NO: 1951810 - RNA, 19 nt, Artificial Sequence
  Description of Artificial Sequence: Synthetic oligonucleotide
augucugaccagcugugau

SEQ ID NO: 1951811 - RNA, 19 nt, Artificial Sequence
  Description of Artificial Sequence: Synthetic oligonucleotide
gccaccuaaauauuuuauc

SEQ ID NO: 1951812 - RNA, 19 nt, Artificial Sequence
  Description of Artificial Sequence: Synthetic oligonucleotide
cucaaacggaaagcuuucc

SEQ ID NO: 1951813 - RNA, 19 nt, Artificial Sequence
  Description of Artificial Sequence: Synthetic oligonucleotide
guccucugaugucugacca

SEQ ID NO: 1951814 - RNA, 19 nt, Artificial Sequence
  Description of Artificial Sequence: Synthetic oligonucleotide
gaccaaagguuuucccaca

SEQ ID NO: 1951815 - RNA, 19 nt, Artificial Sequence
  Description of Artificial Sequence: Synthetic oligonucleotide
gaauaagaugugagcccug

SEQ ID NO: 1951816 - RNA, 19 nt, Artificial Sequence
  Description of Artificial Sequence: Synthetic oligonucleotide
agguaugagcuccggcuga

SEQ ID NO: 1951817 - RNA, 19 nt, Artificial Sequence
  Description of Artificial Sequence: Synthetic oligonucleotide
cagcaugaauuaucuggug

SEQ ID NO: 1951818 - RNA, 19 nt, Artificial Sequence
  Description of Artificial Sequence: Synthetic oligonucleotide
aguuuggagcucaaacgga

SEQ ID NO: 1951819 - RNA, 19 nt, Artificial Sequence
  Description of Artificial Sequence: Synthetic oligonucleotide
gcuagaguugcgcucuggc

SEQ ID NO: 1951820 - RNA, 19 nt, Artificial Sequence
  Description of Artificial Sequence: Synthetic oligonucleotide
aggugugaacgccaccuaa

SEQ ID NO: 1951821 - RNA, 19 nt, Artificial Sequence
  Description of Artificial Sequence: Synthetic oligonucleotide
gagcugugugcucauacua

SEQ ID NO: 1951822 - RNA, 19 nt, Artificial Sequence
  Description of Artificial Sequence: Synthetic oligonucleotide
cucucccuuaugaauccuc

SEQ ID NO: 1951823 - RNA, 19 nt, Artificial Sequence
  Description of Artificial Sequence: Synthetic oligonucleotide
caugauacugagcuagagu

SEQ ID NO: 1951824 - RNA, 19 nt, Artificial Sequence
  Description of Artificial Sequence: Synthetic oligonucleotide
cauuggaugcaugcauaug

SEQ ID NO: 1951825 - RNA, 19 nt, Artificial Sequence
  Description of Artificial Sequence: Synthetic oligonucleotide
augagccgugagcuacaac

SEQ ID NO: 1951826 - RNA, 19 nt, Artificial Sequence
  Description of Artificial Sequence: Synthetic oligonucleotide
ugugcugacucaggcgaga

SEQ ID NO: 1951827 - RNA, 19 nt, Artificial Sequence
  Description of Artificial Sequence: Synthetic oligonucleotide
aaaugagacuggagcucug

SEQ ID NO: 1951828 - RNA, 19 nt, Artificial Sequence
  Description of Artificial Sequence: Synthetic oligonucleotide
agcugugauugcuggcuga

SEQ ID NO: 1951829 - RNA, 19 nt, Artificial Sequence
  Description of Artificial Sequence: Synthetic oligonucleotide
gcuguaucaguuuggagcu

SEQ ID NO: 1951830 - RNA, 19 nt, Artificial Sequence
  Description of Artificial Sequence: Synthetic oligonucleotide
augauggauaaggcuugag

SEQ ID NO: 1951831 - RNA, 19 nt, Artificial Sequence
  Description of Artificial Sequence: Synthetic oligonucleotide
cagucgucacacacauaag

SEQ ID NO: 1951832 - RNA, 19 nt, Artificial Sequence
  Description of Artificial Sequence: Synthetic oligonucleotide
gaauuaucuggugcuggaa

SEQ ID NO: 1951833 - RNA, 19 nt, Artificial Sequence
  Description of Artificial Sequence: Synthetic oligonucleotide
agacuggagcucuggcuga

SEQ ID NO: 1951834 - RNA, 19 nt, Artificial Sequence
  Description of Artificial Sequence: Synthetic oligonucleotide
guugcacuuauaaggucuc

SEQ ID NO: 1951835 - RNA, 19 nt, Artificial Sequence
  Description of Artificial Sequence: Synthetic oligonucleotide
gacaacuauagggccuuuc

SEQ ID NO: 1951836 - RNA, 19 nt, Artificial Sequence
  Description of Artificial Sequence: Synthetic oligonucleotide
gcaugaauuaucuggugcu

SEQ ID NO: 1951837 - RNA, 19 nt, Artificial Sequence
  Description of Artificial Sequence: Synthetic oligonucleotide
cugaugucugaccagcugu

SEQ ID NO: 1951838 - RNA, 19 nt, Artificial Sequence
  Description of Artificial Sequence: Synthetic oligonucleotide
gaauuuugacugaaggcuu

SEQ ID NO: 1951839 - RNA, 19 nt, Artificial Sequence
  Description of Artificial Sequence: Synthetic oligonucleotide
cuuugaugcuguaucaguu

SEQ ID NO: 1951840 - RNA, 19 nt, Artificial Sequence
  Description of Artificial Sequence: Synthetic oligonucleotide
auacugagcuagaguugcg

SEQ ID NO: 1951841 - RNA, 19 nt, Artificial Sequence
  Description of Artificial Sequence: Synthetic oligonucleotide
cucaggcgagagauccacc

SEQ ID NO: 1951842 - RNA, 19 nt, Artificial Sequence
  Description of Artificial Sequence: Synthetic oligonucleotide
cacauuggaugcaugcaua

SEQ ID NO: 1951843 - RNA, 19 nt, Artificial Sequence
  Description of Artificial Sequence: Synthetic oligonucleotide
ugauggcgaaugagccgug

SEQ ID NO: 1951844 - RNA, 19 nt, Artificial Sequence
  Description of Artificial Sequence: Synthetic oligonucleotide
cucauacuaaaggcuuuuc

SEQ ID NO: 1951845 - RNA, 19 nt, Artificial Sequence
  Description of Artificial Sequence: Synthetic oligonucleotide
cucaugauacugagcuaga

SEQ ID NO: 1951846 - RNA, 19 nt, Artificial Sequence
  Description of Artificial Sequence: Synthetic oligonucleotide
acgccaccuaaauauuuua

SEQ ID NO: 1951847 - RNA, 19 nt, Artificial Sequence
  Description of Artificial Sequence: Synthetic oligonucleotide
cacuuauggcaggguaggg

SEQ ID NO: 1951848 - RNA, 19 nt, Artificial Sequence
  Description of Artificial Sequence: Synthetic oligonucleotide
cugugcugacucaggcgag

SEQ ID NO: 1951849 - RNA, 19 nt, Artificial Sequence
  Description of Artificial Sequence: Synthetic oligonucleotide
uaggugugaacgccaccua

SEQ ID NO: 1951850 - RNA, 19 nt, Artificial Sequence
  Description of Artificial Sequence: Synthetic oligonucleotide
gucucccgguaugaauucg

SEQ ID NO: 1951851 - RNA, 19 nt, Artificial Sequence
  Description of Artificial Sequence: Synthetic oligonucleotide
uccucaugauacugagcua

SEQ ID NO: 1951852 - RNA, 19 nt, Artificial Sequence
  Description of Artificial Sequence: Synthetic oligonucleotide
ccgugagcuacaaccaaag

SEQ ID NO: 1951853 - RNA, 19 nt, Artificial Sequence
  Description of Artificial Sequence: Synthetic oligonucleotide
ucacuuucuuagcguucaa

SEQ ID NO: 1951854 - RNA, 19 nt, Artificial Sequence
  Description of Artificial Sequence: Synthetic oligonucleotide
agcuagaguugcgcucugg

SEQ ID NO: 1951855 - RNA, 19 nt, Artificial Sequence
  Description of Artificial Sequence: Synthetic oligonucleotide
uauggcaggguagggccuc

SEQ ID NO: 1951856 - RNA, 19 nt, Artificial Sequence
  Description of Artificial Sequence: Synthetic oligonucleotide
cagucaucacacuggugca

SEQ ID NO: 1951857 - RNA, 19 nt, Artificial Sequence
  Description of Artificial Sequence: Synthetic oligonucleotide
cacauucaucacauuuuaa

SEQ ID NO: 1951858 - RNA, 19 nt, Artificial Sequence
  Description of Artificial Sequence: Synthetic oligonucleotide
agcugugugcucauacuaa

SEQ ID NO: 1951859 - RNA, 19 nt, Artificial Sequence
  Description of Artificial Sequence: Synthetic oligonucleotide
gagccgugagcuacaacca

SEQ ID NO: 1951860 - RNA, 19 nt, Artificial Sequence
  Description of Artificial Sequence: Synthetic oligonucleotide
gaauucuuugaugcuguau

SEQ ID NO: 1951861 - RNA, 19 nt, Artificial Sequence
  Description of Artificial Sequence: Synthetic oligonucleotide
ccugugcugacucaggcga

SEQ ID NO: 1951862 - RNA, 19 nt, Artificial Sequence
  Description of Artificial Sequence: Synthetic oligonucleotide
agccgugagcuacaaccaa

SEQ ID NO: 1951863 - RNA, 19 nt, Artificial Sequence
  Description of Artificial Sequence: Synthetic oligonucleotide
acuacacuuauagggccuu

SEQ ID NO: 1951864 - RNA, 19 nt, Artificial Sequence
  Description of Artificial Sequence: Synthetic oligonucleotide
gaaugagccgugagcuaca

SEQ ID NO: 1951865 - RNA, 19 nt, Artificial Sequence
  Description of Artificial Sequence: Synthetic oligonucleotide
cuacaaccaaaggcuuuug

SEQ ID NO: 1951866 - RNA, 19 nt, Artificial Sequence
  Description of Artificial Sequence: Synthetic oligonucleotide
gcuccgauuaaaagcuuug

SEQ ID NO: 1951867 - RNA, 19 nt, Artificial Sequence
  Description of Artificial Sequence: Synthetic oligonucleotide
cugacucaggcgagagauc

SEQ ID NO: 1951868 - RNA, 19 nt, Artificial Sequence
  Description of Artificial Sequence: Synthetic oligonucleotide
gagcccuggacaaagcccu

SEQ ID NO: 1951869 - RNA, 19 nt, Artificial Sequence
  Description of Artificial Sequence: Synthetic oligonucleotide
cuagaguugcgcucuggcu

SEQ ID NO: 1951870 - RNA, 19 nt, Artificial Sequence
  Description of Artificial Sequence: Synthetic oligonucleotide
caguaugaaucagccugug

SEQ ID NO: 1951871 - RNA, 19 nt, Artificial Sequence
  Description of Artificial Sequence: Synthetic oligonucleotide
agucaucacacuggugcaa

SEQ ID NO: 1951872 - RNA, 19 nt, Artificial Sequence
  Description of Artificial Sequence: Synthetic oligonucleotide
cagcugugauugcuggcug

SEQ ID NO: 1951873 - RNA, 19 nt, Artificial Sequence
  Description of Artificial Sequence: Synthetic oligonucleotide
  modified_base (3)..(3): a, c, u, g, unknown or other
ugngcacuuguugcacuua

SEQ ID NO: 1951874 - RNA, 19 nt, Artificial Sequence
  Description of Artificial Sequence: Synthetic oligonucleotide
ugcuggcugaaggcuuucc

SEQ ID NO: 1951875 - RNA, 19 nt, Artificial Sequence
  Description of Artificial Sequence: Synthetic oligonucleotide
cugauggcgaaugagccgu

SEQ ID NO: 1951876 - RNA, 19 nt, Artificial Sequence
  Description of Artificial Sequence: Synthetic oligonucleotide
cugugauugcuggcugaag

SEQ ID NO: 1951877 - RNA, 19 nt, Artificial Sequence
  Description of Artificial Sequence: Synthetic oligonucleotide
guguuuccaaauucacagu

SEQ ID NO: 1951878 - RNA, 19 nt, Artificial Sequence
  Description of Artificial Sequence: Synthetic oligonucleotide
  modified_base (10)..(10): a, c, u, g, unknown or other
aggcuuuugngcacuuguu

SEQ ID NO: 1951879 - RNA, 19 nt, Artificial Sequence
  Description of Artificial Sequence: Synthetic oligonucleotide
ucucucccuuaugaauccu

SEQ ID NO: 1951880 - RNA, 19 nt, Artificial Sequence
  Description of Artificial Sequence: Synthetic oligonucleotide
ccaccugaaagcuuuccca

SEQ ID NO: 1951881 - RNA, 19 nt, Artificial Sequence
  Description of Artificial Sequence: Synthetic oligonucleotide
  modified_base (2)..(2): a, c, u, g, unknown or other
gngcacuuguugcacuuau

SEQ ID NO: 1951882 - RNA, 19 nt, Artificial Sequence
  Description of Artificial Sequence: Synthetic oligonucleotide
gugcugacucaggcgagag

SEQ ID NO: 1951883 - RNA, 19 nt, Artificial Sequence
  Description of Artificial Sequence: Synthetic oligonucleotide
gauggcgaaugagccguga

SEQ ID NO: 1951884 - RNA, 19 nt, Artificial Sequence
  Description of Artificial Sequence: Synthetic oligonucleotide
gaauucgcugauguugaau

SEQ ID NO: 1951885 - RNA, 19 nt, Artificial Sequence
  Description of Artificial Sequence: Synthetic oligonucleotide
agcuccgauuaaaagcuuu

SEQ ID NO: 1951886 - RNA, 19 nt, Artificial Sequence
  Description of Artificial Sequence: Synthetic oligonucleotide
ucacuccagcaugaauuau

SEQ ID NO: 1951887 - RNA, 19 nt, Artificial Sequence
  Description of Artificial Sequence: Synthetic oligonucleotide
gcugugugcucauacuaaa

SEQ ID NO: 1951888 - RNA, 19 nt, Artificial Sequence
  Description of Artificial Sequence: Synthetic oligonucleotide
gaauccucugaugguaaau

SEQ ID NO: 1951889 - RNA, 19 nt, Artificial Sequence
  Description of Artificial Sequence: Synthetic oligonucleotide
guaugagcuccggcugaag

SEQ ID NO: 1951890 - RNA, 19 nt, Artificial Sequence
  Description of Artificial Sequence: Synthetic oligonucleotide
ggcgaaugagccgugagcu

SEQ ID NO: 1951891 - RNA, 19 nt, Artificial Sequence
  Description of Artificial Sequence: Synthetic oligonucleotide
gagcuagaguugcgcucug

SEQ ID NO: 1951892 - RNA, 19 nt, Artificial Sequence
  Description of Artificial Sequence: Synthetic oligonucleotide
agcuacaaccaaaggcuuu

SEQ ID NO: 1951893 - RNA, 19 nt, Artificial Sequence
  Description of Artificial Sequence: Synthetic oligonucleotide
gaugugagcccuggacaaa

SEQ ID NO: 1951894 - RNA, 19 nt, Artificial Sequence
  Description of Artificial Sequence: Synthetic oligonucleotide
cacuacacuuauagggccu

SEQ ID NO: 1951895 - RNA, 19 nt, Artificial Sequence
  Description of Artificial Sequence: Synthetic oligonucleotide
gguguauaauuagguguga

SEQ ID NO: 1951896 - RNA, 19 nt, Artificial Sequence
  Description of Artificial Sequence: Synthetic oligonucleotide
uucccacacuccucaugau

SEQ ID NO: 1951897 - RNA, 19 nt, Artificial Sequence
  Description of Artificial Sequence: Synthetic oligonucleotide
cgaaugagccgugagcuac

SEQ ID NO: 1951898 - RNA, 19 nt, Artificial Sequence
  Description of Artificial Sequence: Synthetic oligonucleotide
uagugagcugugugcucau

SEQ ID NO: 1951899 - RNA, 19 nt, Artificial Sequence
  Description of Artificial Sequence: Synthetic oligonucleotide
gcuacuuucaacaguguuu

SEQ ID NO: 1951900 - RNA, 19 nt, Artificial Sequence
  Description of Artificial Sequence: Synthetic oligonucleotide
agccuugagcuccgauuaa

SEQ ID NO: 1951901 - RNA, 19 nt, Artificial Sequence
  Description of Artificial Sequence: Synthetic oligonucleotide
cugguggauagugagcugu

SEQ ID NO: 1951902 - RNA, 19 nt, Artificial Sequence
  Description of Artificial Sequence: Synthetic oligonucleotide
cccuggacaaagcccuucc

SEQ ID NO: 1951903 - RNA, 19 nt, Artificial Sequence
  Description of Artificial Sequence: Synthetic oligonucleotide
gaaucagccugugcugacu

SEQ ID NO: 1951904 - RNA, 19 nt, Artificial Sequence
  Description of Artificial Sequence: Synthetic oligonucleotide
gauccaccugaaagcuuuc

SEQ ID NO: 1951905 - RNA, 19 nt, Artificial Sequence
  Description of Artificial Sequence: Synthetic oligonucleotide
ccagcaugaauuaucuggu

SEQ ID NO: 1951906 - RNA, 19 nt, Artificial Sequence
  Description of Artificial Sequence: Synthetic oligonucleotide
ggauagugagcugugugcu

SEQ ID NO: 1951907 - RNA, 19 nt, Artificial Sequence
  Description of Artificial Sequence: Synthetic oligonucleotide
gcugacucaggcgagagau

SEQ ID NO: 1951908 - RNA, 19 nt, Artificial Sequence
  Description of Artificial Sequence: Synthetic oligonucleotide
gguguucaauaagguauga

SEQ ID NO: 1951909 - RNA, 19 nt, Artificial Sequence
  Description of Artificial Sequence: Synthetic oligonucleotide
cuuggcucgaguguggauu

SEQ ID NO: 1951910 - RNA, 19 nt, Artificial Sequence
  Description of Artificial Sequence: Synthetic oligonucleotide
gcuugagcucugaccaaag

SEQ ID NO: 1951911 - RNA, 19 nt, Artificial Sequence
  Description of Artificial Sequence: Synthetic oligonucleotide
aggcuugagcucugaccaa

SEQ ID NO: 1951912 - RNA, 19 nt, Artificial Sequence
  Description of Artificial Sequence: Synthetic oligonucleotide
gcucaaacggaaagcuuuc

SEQ ID NO: 1951913 - RNA, 19 nt, Artificial Sequence
  Description of Artificial Sequence: Synthetic oligonucleotide
ggugugaacgccaccuaaa

SEQ ID NO: 1951914 - RNA, 19 nt, Artificial Sequence
  Description of Artificial Sequence: Synthetic oligonucleotide
ccacuuggcucgagugugg

SEQ ID NO: 1951915 - RNA, 19 nt, Artificial Sequence
  Description of Artificial Sequence: Synthetic oligonucleotide
aguugcgcucuggcugaag

SEQ ID NO: 1951916 - RNA, 19 nt, Artificial Sequence
  Description of Artificial Sequence: Synthetic oligonucleotide
gugcucauacuaaaggcuu

SEQ ID NO: 1951917 - RNA, 19 nt, Artificial Sequence
  Description of Artificial Sequence: Synthetic oligonucleotide
cacaagcauuacauuugua

SEQ ID NO: 1951918 - RNA, 19 nt, Artificial Sequence
  Description of Artificial Sequence: Synthetic oligonucleotide
gacucaggcgagagaucca

SEQ ID NO: 1951919 - RNA, 19 nt, Artificial Sequence
  Description of Artificial Sequence: Synthetic oligonucleotide
gaacgccaccuaaauauuu

SEQ ID NO: 1951920 - RNA, 19 nt, Artificial Sequence
  Description of Artificial Sequence: Synthetic oligonucleotide
ccacauucaucacauuuua

SEQ ID NO: 1951921 - RNA, 19 nt, Artificial Sequence
  Description of Artificial Sequence: Synthetic oligonucleotide
ggaugcaugcauauggcuu

SEQ ID NO: 1951922 - RNA, 19 nt, Artificial Sequence
  Description of Artificial Sequence: Synthetic oligonucleotide
cuguaucaguuuggagcuc

SEQ ID NO: 1951923 - RNA, 19 nt, Artificial Sequence
  Description of Artificial Sequence: Synthetic oligonucleotide
cacuacacugauagggcuu

SEQ ID NO: 1951924 - RNA, 19 nt, Artificial Sequence
  Description of Artificial Sequence: Synthetic oligonucleotide
ccugacaacuauagggccu

SEQ ID NO: 1951925 - RNA, 19 nt, Artificial Sequence
  Description of Artificial Sequence: Synthetic oligonucleotide
aggcuucgucucccgguau

SEQ ID NO: 1951926 - RNA, 19 nt, Artificial Sequence
  Description of Artificial Sequence: Synthetic oligonucleotide
cucccgguaugaauucgcu

SEQ ID NO: 1951927 - RNA, 19 nt, Artificial Sequence
  Description of Artificial Sequence: Synthetic oligonucleotide
ggauaaggcuugagcucug

SEQ ID NO: 1951928 - RNA, 19 nt, Artificial Sequence
  Description of Artificial Sequence: Synthetic oligonucleotide
acaguaccacuuggcucga

SEQ ID NO: 1951929 - RNA, 19 nt, Artificial Sequence
  Description of Artificial Sequence: Synthetic oligonucleotide
guaucaguuuggagcucaa

SEQ ID NO: 1951930 - RNA, 19 nt, Artificial Sequence
  Description of Artificial Sequence: Synthetic oligonucleotide
uggcucgaguguggauucu

SEQ ID NO: 1951931 - RNA, 19 nt, Artificial Sequence
  Description of Artificial Sequence: Synthetic oligonucleotide
gagcuacaaccaaaggcuu

SEQ ID NO: 1951932 - RNA, 19 nt, Artificial Sequence
  Description of Artificial Sequence: Synthetic oligonucleotide
ggcuugagcucugaccaaa

SEQ ID NO: 1951933 - RNA, 19 nt, Artificial Sequence
  Description of Artificial Sequence: Synthetic oligonucleotide
cacuuggcucgagugugga

SEQ ID NO: 1951934 - RNA, 19 nt, Artificial Sequence
  Description of Artificial Sequence: Synthetic oligonucleotide
caucacacuggugcaauuu

SEQ ID NO: 1951935 - RNA, 19 nt, Artificial Sequence
  Description of Artificial Sequence: Synthetic oligonucleotide
cugacaacuauagggccuu

SEQ ID NO: 1951936 - RNA, 19 nt, Artificial Sequence
  Description of Artificial Sequence: Synthetic oligonucleotide
ugacaacuauagggccuuu

SEQ ID NO: 1951937 - RNA, 19 nt, Artificial Sequence
  Description of Artificial Sequence: Synthetic oligonucleotide
gcuacaaccaaaggcuuuu

SEQ ID NO: 1951938 - RNA, 19 nt, Artificial Sequence
  Description of Artificial Sequence: Synthetic oligonucleotide
agugagcugugugcucaua

SEQ ID NO: 1951939 - RNA, 19 nt, Artificial Sequence
  Description of Artificial Sequence: Synthetic oligonucleotide
gcuucgucucccgguauga

SEQ ID NO: 1951940 - RNA, 19 nt, Artificial Sequence
  Description of Artificial Sequence: Synthetic oligonucleotide
gagcucaaacggaaagcuu

SEQ ID NO: 1951941 - RNA, 19 nt, Artificial Sequence
  Description of Artificial Sequence: Synthetic oligonucleotide
gcugugauugcuggcugaa

SEQ ID NO: 1951942 - RNA, 19 nt, Artificial Sequence
  Description of Artificial Sequence: Synthetic oligonucleotide
gguaugagcuccggcugaa

SEQ ID NO: 1951943 - RNA, 19 nt, Artificial Sequence
  Description of Artificial Sequence: Synthetic oligonucleotide
gagcuacuuucaacagugu

SEQ ID NO: 1951944 - RNA, 19 nt, Artificial Sequence
  Description of Artificial Sequence: Synthetic oligonucleotide
ggcucgaguguggauucuc

SEQ ID NO: 1951945 - RNA, 19 nt, Artificial Sequence
  Description of Artificial Sequence: Synthetic oligonucleotide
auggcaggguagggccucu

SEQ ID NO: 1951946 - RNA, 19 nt, Artificial Sequence
  Description of Artificial Sequence: Synthetic oligonucleotide
cuucgucucccgguaugaa

SEQ ID NO: 1951947 - RNA, 19 nt, Artificial Sequence
  Description of Artificial Sequence: Synthetic oligonucleotide
gccgugagcuacaaccaaa

SEQ ID NO: 1951948 - RNA, 19 nt, Artificial Sequence
  Description of Artificial Sequence: Synthetic oligonucleotide
ccacaagcauuacauuugu

SEQ ID NO: 1951949 - RNA, 19 nt, Artificial Sequence
  Description of Artificial Sequence: Synthetic oligonucleotide
ccacauuggaugcaugcau

SEQ ID NO: 1951950 - RNA, 19 nt, Artificial Sequence
  Description of Artificial Sequence: Synthetic oligonucleotide
caguaccacuuggcucgag

SEQ ID NO: 1951951 - RNA, 19 nt, Artificial Sequence
  Description of Artificial Sequence: Synthetic oligonucleotide
gaacccucugguggauagu

SEQ ID NO: 1951952 - RNA, 19 nt, Artificial Sequence
  Description of Artificial Sequence: Synthetic oligonucleotide
gaguucucugauggcgaau

SEQ ID NO: 1951953 - RNA, 19 nt, Artificial Sequence
  Description of Artificial Sequence: Synthetic oligonucleotide
gagauccaccugaaagcuu

SEQ ID NO: 1951954 - RNA, 19 nt, Artificial Sequence
  Description of Artificial Sequence: Synthetic oligonucleotide
cgucucccgguaugaauuc

SEQ ID NO: 1951955 - RNA, 19 nt, Artificial Sequence
  Description of Artificial Sequence: Synthetic oligonucleotide
gguggauagugagcugugu

SEQ ID NO: 1951956 - RNA, 19 nt, Artificial Sequence
  Description of Artificial Sequence: Synthetic oligonucleotide
  modified_base (13)..(13): a, c, u, g, unknown or other
caaaggcuuuugngcacuu

SEQ ID NO: 1951957 - RNA, 19 nt, Artificial Sequence
  Description of Artificial Sequence: Synthetic oligonucleotide
gcgaaugagccgugagcua

SEQ ID NO: 1951958 - RNA, 19 nt, Artificial Sequence
  Description of Artificial Sequence: Synthetic oligonucleotide
gcgagagauccaccugaaa

SEQ ID NO: 1951959 - RNA, 19 nt, Artificial Sequence
  Description of Artificial Sequence: Synthetic oligonucleotide
gugaacccucugguggaua

SEQ ID NO: 1951960 - RNA, 19 nt, Artificial Sequence
  Description of Artificial Sequence: Synthetic oligonucleotide
gugagccuugagcuccgau

SEQ ID NO: 1951961 - RNA, 19 nt, Artificial Sequence
  Description of Artificial Sequence: Synthetic oligonucleotide
ggcgagagauccaccugaa

SEQ ID NO: 1951962 - RNA, 19 nt, Artificial Sequence
  Description of Artificial Sequence: Synthetic oligonucleotide
cacagucgucacacacaua

SEQ ID NO: 1951963 - RNA, 19 nt, Artificial Sequence
  Description of Artificial Sequence: Synthetic oligonucleotide
uggcaggguagggccucuc

SEQ ID NO: 1951964 - RNA, 19 nt, Artificial Sequence
  Description of Artificial Sequence: Synthetic oligonucleotide
gcucauacuaaaggcuuuu

SEQ ID NO: 1951965 - RNA, 19 nt, Artificial Sequence
  Description of Artificial Sequence: Synthetic oligonucleotide
ggcaggguagggccucucu

SEQ ID NO: 1951966 - RNA, 19 nt, Artificial Sequence
  Description of Artificial Sequence: Synthetic oligonucleotide
gcccuggacaaagcccuuc

SEQ ID NO: 1951967 - RNA, 19 nt, Artificial Sequence
  Description of Artificial Sequence: Synthetic oligonucleotide
gaguugcgcucuggcugaa

SEQ ID NO: 1951968 - RNA, 19 nt, Artificial Sequence
  Description of Artificial Sequence: Synthetic oligonucleotide
gagcuccgauuaaaagcuu

SEQ ID NO: 1951969 - RNA, 19 nt, Artificial Sequence
  Description of Artificial Sequence: Synthetic oligonucleotide
cccacacuccugacaacua

SEQ ID NO: 1951970 - RNA, 19 nt, Artificial Sequence
  Description of Artificial Sequence: Synthetic oligonucleotide
ccacacuccugacaacuau

SEQ ID NO: 1951971 - RNA, 19 nt, Artificial Sequence
  Description of Artificial Sequence: Synthetic oligonucleotide
ccacacuccucaugauacu

SEQ ID NO: 1951972 - RNA, 19 nt, Artificial Sequence
  Description of Artificial Sequence: Synthetic oligonucleotide
cgccaccuaaauauuuuau

SEQ ID NO: 1951973 - RNA, 19 nt, Artificial Sequence
  Description of Artificial Sequence: Synthetic oligonucleotide
aaaauguuuauuuugagac

SEQ ID NO: 1951974 - RNA, 19 nt, Artificial Sequence
  Description of Artificial Sequence: Synthetic oligonucleotide
uuugagaucaccaagcucu

SEQ ID NO: 1951975 - RNA, 19 nt, Artificial Sequence
  Description of Artificial Sequence: Synthetic oligonucleotide
auagacaccauagcgaccc

SEQ ID NO: 1951976 - RNA, 19 nt, Artificial Sequence
  Description of Artificial Sequence: Synthetic oligonucleotide
auuauugauuccccgauag

SEQ ID NO: 1951977 - RNA, 19 nt, Artificial Sequence
  Description of Artificial Sequence: Synthetic oligonucleotide
aacgggucgacuuguagac

SEQ ID NO: 1951978 - RNA, 19 nt, Artificial Sequence
  Description of Artificial Sequence: Synthetic oligonucleotide
uuuuccuccucauagacac

SEQ ID NO: 1951979 - RNA, 19 nt, Artificial Sequence
  Description of Artificial Sequence: Synthetic oligonucleotide
uugagacugggaauuaugg

SEQ ID NO: 1951980 - RNA, 19 nt, Artificial Sequence
  Description of Artificial Sequence: Synthetic oligonucleotide
gacaacaggguuuuggaag

SEQ ID NO: 1951981 - RNA, 19 nt, Artificial Sequence
  Description of Artificial Sequence: Synthetic oligonucleotide
uggcaaaucuaaauagugg

SEQ ID NO: 1951982 - RNA, 19 nt, Artificial Sequence
  Description of Artificial Sequence: Synthetic oligonucleotide
aauccagucucuuuguagu

SEQ ID NO: 1951983 - RNA, 19 nt, Artificial Sequence
  Description of Artificial Sequence: Synthetic oligonucleotide
aaaucagaagcaccucccg

SEQ ID NO: 1951984 - RNA, 19 nt, Artificial Sequence
  Description of Artificial Sequence: Synthetic oligonucleotide
aaucagaagcaccucccgg

SEQ ID NO: 1951985 - RNA, 19 nt, Artificial Sequence
  Description of Artificial Sequence: Synthetic oligonucleotide
ggcaaaucuaaauaguggg

SEQ ID NO: 1951986 - RNA, 19 nt, Artificial Sequence
  Description of Artificial Sequence: Synthetic oligonucleotide
uggacuuuccuccucgggg

SEQ ID NO: 1951987 - RNA, 19 nt, Artificial Sequence
  Description of Artificial Sequence: Synthetic oligonucleotide
uauggcaaaucuaaauagu

SEQ ID NO: 1951988 - RNA, 19 nt, Artificial Sequence
  Description of Artificial Sequence: Synthetic oligonucleotide
ucauagacaccauagcgac

SEQ ID NO: 1951989 - RNA, 19 nt, Artificial Sequence
  Description of Artificial Sequence: Synthetic oligonucleotide
uugauuccccgauagaucu

SEQ ID NO: 1951990 - RNA, 19 nt, Artificial Sequence
  Description of Artificial Sequence: Synthetic oligonucleotide
auagcgacccucaucaagc

SEQ ID NO: 1951991 - RNA, 19 nt, Artificial Sequence
  Description of Artificial Sequence: Synthetic oligonucleotide
uuugagacugggaauuaug

SEQ ID NO: 1951992 - RNA, 19 nt, Artificial Sequence
  Description of Artificial Sequence: Synthetic oligonucleotide
ucuuucgcuggauugaaga

SEQ ID NO: 1951993 - RNA, 19 nt, Artificial Sequence
  Description of Artificial Sequence: Synthetic oligonucleotide
uucgcuggauugaagacgc

SEQ ID NO: 1951994 - RNA, 19 nt, Artificial Sequence
  Description of Artificial Sequence: Synthetic oligonucleotide
agacauagcagcgagaggu

SEQ ID NO: 1951995 - RNA, 19 nt, Artificial Sequence
  Description of Artificial Sequence: Synthetic oligonucleotide
agauggauugugcaucgcg

SEQ ID NO: 1951996 - RNA, 19 nt, Artificial Sequence
  Description of Artificial Sequence: Synthetic oligonucleotide
aaggucuggcgacagauga

SEQ ID NO: 1951997 - RNA, 19 nt, Artificial Sequence
  Description of Artificial Sequence: Synthetic oligonucleotide
gaauccagucucuuuguag

SEQ ID NO: 1951998 - RNA, 19 nt, Artificial Sequence
  Description of Artificial Sequence: Synthetic oligonucleotide
aaaucuaaauagugggcau

SEQ ID NO: 1951999 - RNA, 19 nt, Artificial Sequence
  Description of Artificial Sequence: Synthetic oligonucleotide
uaauuauugauuccccgau

SEQ ID NO: 1952000 - RNA, 19 nt, Artificial Sequence
  Description of Artificial Sequence: Synthetic oligonucleotide
cuaggaaaucagaagcacc

SEQ ID NO: 1952001 - RNA, 19 nt, Artificial Sequence
  Description of Artificial Sequence: Synthetic oligonucleotide
gaacgugcauaccuggccg

SEQ ID NO: 1952002 - RNA, 19 nt, Artificial Sequence
  Description of Artificial Sequence: Synthetic oligonucleotide
uuucgcuggauugaagacg

SEQ ID NO: 1952003 - RNA, 19 nt, Artificial Sequence
  Description of Artificial Sequence: Synthetic oligonucleotide
auuugagaucaccaagcuc

SEQ ID NO: 1952004 - RNA, 19 nt, Artificial Sequence
  Description of Artificial Sequence: Synthetic oligonucleotide
ucuggcuccguucaaagau

SEQ ID NO: 1952005 - RNA, 19 nt, Artificial Sequence
  Description of Artificial Sequence: Synthetic oligonucleotide
uaguccuugcagaugucgg

SEQ ID NO: 1952006 - RNA, 19 nt, Artificial Sequence
  Description of Artificial Sequence: Synthetic oligonucleotide
uauugauuccccgauagau

SEQ ID NO: 1952007 - RNA, 19 nt, Artificial Sequence
  Description of Artificial Sequence: Synthetic oligonucleotide
uggucacagacauagcagc

SEQ ID NO: 1952008 - RNA, 19 nt, Artificial Sequence
  Description of Artificial Sequence: Synthetic oligonucleotide
agagguggugcggaaaugc

SEQ ID NO: 1952009 - RNA, 19 nt, Artificial Sequence
  Description of Artificial Sequence: Synthetic oligonucleotide
aucgcuucccacuucguag

SEQ ID NO: 1952010 - RNA, 19 nt, Artificial Sequence
  Description of Artificial Sequence: Synthetic oligonucleotide
aucaucgcuucccacuucg

SEQ ID NO: 1952011 - RNA, 19 nt, Artificial Sequence
  Description of Artificial Sequence: Synthetic oligonucleotide
ugagacugggaauuauggc

SEQ ID NO: 1952012 - RNA, 19 nt, Artificial Sequence
  Description of Artificial Sequence: Synthetic oligonucleotide
agugccggcgcuuucggcg

SEQ ID NO: 1952013 - RNA, 19 nt, Artificial Sequence
  Description of Artificial Sequence: Synthetic oligonucleotide
auauccucgggccccacgg

SEQ ID NO: 1952014 - RNA, 19 nt, Artificial Sequence
  Description of Artificial Sequence: Synthetic oligonucleotide
ugcucgggagcucggaugg

SEQ ID NO: 1952015 - RNA, 19 nt, Artificial Sequence
  Description of Artificial Sequence: Synthetic oligonucleotide
auuucucgcagaaauaaug

SEQ ID NO: 1952016 - RNA, 19 nt, Artificial Sequence
  Description of Artificial Sequence: Synthetic oligonucleotide
uuauuuugagacugggaau

SEQ ID NO: 1952017 - RNA, 19 nt, Artificial Sequence
  Description of Artificial Sequence: Synthetic oligonucleotide
gaaaucagaagcaccuccc

SEQ ID NO: 1952018 - RNA, 19 nt, Artificial Sequence
  Description of Artificial Sequence: Synthetic oligonucleotide
uauuuugagacugggaauu

SEQ ID NO: 1952019 - RNA, 19 nt, Artificial Sequence
  Description of Artificial Sequence: Synthetic oligonucleotide
uccucauagacaccauagc

SEQ ID NO: 1952020 - RNA, 19 nt, Artificial Sequence
  Description of Artificial Sequence: Synthetic oligonucleotide
agccgcagaauccagucuc

SEQ ID NO: 1952021 - RNA, 19 nt, Artificial Sequence
  Description of Artificial Sequence: Synthetic oligonucleotide
aacgugcauaccuggccgg

SEQ ID NO: 1952022 - RNA, 19 nt, Artificial Sequence
  Description of Artificial Sequence: Synthetic oligonucleotide
ucuaggaaaucagaagcac

SEQ ID NO: 1952023 - RNA, 19 nt, Artificial Sequence
  Description of Artificial Sequence: Synthetic oligonucleotide
gauggauugugcaucgcgc

SEQ ID NO: 1952024 - RNA, 19 nt, Artificial Sequence
  Description of Artificial Sequence: Synthetic oligonucleotide
ucuguuucccgcugccacg

SEQ ID NO: 1952025 - RNA, 19 nt, Artificial Sequence
  Description of Artificial Sequence: Synthetic oligonucleotide
aauuauugauuccccgaua

SEQ ID NO: 1952026 - RNA, 19 nt, Artificial Sequence
  Description of Artificial Sequence: Synthetic oligonucleotide
aguccuugcagaugucggg

SEQ ID NO: 1952027 - RNA, 19 nt, Artificial Sequence
  Description of Artificial Sequence: Synthetic oligonucleotide
cucauagacaccauagcga

SEQ ID NO: 1952028 - RNA, 19 nt, Artificial Sequence
  Description of Artificial Sequence: Synthetic oligonucleotide
cauuggacuuuccuccucg

SEQ ID NO: 1952029 - RNA, 19 nt, Artificial Sequence
  Description of Artificial Sequence: Synthetic oligonucleotide
auugauuccccgauagauc

SEQ ID NO: 1952030 - RNA, 19 nt, Artificial Sequence
  Description of Artificial Sequence: Synthetic oligonucleotide
aguucguagacagccgucg

SEQ ID NO: 1952031 - RNA, 19 nt, Artificial Sequence
  Description of Artificial Sequence: Synthetic oligonucleotide
ucuaaauagugggcauugg

SEQ ID NO: 1952032 - RNA, 19 nt, Artificial Sequence
  Description of Artificial Sequence: Synthetic oligonucleotide
uggcuccguucaaagaugg

SEQ ID NO: 1952033 - RNA, 19 nt, Artificial Sequence
  Description of Artificial Sequence: Synthetic oligonucleotide
uuauugauuccccgauaga

SEQ ID NO: 1952034 - RNA, 19 nt, Artificial Sequence
  Description of Artificial Sequence: Synthetic oligonucleotide
caaaucuaaauagugggca

SEQ ID NO: 1952035 - RNA, 19 nt, Artificial Sequence
  Description of Artificial Sequence: Synthetic oligonucleotide
uccaguucguagacagccg

SEQ ID NO: 1952036 - RNA, 19 nt, Artificial Sequence
  Description of Artificial Sequence: Synthetic oligonucleotide
uuggacuuuccuccucggg

SEQ ID NO: 1952037 - RNA, 19 nt, Artificial Sequence
  Description of Artificial Sequence: Synthetic oligonucleotide
aaucaguucuuucgcugga

SEQ ID NO: 1952038 - RNA, 19 nt, Artificial Sequence
  Description of Artificial Sequence: Synthetic oligonucleotide
auggcaaaucuaaauagug

SEQ ID NO: 1952039 - RNA, 19 nt, Artificial Sequence
  Description of Artificial Sequence: Synthetic oligonucleotide
uguucauucucguccucgc

SEQ ID NO: 1952040 - RNA, 19 nt, Artificial Sequence
  Description of Artificial Sequence: Synthetic oligonucleotide
ggaaaucagaagcaccucc

SEQ ID NO: 1952041 - RNA, 19 nt, Artificial Sequence
  Description of Artificial Sequence: Synthetic oligonucleotide
ccucauagacaccauagcg

SEQ ID NO: 1952042 - RNA, 19 nt, Artificial Sequence
  Description of Artificial Sequence: Synthetic oligonucleotide
cauagcgacccucaucaag

SEQ ID NO: 1952043 - RNA, 19 nt, Artificial Sequence
  Description of Artificial Sequence: Synthetic oligonucleotide
cacagcgcugccuucgucg

SEQ ID NO: 1952044 - RNA, 19 nt, Artificial Sequence
  Description of Artificial Sequence: Synthetic oligonucleotide
ucguccucgcuacucaagc

SEQ ID NO: 1952045 - RNA, 19 nt, Artificial Sequence
  Description of Artificial Sequence: Synthetic oligonucleotide
ucgacuuguagaccacgcc

SEQ ID NO: 1952046 - RNA, 19 nt, Artificial Sequence
  Description of Artificial Sequence: Synthetic oligonucleotide
gguuuugccgaacgggucg

SEQ ID NO: 1952047 - RNA, 19 nt, Artificial Sequence
  Description of Artificial Sequence: Synthetic oligonucleotide
uccuggaucuucuggcucc

SEQ ID NO: 1952048 - RNA, 19 nt, Artificial Sequence
  Description of Artificial Sequence: Synthetic oligonucleotide
cucaagccgccguaguucg

SEQ ID NO: 1952049 - RNA, 19 nt, Artificial Sequence
  Description of Artificial Sequence: Synthetic oligonucleotide
uucauucucguccucgcua

SEQ ID NO: 1952050 - RNA, 19 nt, Artificial Sequence
  Description of Artificial Sequence: Synthetic oligonucleotide
aucaucggauugugggucg

SEQ ID NO: 1952051 - RNA, 19 nt, Artificial Sequence
  Description of Artificial Sequence: Synthetic oligonucleotide
ggaauuauggcaaaucuaa

SEQ ID NO: 1952052 - RNA, 19 nt, Artificial Sequence
  Description of Artificial Sequence: Synthetic oligonucleotide
ucauucucguccucgcuac

SEQ ID NO: 1952053 - RNA, 19 nt, Artificial Sequence
  Description of Artificial Sequence: Synthetic oligonucleotide
cuaaauagugggcauugga

SEQ ID NO: 1952054 - RNA, 19 nt, Artificial Sequence
  Description of Artificial Sequence: Synthetic oligonucleotide
ccauuugagaucaccaagc

SEQ ID NO: 1952055 - RNA, 19 nt, Artificial Sequence
  Description of Artificial Sequence: Synthetic oligonucleotide
augcuuucccaguuuagca

SEQ ID NO: 1952056 - RNA, 19 nt, Artificial Sequence
  Description of Artificial Sequence: Synthetic oligonucleotide
gaacgggucgacuuguaga

SEQ ID NO: 1952057 - RNA, 19 nt, Artificial Sequence
  Description of Artificial Sequence: Synthetic oligonucleotide
uuccgugcgaugcuuuccc

SEQ ID NO: 1952058 - RNA, 19 nt, Artificial Sequence
  Description of Artificial Sequence: Synthetic oligonucleotide
cuuucgcuggauugaagac

SEQ ID NO: 1952059 - RNA, 19 nt, Artificial Sequence
  Description of Artificial Sequence: Synthetic oligonucleotide
ugggcauuggacuuuccuc

SEQ ID NO: 1952060 - RNA, 19 nt, Artificial Sequence
  Description of Artificial Sequence: Synthetic oligonucleotide
gaagccgcagaauccaguc

SEQ ID NO: 1952061 - RNA, 19 nt, Artificial Sequence
  Description of Artificial Sequence: Synthetic oligonucleotide
gaccccucaucacagugcc

SEQ ID NO: 1952062 - RNA, 19 nt, Artificial Sequence
  Description of Artificial Sequence: Synthetic oligonucleotide
acagcgcugccuucgucgc

SEQ ID NO: 1952063 - RNA, 19 nt, Artificial Sequence
  Description of Artificial Sequence: Synthetic oligonucleotide
uaguuuuccuccucauaga

SEQ ID NO: 1952064 - RNA, 19 nt, Artificial Sequence
  Description of Artificial Sequence: Synthetic oligonucleotide
acucaagccgccguaguuc

SEQ ID NO: 1952065 - RNA, 19 nt, Artificial Sequence
  Description of Artificial Sequence: Synthetic oligonucleotide
auuggacuuuccuccucgg

SEQ ID NO: 1952066 - RNA, 19 nt, Artificial Sequence
  Description of Artificial Sequence: Synthetic oligonucleotide
agcagcgagagguggugcg

SEQ ID NO: 1952067 - RNA, 19 nt, Artificial Sequence
  Description of Artificial Sequence: Synthetic oligonucleotide
guuacaacaaaauguuuau

SEQ ID NO: 1952068 - RNA, 19 nt, Artificial Sequence
  Description of Artificial Sequence: Synthetic oligonucleotide
ucaucaagcucacguucga

SEQ ID NO: 1952069 - RNA, 19 nt, Artificial Sequence
  Description of Artificial Sequence: Synthetic oligonucleotide
auggauugugcaucgcgcu

SEQ ID NO: 1952070 - RNA, 19 nt, Artificial Sequence
  Description of Artificial Sequence: Synthetic oligonucleotide
acggguuuugccgaacggg

SEQ ID NO: 1952071 - RNA, 19 nt, Artificial Sequence
  Description of Artificial Sequence: Synthetic oligonucleotide
uccagucucuuuguagucc

SEQ ID NO: 1952072 - RNA, 19 nt, Artificial Sequence
  Description of Artificial Sequence: Synthetic oligonucleotide
guucaaagauggauugugc

SEQ ID NO: 1952073 - RNA, 19 nt, Artificial Sequence
  Description of Artificial Sequence: Synthetic oligonucleotide
uccucgcuacucaagccgc

SEQ ID NO: 1952074 - RNA, 19 nt, Artificial Sequence
  Description of Artificial Sequence: Synthetic oligonucleotide
ugcaucgcgcuccuucuca

SEQ ID NO: 1952075 - RNA, 19 nt, Artificial Sequence
  Description of Artificial Sequence: Synthetic oligonucleotide
aagccgccguaguucgccc

SEQ ID NO: 1952076 - RNA, 19 nt, Artificial Sequence
  Description of Artificial Sequence: Synthetic oligonucleotide
uucuuucgcuggauugaag

SEQ ID NO: 1952077 - RNA, 19 nt, Artificial Sequence
  Description of Artificial Sequence: Synthetic oligonucleotide
cuguucauucucguccucg

SEQ ID NO: 1952078 - RNA, 19 nt, Artificial Sequence
  Description of Artificial Sequence: Synthetic oligonucleotide
gccauuugagaucaccaag

SEQ ID NO: 1952079 - RNA, 19 nt, Artificial Sequence
  Description of Artificial Sequence: Synthetic oligonucleotide
ugacaacaggguuuuggaa

SEQ ID NO: 1952080 - RNA, 19 nt, Artificial Sequence
  Description of Artificial Sequence: Synthetic oligonucleotide
ucccacuucguaguuuucc

SEQ ID NO: 1952081 - RNA, 19 nt, Artificial Sequence
  Description of Artificial Sequence: Synthetic oligonucleotide
gaucaucggauuguggguc

SEQ ID NO: 1952082 - RNA, 19 nt, Artificial Sequence
  Description of Artificial Sequence: Synthetic oligonucleotide
ugugcaucgcgcuccuucu

SEQ ID NO: 1952083 - RNA, 19 nt, Artificial Sequence
  Description of Artificial Sequence: Synthetic oligonucleotide
cauagacaccauagcgacc

SEQ ID NO: 1952084 - RNA, 19 nt, Artificial Sequence
  Description of Artificial Sequence: Synthetic oligonucleotide
gucgccugcuucuucuccg

SEQ ID NO: 1952085 - RNA, 19 nt, Artificial Sequence
  Description of Artificial Sequence: Synthetic oligonucleotide
aucgcgcuccuucucagug

SEQ ID NO: 1952086 - RNA, 19 nt, Artificial Sequence
  Description of Artificial Sequence: Synthetic oligonucleotide
cucuggaacagccgccgcg

SEQ ID NO: 1952087 - RNA, 19 nt, Artificial Sequence
  Description of Artificial Sequence: Synthetic oligonucleotide
aggaacgugcauaccuggc

SEQ ID NO: 1952088 - RNA, 19 nt, Artificial Sequence
  Description of Artificial Sequence: Synthetic oligonucleotide
cuugcagaugucgggcugg

SEQ ID NO: 1952089 - RNA, 19 nt, Artificial Sequence
  Description of Artificial Sequence: Synthetic oligonucleotide
uauccucgggccccacggg

SEQ ID NO: 1952090 - RNA, 19 nt, Artificial Sequence
  Description of Artificial Sequence: Synthetic oligonucleotide
gaccacgccgagcugcucc

SEQ ID NO: 1952091 - RNA, 19 nt, Artificial Sequence
  Description of Artificial Sequence: Synthetic oligonucleotide
auuggucugcuggucacag

SEQ ID NO: 1952092 - RNA, 19 nt, Artificial Sequence
  Description of Artificial Sequence: Synthetic oligonucleotide
uccgccauuugagaucacc

SEQ ID NO: 1952093 - RNA, 19 nt, Artificial Sequence
  Description of Artificial Sequence: Synthetic oligonucleotide
gcaaucaguucuuucgcug

SEQ ID NO: 1952094 - RNA, 19 nt, Artificial Sequence
  Description of Artificial Sequence: Synthetic oligonucleotide
ggaacgugcauaccuggcc

SEQ ID NO: 1952095 - RNA, 19 nt, Artificial Sequence
  Description of Artificial Sequence: Synthetic oligonucleotide
ugagaucaccaagcucugg

SEQ ID NO: 1952096 - RNA, 19 nt, Artificial Sequence
  Description of Artificial Sequence: Synthetic oligonucleotide
aggaaaucagaagcaccuc

SEQ ID NO: 1952097 - RNA, 19 nt, Artificial Sequence
  Description of Artificial Sequence: Synthetic oligonucleotide
aagccgcagaauccagucu

SEQ ID NO: 1952098 - RNA, 19 nt, Artificial Sequence
  Description of Artificial Sequence: Synthetic oligonucleotide
auucucguccucgcuacuc

SEQ ID NO: 1952099 - RNA, 19 nt, Artificial Sequence
  Description of Artificial Sequence: Synthetic oligonucleotide
aguucgcccucuguuuccc

SEQ ID NO: 1952100 - RNA, 19 nt, Artificial Sequence
  Description of Artificial Sequence: Synthetic oligonucleotide
uggauugugcaucgcgcuc

SEQ ID NO: 1952101 - RNA, 19 nt, Artificial Sequence
  Description of Artificial Sequence: Synthetic oligonucleotide
cuuucggcgacccgccgcc

SEQ ID NO: 1952102 - RNA, 19 nt, Artificial Sequence
  Description of Artificial Sequence: Synthetic oligonucleotide
uuuggaaggucuggcgaca

SEQ ID NO: 1952103 - RNA, 19 nt, Artificial Sequence
  Description of Artificial Sequence: Synthetic oligonucleotide
agucucuuuguaguccuug

SEQ ID NO: 1952104 - RNA, 19 nt, Artificial Sequence
  Description of Artificial Sequence: Synthetic oligonucleotide
aacucccuggagaaagcug

SEQ ID NO: 1952105 - RNA, 19 nt, Artificial Sequence
  Description of Artificial Sequence: Synthetic oligonucleotide
gcuggucacagacauagca

SEQ ID NO: 1952106 - RNA, 19 nt, Artificial Sequence
  Description of Artificial Sequence: Synthetic oligonucleotide
agcucuggaacagccgccg

SEQ ID NO: 1952107 - RNA, 19 nt, Artificial Sequence
  Description of Artificial Sequence: Synthetic oligonucleotide
uugugggucgccugcuucu

SEQ ID NO: 1952108 - RNA, 19 nt, Artificial Sequence
  Description of Artificial Sequence: Synthetic oligonucleotide
uuuugagacugggaauuau

SEQ ID NO: 1952109 - RNA, 19 nt, Artificial Sequence
  Description of Artificial Sequence: Synthetic oligonucleotide
uagaugcucgggagcucgg

SEQ ID NO: 1952110 - RNA, 19 nt, Artificial Sequence
  Description of Artificial Sequence: Synthetic oligonucleotide
cugggaauuauggcaaauc

SEQ ID NO: 1952111 - RNA, 19 nt, Artificial Sequence
  Description of Artificial Sequence: Synthetic oligonucleotide
gaccacagcgcugccuucg

SEQ ID NO: 1952112 - RNA, 19 nt, Artificial Sequence
  Description of Artificial Sequence: Synthetic oligonucleotide
cuccucggggucuucuagg

SEQ ID NO: 1952113 - RNA, 19 nt, Artificial Sequence
  Description of Artificial Sequence: Synthetic oligonucleotide
uucgcccucuguuucccgc

SEQ ID NO: 1952114 - RNA, 19 nt, Artificial Sequence
  Description of Artificial Sequence: Synthetic oligonucleotide
uucuggcuccguucaaaga

SEQ ID NO: 1952115 - RNA, 19 nt, Artificial Sequence
  Description of Artificial Sequence: Synthetic oligonucleotide
uaguucgcccucuguuucc

SEQ ID NO: 1952116 - RNA, 19 nt, Artificial Sequence
  Description of Artificial Sequence: Synthetic oligonucleotide
ucgcuucccacuucguagu

SEQ ID NO: 1952117 - RNA, 19 nt, Artificial Sequence
  Description of Artificial Sequence: Synthetic oligonucleotide
ugcuccgccauuugagauc

SEQ ID NO: 1952118 - RNA, 19 nt, Artificial Sequence
  Description of Artificial Sequence: Synthetic oligonucleotide
ugccgaacgggucgacuug

SEQ ID NO: 1952119 - RNA, 19 nt, Artificial Sequence
  Description of Artificial Sequence: Synthetic oligonucleotide
augcucgggagcucggaug

SEQ ID NO: 1952120 - RNA, 19 nt, Artificial Sequence
  Description of Artificial Sequence: Synthetic oligonucleotide
uacucaagccgccguaguu

SEQ ID NO: 1952121 - RNA, 19 nt, Artificial Sequence
  Description of Artificial Sequence: Synthetic oligonucleotide
ucggauugugggucgccug

SEQ ID NO: 1952122 - RNA, 19 nt, Artificial Sequence
  Description of Artificial Sequence: Synthetic oligonucleotide
ugggucgccugcuucuucu

SEQ ID NO: 1952123 - RNA, 19 nt, Artificial Sequence
  Description of Artificial Sequence: Synthetic oligonucleotide
gucuucuaggaaaucagaa

SEQ ID NO: 1952124 - RNA, 19 nt, Artificial Sequence
  Description of Artificial Sequence: Synthetic oligonucleotide
auaccuggccggccgaacu

SEQ ID NO: 1952125 - RNA, 19 nt, Artificial Sequence
  Description of Artificial Sequence: Synthetic oligonucleotide
gacauagcagcgagaggug

SEQ ID NO: 1952126 - RNA, 19 nt, Artificial Sequence
  Description of Artificial Sequence: Synthetic oligonucleotide
ggccccacggguuuugccg

SEQ ID NO: 1952127 - RNA, 19 nt, Artificial Sequence
  Description of Artificial Sequence: Synthetic oligonucleotide
uggcgacagaugaaacacu

SEQ ID NO: 1952128 - RNA, 19 nt, Artificial Sequence
  Description of Artificial Sequence: Synthetic oligonucleotide
auagcagcgagagguggug

SEQ ID NO: 1952129 - RNA, 19 nt, Artificial Sequence
  Description of Artificial Sequence: Synthetic oligonucleotide
cauauccucgggccccacg

SEQ ID NO: 1952130 - RNA, 19 nt, Artificial Sequence
  Description of Artificial Sequence: Synthetic oligonucleotide
cacggguuuugccgaacgg

SEQ ID NO: 1952131 - RNA, 19 nt, Artificial Sequence
  Description of Artificial Sequence: Synthetic oligonucleotide
agacugggaauuauggcaa

SEQ ID NO: 1952132 - RNA, 19 nt, Artificial Sequence
  Description of Artificial Sequence: Synthetic oligonucleotide
ucggggucuucuaggaaau

SEQ ID NO: 1952133 - RNA, 19 nt, Artificial Sequence
  Description of Artificial Sequence: Synthetic oligonucleotide
guucguagacagccgucgc

SEQ ID NO: 1952134 - RNA, 19 nt, Artificial Sequence
  Description of Artificial Sequence: Synthetic oligonucleotide
cucggggucuucuaggaaa

SEQ ID NO: 1952135 - RNA, 19 nt, Artificial Sequence
  Description of Artificial Sequence: Synthetic oligonucleotide
uguuucccgcugccacgcg

SEQ ID NO: 1952136 - RNA, 19 nt, Artificial Sequence
  Description of Artificial Sequence: Synthetic oligonucleotide
uugccgaacgggucgacuu

SEQ ID NO: 1952137 - RNA, 19 nt, Artificial Sequence
  Description of Artificial Sequence: Synthetic oligonucleotide
agcugcuccgccauuugag

SEQ ID NO: 1952138 - RNA, 19 nt, Artificial Sequence
  Description of Artificial Sequence: Synthetic oligonucleotide
caagccgccguaguucgcc

SEQ ID NO: 1952139 - RNA, 19 nt, Artificial Sequence
  Description of Artificial Sequence: Synthetic oligonucleotide
gucgacuuguagaccacgc

SEQ ID NO: 1952140 - RNA, 19 nt, Artificial Sequence
  Description of Artificial Sequence: Synthetic oligonucleotide
uggaacagccgccgcggac

SEQ ID NO: 1952141 - RNA, 19 nt, Artificial Sequence
  Description of Artificial Sequence: Synthetic oligonucleotide
uagaccacgccgagcugcu

SEQ ID NO: 1952142 - RNA, 19 nt, Artificial Sequence
  Description of Artificial Sequence: Synthetic oligonucleotide
uggaucuucuggcuccguu

SEQ ID NO: 1952143 - RNA, 19 nt, Artificial Sequence
  Description of Artificial Sequence: Synthetic oligonucleotide
cucguccucgcuacucaag

SEQ ID NO: 1952144 - RNA, 19 nt, Artificial Sequence
  Description of Artificial Sequence: Synthetic oligonucleotide
guccuugcagaugucgggc

SEQ ID NO: 1952145 - RNA, 19 nt, Artificial Sequence
  Description of Artificial Sequence: Synthetic oligonucleotide
cagaagcaccucccggugc

SEQ ID NO: 1952146 - RNA, 19 nt, Artificial Sequence
  Description of Artificial Sequence: Synthetic oligonucleotide
ggauugugcaucgcgcucc

SEQ ID NO: 1952147 - RNA, 19 nt, Artificial Sequence
  Description of Artificial Sequence: Synthetic oligonucleotide
cucgcuacucaagccgccg

SEQ ID NO: 1952148 - RNA, 19 nt, Artificial Sequence
  Description of Artificial Sequence: Synthetic oligonucleotide
acgggucgacuuguagacc

SEQ ID NO: 1952149 - RNA, 19 nt, Artificial Sequence
  Description of Artificial Sequence: Synthetic oligonucleotide
ugcuggucacagacauagc

SEQ ID NO: 1952150 - RNA, 19 nt, Artificial Sequence
  Description of Artificial Sequence: Synthetic oligonucleotide
cucccggugcuuccgugcg

SEQ ID NO: 1952151 - RNA, 19 nt, Artificial Sequence
  Description of Artificial Sequence: Synthetic oligonucleotide
caguguccaguucguagac

SEQ ID NO: 1952152 - RNA, 19 nt, Artificial Sequence
  Description of Artificial Sequence: Synthetic oligonucleotide
gcacguagaugcucgggag

SEQ ID NO: 1952153 - RNA, 19 nt, Artificial Sequence
  Description of Artificial Sequence: Synthetic oligonucleotide
cuuccgugcgaugcuuucc

SEQ ID NO: 1952154 - RNA, 19 nt, Artificial Sequence
  Description of Artificial Sequence: Synthetic oligonucleotide
ugcgaugcuuucccaguuu

SEQ ID NO: 1952155 - RNA, 19 nt, Artificial Sequence
  Description of Artificial Sequence: Synthetic oligonucleotide
ucgcuacucaagccgccgu

SEQ ID NO: 1952156 - RNA, 19 nt, Artificial Sequence
  Description of Artificial Sequence: Synthetic oligonucleotide
ugcauaccuggccggccga

SEQ ID NO: 1952157 - RNA, 19 nt, Artificial Sequence
  Description of Artificial Sequence: Synthetic oligonucleotide
cccuggagaaagcugcucc

SEQ ID NO: 1952158 - RNA, 19 nt, Artificial Sequence
  Description of Artificial Sequence: Synthetic oligonucleotide
ggaacagccgccgcggacc

SEQ ID NO: 1952159 - RNA, 19 nt, Artificial Sequence
  Description of Artificial Sequence: Synthetic oligonucleotide
gucacagacauagcagcga

SEQ ID NO: 1952160 - RNA, 19 nt, Artificial Sequence
  Description of Artificial Sequence: Synthetic oligonucleotide
uagcgacccucaucaagcu

SEQ ID NO: 1952161 - RNA, 19 nt, Artificial Sequence
  Description of Artificial Sequence: Synthetic oligonucleotide
uggccggccgaacucccug

SEQ ID NO: 1952162 - RNA, 19 nt, Artificial Sequence
  Description of Artificial Sequence: Synthetic oligonucleotide
ugccgcuguccccggaccc

SEQ ID NO: 1952163 - RNA, 19 nt, Artificial Sequence
  Description of Artificial Sequence: Synthetic oligonucleotide
cgcgucuucuggaucaucg

SEQ ID NO: 1952164 - RNA, 19 nt, Artificial Sequence
  Description of Artificial Sequence: Synthetic oligonucleotide
cauuugagaucaccaagcu

SEQ ID NO: 1952165 - RNA, 19 nt, Artificial Sequence
  Description of Artificial Sequence: Synthetic oligonucleotide
ucaucgcuucccacuucgu

SEQ ID NO: 1952166 - RNA, 19 nt, Artificial Sequence
  Description of Artificial Sequence: Synthetic oligonucleotide
ccccucaucacagugccgg

SEQ ID NO: 1952167 - RNA, 19 nt, Artificial Sequence
  Description of Artificial Sequence: Synthetic oligonucleotide
caguucguagacagccguc

SEQ ID NO: 1952168 - RNA, 19 nt, Artificial Sequence
  Description of Artificial Sequence: Synthetic oligonucleotide
ggcacguagaugcucggga

SEQ ID NO: 1952169 - RNA, 19 nt, Artificial Sequence
  Description of Artificial Sequence: Synthetic oligonucleotide
ucucguccucgcuacucaa

SEQ ID NO: 1952170 - RNA, 19 nt, Artificial Sequence
  Description of Artificial Sequence: Synthetic oligonucleotide
ucaucggauugugggucgc

SEQ ID NO: 1952171 - RNA, 19 nt, Artificial Sequence
  Description of Artificial Sequence: Synthetic oligonucleotide
uaccuggccggccgaacuc

SEQ ID NO: 1952172 - RNA, 19 nt, Artificial Sequence
  Description of Artificial Sequence: Synthetic oligonucleotide
ucaagccgccguaguucgc

SEQ ID NO: 1952173 - RNA, 19 nt, Artificial Sequence
  Description of Artificial Sequence: Synthetic oligonucleotide
gugcacauuucucgcagaa

SEQ ID NO: 1952174 - RNA, 19 nt, Artificial Sequence
  Description of Artificial Sequence: Synthetic oligonucleotide
gagagguggugcggaaaug

SEQ ID NO: 1952175 - RNA, 19 nt, Artificial Sequence
  Description of Artificial Sequence: Synthetic oligonucleotide
auuuugagacugggaauua

SEQ ID NO: 1952176 - RNA, 19 nt, Artificial Sequence
  Description of Artificial Sequence: Synthetic oligonucleotide
aucggauugugggucgccu

SEQ ID NO: 1952177 - RNA, 19 nt, Artificial Sequence
  Description of Artificial Sequence: Synthetic oligonucleotide
ggucggaccacagcgcugc

SEQ ID NO: 1952178 - RNA, 19 nt, Artificial Sequence
  Description of Artificial Sequence: Synthetic oligonucleotide
ggcgcuuucggcgacccgc

SEQ ID NO: 1952179 - RNA, 19 nt, Artificial Sequence
  Description of Artificial Sequence: Synthetic oligonucleotide
ggucgacuuguagaccacg

SEQ ID NO: 1952180 - RNA, 19 nt, Artificial Sequence
  Description of Artificial Sequence: Synthetic oligonucleotide
ucgcgcuccuucucagugu

SEQ ID NO: 1952181 - RNA, 19 nt, Artificial Sequence
  Description of Artificial Sequence: Synthetic oligonucleotide
ccgaacucccuggagaaag

SEQ ID NO: 1952182 - RNA, 19 nt, Artificial Sequence
  Description of Artificial Sequence: Synthetic oligonucleotide
ugauuccccgauagaucuu

SEQ ID NO: 1952183 - RNA, 19 nt, Artificial Sequence
  Description of Artificial Sequence: Synthetic oligonucleotide
guucgcccucuguuucccg

SEQ ID NO: 1952184 - RNA, 19 nt, Artificial Sequence
  Description of Artificial Sequence: Synthetic oligonucleotide
guccccggaccccucauca

SEQ ID NO: 1952185 - RNA, 19 nt, Artificial Sequence
  Description of Artificial Sequence: Synthetic oligonucleotide
uccgugcgaugcuuuccca

SEQ ID NO: 1952186 - RNA, 19 nt, Artificial Sequence
  Description of Artificial Sequence: Synthetic oligonucleotide
ucgcccucuguuucccgcu

SEQ ID NO: 1952187 - RNA, 19 nt, Artificial Sequence
  Description of Artificial Sequence: Synthetic oligonucleotide
uagacaccauagcgacccu

SEQ ID NO: 1952188 - RNA, 19 nt, Artificial Sequence
  Description of Artificial Sequence: Synthetic oligonucleotide
gcuacucaagccgccguag

SEQ ID NO: 1952189 - RNA, 19 nt, Artificial Sequence
  Description of Artificial Sequence: Synthetic oligonucleotide
agugggcauuggacuuucc

SEQ ID NO: 1952190 - RNA, 19 nt, Artificial Sequence
  Description of Artificial Sequence: Synthetic oligonucleotide
ucgcuggauugaagacgcc

SEQ ID NO: 1952191 - RNA, 19 nt, Artificial Sequence
  Description of Artificial Sequence: Synthetic oligonucleotide
caucggauugugggucgcc

SEQ ID NO: 1952192 - RNA, 19 nt, Artificial Sequence
  Description of Artificial Sequence: Synthetic oligonucleotide
gccgccgcggaccggaccg

SEQ ID NO: 1952193 - RNA, 19 nt, Artificial Sequence
  Description of Artificial Sequence: Synthetic oligonucleotide
uguccccggaccccucauc

SEQ ID NO: 1952194 - RNA, 19 nt, Artificial Sequence
  Description of Artificial Sequence: Synthetic oligonucleotide
gggaauuauggcaaaucua

SEQ ID NO: 1952195 - RNA, 19 nt, Artificial Sequence
  Description of Artificial Sequence: Synthetic oligonucleotide
uccuccucauagacaccau

SEQ ID NO: 1952196 - RNA, 19 nt, Artificial Sequence
  Description of Artificial Sequence: Synthetic oligonucleotide
uucccacuucguaguuuuc

SEQ ID NO: 1952197 - RNA, 19 nt, Artificial Sequence
  Description of Artificial Sequence: Synthetic oligonucleotide
guucuuucgcuggauugaa

SEQ ID NO: 1952198 - RNA, 19 nt, Artificial Sequence
  Description of Artificial Sequence: Synthetic oligonucleotide
cacagacauagcagcgaga

SEQ ID NO: 1952199 - RNA, 19 nt, Artificial Sequence
  Description of Artificial Sequence: Synthetic oligonucleotide
cuccguucaaagauggauu

SEQ ID NO: 1952200 - RNA, 19 nt, Artificial Sequence
  Description of Artificial Sequence: Synthetic oligonucleotide
ccuacacuuggugacaaca

SEQ ID NO: 1952201 - RNA, 19 nt, Artificial Sequence
  Description of Artificial Sequence: Synthetic oligonucleotide
cauagcagcgagagguggu

SEQ ID NO: 1952202 - RNA, 19 nt, Artificial Sequence
  Description of Artificial Sequence: Synthetic oligonucleotide
cuucccacuucguaguuuu

SEQ ID NO: 1952203 - RNA, 19 nt, Artificial Sequence
  Description of Artificial Sequence: Synthetic oligonucleotide
cauuucucgcagaaauaau

SEQ ID NO: 1952204 - RNA, 19 nt, Artificial Sequence
  Description of Artificial Sequence: Synthetic oligonucleotide
ggaccccucaucacagugc

SEQ ID NO: 1952205 - RNA, 19 nt, Artificial Sequence
  Description of Artificial Sequence: Synthetic oligonucleotide
agaaagcugcuccgccauu

SEQ ID NO: 1952206 - RNA, 19 nt, Artificial Sequence
  Description of Artificial Sequence: Synthetic oligonucleotide
acagccgccgcggaccgga

SEQ ID NO: 1952207 - RNA, 19 nt, Artificial Sequence
  Description of Artificial Sequence: Synthetic oligonucleotide
caccaagcucuggaacagc

SEQ ID NO: 1952208 - RNA, 19 nt, Artificial Sequence
  Description of Artificial Sequence: Synthetic oligonucleotide
gcuuucggcgacccgccgc

SEQ ID NO: 1952209 - RNA, 19 nt, Artificial Sequence
  Description of Artificial Sequence: Synthetic oligonucleotide
gauugugcaucgcgcuccu

SEQ ID NO: 1952210 - RNA, 19 nt, Artificial Sequence
  Description of Artificial Sequence: Synthetic oligonucleotide
gucuggcgacagaugaaac

SEQ ID NO: 1952211 - RNA, 19 nt, Artificial Sequence
  Description of Artificial Sequence: Synthetic oligonucleotide
guuuugccgaacgggucga

SEQ ID NO: 1952212 - RNA, 19 nt, Artificial Sequence
  Description of Artificial Sequence: Synthetic oligonucleotide
uuuugccgaacgggucgac

SEQ ID NO: 1952213 - RNA, 19 nt, Artificial Sequence
  Description of Artificial Sequence: Synthetic oligonucleotide
gaacucccuggagaaagcu

SEQ ID NO: 1952214 - RNA, 19 nt, Artificial Sequence
  Description of Artificial Sequence: Synthetic oligonucleotide
ccacggguuuugccgaacg

SEQ ID NO: 1952215 - RNA, 19 nt, Artificial Sequence
  Description of Artificial Sequence: Synthetic oligonucleotide
gacccucaucaagcucacg

SEQ ID NO: 1952216 - RNA, 19 nt, Artificial Sequence
  Description of Artificial Sequence: Synthetic oligonucleotide
uccccggaccccucaucac

SEQ ID NO: 1952217 - RNA, 19 nt, Artificial Sequence
  Description of Artificial Sequence: Synthetic oligonucleotide
agaugcucgggagcucgga

SEQ ID NO: 1952218 - RNA, 19 nt, Artificial Sequence
  Description of Artificial Sequence: Synthetic oligonucleotide
cauaccuggccggccgaac

SEQ ID NO: 1952219 - RNA, 19 nt, Artificial Sequence
  Description of Artificial Sequence: Synthetic oligonucleotide
gcugcuccgccauuugaga

SEQ ID NO: 1952220 - RNA, 19 nt, Artificial Sequence
  Description of Artificial Sequence: Synthetic oligonucleotide
caucgcuucccacuucgua

SEQ ID NO: 1952221 - RNA, 19 nt, Artificial Sequence
  Description of Artificial Sequence: Synthetic oligonucleotide
ggacuuuccuccucggggu

SEQ ID NO: 1952222 - RNA, 19 nt, Artificial Sequence
  Description of Artificial Sequence: Synthetic oligonucleotide
gaugcucgggagcucggau

SEQ ID NO: 1952223 - RNA, 19 nt, Artificial Sequence
  Description of Artificial Sequence: Synthetic oligonucleotide
auguauccuugggcuucac

SEQ ID NO: 1952224 - RNA, 19 nt, Artificial Sequence
  Description of Artificial Sequence: Synthetic oligonucleotide
ggucuggcgacagaugaaa

SEQ ID NO: 1952225 - RNA, 19 nt, Artificial Sequence
  Description of Artificial Sequence: Synthetic oligonucleotide
gcaucgcgcuccuucucag

SEQ ID NO: 1952226 - RNA, 19 nt, Artificial Sequence
  Description of Artificial Sequence: Synthetic oligonucleotide
cagugccggcgcuuucggc

SEQ ID NO: 1952227 - RNA, 19 nt, Artificial Sequence
  Description of Artificial Sequence: Synthetic oligonucleotide
agcgagagguggugcggaa

SEQ ID NO: 1952228 - RNA, 19 nt, Artificial Sequence
  Description of Artificial Sequence: Synthetic oligonucleotide
ucccggugcuuccgugcga

SEQ ID NO: 1952229 - RNA, 19 nt, Artificial Sequence
  Description of Artificial Sequence: Synthetic oligonucleotide
ccucaucacagugccggcg

SEQ ID NO: 1952230 - RNA, 19 nt, Artificial Sequence
  Description of Artificial Sequence: Synthetic oligonucleotide
gcagcgagagguggugcgg

SEQ ID NO: 1952231 - RNA, 19 nt, Artificial Sequence
  Description of Artificial Sequence: Synthetic oligonucleotide
gcuccgccauuugagauca

SEQ ID NO: 1952232 - RNA, 19 nt, Artificial Sequence
  Description of Artificial Sequence: Synthetic oligonucleotide
ccgugcgaugcuuucccag

SEQ ID NO: 1952233 - RNA, 19 nt, Artificial Sequence
  Description of Artificial Sequence: Synthetic oligonucleotide
ccacuucguaguuuuccuc

SEQ ID NO: 1952234 - RNA, 19 nt, Artificial Sequence
  Description of Artificial Sequence: Synthetic oligonucleotide
ggccgaacucccuggagaa

SEQ ID NO: 1952235 - RNA, 19 nt, Artificial Sequence
  Description of Artificial Sequence: Synthetic oligonucleotide
cccggaccccucaucacag

SEQ ID NO: 1952236 - RNA, 19 nt, Artificial Sequence
  Description of Artificial Sequence: Synthetic oligonucleotide
gagguggugcggaaaugcu

SEQ ID NO: 1952237 - RNA, 19 nt, Artificial Sequence
  Description of Artificial Sequence: Synthetic oligonucleotide
agccgccguaguucgcccu

SEQ ID NO: 1952238 - RNA, 19 nt, Artificial Sequence
  Description of Artificial Sequence: Synthetic oligonucleotide
gcuuucccaguuuagcaau

SEQ ID NO: 1952239 - RNA, 19 nt, Artificial Sequence
  Description of Artificial Sequence: Synthetic oligonucleotide
cauuggucugcuggucaca

SEQ ID NO: 1952240 - RNA, 19 nt, Artificial Sequence
  Description of Artificial Sequence: Synthetic oligonucleotide
ugugggucgccugcuucuu

SEQ ID NO: 1952241 - RNA, 19 nt, Artificial Sequence
  Description of Artificial Sequence: Synthetic oligonucleotide
ccucccggugcuuccgugc

SEQ ID NO: 1952242 - RNA, 19 nt, Artificial Sequence
  Description of Artificial Sequence: Synthetic oligonucleotide
cgaacucccuggagaaagc

SEQ ID NO: 1952243 - RNA, 19 nt, Artificial Sequence
  Description of Artificial Sequence: Synthetic oligonucleotide
gugccggcgcuuucggcga

SEQ ID NO: 1952244 - RNA, 19 nt, Artificial Sequence
  Description of Artificial Sequence: Synthetic oligonucleotide
gcuuccgugcgaugcuuuc

SEQ ID NO: 1952245 - RNA, 19 nt, Artificial Sequence
  Description of Artificial Sequence: Synthetic oligonucleotide
cgaacgggucgacuuguag

SEQ ID NO: 1952246 - RNA, 19 nt, Artificial Sequence
  Description of Artificial Sequence: Synthetic oligonucleotide
gcauuggacuuuccuccuc

SEQ ID NO: 1952247 - RNA, 19 nt, Artificial Sequence
  Description of Artificial Sequence: Synthetic oligonucleotide
guuucccgcugccacgcgu

SEQ ID NO: 1952248 - RNA, 19 nt, Artificial Sequence
  Description of Artificial Sequence: Synthetic oligonucleotide
cguccucgcuacucaagcc

SEQ ID NO: 1952249 - RNA, 19 nt, Artificial Sequence
  Description of Artificial Sequence: Synthetic oligonucleotide
aggucuggcgacagaugaa

SEQ ID NO: 1952250 - RNA, 19 nt, Artificial Sequence
  Description of Artificial Sequence: Synthetic oligonucleotide
ccucgcuacucaagccgcc

SEQ ID NO: 1952251 - RNA, 19 nt, Artificial Sequence
  Description of Artificial Sequence: Synthetic oligonucleotide
cccucuguuucccgcugcc

SEQ ID NO: 1952252 - RNA, 19 nt, Artificial Sequence
  Description of Artificial Sequence: Synthetic oligonucleotide
gcuccguucaaagauggau

SEQ ID NO: 1952253 - RNA, 19 nt, Artificial Sequence
  Description of Artificial Sequence: Synthetic oligonucleotide
uuucggcgacccgccgccc

SEQ ID NO: 1952254 - RNA, 19 nt, Artificial Sequence
  Description of Artificial Sequence: Synthetic oligonucleotide
ggguuuugccgaacggguc

SEQ ID NO: 1952255 - RNA, 19 nt, Artificial Sequence
  Description of Artificial Sequence: Synthetic oligonucleotide
cgggucgacuuguagacca

SEQ ID NO: 1952256 - RNA, 19 nt, Artificial Sequence
  Description of Artificial Sequence: Synthetic oligonucleotide
gugggucgccugcuucuuc

SEQ ID NO: 1952257 - RNA, 19 nt, Artificial Sequence
  Description of Artificial Sequence: Synthetic oligonucleotide
cuacucaagccgccguagu

SEQ ID NO: 1952258 - RNA, 19 nt, Artificial Sequence
  Description of Artificial Sequence: Synthetic oligonucleotide
ggcauuggacuuuccuccu

SEQ ID NO: 1952259 - RNA, 19 nt, Artificial Sequence
  Description of Artificial Sequence: Synthetic oligonucleotide
ccgaagccgcagaauccag

SEQ ID NO: 1952260 - RNA, 19 nt, Artificial Sequence
  Description of Artificial Sequence: Synthetic oligonucleotide
cuguccccgaagccgcaga

SEQ ID NO: 1952261 - RNA, 19 nt, Artificial Sequence
  Description of Artificial Sequence: Synthetic oligonucleotide
ggugcuuccgugcgaugcu

SEQ ID NO: 1952262 - RNA, 19 nt, Artificial Sequence
  Description of Artificial Sequence: Synthetic oligonucleotide
cugcuccgccauuugagau

SEQ ID NO: 1952263 - RNA, 19 nt, Artificial Sequence
  Description of Artificial Sequence: Synthetic oligonucleotide
gucggaccacagcgcugcc

SEQ ID NO: 1952264 - RNA, 19 nt, Artificial Sequence
  Description of Artificial Sequence: Synthetic oligonucleotide
ugccggcgcuuucggcgac

SEQ ID NO: 1952265 - RNA, 19 nt, Artificial Sequence
  Description of Artificial Sequence: Synthetic oligonucleotide
cuggauugaagacgccauu

SEQ ID NO: 1952266 - RNA, 19 nt, Artificial Sequence
  Description of Artificial Sequence: Synthetic oligonucleotide
ggcgacagaugaaacacuu

SEQ ID NO: 1952267 - RNA, 19 nt, Artificial Sequence
  Description of Artificial Sequence: Synthetic oligonucleotide
gcuggauugaagacgccau

SEQ ID NO: 1952268 - RNA, 19 nt, Artificial Sequence
  Description of Artificial Sequence: Synthetic oligonucleotide
cagcgagagguggugcgga

SEQ ID NO: 1952269 - RNA, 19 nt, Artificial Sequence
  Description of Artificial Sequence: Synthetic oligonucleotide
cuggaacagccgccgcgga

SEQ ID NO: 1952270 - RNA, 19 nt, Artificial Sequence
  Description of Artificial Sequence: Synthetic oligonucleotide
cucccuggagaaagcugcu

SEQ ID NO: 1952271 - RNA, 19 nt, Artificial Sequence
  Description of Artificial Sequence: Synthetic oligonucleotide
gccccacggguuuugccga

SEQ ID NO: 1952272 - RNA, 19 nt, Artificial Sequence
  Description of Artificial Sequence: Synthetic oligonucleotide
gugcgaugcuuucccaguu

SEQ ID NO: 1952273 - RNA, 19 nt, Artificial Sequence
  Description of Artificial Sequence: Synthetic oligonucleotide
cccgaagccgcagaaucca

SEQ ID NO: 1952274 - RNA, 19 nt, Artificial Sequence
  Description of Artificial Sequence: Synthetic oligonucleotide
cccacuucguaguuuuccu

SEQ ID NO: 1952275 - RNA, 19 nt, Artificial Sequence
  Description of Artificial Sequence: Synthetic oligonucleotide
ccaguucguagacagccgu

SEQ ID NO: 1952276 - RNA, 19 nt, Artificial Sequence
  Description of Artificial Sequence: Synthetic oligonucleotide
cgccauuugagaucaccaa

SEQ ID NO: 1952277 - RNA, 19 nt, Artificial Sequence
  Description of Artificial Sequence: Synthetic oligonucleotide
gggucgacuuguagaccac

SEQ ID NO: 1952278 - RNA, 19 nt, Artificial Sequence
  Description of Artificial Sequence: Synthetic oligonucleotide
cgacccgccgccccuuucc

SEQ ID NO: 1952279 - RNA, 19 nt, Artificial Sequence
  Description of Artificial Sequence: Synthetic oligonucleotide
gccgccguaguucgcccuc

SEQ ID NO: 1952280 - RNA, 19 nt, Artificial Sequence
  Description of Artificial Sequence: Synthetic oligonucleotide
caucaagcucacguucgau

SEQ ID NO: 1952281 - RNA, 19 nt, Artificial Sequence
  Description of Artificial Sequence: Synthetic oligonucleotide
caucgcgcuccuucucagu

SEQ ID NO: 1952282 - RNA, 19 nt, Artificial Sequence
  Description of Artificial Sequence: Synthetic oligonucleotide
ccggccgaacucccuggag

SEQ ID NO: 1952283 - RNA, 19 nt, Artificial Sequence
  Description of Artificial Sequence: Synthetic oligonucleotide
cauucucguccucgcuacu

SEQ ID NO: 1952284 - RNA, 19 nt, Artificial Sequence
  Description of Artificial Sequence: Synthetic oligonucleotide
cgugcauaccuggccggcc

SEQ ID NO: 1952285 - RNA, 19 nt, Artificial Sequence
  Description of Artificial Sequence: Synthetic oligonucleotide
gccgcuguccccggacccc

SEQ ID NO: 1952286 - RNA, 19 nt, Artificial Sequence
  Description of Artificial Sequence: Synthetic oligonucleotide
gggucgccugcuucuucuc

SEQ ID NO: 1952287 - RNA, 19 nt, Artificial Sequence
  Description of Artificial Sequence: Synthetic oligonucleotide
cuccgccauuugagaucac

SEQ ID NO: 1952288 - RNA, 19 nt, Artificial Sequence
  Description of Artificial Sequence: Synthetic oligonucleotide
ccccggaccccucaucaca

SEQ ID NO: 1952289 - RNA, 19 nt, Artificial Sequence
  Description of Artificial Sequence: Synthetic oligonucleotide
cgcuggauugaagacgcca

SEQ ID NO: 1952290 - RNA, 19 nt, Artificial Sequence
  Description of Artificial Sequence: Synthetic oligonucleotide
auugugcaucgcgcuccuu

SEQ ID NO: 1952291 - RNA, 19 nt, Artificial Sequence
  Description of Artificial Sequence: Synthetic oligonucleotide
gcucgggagcucggauggg

SEQ ID NO: 1952292 - RNA, 19 nt, Artificial Sequence
  Description of Artificial Sequence: Synthetic oligonucleotide
cggccgaacucccuggaga

SEQ ID NO: 1952293 - RNA, 19 nt, Artificial Sequence
  Description of Artificial Sequence: Synthetic oligonucleotide
ggcuccguucaaagaugga

SEQ ID NO: 1952294 - RNA, 19 nt, Artificial Sequence
  Description of Artificial Sequence: Synthetic oligonucleotide
cggguuuugccgaacgggu

SEQ ID NO: 1952295 - RNA, 19 nt, Artificial Sequence
  Description of Artificial Sequence: Synthetic oligonucleotide
ccgcggaccggaccgcuuc

SEQ ID NO: 1952296 - RNA, 19 nt, Artificial Sequence
  Description of Artificial Sequence: Synthetic oligonucleotide
cgugcgaugcuuucccagu

SEQ ID NO: 1952297 - RNA, 19 nt, Artificial Sequence
  Description of Artificial Sequence: Synthetic oligonucleotide
cguaguucgcccucuguuu

SEQ ID NO: 1952298 - RNA, 19 nt, Artificial Sequence
  Description of Artificial Sequence: Synthetic oligonucleotide
gcgagagguggugcggaaa

SEQ ID NO: 1952299 - RNA, 19 nt, Artificial Sequence
  Description of Artificial Sequence: Synthetic oligonucleotide
gccggccgaacucccugga

SEQ ID NO: 1952300 - RNA, 19 nt, Artificial Sequence
  Description of Artificial Sequence: Synthetic oligonucleotide
cgcggaccggaccgcuucg

SEQ ID NO: 1952301 - RNA, 19 nt, Artificial Sequence
  Description of Artificial Sequence: Synthetic oligonucleotide
ccacagcgcugccuucguc

SEQ ID NO: 1952302 - RNA, 19 nt, Artificial Sequence
  Description of Artificial Sequence: Synthetic oligonucleotide
ccguaguucgcccucuguu

SEQ ID NO: 1952303 - RNA, 19 nt, Artificial Sequence
  Description of Artificial Sequence: Synthetic oligonucleotide
cagucucuuuguaguccuu

SEQ ID NO: 1952304 - RNA, 19 nt, Artificial Sequence
  Description of Artificial Sequence: Synthetic oligonucleotide
cggucggaccacagcgcug

SEQ ID NO: 1952305 - RNA, 19 nt, Artificial Sequence
  Description of Artificial Sequence: Synthetic oligonucleotide
cccacggguuuugccgaac

SEQ ID NO: 1952306 - RNA, 19 nt, Artificial Sequence
  Description of Artificial Sequence: Synthetic oligonucleotide
cguagaugcucgggagcuc

SEQ ID NO: 1952307 - RNA, 19 nt, Artificial Sequence
  Description of Artificial Sequence: Synthetic oligonucleotide
gccgaacgggucgacuugu

SEQ ID NO: 1952308 - RNA, 19 nt, Artificial Sequence
  Description of Artificial Sequence: Synthetic oligonucleotide
caucacagugccggcgcuu

SEQ ID NO: 1952309 - RNA, 19 nt, Artificial Sequence
  Description of Artificial Sequence: Synthetic oligonucleotide
gccgcagaauccagucucu

SEQ ID NO: 1952310 - RNA, 19 nt, Artificial Sequence
  Description of Artificial Sequence: Synthetic oligonucleotide
gcauaccuggccggccgaa

SEQ ID NO: 1952311 - RNA, 19 nt, Artificial Sequence
  Description of Artificial Sequence: Synthetic oligonucleotide
cgagagguggugcggaaau

SEQ ID NO: 1952312 - RNA, 19 nt, Artificial Sequence
  Description of Artificial Sequence: Synthetic oligonucleotide
ccauagcgacccucaucaa

SEQ ID NO: 1952313 - RNA, 19 nt, Artificial Sequence
  Description of Artificial Sequence: Synthetic oligonucleotide
gugcuuccgugcgaugcuu

SEQ ID NO: 1952314 - RNA, 19 nt, Artificial Sequence
  Description of Artificial Sequence: Synthetic oligonucleotide
ccggugcuuccgugcgaug

SEQ ID NO: 1952315 - RNA, 19 nt, Artificial Sequence
  Description of Artificial Sequence: Synthetic oligonucleotide
gccgaacucccuggagaaa

SEQ ID NO: 1952316 - RNA, 19 nt, Artificial Sequence
  Description of Artificial Sequence: Synthetic oligonucleotide
ccguucaaagauggauugu

SEQ ID NO: 1952317 - RNA, 19 nt, Artificial Sequence
  Description of Artificial Sequence: Synthetic oligonucleotide
caccucccggugcuuccgu

SEQ ID NO: 1952318 - RNA, 19 nt, Artificial Sequence
  Description of Artificial Sequence: Synthetic oligonucleotide
gcgacccgccgccccuuuc

SEQ ID NO: 1952319 - RNA, 19 nt, Artificial Sequence
  Description of Artificial Sequence: Synthetic oligonucleotide
cagcgcugccuucgucgcu

SEQ ID NO: 1952320 - RNA, 19 nt, Artificial Sequence
  Description of Artificial Sequence: Synthetic oligonucleotide
cuguccccggaccccucau

SEQ ID NO: 1952321 - RNA, 19 nt, Artificial Sequence
  Description of Artificial Sequence: Synthetic oligonucleotide
cgcuacucaagccgccgua

SEQ ID NO: 1952322 - RNA, 19 nt, Artificial Sequence
  Description of Artificial Sequence: Synthetic oligonucleotide
cgccguaguucgcccucug

SEQ ID NO: 1952323 - RNA, 19 nt, Artificial Sequence
  Description of Artificial Sequence: Synthetic oligonucleotide
ccgaacgggucgacuugua

SEQ ID NO: 1952324 - RNA, 19 nt, Artificial Sequence
  Description of Artificial Sequence: Synthetic oligonucleotide
cggcgcuuucggcgacccg

SEQ ID NO: 1952325 - RNA, 19 nt, Artificial Sequence
  Description of Artificial Sequence: Synthetic oligonucleotide
ccacgccgagcugcuccug

SEQ ID NO: 1952326 - RNA, 19 nt, Artificial Sequence
  Description of Artificial Sequence: Synthetic oligonucleotide
ccgccccuuuccgcccagg

SEQ ID NO: 1952327 - RNA, 19 nt, Artificial Sequence
  Description of Artificial Sequence: Synthetic oligonucleotide
ccccacggguuuugccgaa

SEQ ID NO: 1952328 - RNA, 19 nt, Artificial Sequence
  Description of Artificial Sequence: Synthetic oligonucleotide
ccgagcugcuccuguucau

SEQ ID NO: 1952329 - RNA, 19 nt, Artificial Sequence
  Description of Artificial Sequence: Synthetic oligonucleotide
cccggugcuuccgugcgau

SEQ ID NO: 1952330 - RNA, 19 nt, Artificial Sequence
  Description of Artificial Sequence: Synthetic oligonucleotide
ccggaccccucaucacagu

SEQ ID NO: 1952331 - RNA, 19 nt, Artificial Sequence
  Description of Artificial Sequence: Synthetic oligonucleotide
ggcgacccgccgccccuuu

SEQ ID NO: 1952332 - RNA, 19 nt, Artificial Sequence
  Description of Artificial Sequence: Synthetic oligonucleotide
ccgcuguccccggaccccu

SEQ ID NO: 1952333 - RNA, 19 nt, Artificial Sequence
  Description of Artificial Sequence: Synthetic oligonucleotide
ccgccguaguucgcccucu

SEQ ID NO: 1952334 - RNA, 19 nt, Artificial Sequence
  Description of Artificial Sequence: Synthetic oligonucleotide
cgcuucccacuucguaguu

SEQ ID NO: 1952335 - RNA, 19 nt, Artificial Sequence
  Description of Artificial Sequence: Synthetic oligonucleotide
gccgcggaccggaccgcuu

SEQ ID NO: 1952336 - RNA, 19 nt, Artificial Sequence
  Description of Artificial Sequence: Synthetic oligonucleotide
cgccgcggaccggaccgcu

SEQ ID NO: 1952337 - RNA, 19 nt, Artificial Sequence
  Description of Artificial Sequence: Synthetic oligonucleotide
ucagggugcagauaggccg

SEQ ID NO: 1952338 - RNA, 19 nt, Artificial Sequence
  Description of Artificial Sequence: Synthetic oligonucleotide
cucagcuuugcucagacgg

SEQ ID NO: 1952339 - RNA, 19 nt, Artificial Sequence
  Description of Artificial Sequence: Synthetic oligonucleotide
ucagucuguacccaggcag

SEQ ID NO: 1952340 - RNA, 19 nt, Artificial Sequence
  Description of Artificial Sequence: Synthetic oligonucleotide
acugaguuggucaaauucc

SEQ ID NO: 1952341 - RNA, 19 nt, Artificial Sequence
  Description of Artificial Sequence: Synthetic oligonucleotide
uguaucacucucaugcagc

SEQ ID NO: 1952342 - RNA, 19 nt, Artificial Sequence
  Description of Artificial Sequence: Synthetic oligonucleotide
uuuacucccguuaccaggc

SEQ ID NO: 1952343 - RNA, 19 nt, Artificial Sequence
  Description of Artificial Sequence: Synthetic oligonucleotide
aguuggucaaauuccuugg

SEQ ID NO: 1952344 - RNA, 19 nt, Artificial Sequence
  Description of Artificial Sequence: Synthetic oligonucleotide
cacaucgugaaauuccucc

SEQ ID NO: 1952345 - RNA, 19 nt, Artificial Sequence
  Description of Artificial Sequence: Synthetic oligonucleotide
ugucaaaucuucaccauaa

SEQ ID NO: 1952346 - RNA, 19 nt, Artificial Sequence
  Description of Artificial Sequence: Synthetic oligonucleotide
auuguucccaggcagcccg

SEQ ID NO: 1952347 - RNA, 19 nt, Artificial Sequence
  Description of Artificial Sequence: Synthetic oligonucleotide
ugagucagaguucaucaug

SEQ ID NO: 1952348 - RNA, 19 nt, Artificial Sequence
  Description of Artificial Sequence: Synthetic oligonucleotide
ucucagggagagaagauga

SEQ ID NO: 1952349 - RNA, 19 nt, Artificial Sequence
  Description of Artificial Sequence: Synthetic oligonucleotide
agcaagauccaugcggucc

SEQ ID NO: 1952350 - RNA, 19 nt, Artificial Sequence
  Description of Artificial Sequence: Synthetic oligonucleotide
gagucagaguucaucaugg

SEQ ID NO: 1952351 - RNA, 19 nt, Artificial Sequence
  Description of Artificial Sequence: Synthetic oligonucleotide
auugccgugggcgucaucg

SEQ ID NO: 1952352 - RNA, 19 nt, Artificial Sequence
  Description of Artificial Sequence: Synthetic oligonucleotide
acccacuucacugcuaucc

SEQ ID NO: 1952353 - RNA, 19 nt, Artificial Sequence
  Description of Artificial Sequence: Synthetic oligonucleotide
gacugaguuggucaaauuc

SEQ ID NO: 1952354 - RNA, 19 nt, Artificial Sequence
  Description of Artificial Sequence: Synthetic oligonucleotide
aucgccacaucgucggucc

SEQ ID NO: 1952355 - RNA, 19 nt, Artificial Sequence
  Description of Artificial Sequence: Synthetic oligonucleotide
gagagaagaugacugaguc

SEQ ID NO: 1952356 - RNA, 19 nt, Artificial Sequence
  Description of Artificial Sequence: Synthetic oligonucleotide
uggucaaauuccuuggcca

SEQ ID NO: 1952357 - RNA, 19 nt, Artificial Sequence
  Description of Artificial Sequence: Synthetic oligonucleotide
aggaucucagcuuugcuca

SEQ ID NO: 1952358 - RNA, 19 nt, Artificial Sequence
  Description of Artificial Sequence: Synthetic oligonucleotide
uaauugguggccuggcugc

SEQ ID NO: 1952359 - RNA, 19 nt, Artificial Sequence
  Description of Artificial Sequence: Synthetic oligonucleotide
uucagaucccggaaguccc

SEQ ID NO: 1952360 - RNA, 19 nt, Artificial Sequence
  Description of Artificial Sequence: Synthetic oligonucleotide
ccagcaauggcuuuuauug

SEQ ID NO: 1952361 - RNA, 19 nt, Artificial Sequence
  Description of Artificial Sequence: Synthetic oligonucleotide
cuccacaucgugaaauucc

SEQ ID NO: 1952362 - RNA, 19 nt, Artificial Sequence
  Description of Artificial Sequence: Synthetic oligonucleotide
aacauguuccaguugcuua

SEQ ID NO: 1952363 - RNA, 19 nt, Artificial Sequence
  Description of Artificial Sequence: Synthetic oligonucleotide
ucgagaagcacggugaacu

SEQ ID NO: 1952364 - RNA, 19 nt, Artificial Sequence
  Description of Artificial Sequence: Synthetic oligonucleotide
ucguaggugugccaggcag

SEQ ID NO: 1952365 - RNA, 19 nt, Artificial Sequence
  Description of Artificial Sequence: Synthetic oligonucleotide
uccuaggaaugccucgugg

SEQ ID NO: 1952366 - RNA, 19 nt, Artificial Sequence
  Description of Artificial Sequence: Synthetic oligonucleotide
agaagcacggugaacucgc

SEQ ID NO: 1952367 - RNA, 19 nt, Artificial Sequence
  Description of Artificial Sequence: Synthetic oligonucleotide
ucaucauggugccuuguca

SEQ ID NO: 1952368 - RNA, 19 nt, Artificial Sequence
  Description of Artificial Sequence: Synthetic oligonucleotide
ccugccauggccaugaggc

SEQ ID NO: 1952369 - RNA, 19 nt, Artificial Sequence
  Description of Artificial Sequence: Synthetic oligonucleotide
acuggaaauugccgugggc

SEQ ID NO: 1952370 - RNA, 19 nt, Artificial Sequence
  Description of Artificial Sequence: Synthetic oligonucleotide
aucgucgguccuuuacucc

SEQ ID NO: 1952371 - RNA, 19 nt, Artificial Sequence
  Description of Artificial Sequence: Synthetic oligonucleotide
auccaugcgguccacgauc

SEQ ID NO: 1952372 - RNA, 19 nt, Artificial Sequence
  Description of Artificial Sequence: Synthetic oligonucleotide
gcuuuuauuguucccaggc

SEQ ID NO: 1952373 - RNA, 19 nt, Artificial Sequence
  Description of Artificial Sequence: Synthetic oligonucleotide
ucguacuggaaauugccgu

SEQ ID NO: 1952374 - RNA, 19 nt, Artificial Sequence
  Description of Artificial Sequence: Synthetic oligonucleotide
uccacaucgugaaauuccu

SEQ ID NO: 1952375 - RNA, 19 nt, Artificial Sequence
  Description of Artificial Sequence: Synthetic oligonucleotide
ucagcuuugcucagacggc

SEQ ID NO: 1952376 - RNA, 19 nt, Artificial Sequence
  Description of Artificial Sequence: Synthetic oligonucleotide
uacuggaaauugccguggg

SEQ ID NO: 1952377 - RNA, 19 nt, Artificial Sequence
  Description of Artificial Sequence: Synthetic oligonucleotide
agcucggcuaaggacaccc

SEQ ID NO: 1952378 - RNA, 19 nt, Artificial Sequence
  Description of Artificial Sequence: Synthetic oligonucleotide
ugcagauaggccgucagcu

SEQ ID NO: 1952379 - RNA, 19 nt, Artificial Sequence
  Description of Artificial Sequence: Synthetic oligonucleotide
cuggcuuuccucuggacug

SEQ ID NO: 1952380 - RNA, 19 nt, Artificial Sequence
  Description of Artificial Sequence: Synthetic oligonucleotide
ugccaggcagcgcucaccg

SEQ ID NO: 1952381 - RNA, 19 nt, Artificial Sequence
  Description of Artificial Sequence: Synthetic oligonucleotide
uccacgauccgcccgaguc

SEQ ID NO: 1952382 - RNA, 19 nt, Artificial Sequence
  Description of Artificial Sequence: Synthetic oligonucleotide
ugcgugugagcgauccacg

SEQ ID NO: 1952383 - RNA, 19 nt, Artificial Sequence
  Description of Artificial Sequence: Synthetic oligonucleotide
ucggcuaaggacacccagc

SEQ ID NO: 1952384 - RNA, 19 nt, Artificial Sequence
  Description of Artificial Sequence: Synthetic oligonucleotide
agagaagaugacugaguca

SEQ ID NO: 1952385 - RNA, 19 nt, Artificial Sequence
  Description of Artificial Sequence: Synthetic oligonucleotide
uggcuuuuauuguucccag

SEQ ID NO: 1952386 - RNA, 19 nt, Artificial Sequence
  Description of Artificial Sequence: Synthetic oligonucleotide
cagaguucaucauggugcc

SEQ ID NO: 1952387 - RNA, 19 nt, Artificial Sequence
  Description of Artificial Sequence: Synthetic oligonucleotide
uugucaaaucuucaccaua

SEQ ID NO: 1952388 - RNA, 19 nt, Artificial Sequence
  Description of Artificial Sequence: Synthetic oligonucleotide
ucgucgguccuuuacuccc

SEQ ID NO: 1952389 - RNA, 19 nt, Artificial Sequence
  Description of Artificial Sequence: Synthetic oligonucleotide
gugugagcgauccacgcgc

SEQ ID NO: 1952390 - RNA, 19 nt, Artificial Sequence
  Description of Artificial Sequence: Synthetic oligonucleotide
ucagaguacagguccgcga

SEQ ID NO: 1952391 - RNA, 19 nt, Artificial Sequence
  Description of Artificial Sequence: Synthetic oligonucleotide
agcgaccaucgccacaucg

SEQ ID NO: 1952392 - RNA, 19 nt, Artificial Sequence
  Description of Artificial Sequence: Synthetic oligonucleotide
ggaaucgccucucaucccg

SEQ ID NO: 1952393 - RNA, 19 nt, Artificial Sequence
  Description of Artificial Sequence: Synthetic oligonucleotide
guaggucucagcauccucc

SEQ ID NO: 1952394 - RNA, 19 nt, Artificial Sequence
  Description of Artificial Sequence: Synthetic oligonucleotide
cuuaggaucucagcuuugc

SEQ ID NO: 1952395 - RNA, 19 nt, Artificial Sequence
  Description of Artificial Sequence: Synthetic oligonucleotide
uggucguacuggaaauugc

SEQ ID NO: 1952396 - RNA, 19 nt, Artificial Sequence
  Description of Artificial Sequence: Synthetic oligonucleotide
augacugagucagaguuca

SEQ ID NO: 1952397 - RNA, 19 nt, Artificial Sequence
  Description of Artificial Sequence: Synthetic oligonucleotide
ucguccuaggaaugccucg

SEQ ID NO: 1952398 - RNA, 19 nt, Artificial Sequence
  Description of Artificial Sequence: Synthetic oligonucleotide
uugucuguaucacucucau

SEQ ID NO: 1952399 - RNA, 19 nt, Artificial Sequence
  Description of Artificial Sequence: Synthetic oligonucleotide
acauagccgucuuuguucu

SEQ ID NO: 1952400 - RNA, 19 nt, Artificial Sequence
  Description of Artificial Sequence: Synthetic oligonucleotide
uuaggaucucagcuuugcu

SEQ ID NO: 1952401 - RNA, 19 nt, Artificial Sequence
  Description of Artificial Sequence: Synthetic oligonucleotide
uccaugcgguccacgaucc

SEQ ID NO: 1952402 - RNA, 19 nt, Artificial Sequence
  Description of Artificial Sequence: Synthetic oligonucleotide
ugugagcgauccacgcgcg

SEQ ID NO: 1952403 - RNA, 19 nt, Artificial Sequence
  Description of Artificial Sequence: Synthetic oligonucleotide
cuguaucacucucaugcag

SEQ ID NO: 1952404 - RNA, 19 nt, Artificial Sequence
  Description of Artificial Sequence: Synthetic oligonucleotide
auuccuuggccacgucucg

SEQ ID NO: 1952405 - RNA, 19 nt, Artificial Sequence
  Description of Artificial Sequence: Synthetic oligonucleotide
auggcuuuuauuguuccca

SEQ ID NO: 1952406 - RNA, 19 nt, Artificial Sequence
  Description of Artificial Sequence: Synthetic oligonucleotide
uaggccgucagcucuuccc

SEQ ID NO: 1952407 - RNA, 19 nt, Artificial Sequence
  Description of Artificial Sequence: Synthetic oligonucleotide
augugugggaacuccucag

SEQ ID NO: 1952408 - RNA, 19 nt, Artificial Sequence
  Description of Artificial Sequence: Synthetic oligonucleotide
auacguggcauugcgcaac

SEQ ID NO: 1952409 - RNA, 19 nt, Artificial Sequence
  Description of Artificial Sequence: Synthetic oligonucleotide
acagaagcgaccaucgcca

SEQ ID NO: 1952410 - RNA, 19 nt, Artificial Sequence
  Description of Artificial Sequence: Synthetic oligonucleotide
aguaacccacuucacugcu

SEQ ID NO: 1952411 - RNA, 19 nt, Artificial Sequence
  Description of Artificial Sequence: Synthetic oligonucleotide
guuaccaggccuggguucg

SEQ ID NO: 1952412 - RNA, 19 nt, Artificial Sequence
  Description of Artificial Sequence: Synthetic oligonucleotide
uggaaauugccgugggcgu

SEQ ID NO: 1952413 - RNA, 19 nt, Artificial Sequence
  Description of Artificial Sequence: Synthetic oligonucleotide
acaucgucgguccuuuacu

SEQ ID NO: 1952414 - RNA, 19 nt, Artificial Sequence
  Description of Artificial Sequence: Synthetic oligonucleotide
caugucguaggugugccag

SEQ ID NO: 1952415 - RNA, 19 nt, Artificial Sequence
  Description of Artificial Sequence: Synthetic oligonucleotide
gucguacuggaaauugccg

SEQ ID NO: 1952416 - RNA, 19 nt, Artificial Sequence
  Description of Artificial Sequence: Synthetic oligonucleotide
ugguccgccacccggaauc

SEQ ID NO: 1952417 - RNA, 19 nt, Artificial Sequence
  Description of Artificial Sequence: Synthetic oligonucleotide
guacuggaaauugccgugg

SEQ ID NO: 1952418 - RNA, 19 nt, Artificial Sequence
  Description of Artificial Sequence: Synthetic oligonucleotide
aaucgccucucaucccgag

SEQ ID NO: 1952419 - RNA, 19 nt, Artificial Sequence
  Description of Artificial Sequence: Synthetic oligonucleotide
ccaguaacccacuucacug

SEQ ID NO: 1952420 - RNA, 19 nt, Artificial Sequence
  Description of Artificial Sequence: Synthetic oligonucleotide
acuccucccaacccacgcg

SEQ ID NO: 1952421 - RNA, 19 nt, Artificial Sequence
  Description of Artificial Sequence: Synthetic oligonucleotide
guaggugugccaggcagcg

SEQ ID NO: 1952422 - RNA, 19 nt, Artificial Sequence
  Description of Artificial Sequence: Synthetic oligonucleotide
agcacggugaacucgcuuu

SEQ ID NO: 1952423 - RNA, 19 nt, Artificial Sequence
  Description of Artificial Sequence: Synthetic oligonucleotide
ugggaacuccucagggugc

SEQ ID NO: 1952424 - RNA, 19 nt, Artificial Sequence
  Description of Artificial Sequence: Synthetic oligonucleotide
ucucguccuaggaaugccu

SEQ ID NO: 1952425 - RNA, 19 nt, Artificial Sequence
  Description of Artificial Sequence: Synthetic oligonucleotide
ccuggguucgagaagcacg

SEQ ID NO: 1952426 - RNA, 19 nt, Artificial Sequence
  Description of Artificial Sequence: Synthetic oligonucleotide
gucaaauuccuuggccacg

SEQ ID NO: 1952427 - RNA, 19 nt, Artificial Sequence
  Description of Artificial Sequence: Synthetic oligonucleotide
cuuuuauuguucccaggca

SEQ ID NO: 1952428 - RNA, 19 nt, Artificial Sequence
  Description of Artificial Sequence: Synthetic oligonucleotide
aggccgucagcucuucccg

SEQ ID NO: 1952429 - RNA, 19 nt, Artificial Sequence
  Description of Artificial Sequence: Synthetic oligonucleotide
agucuguacccaggcaggc

SEQ ID NO: 1952430 - RNA, 19 nt, Artificial Sequence
  Description of Artificial Sequence: Synthetic oligonucleotide
agcaaccacgaugucucgc

SEQ ID NO: 1952431 - RNA, 19 nt, Artificial Sequence
  Description of Artificial Sequence: Synthetic oligonucleotide
gcaacagaagcgaccaucg

SEQ ID NO: 1952432 - RNA, 19 nt, Artificial Sequence
  Description of Artificial Sequence: Synthetic oligonucleotide
cuaggaaugccucgugguc

SEQ ID NO: 1952433 - RNA, 19 nt, Artificial Sequence
  Description of Artificial Sequence: Synthetic oligonucleotide
cacccaguaacccacuuca

SEQ ID NO: 1952434 - RNA, 19 nt, Artificial Sequence
  Description of Artificial Sequence: Synthetic oligonucleotide
uccgccacccggaaucgcc

SEQ ID NO: 1952435 - RNA, 19 nt, Artificial Sequence
  Description of Artificial Sequence: Synthetic oligonucleotide
uguaggucucagcauccuc

SEQ ID NO: 1952436 - RNA, 19 nt, Artificial Sequence
  Description of Artificial Sequence: Synthetic oligonucleotide
gauccacgcgcggagcucg

SEQ ID NO: 1952437 - RNA, 19 nt, Artificial Sequence
  Description of Artificial Sequence: Synthetic oligonucleotide
gugaacucgcuuuccagca

SEQ ID NO: 1952438 - RNA, 19 nt, Artificial Sequence
  Description of Artificial Sequence: Synthetic oligonucleotide
ucacucucaugcagcaggu

SEQ ID NO: 1952439 - RNA, 19 nt, Artificial Sequence
  Description of Artificial Sequence: Synthetic oligonucleotide
aguucaucauggugccuug

SEQ ID NO: 1952440 - RNA, 19 nt, Artificial Sequence
  Description of Artificial Sequence: Synthetic oligonucleotide
cauggugccuugucaaauc

SEQ ID NO: 1952441 - RNA, 19 nt, Artificial Sequence
  Description of Artificial Sequence: Synthetic oligonucleotide
ugucguaggugugccaggc

SEQ ID NO: 1952442 - RNA, 19 nt, Artificial Sequence
  Description of Artificial Sequence: Synthetic oligonucleotide
aacucgcuuuccagcaagg

SEQ ID NO: 1952443 - RNA, 19 nt, Artificial Sequence
  Description of Artificial Sequence: Synthetic oligonucleotide
ucucgcaugugugggaacu

SEQ ID NO: 1952444 - RNA, 19 nt, Artificial Sequence
  Description of Artificial Sequence: Synthetic oligonucleotide
caccgagucacggaugugc

SEQ ID NO: 1952445 - RNA, 19 nt, Artificial Sequence
  Description of Artificial Sequence: Synthetic oligonucleotide
agguccgcgauguacuccu

SEQ ID NO: 1952446 - RNA, 19 nt, Artificial Sequence
  Description of Artificial Sequence: Synthetic oligonucleotide
gacugagucagaguucauc

SEQ ID NO: 1952447 - RNA, 19 nt, Artificial Sequence
  Description of Artificial Sequence: Synthetic oligonucleotide
auaggccgucagcucuucc

SEQ ID NO: 1952448 - RNA, 19 nt, Artificial Sequence
  Description of Artificial Sequence: Synthetic oligonucleotide
uccaugucguaggugugcc

SEQ ID NO: 1952449 - RNA, 19 nt, Artificial Sequence
  Description of Artificial Sequence: Synthetic oligonucleotide
augucguaggugugccagg

SEQ ID NO: 1952450 - RNA, 19 nt, Artificial Sequence
  Description of Artificial Sequence: Synthetic oligonucleotide
aacccacuucacugcuauc

SEQ ID NO: 1952451 - RNA, 19 nt, Artificial Sequence
  Description of Artificial Sequence: Synthetic oligonucleotide
cacaucgucgguccuuuac

SEQ ID NO: 1952452 - RNA, 19 nt, Artificial Sequence
  Description of Artificial Sequence: Synthetic oligonucleotide
ugcugcgugugagcgaucc

SEQ ID NO: 1952453 - RNA, 19 nt, Artificial Sequence
  Description of Artificial Sequence: Synthetic oligonucleotide
ugucuguaucacucucaug

SEQ ID NO: 1952454 - RNA, 19 nt, Artificial Sequence
  Description of Artificial Sequence: Synthetic oligonucleotide
gaccaucgccacaucgucg

SEQ ID NO: 1952455 - RNA, 19 nt, Artificial Sequence
  Description of Artificial Sequence: Synthetic oligonucleotide
gucucagggagagaagaug

SEQ ID NO: 1952456 - RNA, 19 nt, Artificial Sequence
  Description of Artificial Sequence: Synthetic oligonucleotide
ugagcgauccacgcgcgga

SEQ ID NO: 1952457 - RNA, 19 nt, Artificial Sequence
  Description of Artificial Sequence: Synthetic oligonucleotide
guggucguacuggaaauug

SEQ ID NO: 1952458 - RNA, 19 nt, Artificial Sequence
  Description of Artificial Sequence: Synthetic oligonucleotide
cucagaguacagguccgcg

SEQ ID NO: 1952459 - RNA, 19 nt, Artificial Sequence
  Description of Artificial Sequence: Synthetic oligonucleotide
caugcgguccacgauccgc

SEQ ID NO: 1952460 - RNA, 19 nt, Artificial Sequence
  Description of Artificial Sequence: Synthetic oligonucleotide
caucgcugucuccagcaag

SEQ ID NO: 1952461 - RNA, 19 nt, Artificial Sequence
  Description of Artificial Sequence: Synthetic oligonucleotide
ggucaaauuccuuggccac

SEQ ID NO: 1952462 - RNA, 19 nt, Artificial Sequence
  Description of Artificial Sequence: Synthetic oligonucleotide
ugaacucgcuuuccagcaa

SEQ ID NO: 1952463 - RNA, 19 nt, Artificial Sequence
  Description of Artificial Sequence: Synthetic oligonucleotide
caucgucgguccuuuacuc

SEQ ID NO: 1952464 - RNA, 19 nt, Artificial Sequence
  Description of Artificial Sequence: Synthetic oligonucleotide
ggucguacuggaaauugcc

SEQ ID NO: 1952465 - RNA, 19 nt, Artificial Sequence
  Description of Artificial Sequence: Synthetic oligonucleotide
caucauggugccuugucaa

SEQ ID NO: 1952466 - RNA, 19 nt, Artificial Sequence
  Description of Artificial Sequence: Synthetic oligonucleotide
ccggaaucgccucucaucc

SEQ ID NO: 1952467 - RNA, 19 nt, Artificial Sequence
  Description of Artificial Sequence: Synthetic oligonucleotide
ggcuuuuauuguucccagg

SEQ ID NO: 1952468 - RNA, 19 nt, Artificial Sequence
  Description of Artificial Sequence: Synthetic oligonucleotide
gaguccccauccugguccg

SEQ ID NO: 1952469 - RNA, 19 nt, Artificial Sequence
  Description of Artificial Sequence: Synthetic oligonucleotide
ucguggucguacuggaaau

SEQ ID NO: 1952470 - RNA, 19 nt, Artificial Sequence
  Description of Artificial Sequence: Synthetic oligonucleotide
caugugugggaacuccuca

SEQ ID NO: 1952471 - RNA, 19 nt, Artificial Sequence
  Description of Artificial Sequence: Synthetic oligonucleotide
ggcauugcgcaacuccucc

SEQ ID NO: 1952472 - RNA, 19 nt, Artificial Sequence
  Description of Artificial Sequence: Synthetic oligonucleotide
ucgcaugugugggaacucc

SEQ ID NO: 1952473 - RNA, 19 nt, Artificial Sequence
  Description of Artificial Sequence: Synthetic oligonucleotide
gaaauugccgugggcguca

SEQ ID NO: 1952474 - RNA, 19 nt, Artificial Sequence
  Description of Artificial Sequence: Synthetic oligonucleotide
gagcgauccacgcgcggag

SEQ ID NO: 1952475 - RNA, 19 nt, Artificial Sequence
  Description of Artificial Sequence: Synthetic oligonucleotide
caggugguuggccuccacc

SEQ ID NO: 1952476 - RNA, 19 nt, Artificial Sequence
  Description of Artificial Sequence: Synthetic oligonucleotide
agaguacagguccgcgaug

SEQ ID NO: 1952477 - RNA, 19 nt, Artificial Sequence
  Description of Artificial Sequence: Synthetic oligonucleotide
ucgggccuggcuuuccucu

SEQ ID NO: 1952478 - RNA, 19 nt, Artificial Sequence
  Description of Artificial Sequence: Synthetic oligonucleotide
gguccuuuacucccguuac

SEQ ID NO: 1952479 - RNA, 19 nt, Artificial Sequence
  Description of Artificial Sequence: Synthetic oligonucleotide
aacccacgcgcccgucgcg

SEQ ID NO: 1952480 - RNA, 19 nt, Artificial Sequence
  Description of Artificial Sequence: Synthetic oligonucleotide
caacagaagcgaccaucgc

SEQ ID NO: 1952481 - RNA, 19 nt, Artificial Sequence
  Description of Artificial Sequence: Synthetic oligonucleotide
aggcagcacccaguaaccc

SEQ ID NO: 1952482 - RNA, 19 nt, Artificial Sequence
  Description of Artificial Sequence: Synthetic oligonucleotide
cucguccuaggaaugccuc

SEQ ID NO: 1952483 - RNA, 19 nt, Artificial Sequence
  Description of Artificial Sequence: Synthetic oligonucleotide
uuacucccguuaccaggcc

SEQ ID NO: 1952484 - RNA, 19 nt, Artificial Sequence
  Description of Artificial Sequence: Synthetic oligonucleotide
aucauggugccuugucaaa

SEQ ID NO: 1952485 - RNA, 19 nt, Artificial Sequence
  Description of Artificial Sequence: Synthetic oligonucleotide
ugccgugggcgucaucgug

SEQ ID NO: 1952486 - RNA, 19 nt, Artificial Sequence
  Description of Artificial Sequence: Synthetic oligonucleotide
aucgcugucuccagcaaga

SEQ ID NO: 1952487 - RNA, 19 nt, Artificial Sequence
  Description of Artificial Sequence: Synthetic oligonucleotide
ggugcagauaggccgucag

SEQ ID NO: 1952488 - RNA, 19 nt, Artificial Sequence
  Description of Artificial Sequence: Synthetic oligonucleotide
cugcgugugagcgauccac

SEQ ID NO: 1952489 - RNA, 19 nt, Artificial Sequence
  Description of Artificial Sequence: Synthetic oligonucleotide
agacggccauccuugucug

SEQ ID NO: 1952490 - RNA, 19 nt, Artificial Sequence
  Description of Artificial Sequence: Synthetic oligonucleotide
gucgcgguccaugucguag

SEQ ID NO: 1952491 - RNA, 19 nt, Artificial Sequence
  Description of Artificial Sequence: Synthetic oligonucleotide
cugaugcacccugccaugg

SEQ ID NO: 1952492 - RNA, 19 nt, Artificial Sequence
  Description of Artificial Sequence: Synthetic oligonucleotide
cacgauccgcccgagucgg

SEQ ID NO: 1952493 - RNA, 19 nt, Artificial Sequence
  Description of Artificial Sequence: Synthetic oligonucleotide
gauccgcccgagucgggcc

SEQ ID NO: 1952494 - RNA, 19 nt, Artificial Sequence
  Description of Artificial Sequence: Synthetic oligonucleotide
acacccagccaucgcuguc

SEQ ID NO: 1952495 - RNA, 19 nt, Artificial Sequence
  Description of Artificial Sequence: Synthetic oligonucleotide
ugucucgcaugugugggaa

SEQ ID NO: 1952496 - RNA, 19 nt, Artificial Sequence
  Description of Artificial Sequence: Synthetic oligonucleotide
aauugccgugggcgucauc

SEQ ID NO: 1952497 - RNA, 19 nt, Artificial Sequence
  Description of Artificial Sequence: Synthetic oligonucleotide
uggcauugcgcaacuccuc

SEQ ID NO: 1952498 - RNA, 19 nt, Artificial Sequence
  Description of Artificial Sequence: Synthetic oligonucleotide
ggguucgagaagcacggug

SEQ ID NO: 1952499 - RNA, 19 nt, Artificial Sequence
  Description of Artificial Sequence: Synthetic oligonucleotide
agaagcgaccaucgccaca

SEQ ID NO: 1952500 - RNA, 19 nt, Artificial Sequence
  Description of Artificial Sequence: Synthetic oligonucleotide
guggccauacguggcauug

SEQ ID NO: 1952501 - RNA, 19 nt, Artificial Sequence
  Description of Artificial Sequence: Synthetic oligonucleotide
gucacggaugugccgcugc

SEQ ID NO: 1952502 - RNA, 19 nt, Artificial Sequence
  Description of Artificial Sequence: Synthetic oligonucleotide
uugcgcaacuccucccaac

SEQ ID NO: 1952503 - RNA, 19 nt, Artificial Sequence
  Description of Artificial Sequence: Synthetic oligonucleotide
aagcacggugaacucgcuu

SEQ ID NO: 1952504 - RNA, 19 nt, Artificial Sequence
  Description of Artificial Sequence: Synthetic oligonucleotide
uggccaugaggcccggcgu

SEQ ID NO: 1952505 - RNA, 19 nt, Artificial Sequence
  Description of Artificial Sequence: Synthetic oligonucleotide
agcgauccacgcgcggagc

SEQ ID NO: 1952506 - RNA, 19 nt, Artificial Sequence
  Description of Artificial Sequence: Synthetic oligonucleotide
uucgagaagcacggugaac

SEQ ID NO: 1952507 - RNA, 19 nt, Artificial Sequence
  Description of Artificial Sequence: Synthetic oligonucleotide
acgaugucucgcaugugug

SEQ ID NO: 1952508 - RNA, 19 nt, Artificial Sequence
  Description of Artificial Sequence: Synthetic oligonucleotide
gaagcgaccaucgccacau

SEQ ID NO: 1952509 - RNA, 19 nt, Artificial Sequence
  Description of Artificial Sequence: Synthetic oligonucleotide
uccucccaacccacgcgcc

SEQ ID NO: 1952510 - RNA, 19 nt, Artificial Sequence
  Description of Artificial Sequence: Synthetic oligonucleotide
ccauacguggcauugcgca

SEQ ID NO: 1952511 - RNA, 19 nt, Artificial Sequence
  Description of Artificial Sequence: Synthetic oligonucleotide
cugaguuggucaaauuccu

SEQ ID NO: 1952512 - RNA, 19 nt, Artificial Sequence
  Description of Artificial Sequence: Synthetic oligonucleotide
gcuaaggacacccagccau

SEQ ID NO: 1952513 - RNA, 19 nt, Artificial Sequence
  Description of Artificial Sequence: Synthetic oligonucleotide
caacccacgcgcccgucgc

SEQ ID NO: 1952514 - RNA, 19 nt, Artificial Sequence
  Description of Artificial Sequence: Synthetic oligonucleotide
aggcagcgcucaccgaguc

SEQ ID NO: 1952515 - RNA, 19 nt, Artificial Sequence
  Description of Artificial Sequence: Synthetic oligonucleotide
gcaaccacgaugucucgca

SEQ ID NO: 1952516 - RNA, 19 nt, Artificial Sequence
  Description of Artificial Sequence: Synthetic oligonucleotide
aagcgaccaucgccacauc

SEQ ID NO: 1952517 - RNA, 19 nt, Artificial Sequence
  Description of Artificial Sequence: Synthetic oligonucleotide
gcucauaguggccauacgu

SEQ ID NO: 1952518 - RNA, 19 nt, Artificial Sequence
  Description of Artificial Sequence: Synthetic oligonucleotide
auugcgcaacuccucccaa

SEQ ID NO: 1952519 - RNA, 19 nt, Artificial Sequence
  Description of Artificial Sequence: Synthetic oligonucleotide
gccgucuuuguucuuguca

SEQ ID NO: 1952520 - RNA, 19 nt, Artificial Sequence
  Description of Artificial Sequence: Synthetic oligonucleotide
gucucguccuaggaaugcc

SEQ ID NO: 1952521 - RNA, 19 nt, Artificial Sequence
  Description of Artificial Sequence: Synthetic oligonucleotide
cagacggccauccuugucu

SEQ ID NO: 1952522 - RNA, 19 nt, Artificial Sequence
  Description of Artificial Sequence: Synthetic oligonucleotide
cccgucgcgguccaugucg

SEQ ID NO: 1952523 - RNA, 19 nt, Artificial Sequence
  Description of Artificial Sequence: Synthetic oligonucleotide
gugagcgauccacgcgcgg

SEQ ID NO: 1952524 - RNA, 19 nt, Artificial Sequence
  Description of Artificial Sequence: Synthetic oligonucleotide
uuggccacgucucguccua

SEQ ID NO: 1952525 - RNA, 19 nt, Artificial Sequence
  Description of Artificial Sequence: Synthetic oligonucleotide
agccgcccauccuuguuca

SEQ ID NO: 1952526 - RNA, 19 nt, Artificial Sequence
  Description of Artificial Sequence: Synthetic oligonucleotide
uguucccaggcagcccgag

SEQ ID NO: 1952527 - RNA, 19 nt, Artificial Sequence
  Description of Artificial Sequence: Synthetic oligonucleotide
guccuaggaaugccucgug

SEQ ID NO: 1952528 - RNA, 19 nt, Artificial Sequence
  Description of Artificial Sequence: Synthetic oligonucleotide
acccaguaacccacuucac

SEQ ID NO: 1952529 - RNA, 19 nt, Artificial Sequence
  Description of Artificial Sequence: Synthetic oligonucleotide
cagauaggccgucagcucu

SEQ ID NO: 1952530 - RNA, 19 nt, Artificial Sequence
  Description of Artificial Sequence: Synthetic oligonucleotide
cagcaaccacgaugucucg

SEQ ID NO: 1952531 - RNA, 19 nt, Artificial Sequence
  Description of Artificial Sequence: Synthetic oligonucleotide
agaucccggaagucccgga

SEQ ID NO: 1952532 - RNA, 19 nt, Artificial Sequence
  Description of Artificial Sequence: Synthetic oligonucleotide
cagaucccggaagucccgg

SEQ ID NO: 1952533 - RNA, 19 nt, Artificial Sequence
  Description of Artificial Sequence: Synthetic oligonucleotide
ggcucauaguggccauacg

SEQ ID NO: 1952534 - RNA, 19 nt, Artificial Sequence
  Description of Artificial Sequence: Synthetic oligonucleotide
uggccauacguggcauugc

SEQ ID NO: 1952535 - RNA, 19 nt, Artificial Sequence
  Description of Artificial Sequence: Synthetic oligonucleotide
cauacguggcauugcgcaa

SEQ ID NO: 1952536 - RNA, 19 nt, Artificial Sequence
  Description of Artificial Sequence: Synthetic oligonucleotide
ccuuuacucccguuaccag

SEQ ID NO: 1952537 - RNA, 19 nt, Artificial Sequence
  Description of Artificial Sequence: Synthetic oligonucleotide
gaucucagcuuugcucaga

SEQ ID NO: 1952538 - RNA, 19 nt, Artificial Sequence
  Description of Artificial Sequence: Synthetic oligonucleotide
cagaagcgaccaucgccac

SEQ ID NO: 1952539 - RNA, 19 nt, Artificial Sequence
  Description of Artificial Sequence: Synthetic oligonucleotide
ucucaugcagcaggugguu

SEQ ID NO: 1952540 - RNA, 19 nt, Artificial Sequence
  Description of Artificial Sequence: Synthetic oligonucleotide
cgaugucucgcaugugugg

SEQ ID NO: 1952541 - RNA, 19 nt, Artificial Sequence
  Description of Artificial Sequence: Synthetic oligonucleotide
cacgucucguccuaggaau

SEQ ID NO: 1952542 - RNA, 19 nt, Artificial Sequence
  Description of Artificial Sequence: Synthetic oligonucleotide
ucccguuaccaggccuggg

SEQ ID NO: 1952543 - RNA, 19 nt, Artificial Sequence
  Description of Artificial Sequence: Synthetic oligonucleotide
gcuauccagccgcccaucc

SEQ ID NO: 1952544 - RNA, 19 nt, Artificial Sequence
  Description of Artificial Sequence: Synthetic oligonucleotide
agucgggccuggcuuuccu

SEQ ID NO: 1952545 - RNA, 19 nt, Artificial Sequence
  Description of Artificial Sequence: Synthetic oligonucleotide
uugcucagacggccauccu

SEQ ID NO: 1952546 - RNA, 19 nt, Artificial Sequence
  Description of Artificial Sequence: Synthetic oligonucleotide
ccacgauccgcccgagucg

SEQ ID NO: 1952547 - RNA, 19 nt, Artificial Sequence
  Description of Artificial Sequence: Synthetic oligonucleotide
gaggcccggcgucagggga

SEQ ID NO: 1952548 - RNA, 19 nt, Artificial Sequence
  Description of Artificial Sequence: Synthetic oligonucleotide
uguacccaggcaggcuccu

SEQ ID NO: 1952549 - RNA, 19 nt, Artificial Sequence
  Description of Artificial Sequence: Synthetic oligonucleotide
cuuugcucagacggccauc

SEQ ID NO: 1952550 - RNA, 19 nt, Artificial Sequence
  Description of Artificial Sequence: Synthetic oligonucleotide
caucgccacaucgucgguc

SEQ ID NO: 1952551 - RNA, 19 nt, Artificial Sequence
  Description of Artificial Sequence: Synthetic oligonucleotide
cagguccgcgauguacucc

SEQ ID NO: 1952552 - RNA, 19 nt, Artificial Sequence
  Description of Artificial Sequence: Synthetic oligonucleotide
gcgugugagcgauccacgc

SEQ ID NO: 1952553 - RNA, 19 nt, Artificial Sequence
  Description of Artificial Sequence: Synthetic oligonucleotide
cauaauugguggccuggcu

SEQ ID NO: 1952554 - RNA, 19 nt, Artificial Sequence
  Description of Artificial Sequence: Synthetic oligonucleotide
gccgugggcgucaucgugg

SEQ ID NO: 1952555 - RNA, 19 nt, Artificial Sequence
  Description of Artificial Sequence: Synthetic oligonucleotide
ugacugagucagaguucau

SEQ ID NO: 1952556 - RNA, 19 nt, Artificial Sequence
  Description of Artificial Sequence: Synthetic oligonucleotide
cucccguuaccaggccugg

SEQ ID NO: 1952557 - RNA, 19 nt, Artificial Sequence
  Description of Artificial Sequence: Synthetic oligonucleotide
cgugugagcgauccacgcg

SEQ ID NO: 1952558 - RNA, 19 nt, Artificial Sequence
  Description of Artificial Sequence: Synthetic oligonucleotide
gcggagcucggcuaaggac

SEQ ID NO: 1952559 - RNA, 19 nt, Artificial Sequence
  Description of Artificial Sequence: Synthetic oligonucleotide
uugccgugggcgucaucgu

SEQ ID NO: 1952560 - RNA, 19 nt, Artificial Sequence
  Description of Artificial Sequence: Synthetic oligonucleotide
cgagucacggaugugccgc

SEQ ID NO: 1952561 - RNA, 19 nt, Artificial Sequence
  Description of Artificial Sequence: Synthetic oligonucleotide
caaauuccuuggccacguc

SEQ ID NO: 1952562 - RNA, 19 nt, Artificial Sequence
  Description of Artificial Sequence: Synthetic oligonucleotide
cccggaaucgccucucauc

SEQ ID NO: 1952563 - RNA, 19 nt, Artificial Sequence
  Description of Artificial Sequence: Synthetic oligonucleotide
agcacccaguaacccacuu

SEQ ID NO: 1952564 - RNA, 19 nt, Artificial Sequence
  Description of Artificial Sequence: Synthetic oligonucleotide
acgucucguccuaggaaug

SEQ ID NO: 1952565 - RNA, 19 nt, Artificial Sequence
  Description of Artificial Sequence: Synthetic oligonucleotide
cagcaauggcuuuuauugu

SEQ ID NO: 1952566 - RNA, 19 nt, Artificial Sequence
  Description of Artificial Sequence: Synthetic oligonucleotide
ccgucuuuguucuugucaa

SEQ ID NO: 1952567 - RNA, 19 nt, Artificial Sequence
  Description of Artificial Sequence: Synthetic oligonucleotide
ccugaugcacccugccaug

SEQ ID NO: 1952568 - RNA, 19 nt, Artificial Sequence
  Description of Artificial Sequence: Synthetic oligonucleotide
gaaucgccucucaucccga

SEQ ID NO: 1952569 - RNA, 19 nt, Artificial Sequence
  Description of Artificial Sequence: Synthetic oligonucleotide
ggccacgucucguccuagg

SEQ ID NO: 1952570 - RNA, 19 nt, Artificial Sequence
  Description of Artificial Sequence: Synthetic oligonucleotide
gauccaugcgguccacgau

SEQ ID NO: 1952571 - RNA, 19 nt, Artificial Sequence
  Description of Artificial Sequence: Synthetic oligonucleotide
ggaaauugccgugggcguc

SEQ ID NO: 1952572 - RNA, 19 nt, Artificial Sequence
  Description of Artificial Sequence: Synthetic oligonucleotide
gauaggccgucagcucuuc

SEQ ID NO: 1952573 - RNA, 19 nt, Artificial Sequence
  Description of Artificial Sequence: Synthetic oligonucleotide
ucccaacccacgcgcccgu

SEQ ID NO: 1952574 - RNA, 19 nt, Artificial Sequence
  Description of Artificial Sequence: Synthetic oligonucleotide
ggaagucccggaacugcug

SEQ ID NO: 1952575 - RNA, 19 nt, Artificial Sequence
  Description of Artificial Sequence: Synthetic oligonucleotide
gucucgcaugugugggaac

SEQ ID NO: 1952576 - RNA, 19 nt, Artificial Sequence
  Description of Artificial Sequence: Synthetic oligonucleotide
ggcgucaggggauggcuuc

SEQ ID NO: 1952577 - RNA, 19 nt, Artificial Sequence
  Description of Artificial Sequence: Synthetic oligonucleotide
ugcuauccagccgcccauc

SEQ ID NO: 1952578 - RNA, 19 nt, Artificial Sequence
  Description of Artificial Sequence: Synthetic oligonucleotide
gucguaggugugccaggca

SEQ ID NO: 1952579 - RNA, 19 nt, Artificial Sequence
  Description of Artificial Sequence: Synthetic oligonucleotide
aaauugccgugggcgucau

SEQ ID NO: 1952580 - RNA, 19 nt, Artificial Sequence
  Description of Artificial Sequence: Synthetic oligonucleotide
cacugcuauccagccgccc

SEQ ID NO: 1952581 - RNA, 19 nt, Artificial Sequence
  Description of Artificial Sequence: Synthetic oligonucleotide
acccggaaucgccucucau

SEQ ID NO: 1952582 - RNA, 19 nt, Artificial Sequence
  Description of Artificial Sequence: Synthetic oligonucleotide
ccgagucacggaugugccg

SEQ ID NO: 1952583 - RNA, 19 nt, Artificial Sequence
  Description of Artificial Sequence: Synthetic oligonucleotide
cguaggugugccaggcagc

SEQ ID NO: 1952584 - RNA, 19 nt, Artificial Sequence
  Description of Artificial Sequence: Synthetic oligonucleotide
aguccccauccugguccgc

SEQ ID NO: 1952585 - RNA, 19 nt, Artificial Sequence
  Description of Artificial Sequence: Synthetic oligonucleotide
gcacccaguaacccacuuc

SEQ ID NO: 1952586 - RNA, 19 nt, Artificial Sequence
  Description of Artificial Sequence: Synthetic oligonucleotide
cacucucaugcagcaggug

SEQ ID NO: 1952587 - RNA, 19 nt, Artificial Sequence
  Description of Artificial Sequence: Synthetic oligonucleotide
cacgcgcccgucgcggucc

SEQ ID NO: 1952588 - RNA, 19 nt, Artificial Sequence
  Description of Artificial Sequence: Synthetic oligonucleotide
caagauccaugcgguccac

SEQ ID NO: 1952589 - RNA, 19 nt, Artificial Sequence
  Description of Artificial Sequence: Synthetic oligonucleotide
ccaacccacgcgcccgucg

SEQ ID NO: 1952590 - RNA, 19 nt, Artificial Sequence
  Description of Artificial Sequence: Synthetic oligonucleotide
ucgccacaucgucgguccu

SEQ ID NO: 1952591 - RNA, 19 nt, Artificial Sequence
  Description of Artificial Sequence: Synthetic oligonucleotide
uggguucgagaagcacggu

SEQ ID NO: 1952592 - RNA, 19 nt, Artificial Sequence
  Description of Artificial Sequence: Synthetic oligonucleotide
ccggaagucccggaacugc

SEQ ID NO: 1952593 - RNA, 19 nt, Artificial Sequence
  Description of Artificial Sequence: Synthetic oligonucleotide
agauaggccgucagcucuu

SEQ ID NO: 1952594 - RNA, 19 nt, Artificial Sequence
  Description of Artificial Sequence: Synthetic oligonucleotide
gcgcaacuccucccaaccc

SEQ ID NO: 1952595 - RNA, 19 nt, Artificial Sequence
  Description of Artificial Sequence: Synthetic oligonucleotide
cugagucagaguucaucau

SEQ ID NO: 1952596 - RNA, 19 nt, Artificial Sequence
  Description of Artificial Sequence: Synthetic oligonucleotide
uuaccaggccuggguucga

SEQ ID NO: 1952597 - RNA, 19 nt, Artificial Sequence
  Description of Artificial Sequence: Synthetic oligonucleotide
ucgcugucuccagcaagau

SEQ ID NO: 1952598 - RNA, 19 nt, Artificial Sequence
  Description of Artificial Sequence: Synthetic oligonucleotide
gagucgggccuggcuuucc

SEQ ID NO: 1952599 - RNA, 19 nt, Artificial Sequence
  Description of Artificial Sequence: Synthetic oligonucleotide
agcccgagggguggggaca

SEQ ID NO: 1952600 - RNA, 19 nt, Artificial Sequence
  Description of Artificial Sequence: Synthetic oligonucleotide
acguggcauugcgcaacuc

SEQ ID NO: 1952601 - RNA, 19 nt, Artificial Sequence
  Description of Artificial Sequence: Synthetic oligonucleotide
gguccgccacccggaaucg

SEQ ID NO: 1952602 - RNA, 19 nt, Artificial Sequence
  Description of Artificial Sequence: Synthetic oligonucleotide
gcuuaggaucucagcuuug

SEQ ID NO: 1952603 - RNA, 19 nt, Artificial Sequence
  Description of Artificial Sequence: Synthetic oligonucleotide
ggcuaaggacacccagcca

SEQ ID NO: 1952604 - RNA, 19 nt, Artificial Sequence
  Description of Artificial Sequence: Synthetic oligonucleotide
gccauacguggcauugcgc

SEQ ID NO: 1952605 - RNA, 19 nt, Artificial Sequence
  Description of Artificial Sequence: Synthetic oligonucleotide
ccuaggaaugccucguggu

SEQ ID NO: 1952606 - RNA, 19 nt, Artificial Sequence
  Description of Artificial Sequence: Synthetic oligonucleotide
ggccaugaggcccggcguc

SEQ ID NO: 1952607 - RNA, 19 nt, Artificial Sequence
  Description of Artificial Sequence: Synthetic oligonucleotide
acgcgcggagcucggcuaa

SEQ ID NO: 1952608 - RNA, 19 nt, Artificial Sequence
  Description of Artificial Sequence: Synthetic oligonucleotide
gccucucaucccgagccag

SEQ ID NO: 1952609 - RNA, 19 nt, Artificial Sequence
  Description of Artificial Sequence: Synthetic oligonucleotide
ccucccaacccacgcgccc

SEQ ID NO: 1952610 - RNA, 19 nt, Artificial Sequence
  Description of Artificial Sequence: Synthetic oligonucleotide
ggccauccuugucuguauc

SEQ ID NO: 1952611 - RNA, 19 nt, Artificial Sequence
  Description of Artificial Sequence: Synthetic oligonucleotide
cguuaccaggccuggguuc

SEQ ID NO: 1952612 - RNA, 19 nt, Artificial Sequence
  Description of Artificial Sequence: Synthetic oligonucleotide
gagcucggcuaaggacacc

SEQ ID NO: 1952613 - RNA, 19 nt, Artificial Sequence
  Description of Artificial Sequence: Synthetic oligonucleotide
gagucacggaugugccgcu

SEQ ID NO: 1952614 - RNA, 19 nt, Artificial Sequence
  Description of Artificial Sequence: Synthetic oligonucleotide
ccucagaguacagguccgc

SEQ ID NO: 1952615 - RNA, 19 nt, Artificial Sequence
  Description of Artificial Sequence: Synthetic oligonucleotide
cgucgguccuuuacucccg

SEQ ID NO: 1952616 - RNA, 19 nt, Artificial Sequence
  Description of Artificial Sequence: Synthetic oligonucleotide
guaacccacuucacugcua

SEQ ID NO: 1952617 - RNA, 19 nt, Artificial Sequence
  Description of Artificial Sequence: Synthetic oligonucleotide
cuauccagccgcccauccu

SEQ ID NO: 1952618 - RNA, 19 nt, Artificial Sequence
  Description of Artificial Sequence: Synthetic oligonucleotide
ggggucucagggagagaag

SEQ ID NO: 1952619 - RNA, 19 nt, Artificial Sequence
  Description of Artificial Sequence: Synthetic oligonucleotide
cgagaagcacggugaacuc

SEQ ID NO: 1952620 - RNA, 19 nt, Artificial Sequence
  Description of Artificial Sequence: Synthetic oligonucleotide
cgaccaucgccacaucguc

SEQ ID NO: 1952621 - RNA, 19 nt, Artificial Sequence
  Description of Artificial Sequence: Synthetic oligonucleotide
ccgcucagucuguacccag

SEQ ID NO: 1952622 - RNA, 19 nt, Artificial Sequence
  Description of Artificial Sequence: Synthetic oligonucleotide
auccacgcgcggagcucgg

SEQ ID NO: 1952623 - RNA, 19 nt, Artificial Sequence
  Description of Artificial Sequence: Synthetic oligonucleotide
cgucucguccuaggaaugc

SEQ ID NO: 1952624 - RNA, 19 nt, Artificial Sequence
  Description of Artificial Sequence: Synthetic oligonucleotide
gcucaccgagucacggaug

SEQ ID NO: 1952625 - RNA, 19 nt, Artificial Sequence
  Description of Artificial Sequence: Synthetic oligonucleotide
gaagcacggugaacucgcu

SEQ ID NO: 1952626 - RNA, 19 nt, Artificial Sequence
  Description of Artificial Sequence: Synthetic oligonucleotide
cacgcgcggagcucggcua

SEQ ID NO: 1952627 - RNA, 19 nt, Artificial Sequence
  Description of Artificial Sequence: Synthetic oligonucleotide
cggaaucgccucucauccc

SEQ ID NO: 1952628 - RNA, 19 nt, Artificial Sequence
  Description of Artificial Sequence: Synthetic oligonucleotide
acgauccgcccgagucggg

SEQ ID NO: 1952629 - RNA, 19 nt, Artificial Sequence
  Description of Artificial Sequence: Synthetic oligonucleotide
gcucccugaugcacccugc

SEQ ID NO: 1952630 - RNA, 19 nt, Artificial Sequence
  Description of Artificial Sequence: Synthetic oligonucleotide
ccgcgauguacuccuccac

SEQ ID NO: 1952631 - RNA, 19 nt, Artificial Sequence
  Description of Artificial Sequence: Synthetic oligonucleotide
gucgguccuuuacucccgu

SEQ ID NO: 1952632 - RNA, 19 nt, Artificial Sequence
  Description of Artificial Sequence: Synthetic oligonucleotide
ccaugcgguccacgauccg

SEQ ID NO: 1952633 - RNA, 19 nt, Artificial Sequence
  Description of Artificial Sequence: Synthetic oligonucleotide
caggcagcgcucaccgagu

SEQ ID NO: 1952634 - RNA, 19 nt, Artificial Sequence
  Description of Artificial Sequence: Synthetic oligonucleotide
gccuggguucgagaagcac

SEQ ID NO: 1952635 - RNA, 19 nt, Artificial Sequence
  Description of Artificial Sequence: Synthetic oligonucleotide
ugcugccgcucagucugua

SEQ ID NO: 1952636 - RNA, 19 nt, Artificial Sequence
  Description of Artificial Sequence: Synthetic oligonucleotide
ccacgucucguccuaggaa

SEQ ID NO: 1952637 - RNA, 19 nt, Artificial Sequence
  Description of Artificial Sequence: Synthetic oligonucleotide
gcgcggagcucggcuaagg

SEQ ID NO: 1952638 - RNA, 19 nt, Artificial Sequence
  Description of Artificial Sequence: Synthetic oligonucleotide
gcgaccaucgccacaucgu

SEQ ID NO: 1952639 - RNA, 19 nt, Artificial Sequence
  Description of Artificial Sequence: Synthetic oligonucleotide
guccgccacccggaaucgc

SEQ ID NO: 1952640 - RNA, 19 nt, Artificial Sequence
  Description of Artificial Sequence: Synthetic oligonucleotide
guacccaggcaggcuccuc

SEQ ID NO: 1952641 - RNA, 19 nt, Artificial Sequence
  Description of Artificial Sequence: Synthetic oligonucleotide
gcgcucaccgagucacgga

SEQ ID NO: 1952642 - RNA, 19 nt, Artificial Sequence
  Description of Artificial Sequence: Synthetic oligonucleotide
gcugcgugugagcgaucca

SEQ ID NO: 1952643 - RNA, 19 nt, Artificial Sequence
  Description of Artificial Sequence: Synthetic oligonucleotide
aggcccggcgucaggggau

SEQ ID NO: 1952644 - RNA, 19 nt, Artificial Sequence
  Description of Artificial Sequence: Synthetic oligonucleotide
gccgcccauccuuguucag

SEQ ID NO: 1952645 - RNA, 19 nt, Artificial Sequence
  Description of Artificial Sequence: Synthetic oligonucleotide
cugcugcgugugagcgauc

SEQ ID NO: 1952646 - RNA, 19 nt, Artificial Sequence
  Description of Artificial Sequence: Synthetic oligonucleotide
gguccacgauccgcccgag

SEQ ID NO: 1952647 - RNA, 19 nt, Artificial Sequence
  Description of Artificial Sequence: Synthetic oligonucleotide
cgauccgcccgagucgggc

SEQ ID NO: 1952648 - RNA, 19 nt, Artificial Sequence
  Description of Artificial Sequence: Synthetic oligonucleotide
ggacugaguuggucaaauu

SEQ ID NO: 1952649 - RNA, 19 nt, Artificial Sequence
  Description of Artificial Sequence: Synthetic oligonucleotide
cccguuaccaggccugggu

SEQ ID NO: 1952650 - RNA, 19 nt, Artificial Sequence
  Description of Artificial Sequence: Synthetic oligonucleotide
gccgcucagucuguaccca

SEQ ID NO: 1952651 - RNA, 19 nt, Artificial Sequence
  Description of Artificial Sequence: Synthetic oligonucleotide
cccgggcuccucagaguac

SEQ ID NO: 1952652 - RNA, 19 nt, Artificial Sequence
  Description of Artificial Sequence: Synthetic oligonucleotide
gcgauccacgcgcggagcu

SEQ ID NO: 1952653 - RNA, 19 nt, Artificial Sequence
  Description of Artificial Sequence: Synthetic oligonucleotide
gggugcagauaggccguca

SEQ ID NO: 1952654 - RNA, 19 nt, Artificial Sequence
  Description of Artificial Sequence: Synthetic oligonucleotide
gcgcccgucgcgguccaug

SEQ ID NO: 1952655 - RNA, 19 nt, Artificial Sequence
  Description of Artificial Sequence: Synthetic oligonucleotide
ccccgggcuccucagagua

SEQ ID NO: 1952656 - RNA, 19 nt, Artificial Sequence
  Description of Artificial Sequence: Synthetic oligonucleotide
acgcgcccgucgcggucca

SEQ ID NO: 1952657 - RNA, 19 nt, Artificial Sequence
  Description of Artificial Sequence: Synthetic oligonucleotide
guccacgauccgcccgagu

SEQ ID NO: 1952658 - RNA, 19 nt, Artificial Sequence
  Description of Artificial Sequence: Synthetic oligonucleotide
ccccggcucauaguggcca

SEQ ID NO: 1952659 - RNA, 19 nt, Artificial Sequence
  Description of Artificial Sequence: Synthetic oligonucleotide
ccacccggaaucgccucuc

SEQ ID NO: 1952660 - RNA, 19 nt, Artificial Sequence
  Description of Artificial Sequence: Synthetic oligonucleotide
cauagccgucuuuguucuu

SEQ ID NO: 1952661 - RNA, 19 nt, Artificial Sequence
  Description of Artificial Sequence: Synthetic oligonucleotide
ccacgaugucucgcaugug

SEQ ID NO: 1952662 - RNA, 19 nt, Artificial Sequence
  Description of Artificial Sequence: Synthetic oligonucleotide
gccacccggaaucgccucu

SEQ ID NO: 1952663 - RNA, 19 nt, Artificial Sequence
  Description of Artificial Sequence: Synthetic oligonucleotide
ccggaacugcugccgcuca

SEQ ID NO: 1952664 - RNA, 19 nt, Artificial Sequence
  Description of Artificial Sequence: Synthetic oligonucleotide
cgguccacgauccgcccga

SEQ ID NO: 1952665 - RNA, 19 nt, Artificial Sequence
  Description of Artificial Sequence: Synthetic oligonucleotide
ggccuggguucgagaagca

SEQ ID NO: 1952666 - RNA, 19 nt, Artificial Sequence
  Description of Artificial Sequence: Synthetic oligonucleotide
cugguccgccacccggaau

SEQ ID NO: 1952667 - RNA, 19 nt, Artificial Sequence
  Description of Artificial Sequence: Synthetic oligonucleotide
cccgagucgggccuggcuu

SEQ ID NO: 1952668 - RNA, 19 nt, Artificial Sequence
  Description of Artificial Sequence: Synthetic oligonucleotide
gccacaucgucgguccuuu

SEQ ID NO: 1952669 - RNA, 19 nt, Artificial Sequence
  Description of Artificial Sequence: Synthetic oligonucleotide
cgauccacgcgcggagcuc

SEQ ID NO: 1952670 - RNA, 19 nt, Artificial Sequence
  Description of Artificial Sequence: Synthetic oligonucleotide
gcccgucgcgguccauguc

SEQ ID NO: 1952671 - RNA, 19 nt, Artificial Sequence
  Description of Artificial Sequence: Synthetic oligonucleotide
ccacgcgcccgucgcgguc

SEQ ID NO: 1952672 - RNA, 19 nt, Artificial Sequence
  Description of Artificial Sequence: Synthetic oligonucleotide
ccugguccgccacccggaa

SEQ ID NO: 1952673 - RNA, 19 nt, Artificial Sequence
  Description of Artificial Sequence: Synthetic oligonucleotide
cgccacccggaaucgccuc

SEQ ID NO: 1952674 - RNA, 19 nt, Artificial Sequence
  Description of Artificial Sequence: Synthetic oligonucleotide
cgcucaccgagucacggau

SEQ ID NO: 1952675 - RNA, 19 nt, Artificial Sequence
  Description of Artificial Sequence: Synthetic oligonucleotide
ccguuaccaggccuggguu

SEQ ID NO: 1952676 - RNA, 19 nt, Artificial Sequence
  Description of Artificial Sequence: Synthetic oligonucleotide
ccgucgcgguccaugucgu

SEQ ID NO: 1952677 - RNA, 19 nt, Artificial Sequence
  Description of Artificial Sequence: Synthetic oligonucleotide
ccgccacccggaaucgccu

SEQ ID NO: 1952678 - RNA, 19 nt, Artificial Sequence
  Description of Artificial Sequence: Synthetic oligonucleotide
cgcgcggagcucggcuaag

SEQ ID NO: 1952679 - RNA, 19 nt, Artificial Sequence
  Description of Artificial Sequence: Synthetic oligonucleotide
cccaacccacgcgcccguc

SEQ ID NO: 1952680 - RNA, 19 nt, Artificial Sequence
  Description of Artificial Sequence: Synthetic oligonucleotide
ccgagucgggccuggcuuu

SEQ ID NO: 1952681 - RNA, 19 nt, Artificial Sequence
  Description of Artificial Sequence: Synthetic oligonucleotide
ccacaucgucgguccuuua

SEQ ID NO: 1952682 - RNA, 19 nt, Artificial Sequence
  Description of Artificial Sequence: Synthetic oligonucleotide
cguggucguacuggaaauu

SEQ ID NO: 1952683 - RNA, 19 nt, Artificial Sequence
  Description of Artificial Sequence: Synthetic oligonucleotide
ccggcucauaguggccaua

SEQ ID NO: 1952684 - RNA, 19 nt, Artificial Sequence
  Description of Artificial Sequence: Synthetic oligonucleotide
cgcccgucgcgguccaugu

SEQ ID NO: 1952685 - RNA, 19 nt, Artificial Sequence
  Description of Artificial Sequence: Synthetic oligonucleotide
gggcucccugaugcacccu

SEQ ID NO: 1952686 - RNA, 19 nt, Artificial Sequence
  Description of Artificial Sequence: Synthetic oligonucleotide
cccacgcgcccgucgcggu

SEQ ID NO: 1952687 - RNA, 19 nt, Artificial Sequence
  Description of Artificial Sequence: Synthetic oligonucleotide
cgucgcgguccaugucgua

SEQ ID NO: 1952688 - RNA, 19 nt, Artificial Sequence
  Description of Artificial Sequence: Synthetic oligonucleotide
cgcccgagucgggccuggc

SEQ ID NO: 1952689 - RNA, 19 nt, Artificial Sequence
  Description of Artificial Sequence: Synthetic oligonucleotide
cgccacaucgucgguccuu

SEQ ID NO: 1952690 - RNA, 19 nt, Artificial Sequence
  Description of Artificial Sequence: Synthetic oligonucleotide
cgcgcccgucgcgguccau

SEQ ID NO: 1952691 - RNA, 19 nt, Artificial Sequence
  Description of Artificial Sequence: Synthetic oligonucleotide
ucauauauaaaccugagga

SEQ ID NO: 1952692 - RNA, 19 nt, Artificial Sequence
  Description of Artificial Sequence: Synthetic oligonucleotide
agcuuuaauacuuugggcc

SEQ ID NO: 1952693 - RNA, 19 nt, Artificial Sequence
  Description of Artificial Sequence: Synthetic oligonucleotide
aaauuuuauacagacuggc

SEQ ID NO: 1952694 - RNA, 19 nt, Artificial Sequence
  Description of Artificial Sequence: Synthetic oligonucleotide
gaagaauucauauaccagc

SEQ ID NO: 1952695 - RNA, 19 nt, Artificial Sequence
  Description of Artificial Sequence: Synthetic oligonucleotide
ucagcuuuaauacuuuggg

SEQ ID NO: 1952696 - RNA, 19 nt, Artificial Sequence
  Description of Artificial Sequence: Synthetic oligonucleotide
uauucauuauuccagaagu

SEQ ID NO: 1952697 - RNA, 19 nt, Artificial Sequence
  Description of Artificial Sequence: Synthetic oligonucleotide
augcauaggaauaagaacc

SEQ ID NO: 1952698 - RNA, 19 nt, Artificial Sequence
  Description of Artificial Sequence: Synthetic oligonucleotide
agugagaucaucaaagagc

SEQ ID NO: 1952699 - RNA, 19 nt, Artificial Sequence
  Description of Artificial Sequence: Synthetic oligonucleotide
uuagaaauugcuuauguuc

SEQ ID NO: 1952700 - RNA, 19 nt, Artificial Sequence
  Description of Artificial Sequence: Synthetic oligonucleotide
cuuuguaggaacuagugag

SEQ ID NO: 1952701 - RNA, 19 nt, Artificial Sequence
  Description of Artificial Sequence: Synthetic oligonucleotide
aauaagaaccuucauuaga

SEQ ID NO: 1952702 - RNA, 19 nt, Artificial Sequence
  Description of Artificial Sequence: Synthetic oligonucleotide
ucuaggagagggaauaccg

SEQ ID NO: 1952703 - RNA, 19 nt, Artificial Sequence
  Description of Artificial Sequence: Synthetic oligonucleotide
aauuaaacuaagaauauau

SEQ ID NO: 1952704 - RNA, 19 nt, Artificial Sequence
  Description of Artificial Sequence: Synthetic oligonucleotide
aauuggcagaauuuuauca

SEQ ID NO: 1952705 - RNA, 19 nt, Artificial Sequence
  Description of Artificial Sequence: Synthetic oligonucleotide
aauacuuugggccuucaga

SEQ ID NO: 1952706 - RNA, 19 nt, Artificial Sequence
  Description of Artificial Sequence: Synthetic oligonucleotide
uuaaucugcuuccugauga

SEQ ID NO: 1952707 - RNA, 19 nt, Artificial Sequence
  Description of Artificial Sequence: Synthetic oligonucleotide
uuguacaaacuucugauca

SEQ ID NO: 1952708 - RNA, 19 nt, Artificial Sequence
  Description of Artificial Sequence: Synthetic oligonucleotide
aauuguguugguucaauga

SEQ ID NO: 1952709 - RNA, 19 nt, Artificial Sequence
  Description of Artificial Sequence: Synthetic oligonucleotide
cuuuggaaauuuuauacag

SEQ ID NO: 1952710 - RNA, 19 nt, Artificial Sequence
  Description of Artificial Sequence: Synthetic oligonucleotide
uucauauauaaaccugagg

SEQ ID NO: 1952711 - RNA, 19 nt, Artificial Sequence
  Description of Artificial Sequence: Synthetic oligonucleotide
ugaaaaugagaacuggaga

SEQ ID NO: 1952712 - RNA, 19 nt, Artificial Sequence
  Description of Artificial Sequence: Synthetic oligonucleotide
uuggaaauuuuauacagac

SEQ ID NO: 1952713 - RNA, 19 nt, Artificial Sequence
  Description of Artificial Sequence: Synthetic oligonucleotide
ucuuuaaagaggcugggcu

SEQ ID NO: 1952714 - RNA, 19 nt, Artificial Sequence
  Description of Artificial Sequence: Synthetic oligonucleotide
uauaccagcuguaugugag

SEQ ID NO: 1952715 - RNA, 19 nt, Artificial Sequence
  Description of Artificial Sequence: Synthetic oligonucleotide
acuaagaauauauucauua

SEQ ID NO: 1952716 - RNA, 19 nt, Artificial Sequence
  Description of Artificial Sequence: Synthetic oligonucleotide
aaaugagaacuggagacac

SEQ ID NO: 1952717 - RNA, 19 nt, Artificial Sequence
  Description of Artificial Sequence: Synthetic oligonucleotide
uagaaauugcuuauguucu

SEQ ID NO: 1952718 - RNA, 19 nt, Artificial Sequence
  Description of Artificial Sequence: Synthetic oligonucleotide
uuuugcaguaugcauagga

SEQ ID NO: 1952719 - RNA, 19 nt, Artificial Sequence
  Description of Artificial Sequence: Synthetic oligonucleotide
uaucgcuuugcaaugcugg

SEQ ID NO: 1952720 - RNA, 19 nt, Artificial Sequence
  Description of Artificial Sequence: Synthetic oligonucleotide
ucaucaaagagcuugccgu

SEQ ID NO: 1952721 - RNA, 19 nt, Artificial Sequence
  Description of Artificial Sequence: Synthetic oligonucleotide
auguuguuaaucugcuucc

SEQ ID NO: 1952722 - RNA, 19 nt, Artificial Sequence
  Description of Artificial Sequence: Synthetic oligonucleotide
aauguaucgcuuugcaaug

SEQ ID NO: 1952723 - RNA, 19 nt, Artificial Sequence
  Description of Artificial Sequence: Synthetic oligonucleotide
uuucauauauaaaccugag

SEQ ID NO: 1952724 - RNA, 19 nt, Artificial Sequence
  Description of Artificial Sequence: Synthetic oligonucleotide
auucucuucaauuaaacua

SEQ ID NO: 1952725 - RNA, 19 nt, Artificial Sequence
  Description of Artificial Sequence: Synthetic oligonucleotide
gaagauguuguuaaucugc

SEQ ID NO: 1952726 - RNA, 19 nt, Artificial Sequence
  Description of Artificial Sequence: Synthetic oligonucleotide
uaucucaaggaguucagcc

SEQ ID NO: 1952727 - RNA, 19 nt, Artificial Sequence
  Description of Artificial Sequence: Synthetic oligonucleotide
cugaaaaugagaacuggag

SEQ ID NO: 1952728 - RNA, 19 nt, Artificial Sequence
  Description of Artificial Sequence: Synthetic oligonucleotide
agaaguacagugcucuuuc

SEQ ID NO: 1952729 - RNA, 19 nt, Artificial Sequence
  Description of Artificial Sequence: Synthetic oligonucleotide
auuuuauacagacuggcaa

SEQ ID NO: 1952730 - RNA, 19 nt, Artificial Sequence
  Description of Artificial Sequence: Synthetic oligonucleotide
acuagugagaucaucaaag

SEQ ID NO: 1952731 - RNA, 19 nt, Artificial Sequence
  Description of Artificial Sequence: Synthetic oligonucleotide
cugaugaacgcucucagcc

SEQ ID NO: 1952732 - RNA, 19 nt, Artificial Sequence
  Description of Artificial Sequence: Synthetic oligonucleotide
uucaaugacaucuaagauu

SEQ ID NO: 1952733 - RNA, 19 nt, Artificial Sequence
  Description of Artificial Sequence: Synthetic oligonucleotide
ucuuuggaaauuuuauaca

SEQ ID NO: 1952734 - RNA, 19 nt, Artificial Sequence
  Description of Artificial Sequence: Synthetic oligonucleotide
ugucucucggcuuuguagg

SEQ ID NO: 1952735 - RNA, 19 nt, Artificial Sequence
  Description of Artificial Sequence: Synthetic oligonucleotide
ucaauuaaacuaagaauau

SEQ ID NO: 1952736 - RNA, 19 nt, Artificial Sequence
  Description of Artificial Sequence: Synthetic oligonucleotide
uguuguacaaacuucugau

SEQ ID NO: 1952737 - RNA, 19 nt, Artificial Sequence
  Description of Artificial Sequence: Synthetic oligonucleotide
aguaucuuuaaagaggcug

SEQ ID NO: 1952738 - RNA, 19 nt, Artificial Sequence
  Description of Artificial Sequence: Synthetic oligonucleotide
uuugaauuguguugguuca

SEQ ID NO: 1952739 - RNA, 19 nt, Artificial Sequence
  Description of Artificial Sequence: Synthetic oligonucleotide
auaaauccgaugcaggacu

SEQ ID NO: 1952740 - RNA, 19 nt, Artificial Sequence
  Description of Artificial Sequence: Synthetic oligonucleotide
aagaaccuucauuagaaau

SEQ ID NO: 1952741 - RNA, 19 nt, Artificial Sequence
  Description of Artificial Sequence: Synthetic oligonucleotide
uguucuuuggaaauuuuau

SEQ ID NO: 1952742 - RNA, 19 nt, Artificial Sequence
  Description of Artificial Sequence: Synthetic oligonucleotide
ugcuacaauggucugauuc

SEQ ID NO: 1952743 - RNA, 19 nt, Artificial Sequence
  Description of Artificial Sequence: Synthetic oligonucleotide
uuuggaaauuuuauacaga

SEQ ID NO: 1952744 - RNA, 19 nt, Artificial Sequence
  Description of Artificial Sequence: Synthetic oligonucleotide
uuuuauacagacuggcaaa

SEQ ID NO: 1952745 - RNA, 19 nt, Artificial Sequence
  Description of Artificial Sequence: Synthetic oligonucleotide
cuuauguucugcuuucagc

SEQ ID NO: 1952746 - RNA, 19 nt, Artificial Sequence
  Description of Artificial Sequence: Synthetic oligonucleotide
uuuccauaauucuucacgu

SEQ ID NO: 1952747 - RNA, 19 nt, Artificial Sequence
  Description of Artificial Sequence: Synthetic oligonucleotide
aauggucugauuccagugu

SEQ ID NO: 1952748 - RNA, 19 nt, Artificial Sequence
  Description of Artificial Sequence: Synthetic oligonucleotide
caugaaacaaagccagucc

SEQ ID NO: 1952749 - RNA, 19 nt, Artificial Sequence
  Description of Artificial Sequence: Synthetic oligonucleotide
ucuaagauuucuucaauuu

SEQ ID NO: 1952750 - RNA, 19 nt, Artificial Sequence
  Description of Artificial Sequence: Synthetic oligonucleotide
aagaggcugggcuucuuac

SEQ ID NO: 1952751 - RNA, 19 nt, Artificial Sequence
  Description of Artificial Sequence: Synthetic oligonucleotide
guaggaacuagugagauca

SEQ ID NO: 1952752 - RNA, 19 nt, Artificial Sequence
  Description of Artificial Sequence: Synthetic oligonucleotide
uacagacuggcaaacauaa

SEQ ID NO: 1952753 - RNA, 19 nt, Artificial Sequence
  Description of Artificial Sequence: Synthetic oligonucleotide
guaucuuuaaagaggcugg

SEQ ID NO: 1952754 - RNA, 19 nt, Artificial Sequence
  Description of Artificial Sequence: Synthetic oligonucleotide
ucucaagaagaauucauau

SEQ ID NO: 1952755 - RNA, 19 nt, Artificial Sequence
  Description of Artificial Sequence: Synthetic oligonucleotide
uuuguaggaacuagugaga

SEQ ID NO: 1952756 - RNA, 19 nt, Artificial Sequence
  Description of Artificial Sequence: Synthetic oligonucleotide
gaagccuggaaaacuaagg

SEQ ID NO: 1952757 - RNA, 19 nt, Artificial Sequence
  Description of Artificial Sequence: Synthetic oligonucleotide
guacacaagugcuacaaug

SEQ ID NO: 1952758 - RNA, 19 nt, Artificial Sequence
  Description of Artificial Sequence: Synthetic oligonucleotide
uggaaaacuaagguguugc

SEQ ID NO: 1952759 - RNA, 19 nt, Artificial Sequence
  Description of Artificial Sequence: Synthetic oligonucleotide
agagggaauaccgugcucg

SEQ ID NO: 1952760 - RNA, 19 nt, Artificial Sequence
  Description of Artificial Sequence: Synthetic oligonucleotide
gagcaugaaacaaagccag

SEQ ID NO: 1952761 - RNA, 19 nt, Artificial Sequence
  Description of Artificial Sequence: Synthetic oligonucleotide
ugaucaauguaucgcuuug

SEQ ID NO: 1952762 - RNA, 19 nt, Artificial Sequence
  Description of Artificial Sequence: Synthetic oligonucleotide
agaaucucaagaagaauuc

SEQ ID NO: 1952763 - RNA, 19 nt, Artificial Sequence
  Description of Artificial Sequence: Synthetic oligonucleotide
auggcaguaucuuuaaaga

SEQ ID NO: 1952764 - RNA, 19 nt, Artificial Sequence
  Description of Artificial Sequence: Synthetic oligonucleotide
auauucucuucaauuaaac

SEQ ID NO: 1952765 - RNA, 19 nt, Artificial Sequence
  Description of Artificial Sequence: Synthetic oligonucleotide
caaaauuucagcaguccuc

SEQ ID NO: 1952766 - RNA, 19 nt, Artificial Sequence
  Description of Artificial Sequence: Synthetic oligonucleotide
aagaauucauauaccagcu

SEQ ID NO: 1952767 - RNA, 19 nt, Artificial Sequence
  Description of Artificial Sequence: Synthetic oligonucleotide
uuugcaguaugcauaggaa

SEQ ID NO: 1952768 - RNA, 19 nt, Artificial Sequence
  Description of Artificial Sequence: Synthetic oligonucleotide
aaaccugaggaagauguug

SEQ ID NO: 1952769 - RNA, 19 nt, Artificial Sequence
  Description of Artificial Sequence: Synthetic oligonucleotide
gaaccuucauuagaaauug

SEQ ID NO: 1952770 - RNA, 19 nt, Artificial Sequence
  Description of Artificial Sequence: Synthetic oligonucleotide
uguguugguucaaugacau

SEQ ID NO: 1952771 - RNA, 19 nt, Artificial Sequence
  Description of Artificial Sequence: Synthetic oligonucleotide
uucugaucaauguaucgcu

SEQ ID NO: 1952772 - RNA, 19 nt, Artificial Sequence
  Description of Artificial Sequence: Synthetic oligonucleotide
augaaacaaagccaguccu

SEQ ID NO: 1952773 - RNA, 19 nt, Artificial Sequence
  Description of Artificial Sequence: Synthetic oligonucleotide
ugcaguaugcauaggaaua

SEQ ID NO: 1952774 - RNA, 19 nt, Artificial Sequence
  Description of Artificial Sequence: Synthetic oligonucleotide
uugccguucaucuccauca

SEQ ID NO: 1952775 - RNA, 19 nt, Artificial Sequence
  Description of Artificial Sequence: Synthetic oligonucleotide
agaauuuuaucaauauucu

SEQ ID NO: 1952776 - RNA, 19 nt, Artificial Sequence
  Description of Artificial Sequence: Synthetic oligonucleotide
ugcauaggaauaagaaccu

SEQ ID NO: 1952777 - RNA, 19 nt, Artificial Sequence
  Description of Artificial Sequence: Synthetic oligonucleotide
uggcaguaucuuuaaagag

SEQ ID NO: 1952778 - RNA, 19 nt, Artificial Sequence
  Description of Artificial Sequence: Synthetic oligonucleotide
aggaauaagaaccuucauu

SEQ ID NO: 1952779 - RNA, 19 nt, Artificial Sequence
  Description of Artificial Sequence: Synthetic oligonucleotide
auacuuugggccuucagaa

SEQ ID NO: 1952780 - RNA, 19 nt, Artificial Sequence
  Description of Artificial Sequence: Synthetic oligonucleotide
uuguguugguucaaugaca

SEQ ID NO: 1952781 - RNA, 19 nt, Artificial Sequence
  Description of Artificial Sequence: Synthetic oligonucleotide
cuuccuaauaucucaagga

SEQ ID NO: 1952782 - RNA, 19 nt, Artificial Sequence
  Description of Artificial Sequence: Synthetic oligonucleotide
acaucuaagauuucuucaa

SEQ ID NO: 1952783 - RNA, 19 nt, Artificial Sequence
  Description of Artificial Sequence: Synthetic oligonucleotide
auugcuuauguucugcuuu

SEQ ID NO: 1952784 - RNA, 19 nt, Artificial Sequence
  Description of Artificial Sequence: Synthetic oligonucleotide
acaagugcuacaauggucu

SEQ ID NO: 1952785 - RNA, 19 nt, Artificial Sequence
  Description of Artificial Sequence: Synthetic oligonucleotide
aacuagugagaucaucaaa

SEQ ID NO: 1952786 - RNA, 19 nt, Artificial Sequence
  Description of Artificial Sequence: Synthetic oligonucleotide
gaugaacgcucucagcccc

SEQ ID NO: 1952787 - RNA, 19 nt, Artificial Sequence
  Description of Artificial Sequence: Synthetic oligonucleotide
ggcaguaucuuuaaagagg

SEQ ID NO: 1952788 - RNA, 19 nt, Artificial Sequence
  Description of Artificial Sequence: Synthetic oligonucleotide
uggaaauuuuauacagacu

SEQ ID NO: 1952789 - RNA, 19 nt, Artificial Sequence
  Description of Artificial Sequence: Synthetic oligonucleotide
gaaauugcuuauguucugc

SEQ ID NO: 1952790 - RNA, 19 nt, Artificial Sequence
  Description of Artificial Sequence: Synthetic oligonucleotide
agaagaauucauauaccag

SEQ ID NO: 1952791 - RNA, 19 nt, Artificial Sequence
  Description of Artificial Sequence: Synthetic oligonucleotide
aauaucucaaggaguucag

SEQ ID NO: 1952792 - RNA, 19 nt, Artificial Sequence
  Description of Artificial Sequence: Synthetic oligonucleotide
uaucuuuaaagaggcuggg

SEQ ID NO: 1952793 - RNA, 19 nt, Artificial Sequence
  Description of Artificial Sequence: Synthetic oligonucleotide
uuuauacagacuggcaaac

SEQ ID NO: 1952794 - RNA, 19 nt, Artificial Sequence
  Description of Artificial Sequence: Synthetic oligonucleotide
auaagaaccuucauuagaa

SEQ ID NO: 1952795 - RNA, 19 nt, Artificial Sequence
  Description of Artificial Sequence: Synthetic oligonucleotide
uucagcacguuguacacaa

SEQ ID NO: 1952796 - RNA, 19 nt, Artificial Sequence
  Description of Artificial Sequence: Synthetic oligonucleotide
ucagggcucuccaagaauc

SEQ ID NO: 1952797 - RNA, 19 nt, Artificial Sequence
  Description of Artificial Sequence: Synthetic oligonucleotide
gaauuguguugguucaaug

SEQ ID NO: 1952798 - RNA, 19 nt, Artificial Sequence
  Description of Artificial Sequence: Synthetic oligonucleotide
acagugcucuuucugcaac

SEQ ID NO: 1952799 - RNA, 19 nt, Artificial Sequence
  Description of Artificial Sequence: Synthetic oligonucleotide
guuucauauauaaaccuga

SEQ ID NO: 1952800 - RNA, 19 nt, Artificial Sequence
  Description of Artificial Sequence: Synthetic oligonucleotide
ucacguuccaauuccuucu

SEQ ID NO: 1952801 - RNA, 19 nt, Artificial Sequence
  Description of Artificial Sequence: Synthetic oligonucleotide
aauccgaugcaggacuguc

SEQ ID NO: 1952802 - RNA, 19 nt, Artificial Sequence
  Description of Artificial Sequence: Synthetic oligonucleotide
cuguaugugaggccaagag

SEQ ID NO: 1952803 - RNA, 19 nt, Artificial Sequence
  Description of Artificial Sequence: Synthetic oligonucleotide
aucaauguaucgcuuugca

SEQ ID NO: 1952804 - RNA, 19 nt, Artificial Sequence
  Description of Artificial Sequence: Synthetic oligonucleotide
gagcuugccguucaucucc

SEQ ID NO: 1952805 - RNA, 19 nt, Artificial Sequence
  Description of Artificial Sequence: Synthetic oligonucleotide
aucuuuaaagaggcugggc

SEQ ID NO: 1952806 - RNA, 19 nt, Artificial Sequence
  Description of Artificial Sequence: Synthetic oligonucleotide
aaucucaagaagaauucau

SEQ ID NO: 1952807 - RNA, 19 nt, Artificial Sequence
  Description of Artificial Sequence: Synthetic oligonucleotide
ugaugaacgcucucagccc

SEQ ID NO: 1952808 - RNA, 19 nt, Artificial Sequence
  Description of Artificial Sequence: Synthetic oligonucleotide
aaauguucuguuucauaua

SEQ ID NO: 1952809 - RNA, 19 nt, Artificial Sequence
  Description of Artificial Sequence: Synthetic oligonucleotide
uaauacuuugggccuucag

SEQ ID NO: 1952810 - RNA, 19 nt, Artificial Sequence
  Description of Artificial Sequence: Synthetic oligonucleotide
uaauuggcagaauuuuauc

SEQ ID NO: 1952811 - RNA, 19 nt, Artificial Sequence
  Description of Artificial Sequence: Synthetic oligonucleotide
aaacccagaguauggcagu

SEQ ID NO: 1952812 - RNA, 19 nt, Artificial Sequence
  Description of Artificial Sequence: Synthetic oligonucleotide
ucagaagccuggaaaacua

SEQ ID NO: 1952813 - RNA, 19 nt, Artificial Sequence
  Description of Artificial Sequence: Synthetic oligonucleotide
auaggaauaagaaccuuca

SEQ ID NO: 1952814 - RNA, 19 nt, Artificial Sequence
  Description of Artificial Sequence: Synthetic oligonucleotide
aucucaaggaguucagcca

SEQ ID NO: 1952815 - RNA, 19 nt, Artificial Sequence
  Description of Artificial Sequence: Synthetic oligonucleotide
gaaaacuaagguguugcca

SEQ ID NO: 1952816 - RNA, 19 nt, Artificial Sequence
  Description of Artificial Sequence: Synthetic oligonucleotide
aauugcuuauguucugcuu

SEQ ID NO: 1952817 - RNA, 19 nt, Artificial Sequence
  Description of Artificial Sequence: Synthetic oligonucleotide
cagcuuuaauacuuugggc

SEQ ID NO: 1952818 - RNA, 19 nt, Artificial Sequence
  Description of Artificial Sequence: Synthetic oligonucleotide
uaugugaggccaagaggcc

SEQ ID NO: 1952819 - RNA, 19 nt, Artificial Sequence
  Description of Artificial Sequence: Synthetic oligonucleotide
aucgcuuugcaaugcuggg

SEQ ID NO: 1952820 - RNA, 19 nt, Artificial Sequence
  Description of Artificial Sequence: Synthetic oligonucleotide
uuuaaagaggcugggcuuc

SEQ ID NO: 1952821 - RNA, 19 nt, Artificial Sequence
  Description of Artificial Sequence: Synthetic oligonucleotide
aguguggugucuuucucca

SEQ ID NO: 1952822 - RNA, 19 nt, Artificial Sequence
  Description of Artificial Sequence: Synthetic oligonucleotide
gcuacaauggucugauucc

SEQ ID NO: 1952823 - RNA, 19 nt, Artificial Sequence
  Description of Artificial Sequence: Synthetic oligonucleotide
cuucaauuaaacuaagaau

SEQ ID NO: 1952824 - RNA, 19 nt, Artificial Sequence
  Description of Artificial Sequence: Synthetic oligonucleotide
auaauuggcagaauuuuau

SEQ ID NO: 1952825 - RNA, 19 nt, Artificial Sequence
  Description of Artificial Sequence: Synthetic oligonucleotide
cugucucucggcuuuguag

SEQ ID NO: 1952826 - RNA, 19 nt, Artificial Sequence
  Description of Artificial Sequence: Synthetic oligonucleotide
uaaauccgaugcaggacug

SEQ ID NO: 1952827 - RNA, 19 nt, Artificial Sequence
  Description of Artificial Sequence: Synthetic oligonucleotide
aaaguggcucuucaauuuu

SEQ ID NO: 1952828 - RNA, 19 nt, Artificial Sequence
  Description of Artificial Sequence: Synthetic oligonucleotide
uucagaagccuggaaaacu

SEQ ID NO: 1952829 - RNA, 19 nt, Artificial Sequence
  Description of Artificial Sequence: Synthetic oligonucleotide
ucaauguaucgcuuugcaa

SEQ ID NO: 1952830 - RNA, 19 nt, Artificial Sequence
  Description of Artificial Sequence: Synthetic oligonucleotide
acaauggucugauuccagu

SEQ ID NO: 1952831 - RNA, 19 nt, Artificial Sequence
  Description of Artificial Sequence: Synthetic oligonucleotide
aaccuucauuagaaauugc

SEQ ID NO: 1952832 - RNA, 19 nt, Artificial Sequence
  Description of Artificial Sequence: Synthetic oligonucleotide
accugaaaaugagaacugg

SEQ ID NO: 1952833 - RNA, 19 nt, Artificial Sequence
  Description of Artificial Sequence: Synthetic oligonucleotide
aaccugaaaaugagaacug

SEQ ID NO: 1952834 - RNA, 19 nt, Artificial Sequence
  Description of Artificial Sequence: Synthetic oligonucleotide
uucccauaaauccgaugca

SEQ ID NO: 1952835 - RNA, 19 nt, Artificial Sequence
  Description of Artificial Sequence: Synthetic oligonucleotide
uuguacacaagugcuacaa

SEQ ID NO: 1952836 - RNA, 19 nt, Artificial Sequence
  Description of Artificial Sequence: Synthetic oligonucleotide
aucuaagauuucuucaauu

SEQ ID NO: 1952837 - RNA, 19 nt, Artificial Sequence
  Description of Artificial Sequence: Synthetic oligonucleotide
uacuuugggccuucagaag

SEQ ID NO: 1952838 - RNA, 19 nt, Artificial Sequence
  Description of Artificial Sequence: Synthetic oligonucleotide
guaugcauaggaauaagaa

SEQ ID NO: 1952839 - RNA, 19 nt, Artificial Sequence
  Description of Artificial Sequence: Synthetic oligonucleotide
cuuugggccuucagaagcc

SEQ ID NO: 1952840 - RNA, 19 nt, Artificial Sequence
  Description of Artificial Sequence: Synthetic oligonucleotide
cauaaauccgaugcaggac

SEQ ID NO: 1952841 - RNA, 19 nt, Artificial Sequence
  Description of Artificial Sequence: Synthetic oligonucleotide
uuggcagaauuuuaucaau

SEQ ID NO: 1952842 - RNA, 19 nt, Artificial Sequence
  Description of Artificial Sequence: Synthetic oligonucleotide
uucagcggcaaugcaaagc

SEQ ID NO: 1952843 - RNA, 19 nt, Artificial Sequence
  Description of Artificial Sequence: Synthetic oligonucleotide
cucgguguaagcacuguuc

SEQ ID NO: 1952844 - RNA, 19 nt, Artificial Sequence
  Description of Artificial Sequence: Synthetic oligonucleotide
gagggaauaccgugcucgg

SEQ ID NO: 1952845 - RNA, 19 nt, Artificial Sequence
  Description of Artificial Sequence: Synthetic oligonucleotide
cacaagugcuacaaugguc

SEQ ID NO: 1952846 - RNA, 19 nt, Artificial Sequence
  Description of Artificial Sequence: Synthetic oligonucleotide
caauguaucgcuuugcaau

SEQ ID NO: 1952847 - RNA, 19 nt, Artificial Sequence
  Description of Artificial Sequence: Synthetic oligonucleotide
accuucauuagaaauugcu

SEQ ID NO: 1952848 - RNA, 19 nt, Artificial Sequence
  Description of Artificial Sequence: Synthetic oligonucleotide
cugaggaagauguuguuaa

SEQ ID NO: 1952849 - RNA, 19 nt, Artificial Sequence
  Description of Artificial Sequence: Synthetic oligonucleotide
uggcagaauuuuaucaaua

SEQ ID NO: 1952850 - RNA, 19 nt, Artificial Sequence
  Description of Artificial Sequence: Synthetic oligonucleotide
agaaccuucauuagaaauu

SEQ ID NO: 1952851 - RNA, 19 nt, Artificial Sequence
  Description of Artificial Sequence: Synthetic oligonucleotide
ucggcuuuguaggaacuag

SEQ ID NO: 1952852 - RNA, 19 nt, Artificial Sequence
  Description of Artificial Sequence: Synthetic oligonucleotide
cugucuucaggaagucgcg

SEQ ID NO: 1952853 - RNA, 19 nt, Artificial Sequence
  Description of Artificial Sequence: Synthetic oligonucleotide
uaagaaccuucauuagaaa

SEQ ID NO: 1952854 - RNA, 19 nt, Artificial Sequence
  Description of Artificial Sequence: Synthetic oligonucleotide
auauaccagcuguauguga

SEQ ID NO: 1952855 - RNA, 19 nt, Artificial Sequence
  Description of Artificial Sequence: Synthetic oligonucleotide
aggaagucgcgcucucugg

SEQ ID NO: 1952856 - RNA, 19 nt, Artificial Sequence
  Description of Artificial Sequence: Synthetic oligonucleotide
aguaugcauaggaauaaga

SEQ ID NO: 1952857 - RNA, 19 nt, Artificial Sequence
  Description of Artificial Sequence: Synthetic oligonucleotide
aguauggcaguaucuuuaa

SEQ ID NO: 1952858 - RNA, 19 nt, Artificial Sequence
  Description of Artificial Sequence: Synthetic oligonucleotide
uuauacagacuggcaaaca

SEQ ID NO: 1952859 - RNA, 19 nt, Artificial Sequence
  Description of Artificial Sequence: Synthetic oligonucleotide
uucuuaccccaccaccucu

SEQ ID NO: 1952860 - RNA, 19 nt, Artificial Sequence
  Description of Artificial Sequence: Synthetic oligonucleotide
uggguucguccucuucugg

SEQ ID NO: 1952861 - RNA, 19 nt, Artificial Sequence
  Description of Artificial Sequence: Synthetic oligonucleotide
aggguuuucagcacguugu

SEQ ID NO: 1952862 - RNA, 19 nt, Artificial Sequence
  Description of Artificial Sequence: Synthetic oligonucleotide
gaacuagugagaucaucaa

SEQ ID NO: 1952863 - RNA, 19 nt, Artificial Sequence
  Description of Artificial Sequence: Synthetic oligonucleotide
uugcuuauguucugcuuuc

SEQ ID NO: 1952864 - RNA, 19 nt, Artificial Sequence
  Description of Artificial Sequence: Synthetic oligonucleotide
uguacacaagugcuacaau

SEQ ID NO: 1952865 - RNA, 19 nt, Artificial Sequence
  Description of Artificial Sequence: Synthetic oligonucleotide
cuuucagcggcaaugcaaa

SEQ ID NO: 1952866 - RNA, 19 nt, Artificial Sequence
  Description of Artificial Sequence: Synthetic oligonucleotide
uaggaauaagaaccuucau

SEQ ID NO: 1952867 - RNA, 19 nt, Artificial Sequence
  Description of Artificial Sequence: Synthetic oligonucleotide
caaccugaaaaugagaacu

SEQ ID NO: 1952868 - RNA, 19 nt, Artificial Sequence
  Description of Artificial Sequence: Synthetic oligonucleotide
agugcuacaauggucugau

SEQ ID NO: 1952869 - RNA, 19 nt, Artificial Sequence
  Description of Artificial Sequence: Synthetic oligonucleotide
ggugucuuucuccaggaac

SEQ ID NO: 1952870 - RNA, 19 nt, Artificial Sequence
  Description of Artificial Sequence: Synthetic oligonucleotide
ggaacuagugagaucauca

SEQ ID NO: 1952871 - RNA, 19 nt, Artificial Sequence
  Description of Artificial Sequence: Synthetic oligonucleotide
uguaggaacuagugagauc

SEQ ID NO: 1952872 - RNA, 19 nt, Artificial Sequence
  Description of Artificial Sequence: Synthetic oligonucleotide
agaagccuggaaaacuaag

SEQ ID NO: 1952873 - RNA, 19 nt, Artificial Sequence
  Description of Artificial Sequence: Synthetic oligonucleotide
uuguaggaacuagugagau

SEQ ID NO: 1952874 - RNA, 19 nt, Artificial Sequence
  Description of Artificial Sequence: Synthetic oligonucleotide
aggaacuagugagaucauc

SEQ ID NO: 1952875 - RNA, 19 nt, Artificial Sequence
  Description of Artificial Sequence: Synthetic oligonucleotide
acacuuggauauuugcuua

SEQ ID NO: 1952876 - RNA, 19 nt, Artificial Sequence
  Description of Artificial Sequence: Synthetic oligonucleotide
cuguuguacaaacuucuga

SEQ ID NO: 1952877 - RNA, 19 nt, Artificial Sequence
  Description of Artificial Sequence: Synthetic oligonucleotide
gaugcaggacugucuucag

SEQ ID NO: 1952878 - RNA, 19 nt, Artificial Sequence
  Description of Artificial Sequence: Synthetic oligonucleotide
gggaauaccgugcucggug

SEQ ID NO: 1952879 - RNA, 19 nt, Artificial Sequence
  Description of Artificial Sequence: Synthetic oligonucleotide
auucauauaccagcuguau

SEQ ID NO: 1952880 - RNA, 19 nt, Artificial Sequence
  Description of Artificial Sequence: Synthetic oligonucleotide
gugagaucaucaaagagcu

SEQ ID NO: 1952881 - RNA, 19 nt, Artificial Sequence
  Description of Artificial Sequence: Synthetic oligonucleotide
gaacuucccauaaauccga

SEQ ID NO: 1952882 - RNA, 19 nt, Artificial Sequence
  Description of Artificial Sequence: Synthetic oligonucleotide
aacuaagaauauauucauu

SEQ ID NO: 1952883 - RNA, 19 nt, Artificial Sequence
  Description of Artificial Sequence: Synthetic oligonucleotide
aguccuuuugcaguaugca

SEQ ID NO: 1952884 - RNA, 19 nt, Artificial Sequence
  Description of Artificial Sequence: Synthetic oligonucleotide
acuucccauaaauccgaug

SEQ ID NO: 1952885 - RNA, 19 nt, Artificial Sequence
  Description of Artificial Sequence: Synthetic oligonucleotide
cauauaccagcuguaugug

SEQ ID NO: 1952886 - RNA, 19 nt, Artificial Sequence
  Description of Artificial Sequence: Synthetic oligonucleotide
cucucugggaucuucacua

SEQ ID NO: 1952887 - RNA, 19 nt, Artificial Sequence
  Description of Artificial Sequence: Synthetic oligonucleotide
auauaaaccugaggaagau

SEQ ID NO: 1952888 - RNA, 19 nt, Artificial Sequence
  Description of Artificial Sequence: Synthetic oligonucleotide
acaguacgccagcugagca

SEQ ID NO: 1952889 - RNA, 19 nt, Artificial Sequence
  Description of Artificial Sequence: Synthetic oligonucleotide
aagugcuacaauggucuga

SEQ ID NO: 1952890 - RNA, 19 nt, Artificial Sequence
  Description of Artificial Sequence: Synthetic oligonucleotide
caggagcuguuguacaaac

SEQ ID NO: 1952891 - RNA, 19 nt, Artificial Sequence
  Description of Artificial Sequence: Synthetic oligonucleotide
agaguauggcaguaucuuu

SEQ ID NO: 1952892 - RNA, 19 nt, Artificial Sequence
  Description of Artificial Sequence: Synthetic oligonucleotide
uaaucugcuuccugaugaa

SEQ ID NO: 1952893 - RNA, 19 nt, Artificial Sequence
  Description of Artificial Sequence: Synthetic oligonucleotide
cucuaggagagggaauacc

SEQ ID NO: 1952894 - RNA, 19 nt, Artificial Sequence
  Description of Artificial Sequence: Synthetic oligonucleotide
aauaccgugcucgguguaa

SEQ ID NO: 1952895 - RNA, 19 nt, Artificial Sequence
  Description of Artificial Sequence: Synthetic oligonucleotide
uuucagcggcaaugcaaag

SEQ ID NO: 1952896 - RNA, 19 nt, Artificial Sequence
  Description of Artificial Sequence: Synthetic oligonucleotide
agaacuggagacacacuug

SEQ ID NO: 1952897 - RNA, 19 nt, Artificial Sequence
  Description of Artificial Sequence: Synthetic oligonucleotide
ugggaucuucacuaucaaa

SEQ ID NO: 1952898 - RNA, 19 nt, Artificial Sequence
  Description of Artificial Sequence: Synthetic oligonucleotide
agcacguuguacacaagug

SEQ ID NO: 1952899 - RNA, 19 nt, Artificial Sequence
  Description of Artificial Sequence: Synthetic oligonucleotide
aacuaagguguugccaaaa

SEQ ID NO: 1952900 - RNA, 19 nt, Artificial Sequence
  Description of Artificial Sequence: Synthetic oligonucleotide
uccucugaucacaggcucu

SEQ ID NO: 1952901 - RNA, 19 nt, Artificial Sequence
  Description of Artificial Sequence: Synthetic oligonucleotide
ucuuaccccaccaccucuc

SEQ ID NO: 1952902 - RNA, 19 nt, Artificial Sequence
  Description of Artificial Sequence: Synthetic oligonucleotide
ggaagucgcgcucucuggg

SEQ ID NO: 1952903 - RNA, 19 nt, Artificial Sequence
  Description of Artificial Sequence: Synthetic oligonucleotide
gaguauggcaguaucuuua

SEQ ID NO: 1952904 - RNA, 19 nt, Artificial Sequence
  Description of Artificial Sequence: Synthetic oligonucleotide
uaaaccugaggaagauguu

SEQ ID NO: 1952905 - RNA, 19 nt, Artificial Sequence
  Description of Artificial Sequence: Synthetic oligonucleotide
ugucuucaggaagucgcgc

SEQ ID NO: 1952906 - RNA, 19 nt, Artificial Sequence
  Description of Artificial Sequence: Synthetic oligonucleotide
uuccauaauucuucacguu

SEQ ID NO: 1952907 - RNA, 19 nt, Artificial Sequence
  Description of Artificial Sequence: Synthetic oligonucleotide
ucaaggaguucagccacac

SEQ ID NO: 1952908 - RNA, 19 nt, Artificial Sequence
  Description of Artificial Sequence: Synthetic oligonucleotide
cagugcucuuucugcaacc

SEQ ID NO: 1952909 - RNA, 19 nt, Artificial Sequence
  Description of Artificial Sequence: Synthetic oligonucleotide
cuuggauauuugcuuaaaa

SEQ ID NO: 1952910 - RNA, 19 nt, Artificial Sequence
  Description of Artificial Sequence: Synthetic oligonucleotide
ucgcuuugcaaugcugggc

SEQ ID NO: 1952911 - RNA, 19 nt, Artificial Sequence
  Description of Artificial Sequence: Synthetic oligonucleotide
uuugcaaugcugggcugga

SEQ ID NO: 1952912 - RNA, 19 nt, Artificial Sequence
  Description of Artificial Sequence: Synthetic oligonucleotide
aagucgcgcucucugggau

SEQ ID NO: 1952913 - RNA, 19 nt, Artificial Sequence
  Description of Artificial Sequence: Synthetic oligonucleotide
cuugccguucaucuccauc

SEQ ID NO: 1952914 - RNA, 19 nt, Artificial Sequence
  Description of Artificial Sequence: Synthetic oligonucleotide
cauaauucuucacguucca

SEQ ID NO: 1952915 - RNA, 19 nt, Artificial Sequence
  Description of Artificial Sequence: Synthetic oligonucleotide
ucucggcuuuguaggaacu

SEQ ID NO: 1952916 - RNA, 19 nt, Artificial Sequence
  Description of Artificial Sequence: Synthetic oligonucleotide
ugcuuucagcggcaaugca

SEQ ID NO: 1952917 - RNA, 19 nt, Artificial Sequence
  Description of Artificial Sequence: Synthetic oligonucleotide
auggucugauuccaguguu

SEQ ID NO: 1952918 - RNA, 19 nt, Artificial Sequence
  Description of Artificial Sequence: Synthetic oligonucleotide
ggcuucuuaccccaccacc

SEQ ID NO: 1952919 - RNA, 19 nt, Artificial Sequence
  Description of Artificial Sequence: Synthetic oligonucleotide
gcuuauguucugcuuucag

SEQ ID NO: 1952920 - RNA, 19 nt, Artificial Sequence
  Description of Artificial Sequence: Synthetic oligonucleotide
aucucaagaagaauucaua

SEQ ID NO: 1952921 - RNA, 19 nt, Artificial Sequence
  Description of Artificial Sequence: Synthetic oligonucleotide
uggucugauuccaguguuc

SEQ ID NO: 1952922 - RNA, 19 nt, Artificial Sequence
  Description of Artificial Sequence: Synthetic oligonucleotide
guucaaugacaucuaagau

SEQ ID NO: 1952923 - RNA, 19 nt, Artificial Sequence
  Description of Artificial Sequence: Synthetic oligonucleotide
cuucuuaccccaccaccuc

SEQ ID NO: 1952924 - RNA, 19 nt, Artificial Sequence
  Description of Artificial Sequence: Synthetic oligonucleotide
agccccaggaacuucccau

SEQ ID NO: 1952925 - RNA, 19 nt, Artificial Sequence
  Description of Artificial Sequence: Synthetic oligonucleotide
gcuuuguaggaacuaguga

SEQ ID NO: 1952926 - RNA, 19 nt, Artificial Sequence
  Description of Artificial Sequence: Synthetic oligonucleotide
ucagcacguuguacacaag

SEQ ID NO: 1952927 - RNA, 19 nt, Artificial Sequence
  Description of Artificial Sequence: Synthetic oligonucleotide
gaagucgcgcucucuggga

SEQ ID NO: 1952928 - RNA, 19 nt, Artificial Sequence
  Description of Artificial Sequence: Synthetic oligonucleotide
cuggaaaacuaagguguug

SEQ ID NO: 1952929 - RNA, 19 nt, Artificial Sequence
  Description of Artificial Sequence: Synthetic oligonucleotide
agucgcgcucucugggauc

SEQ ID NO: 1952930 - RNA, 19 nt, Artificial Sequence
  Description of Artificial Sequence: Synthetic oligonucleotide
ggcuuuguaggaacuagug

SEQ ID NO: 1952931 - RNA, 19 nt, Artificial Sequence
  Description of Artificial Sequence: Synthetic oligonucleotide
caauuaaacuaagaauaua

SEQ ID NO: 1952932 - RNA, 19 nt, Artificial Sequence
  Description of Artificial Sequence: Synthetic oligonucleotide
caagugcuacaauggucug

SEQ ID NO: 1952933 - RNA, 19 nt, Artificial Sequence
  Description of Artificial Sequence: Synthetic oligonucleotide
agugcucuuucugcaaccu

SEQ ID NO: 1952934 - RNA, 19 nt, Artificial Sequence
  Description of Artificial Sequence: Synthetic oligonucleotide
auucauuauuccagaagua

SEQ ID NO: 1952935 - RNA, 19 nt, Artificial Sequence
  Description of Artificial Sequence: Synthetic oligonucleotide
cagacuggcaaacauaauu

SEQ ID NO: 1952936 - RNA, 19 nt, Artificial Sequence
  Description of Artificial Sequence: Synthetic oligonucleotide
agucagggcucuccaagaa

SEQ ID NO: 1952937 - RNA, 19 nt, Artificial Sequence
  Description of Artificial Sequence: Synthetic oligonucleotide
uuaauacuuugggccuuca

SEQ ID NO: 1952938 - RNA, 19 nt, Artificial Sequence
  Description of Artificial Sequence: Synthetic oligonucleotide
aaaagcuccaggagcuguu

SEQ ID NO: 1952939 - RNA, 19 nt, Artificial Sequence
  Description of Artificial Sequence: Synthetic oligonucleotide
guaucgcuuugcaaugcug

SEQ ID NO: 1952940 - RNA, 19 nt, Artificial Sequence
  Description of Artificial Sequence: Synthetic oligonucleotide
agggcucuccaagaaucuc

SEQ ID NO: 1952941 - RNA, 19 nt, Artificial Sequence
  Description of Artificial Sequence: Synthetic oligonucleotide
caaggaguucagccacacc

SEQ ID NO: 1952942 - RNA, 19 nt, Artificial Sequence
  Description of Artificial Sequence: Synthetic oligonucleotide
auaccgugcucgguguaag

SEQ ID NO: 1952943 - RNA, 19 nt, Artificial Sequence
  Description of Artificial Sequence: Synthetic oligonucleotide
uuucagcaguccucugauc

SEQ ID NO: 1952944 - RNA, 19 nt, Artificial Sequence
  Description of Artificial Sequence: Synthetic oligonucleotide
gaaacaaagccaguccuuu

SEQ ID NO: 1952945 - RNA, 19 nt, Artificial Sequence
  Description of Artificial Sequence: Synthetic oligonucleotide
ugcuuauguucugcuuuca

SEQ ID NO: 1952946 - RNA, 19 nt, Artificial Sequence
  Description of Artificial Sequence: Synthetic oligonucleotide
ccugaaaaugagaacugga

SEQ ID NO: 1952947 - RNA, 19 nt, Artificial Sequence
  Description of Artificial Sequence: Synthetic oligonucleotide
uucaggaagucgcgcucuc

SEQ ID NO: 1952948 - RNA, 19 nt, Artificial Sequence
  Description of Artificial Sequence: Synthetic oligonucleotide
gcuuuaauacuuugggccu

SEQ ID NO: 1952949 - RNA, 19 nt, Artificial Sequence
  Description of Artificial Sequence: Synthetic oligonucleotide
agcggcaaugcaaagccau

SEQ ID NO: 1952950 - RNA, 19 nt, Artificial Sequence
  Description of Artificial Sequence: Synthetic oligonucleotide
uaccgugcucgguguaagc

SEQ ID NO: 1952951 - RNA, 19 nt, Artificial Sequence
  Description of Artificial Sequence: Synthetic oligonucleotide
agcuguaugugaggccaag

SEQ ID NO: 1952952 - RNA, 19 nt, Artificial Sequence
  Description of Artificial Sequence: Synthetic oligonucleotide
accucucuaggagagggaa

SEQ ID NO: 1952953 - RNA, 19 nt, Artificial Sequence
  Description of Artificial Sequence: Synthetic oligonucleotide
cuuuugcaguaugcauagg

SEQ ID NO: 1952954 - RNA, 19 nt, Artificial Sequence
  Description of Artificial Sequence: Synthetic oligonucleotide
ugaacgcucucagccccag

SEQ ID NO: 1952955 - RNA, 19 nt, Artificial Sequence
  Description of Artificial Sequence: Synthetic oligonucleotide
uuugggccuucagaagccu

SEQ ID NO: 1952956 - RNA, 19 nt, Artificial Sequence
  Description of Artificial Sequence: Synthetic oligonucleotide
gaacgcucucagccccagg

SEQ ID NO: 1952957 - RNA, 19 nt, Artificial Sequence
  Description of Artificial Sequence: Synthetic oligonucleotide
guucguccucuucuggauc

SEQ ID NO: 1952958 - RNA, 19 nt, Artificial Sequence
  Description of Artificial Sequence: Synthetic oligonucleotide
accgugcucgguguaagca

SEQ ID NO: 1952959 - RNA, 19 nt, Artificial Sequence
  Description of Artificial Sequence: Synthetic oligonucleotide
ggcaaacauaauuggcaga

SEQ ID NO: 1952960 - RNA, 19 nt, Artificial Sequence
  Description of Artificial Sequence: Synthetic oligonucleotide
cuuuaaagaggcugggcuu

SEQ ID NO: 1952961 - RNA, 19 nt, Artificial Sequence
  Description of Artificial Sequence: Synthetic oligonucleotide
agcaguccucugaucacag

SEQ ID NO: 1952962 - RNA, 19 nt, Artificial Sequence
  Description of Artificial Sequence: Synthetic oligonucleotide
cucugggaucuucacuauc

SEQ ID NO: 1952963 - RNA, 19 nt, Artificial Sequence
  Description of Artificial Sequence: Synthetic oligonucleotide
gccuggaaaacuaaggugu

SEQ ID NO: 1952964 - RNA, 19 nt, Artificial Sequence
  Description of Artificial Sequence: Synthetic oligonucleotide
ccuaauaucucaaggaguu

SEQ ID NO: 1952965 - RNA, 19 nt, Artificial Sequence
  Description of Artificial Sequence: Synthetic oligonucleotide
ccugaugaacgcucucagc

SEQ ID NO: 1952966 - RNA, 19 nt, Artificial Sequence
  Description of Artificial Sequence: Synthetic oligonucleotide
gagagggaauaccgugcuc

SEQ ID NO: 1952967 - RNA, 19 nt, Artificial Sequence
  Description of Artificial Sequence: Synthetic oligonucleotide
cugcaaccugaaaaugaga

SEQ ID NO: 1952968 - RNA, 19 nt, Artificial Sequence
  Description of Artificial Sequence: Synthetic oligonucleotide
agccaguccuuuugcagua

SEQ ID NO: 1952969 - RNA, 19 nt, Artificial Sequence
  Description of Artificial Sequence: Synthetic oligonucleotide
gaaguacagugcucuuucu

SEQ ID NO: 1952970 - RNA, 19 nt, Artificial Sequence
  Description of Artificial Sequence: Synthetic oligonucleotide
cuaggagagggaauaccgu

SEQ ID NO: 1952971 - RNA, 19 nt, Artificial Sequence
  Description of Artificial Sequence: Synthetic oligonucleotide
aacccagaguauggcagua

SEQ ID NO: 1952972 - RNA, 19 nt, Artificial Sequence
  Description of Artificial Sequence: Synthetic oligonucleotide
aacuucccauaaauccgau

SEQ ID NO: 1952973 - RNA, 19 nt, Artificial Sequence
  Description of Artificial Sequence: Synthetic oligonucleotide
accaccucucuaggagagg

SEQ ID NO: 1952974 - RNA, 19 nt, Artificial Sequence
  Description of Artificial Sequence: Synthetic oligonucleotide
gccguucaucuccaucagg

SEQ ID NO: 1952975 - RNA, 19 nt, Artificial Sequence
  Description of Artificial Sequence: Synthetic oligonucleotide
guccuuuugcaguaugcau

SEQ ID NO: 1952976 - RNA, 19 nt, Artificial Sequence
  Description of Artificial Sequence: Synthetic oligonucleotide
gcuguuguacaaacuucug

SEQ ID NO: 1952977 - RNA, 19 nt, Artificial Sequence
  Description of Artificial Sequence: Synthetic oligonucleotide
gucucucggcuuuguagga

SEQ ID NO: 1952978 - RNA, 19 nt, Artificial Sequence
  Description of Artificial Sequence: Synthetic oligonucleotide
cagaagccuggaaaacuaa

SEQ ID NO: 1952979 - RNA, 19 nt, Artificial Sequence
  Description of Artificial Sequence: Synthetic oligonucleotide
aggaguucagccacaccau

SEQ ID NO: 1952980 - RNA, 19 nt, Artificial Sequence
  Description of Artificial Sequence: Synthetic oligonucleotide
cagcacguuguacacaagu

SEQ ID NO: 1952981 - RNA, 19 nt, Artificial Sequence
  Description of Artificial Sequence: Synthetic oligonucleotide
guauggcaguaucuuuaaa

SEQ ID NO: 1952982 - RNA, 19 nt, Artificial Sequence
  Description of Artificial Sequence: Synthetic oligonucleotide
gaucacaggcucugucagu

SEQ ID NO: 1952983 - RNA, 19 nt, Artificial Sequence
  Description of Artificial Sequence: Synthetic oligonucleotide
auccgaugcaggacugucu

SEQ ID NO: 1952984 - RNA, 19 nt, Artificial Sequence
  Description of Artificial Sequence: Synthetic oligonucleotide
gcaguccucugaucacagg

SEQ ID NO: 1952985 - RNA, 19 nt, Artificial Sequence
  Description of Artificial Sequence: Synthetic oligonucleotide
caucuaagauuucuucaau

SEQ ID NO: 1952986 - RNA, 19 nt, Artificial Sequence
  Description of Artificial Sequence: Synthetic oligonucleotide
gcuuucagcggcaaugcaa

SEQ ID NO: 1952987 - RNA, 19 nt, Artificial Sequence
  Description of Artificial Sequence: Synthetic oligonucleotide
guguugguucaaugacauc

SEQ ID NO: 1952988 - RNA, 19 nt, Artificial Sequence
  Description of Artificial Sequence: Synthetic oligonucleotide
gaauaccgugcucggugua

SEQ ID NO: 1952989 - RNA, 19 nt, Artificial Sequence
  Description of Artificial Sequence: Synthetic oligonucleotide
gcugagcaugaaacaaagc

SEQ ID NO: 1952990 - RNA, 19 nt, Artificial Sequence
  Description of Artificial Sequence: Synthetic oligonucleotide
agggaauaccgugcucggu

SEQ ID NO: 1952991 - RNA, 19 nt, Artificial Sequence
  Description of Artificial Sequence: Synthetic oligonucleotide
acguuccaauuccuucuuu

SEQ ID NO: 1952992 - RNA, 19 nt, Artificial Sequence
  Description of Artificial Sequence: Synthetic oligonucleotide
acguuguacacaagugcua

SEQ ID NO: 1952993 - RNA, 19 nt, Artificial Sequence
  Description of Artificial Sequence: Synthetic oligonucleotide
ccaaaauuucagcaguccu

SEQ ID NO: 1952994 - RNA, 19 nt, Artificial Sequence
  Description of Artificial Sequence: Synthetic oligonucleotide
ccaucaggguuuucagcac

SEQ ID NO: 1952995 - RNA, 19 nt, Artificial Sequence
  Description of Artificial Sequence: Synthetic oligonucleotide
ggagagggaauaccgugcu

SEQ ID NO: 1952996 - RNA, 19 nt, Artificial Sequence
  Description of Artificial Sequence: Synthetic oligonucleotide
gggcucuccaagaaucuca

SEQ ID NO: 1952997 - RNA, 19 nt, Artificial Sequence
  Description of Artificial Sequence: Synthetic oligonucleotide
gagacacacuuggauauuu

SEQ ID NO: 1952998 - RNA, 19 nt, Artificial Sequence
  Description of Artificial Sequence: Synthetic oligonucleotide
ggccaaaauuucagcaguc

SEQ ID NO: 1952999 - RNA, 19 nt, Artificial Sequence
  Description of Artificial Sequence: Synthetic oligonucleotide
cagaguauggcaguaucuu

SEQ ID NO: 1953000 - RNA, 19 nt, Artificial Sequence
  Description of Artificial Sequence: Synthetic oligonucleotide
ggaauaccgugcucggugu

SEQ ID NO: 1953001 - RNA, 19 nt, Artificial Sequence
  Description of Artificial Sequence: Synthetic oligonucleotide
ggucugauuccaguguucu

SEQ ID NO: 1953002 - RNA, 19 nt, Artificial Sequence
  Description of Artificial Sequence: Synthetic oligonucleotide
aguguggguucguccucuu

SEQ ID NO: 1953003 - RNA, 19 nt, Artificial Sequence
  Description of Artificial Sequence: Synthetic oligonucleotide
gcuucuuaccccaccaccu

SEQ ID NO: 1953004 - RNA, 19 nt, Artificial Sequence
  Description of Artificial Sequence: Synthetic oligonucleotide
augaacgcucucagcccca

SEQ ID NO: 1953005 - RNA, 19 nt, Artificial Sequence
  Description of Artificial Sequence: Synthetic oligonucleotide
caccucucuaggagaggga

SEQ ID NO: 1953006 - RNA, 19 nt, Artificial Sequence
  Description of Artificial Sequence: Synthetic oligonucleotide
uugcaaugcugggcuggaa

SEQ ID NO: 1953007 - RNA, 19 nt, Artificial Sequence
  Description of Artificial Sequence: Synthetic oligonucleotide
acccagaguauggcaguau

SEQ ID NO: 1953008 - RNA, 19 nt, Artificial Sequence
  Description of Artificial Sequence: Synthetic oligonucleotide
cagcggcaaugcaaagcca

SEQ ID NO: 1953009 - RNA, 19 nt, Artificial Sequence
  Description of Artificial Sequence: Synthetic oligonucleotide
cuuuaauacuuugggccuu

SEQ ID NO: 1953010 - RNA, 19 nt, Artificial Sequence
  Description of Artificial Sequence: Synthetic oligonucleotide
ucguccucuucuggaucaa

SEQ ID NO: 1953011 - RNA, 19 nt, Artificial Sequence
  Description of Artificial Sequence: Synthetic oligonucleotide
gcuguaugugaggccaaga

SEQ ID NO: 1953012 - RNA, 19 nt, Artificial Sequence
  Description of Artificial Sequence: Synthetic oligonucleotide
ccagaguauggcaguaucu

SEQ ID NO: 1953013 - RNA, 19 nt, Artificial Sequence
  Description of Artificial Sequence: Synthetic oligonucleotide
cgcucucagccccaggaac

SEQ ID NO: 1953014 - RNA, 19 nt, Artificial Sequence
  Description of Artificial Sequence: Synthetic oligonucleotide
cucggcuuuguaggaacua

SEQ ID NO: 1953015 - RNA, 19 nt, Artificial Sequence
  Description of Artificial Sequence: Synthetic oligonucleotide
caguguucuuuggaaauuu

SEQ ID NO: 1953016 - RNA, 19 nt, Artificial Sequence
  Description of Artificial Sequence: Synthetic oligonucleotide
cagaaguacagugcucuuu

SEQ ID NO: 1953017 - RNA, 19 nt, Artificial Sequence
  Description of Artificial Sequence: Synthetic oligonucleotide
gucgcgcucucugggaucu

SEQ ID NO: 1953018 - RNA, 19 nt, Artificial Sequence
  Description of Artificial Sequence: Synthetic oligonucleotide
ggacugucuucaggaaguc

SEQ ID NO: 1953019 - RNA, 19 nt, Artificial Sequence
  Description of Artificial Sequence: Synthetic oligonucleotide
ccugaggaagauguuguua

SEQ ID NO: 1953020 - RNA, 19 nt, Artificial Sequence
  Description of Artificial Sequence: Synthetic oligonucleotide
guucugcuuucagcggcaa

SEQ ID NO: 1953021 - RNA, 19 nt, Artificial Sequence
  Description of Artificial Sequence: Synthetic oligonucleotide
gucugauuccaguguucuu

SEQ ID NO: 1953022 - RNA, 19 nt, Artificial Sequence
  Description of Artificial Sequence: Synthetic oligonucleotide
ccgaugcaggacugucuuc

SEQ ID NO: 1953023 - RNA, 19 nt, Artificial Sequence
  Description of Artificial Sequence: Synthetic oligonucleotide
cacguuccaauuccuucuu

SEQ ID NO: 1953024 - RNA, 19 nt, Artificial Sequence
  Description of Artificial Sequence: Synthetic oligonucleotide
caaagagcuugccguucau

SEQ ID NO: 1953025 - RNA, 19 nt, Artificial Sequence
  Description of Artificial Sequence: Synthetic oligonucleotide
cgcuuugcaaugcugggcu

SEQ ID NO: 1953026 - RNA, 19 nt, Artificial Sequence
  Description of Artificial Sequence: Synthetic oligonucleotide
cgcucucugggaucuucac

SEQ ID NO: 1953027 - RNA, 19 nt, Artificial Sequence
  Description of Artificial Sequence: Synthetic oligonucleotide
caguguggguucguccucu

SEQ ID NO: 1953028 - RNA, 19 nt, Artificial Sequence
  Description of Artificial Sequence: Synthetic oligonucleotide
ccaggagcuguuguacaaa

SEQ ID NO: 1953029 - RNA, 19 nt, Artificial Sequence
  Description of Artificial Sequence: Synthetic oligonucleotide
gcgcucucugggaucuuca

SEQ ID NO: 1953030 - RNA, 19 nt, Artificial Sequence
  Description of Artificial Sequence: Synthetic oligonucleotide
gcucgguguaagcacuguu

SEQ ID NO: 1953031 - RNA, 19 nt, Artificial Sequence
  Description of Artificial Sequence: Synthetic oligonucleotide
cgugcucgguguaagcacu

SEQ ID NO: 1953032 - RNA, 19 nt, Artificial Sequence
  Description of Artificial Sequence: Synthetic oligonucleotide
cggcuuuguaggaacuagu

SEQ ID NO: 1953033 - RNA, 19 nt, Artificial Sequence
  Description of Artificial Sequence: Synthetic oligonucleotide
ccucucuaggagagggaau

SEQ ID NO: 1953034 - RNA, 19 nt, Artificial Sequence
  Description of Artificial Sequence: Synthetic oligonucleotide
gugcuacaauggucugauu

SEQ ID NO: 1953035 - RNA, 19 nt, Artificial Sequence
  Description of Artificial Sequence: Synthetic oligonucleotide
cccucagcuuuaauacuuu

SEQ ID NO: 1953036 - RNA, 19 nt, Artificial Sequence
  Description of Artificial Sequence: Synthetic oligonucleotide
ucgcgcucucugggaucuu

SEQ ID NO: 1953037 - RNA, 19 nt, Artificial Sequence
  Description of Artificial Sequence: Synthetic oligonucleotide
gccacaccauugaaauguu

SEQ ID NO: 1953038 - RNA, 19 nt, Artificial Sequence
  Description of Artificial Sequence: Synthetic oligonucleotide
gcggcaaugcaaagccauu

SEQ ID NO: 1953039 - RNA, 19 nt, Artificial Sequence
  Description of Artificial Sequence: Synthetic oligonucleotide
aauuccauggacaugggcc

SEQ ID NO: 1953040 - RNA, 19 nt, Artificial Sequence
  Description of Artificial Sequence: Synthetic oligonucleotide
aaggaacuuaucuuggggc

SEQ ID NO: 1953041 - RNA, 19 nt, Artificial Sequence
  Description of Artificial Sequence: Synthetic oligonucleotide
aauacuagccccaggaugc

SEQ ID NO: 1953042 - RNA, 19 nt, Artificial Sequence
  Description of Artificial Sequence: Synthetic oligonucleotide
ugagauaucagaauccagu

SEQ ID NO: 1953043 - RNA, 19 nt, Artificial Sequence
  Description of Artificial Sequence: Synthetic oligonucleotide
aaauacuagccccaggaug

SEQ ID NO: 1953044 - RNA, 19 nt, Artificial Sequence
  Description of Artificial Sequence: Synthetic oligonucleotide
auuucaguuggacaucccc

SEQ ID NO: 1953045 - RNA, 19 nt, Artificial Sequence
  Description of Artificial Sequence: Synthetic oligonucleotide
gauaucagaauccagucuc

SEQ ID NO: 1953046 - RNA, 19 nt, Artificial Sequence
  Description of Artificial Sequence: Synthetic oligonucleotide
uaagagguaagcaggacca

SEQ ID NO: 1953047 - RNA, 19 nt, Artificial Sequence
  Description of Artificial Sequence: Synthetic oligonucleotide
cuaucaucuaugaugagug

SEQ ID NO: 1953048 - RNA, 19 nt, Artificial Sequence
  Description of Artificial Sequence: Synthetic oligonucleotide
ugaaggauggguagcaaag

SEQ ID NO: 1953049 - RNA, 19 nt, Artificial Sequence
  Description of Artificial Sequence: Synthetic oligonucleotide
aguuccugccaauagacuc

SEQ ID NO: 1953050 - RNA, 19 nt, Artificial Sequence
  Description of Artificial Sequence: Synthetic oligonucleotide
aggguguucucucuuaagc

SEQ ID NO: 1953051 - RNA, 19 nt, Artificial Sequence
  Description of Artificial Sequence: Synthetic oligonucleotide
gugaauuccauggacaugg

SEQ ID NO: 1953052 - RNA, 19 nt, Artificial Sequence
  Description of Artificial Sequence: Synthetic oligonucleotide
uuucuagugagauaucaga

SEQ ID NO: 1953053 - RNA, 19 nt, Artificial Sequence
  Description of Artificial Sequence: Synthetic oligonucleotide
uacucguuacucccgaugg

SEQ ID NO: 1953054 - RNA, 19 nt, Artificial Sequence
  Description of Artificial Sequence: Synthetic oligonucleotide
cuacauuuuggucagcugc

SEQ ID NO: 1953055 - RNA, 19 nt, Artificial Sequence
  Description of Artificial Sequence: Synthetic oligonucleotide
uuaucuuggggccucagcu

SEQ ID NO: 1953056 - RNA, 19 nt, Artificial Sequence
  Description of Artificial Sequence: Synthetic oligonucleotide
auuugcuacaugcagguga

SEQ ID NO: 1953057 - RNA, 19 nt, Artificial Sequence
  Description of Artificial Sequence: Synthetic oligonucleotide
uauaaauacuagccccagg

SEQ ID NO: 1953058 - RNA, 19 nt, Artificial Sequence
  Description of Artificial Sequence: Synthetic oligonucleotide
ugugguauguaaccucagg

SEQ ID NO: 1953059 - RNA, 19 nt, Artificial Sequence
  Description of Artificial Sequence: Synthetic oligonucleotide
aagagccucucacucaccg

SEQ ID NO: 1953060 - RNA, 19 nt, Artificial Sequence
  Description of Artificial Sequence: Synthetic oligonucleotide
ugacgugacauccuuauaa

SEQ ID NO: 1953061 - RNA, 19 nt, Artificial Sequence
  Description of Artificial Sequence: Synthetic oligonucleotide
ucuaugaugaguguucugu

SEQ ID NO: 1953062 - RNA, 19 nt, Artificial Sequence
  Description of Artificial Sequence: Synthetic oligonucleotide
uggacauccccaaaggccc

SEQ ID NO: 1953063 - RNA, 19 nt, Artificial Sequence
  Description of Artificial Sequence: Synthetic oligonucleotide
cagccuaucaucuaugaug

SEQ ID NO: 1953064 - RNA, 19 nt, Artificial Sequence
  Description of Artificial Sequence: Synthetic oligonucleotide
gaauccagucucuggaagg

SEQ ID NO: 1953065 - RNA, 19 nt, Artificial Sequence
  Description of Artificial Sequence: Synthetic oligonucleotide
guaaccucaggcuuggcag

SEQ ID NO: 1953066 - RNA, 19 nt, Artificial Sequence
  Description of Artificial Sequence: Synthetic oligonucleotide
uuggucagcugcauggagg

SEQ ID NO: 1953067 - RNA, 19 nt, Artificial Sequence
  Description of Artificial Sequence: Synthetic oligonucleotide
ucaucuaugaugaguguuc

SEQ ID NO: 1953068 - RNA, 19 nt, Artificial Sequence
  Description of Artificial Sequence: Synthetic oligonucleotide
guaagagguaagcaggacc

SEQ ID NO: 1953069 - RNA, 19 nt, Artificial Sequence
  Description of Artificial Sequence: Synthetic oligonucleotide
aguuggacauccccaaagg

SEQ ID NO: 1953070 - RNA, 19 nt, Artificial Sequence
  Description of Artificial Sequence: Synthetic oligonucleotide
uuucaguuggacaucccca

SEQ ID NO: 1953071 - RNA, 19 nt, Artificial Sequence
  Description of Artificial Sequence: Synthetic oligonucleotide
ugacagugauaucaucccg

SEQ ID NO: 1953072 - RNA, 19 nt, Artificial Sequence
  Description of Artificial Sequence: Synthetic oligonucleotide
uucuagugagauaucagaa

SEQ ID NO: 1953073 - RNA, 19 nt, Artificial Sequence
  Description of Artificial Sequence: Synthetic oligonucleotide
auguacugacgugacaucc

SEQ ID NO: 1953074 - RNA, 19 nt, Artificial Sequence
  Description of Artificial Sequence: Synthetic oligonucleotide
acggguaagagguaagcag

SEQ ID NO: 1953075 - RNA, 19 nt, Artificial Sequence
  Description of Artificial Sequence: Synthetic oligonucleotide
uacgcugcaacucuuuacu

SEQ ID NO: 1953076 - RNA, 19 nt, Artificial Sequence
  Description of Artificial Sequence: Synthetic oligonucleotide
agggauaaguucuuuguca

SEQ ID NO: 1953077 - RNA, 19 nt, Artificial Sequence
  Description of Artificial Sequence: Synthetic oligonucleotide
ugguauguaaccucaggcu

SEQ ID NO: 1953078 - RNA, 19 nt, Artificial Sequence
  Description of Artificial Sequence: Synthetic oligonucleotide
uguaaccucaggcuuggca

SEQ ID NO: 1953079 - RNA, 19 nt, Artificial Sequence
  Description of Artificial Sequence: Synthetic oligonucleotide
uacauuuuggucagcugca

SEQ ID NO: 1953080 - RNA, 19 nt, Artificial Sequence
  Description of Artificial Sequence: Synthetic oligonucleotide
uaguagaagagccucucac

SEQ ID NO: 1953081 - RNA, 19 nt, Artificial Sequence
  Description of Artificial Sequence: Synthetic oligonucleotide
auuccaagcauugugguca

SEQ ID NO: 1953082 - RNA, 19 nt, Artificial Sequence
  Description of Artificial Sequence: Synthetic oligonucleotide
acaaggaacuuaucuuggg

SEQ ID NO: 1953083 - RNA, 19 nt, Artificial Sequence
  Description of Artificial Sequence: Synthetic oligonucleotide
gagauaucagaauccaguc

SEQ ID NO: 1953084 - RNA, 19 nt, Artificial Sequence
  Description of Artificial Sequence: Synthetic oligonucleotide
agucagauaggguggagug

SEQ ID NO: 1953085 - RNA, 19 nt, Artificial Sequence
  Description of Artificial Sequence: Synthetic oligonucleotide
uguggucacggguaagagg

SEQ ID NO: 1953086 - RNA, 19 nt, Artificial Sequence
  Description of Artificial Sequence: Synthetic oligonucleotide
uccuggacaccaaggauag

SEQ ID NO: 1953087 - RNA, 19 nt, Artificial Sequence
  Description of Artificial Sequence: Synthetic oligonucleotide
ucuagugagauaucagaau

SEQ ID NO: 1953088 - RNA, 19 nt, Artificial Sequence
  Description of Artificial Sequence: Synthetic oligonucleotide
ggcaugucugaucagaugc

SEQ ID NO: 1953089 - RNA, 19 nt, Artificial Sequence
  Description of Artificial Sequence: Synthetic oligonucleotide
uucugguaaugucagcaug

SEQ ID NO: 1953090 - RNA, 19 nt, Artificial Sequence
  Description of Artificial Sequence: Synthetic oligonucleotide
cuggacaccaaggauagcc

SEQ ID NO: 1953091 - RNA, 19 nt, Artificial Sequence
  Description of Artificial Sequence: Synthetic oligonucleotide
uuauaaauacuagccccag

SEQ ID NO: 1953092 - RNA, 19 nt, Artificial Sequence
  Description of Artificial Sequence: Synthetic oligonucleotide
aggaccacacaccauuauc

SEQ ID NO: 1953093 - RNA, 19 nt, Artificial Sequence
  Description of Artificial Sequence: Synthetic oligonucleotide
ugcaugaggcccagguugg

SEQ ID NO: 1953094 - RNA, 19 nt, Artificial Sequence
  Description of Artificial Sequence: Synthetic oligonucleotide
ggaaggaguacaucaaugc

SEQ ID NO: 1953095 - RNA, 19 nt, Artificial Sequence
  Description of Artificial Sequence: Synthetic oligonucleotide
ucauugccuagcauguccc

SEQ ID NO: 1953096 - RNA, 19 nt, Artificial Sequence
  Description of Artificial Sequence: Synthetic oligonucleotide
agaaguuccugccaauaga

SEQ ID NO: 1953097 - RNA, 19 nt, Artificial Sequence
  Description of Artificial Sequence: Synthetic oligonucleotide
uuugcuacaugcaggugaa

SEQ ID NO: 1953098 - RNA, 19 nt, Artificial Sequence
  Description of Artificial Sequence: Synthetic oligonucleotide
gaacugguagauguugagg

SEQ ID NO: 1953099 - RNA, 19 nt, Artificial Sequence
  Description of Artificial Sequence: Synthetic oligonucleotide
uauguaaccucaggcuugg

SEQ ID NO: 1953100 - RNA, 19 nt, Artificial Sequence
  Description of Artificial Sequence: Synthetic oligonucleotide
agauaucagaauccagucu

SEQ ID NO: 1953101 - RNA, 19 nt, Artificial Sequence
  Description of Artificial Sequence: Synthetic oligonucleotide
gaaguuccugccaauagac

SEQ ID NO: 1953102 - RNA, 19 nt, Artificial Sequence
  Description of Artificial Sequence: Synthetic oligonucleotide
ucaguaucaaagccccucu

SEQ ID NO: 1953103 - RNA, 19 nt, Artificial Sequence
  Description of Artificial Sequence: Synthetic oligonucleotide
guacaucaaugcuucuucg

SEQ ID NO: 1953104 - RNA, 19 nt, Artificial Sequence
  Description of Artificial Sequence: Synthetic oligonucleotide
gaguguaguaguggggugg

SEQ ID NO: 1953105 - RNA, 19 nt, Artificial Sequence
  Description of Artificial Sequence: Synthetic oligonucleotide
gaugcguggcuacauuuug

SEQ ID NO: 1953106 - RNA, 19 nt, Artificial Sequence
  Description of Artificial Sequence: Synthetic oligonucleotide
agccccaggaugcuugagc

SEQ ID NO: 1953107 - RNA, 19 nt, Artificial Sequence
  Description of Artificial Sequence: Synthetic oligonucleotide
gaugcuugagccacugaag

SEQ ID NO: 1953108 - RNA, 19 nt, Artificial Sequence
  Description of Artificial Sequence: Synthetic oligonucleotide
auaaguucuuugucaccuc

SEQ ID NO: 1953109 - RNA, 19 nt, Artificial Sequence
  Description of Artificial Sequence: Synthetic oligonucleotide
aggauagcccggcagucac

SEQ ID NO: 1953110 - RNA, 19 nt, Artificial Sequence
  Description of Artificial Sequence: Synthetic oligonucleotide
gauguugagggccucagua

SEQ ID NO: 1953111 - RNA, 19 nt, Artificial Sequence
  Description of Artificial Sequence: Synthetic oligonucleotide
guagaagagccucucacuc

SEQ ID NO: 1953112 - RNA, 19 nt, Artificial Sequence
  Description of Artificial Sequence: Synthetic oligonucleotide
agauguacugacgugacau

SEQ ID NO: 1953113 - RNA, 19 nt, Artificial Sequence
  Description of Artificial Sequence: Synthetic oligonucleotide
uguugagggccucaguauc

SEQ ID NO: 1953114 - RNA, 19 nt, Artificial Sequence
  Description of Artificial Sequence: Synthetic oligonucleotide
uguacugacgugacauccu

SEQ ID NO: 1953115 - RNA, 19 nt, Artificial Sequence
  Description of Artificial Sequence: Synthetic oligonucleotide
uccagguccgguuuauggc

SEQ ID NO: 1953116 - RNA, 19 nt, Artificial Sequence
  Description of Artificial Sequence: Synthetic oligonucleotide
gauaaguucuuugucaccu

SEQ ID NO: 1953117 - RNA, 19 nt, Artificial Sequence
  Description of Artificial Sequence: Synthetic oligonucleotide
agugagauaucagaaucca

SEQ ID NO: 1953118 - RNA, 19 nt, Artificial Sequence
  Description of Artificial Sequence: Synthetic oligonucleotide
ucauuccaagcauuguggu

SEQ ID NO: 1953119 - RNA, 19 nt, Artificial Sequence
  Description of Artificial Sequence: Synthetic oligonucleotide
acucguuacucccgauggc

SEQ ID NO: 1953120 - RNA, 19 nt, Artificial Sequence
  Description of Artificial Sequence: Synthetic oligonucleotide
auaggguggaguguaguag

SEQ ID NO: 1953121 - RNA, 19 nt, Artificial Sequence
  Description of Artificial Sequence: Synthetic oligonucleotide
ucucacucaccgcuugugc

SEQ ID NO: 1953122 - RNA, 19 nt, Artificial Sequence
  Description of Artificial Sequence: Synthetic oligonucleotide
gaauuccauggacaugggc

SEQ ID NO: 1953123 - RNA, 19 nt, Artificial Sequence
  Description of Artificial Sequence: Synthetic oligonucleotide
auggacaugggccaugcaa

SEQ ID NO: 1953124 - RNA, 19 nt, Artificial Sequence
  Description of Artificial Sequence: Synthetic oligonucleotide
caucaaugcuucuucgaug

SEQ ID NO: 1953125 - RNA, 19 nt, Artificial Sequence
  Description of Artificial Sequence: Synthetic oligonucleotide
ugaauuccauggacauggg

SEQ ID NO: 1953126 - RNA, 19 nt, Artificial Sequence
  Description of Artificial Sequence: Synthetic oligonucleotide
guccagguccgguuuaugg

SEQ ID NO: 1953127 - RNA, 19 nt, Artificial Sequence
  Description of Artificial Sequence: Synthetic oligonucleotide
cagcuugugguauguaacc

SEQ ID NO: 1953128 - RNA, 19 nt, Artificial Sequence
  Description of Artificial Sequence: Synthetic oligonucleotide
auacucguuacucccgaug

SEQ ID NO: 1953129 - RNA, 19 nt, Artificial Sequence
  Description of Artificial Sequence: Synthetic oligonucleotide
guuccugccaauagacucg

SEQ ID NO: 1953130 - RNA, 19 nt, Artificial Sequence
  Description of Artificial Sequence: Synthetic oligonucleotide
guuggacauccccaaaggc

SEQ ID NO: 1953131 - RNA, 19 nt, Artificial Sequence
  Description of Artificial Sequence: Synthetic oligonucleotide
cuugugguauguaaccuca

SEQ ID NO: 1953132 - RNA, 19 nt, Artificial Sequence
  Description of Artificial Sequence: Synthetic oligonucleotide
uagaagagccucucacuca

SEQ ID NO: 1953133 - RNA, 19 nt, Artificial Sequence
  Description of Artificial Sequence: Synthetic oligonucleotide
aggucugguggacaucagg

SEQ ID NO: 1953134 - RNA, 19 nt, Artificial Sequence
  Description of Artificial Sequence: Synthetic oligonucleotide
agagccucucacucaccgc

SEQ ID NO: 1953135 - RNA, 19 nt, Artificial Sequence
  Description of Artificial Sequence: Synthetic oligonucleotide
ucaucccgguacauccugg

SEQ ID NO: 1953136 - RNA, 19 nt, Artificial Sequence
  Description of Artificial Sequence: Synthetic oligonucleotide
ugacauccuuauaaauacu

SEQ ID NO: 1953137 - RNA, 19 nt, Artificial Sequence
  Description of Artificial Sequence: Synthetic oligonucleotide
accaucugaggccagcaca

SEQ ID NO: 1953138 - RNA, 19 nt, Artificial Sequence
  Description of Artificial Sequence: Synthetic oligonucleotide
ggagccugaauuucuagug

SEQ ID NO: 1953139 - RNA, 19 nt, Artificial Sequence
  Description of Artificial Sequence: Synthetic oligonucleotide
aggguaugaggacacccag

SEQ ID NO: 1953140 - RNA, 19 nt, Artificial Sequence
  Description of Artificial Sequence: Synthetic oligonucleotide
uaggguggaguguaguagu

SEQ ID NO: 1953141 - RNA, 19 nt, Artificial Sequence
  Description of Artificial Sequence: Synthetic oligonucleotide
gagggauaaguucuuuguc

SEQ ID NO: 1953142 - RNA, 19 nt, Artificial Sequence
  Description of Artificial Sequence: Synthetic oligonucleotide
caguuggacauccccaaag

SEQ ID NO: 1953143 - RNA, 19 nt, Artificial Sequence
  Description of Artificial Sequence: Synthetic oligonucleotide
cuuaucuuggggccucagc

SEQ ID NO: 1953144 - RNA, 19 nt, Artificial Sequence
  Description of Artificial Sequence: Synthetic oligonucleotide
ugcaggugaauuccaugga

SEQ ID NO: 1953145 - RNA, 19 nt, Artificial Sequence
  Description of Artificial Sequence: Synthetic oligonucleotide
auugccuagcaugucccac

SEQ ID NO: 1953146 - RNA, 19 nt, Artificial Sequence
  Description of Artificial Sequence: Synthetic oligonucleotide
acagugauaucaucccggu

SEQ ID NO: 1953147 - RNA, 19 nt, Artificial Sequence
  Description of Artificial Sequence: Synthetic oligonucleotide
uucucucuuaagccgggac

SEQ ID NO: 1953148 - RNA, 19 nt, Artificial Sequence
  Description of Artificial Sequence: Synthetic oligonucleotide
agccuaucaucuaugauga

SEQ ID NO: 1953149 - RNA, 19 nt, Artificial Sequence
  Description of Artificial Sequence: Synthetic oligonucleotide
aucuuggggccucagcuug

SEQ ID NO: 1953150 - RNA, 19 nt, Artificial Sequence
  Description of Artificial Sequence: Synthetic oligonucleotide
ugaguguucuguccucaga

SEQ ID NO: 1953151 - RNA, 19 nt, Artificial Sequence
  Description of Artificial Sequence: Synthetic oligonucleotide
guaagcaggaccacacacc

SEQ ID NO: 1953152 - RNA, 19 nt, Artificial Sequence
  Description of Artificial Sequence: Synthetic oligonucleotide
ucagauaggguggagugua

SEQ ID NO: 1953153 - RNA, 19 nt, Artificial Sequence
  Description of Artificial Sequence: Synthetic oligonucleotide
gguaugaggacacccagca

SEQ ID NO: 1953154 - RNA, 19 nt, Artificial Sequence
  Description of Artificial Sequence: Synthetic oligonucleotide
ugcguggcuacauuuuggu

SEQ ID NO: 1953155 - RNA, 19 nt, Artificial Sequence
  Description of Artificial Sequence: Synthetic oligonucleotide
ugcauguuuuccauugcuu

SEQ ID NO: 1953156 - RNA, 19 nt, Artificial Sequence
  Description of Artificial Sequence: Synthetic oligonucleotide
gauaucaucccgguacauc

SEQ ID NO: 1953157 - RNA, 19 nt, Artificial Sequence
  Description of Artificial Sequence: Synthetic oligonucleotide
augucagcauggcagccag

SEQ ID NO: 1953158 - RNA, 19 nt, Artificial Sequence
  Description of Artificial Sequence: Synthetic oligonucleotide
cuaugaugaguguucuguc

SEQ ID NO: 1953159 - RNA, 19 nt, Artificial Sequence
  Description of Artificial Sequence: Synthetic oligonucleotide
uacaugcaggugaauucca

SEQ ID NO: 1953160 - RNA, 19 nt, Artificial Sequence
  Description of Artificial Sequence: Synthetic oligonucleotide
cugccauguaguagaagag

SEQ ID NO: 1953161 - RNA, 19 nt, Artificial Sequence
  Description of Artificial Sequence: Synthetic oligonucleotide
ucugaucagaugcguggcu

SEQ ID NO: 1953162 - RNA, 19 nt, Artificial Sequence
  Description of Artificial Sequence: Synthetic oligonucleotide
guauguaaccucaggcuug

SEQ ID NO: 1953163 - RNA, 19 nt, Artificial Sequence
  Description of Artificial Sequence: Synthetic oligonucleotide
uguaguagaagagccucuc

SEQ ID NO: 1953164 - RNA, 19 nt, Artificial Sequence
  Description of Artificial Sequence: Synthetic oligonucleotide
cuagcaugucccacagacc

SEQ ID NO: 1953165 - RNA, 19 nt, Artificial Sequence
  Description of Artificial Sequence: Synthetic oligonucleotide
ugaucagaugcguggcuac

SEQ ID NO: 1953166 - RNA, 19 nt, Artificial Sequence
  Description of Artificial Sequence: Synthetic oligonucleotide
gaaggaguacaucaaugcu

SEQ ID NO: 1953167 - RNA, 19 nt, Artificial Sequence
  Description of Artificial Sequence: Synthetic oligonucleotide
uugugguauguaaccucag

SEQ ID NO: 1953168 - RNA, 19 nt, Artificial Sequence
  Description of Artificial Sequence: Synthetic oligonucleotide
cauaugcaggucaagaagu

SEQ ID NO: 1953169 - RNA, 19 nt, Artificial Sequence
  Description of Artificial Sequence: Synthetic oligonucleotide
uaucaucuaugaugagugu

SEQ ID NO: 1953170 - RNA, 19 nt, Artificial Sequence
  Description of Artificial Sequence: Synthetic oligonucleotide
cuucuucgaugcucaagcc

SEQ ID NO: 1953171 - RNA, 19 nt, Artificial Sequence
  Description of Artificial Sequence: Synthetic oligonucleotide
ucacucaccgcuugugcac

SEQ ID NO: 1953172 - RNA, 19 nt, Artificial Sequence
  Description of Artificial Sequence: Synthetic oligonucleotide
gacauccuuauaaauacua

SEQ ID NO: 1953173 - RNA, 19 nt, Artificial Sequence
  Description of Artificial Sequence: Synthetic oligonucleotide
ugcaggucaagaaguuccu

SEQ ID NO: 1953174 - RNA, 19 nt, Artificial Sequence
  Description of Artificial Sequence: Synthetic oligonucleotide
gauguacugacgugacauc

SEQ ID NO: 1953175 - RNA, 19 nt, Artificial Sequence
  Description of Artificial Sequence: Synthetic oligonucleotide
gggauaaguucuuugucac

SEQ ID NO: 1953176 - RNA, 19 nt, Artificial Sequence
  Description of Artificial Sequence: Synthetic oligonucleotide
cuacgcugcaacucuuuac

SEQ ID NO: 1953177 - RNA, 19 nt, Artificial Sequence
  Description of Artificial Sequence: Synthetic oligonucleotide
cauuccaagcauugugguc

SEQ ID NO: 1953178 - RNA, 19 nt, Artificial Sequence
  Description of Artificial Sequence: Synthetic oligonucleotide
ggguguucucucuuaagcc

SEQ ID NO: 1953179 - RNA, 19 nt, Artificial Sequence
  Description of Artificial Sequence: Synthetic oligonucleotide
auuguggucacggguaaga

SEQ ID NO: 1953180 - RNA, 19 nt, Artificial Sequence
  Description of Artificial Sequence: Synthetic oligonucleotide
ccauaugcaggucaagaag

SEQ ID NO: 1953181 - RNA, 19 nt, Artificial Sequence
  Description of Artificial Sequence: Synthetic oligonucleotide
cucaguaucaaagccccuc

SEQ ID NO: 1953182 - RNA, 19 nt, Artificial Sequence
  Description of Artificial Sequence: Synthetic oligonucleotide
cuuaagccgggacagcuca

SEQ ID NO: 1953183 - RNA, 19 nt, Artificial Sequence
  Description of Artificial Sequence: Synthetic oligonucleotide
uggcaaccaaccuuggaua

SEQ ID NO: 1953184 - RNA, 19 nt, Artificial Sequence
  Description of Artificial Sequence: Synthetic oligonucleotide
uccgguuuauggcaaccaa

SEQ ID NO: 1953185 - RNA, 19 nt, Artificial Sequence
  Description of Artificial Sequence: Synthetic oligonucleotide
gauaggguggaguguagua

SEQ ID NO: 1953186 - RNA, 19 nt, Artificial Sequence
  Description of Artificial Sequence: Synthetic oligonucleotide
uuaucuuccuggacaccaa

SEQ ID NO: 1953187 - RNA, 19 nt, Artificial Sequence
  Description of Artificial Sequence: Synthetic oligonucleotide
ucacggguaagagguaagc

SEQ ID NO: 1953188 - RNA, 19 nt, Artificial Sequence
  Description of Artificial Sequence: Synthetic oligonucleotide
agccuuaccacauccucau

SEQ ID NO: 1953189 - RNA, 19 nt, Artificial Sequence
  Description of Artificial Sequence: Synthetic oligonucleotide
auaggugccccaccaccag

SEQ ID NO: 1953190 - RNA, 19 nt, Artificial Sequence
  Description of Artificial Sequence: Synthetic oligonucleotide
uggggccucagcuuguggu

SEQ ID NO: 1953191 - RNA, 19 nt, Artificial Sequence
  Description of Artificial Sequence: Synthetic oligonucleotide
uuugguccagguccgguuu

SEQ ID NO: 1953192 - RNA, 19 nt, Artificial Sequence
  Description of Artificial Sequence: Synthetic oligonucleotide
ucaggguguucucucuuaa

SEQ ID NO: 1953193 - RNA, 19 nt, Artificial Sequence
  Description of Artificial Sequence: Synthetic oligonucleotide
agcagccuaucaucuauga

SEQ ID NO: 1953194 - RNA, 19 nt, Artificial Sequence
  Description of Artificial Sequence: Synthetic oligonucleotide
ugcuacaugcaggugaauu

SEQ ID NO: 1953195 - RNA, 19 nt, Artificial Sequence
  Description of Artificial Sequence: Synthetic oligonucleotide
cuuggauaggugccccacc

SEQ ID NO: 1953196 - RNA, 19 nt, Artificial Sequence
  Description of Artificial Sequence: Synthetic oligonucleotide
gacacuacgcugcaacucu

SEQ ID NO: 1953197 - RNA, 19 nt, Artificial Sequence
  Description of Artificial Sequence: Synthetic oligonucleotide
ggacaccaaggauagcccg

SEQ ID NO: 1953198 - RNA, 19 nt, Artificial Sequence
  Description of Artificial Sequence: Synthetic oligonucleotide
ggauggguagcaaaggcug

SEQ ID NO: 1953199 - RNA, 19 nt, Artificial Sequence
  Description of Artificial Sequence: Synthetic oligonucleotide
gauggguagcaaaggcugc

SEQ ID NO: 1953200 - RNA, 19 nt, Artificial Sequence
  Description of Artificial Sequence: Synthetic oligonucleotide
uccaucugcccaaggucug

SEQ ID NO: 1953201 - RNA, 19 nt, Artificial Sequence
  Description of Artificial Sequence: Synthetic oligonucleotide
caggugaauuccauggaca

SEQ ID NO: 1953202 - RNA, 19 nt, Artificial Sequence
  Description of Artificial Sequence: Synthetic oligonucleotide
cauuuuggucagcugcaug

SEQ ID NO: 1953203 - RNA, 19 nt, Artificial Sequence
  Description of Artificial Sequence: Synthetic oligonucleotide
uaugcaggucaagaaguuc

SEQ ID NO: 1953204 - RNA, 19 nt, Artificial Sequence
  Description of Artificial Sequence: Synthetic oligonucleotide
aucuaugaugaguguucug

SEQ ID NO: 1953205 - RNA, 19 nt, Artificial Sequence
  Description of Artificial Sequence: Synthetic oligonucleotide
ccaaccuuggauaggugcc

SEQ ID NO: 1953206 - RNA, 19 nt, Artificial Sequence
  Description of Artificial Sequence: Synthetic oligonucleotide
gguggugugaacugguaga

SEQ ID NO: 1953207 - RNA, 19 nt, Artificial Sequence
  Description of Artificial Sequence: Synthetic oligonucleotide
uuaagccgggacagcucag

SEQ ID NO: 1953208 - RNA, 19 nt, Artificial Sequence
  Description of Artificial Sequence: Synthetic oligonucleotide
ucaagaaguuccugccaau

SEQ ID NO: 1953209 - RNA, 19 nt, Artificial Sequence
  Description of Artificial Sequence: Synthetic oligonucleotide
uagacucgaagguggucca

SEQ ID NO: 1953210 - RNA, 19 nt, Artificial Sequence
  Description of Artificial Sequence: Synthetic oligonucleotide
acgcugcaacucuuuacuc

SEQ ID NO: 1953211 - RNA, 19 nt, Artificial Sequence
  Description of Artificial Sequence: Synthetic oligonucleotide
gccauguaguagaagagcc

SEQ ID NO: 1953212 - RNA, 19 nt, Artificial Sequence
  Description of Artificial Sequence: Synthetic oligonucleotide
ggcaaccaaccuuggauag

SEQ ID NO: 1953213 - RNA, 19 nt, Artificial Sequence
  Description of Artificial Sequence: Synthetic oligonucleotide
aaggauagcccggcaguca

SEQ ID NO: 1953214 - RNA, 19 nt, Artificial Sequence
  Description of Artificial Sequence: Synthetic oligonucleotide
gauaggugccccaccacca

SEQ ID NO: 1953215 - RNA, 19 nt, Artificial Sequence
  Description of Artificial Sequence: Synthetic oligonucleotide
ggauaaguucuuugucacc

SEQ ID NO: 1953216 - RNA, 19 nt, Artificial Sequence
  Description of Artificial Sequence: Synthetic oligonucleotide
gugagauaucagaauccag

SEQ ID NO: 1953217 - RNA, 19 nt, Artificial Sequence
  Description of Artificial Sequence: Synthetic oligonucleotide
ccugccaauagacucgaag

SEQ ID NO: 1953218 - RNA, 19 nt, Artificial Sequence
  Description of Artificial Sequence: Synthetic oligonucleotide
aggacacuacgcugcaacu

SEQ ID NO: 1953219 - RNA, 19 nt, Artificial Sequence
  Description of Artificial Sequence: Synthetic oligonucleotide
uagugggguggugugaacu

SEQ ID NO: 1953220 - RNA, 19 nt, Artificial Sequence
  Description of Artificial Sequence: Synthetic oligonucleotide
gaugaguguucuguccuca

SEQ ID NO: 1953221 - RNA, 19 nt, Artificial Sequence
  Description of Artificial Sequence: Synthetic oligonucleotide
gauagcccggcagucacca

SEQ ID NO: 1953222 - RNA, 19 nt, Artificial Sequence
  Description of Artificial Sequence: Synthetic oligonucleotide
caucccgguacauccuggc

SEQ ID NO: 1953223 - RNA, 19 nt, Artificial Sequence
  Description of Artificial Sequence: Synthetic oligonucleotide
ugcaacucuuuacuccauu

SEQ ID NO: 1953224 - RNA, 19 nt, Artificial Sequence
  Description of Artificial Sequence: Synthetic oligonucleotide
cggguaagagguaagcagg

SEQ ID NO: 1953225 - RNA, 19 nt, Artificial Sequence
  Description of Artificial Sequence: Synthetic oligonucleotide
ccaagcauuguggucacgg

SEQ ID NO: 1953226 - RNA, 19 nt, Artificial Sequence
  Description of Artificial Sequence: Synthetic oligonucleotide
aaguuccugccaauagacu

SEQ ID NO: 1953227 - RNA, 19 nt, Artificial Sequence
  Description of Artificial Sequence: Synthetic oligonucleotide
ucguuacucccgauggcau

SEQ ID NO: 1953228 - RNA, 19 nt, Artificial Sequence
  Description of Artificial Sequence: Synthetic oligonucleotide
guggaguguaguagugggg

SEQ ID NO: 1953229 - RNA, 19 nt, Artificial Sequence
  Description of Artificial Sequence: Synthetic oligonucleotide
ucagaugcguggcuacauu

SEQ ID NO: 1953230 - RNA, 19 nt, Artificial Sequence
  Description of Artificial Sequence: Synthetic oligonucleotide
guaguagaagagccucuca

SEQ ID NO: 1953231 - RNA, 19 nt, Artificial Sequence
  Description of Artificial Sequence: Synthetic oligonucleotide
acuagccccaggaugcuug

SEQ ID NO: 1953232 - RNA, 19 nt, Artificial Sequence
  Description of Artificial Sequence: Synthetic oligonucleotide
agcuugugguauguaaccu

SEQ ID NO: 1953233 - RNA, 19 nt, Artificial Sequence
  Description of Artificial Sequence: Synthetic oligonucleotide
ggaugcuugagccacugaa

SEQ ID NO: 1953234 - RNA, 19 nt, Artificial Sequence
  Description of Artificial Sequence: Synthetic oligonucleotide
augcguggcuacauuuugg

SEQ ID NO: 1953235 - RNA, 19 nt, Artificial Sequence
  Description of Artificial Sequence: Synthetic oligonucleotide
guccagauguacugacgug

SEQ ID NO: 1953236 - RNA, 19 nt, Artificial Sequence
  Description of Artificial Sequence: Synthetic oligonucleotide
caaggucugguggacauca

SEQ ID NO: 1953237 - RNA, 19 nt, Artificial Sequence
  Description of Artificial Sequence: Synthetic oligonucleotide
gugguccagauguacugac

SEQ ID NO: 1953238 - RNA, 19 nt, Artificial Sequence
  Description of Artificial Sequence: Synthetic oligonucleotide
agguccgguuuauggcaac

SEQ ID NO: 1953239 - RNA, 19 nt, Artificial Sequence
  Description of Artificial Sequence: Synthetic oligonucleotide
agguaagcaggaccacaca

SEQ ID NO: 1953240 - RNA, 19 nt, Artificial Sequence
  Description of Artificial Sequence: Synthetic oligonucleotide
gaacuuaucuuggggccuc

SEQ ID NO: 1953241 - RNA, 19 nt, Artificial Sequence
  Description of Artificial Sequence: Synthetic oligonucleotide
ggguggugugaacugguag

SEQ ID NO: 1953242 - RNA, 19 nt, Artificial Sequence
  Description of Artificial Sequence: Synthetic oligonucleotide
ugggccaugcaagcuguug

SEQ ID NO: 1953243 - RNA, 19 nt, Artificial Sequence
  Description of Artificial Sequence: Synthetic oligonucleotide
aaguucuuugucaccucau

SEQ ID NO: 1953244 - RNA, 19 nt, Artificial Sequence
  Description of Artificial Sequence: Synthetic oligonucleotide
acuacgcugcaacucuuua

SEQ ID NO: 1953245 - RNA, 19 nt, Artificial Sequence
  Description of Artificial Sequence: Synthetic oligonucleotide
uuccaagcauuguggucac

SEQ ID NO: 1953246 - RNA, 19 nt, Artificial Sequence
  Description of Artificial Sequence: Synthetic oligonucleotide
agcauuguggucacgggua

SEQ ID NO: 1953247 - RNA, 19 nt, Artificial Sequence
  Description of Artificial Sequence: Synthetic oligonucleotide
cagauaggguggaguguag

SEQ ID NO: 1953248 - RNA, 19 nt, Artificial Sequence
  Description of Artificial Sequence: Synthetic oligonucleotide
gcuacauuuuggucagcug

SEQ ID NO: 1953249 - RNA, 19 nt, Artificial Sequence
  Description of Artificial Sequence: Synthetic oligonucleotide
cucguuacucccgauggca

SEQ ID NO: 1953250 - RNA, 19 nt, Artificial Sequence
  Description of Artificial Sequence: Synthetic oligonucleotide
agauaggguggaguguagu

SEQ ID NO: 1953251 - RNA, 19 nt, Artificial Sequence
  Description of Artificial Sequence: Synthetic oligonucleotide
cauuaucuuccuggacacc

SEQ ID NO: 1953252 - RNA, 19 nt, Artificial Sequence
  Description of Artificial Sequence: Synthetic oligonucleotide
caccauuaucuuccuggac

SEQ ID NO: 1953253 - RNA, 19 nt, Artificial Sequence
  Description of Artificial Sequence: Synthetic oligonucleotide
gaauuucuagugagauauc

SEQ ID NO: 1953254 - RNA, 19 nt, Artificial Sequence
  Description of Artificial Sequence: Synthetic oligonucleotide
gaccaucugaggccagcac

SEQ ID NO: 1953255 - RNA, 19 nt, Artificial Sequence
  Description of Artificial Sequence: Synthetic oligonucleotide
augucugaucagaugcgug

SEQ ID NO: 1953256 - RNA, 19 nt, Artificial Sequence
  Description of Artificial Sequence: Synthetic oligonucleotide
uacucccgauggcaugucu

SEQ ID NO: 1953257 - RNA, 19 nt, Artificial Sequence
  Description of Artificial Sequence: Synthetic oligonucleotide
ccaugcaagcuguugcccc

SEQ ID NO: 1953258 - RNA, 19 nt, Artificial Sequence
  Description of Artificial Sequence: Synthetic oligonucleotide
cugaauuucuagugagaua

SEQ ID NO: 1953259 - RNA, 19 nt, Artificial Sequence
  Description of Artificial Sequence: Synthetic oligonucleotide
uacugacgugacauccuua

SEQ ID NO: 1953260 - RNA, 19 nt, Artificial Sequence
  Description of Artificial Sequence: Synthetic oligonucleotide
gcuugugguauguaaccuc

SEQ ID NO: 1953261 - RNA, 19 nt, Artificial Sequence
  Description of Artificial Sequence: Synthetic oligonucleotide
uuccugccaauagacucga

SEQ ID NO: 1953262 - RNA, 19 nt, Artificial Sequence
  Description of Artificial Sequence: Synthetic oligonucleotide
cucuuuacuccauuucagu

SEQ ID NO: 1953263 - RNA, 19 nt, Artificial Sequence
  Description of Artificial Sequence: Synthetic oligonucleotide
gcaugucugaucagaugcg

SEQ ID NO: 1953264 - RNA, 19 nt, Artificial Sequence
  Description of Artificial Sequence: Synthetic oligonucleotide
auguaguagaagagccucu

SEQ ID NO: 1953265 - RNA, 19 nt, Artificial Sequence
  Description of Artificial Sequence: Synthetic oligonucleotide
guugagggccucaguauca

SEQ ID NO: 1953266 - RNA, 19 nt, Artificial Sequence
  Description of Artificial Sequence: Synthetic oligonucleotide
gguacauccuggcuacauc

SEQ ID NO: 1953267 - RNA, 19 nt, Artificial Sequence
  Description of Artificial Sequence: Synthetic oligonucleotide
agcaaaggcugcauguuuu

SEQ ID NO: 1953268 - RNA, 19 nt, Artificial Sequence
  Description of Artificial Sequence: Synthetic oligonucleotide
uaguaguggggugguguga

SEQ ID NO: 1953269 - RNA, 19 nt, Artificial Sequence
  Description of Artificial Sequence: Synthetic oligonucleotide
ggccaugcaagcuguugcc

SEQ ID NO: 1953270 - RNA, 19 nt, Artificial Sequence
  Description of Artificial Sequence: Synthetic oligonucleotide
cuggcuacaucuucuggua

SEQ ID NO: 1953271 - RNA, 19 nt, Artificial Sequence
  Description of Artificial Sequence: Synthetic oligonucleotide
ggaguguaguaguggggug

SEQ ID NO: 1953272 - RNA, 19 nt, Artificial Sequence
  Description of Artificial Sequence: Synthetic oligonucleotide
caguaucaaagccccucuc

SEQ ID NO: 1953273 - RNA, 19 nt, Artificial Sequence
  Description of Artificial Sequence: Synthetic oligonucleotide
gucacggguaagagguaag

SEQ ID NO: 1953274 - RNA, 19 nt, Artificial Sequence
  Description of Artificial Sequence: Synthetic oligonucleotide
gccgggacagcucagcuuc

SEQ ID NO: 1953275 - RNA, 19 nt, Artificial Sequence
  Description of Artificial Sequence: Synthetic oligonucleotide
aucugcccaaggucuggug

SEQ ID NO: 1953276 - RNA, 19 nt, Artificial Sequence
  Description of Artificial Sequence: Synthetic oligonucleotide
caaggauagcccggcaguc

SEQ ID NO: 1953277 - RNA, 19 nt, Artificial Sequence
  Description of Artificial Sequence: Synthetic oligonucleotide
aucccgguacauccuggcu

SEQ ID NO: 1953278 - RNA, 19 nt, Artificial Sequence
  Description of Artificial Sequence: Synthetic oligonucleotide
gaucagaugcguggcuaca

SEQ ID NO: 1953279 - RNA, 19 nt, Artificial Sequence
  Description of Artificial Sequence: Synthetic oligonucleotide
aaaggcccugcaggguaug

SEQ ID NO: 1953280 - RNA, 19 nt, Artificial Sequence
  Description of Artificial Sequence: Synthetic oligonucleotide
gguauguaaccucaggcuu

SEQ ID NO: 1953281 - RNA, 19 nt, Artificial Sequence
  Description of Artificial Sequence: Synthetic oligonucleotide
ccauuucaguuggacaucc

SEQ ID NO: 1953282 - RNA, 19 nt, Artificial Sequence
  Description of Artificial Sequence: Synthetic oligonucleotide
ccgguuuauggcaaccaac

SEQ ID NO: 1953283 - RNA, 19 nt, Artificial Sequence
  Description of Artificial Sequence: Synthetic oligonucleotide
gacucgaaggugguccaga

SEQ ID NO: 1953284 - RNA, 19 nt, Artificial Sequence
  Description of Artificial Sequence: Synthetic oligonucleotide
cucucacucaccgcuugug

SEQ ID NO: 1953285 - RNA, 19 nt, Artificial Sequence
  Description of Artificial Sequence: Synthetic oligonucleotide
gguccagauguacugacgu

SEQ ID NO: 1953286 - RNA, 19 nt, Artificial Sequence
  Description of Artificial Sequence: Synthetic oligonucleotide
aacuuaucuuggggccuca

SEQ ID NO: 1953287 - RNA, 19 nt, Artificial Sequence
  Description of Artificial Sequence: Synthetic oligonucleotide
caaagccccucuccaggac

SEQ ID NO: 1953288 - RNA, 19 nt, Artificial Sequence
  Description of Artificial Sequence: Synthetic oligonucleotide
auaugcaggucaagaaguu

SEQ ID NO: 1953289 - RNA, 19 nt, Artificial Sequence
  Description of Artificial Sequence: Synthetic oligonucleotide
ggugaauuccauggacaug

SEQ ID NO: 1953290 - RNA, 19 nt, Artificial Sequence
  Description of Artificial Sequence: Synthetic oligonucleotide
agaccaucugaggccagca

SEQ ID NO: 1953291 - RNA, 19 nt, Artificial Sequence
  Description of Artificial Sequence: Synthetic oligonucleotide
cagaccaucugaggccagc

SEQ ID NO: 1953292 - RNA, 19 nt, Artificial Sequence
  Description of Artificial Sequence: Synthetic oligonucleotide
gcaaccaaccuuggauagg

SEQ ID NO: 1953293 - RNA, 19 nt, Artificial Sequence
  Description of Artificial Sequence: Synthetic oligonucleotide
cgcugcaacucuuuacucc

SEQ ID NO: 1953294 - RNA, 19 nt, Artificial Sequence
  Description of Artificial Sequence: Synthetic oligonucleotide
aucagaugcguggcuacau

SEQ ID NO: 1953295 - RNA, 19 nt, Artificial Sequence
  Description of Artificial Sequence: Synthetic oligonucleotide
ggcagucaccagcauuugc

SEQ ID NO: 1953296 - RNA, 19 nt, Artificial Sequence
  Description of Artificial Sequence: Synthetic oligonucleotide
gcaggguaugaggacaccc

SEQ ID NO: 1953297 - RNA, 19 nt, Artificial Sequence
  Description of Artificial Sequence: Synthetic oligonucleotide
acuuaucuuggggccucag

SEQ ID NO: 1953298 - RNA, 19 nt, Artificial Sequence
  Description of Artificial Sequence: Synthetic oligonucleotide
aaccaaccuuggauaggug

SEQ ID NO: 1953299 - RNA, 19 nt, Artificial Sequence
  Description of Artificial Sequence: Synthetic oligonucleotide
ugcaggguaugaggacacc

SEQ ID NO: 1953300 - RNA, 19 nt, Artificial Sequence
  Description of Artificial Sequence: Synthetic oligonucleotide
gaagagccucucacucacc

SEQ ID NO: 1953301 - RNA, 19 nt, Artificial Sequence
  Description of Artificial Sequence: Synthetic oligonucleotide
uccaagcauuguggucacg

SEQ ID NO: 1953302 - RNA, 19 nt, Artificial Sequence
  Description of Artificial Sequence: Synthetic oligonucleotide
cauuugcuacaugcaggug

SEQ ID NO: 1953303 - RNA, 19 nt, Artificial Sequence
  Description of Artificial Sequence: Synthetic oligonucleotide
gguaagagguaagcaggac

SEQ ID NO: 1953304 - RNA, 19 nt, Artificial Sequence
  Description of Artificial Sequence: Synthetic oligonucleotide
cacagaccaucugaggcca

SEQ ID NO: 1953305 - RNA, 19 nt, Artificial Sequence
  Description of Artificial Sequence: Synthetic oligonucleotide
cacggguaagagguaagca

SEQ ID NO: 1953306 - RNA, 19 nt, Artificial Sequence
  Description of Artificial Sequence: Synthetic oligonucleotide
guuacucccgauggcaugu

SEQ ID NO: 1953307 - RNA, 19 nt, Artificial Sequence
  Description of Artificial Sequence: Synthetic oligonucleotide
agaugcguggcuacauuuu

SEQ ID NO: 1953308 - RNA, 19 nt, Artificial Sequence
  Description of Artificial Sequence: Synthetic oligonucleotide
cauccuggcuacaucuucu

SEQ ID NO: 1953309 - RNA, 19 nt, Artificial Sequence
  Description of Artificial Sequence: Synthetic oligonucleotide
gaguacaucaaugcuucuu

SEQ ID NO: 1953310 - RNA, 19 nt, Artificial Sequence
  Description of Artificial Sequence: Synthetic oligonucleotide
cauugccuagcauguccca

SEQ ID NO: 1953311 - RNA, 19 nt, Artificial Sequence
  Description of Artificial Sequence: Synthetic oligonucleotide
ccgauggcaugucugauca

SEQ ID NO: 1953312 - RNA, 19 nt, Artificial Sequence
  Description of Artificial Sequence: Synthetic oligonucleotide
ggaccacacaccauuaucu

SEQ ID NO: 1953313 - RNA, 19 nt, Artificial Sequence
  Description of Artificial Sequence: Synthetic oligonucleotide
auguaaccucaggcuuggc

SEQ ID NO: 1953314 - RNA, 19 nt, Artificial Sequence
  Description of Artificial Sequence: Synthetic oligonucleotide
uggcuccaucuccccauac

SEQ ID NO: 1953315 - RNA, 19 nt, Artificial Sequence
  Description of Artificial Sequence: Synthetic oligonucleotide
ugucagcauggcagccagu

SEQ ID NO: 1953316 - RNA, 19 nt, Artificial Sequence
  Description of Artificial Sequence: Synthetic oligonucleotide
caaccaaccuuggauaggu

SEQ ID NO: 1953317 - RNA, 19 nt, Artificial Sequence
  Description of Artificial Sequence: Synthetic oligonucleotide
cccgguacauccuggcuac

SEQ ID NO: 1953318 - RNA, 19 nt, Artificial Sequence
  Description of Artificial Sequence: Synthetic oligonucleotide
acaugcaggugaauuccau

SEQ ID NO: 1953319 - RNA, 19 nt, Artificial Sequence
  Description of Artificial Sequence: Synthetic oligonucleotide
auagcccggcagucaccag

SEQ ID NO: 1953320 - RNA, 19 nt, Artificial Sequence
  Description of Artificial Sequence: Synthetic oligonucleotide
cagauguacugacgugaca

SEQ ID NO: 1953321 - RNA, 19 nt, Artificial Sequence
  Description of Artificial Sequence: Synthetic oligonucleotide
guagugggguggugugaac

SEQ ID NO: 1953322 - RNA, 19 nt, Artificial Sequence
  Description of Artificial Sequence: Synthetic oligonucleotide
gguuuauggcaaccaaccu

SEQ ID NO: 1953323 - RNA, 19 nt, Artificial Sequence
  Description of Artificial Sequence: Synthetic oligonucleotide
ggguaugaggacacccagc

SEQ ID NO: 1953324 - RNA, 19 nt, Artificial Sequence
  Description of Artificial Sequence: Synthetic oligonucleotide
caauagacucgaagguggu

SEQ ID NO: 1953325 - RNA, 19 nt, Artificial Sequence
  Description of Artificial Sequence: Synthetic oligonucleotide
ggacacuacgcugcaacuc

SEQ ID NO: 1953326 - RNA, 19 nt, Artificial Sequence
  Description of Artificial Sequence: Synthetic oligonucleotide
auacuagccccaggaugcu

SEQ ID NO: 1953327 - RNA, 19 nt, Artificial Sequence
  Description of Artificial Sequence: Synthetic oligonucleotide
uggcuggucuuugguccag

SEQ ID NO: 1953328 - RNA, 19 nt, Artificial Sequence
  Description of Artificial Sequence: Synthetic oligonucleotide
ccagguccgguuuauggca

SEQ ID NO: 1953329 - RNA, 19 nt, Artificial Sequence
  Description of Artificial Sequence: Synthetic oligonucleotide
ugaggacacccagcagccu

SEQ ID NO: 1953330 - RNA, 19 nt, Artificial Sequence
  Description of Artificial Sequence: Synthetic oligonucleotide
cuuggcagucagauagggu

SEQ ID NO: 1953331 - RNA, 19 nt, Artificial Sequence
  Description of Artificial Sequence: Synthetic oligonucleotide
ggguaagagguaagcagga

SEQ ID NO: 1953332 - RNA, 19 nt, Artificial Sequence
  Description of Artificial Sequence: Synthetic oligonucleotide
guccgguuuauggcaacca

SEQ ID NO: 1953333 - RNA, 19 nt, Artificial Sequence
  Description of Artificial Sequence: Synthetic oligonucleotide
agcaaccuggagggauaag

SEQ ID NO: 1953334 - RNA, 19 nt, Artificial Sequence
  Description of Artificial Sequence: Synthetic oligonucleotide
uggucacggguaagaggua

SEQ ID NO: 1953335 - RNA, 19 nt, Artificial Sequence
  Description of Artificial Sequence: Synthetic oligonucleotide
cucuuaagccgggacagcu

SEQ ID NO: 1953336 - RNA, 19 nt, Artificial Sequence
  Description of Artificial Sequence: Synthetic oligonucleotide
cuuggggccucagcuugug

SEQ ID NO: 1953337 - RNA, 19 nt, Artificial Sequence
  Description of Artificial Sequence: Synthetic oligonucleotide
caucuaugaugaguguucu

SEQ ID NO: 1953338 - RNA, 19 nt, Artificial Sequence
  Description of Artificial Sequence: Synthetic oligonucleotide
gguccgguuuauggcaacc

SEQ ID NO: 1953339 - RNA, 19 nt, Artificial Sequence
  Description of Artificial Sequence: Synthetic oligonucleotide
cuagccccaggaugcuuga

SEQ ID NO: 1953340 - RNA, 19 nt, Artificial Sequence
  Description of Artificial Sequence: Synthetic oligonucleotide
gcaaccuggagggauaagu

SEQ ID NO: 1953341 - RNA, 19 nt, Artificial Sequence
  Description of Artificial Sequence: Synthetic oligonucleotide
cuggaaggaguacaucaau

SEQ ID NO: 1953342 - RNA, 19 nt, Artificial Sequence
  Description of Artificial Sequence: Synthetic oligonucleotide
caugucugaucagaugcgu

SEQ ID NO: 1953343 - RNA, 19 nt, Artificial Sequence
  Description of Artificial Sequence: Synthetic oligonucleotide
caaccuggagggauaaguu

SEQ ID NO: 1953344 - RNA, 19 nt, Artificial Sequence
  Description of Artificial Sequence: Synthetic oligonucleotide
guacugacgugacauccuu

SEQ ID NO: 1953345 - RNA, 19 nt, Artificial Sequence
  Description of Artificial Sequence: Synthetic oligonucleotide
gccaugcaagcuguugccc

SEQ ID NO: 1953346 - RNA, 19 nt, Artificial Sequence
  Description of Artificial Sequence: Synthetic oligonucleotide
uuacucccgauggcauguc

SEQ ID NO: 1953347 - RNA, 19 nt, Artificial Sequence
  Description of Artificial Sequence: Synthetic oligonucleotide
ucccgauggcaugucugau

SEQ ID NO: 1953348 - RNA, 19 nt, Artificial Sequence
  Description of Artificial Sequence: Synthetic oligonucleotide
uucgaugcucaagcccauu

SEQ ID NO: 1953349 - RNA, 19 nt, Artificial Sequence
  Description of Artificial Sequence: Synthetic oligonucleotide
ccagaggagccugaauuuc

SEQ ID NO: 1953350 - RNA, 19 nt, Artificial Sequence
  Description of Artificial Sequence: Synthetic oligonucleotide
gucagauaggguggagugu

SEQ ID NO: 1953351 - RNA, 19 nt, Artificial Sequence
  Description of Artificial Sequence: Synthetic oligonucleotide
cagguccgguuuauggcaa

SEQ ID NO: 1953352 - RNA, 19 nt, Artificial Sequence
  Description of Artificial Sequence: Synthetic oligonucleotide
gcucaagcccauuuccaua

SEQ ID NO: 1953353 - RNA, 19 nt, Artificial Sequence
  Description of Artificial Sequence: Synthetic oligonucleotide
gccuaucaucuaugaugag

SEQ ID NO: 1953354 - RNA, 19 nt, Artificial Sequence
  Description of Artificial Sequence: Synthetic oligonucleotide
cagaugcguggcuacauuu

SEQ ID NO: 1953355 - RNA, 19 nt, Artificial Sequence
  Description of Artificial Sequence: Synthetic oligonucleotide
uccugccaauagacucgaa

SEQ ID NO: 1953356 - RNA, 19 nt, Artificial Sequence
  Description of Artificial Sequence: Synthetic oligonucleotide
ggcuacauuuuggucagcu

SEQ ID NO: 1953357 - RNA, 19 nt, Artificial Sequence
  Description of Artificial Sequence: Synthetic oligonucleotide
guggugugaacugguagau

SEQ ID NO: 1953358 - RNA, 19 nt, Artificial Sequence
  Description of Artificial Sequence: Synthetic oligonucleotide
gcauuguggucacggguaa

SEQ ID NO: 1953359 - RNA, 19 nt, Artificial Sequence
  Description of Artificial Sequence: Synthetic oligonucleotide
ccuuggauaggugccccac

SEQ ID NO: 1953360 - RNA, 19 nt, Artificial Sequence
  Description of Artificial Sequence: Synthetic oligonucleotide
gcaacucuuuacuccauuu

SEQ ID NO: 1953361 - RNA, 19 nt, Artificial Sequence
  Description of Artificial Sequence: Synthetic oligonucleotide
cguuacucccgauggcaug

SEQ ID NO: 1953362 - RNA, 19 nt, Artificial Sequence
  Description of Artificial Sequence: Synthetic oligonucleotide
ggaacuuaucuuggggccu

SEQ ID NO: 1953363 - RNA, 19 nt, Artificial Sequence
  Description of Artificial Sequence: Synthetic oligonucleotide
ggccucagcuugugguaug

SEQ ID NO: 1953364 - RNA, 19 nt, Artificial Sequence
  Description of Artificial Sequence: Synthetic oligonucleotide
uacuagccccaggaugcuu

SEQ ID NO: 1953365 - RNA, 19 nt, Artificial Sequence
  Description of Artificial Sequence: Synthetic oligonucleotide
acucugcaugaggcccagg

SEQ ID NO: 1953366 - RNA, 19 nt, Artificial Sequence
  Description of Artificial Sequence: Synthetic oligonucleotide
ccauacucguuacucccga

SEQ ID NO: 1953367 - RNA, 19 nt, Artificial Sequence
  Description of Artificial Sequence: Synthetic oligonucleotide
gcguggcuacauuuugguc

SEQ ID NO: 1953368 - RNA, 19 nt, Artificial Sequence
  Description of Artificial Sequence: Synthetic oligonucleotide
caccagcauuugcuacaug

SEQ ID NO: 1953369 - RNA, 19 nt, Artificial Sequence
  Description of Artificial Sequence: Synthetic oligonucleotide
cugacgugacauccuuaua

SEQ ID NO: 1953370 - RNA, 19 nt, Artificial Sequence
  Description of Artificial Sequence: Synthetic oligonucleotide
cagugauaucaucccggua

SEQ ID NO: 1953371 - RNA, 19 nt, Artificial Sequence
  Description of Artificial Sequence: Synthetic oligonucleotide
gucucuggaaggaguacau

SEQ ID NO: 1953372 - RNA, 19 nt, Artificial Sequence
  Description of Artificial Sequence: Synthetic oligonucleotide
cauccccaaaggcccugca

SEQ ID NO: 1953373 - RNA, 19 nt, Artificial Sequence
  Description of Artificial Sequence: Synthetic oligonucleotide
uugcuacaugcaggugaau

SEQ ID NO: 1953374 - RNA, 19 nt, Artificial Sequence
  Description of Artificial Sequence: Synthetic oligonucleotide
ggauagcccggcagucacc

SEQ ID NO: 1953375 - RNA, 19 nt, Artificial Sequence
  Description of Artificial Sequence: Synthetic oligonucleotide
gguagauguugagggccuc

SEQ ID NO: 1953376 - RNA, 19 nt, Artificial Sequence
  Description of Artificial Sequence: Synthetic oligonucleotide
caggcuuggcagucagaua

SEQ ID NO: 1953377 - RNA, 19 nt, Artificial Sequence
  Description of Artificial Sequence: Synthetic oligonucleotide
gccagcacaaggaacuuau

SEQ ID NO: 1953378 - RNA, 19 nt, Artificial Sequence
  Description of Artificial Sequence: Synthetic oligonucleotide
acacuacgcugcaacucuu

SEQ ID NO: 1953379 - RNA, 19 nt, Artificial Sequence
  Description of Artificial Sequence: Synthetic oligonucleotide
ccaaggauagcccggcagu

SEQ ID NO: 1953380 - RNA, 19 nt, Artificial Sequence
  Description of Artificial Sequence: Synthetic oligonucleotide
caccaaggauagcccggca

SEQ ID NO: 1953381 - RNA, 19 nt, Artificial Sequence
  Description of Artificial Sequence: Synthetic oligonucleotide
ccccucuccaggacacuac

SEQ ID NO: 1953382 - RNA, 19 nt, Artificial Sequence
  Description of Artificial Sequence: Synthetic oligonucleotide
cauacucguuacucccgau

SEQ ID NO: 1953383 - RNA, 19 nt, Artificial Sequence
  Description of Artificial Sequence: Synthetic oligonucleotide
gcccugcaggguaugagga

SEQ ID NO: 1953384 - RNA, 19 nt, Artificial Sequence
  Description of Artificial Sequence: Synthetic oligonucleotide
guccucagacucagggugu

SEQ ID NO: 1953385 - RNA, 19 nt, Artificial Sequence
  Description of Artificial Sequence: Synthetic oligonucleotide
caaaggcccugcaggguau

SEQ ID NO: 1953386 - RNA, 19 nt, Artificial Sequence
  Description of Artificial Sequence: Synthetic oligonucleotide
gguccagguccgguuuaug

SEQ ID NO: 1953387 - RNA, 19 nt, Artificial Sequence
  Description of Artificial Sequence: Synthetic oligonucleotide
gcagccuaucaucuaugau

SEQ ID NO: 1953388 - RNA, 19 nt, Artificial Sequence
  Description of Artificial Sequence: Synthetic oligonucleotide
cuucgaugcucaagcccau

SEQ ID NO: 1953389 - RNA, 19 nt, Artificial Sequence
  Description of Artificial Sequence: Synthetic oligonucleotide
gcuggucuuugguccaggu

SEQ ID NO: 1953390 - RNA, 19 nt, Artificial Sequence
  Description of Artificial Sequence: Synthetic oligonucleotide
ccaccaugacagugauauc

SEQ ID NO: 1953391 - RNA, 19 nt, Artificial Sequence
  Description of Artificial Sequence: Synthetic oligonucleotide
agccucucacucaccgcuu

SEQ ID NO: 1953392 - RNA, 19 nt, Artificial Sequence
  Description of Artificial Sequence: Synthetic oligonucleotide
agccccucuccaggacacu

SEQ ID NO: 1953393 - RNA, 19 nt, Artificial Sequence
  Description of Artificial Sequence: Synthetic oligonucleotide
ccaaggucugguggacauc

SEQ ID NO: 1953394 - RNA, 19 nt, Artificial Sequence
  Description of Artificial Sequence: Synthetic oligonucleotide
ggcccagguuggcuggucu

SEQ ID NO: 1953395 - RNA, 19 nt, Artificial Sequence
  Description of Artificial Sequence: Synthetic oligonucleotide
ggccagcacaaggaacuua

SEQ ID NO: 1953396 - RNA, 19 nt, Artificial Sequence
  Description of Artificial Sequence: Synthetic oligonucleotide
ggacacccagcagccuauc

SEQ ID NO: 1953397 - RNA, 19 nt, Artificial Sequence
  Description of Artificial Sequence: Synthetic oligonucleotide
augggccaugcaagcuguu

SEQ ID NO: 1953398 - RNA, 19 nt, Artificial Sequence
  Description of Artificial Sequence: Synthetic oligonucleotide
gggguggugugaacuggua

SEQ ID NO: 1953399 - RNA, 19 nt, Artificial Sequence
  Description of Artificial Sequence: Synthetic oligonucleotide
gccccucuccaggacacua

SEQ ID NO: 1953400 - RNA, 19 nt, Artificial Sequence
  Description of Artificial Sequence: Synthetic oligonucleotide
gggccucagcuugugguau

SEQ ID NO: 1953401 - RNA, 19 nt, Artificial Sequence
  Description of Artificial Sequence: Synthetic oligonucleotide
ccucucacucaccgcuugu

SEQ ID NO: 1953402 - RNA, 19 nt, Artificial Sequence
  Description of Artificial Sequence: Synthetic oligonucleotide
cccggcagucaccagcauu

SEQ ID NO: 1953403 - RNA, 19 nt, Artificial Sequence
  Description of Artificial Sequence: Synthetic oligonucleotide
gccuuaccacauccucauu

SEQ ID NO: 1953404 - RNA, 19 nt, Artificial Sequence
  Description of Artificial Sequence: Synthetic oligonucleotide
ccgguacauccuggcuaca

SEQ ID NO: 1953405 - RNA, 19 nt, Artificial Sequence
  Description of Artificial Sequence: Synthetic oligonucleotide
gcccggcagucaccagcau

SEQ ID NO: 1953406 - RNA, 19 nt, Artificial Sequence
  Description of Artificial Sequence: Synthetic oligonucleotide
agggguaagaacuugaccc

SEQ ID NO: 1953407 - RNA, 19 nt, Artificial Sequence
  Description of Artificial Sequence: Synthetic oligonucleotide
cuuaaguagagcuugcgcc

SEQ ID NO: 1953408 - RNA, 19 nt, Artificial Sequence
  Description of Artificial Sequence: Synthetic oligonucleotide
gaagugaacagcaaagacg

SEQ ID NO: 1953409 - RNA, 19 nt, Artificial Sequence
  Description of Artificial Sequence: Synthetic oligonucleotide
aacgguagaagugaacagc

SEQ ID NO: 1953410 - RNA, 19 nt, Artificial Sequence
  Description of Artificial Sequence: Synthetic oligonucleotide
guggacauuacucacagcc

SEQ ID NO: 1953411 - RNA, 19 nt, Artificial Sequence
  Description of Artificial Sequence: Synthetic oligonucleotide
aagagcaacgucccgauga

SEQ ID NO: 1953412 - RNA, 19 nt, Artificial Sequence
  Description of Artificial Sequence: Synthetic oligonucleotide
ucuuugaccgaguugaggu

SEQ ID NO: 1953413 - RNA, 19 nt, Artificial Sequence
  Description of Artificial Sequence: Synthetic oligonucleotide
aagugaacagcaaagacga

SEQ ID NO: 1953414 - RNA, 19 nt, Artificial Sequence
  Description of Artificial Sequence: Synthetic oligonucleotide
ugaacagcaaagacgauaa

SEQ ID NO: 1953415 - RNA, 19 nt, Artificial Sequence
  Description of Artificial Sequence: Synthetic oligonucleotide
aacuugacccagcagagca

SEQ ID NO: 1953416 - RNA, 19 nt, Artificial Sequence
  Description of Artificial Sequence: Synthetic oligonucleotide
cucggaguaacucugggcg

SEQ ID NO: 1953417 - RNA, 19 nt, Artificial Sequence
  Description of Artificial Sequence: Synthetic oligonucleotide
gaaagucucaaagugcuag

SEQ ID NO: 1953418 - RNA, 19 nt, Artificial Sequence
  Description of Artificial Sequence: Synthetic oligonucleotide
aacgagggagugcuuauuc

SEQ ID NO: 1953419 - RNA, 19 nt, Artificial Sequence
  Description of Artificial Sequence: Synthetic oligonucleotide
gaugcauggaguucgcugc

SEQ ID NO: 1953420 - RNA, 19 nt, Artificial Sequence
  Description of Artificial Sequence: Synthetic oligonucleotide
uuacucacagccucgaugu

SEQ ID NO: 1953421 - RNA, 19 nt, Artificial Sequence
  Description of Artificial Sequence: Synthetic oligonucleotide
agcaccgugguacaggcac

SEQ ID NO: 1953422 - RNA, 19 nt, Artificial Sequence
  Description of Artificial Sequence: Synthetic oligonucleotide
ugaacgguagaagugaaca

SEQ ID NO: 1953423 - RNA, 19 nt, Artificial Sequence
  Description of Artificial Sequence: Synthetic oligonucleotide
aagaaagucucaaagugcu

SEQ ID NO: 1953424 - RNA, 19 nt, Artificial Sequence
  Description of Artificial Sequence: Synthetic oligonucleotide
ugguggauagucauggucu

SEQ ID NO: 1953425 - RNA, 19 nt, Artificial Sequence
  Description of Artificial Sequence: Synthetic oligonucleotide
uuaaguagagcuugcgcca

SEQ ID NO: 1953426 - RNA, 19 nt, Artificial Sequence
  Description of Artificial Sequence: Synthetic oligonucleotide
auucucacagaagaaaguc

SEQ ID NO: 1953427 - RNA, 19 nt, Artificial Sequence
  Description of Artificial Sequence: Synthetic oligonucleotide
uuguggacauuacucacag

SEQ ID NO: 1953428 - RNA, 19 nt, Artificial Sequence
  Description of Artificial Sequence: Synthetic oligonucleotide
auuacucacagccucgaug

SEQ ID NO: 1953429 - RNA, 19 nt, Artificial Sequence
  Description of Artificial Sequence: Synthetic oligonucleotide
gaagaaagucucaaagugc

SEQ ID NO: 1953430 - RNA, 19 nt, Artificial Sequence
  Description of Artificial Sequence: Synthetic oligonucleotide
uauggcugaccagugaacg

SEQ ID NO: 1953431 - RNA, 19 nt, Artificial Sequence
  Description of Artificial Sequence: Synthetic oligonucleotide
gaagccggagagcagagcc

SEQ ID NO: 1953432 - RNA, 19 nt, Artificial Sequence
  Description of Artificial Sequence: Synthetic oligonucleotide
aaugcagguacugaucaug

SEQ ID NO: 1953433 - RNA, 19 nt, Artificial Sequence
  Description of Artificial Sequence: Synthetic oligonucleotide
aacagcaaagacgauaaaa

SEQ ID NO: 1953434 - RNA, 19 nt, Artificial Sequence
  Description of Artificial Sequence: Synthetic oligonucleotide
agaaugcagguacugauca

SEQ ID NO: 1953435 - RNA, 19 nt, Artificial Sequence
  Description of Artificial Sequence: Synthetic oligonucleotide
cuuaguggggcuuggcugg

SEQ ID NO: 1953436 - RNA, 19 nt, Artificial Sequence
  Description of Artificial Sequence: Synthetic oligonucleotide
guaaggugaagcuccacag

SEQ ID NO: 1953437 - RNA, 19 nt, Artificial Sequence
  Description of Artificial Sequence: Synthetic oligonucleotide
augaccguagagaaggccc

SEQ ID NO: 1953438 - RNA, 19 nt, Artificial Sequence
  Description of Artificial Sequence: Synthetic oligonucleotide
gacucuuugaccgaguuga

SEQ ID NO: 1953439 - RNA, 19 nt, Artificial Sequence
  Description of Artificial Sequence: Synthetic oligonucleotide
cuuggcgcggcuuaaguag

SEQ ID NO: 1953440 - RNA, 19 nt, Artificial Sequence
  Description of Artificial Sequence: Synthetic oligonucleotide
acucaggcauaaugggugc

SEQ ID NO: 1953441 - RNA, 19 nt, Artificial Sequence
  Description of Artificial Sequence: Synthetic oligonucleotide
uccggaugcauggaguucg

SEQ ID NO: 1953442 - RNA, 19 nt, Artificial Sequence
  Description of Artificial Sequence: Synthetic oligonucleotide
aagacaaugagaagcccug

SEQ ID NO: 1953443 - RNA, 19 nt, Artificial Sequence
  Description of Artificial Sequence: Synthetic oligonucleotide
acaaugagaagcccuggug

SEQ ID NO: 1953444 - RNA, 19 nt, Artificial Sequence
  Description of Artificial Sequence: Synthetic oligonucleotide
uccgucuuauggcugacca

SEQ ID NO: 1953445 - RNA, 19 nt, Artificial Sequence
  Description of Artificial Sequence: Synthetic oligonucleotide
uaagaacuugacccagcag

SEQ ID NO: 1953446 - RNA, 19 nt, Artificial Sequence
  Description of Artificial Sequence: Synthetic oligonucleotide
caggacagcgccugcaucg

SEQ ID NO: 1953447 - RNA, 19 nt, Artificial Sequence
  Description of Artificial Sequence: Synthetic oligonucleotide
aagggcguaaggugaagcu

SEQ ID NO: 1953448 - RNA, 19 nt, Artificial Sequence
  Description of Artificial Sequence: Synthetic oligonucleotide
agcaacgucccgaugaccg

SEQ ID NO: 1953449 - RNA, 19 nt, Artificial Sequence
  Description of Artificial Sequence: Synthetic oligonucleotide
caggagggcgcuuaguggg

SEQ ID NO: 1953450 - RNA, 19 nt, Artificial Sequence
  Description of Artificial Sequence: Synthetic oligonucleotide
cucugggcgauccaguccg

SEQ ID NO: 1953451 - RNA, 19 nt, Artificial Sequence
  Description of Artificial Sequence: Synthetic oligonucleotide
uugaggcucaucaccucgg

SEQ ID NO: 1953452 - RNA, 19 nt, Artificial Sequence
  Description of Artificial Sequence: Synthetic oligonucleotide
agagcaacgucccgaugac

SEQ ID NO: 1953453 - RNA, 19 nt, Artificial Sequence
  Description of Artificial Sequence: Synthetic oligonucleotide
cuucccuccacacucugcc

SEQ ID NO: 1953454 - RNA, 19 nt, Artificial Sequence
  Description of Artificial Sequence: Synthetic oligonucleotide
gacauuacucacagccucg

SEQ ID NO: 1953455 - RNA, 19 nt, Artificial Sequence
  Description of Artificial Sequence: Synthetic oligonucleotide
gacccagcagagcagcacg

SEQ ID NO: 1953456 - RNA, 19 nt, Artificial Sequence
  Description of Artificial Sequence: Synthetic oligonucleotide
gauagucauggucuguauc

SEQ ID NO: 1953457 - RNA, 19 nt, Artificial Sequence
  Description of Artificial Sequence: Synthetic oligonucleotide
aucaccucggaguaacucu

SEQ ID NO: 1953458 - RNA, 19 nt, Artificial Sequence
  Description of Artificial Sequence: Synthetic oligonucleotide
accgaguugagguugugga

SEQ ID NO: 1953459 - RNA, 19 nt, Artificial Sequence
  Description of Artificial Sequence: Synthetic oligonucleotide
cuggacuucuaccaucgcc

SEQ ID NO: 1953460 - RNA, 19 nt, Artificial Sequence
  Description of Artificial Sequence: Synthetic oligonucleotide
uguuggcgacgacagcugg

SEQ ID NO: 1953461 - RNA, 19 nt, Artificial Sequence
  Description of Artificial Sequence: Synthetic oligonucleotide
gagggguaagaacuugacc

SEQ ID NO: 1953462 - RNA, 19 nt, Artificial Sequence
  Description of Artificial Sequence: Synthetic oligonucleotide
ucguugaggcucaucaccu

SEQ ID NO: 1953463 - RNA, 19 nt, Artificial Sequence
  Description of Artificial Sequence: Synthetic oligonucleotide
aggcucaucaccucggagu

SEQ ID NO: 1953464 - RNA, 19 nt, Artificial Sequence
  Description of Artificial Sequence: Synthetic oligonucleotide
uggacauuacucacagccu

SEQ ID NO: 1953465 - RNA, 19 nt, Artificial Sequence
  Description of Artificial Sequence: Synthetic oligonucleotide
ucaccucggaguaacucug

SEQ ID NO: 1953466 - RNA, 19 nt, Artificial Sequence
  Description of Artificial Sequence: Synthetic oligonucleotide
cacgaccucagccaggaag

SEQ ID NO: 1953467 - RNA, 19 nt, Artificial Sequence
  Description of Artificial Sequence: Synthetic oligonucleotide
ucuuauggcugaccaguga

SEQ ID NO: 1953468 - RNA, 19 nt, Artificial Sequence
  Description of Artificial Sequence: Synthetic oligonucleotide
ugagggguaagaacuugac

SEQ ID NO: 1953469 - RNA, 19 nt, Artificial Sequence
  Description of Artificial Sequence: Synthetic oligonucleotide
ucauggucuguauccagcu

SEQ ID NO: 1953470 - RNA, 19 nt, Artificial Sequence
  Description of Artificial Sequence: Synthetic oligonucleotide
ggagugcuuauucucacag

SEQ ID NO: 1953471 - RNA, 19 nt, Artificial Sequence
  Description of Artificial Sequence: Synthetic oligonucleotide
aagggaagcucgggguugc

SEQ ID NO: 1953472 - RNA, 19 nt, Artificial Sequence
  Description of Artificial Sequence: Synthetic oligonucleotide
acaggcacugaagacaaug

SEQ ID NO: 1953473 - RNA, 19 nt, Artificial Sequence
  Description of Artificial Sequence: Synthetic oligonucleotide
acugaucaugagugcaaag

SEQ ID NO: 1953474 - RNA, 19 nt, Artificial Sequence
  Description of Artificial Sequence: Synthetic oligonucleotide
agagccgagguccggcugg

SEQ ID NO: 1953475 - RNA, 19 nt, Artificial Sequence
  Description of Artificial Sequence: Synthetic oligonucleotide
ugaccguagagaaggccca

SEQ ID NO: 1953476 - RNA, 19 nt, Artificial Sequence
  Description of Artificial Sequence: Synthetic oligonucleotide
auguuggggagaaugcagg

SEQ ID NO: 1953477 - RNA, 19 nt, Artificial Sequence
  Description of Artificial Sequence: Synthetic oligonucleotide
agucauggucuguauccag

SEQ ID NO: 1953478 - RNA, 19 nt, Artificial Sequence
  Description of Artificial Sequence: Synthetic oligonucleotide
guaacucugggcgauccag

SEQ ID NO: 1953479 - RNA, 19 nt, Artificial Sequence
  Description of Artificial Sequence: Synthetic oligonucleotide
uuaaaccucuucccuccac

SEQ ID NO: 1953480 - RNA, 19 nt, Artificial Sequence
  Description of Artificial Sequence: Synthetic oligonucleotide
uggaguucgcugcgaaggc

SEQ ID NO: 1953481 - RNA, 19 nt, Artificial Sequence
  Description of Artificial Sequence: Synthetic oligonucleotide
uaaguagagcuugcgccag

SEQ ID NO: 1953482 - RNA, 19 nt, Artificial Sequence
  Description of Artificial Sequence: Synthetic oligonucleotide
aaugggugccaggugucag

SEQ ID NO: 1953483 - RNA, 19 nt, Artificial Sequence
  Description of Artificial Sequence: Synthetic oligonucleotide
gaugaccguagagaaggcc

SEQ ID NO: 1953484 - RNA, 19 nt, Artificial Sequence
  Description of Artificial Sequence: Synthetic oligonucleotide
uguuggggagaaugcaggu

SEQ ID NO: 1953485 - RNA, 19 nt, Artificial Sequence
  Description of Artificial Sequence: Synthetic oligonucleotide
ugcaagcgggcaaacucug

SEQ ID NO: 1953486 - RNA, 19 nt, Artificial Sequence
  Description of Artificial Sequence: Synthetic oligonucleotide
ucccgaugaccguagagaa

SEQ ID NO: 1953487 - RNA, 19 nt, Artificial Sequence
  Description of Artificial Sequence: Synthetic oligonucleotide
aguccggguagcugacggc

SEQ ID NO: 1953488 - RNA, 19 nt, Artificial Sequence
  Description of Artificial Sequence: Synthetic oligonucleotide
augguccccucuguggucc

SEQ ID NO: 1953489 - RNA, 19 nt, Artificial Sequence
  Description of Artificial Sequence: Synthetic oligonucleotide
cuugcgccaggacagcgcc

SEQ ID NO: 1953490 - RNA, 19 nt, Artificial Sequence
  Description of Artificial Sequence: Synthetic oligonucleotide
cugaucaugagugcaaaga

SEQ ID NO: 1953491 - RNA, 19 nt, Artificial Sequence
  Description of Artificial Sequence: Synthetic oligonucleotide
agcuggacuucuaccaucg

SEQ ID NO: 1953492 - RNA, 19 nt, Artificial Sequence
  Description of Artificial Sequence: Synthetic oligonucleotide
ccgaugaccguagagaagg

SEQ ID NO: 1953493 - RNA, 19 nt, Artificial Sequence
  Description of Artificial Sequence: Synthetic oligonucleotide
ugcagguacugaucaugag

SEQ ID NO: 1953494 - RNA, 19 nt, Artificial Sequence
  Description of Artificial Sequence: Synthetic oligonucleotide
ugguacaggcacugaagac

SEQ ID NO: 1953495 - RNA, 19 nt, Artificial Sequence
  Description of Artificial Sequence: Synthetic oligonucleotide
ugcaucgagugcucguuga

SEQ ID NO: 1953496 - RNA, 19 nt, Artificial Sequence
  Description of Artificial Sequence: Synthetic oligonucleotide
cuuauggcugaccagugaa

SEQ ID NO: 1953497 - RNA, 19 nt, Artificial Sequence
  Description of Artificial Sequence: Synthetic oligonucleotide
cugguggauagucaugguc

SEQ ID NO: 1953498 - RNA, 19 nt, Artificial Sequence
  Description of Artificial Sequence: Synthetic oligonucleotide
ggaugcauggaguucgcug

SEQ ID NO: 1953499 - RNA, 19 nt, Artificial Sequence
  Description of Artificial Sequence: Synthetic oligonucleotide
accucggaguaacucuggg

SEQ ID NO: 1953500 - RNA, 19 nt, Artificial Sequence
  Description of Artificial Sequence: Synthetic oligonucleotide
agcugguucaggagggcgc

SEQ ID NO: 1953501 - RNA, 19 nt, Artificial Sequence
  Description of Artificial Sequence: Synthetic oligonucleotide
aagaacgagggagugcuua

SEQ ID NO: 1953502 - RNA, 19 nt, Artificial Sequence
  Description of Artificial Sequence: Synthetic oligonucleotide
augcauggaguucgcugcg

SEQ ID NO: 1953503 - RNA, 19 nt, Artificial Sequence
  Description of Artificial Sequence: Synthetic oligonucleotide
gaagggcguaaggugaagc

SEQ ID NO: 1953504 - RNA, 19 nt, Artificial Sequence
  Description of Artificial Sequence: Synthetic oligonucleotide
agcucguugagcuccugga

SEQ ID NO: 1953505 - RNA, 19 nt, Artificial Sequence
  Description of Artificial Sequence: Synthetic oligonucleotide
uggucuguauccagcugga

SEQ ID NO: 1953506 - RNA, 19 nt, Artificial Sequence
  Description of Artificial Sequence: Synthetic oligonucleotide
aggugaagcuccacaggcc

SEQ ID NO: 1953507 - RNA, 19 nt, Artificial Sequence
  Description of Artificial Sequence: Synthetic oligonucleotide
ggaagcucgggguugcugc

SEQ ID NO: 1953508 - RNA, 19 nt, Artificial Sequence
  Description of Artificial Sequence: Synthetic oligonucleotide
cucuuugaccgaguugagg

SEQ ID NO: 1953509 - RNA, 19 nt, Artificial Sequence
  Description of Artificial Sequence: Synthetic oligonucleotide
gaagacaaugagaagcccu

SEQ ID NO: 1953510 - RNA, 19 nt, Artificial Sequence
  Description of Artificial Sequence: Synthetic oligonucleotide
cucaucaccucggaguaac

SEQ ID NO: 1953511 - RNA, 19 nt, Artificial Sequence
  Description of Artificial Sequence: Synthetic oligonucleotide
cauaaugggugccaggugu

SEQ ID NO: 1953512 - RNA, 19 nt, Artificial Sequence
  Description of Artificial Sequence: Synthetic oligonucleotide
gaguucgcugcgaaggcgc

SEQ ID NO: 1953513 - RNA, 19 nt, Artificial Sequence
  Description of Artificial Sequence: Synthetic oligonucleotide
agggcguaaggugaagcuc

SEQ ID NO: 1953514 - RNA, 19 nt, Artificial Sequence
  Description of Artificial Sequence: Synthetic oligonucleotide
auaaugggugccagguguc

SEQ ID NO: 1953515 - RNA, 19 nt, Artificial Sequence
  Description of Artificial Sequence: Synthetic oligonucleotide
aggcauaaugggugccagg

SEQ ID NO: 1953516 - RNA, 19 nt, Artificial Sequence
  Description of Artificial Sequence: Synthetic oligonucleotide
agacaaugagaagcccugg

SEQ ID NO: 1953517 - RNA, 19 nt, Artificial Sequence
  Description of Artificial Sequence: Synthetic oligonucleotide
caguccggguagcugacgg

SEQ ID NO: 1953518 - RNA, 19 nt, Artificial Sequence
  Description of Artificial Sequence: Synthetic oligonucleotide
acgguagaagugaacagca

SEQ ID NO: 1953519 - RNA, 19 nt, Artificial Sequence
  Description of Artificial Sequence: Synthetic oligonucleotide
acucacagccucgauguug

SEQ ID NO: 1953520 - RNA, 19 nt, Artificial Sequence
  Description of Artificial Sequence: Synthetic oligonucleotide
ugccgguccgucuuauggc

SEQ ID NO: 1953521 - RNA, 19 nt, Artificial Sequence
  Description of Artificial Sequence: Synthetic oligonucleotide
aggaagagcaacgucccga

SEQ ID NO: 1953522 - RNA, 19 nt, Artificial Sequence
  Description of Artificial Sequence: Synthetic oligonucleotide
gaccagugaacgguagaag

SEQ ID NO: 1953523 - RNA, 19 nt, Artificial Sequence
  Description of Artificial Sequence: Synthetic oligonucleotide
gaaggcgaggacucaggca

SEQ ID NO: 1953524 - RNA, 19 nt, Artificial Sequence
  Description of Artificial Sequence: Synthetic oligonucleotide
agcagagccgagguccggc

SEQ ID NO: 1953525 - RNA, 19 nt, Artificial Sequence
  Description of Artificial Sequence: Synthetic oligonucleotide
ggacauuacucacagccuc

SEQ ID NO: 1953526 - RNA, 19 nt, Artificial Sequence
  Description of Artificial Sequence: Synthetic oligonucleotide
uccggguagcugacggcgg

SEQ ID NO: 1953527 - RNA, 19 nt, Artificial Sequence
  Description of Artificial Sequence: Synthetic oligonucleotide
gcuuaguggggcuuggcug

SEQ ID NO: 1953528 - RNA, 19 nt, Artificial Sequence
  Description of Artificial Sequence: Synthetic oligonucleotide
uggauagucauggucugua

SEQ ID NO: 1953529 - RNA, 19 nt, Artificial Sequence
  Description of Artificial Sequence: Synthetic oligonucleotide
ucggaguaacucugggcga

SEQ ID NO: 1953530 - RNA, 19 nt, Artificial Sequence
  Description of Artificial Sequence: Synthetic oligonucleotide
ucgauguggcggugcaugc

SEQ ID NO: 1953531 - RNA, 19 nt, Artificial Sequence
  Description of Artificial Sequence: Synthetic oligonucleotide
auggccgccgccucacccg

SEQ ID NO: 1953532 - RNA, 19 nt, Artificial Sequence
  Description of Artificial Sequence: Synthetic oligonucleotide
uggcugaccagugaacggu

SEQ ID NO: 1953533 - RNA, 19 nt, Artificial Sequence
  Description of Artificial Sequence: Synthetic oligonucleotide
gacuucuaccaucgccacc

SEQ ID NO: 1953534 - RNA, 19 nt, Artificial Sequence
  Description of Artificial Sequence: Synthetic oligonucleotide
aagccggagagcagagccg

SEQ ID NO: 1953535 - RNA, 19 nt, Artificial Sequence
  Description of Artificial Sequence: Synthetic oligonucleotide
cccgguaaagcccagucgc

SEQ ID NO: 1953536 - RNA, 19 nt, Artificial Sequence
  Description of Artificial Sequence: Synthetic oligonucleotide
acgagggagugcuuauucu

SEQ ID NO: 1953537 - RNA, 19 nt, Artificial Sequence
  Description of Artificial Sequence: Synthetic oligonucleotide
agcccagucgccugugcag

SEQ ID NO: 1953538 - RNA, 19 nt, Artificial Sequence
  Description of Artificial Sequence: Synthetic oligonucleotide
uuggcgcggcuuaaguaga

SEQ ID NO: 1953539 - RNA, 19 nt, Artificial Sequence
  Description of Artificial Sequence: Synthetic oligonucleotide
uagucauggucuguaucca

SEQ ID NO: 1953540 - RNA, 19 nt, Artificial Sequence
  Description of Artificial Sequence: Synthetic oligonucleotide
guccggguagcugacggcg

SEQ ID NO: 1953541 - RNA, 19 nt, Artificial Sequence
  Description of Artificial Sequence: Synthetic oligonucleotide
gagacggcagcgguggggc

SEQ ID NO: 1953542 - RNA, 19 nt, Artificial Sequence
  Description of Artificial Sequence: Synthetic oligonucleotide
gaagcccugguggauaguc

SEQ ID NO: 1953543 - RNA, 19 nt, Artificial Sequence
  Description of Artificial Sequence: Synthetic oligonucleotide
uguggacauuacucacagc

SEQ ID NO: 1953544 - RNA, 19 nt, Artificial Sequence
  Description of Artificial Sequence: Synthetic oligonucleotide
cuugagggguaagaacuug

SEQ ID NO: 1953545 - RNA, 19 nt, Artificial Sequence
  Description of Artificial Sequence: Synthetic oligonucleotide
agaacgagggagugcuuau

SEQ ID NO: 1953546 - RNA, 19 nt, Artificial Sequence
  Description of Artificial Sequence: Synthetic oligonucleotide
ggugaagcuccacaggcca

SEQ ID NO: 1953547 - RNA, 19 nt, Artificial Sequence
  Description of Artificial Sequence: Synthetic oligonucleotide
gagugcuuauucucacaga

SEQ ID NO: 1953548 - RNA, 19 nt, Artificial Sequence
  Description of Artificial Sequence: Synthetic oligonucleotide
gucuguauccagcuggacu

SEQ ID NO: 1953549 - RNA, 19 nt, Artificial Sequence
  Description of Artificial Sequence: Synthetic oligonucleotide
cuaccaucgccaccauggc

SEQ ID NO: 1953550 - RNA, 19 nt, Artificial Sequence
  Description of Artificial Sequence: Synthetic oligonucleotide
gacaaugagaagcccuggu

SEQ ID NO: 1953551 - RNA, 19 nt, Artificial Sequence
  Description of Artificial Sequence: Synthetic oligonucleotide
ucacccggggugaugccac

SEQ ID NO: 1953552 - RNA, 19 nt, Artificial Sequence
  Description of Artificial Sequence: Synthetic oligonucleotide
gguaaagcccagucgccug

SEQ ID NO: 1953553 - RNA, 19 nt, Artificial Sequence
  Description of Artificial Sequence: Synthetic oligonucleotide
acgaccucagccaggaaga

SEQ ID NO: 1953554 - RNA, 19 nt, Artificial Sequence
  Description of Artificial Sequence: Synthetic oligonucleotide
aacgucccgaugaccguag

SEQ ID NO: 1953555 - RNA, 19 nt, Artificial Sequence
  Description of Artificial Sequence: Synthetic oligonucleotide
cauggucuguauccagcug

SEQ ID NO: 1953556 - RNA, 19 nt, Artificial Sequence
  Description of Artificial Sequence: Synthetic oligonucleotide
ggcuuggcuggccugagug

SEQ ID NO: 1953557 - RNA, 19 nt, Artificial Sequence
  Description of Artificial Sequence: Synthetic oligonucleotide
uaaugggugccagguguca

SEQ ID NO: 1953558 - RNA, 19 nt, Artificial Sequence
  Description of Artificial Sequence: Synthetic oligonucleotide
gauccaguccggguagcug

SEQ ID NO: 1953559 - RNA, 19 nt, Artificial Sequence
  Description of Artificial Sequence: Synthetic oligonucleotide
ggcacugaagacaaugaga

SEQ ID NO: 1953560 - RNA, 19 nt, Artificial Sequence
  Description of Artificial Sequence: Synthetic oligonucleotide
ugccaggugucagggaaug

SEQ ID NO: 1953561 - RNA, 19 nt, Artificial Sequence
  Description of Artificial Sequence: Synthetic oligonucleotide
ucgagugcucguugaggcu

SEQ ID NO: 1953562 - RNA, 19 nt, Artificial Sequence
  Description of Artificial Sequence: Synthetic oligonucleotide
gggcguaaggugaagcucc

SEQ ID NO: 1953563 - RNA, 19 nt, Artificial Sequence
  Description of Artificial Sequence: Synthetic oligonucleotide
ucugggcgauccaguccgg

SEQ ID NO: 1953564 - RNA, 19 nt, Artificial Sequence
  Description of Artificial Sequence: Synthetic oligonucleotide
ucaucaccucggaguaacu

SEQ ID NO: 1953565 - RNA, 19 nt, Artificial Sequence
  Description of Artificial Sequence: Synthetic oligonucleotide
caccucggaguaacucugg

SEQ ID NO: 1953566 - RNA, 19 nt, Artificial Sequence
  Description of Artificial Sequence: Synthetic oligonucleotide
ugggcgauccaguccgggu

SEQ ID NO: 1953567 - RNA, 19 nt, Artificial Sequence
  Description of Artificial Sequence: Synthetic oligonucleotide
agggaaugguccccucugu

SEQ ID NO: 1953568 - RNA, 19 nt, Artificial Sequence
  Description of Artificial Sequence: Synthetic oligonucleotide
acauuacucacagccucga

SEQ ID NO: 1953569 - RNA, 19 nt, Artificial Sequence
  Description of Artificial Sequence: Synthetic oligonucleotide
uggcgcggcuuaaguagag

SEQ ID NO: 1953570 - RNA, 19 nt, Artificial Sequence
  Description of Artificial Sequence: Synthetic oligonucleotide
uggaacugccgguccgucu

SEQ ID NO: 1953571 - RNA, 19 nt, Artificial Sequence
  Description of Artificial Sequence: Synthetic oligonucleotide
uuggcuggccugagugucu

SEQ ID NO: 1953572 - RNA, 19 nt, Artificial Sequence
  Description of Artificial Sequence: Synthetic oligonucleotide
aguggggcuuggcuggccu

SEQ ID NO: 1953573 - RNA, 19 nt, Artificial Sequence
  Description of Artificial Sequence: Synthetic oligonucleotide
ugcgaaggcgcggcuggcg

SEQ ID NO: 1953574 - RNA, 19 nt, Artificial Sequence
  Description of Artificial Sequence: Synthetic oligonucleotide
ccugcaagcgggcaaacuc

SEQ ID NO: 1953575 - RNA, 19 nt, Artificial Sequence
  Description of Artificial Sequence: Synthetic oligonucleotide
ugucagggaaugguccccu

SEQ ID NO: 1953576 - RNA, 19 nt, Artificial Sequence
  Description of Artificial Sequence: Synthetic oligonucleotide
accguagagaaggcccagg

SEQ ID NO: 1953577 - RNA, 19 nt, Artificial Sequence
  Description of Artificial Sequence: Synthetic oligonucleotide
gcggcuuaaguagagcuug

SEQ ID NO: 1953578 - RNA, 19 nt, Artificial Sequence
  Description of Artificial Sequence: Synthetic oligonucleotide
ggcuuaaguagagcuugcg

SEQ ID NO: 1953579 - RNA, 19 nt, Artificial Sequence
  Description of Artificial Sequence: Synthetic oligonucleotide
caucaccucggaguaacuc

SEQ ID NO: 1953580 - RNA, 19 nt, Artificial Sequence
  Description of Artificial Sequence: Synthetic oligonucleotide
caagggaagcucgggguug

SEQ ID NO: 1953581 - RNA, 19 nt, Artificial Sequence
  Description of Artificial Sequence: Synthetic oligonucleotide
gaccucagccaggaagagc

SEQ ID NO: 1953582 - RNA, 19 nt, Artificial Sequence
  Description of Artificial Sequence: Synthetic oligonucleotide
uccaguccggguagcugac

SEQ ID NO: 1953583 - RNA, 19 nt, Artificial Sequence
  Description of Artificial Sequence: Synthetic oligonucleotide
guggcggugcaugcgcucg

SEQ ID NO: 1953584 - RNA, 19 nt, Artificial Sequence
  Description of Artificial Sequence: Synthetic oligonucleotide
cccugguggauagucaugg

SEQ ID NO: 1953585 - RNA, 19 nt, Artificial Sequence
  Description of Artificial Sequence: Synthetic oligonucleotide
gucuuauggcugaccagug

SEQ ID NO: 1953586 - RNA, 19 nt, Artificial Sequence
  Description of Artificial Sequence: Synthetic oligonucleotide
ggaagaacgagggagugcu

SEQ ID NO: 1953587 - RNA, 19 nt, Artificial Sequence
  Description of Artificial Sequence: Synthetic oligonucleotide
agacggcagcgguggggcc

SEQ ID NO: 1953588 - RNA, 19 nt, Artificial Sequence
  Description of Artificial Sequence: Synthetic oligonucleotide
ggacucuuugaccgaguug

SEQ ID NO: 1953589 - RNA, 19 nt, Artificial Sequence
  Description of Artificial Sequence: Synthetic oligonucleotide
gauggcaguggaggcgaug

SEQ ID NO: 1953590 - RNA, 19 nt, Artificial Sequence
  Description of Artificial Sequence: Synthetic oligonucleotide
cucaggcauaaugggugcc

SEQ ID NO: 1953591 - RNA, 19 nt, Artificial Sequence
  Description of Artificial Sequence: Synthetic oligonucleotide
uccaggucugggccaggac

SEQ ID NO: 1953592 - RNA, 19 nt, Artificial Sequence
  Description of Artificial Sequence: Synthetic oligonucleotide
agcuugcgccaggacagcg

SEQ ID NO: 1953593 - RNA, 19 nt, Artificial Sequence
  Description of Artificial Sequence: Synthetic oligonucleotide
caggccagugggaaggcga

SEQ ID NO: 1953594 - RNA, 19 nt, Artificial Sequence
  Description of Artificial Sequence: Synthetic oligonucleotide
uuggcgacgacagcugguu

SEQ ID NO: 1953595 - RNA, 19 nt, Artificial Sequence
  Description of Artificial Sequence: Synthetic oligonucleotide
cacaggggaccaugauggc

SEQ ID NO: 1953596 - RNA, 19 nt, Artificial Sequence
  Description of Artificial Sequence: Synthetic oligonucleotide
ggaguucgcugcgaaggcg

SEQ ID NO: 1953597 - RNA, 19 nt, Artificial Sequence
  Description of Artificial Sequence: Synthetic oligonucleotide
cucaagggaagcucggggu

SEQ ID NO: 1953598 - RNA, 19 nt, Artificial Sequence
  Description of Artificial Sequence: Synthetic oligonucleotide
cuggccugagugucucuug

SEQ ID NO: 1953599 - RNA, 19 nt, Artificial Sequence
  Description of Artificial Sequence: Synthetic oligonucleotide
gacggcagcgguggggccc

SEQ ID NO: 1953600 - RNA, 19 nt, Artificial Sequence
  Description of Artificial Sequence: Synthetic oligonucleotide
aguucgcugcgaaggcgcg

SEQ ID NO: 1953601 - RNA, 19 nt, Artificial Sequence
  Description of Artificial Sequence: Synthetic oligonucleotide
cgugguacaggcacugaag

SEQ ID NO: 1953602 - RNA, 19 nt, Artificial Sequence
  Description of Artificial Sequence: Synthetic oligonucleotide
ggcgauccaguccggguag

SEQ ID NO: 1953603 - RNA, 19 nt, Artificial Sequence
  Description of Artificial Sequence: Synthetic oligonucleotide
caguggaggcgauggccgc

SEQ ID NO: 1953604 - RNA, 19 nt, Artificial Sequence
  Description of Artificial Sequence: Synthetic oligonucleotide
gaccguagagaaggcccag

SEQ ID NO: 1953605 - RNA, 19 nt, Artificial Sequence
  Description of Artificial Sequence: Synthetic oligonucleotide
acacucugccccgguaaag

SEQ ID NO: 1953606 - RNA, 19 nt, Artificial Sequence
  Description of Artificial Sequence: Synthetic oligonucleotide
ggcgacgacagcugguuca

SEQ ID NO: 1953607 - RNA, 19 nt, Artificial Sequence
  Description of Artificial Sequence: Synthetic oligonucleotide
gugaacgguagaagugaac

SEQ ID NO: 1953608 - RNA, 19 nt, Artificial Sequence
  Description of Artificial Sequence: Synthetic oligonucleotide
ugcauggaguucgcugcga

SEQ ID NO: 1953609 - RNA, 19 nt, Artificial Sequence
  Description of Artificial Sequence: Synthetic oligonucleotide
ccgagguccggcuggaggc

SEQ ID NO: 1953610 - RNA, 19 nt, Artificial Sequence
  Description of Artificial Sequence: Synthetic oligonucleotide
cacugcugcuguuggcgac

SEQ ID NO: 1953611 - RNA, 19 nt, Artificial Sequence
  Description of Artificial Sequence: Synthetic oligonucleotide
uccccucugugguccagcu

SEQ ID NO: 1953612 - RNA, 19 nt, Artificial Sequence
  Description of Artificial Sequence: Synthetic oligonucleotide
uuaguggggcuuggcuggc

SEQ ID NO: 1953613 - RNA, 19 nt, Artificial Sequence
  Description of Artificial Sequence: Synthetic oligonucleotide
ccucggaguaacucugggc

SEQ ID NO: 1953614 - RNA, 19 nt, Artificial Sequence
  Description of Artificial Sequence: Synthetic oligonucleotide
ggagaaugcagguacugau

SEQ ID NO: 1953615 - RNA, 19 nt, Artificial Sequence
  Description of Artificial Sequence: Synthetic oligonucleotide
gccgagguccggcuggagg

SEQ ID NO: 1953616 - RNA, 19 nt, Artificial Sequence
  Description of Artificial Sequence: Synthetic oligonucleotide
agugaacgguagaagugaa

SEQ ID NO: 1953617 - RNA, 19 nt, Artificial Sequence
  Description of Artificial Sequence: Synthetic oligonucleotide
guagagcuugcgccaggac

SEQ ID NO: 1953618 - RNA, 19 nt, Artificial Sequence
  Description of Artificial Sequence: Synthetic oligonucleotide
uguggcggugcaugcgcuc

SEQ ID NO: 1953619 - RNA, 19 nt, Artificial Sequence
  Description of Artificial Sequence: Synthetic oligonucleotide
gugucagggaauggucccc

SEQ ID NO: 1953620 - RNA, 19 nt, Artificial Sequence
  Description of Artificial Sequence: Synthetic oligonucleotide
gcauaaugggugccaggug

SEQ ID NO: 1953621 - RNA, 19 nt, Artificial Sequence
  Description of Artificial Sequence: Synthetic oligonucleotide
caggucugggccaggacaa

SEQ ID NO: 1953622 - RNA, 19 nt, Artificial Sequence
  Description of Artificial Sequence: Synthetic oligonucleotide
gccgcucaagggaagcucg

SEQ ID NO: 1953623 - RNA, 19 nt, Artificial Sequence
  Description of Artificial Sequence: Synthetic oligonucleotide
gugaagcuccacaggccag

SEQ ID NO: 1953624 - RNA, 19 nt, Artificial Sequence
  Description of Artificial Sequence: Synthetic oligonucleotide
agccggagagcagagccga

SEQ ID NO: 1953625 - RNA, 19 nt, Artificial Sequence
  Description of Artificial Sequence: Synthetic oligonucleotide
ccguagagaaggcccaggc

SEQ ID NO: 1953626 - RNA, 19 nt, Artificial Sequence
  Description of Artificial Sequence: Synthetic oligonucleotide
cagcacgaccucagccagg

SEQ ID NO: 1953627 - RNA, 19 nt, Artificial Sequence
  Description of Artificial Sequence: Synthetic oligonucleotide
gagcaacgucccgaugacc

SEQ ID NO: 1953628 - RNA, 19 nt, Artificial Sequence
  Description of Artificial Sequence: Synthetic oligonucleotide
acggcagcgguggggcccc

SEQ ID NO: 1953629 - RNA, 19 nt, Artificial Sequence
  Description of Artificial Sequence: Synthetic oligonucleotide
acucuuugaccgaguugag

SEQ ID NO: 1953630 - RNA, 19 nt, Artificial Sequence
  Description of Artificial Sequence: Synthetic oligonucleotide
gcggagacggcagcggugg

SEQ ID NO: 1953631 - RNA, 19 nt, Artificial Sequence
  Description of Artificial Sequence: Synthetic oligonucleotide
acugccgguccgucuuaug

SEQ ID NO: 1953632 - RNA, 19 nt, Artificial Sequence
  Description of Artificial Sequence: Synthetic oligonucleotide
cugacggcgggcggagacg

SEQ ID NO: 1953633 - RNA, 19 nt, Artificial Sequence
  Description of Artificial Sequence: Synthetic oligonucleotide
cugcaagcgggcaaacucu

SEQ ID NO: 1953634 - RNA, 19 nt, Artificial Sequence
  Description of Artificial Sequence: Synthetic oligonucleotide
cagucgccugugcaggcug

SEQ ID NO: 1953635 - RNA, 19 nt, Artificial Sequence
  Description of Artificial Sequence: Synthetic oligonucleotide
guucgcugcgaaggcgcgg

SEQ ID NO: 1953636 - RNA, 19 nt, Artificial Sequence
  Description of Artificial Sequence: Synthetic oligonucleotide
ggagacggcagcggugggg

SEQ ID NO: 1953637 - RNA, 19 nt, Artificial Sequence
  Description of Artificial Sequence: Synthetic oligonucleotide
guaaagcccagucgccugu

SEQ ID NO: 1953638 - RNA, 19 nt, Artificial Sequence
  Description of Artificial Sequence: Synthetic oligonucleotide
ucgccugugcaggcugucc

SEQ ID NO: 1953639 - RNA, 19 nt, Artificial Sequence
  Description of Artificial Sequence: Synthetic oligonucleotide
agugucucuugagggguaa

SEQ ID NO: 1953640 - RNA, 19 nt, Artificial Sequence
  Description of Artificial Sequence: Synthetic oligonucleotide
cagccucgauguuggggag

SEQ ID NO: 1953641 - RNA, 19 nt, Artificial Sequence
  Description of Artificial Sequence: Synthetic oligonucleotide
ugagcuuggcgcggcuuaa

SEQ ID NO: 1953642 - RNA, 19 nt, Artificial Sequence
  Description of Artificial Sequence: Synthetic oligonucleotide
guagcugacggcgggcgga

SEQ ID NO: 1953643 - RNA, 19 nt, Artificial Sequence
  Description of Artificial Sequence: Synthetic oligonucleotide
ggggaagggcguaagguga

SEQ ID NO: 1953644 - RNA, 19 nt, Artificial Sequence
  Description of Artificial Sequence: Synthetic oligonucleotide
ggcauaaugggugccaggu

SEQ ID NO: 1953645 - RNA, 19 nt, Artificial Sequence
  Description of Artificial Sequence: Synthetic oligonucleotide
cugggcgauccaguccggg

SEQ ID NO: 1953646 - RNA, 19 nt, Artificial Sequence
  Description of Artificial Sequence: Synthetic oligonucleotide
uggcgacgacagcugguuc

SEQ ID NO: 1953647 - RNA, 19 nt, Artificial Sequence
  Description of Artificial Sequence: Synthetic oligonucleotide
agaaagucucaaagugcua

SEQ ID NO: 1953648 - RNA, 19 nt, Artificial Sequence
  Description of Artificial Sequence: Synthetic oligonucleotide
ugccgccgcucaagggaag

SEQ ID NO: 1953649 - RNA, 19 nt, Artificial Sequence
  Description of Artificial Sequence: Synthetic oligonucleotide
ccgaguugagguuguggac

SEQ ID NO: 1953650 - RNA, 19 nt, Artificial Sequence
  Description of Artificial Sequence: Synthetic oligonucleotide
ccgguaaagcccagucgcc

SEQ ID NO: 1953651 - RNA, 19 nt, Artificial Sequence
  Description of Artificial Sequence: Synthetic oligonucleotide
guuggggagaaugcaggua

SEQ ID NO: 1953652 - RNA, 19 nt, Artificial Sequence
  Description of Artificial Sequence: Synthetic oligonucleotide
cguaaggugaagcuccaca

SEQ ID NO: 1953653 - RNA, 19 nt, Artificial Sequence
  Description of Artificial Sequence: Synthetic oligonucleotide
ccccgguaaagcccagucg

SEQ ID NO: 1953654 - RNA, 19 nt, Artificial Sequence
  Description of Artificial Sequence: Synthetic oligonucleotide
ugaccgaguugagguugug

SEQ ID NO: 1953655 - RNA, 19 nt, Artificial Sequence
  Description of Artificial Sequence: Synthetic oligonucleotide
ccaggucugggccaggaca

SEQ ID NO: 1953656 - RNA, 19 nt, Artificial Sequence
  Description of Artificial Sequence: Synthetic oligonucleotide
gggagugcuuauucucaca

SEQ ID NO: 1953657 - RNA, 19 nt, Artificial Sequence
  Description of Artificial Sequence: Synthetic oligonucleotide
cccgaugaccguagagaag

SEQ ID NO: 1953658 - RNA, 19 nt, Artificial Sequence
  Description of Artificial Sequence: Synthetic oligonucleotide
gagugcucguugaggcuca

SEQ ID NO: 1953659 - RNA, 19 nt, Artificial Sequence
  Description of Artificial Sequence: Synthetic oligonucleotide
aggacagcgccugcaucga

SEQ ID NO: 1953660 - RNA, 19 nt, Artificial Sequence
  Description of Artificial Sequence: Synthetic oligonucleotide
gcugacggcgggcggagac

SEQ ID NO: 1953661 - RNA, 19 nt, Artificial Sequence
  Description of Artificial Sequence: Synthetic oligonucleotide
uggcggugcaugcgcucgu

SEQ ID NO: 1953662 - RNA, 19 nt, Artificial Sequence
  Description of Artificial Sequence: Synthetic oligonucleotide
gcugaccagugaacgguag

SEQ ID NO: 1953663 - RNA, 19 nt, Artificial Sequence
  Description of Artificial Sequence: Synthetic oligonucleotide
gagcuugcgccaggacagc

SEQ ID NO: 1953664 - RNA, 19 nt, Artificial Sequence
  Description of Artificial Sequence: Synthetic oligonucleotide
gacagcgccugcaucgagu

SEQ ID NO: 1953665 - RNA, 19 nt, Artificial Sequence
  Description of Artificial Sequence: Synthetic oligonucleotide
guccgucuuauggcugacc

SEQ ID NO: 1953666 - RNA, 19 nt, Artificial Sequence
  Description of Artificial Sequence: Synthetic oligonucleotide
cuccggaugcauggaguuc

SEQ ID NO: 1953667 - RNA, 19 nt, Artificial Sequence
  Description of Artificial Sequence: Synthetic oligonucleotide
gggcuccggaugcauggag

SEQ ID NO: 1953668 - RNA, 19 nt, Artificial Sequence
  Description of Artificial Sequence: Synthetic oligonucleotide
gcccagucgccugugcagg

SEQ ID NO: 1953669 - RNA, 19 nt, Artificial Sequence
  Description of Artificial Sequence: Synthetic oligonucleotide
gccucacccggggugaugc

SEQ ID NO: 1953670 - RNA, 19 nt, Artificial Sequence
  Description of Artificial Sequence: Synthetic oligonucleotide
ggaagggcguaaggugaag

SEQ ID NO: 1953671 - RNA, 19 nt, Artificial Sequence
  Description of Artificial Sequence: Synthetic oligonucleotide
aggucugggccaggacaag

SEQ ID NO: 1953672 - RNA, 19 nt, Artificial Sequence
  Description of Artificial Sequence: Synthetic oligonucleotide
gucagggaaugguccccuc

SEQ ID NO: 1953673 - RNA, 19 nt, Artificial Sequence
  Description of Artificial Sequence: Synthetic oligonucleotide
ggacaaggucauggggaag

SEQ ID NO: 1953674 - RNA, 19 nt, Artificial Sequence
  Description of Artificial Sequence: Synthetic oligonucleotide
cacacucugccccgguaaa

SEQ ID NO: 1953675 - RNA, 19 nt, Artificial Sequence
  Description of Artificial Sequence: Synthetic oligonucleotide
aaggcccaggccagcucga

SEQ ID NO: 1953676 - RNA, 19 nt, Artificial Sequence
  Description of Artificial Sequence: Synthetic oligonucleotide
gcggugcaugcgcucgugg

SEQ ID NO: 1953677 - RNA, 19 nt, Artificial Sequence
  Description of Artificial Sequence: Synthetic oligonucleotide
gcgacgacagcugguucag

SEQ ID NO: 1953678 - RNA, 19 nt, Artificial Sequence
  Description of Artificial Sequence: Synthetic oligonucleotide
gaggcgauggccgccgccu

SEQ ID NO: 1953679 - RNA, 19 nt, Artificial Sequence
  Description of Artificial Sequence: Synthetic oligonucleotide
cucgggguugcugcugcuc

SEQ ID NO: 1953680 - RNA, 19 nt, Artificial Sequence
  Description of Artificial Sequence: Synthetic oligonucleotide
ggaagagcaacgucccgau

SEQ ID NO: 1953681 - RNA, 19 nt, Artificial Sequence
  Description of Artificial Sequence: Synthetic oligonucleotide
ccugugcaggcuguccucc

SEQ ID NO: 1953682 - RNA, 19 nt, Artificial Sequence
  Description of Artificial Sequence: Synthetic oligonucleotide
cuccacaggccagugggaa

SEQ ID NO: 1953683 - RNA, 19 nt, Artificial Sequence
  Description of Artificial Sequence: Synthetic oligonucleotide
cuuugaccgaguugagguu

SEQ ID NO: 1953684 - RNA, 19 nt, Artificial Sequence
  Description of Artificial Sequence: Synthetic oligonucleotide
guccccucugugguccagc

SEQ ID NO: 1953685 - RNA, 19 nt, Artificial Sequence
  Description of Artificial Sequence: Synthetic oligonucleotide
cucacccggggugaugcca

SEQ ID NO: 1953686 - RNA, 19 nt, Artificial Sequence
  Description of Artificial Sequence: Synthetic oligonucleotide
gcuugcgccaggacagcgc

SEQ ID NO: 1953687 - RNA, 19 nt, Artificial Sequence
  Description of Artificial Sequence: Synthetic oligonucleotide
ugguccccucuguggucca

SEQ ID NO: 1953688 - RNA, 19 nt, Artificial Sequence
  Description of Artificial Sequence: Synthetic oligonucleotide
ggacagcgccugcaucgag

SEQ ID NO: 1953689 - RNA, 19 nt, Artificial Sequence
  Description of Artificial Sequence: Synthetic oligonucleotide
gcuggacuucuaccaucgc

SEQ ID NO: 1953690 - RNA, 19 nt, Artificial Sequence
  Description of Artificial Sequence: Synthetic oligonucleotide
ccggguagcugacggcggg

SEQ ID NO: 1953691 - RNA, 19 nt, Artificial Sequence
  Description of Artificial Sequence: Synthetic oligonucleotide
gccccgguaaagcccaguc

SEQ ID NO: 1953692 - RNA, 19 nt, Artificial Sequence
  Description of Artificial Sequence: Synthetic oligonucleotide
ccgcucaagggaagcucgg

SEQ ID NO: 1953693 - RNA, 19 nt, Artificial Sequence
  Description of Artificial Sequence: Synthetic oligonucleotide
ggacucaggcauaaugggu

SEQ ID NO: 1953694 - RNA, 19 nt, Artificial Sequence
  Description of Artificial Sequence: Synthetic oligonucleotide
ggcgcuuaguggggcuugg

SEQ ID NO: 1953695 - RNA, 19 nt, Artificial Sequence
  Description of Artificial Sequence: Synthetic oligonucleotide
acgucccgaugaccguaga

SEQ ID NO: 1953696 - RNA, 19 nt, Artificial Sequence
  Description of Artificial Sequence: Synthetic oligonucleotide
uccggcggcugccgcuggu

SEQ ID NO: 1953697 - RNA, 19 nt, Artificial Sequence
  Description of Artificial Sequence: Synthetic oligonucleotide
gcuuggcgcggcuuaagua

SEQ ID NO: 1953698 - RNA, 19 nt, Artificial Sequence
  Description of Artificial Sequence: Synthetic oligonucleotide
gcauggaguucgcugcgaa

SEQ ID NO: 1953699 - RNA, 19 nt, Artificial Sequence
  Description of Artificial Sequence: Synthetic oligonucleotide
agaagcccugguggauagu

SEQ ID NO: 1953700 - RNA, 19 nt, Artificial Sequence
  Description of Artificial Sequence: Synthetic oligonucleotide
gaacugccgguccgucuua

SEQ ID NO: 1953701 - RNA, 19 nt, Artificial Sequence
  Description of Artificial Sequence: Synthetic oligonucleotide
cugccgccgcucaagggaa

SEQ ID NO: 1953702 - RNA, 19 nt, Artificial Sequence
  Description of Artificial Sequence: Synthetic oligonucleotide
cagugggaaggcgaggacu

SEQ ID NO: 1953703 - RNA, 19 nt, Artificial Sequence
  Description of Artificial Sequence: Synthetic oligonucleotide
ggaacugccgguccgucuu

SEQ ID NO: 1953704 - RNA, 19 nt, Artificial Sequence
  Description of Artificial Sequence: Synthetic oligonucleotide
gucauggggaagggcguaa

SEQ ID NO: 1953705 - RNA, 19 nt, Artificial Sequence
  Description of Artificial Sequence: Synthetic oligonucleotide
gcgcggcuuaaguagagcu

SEQ ID NO: 1953706 - RNA, 19 nt, Artificial Sequence
  Description of Artificial Sequence: Synthetic oligonucleotide
ucgcugcgaaggcgcggcu

SEQ ID NO: 1953707 - RNA, 19 nt, Artificial Sequence
  Description of Artificial Sequence: Synthetic oligonucleotide
gggaagcucgggguugcug

SEQ ID NO: 1953708 - RNA, 19 nt, Artificial Sequence
  Description of Artificial Sequence: Synthetic oligonucleotide
gggcgauccaguccgggua

SEQ ID NO: 1953709 - RNA, 19 nt, Artificial Sequence
  Description of Artificial Sequence: Synthetic oligonucleotide
ugccccgguaaagcccagu

SEQ ID NO: 1953710 - RNA, 19 nt, Artificial Sequence
  Description of Artificial Sequence: Synthetic oligonucleotide
cccggggugaugccacugc

SEQ ID NO: 1953711 - RNA, 19 nt, Artificial Sequence
  Description of Artificial Sequence: Synthetic oligonucleotide
gagugucucuugaggggua

SEQ ID NO: 1953712 - RNA, 19 nt, Artificial Sequence
  Description of Artificial Sequence: Synthetic oligonucleotide
ggagggcgcuuaguggggc

SEQ ID NO: 1953713 - RNA, 19 nt, Artificial Sequence
  Description of Artificial Sequence: Synthetic oligonucleotide
ggcgcggcuuaaguagagc

SEQ ID NO: 1953714 - RNA, 19 nt, Artificial Sequence
  Description of Artificial Sequence: Synthetic oligonucleotide
acccggggugaugccacug

SEQ ID NO: 1953715 - RNA, 19 nt, Artificial Sequence
  Description of Artificial Sequence: Synthetic oligonucleotide
agucgccugugcaggcugu

SEQ ID NO: 1953716 - RNA, 19 nt, Artificial Sequence
  Description of Artificial Sequence: Synthetic oligonucleotide
cgucccgaugaccguagag

SEQ ID NO: 1953717 - RNA, 19 nt, Artificial Sequence
  Description of Artificial Sequence: Synthetic oligonucleotide
ggauagucauggucuguau

SEQ ID NO: 1953718 - RNA, 19 nt, Artificial Sequence
  Description of Artificial Sequence: Synthetic oligonucleotide
gagggcgcuuaguggggcu

SEQ ID NO: 1953719 - RNA, 19 nt, Artificial Sequence
  Description of Artificial Sequence: Synthetic oligonucleotide
cugcgaaggcgcggcuggc

SEQ ID NO: 1953720 - RNA, 19 nt, Artificial Sequence
  Description of Artificial Sequence: Synthetic oligonucleotide
cggcuuaaguagagcuugc

SEQ ID NO: 1953721 - RNA, 19 nt, Artificial Sequence
  Description of Artificial Sequence: Synthetic oligonucleotide
cgaugaccguagagaaggc

SEQ ID NO: 1953722 - RNA, 19 nt, Artificial Sequence
  Description of Artificial Sequence: Synthetic oligonucleotide
guggauagucauggucugu

SEQ ID NO: 1953723 - RNA, 19 nt, Artificial Sequence
  Description of Artificial Sequence: Synthetic oligonucleotide
guauccagcuggacuucua

SEQ ID NO: 1953724 - RNA, 19 nt, Artificial Sequence
  Description of Artificial Sequence: Synthetic oligonucleotide
guuggcgacgacagcuggu

SEQ ID NO: 1953725 - RNA, 19 nt, Artificial Sequence
  Description of Artificial Sequence: Synthetic oligonucleotide
caacgucccgaugaccgua

SEQ ID NO: 1953726 - RNA, 19 nt, Artificial Sequence
  Description of Artificial Sequence: Synthetic oligonucleotide
ggucuguauccagcuggac

SEQ ID NO: 1953727 - RNA, 19 nt, Artificial Sequence
  Description of Artificial Sequence: Synthetic oligonucleotide
ccggaugcauggaguucgc

SEQ ID NO: 1953728 - RNA, 19 nt, Artificial Sequence
  Description of Artificial Sequence: Synthetic oligonucleotide
cccagucgccugugcaggc

SEQ ID NO: 1953729 - RNA, 19 nt, Artificial Sequence
  Description of Artificial Sequence: Synthetic oligonucleotide
ggaguaacucugggcgauc

SEQ ID NO: 1953730 - RNA, 19 nt, Artificial Sequence
  Description of Artificial Sequence: Synthetic oligonucleotide
ccaggacagcgccugcauc

SEQ ID NO: 1953731 - RNA, 19 nt, Artificial Sequence
  Description of Artificial Sequence: Synthetic oligonucleotide
gccugugcaggcuguccuc

SEQ ID NO: 1953732 - RNA, 19 nt, Artificial Sequence
  Description of Artificial Sequence: Synthetic oligonucleotide
cgauguggcggugcaugcg

SEQ ID NO: 1953733 - RNA, 19 nt, Artificial Sequence
  Description of Artificial Sequence: Synthetic oligonucleotide
agggcgcuuaguggggcuu

SEQ ID NO: 1953734 - RNA, 19 nt, Artificial Sequence
  Description of Artificial Sequence: Synthetic oligonucleotide
gaacgagggagugcuuauu

SEQ ID NO: 1953735 - RNA, 19 nt, Artificial Sequence
  Description of Artificial Sequence: Synthetic oligonucleotide
gccgguccgucuuauggcu

SEQ ID NO: 1953736 - RNA, 19 nt, Artificial Sequence
  Description of Artificial Sequence: Synthetic oligonucleotide
cuccggcggcugccgcugg

SEQ ID NO: 1953737 - RNA, 19 nt, Artificial Sequence
  Description of Artificial Sequence: Synthetic oligonucleotide
ggcguaaggugaagcucca

SEQ ID NO: 1953738 - RNA, 19 nt, Artificial Sequence
  Description of Artificial Sequence: Synthetic oligonucleotide
guccugcaagcgggcaaac

SEQ ID NO: 1953739 - RNA, 19 nt, Artificial Sequence
  Description of Artificial Sequence: Synthetic oligonucleotide
ccgguccgucuuauggcug

SEQ ID NO: 1953740 - RNA, 19 nt, Artificial Sequence
  Description of Artificial Sequence: Synthetic oligonucleotide
cgcucaagggaagcucggg

SEQ ID NO: 1953741 - RNA, 19 nt, Artificial Sequence
  Description of Artificial Sequence: Synthetic oligonucleotide
gggaagggcguaaggugaa

SEQ ID NO: 1953742 - RNA, 19 nt, Artificial Sequence
  Description of Artificial Sequence: Synthetic oligonucleotide
cgucuuauggcugaccagu

SEQ ID NO: 1953743 - RNA, 19 nt, Artificial Sequence
  Description of Artificial Sequence: Synthetic oligonucleotide
gggacucuuugaccgaguu

SEQ ID NO: 1953744 - RNA, 19 nt, Artificial Sequence
  Description of Artificial Sequence: Synthetic oligonucleotide
cggggugaugccacugcug

SEQ ID NO: 1953745 - RNA, 19 nt, Artificial Sequence
  Description of Artificial Sequence: Synthetic oligonucleotide
gcccugguggauagucaug

SEQ ID NO: 1953746 - RNA, 19 nt, Artificial Sequence
  Description of Artificial Sequence: Synthetic oligonucleotide
gacggcgggcggagacggc

SEQ ID NO: 1953747 - RNA, 19 nt, Artificial Sequence
  Description of Artificial Sequence: Synthetic oligonucleotide
ccgugguacaggcacugaa

SEQ ID NO: 1953748 - RNA, 19 nt, Artificial Sequence
  Description of Artificial Sequence: Synthetic oligonucleotide
gucgccugugcaggcuguc

SEQ ID NO: 1953749 - RNA, 19 nt, Artificial Sequence
  Description of Artificial Sequence: Synthetic oligonucleotide
gccgccgcucaagggaagc

SEQ ID NO: 1953750 - RNA, 19 nt, Artificial Sequence
  Description of Artificial Sequence: Synthetic oligonucleotide
gggcgcuuaguggggcuug

SEQ ID NO: 1953751 - RNA, 19 nt, Artificial Sequence
  Description of Artificial Sequence: Synthetic oligonucleotide
agccgagguccggcuggag

SEQ ID NO: 1953752 - RNA, 19 nt, Artificial Sequence
  Description of Artificial Sequence: Synthetic oligonucleotide
gcuccggaugcauggaguu

SEQ ID NO: 1953753 - RNA, 19 nt, Artificial Sequence
  Description of Artificial Sequence: Synthetic oligonucleotide
ccaguccggguagcugacg

SEQ ID NO: 1953754 - RNA, 19 nt, Artificial Sequence
  Description of Artificial Sequence: Synthetic oligonucleotide
gguccgucuuauggcugac

SEQ ID NO: 1953755 - RNA, 19 nt, Artificial Sequence
  Description of Artificial Sequence: Synthetic oligonucleotide
gcaaacucugccagcucgu

SEQ ID NO: 1953756 - RNA, 19 nt, Artificial Sequence
  Description of Artificial Sequence: Synthetic oligonucleotide
ggcggugcaugcgcucgug

SEQ ID NO: 1953757 - RNA, 19 nt, Artificial Sequence
  Description of Artificial Sequence: Synthetic oligonucleotide
gugcucguugaggcucauc

SEQ ID NO: 1953758 - RNA, 19 nt, Artificial Sequence
  Description of Artificial Sequence: Synthetic oligonucleotide
gcaacgucccgaugaccgu

SEQ ID NO: 1953759 - RNA, 19 nt, Artificial Sequence
  Description of Artificial Sequence: Synthetic oligonucleotide
agugcucguugaggcucau

SEQ ID NO: 1953760 - RNA, 19 nt, Artificial Sequence
  Description of Artificial Sequence: Synthetic oligonucleotide
ggggcuuggcuggccugag

SEQ ID NO: 1953761 - RNA, 19 nt, Artificial Sequence
  Description of Artificial Sequence: Synthetic oligonucleotide
ggucauggggaagggcgua

SEQ ID NO: 1953762 - RNA, 19 nt, Artificial Sequence
  Description of Artificial Sequence: Synthetic oligonucleotide
ccucacccggggugaugcc

SEQ ID NO: 1953763 - RNA, 19 nt, Artificial Sequence
  Description of Artificial Sequence: Synthetic oligonucleotide
gaagaacgagggagugcuu

SEQ ID NO: 1953764 - RNA, 19 nt, Artificial Sequence
  Description of Artificial Sequence: Synthetic oligonucleotide
gcguaaggugaagcuccac

SEQ ID NO: 1953765 - RNA, 19 nt, Artificial Sequence
  Description of Artificial Sequence: Synthetic oligonucleotide
ggcuccggaugcauggagu

SEQ ID NO: 1953766 - RNA, 19 nt, Artificial Sequence
  Description of Artificial Sequence: Synthetic oligonucleotide
gcgauccaguccggguagc

SEQ ID NO: 1953767 - RNA, 19 nt, Artificial Sequence
  Description of Artificial Sequence: Synthetic oligonucleotide
gccugcaucgagugcucgu

SEQ ID NO: 1953768 - RNA, 19 nt, Artificial Sequence
  Description of Artificial Sequence: Synthetic oligonucleotide
ccuccacacucugccccgg

SEQ ID NO: 1953769 - RNA, 19 nt, Artificial Sequence
  Description of Artificial Sequence: Synthetic oligonucleotide
gggugccaggugucaggga

SEQ ID NO: 1953770 - RNA, 19 nt, Artificial Sequence
  Description of Artificial Sequence: Synthetic oligonucleotide
gcgcuuaguggggcuuggc

SEQ ID NO: 1953771 - RNA, 19 nt, Artificial Sequence
  Description of Artificial Sequence: Synthetic oligonucleotide
gcagagccgagguccggcu

SEQ ID NO: 1953772 - RNA, 19 nt, Artificial Sequence
  Description of Artificial Sequence: Synthetic oligonucleotide
cgguccgucuuauggcuga

SEQ ID NO: 1953773 - RNA, 19 nt, Artificial Sequence
  Description of Artificial Sequence: Synthetic oligonucleotide
aggcgaggacucaggcaua

SEQ ID NO: 1953774 - RNA, 19 nt, Artificial Sequence
  Description of Artificial Sequence: Synthetic oligonucleotide
gccggagagcagagccgag

SEQ ID NO: 1953775 - RNA, 19 nt, Artificial Sequence
  Description of Artificial Sequence: Synthetic oligonucleotide
gccgccucacccgggguga

SEQ ID NO: 1953776 - RNA, 19 nt, Artificial Sequence
  Description of Artificial Sequence: Synthetic oligonucleotide
gggcggagacggcagcggu

SEQ ID NO: 1953777 - RNA, 19 nt, Artificial Sequence
  Description of Artificial Sequence: Synthetic oligonucleotide
cuccacacucugccccggu

SEQ ID NO: 1953778 - RNA, 19 nt, Artificial Sequence
  Description of Artificial Sequence: Synthetic oligonucleotide
cuucuaccaucgccaccau

SEQ ID NO: 1953779 - RNA, 19 nt, Artificial Sequence
  Description of Artificial Sequence: Synthetic oligonucleotide
cgccgccucacccggggug

SEQ ID NO: 1953780 - RNA, 19 nt, Artificial Sequence
  Description of Artificial Sequence: Synthetic oligonucleotide
cgcuuaguggggcuuggcu

SEQ ID NO: 1953781 - RNA, 19 nt, Artificial Sequence
  Description of Artificial Sequence: Synthetic oligonucleotide
cgccgcucaagggaagcuc

SEQ ID NO: 1953782 - RNA, 19 nt, Artificial Sequence
  Description of Artificial Sequence: Synthetic oligonucleotide
cggguagcugacggcgggc

SEQ ID NO: 1953783 - RNA, 19 nt, Artificial Sequence
  Description of Artificial Sequence: Synthetic oligonucleotide
cgacgacagcugguucagg

SEQ ID NO: 1953784 - RNA, 19 nt, Artificial Sequence
  Description of Artificial Sequence: Synthetic oligonucleotide
cggagacggcagcgguggg

SEQ ID NO: 1953785 - RNA, 19 nt, Artificial Sequence
  Description of Artificial Sequence: Synthetic oligonucleotide
cacccggggugaugccacu

SEQ ID NO: 1953786 - RNA, 19 nt, Artificial Sequence
  Description of Artificial Sequence: Synthetic oligonucleotide
ggggacucuuugaccgagu

SEQ ID NO: 1953787 - RNA, 19 nt, Artificial Sequence
  Description of Artificial Sequence: Synthetic oligonucleotide
gcaccgugguacaggcacu

SEQ ID NO: 1953788 - RNA, 19 nt, Artificial Sequence
  Description of Artificial Sequence: Synthetic oligonucleotide
cgguaaagcccagucgccu

SEQ ID NO: 1953789 - RNA, 19 nt, Artificial Sequence
  Description of Artificial Sequence: Synthetic oligonucleotide
ggcagggcuccggaugcau

SEQ ID NO: 1953790 - RNA, 19 nt, Artificial Sequence
  Description of Artificial Sequence: Synthetic oligonucleotide
cgcggcuuaaguagagcuu

SEQ ID NO: 1953791 - RNA, 19 nt, Artificial Sequence
  Description of Artificial Sequence: Synthetic oligonucleotide
cgccugugcaggcuguccu

SEQ ID NO: 1953792 - RNA, 19 nt, Artificial Sequence
  Description of Artificial Sequence: Synthetic oligonucleotide
cggaguaacucugggcgau

SEQ ID NO: 1953793 - RNA, 19 nt, Artificial Sequence
  Description of Artificial Sequence: Synthetic oligonucleotide
ccagucgccugugcaggcu

SEQ ID NO: 1953794 - RNA, 19 nt, Artificial Sequence
  Description of Artificial Sequence: Synthetic oligonucleotide
gcucgauguggcggugcau

SEQ ID NO: 1953795 - RNA, 19 nt, Artificial Sequence
  Description of Artificial Sequence: Synthetic oligonucleotide
gcggggcagggcuccggau

SEQ ID NO: 1953796 - RNA, 19 nt, Artificial Sequence
  Description of Artificial Sequence: Synthetic oligonucleotide
gcgaggacucaggcauaau

SEQ ID NO: 1953797 - RNA, 19 nt, Artificial Sequence
  Description of Artificial Sequence: Synthetic oligonucleotide
ccgccgcucaagggaagcu

SEQ ID NO: 1953798 - RNA, 19 nt, Artificial Sequence
  Description of Artificial Sequence: Synthetic oligonucleotide
ccgccgccucacccggggu

SEQ ID NO: 1953799 - RNA, 19 nt, Artificial Sequence
  Description of Artificial Sequence: Synthetic oligonucleotide
ccgccucacccggggugau

SEQ ID NO: 1953800 - RNA, 19 nt, Artificial Sequence
  Description of Artificial Sequence: Synthetic oligonucleotide
aagaauaagagccucacuc

SEQ ID NO: 1953801 - RNA, 19 nt, Artificial Sequence
  Description of Artificial Sequence: Synthetic oligonucleotide
guuaacuucuacuagaucc

SEQ ID NO: 1953802 - RNA, 19 nt, Artificial Sequence
  Description of Artificial Sequence: Synthetic oligonucleotide
ucuuaagcauuacugaccg

SEQ ID NO: 1953803 - RNA, 19 nt, Artificial Sequence
  Description of Artificial Sequence: Synthetic oligonucleotide
aacuauauccccaauggcg

SEQ ID NO: 1953804 - RNA, 19 nt, Artificial Sequence
  Description of Artificial Sequence: Synthetic oligonucleotide
uguacauucaauaugccau

SEQ ID NO: 1953805 - RNA, 19 nt, Artificial Sequence
  Description of Artificial Sequence: Synthetic oligonucleotide
uucaauaugccauagggaa

SEQ ID NO: 1953806 - RNA, 19 nt, Artificial Sequence
  Description of Artificial Sequence: Synthetic oligonucleotide
aacugaaauaagcauguug

SEQ ID NO: 1953807 - RNA, 19 nt, Artificial Sequence
  Description of Artificial Sequence: Synthetic oligonucleotide
aaaucaguagcuguuagug

SEQ ID NO: 1953808 - RNA, 19 nt, Artificial Sequence
  Description of Artificial Sequence: Synthetic oligonucleotide
ggaaauuuaagaauaagag

SEQ ID NO: 1953809 - RNA, 19 nt, Artificial Sequence
  Description of Artificial Sequence: Synthetic oligonucleotide
uuaaugguguuuuccaacc

SEQ ID NO: 1953810 - RNA, 19 nt, Artificial Sequence
  Description of Artificial Sequence: Synthetic oligonucleotide
ugaccgaacaccaauccag

SEQ ID NO: 1953811 - RNA, 19 nt, Artificial Sequence
  Description of Artificial Sequence: Synthetic oligonucleotide
ugcaauagguccuugucag

SEQ ID NO: 1953812 - RNA, 19 nt, Artificial Sequence
  Description of Artificial Sequence: Synthetic oligonucleotide
uuacaagugugcaauaggu

SEQ ID NO: 1953813 - RNA, 19 nt, Artificial Sequence
  Description of Artificial Sequence: Synthetic oligonucleotide
ugcauaauuguuacgccag

SEQ ID NO: 1953814 - RNA, 19 nt, Artificial Sequence
  Description of Artificial Sequence: Synthetic oligonucleotide
uguuguuaacuucuacuag

SEQ ID NO: 1953815 - RNA, 19 nt, Artificial Sequence
  Description of Artificial Sequence: Synthetic oligonucleotide
ggaacuauauccccaaugg

SEQ ID NO: 1953816 - RNA, 19 nt, Artificial Sequence
  Description of Artificial Sequence: Synthetic oligonucleotide
cacuguauggacuaucggg

SEQ ID NO: 1953817 - RNA, 19 nt, Artificial Sequence
  Description of Artificial Sequence: Synthetic oligonucleotide
agaauggggauucuucugg

SEQ ID NO: 1953818 - RNA, 19 nt, Artificial Sequence
  Description of Artificial Sequence: Synthetic oligonucleotide
uuaacuucuacuagaucca

SEQ ID NO: 1953819 - RNA, 19 nt, Artificial Sequence
  Description of Artificial Sequence: Synthetic oligonucleotide
uuaauuugggaucugcaau

SEQ ID NO: 1953820 - RNA, 19 nt, Artificial Sequence
  Description of Artificial Sequence: Synthetic oligonucleotide
aauugggccuauaucaaac

SEQ ID NO: 1953821 - RNA, 19 nt, Artificial Sequence
  Description of Artificial Sequence: Synthetic oligonucleotide
uaaauuacaagugugcaau

SEQ ID NO: 1953822 - RNA, 19 nt, Artificial Sequence
  Description of Artificial Sequence: Synthetic oligonucleotide
aaaccuuaggggcauacgu

SEQ ID NO: 1953823 - RNA, 19 nt, Artificial Sequence
  Description of Artificial Sequence: Synthetic oligonucleotide
aaaggaagccacuacucca

SEQ ID NO: 1953824 - RNA, 19 nt, Artificial Sequence
  Description of Artificial Sequence: Synthetic oligonucleotide
uuuaagaauaagagccuca

SEQ ID NO: 1953825 - RNA, 19 nt, Artificial Sequence
  Description of Artificial Sequence: Synthetic oligonucleotide
uguuaguguuuucuuaagc

SEQ ID NO: 1953826 - RNA, 19 nt, Artificial Sequence
  Description of Artificial Sequence: Synthetic oligonucleotide
uaauuguuacgccagugac

SEQ ID NO: 1953827 - RNA, 19 nt, Artificial Sequence
  Description of Artificial Sequence: Synthetic oligonucleotide
acugaccgaacaccaaucc

SEQ ID NO: 1953828 - RNA, 19 nt, Artificial Sequence
  Description of Artificial Sequence: Synthetic oligonucleotide
uacagcauacuguuucacg

SEQ ID NO: 1953829 - RNA, 19 nt, Artificial Sequence
  Description of Artificial Sequence: Synthetic oligonucleotide
aaaccuuuugggucuaacu

SEQ ID NO: 1953830 - RNA, 19 nt, Artificial Sequence
  Description of Artificial Sequence: Synthetic oligonucleotide
auuguuacgccagugacug

SEQ ID NO: 1953831 - RNA, 19 nt, Artificial Sequence
  Description of Artificial Sequence: Synthetic oligonucleotide
uuaagcauuacugaccgaa

SEQ ID NO: 1953832 - RNA, 19 nt, Artificial Sequence
  Description of Artificial Sequence: Synthetic oligonucleotide
uggaacuauauccccaaug

SEQ ID NO: 1953833 - RNA, 19 nt, Artificial Sequence
  Description of Artificial Sequence: Synthetic oligonucleotide
aaaguggucggugccaagg

SEQ ID NO: 1953834 - RNA, 19 nt, Artificial Sequence
  Description of Artificial Sequence: Synthetic oligonucleotide
uccuaugucaggccacucg

SEQ ID NO: 1953835 - RNA, 19 nt, Artificial Sequence
  Description of Artificial Sequence: Synthetic oligonucleotide
ucugaaaucugcacuggcu

SEQ ID NO: 1953836 - RNA, 19 nt, Artificial Sequence
  Description of Artificial Sequence: Synthetic oligonucleotide
acuguauggacuaucgggg

SEQ ID NO: 1953837 - RNA, 19 nt, Artificial Sequence
  Description of Artificial Sequence: Synthetic oligonucleotide
aaagucggccaaaggaagc

SEQ ID NO: 1953838 - RNA, 19 nt, Artificial Sequence
  Description of Artificial Sequence: Synthetic oligonucleotide
ucuaacuugcauaauuguu

SEQ ID NO: 1953839 - RNA, 19 nt, Artificial Sequence
  Description of Artificial Sequence: Synthetic oligonucleotide
aacgucauauucuccagau

SEQ ID NO: 1953840 - RNA, 19 nt, Artificial Sequence
  Description of Artificial Sequence: Synthetic oligonucleotide
aagucggccaaaggaagcc

SEQ ID NO: 1953841 - RNA, 19 nt, Artificial Sequence
  Description of Artificial Sequence: Synthetic oligonucleotide
acuugacacagcugguacc

SEQ ID NO: 1953842 - RNA, 19 nt, Artificial Sequence
  Description of Artificial Sequence: Synthetic oligonucleotide
agaauaagagccucacuca

SEQ ID NO: 1953843 - RNA, 19 nt, Artificial Sequence
  Description of Artificial Sequence: Synthetic oligonucleotide
guuguuaacuucuacuaga

SEQ ID NO: 1953844 - RNA, 19 nt, Artificial Sequence
  Description of Artificial Sequence: Synthetic oligonucleotide
ugagaauugggccuauauc

SEQ ID NO: 1953845 - RNA, 19 nt, Artificial Sequence
  Description of Artificial Sequence: Synthetic oligonucleotide
ugccauagggaaauuuaag

SEQ ID NO: 1953846 - RNA, 19 nt, Artificial Sequence
  Description of Artificial Sequence: Synthetic oligonucleotide
aaucaguagcuguuagugu

SEQ ID NO: 1953847 - RNA, 19 nt, Artificial Sequence
  Description of Artificial Sequence: Synthetic oligonucleotide
aggggcauacgucacuccc

SEQ ID NO: 1953848 - RNA, 19 nt, Artificial Sequence
  Description of Artificial Sequence: Synthetic oligonucleotide
aauaagcauguuggcaccg

SEQ ID NO: 1953849 - RNA, 19 nt, Artificial Sequence
  Description of Artificial Sequence: Synthetic oligonucleotide
aaaagucggccaaaggaag

SEQ ID NO: 1953850 - RNA, 19 nt, Artificial Sequence
  Description of Artificial Sequence: Synthetic oligonucleotide
uuaagaauaagagccucac

SEQ ID NO: 1953851 - RNA, 19 nt, Artificial Sequence
  Description of Artificial Sequence: Synthetic oligonucleotide
ccuauaucaaaccuuuugg

SEQ ID NO: 1953852 - RNA, 19 nt, Artificial Sequence
  Description of Artificial Sequence: Synthetic oligonucleotide
cuugcauaauuguuacgcc

SEQ ID NO: 1953853 - RNA, 19 nt, Artificial Sequence
  Description of Artificial Sequence: Synthetic oligonucleotide
auguacauucaauaugcca

SEQ ID NO: 1953854 - RNA, 19 nt, Artificial Sequence
  Description of Artificial Sequence: Synthetic oligonucleotide
uucacgggcaguccuuugg

SEQ ID NO: 1953855 - RNA, 19 nt, Artificial Sequence
  Description of Artificial Sequence: Synthetic oligonucleotide
aauagguccuugucagucu

SEQ ID NO: 1953856 - RNA, 19 nt, Artificial Sequence
  Description of Artificial Sequence: Synthetic oligonucleotide
uccuuugaugugcucuugg

SEQ ID NO: 1953857 - RNA, 19 nt, Artificial Sequence
  Description of Artificial Sequence: Synthetic oligonucleotide
cugagagucugaaaucugc

SEQ ID NO: 1953858 - RNA, 19 nt, Artificial Sequence
  Description of Artificial Sequence: Synthetic oligonucleotide
uaugucaggccacucguac

SEQ ID NO: 1953859 - RNA, 19 nt, Artificial Sequence
  Description of Artificial Sequence: Synthetic oligonucleotide
uacuagauccagaaguuua

SEQ ID NO: 1953860 - RNA, 19 nt, Artificial Sequence
  Description of Artificial Sequence: Synthetic oligonucleotide
acauucaauaugccauagg

SEQ ID NO: 1953861 - RNA, 19 nt, Artificial Sequence
  Description of Artificial Sequence: Synthetic oligonucleotide
gaacuauauccccaauggc

SEQ ID NO: 1953862 - RNA, 19 nt, Artificial Sequence
  Description of Artificial Sequence: Synthetic oligonucleotide
caaaggaagccacuacucc

SEQ ID NO: 1953863 - RNA, 19 nt, Artificial Sequence
  Description of Artificial Sequence: Synthetic oligonucleotide
guugcauagcaacaacuug

SEQ ID NO: 1953864 - RNA, 19 nt, Artificial Sequence
  Description of Artificial Sequence: Synthetic oligonucleotide
ugugcaauagguccuuguc

SEQ ID NO: 1953865 - RNA, 19 nt, Artificial Sequence
  Description of Artificial Sequence: Synthetic oligonucleotide
ugaaaucugcacuggcuug

SEQ ID NO: 1953866 - RNA, 19 nt, Artificial Sequence
  Description of Artificial Sequence: Synthetic oligonucleotide
auauucuccagauccuaug

SEQ ID NO: 1953867 - RNA, 19 nt, Artificial Sequence
  Description of Artificial Sequence: Synthetic oligonucleotide
caugcaucuucacuggaag

SEQ ID NO: 1953868 - RNA, 19 nt, Artificial Sequence
  Description of Artificial Sequence: Synthetic oligonucleotide
ugugacaaccuccagucuu

SEQ ID NO: 1953869 - RNA, 19 nt, Artificial Sequence
  Description of Artificial Sequence: Synthetic oligonucleotide
uguuuuccaaccagagugu

SEQ ID NO: 1953870 - RNA, 19 nt, Artificial Sequence
  Description of Artificial Sequence: Synthetic oligonucleotide
uguauggacuaucggggca

SEQ ID NO: 1953871 - RNA, 19 nt, Artificial Sequence
  Description of Artificial Sequence: Synthetic oligonucleotide
acgucacucccucaguugg

SEQ ID NO: 1953872 - RNA, 19 nt, Artificial Sequence
  Description of Artificial Sequence: Synthetic oligonucleotide
uuguuaacuucuacuagau

SEQ ID NO: 1953873 - RNA, 19 nt, Artificial Sequence
  Description of Artificial Sequence: Synthetic oligonucleotide
cuagcuacuuaaugcacug

SEQ ID NO: 1953874 - RNA, 19 nt, Artificial Sequence
  Description of Artificial Sequence: Synthetic oligonucleotide
augcaaauauccauuguag

SEQ ID NO: 1953875 - RNA, 19 nt, Artificial Sequence
  Description of Artificial Sequence: Synthetic oligonucleotide
ugcauagcaacaacuuggu

SEQ ID NO: 1953876 - RNA, 19 nt, Artificial Sequence
  Description of Artificial Sequence: Synthetic oligonucleotide
aucaguagcuguuaguguu

SEQ ID NO: 1953877 - RNA, 19 nt, Artificial Sequence
  Description of Artificial Sequence: Synthetic oligonucleotide
aauuguuacgccagugacu

SEQ ID NO: 1953878 - RNA, 19 nt, Artificial Sequence
  Description of Artificial Sequence: Synthetic oligonucleotide
uugggucuaacuugcauaa

SEQ ID NO: 1953879 - RNA, 19 nt, Artificial Sequence
  Description of Artificial Sequence: Synthetic oligonucleotide
gacucgggagccuugguug

SEQ ID NO: 1953880 - RNA, 19 nt, Artificial Sequence
  Description of Artificial Sequence: Synthetic oligonucleotide
uaagaauaagagccucacu

SEQ ID NO: 1953881 - RNA, 19 nt, Artificial Sequence
  Description of Artificial Sequence: Synthetic oligonucleotide
uccagauccuaugucaggc

SEQ ID NO: 1953882 - RNA, 19 nt, Artificial Sequence
  Description of Artificial Sequence: Synthetic oligonucleotide
accgagucuugacaacacc

SEQ ID NO: 1953883 - RNA, 19 nt, Artificial Sequence
  Description of Artificial Sequence: Synthetic oligonucleotide
accgaacaccaauccagcc

SEQ ID NO: 1953884 - RNA, 19 nt, Artificial Sequence
  Description of Artificial Sequence: Synthetic oligonucleotide
uuacugaccgaacaccaau

SEQ ID NO: 1953885 - RNA, 19 nt, Artificial Sequence
  Description of Artificial Sequence: Synthetic oligonucleotide
caugaagcacuguauggac

SEQ ID NO: 1953886 - RNA, 19 nt, Artificial Sequence
  Description of Artificial Sequence: Synthetic oligonucleotide
ugggauguacauucaauau

SEQ ID NO: 1953887 - RNA, 19 nt, Artificial Sequence
  Description of Artificial Sequence: Synthetic oligonucleotide
uacuuaaugcacuguugca

SEQ ID NO: 1953888 - RNA, 19 nt, Artificial Sequence
  Description of Artificial Sequence: Synthetic oligonucleotide
augagaauggggauucuuc

SEQ ID NO: 1953889 - RNA, 19 nt, Artificial Sequence
  Description of Artificial Sequence: Synthetic oligonucleotide
aaccuuaggggcauacguc

SEQ ID NO: 1953890 - RNA, 19 nt, Artificial Sequence
  Description of Artificial Sequence: Synthetic oligonucleotide
auagggaaauuuaagaaua

SEQ ID NO: 1953891 - RNA, 19 nt, Artificial Sequence
  Description of Artificial Sequence: Synthetic oligonucleotide
cgucauauucuccagaucc

SEQ ID NO: 1953892 - RNA, 19 nt, Artificial Sequence
  Description of Artificial Sequence: Synthetic oligonucleotide
cagucuucucccuagcuac

SEQ ID NO: 1953893 - RNA, 19 nt, Artificial Sequence
  Description of Artificial Sequence: Synthetic oligonucleotide
ggugccaaggaacagcacc

SEQ ID NO: 1953894 - RNA, 19 nt, Artificial Sequence
  Description of Artificial Sequence: Synthetic oligonucleotide
uaagcauuacugaccgaac

SEQ ID NO: 1953895 - RNA, 19 nt, Artificial Sequence
  Description of Artificial Sequence: Synthetic oligonucleotide
ucugugguauaccacugau

SEQ ID NO: 1953896 - RNA, 19 nt, Artificial Sequence
  Description of Artificial Sequence: Synthetic oligonucleotide
uugggccuauaucaaaccu

SEQ ID NO: 1953897 - RNA, 19 nt, Artificial Sequence
  Description of Artificial Sequence: Synthetic oligonucleotide
gcaacugggauguacauuc

SEQ ID NO: 1953898 - RNA, 19 nt, Artificial Sequence
  Description of Artificial Sequence: Synthetic oligonucleotide
ucacgggcaguccuuuggg

SEQ ID NO: 1953899 - RNA, 19 nt, Artificial Sequence
  Description of Artificial Sequence: Synthetic oligonucleotide
uauauccccaauggcgagg

SEQ ID NO: 1953900 - RNA, 19 nt, Artificial Sequence
  Description of Artificial Sequence: Synthetic oligonucleotide
accuuaggggcauacguca

SEQ ID NO: 1953901 - RNA, 19 nt, Artificial Sequence
  Description of Artificial Sequence: Synthetic oligonucleotide
acuauauccccaauggcga

SEQ ID NO: 1953902 - RNA, 19 nt, Artificial Sequence
  Description of Artificial Sequence: Synthetic oligonucleotide
gaccacgccaccucgggag

SEQ ID NO: 1953903 - RNA, 19 nt, Artificial Sequence
  Description of Artificial Sequence: Synthetic oligonucleotide
caaaagucggccaaaggaa

SEQ ID NO: 1953904 - RNA, 19 nt, Artificial Sequence
  Description of Artificial Sequence: Synthetic oligonucleotide
gaauaagagccucacucaa

SEQ ID NO: 1953905 - RNA, 19 nt, Artificial Sequence
  Description of Artificial Sequence: Synthetic oligonucleotide
agcacuguauggacuaucg

SEQ ID NO: 1953906 - RNA, 19 nt, Artificial Sequence
  Description of Artificial Sequence: Synthetic oligonucleotide
gaaaccuuaggggcauacg

SEQ ID NO: 1953907 - RNA, 19 nt, Artificial Sequence
  Description of Artificial Sequence: Synthetic oligonucleotide
gggauguacauucaauaug

SEQ ID NO: 1953908 - RNA, 19 nt, Artificial Sequence
  Description of Artificial Sequence: Synthetic oligonucleotide
ucaugcaucuucacuggaa

SEQ ID NO: 1953909 - RNA, 19 nt, Artificial Sequence
  Description of Artificial Sequence: Synthetic oligonucleotide
ucacucaaaagucggccaa

SEQ ID NO: 1953910 - RNA, 19 nt, Artificial Sequence
  Description of Artificial Sequence: Synthetic oligonucleotide
cagcauacuguuucacggg

SEQ ID NO: 1953911 - RNA, 19 nt, Artificial Sequence
  Description of Artificial Sequence: Synthetic oligonucleotide
aacuugguuuucucaugca

SEQ ID NO: 1953912 - RNA, 19 nt, Artificial Sequence
  Description of Artificial Sequence: Synthetic oligonucleotide
ucggugccaaggaacagca

SEQ ID NO: 1953913 - RNA, 19 nt, Artificial Sequence
  Description of Artificial Sequence: Synthetic oligonucleotide
agaaaccuuaggggcauac

SEQ ID NO: 1953914 - RNA, 19 nt, Artificial Sequence
  Description of Artificial Sequence: Synthetic oligonucleotide
cucgcaaaguggucggugc

SEQ ID NO: 1953915 - RNA, 19 nt, Artificial Sequence
  Description of Artificial Sequence: Synthetic oligonucleotide
aucccggagucauaguuug

SEQ ID NO: 1953916 - RNA, 19 nt, Artificial Sequence
  Description of Artificial Sequence: Synthetic oligonucleotide
cauuacugaccgaacacca

SEQ ID NO: 1953917 - RNA, 19 nt, Artificial Sequence
  Description of Artificial Sequence: Synthetic oligonucleotide
auucaauaugccauaggga

SEQ ID NO: 1953918 - RNA, 19 nt, Artificial Sequence
  Description of Artificial Sequence: Synthetic oligonucleotide
uggucggugccaaggaaca

SEQ ID NO: 1953919 - RNA, 19 nt, Artificial Sequence
  Description of Artificial Sequence: Synthetic oligonucleotide
cuguauggacuaucggggc

SEQ ID NO: 1953920 - RNA, 19 nt, Artificial Sequence
  Description of Artificial Sequence: Synthetic oligonucleotide
guguuguuaacuucuacua

SEQ ID NO: 1953921 - RNA, 19 nt, Artificial Sequence
  Description of Artificial Sequence: Synthetic oligonucleotide
cuuuguugucucuggcggc

SEQ ID NO: 1953922 - RNA, 19 nt, Artificial Sequence
  Description of Artificial Sequence: Synthetic oligonucleotide
gagccucacucaaaagucg

SEQ ID NO: 1953923 - RNA, 19 nt, Artificial Sequence
  Description of Artificial Sequence: Synthetic oligonucleotide
agcuacuuaaugcacuguu

SEQ ID NO: 1953924 - RNA, 19 nt, Artificial Sequence
  Description of Artificial Sequence: Synthetic oligonucleotide
gauguacauucaauaugcc

SEQ ID NO: 1953925 - RNA, 19 nt, Artificial Sequence
  Description of Artificial Sequence: Synthetic oligonucleotide
uaccaugcaugcaaauauc

SEQ ID NO: 1953926 - RNA, 19 nt, Artificial Sequence
  Description of Artificial Sequence: Synthetic oligonucleotide
gucuugacaacaccgcuuc

SEQ ID NO: 1953927 - RNA, 19 nt, Artificial Sequence
  Description of Artificial Sequence: Synthetic oligonucleotide
uacgucacucccucaguug

SEQ ID NO: 1953928 - RNA, 19 nt, Artificial Sequence
  Description of Artificial Sequence: Synthetic oligonucleotide
uaacuucuacuagauccag

SEQ ID NO: 1953929 - RNA, 19 nt, Artificial Sequence
  Description of Artificial Sequence: Synthetic oligonucleotide
aaguggucggugccaagga

SEQ ID NO: 1953930 - RNA, 19 nt, Artificial Sequence
  Description of Artificial Sequence: Synthetic oligonucleotide
acgccagugacugugucuc

SEQ ID NO: 1953931 - RNA, 19 nt, Artificial Sequence
  Description of Artificial Sequence: Synthetic oligonucleotide
caggcagacuuuucaaaac

SEQ ID NO: 1953932 - RNA, 19 nt, Artificial Sequence
  Description of Artificial Sequence: Synthetic oligonucleotide
cuucucgcggacucgggag

SEQ ID NO: 1953933 - RNA, 19 nt, Artificial Sequence
  Description of Artificial Sequence: Synthetic oligonucleotide
ugguguuguuaacuucuac

SEQ ID NO: 1953934 - RNA, 19 nt, Artificial Sequence
  Description of Artificial Sequence: Synthetic oligonucleotide
cuauauccccaauggcgag

SEQ ID NO: 1953935 - RNA, 19 nt, Artificial Sequence
  Description of Artificial Sequence: Synthetic oligonucleotide
ugggccuauaucaaaccuu

SEQ ID NO: 1953936 - RNA, 19 nt, Artificial Sequence
  Description of Artificial Sequence: Synthetic oligonucleotide
gccauagggaaauuuaaga

SEQ ID NO: 1953937 - RNA, 19 nt, Artificial Sequence
  Description of Artificial Sequence: Synthetic oligonucleotide
agucugaaaucugcacugg

SEQ ID NO: 1953938 - RNA, 19 nt, Artificial Sequence
  Description of Artificial Sequence: Synthetic oligonucleotide
ccgagucuugacaacaccg

SEQ ID NO: 1953939 - RNA, 19 nt, Artificial Sequence
  Description of Artificial Sequence: Synthetic oligonucleotide
ggucuaacuugcauaauug

SEQ ID NO: 1953940 - RNA, 19 nt, Artificial Sequence
  Description of Artificial Sequence: Synthetic oligonucleotide
guauggacuaucggggcag

SEQ ID NO: 1953941 - RNA, 19 nt, Artificial Sequence
  Description of Artificial Sequence: Synthetic oligonucleotide
acucaaaagucggccaaag

SEQ ID NO: 1953942 - RNA, 19 nt, Artificial Sequence
  Description of Artificial Sequence: Synthetic oligonucleotide
ucgcaaaguggucggugcc

SEQ ID NO: 1953943 - RNA, 19 nt, Artificial Sequence
  Description of Artificial Sequence: Synthetic oligonucleotide
ccauuguagaaaucaguag

SEQ ID NO: 1953944 - RNA, 19 nt, Artificial Sequence
  Description of Artificial Sequence: Synthetic oligonucleotide
ugucagucuucucccuagc

SEQ ID NO: 1953945 - RNA, 19 nt, Artificial Sequence
  Description of Artificial Sequence: Synthetic oligonucleotide
agacuuuucaaaacugaaa

SEQ ID NO: 1953946 - RNA, 19 nt, Artificial Sequence
  Description of Artificial Sequence: Synthetic oligonucleotide
aggccacucguacaccggg

SEQ ID NO: 1953947 - RNA, 19 nt, Artificial Sequence
  Description of Artificial Sequence: Synthetic oligonucleotide
ucccucgcaaaguggucgg

SEQ ID NO: 1953948 - RNA, 19 nt, Artificial Sequence
  Description of Artificial Sequence: Synthetic oligonucleotide
uggccuuccauuguucaga

SEQ ID NO: 1953949 - RNA, 19 nt, Artificial Sequence
  Description of Artificial Sequence: Synthetic oligonucleotide
gaauugggccuauaucaaa

SEQ ID NO: 1953950 - RNA, 19 nt, Artificial Sequence
  Description of Artificial Sequence: Synthetic oligonucleotide
agauccuaugucaggccac

SEQ ID NO: 1953951 - RNA, 19 nt, Artificial Sequence
  Description of Artificial Sequence: Synthetic oligonucleotide
aggaccacgccaccucggg

SEQ ID NO: 1953952 - RNA, 19 nt, Artificial Sequence
  Description of Artificial Sequence: Synthetic oligonucleotide
ucaguagcuguuaguguuu

SEQ ID NO: 1953953 - RNA, 19 nt, Artificial Sequence
  Description of Artificial Sequence: Synthetic oligonucleotide
ccauuguucagacuuucag

SEQ ID NO: 1953954 - RNA, 19 nt, Artificial Sequence
  Description of Artificial Sequence: Synthetic oligonucleotide
cucccucgcaaaguggucg

SEQ ID NO: 1953955 - RNA, 19 nt, Artificial Sequence
  Description of Artificial Sequence: Synthetic oligonucleotide
uucucgcggacucgggagc

SEQ ID NO: 1953956 - RNA, 19 nt, Artificial Sequence
  Description of Artificial Sequence: Synthetic oligonucleotide
ccaaggaacagcacccucc

SEQ ID NO: 1953957 - RNA, 19 nt, Artificial Sequence
  Description of Artificial Sequence: Synthetic oligonucleotide
ucuugacaacaccgcuucc

SEQ ID NO: 1953958 - RNA, 19 nt, Artificial Sequence
  Description of Artificial Sequence: Synthetic oligonucleotide
ggacuaucggggcaggacc

SEQ ID NO: 1953959 - RNA, 19 nt, Artificial Sequence
  Description of Artificial Sequence: Synthetic oligonucleotide
gacaacaccgcuuccaguu

SEQ ID NO: 1953960 - RNA, 19 nt, Artificial Sequence
  Description of Artificial Sequence: Synthetic oligonucleotide
uacgccagugacugugucu

SEQ ID NO: 1953961 - RNA, 19 nt, Artificial Sequence
  Description of Artificial Sequence: Synthetic oligonucleotide
agcuguuaguguuuucuua

SEQ ID NO: 1953962 - RNA, 19 nt, Artificial Sequence
  Description of Artificial Sequence: Synthetic oligonucleotide
agccucacucaaaagucgg

SEQ ID NO: 1953963 - RNA, 19 nt, Artificial Sequence
  Description of Artificial Sequence: Synthetic oligonucleotide
cugggauguacauucaaua

SEQ ID NO: 1953964 - RNA, 19 nt, Artificial Sequence
  Description of Artificial Sequence: Synthetic oligonucleotide
gguguuguuaacuucuacu

SEQ ID NO: 1953965 - RNA, 19 nt, Artificial Sequence
  Description of Artificial Sequence: Synthetic oligonucleotide
cauaguuuguccuuuuaau

SEQ ID NO: 1953966 - RNA, 19 nt, Artificial Sequence
  Description of Artificial Sequence: Synthetic oligonucleotide
uuaggggcauacgucacuc

SEQ ID NO: 1953967 - RNA, 19 nt, Artificial Sequence
  Description of Artificial Sequence: Synthetic oligonucleotide
ugugcucuugggaggcaca

SEQ ID NO: 1953968 - RNA, 19 nt, Artificial Sequence
  Description of Artificial Sequence: Synthetic oligonucleotide
gcauacgucacucccucag

SEQ ID NO: 1953969 - RNA, 19 nt, Artificial Sequence
  Description of Artificial Sequence: Synthetic oligonucleotide
uggcuguggccuuccauug

SEQ ID NO: 1953970 - RNA, 19 nt, Artificial Sequence
  Description of Artificial Sequence: Synthetic oligonucleotide
aacuucuacuagauccaga

SEQ ID NO: 1953971 - RNA, 19 nt, Artificial Sequence
  Description of Artificial Sequence: Synthetic oligonucleotide
cugugguauaccacugauc

SEQ ID NO: 1953972 - RNA, 19 nt, Artificial Sequence
  Description of Artificial Sequence: Synthetic oligonucleotide
uggacuaucggggcaggac

SEQ ID NO: 1953973 - RNA, 19 nt, Artificial Sequence
  Description of Artificial Sequence: Synthetic oligonucleotide
gugguauaccacugauccc

SEQ ID NO: 1953974 - RNA, 19 nt, Artificial Sequence
  Description of Artificial Sequence: Synthetic oligonucleotide
cuugacaacaccgcuucca

SEQ ID NO: 1953975 - RNA, 19 nt, Artificial Sequence
  Description of Artificial Sequence: Synthetic oligonucleotide
guuggcaccgagucuugac

SEQ ID NO: 1953976 - RNA, 19 nt, Artificial Sequence
  Description of Artificial Sequence: Synthetic oligonucleotide
uguuucacgggcaguccuu

SEQ ID NO: 1953977 - RNA, 19 nt, Artificial Sequence
  Description of Artificial Sequence: Synthetic oligonucleotide
agcagaaaccuuaggggca

SEQ ID NO: 1953978 - RNA, 19 nt, Artificial Sequence
  Description of Artificial Sequence: Synthetic oligonucleotide
uggcaccgagucuugacaa

SEQ ID NO: 1953979 - RNA, 19 nt, Artificial Sequence
  Description of Artificial Sequence: Synthetic oligonucleotide
uguugucucuggcggcgug

SEQ ID NO: 1953980 - RNA, 19 nt, Artificial Sequence
  Description of Artificial Sequence: Synthetic oligonucleotide
uccuugcaaugaaccagca

SEQ ID NO: 1953981 - RNA, 19 nt, Artificial Sequence
  Description of Artificial Sequence: Synthetic oligonucleotide
guacauucaauaugccaua

SEQ ID NO: 1953982 - RNA, 19 nt, Artificial Sequence
  Description of Artificial Sequence: Synthetic oligonucleotide
gggaucugcaaugauggug

SEQ ID NO: 1953983 - RNA, 19 nt, Artificial Sequence
  Description of Artificial Sequence: Synthetic oligonucleotide
auacgucacucccucaguu

SEQ ID NO: 1953984 - RNA, 19 nt, Artificial Sequence
  Description of Artificial Sequence: Synthetic oligonucleotide
augucaggccacucguaca

SEQ ID NO: 1953985 - RNA, 19 nt, Artificial Sequence
  Description of Artificial Sequence: Synthetic oligonucleotide
caccucgggaggcaacugg

SEQ ID NO: 1953986 - RNA, 19 nt, Artificial Sequence
  Description of Artificial Sequence: Synthetic oligonucleotide
ucuucucccuagcuacuua

SEQ ID NO: 1953987 - RNA, 19 nt, Artificial Sequence
  Description of Artificial Sequence: Synthetic oligonucleotide
aagcauguuggcaccgagu

SEQ ID NO: 1953988 - RNA, 19 nt, Artificial Sequence
  Description of Artificial Sequence: Synthetic oligonucleotide
uuccauuguucagacuuuc

SEQ ID NO: 1953989 - RNA, 19 nt, Artificial Sequence
  Description of Artificial Sequence: Synthetic oligonucleotide
auauccccaauggcgaggu

SEQ ID NO: 1953990 - RNA, 19 nt, Artificial Sequence
  Description of Artificial Sequence: Synthetic oligonucleotide
ccauagggaaauuuaagaa

SEQ ID NO: 1953991 - RNA, 19 nt, Artificial Sequence
  Description of Artificial Sequence: Synthetic oligonucleotide
cagauccuaugucaggcca

SEQ ID NO: 1953992 - RNA, 19 nt, Artificial Sequence
  Description of Artificial Sequence: Synthetic oligonucleotide
uucucccuagcuacuuaau

SEQ ID NO: 1953993 - RNA, 19 nt, Artificial Sequence
  Description of Artificial Sequence: Synthetic oligonucleotide
gcuacuuaaugcacuguug

SEQ ID NO: 1953994 - RNA, 19 nt, Artificial Sequence
  Description of Artificial Sequence: Synthetic oligonucleotide
acuaucggggcaggaccac

SEQ ID NO: 1953995 - RNA, 19 nt, Artificial Sequence
  Description of Artificial Sequence: Synthetic oligonucleotide
caaggaacagcacccucca

SEQ ID NO: 1953996 - RNA, 19 nt, Artificial Sequence
  Description of Artificial Sequence: Synthetic oligonucleotide
agccacuacuccaacguca

SEQ ID NO: 1953997 - RNA, 19 nt, Artificial Sequence
  Description of Artificial Sequence: Synthetic oligonucleotide
aaacugaaauaagcauguu

SEQ ID NO: 1953998 - RNA, 19 nt, Artificial Sequence
  Description of Artificial Sequence: Synthetic oligonucleotide
gguaccagcagaaaccuua

SEQ ID NO: 1953999 - RNA, 19 nt, Artificial Sequence
  Description of Artificial Sequence: Synthetic oligonucleotide
uuacgccagugacuguguc

SEQ ID NO: 1954000 - RNA, 19 nt, Artificial Sequence
  Description of Artificial Sequence: Synthetic oligonucleotide
uaggggcauacgucacucc

SEQ ID NO: 1954001 - RNA, 19 nt, Artificial Sequence
  Description of Artificial Sequence: Synthetic oligonucleotide
caccgagucuugacaacac

SEQ ID NO: 1954002 - RNA, 19 nt, Artificial Sequence
  Description of Artificial Sequence: Synthetic oligonucleotide
augcaugcaaauauccauu

SEQ ID NO: 1954003 - RNA, 19 nt, Artificial Sequence
  Description of Artificial Sequence: Synthetic oligonucleotide
caggccacucguacaccgg

SEQ ID NO: 1954004 - RNA, 19 nt, Artificial Sequence
  Description of Artificial Sequence: Synthetic oligonucleotide
guggucggugccaaggaac

SEQ ID NO: 1954005 - RNA, 19 nt, Artificial Sequence
  Description of Artificial Sequence: Synthetic oligonucleotide
gcacuguauggacuaucgg

SEQ ID NO: 1954006 - RNA, 19 nt, Artificial Sequence
  Description of Artificial Sequence: Synthetic oligonucleotide
uucagacuuucaggcagac

SEQ ID NO: 1954007 - RNA, 19 nt, Artificial Sequence
  Description of Artificial Sequence: Synthetic oligonucleotide
aguggucggugccaaggaa

SEQ ID NO: 1954008 - RNA, 19 nt, Artificial Sequence
  Description of Artificial Sequence: Synthetic oligonucleotide
auaagcauguuggcaccga

SEQ ID NO: 1954009 - RNA, 19 nt, Artificial Sequence
  Description of Artificial Sequence: Synthetic oligonucleotide
cugaccgaacaccaaucca

SEQ ID NO: 1954010 - RNA, 19 nt, Artificial Sequence
  Description of Artificial Sequence: Synthetic oligonucleotide
cuucucccuagcuacuuaa

SEQ ID NO: 1954011 - RNA, 19 nt, Artificial Sequence
  Description of Artificial Sequence: Synthetic oligonucleotide
ugcuugagaauugggccua

SEQ ID NO: 1954012 - RNA, 19 nt, Artificial Sequence
  Description of Artificial Sequence: Synthetic oligonucleotide
gacuaucggggcaggacca

SEQ ID NO: 1954013 - RNA, 19 nt, Artificial Sequence
  Description of Artificial Sequence: Synthetic oligonucleotide
gaauggggauucuucuggu

SEQ ID NO: 1954014 - RNA, 19 nt, Artificial Sequence
  Description of Artificial Sequence: Synthetic oligonucleotide
ggcuuggaugagaaugggg

SEQ ID NO: 1954015 - RNA, 19 nt, Artificial Sequence
  Description of Artificial Sequence: Synthetic oligonucleotide
auuacugaccgaacaccaa

SEQ ID NO: 1954016 - RNA, 19 nt, Artificial Sequence
  Description of Artificial Sequence: Synthetic oligonucleotide
caaaguggucggugccaag

SEQ ID NO: 1954017 - RNA, 19 nt, Artificial Sequence
  Description of Artificial Sequence: Synthetic oligonucleotide
aagugugcaauagguccuu

SEQ ID NO: 1954018 - RNA, 19 nt, Artificial Sequence
  Description of Artificial Sequence: Synthetic oligonucleotide
ccucacucaaaagucggcc

SEQ ID NO: 1954019 - RNA, 19 nt, Artificial Sequence
  Description of Artificial Sequence: Synthetic oligonucleotide
ugguaccaugcaugcaaau

SEQ ID NO: 1954020 - RNA, 19 nt, Artificial Sequence
  Description of Artificial Sequence: Synthetic oligonucleotide
caacgucauauucuccaga

SEQ ID NO: 1954021 - RNA, 19 nt, Artificial Sequence
  Description of Artificial Sequence: Synthetic oligonucleotide
caauaugccauagggaaau

SEQ ID NO: 1954022 - RNA, 19 nt, Artificial Sequence
  Description of Artificial Sequence: Synthetic oligonucleotide
agucuugacaacaccgcuu

SEQ ID NO: 1954023 - RNA, 19 nt, Artificial Sequence
  Description of Artificial Sequence: Synthetic oligonucleotide
aauaugccauagggaaauu

SEQ ID NO: 1954024 - RNA, 19 nt, Artificial Sequence
  Description of Artificial Sequence: Synthetic oligonucleotide
caggaccacgccaccucgg

SEQ ID NO: 1954025 - RNA, 19 nt, Artificial Sequence
  Description of Artificial Sequence: Synthetic oligonucleotide
agguuugcuccucccacuu

SEQ ID NO: 1954026 - RNA, 19 nt, Artificial Sequence
  Description of Artificial Sequence: Synthetic oligonucleotide
guacagcauacuguuucac

SEQ ID NO: 1954027 - RNA, 19 nt, Artificial Sequence
  Description of Artificial Sequence: Synthetic oligonucleotide
uagcuacuuaaugcacugu

SEQ ID NO: 1954028 - RNA, 19 nt, Artificial Sequence
  Description of Artificial Sequence: Synthetic oligonucleotide
ccaacgucauauucuccag

SEQ ID NO: 1954029 - RNA, 19 nt, Artificial Sequence
  Description of Artificial Sequence: Synthetic oligonucleotide
ucucgcggacucgggagcc

SEQ ID NO: 1954030 - RNA, 19 nt, Artificial Sequence
  Description of Artificial Sequence: Synthetic oligonucleotide
guugucucuggcggcgugc

SEQ ID NO: 1954031 - RNA, 19 nt, Artificial Sequence
  Description of Artificial Sequence: Synthetic oligonucleotide
ugugacugucugugguaua

SEQ ID NO: 1954032 - RNA, 19 nt, Artificial Sequence
  Description of Artificial Sequence: Synthetic oligonucleotide
uugucucuggcggcgugca

SEQ ID NO: 1954033 - RNA, 19 nt, Artificial Sequence
  Description of Artificial Sequence: Synthetic oligonucleotide
aggcaacugggauguacau

SEQ ID NO: 1954034 - RNA, 19 nt, Artificial Sequence
  Description of Artificial Sequence: Synthetic oligonucleotide
gcaggaccacgccaccucg

SEQ ID NO: 1954035 - RNA, 19 nt, Artificial Sequence
  Description of Artificial Sequence: Synthetic oligonucleotide
acaccgggagcugggacug

SEQ ID NO: 1954036 - RNA, 19 nt, Artificial Sequence
  Description of Artificial Sequence: Synthetic oligonucleotide
cacuacuccaacgucauau

SEQ ID NO: 1954037 - RNA, 19 nt, Artificial Sequence
  Description of Artificial Sequence: Synthetic oligonucleotide
ccaauggcgaggugaaguc

SEQ ID NO: 1954038 - RNA, 19 nt, Artificial Sequence
  Description of Artificial Sequence: Synthetic oligonucleotide
guacaccgggagcugggac

SEQ ID NO: 1954039 - RNA, 19 nt, Artificial Sequence
  Description of Artificial Sequence: Synthetic oligonucleotide
uguuggcaccgagucuuga

SEQ ID NO: 1954040 - RNA, 19 nt, Artificial Sequence
  Description of Artificial Sequence: Synthetic oligonucleotide
gccacucguacaccgggag

SEQ ID NO: 1954041 - RNA, 19 nt, Artificial Sequence
  Description of Artificial Sequence: Synthetic oligonucleotide
cuuaagcauuacugaccga

SEQ ID NO: 1954042 - RNA, 19 nt, Artificial Sequence
  Description of Artificial Sequence: Synthetic oligonucleotide
gagguuugcuccucccacu

SEQ ID NO: 1954043 - RNA, 19 nt, Artificial Sequence
  Description of Artificial Sequence: Synthetic oligonucleotide
ccuugcaaugaaccagcag

SEQ ID NO: 1954044 - RNA, 19 nt, Artificial Sequence
  Description of Artificial Sequence: Synthetic oligonucleotide
auacuguuucacgggcagu

SEQ ID NO: 1954045 - RNA, 19 nt, Artificial Sequence
  Description of Artificial Sequence: Synthetic oligonucleotide
gucggccaaaggaagccac

SEQ ID NO: 1954046 - RNA, 19 nt, Artificial Sequence
  Description of Artificial Sequence: Synthetic oligonucleotide
agucggccaaaggaagcca

SEQ ID NO: 1954047 - RNA, 19 nt, Artificial Sequence
  Description of Artificial Sequence: Synthetic oligonucleotide
gauccuaugucaggccacu

SEQ ID NO: 1954048 - RNA, 19 nt, Artificial Sequence
  Description of Artificial Sequence: Synthetic oligonucleotide
cuggcggcgugcagagccc

SEQ ID NO: 1954049 - RNA, 19 nt, Artificial Sequence
  Description of Artificial Sequence: Synthetic oligonucleotide
agcgucucccucgcaaagu

SEQ ID NO: 1954050 - RNA, 19 nt, Artificial Sequence
  Description of Artificial Sequence: Synthetic oligonucleotide
guauaccacugaucccgga

SEQ ID NO: 1954051 - RNA, 19 nt, Artificial Sequence
  Description of Artificial Sequence: Synthetic oligonucleotide
gcugggacuguacagcaua

SEQ ID NO: 1954052 - RNA, 19 nt, Artificial Sequence
  Description of Artificial Sequence: Synthetic oligonucleotide
gcgucucccucgcaaagug

SEQ ID NO: 1954053 - RNA, 19 nt, Artificial Sequence
  Description of Artificial Sequence: Synthetic oligonucleotide
cccuagcuacuuaaugcac

SEQ ID NO: 1954054 - RNA, 19 nt, Artificial Sequence
  Description of Artificial Sequence: Synthetic oligonucleotide
gggcauacgucacucccuc

SEQ ID NO: 1954055 - RNA, 19 nt, Artificial Sequence
  Description of Artificial Sequence: Synthetic oligonucleotide
ugguaccagcagaaaccuu

SEQ ID NO: 1954056 - RNA, 19 nt, Artificial Sequence
  Description of Artificial Sequence: Synthetic oligonucleotide
caacugggauguacauuca

SEQ ID NO: 1954057 - RNA, 19 nt, Artificial Sequence
  Description of Artificial Sequence: Synthetic oligonucleotide
ggccuuccauuguucagac

SEQ ID NO: 1954058 - RNA, 19 nt, Artificial Sequence
  Description of Artificial Sequence: Synthetic oligonucleotide
acucguacaccgggagcug

SEQ ID NO: 1954059 - RNA, 19 nt, Artificial Sequence
  Description of Artificial Sequence: Synthetic oligonucleotide
gggucuaacuugcauaauu

SEQ ID NO: 1954060 - RNA, 19 nt, Artificial Sequence
  Description of Artificial Sequence: Synthetic oligonucleotide
gugugcaauagguccuugu

SEQ ID NO: 1954061 - RNA, 19 nt, Artificial Sequence
  Description of Artificial Sequence: Synthetic oligonucleotide
cuaugucaggccacucgua

SEQ ID NO: 1954062 - RNA, 19 nt, Artificial Sequence
  Description of Artificial Sequence: Synthetic oligonucleotide
cuuaggggcauacgucacu

SEQ ID NO: 1954063 - RNA, 19 nt, Artificial Sequence
  Description of Artificial Sequence: Synthetic oligonucleotide
ccuuaggggcauacgucac

SEQ ID NO: 1954064 - RNA, 19 nt, Artificial Sequence
  Description of Artificial Sequence: Synthetic oligonucleotide
gugucugcaauggaacuau

SEQ ID NO: 1954065 - RNA, 19 nt, Artificial Sequence
  Description of Artificial Sequence: Synthetic oligonucleotide
ugggucuaacuugcauaau

SEQ ID NO: 1954066 - RNA, 19 nt, Artificial Sequence
  Description of Artificial Sequence: Synthetic oligonucleotide
ggcaccgagucuugacaac

SEQ ID NO: 1954067 - RNA, 19 nt, Artificial Sequence
  Description of Artificial Sequence: Synthetic oligonucleotide
ggcaggaccacgccaccuc

SEQ ID NO: 1954068 - RNA, 19 nt, Artificial Sequence
  Description of Artificial Sequence: Synthetic oligonucleotide
gagucauaguuuguccuuu

SEQ ID NO: 1954069 - RNA, 19 nt, Artificial Sequence
  Description of Artificial Sequence: Synthetic oligonucleotide
ccuagcuacuuaaugcacu

SEQ ID NO: 1954070 - RNA, 19 nt, Artificial Sequence
  Description of Artificial Sequence: Synthetic oligonucleotide
gcaccgagucuugacaaca

SEQ ID NO: 1954071 - RNA, 19 nt, Artificial Sequence
  Description of Artificial Sequence: Synthetic oligonucleotide
cauacgucacucccucagu

SEQ ID NO: 1954072 - RNA, 19 nt, Artificial Sequence
  Description of Artificial Sequence: Synthetic oligonucleotide
ccacucguacaccgggagc

SEQ ID NO: 1954073 - RNA, 19 nt, Artificial Sequence
  Description of Artificial Sequence: Synthetic oligonucleotide
gcuccucccacuugacaca

SEQ ID NO: 1954074 - RNA, 19 nt, Artificial Sequence
  Description of Artificial Sequence: Synthetic oligonucleotide
augguguuguuaacuucua

SEQ ID NO: 1954075 - RNA, 19 nt, Artificial Sequence
  Description of Artificial Sequence: Synthetic oligonucleotide
gcuucucgcggacucggga

SEQ ID NO: 1954076 - RNA, 19 nt, Artificial Sequence
  Description of Artificial Sequence: Synthetic oligonucleotide
cccggagucauaguuuguc

SEQ ID NO: 1954077 - RNA, 19 nt, Artificial Sequence
  Description of Artificial Sequence: Synthetic oligonucleotide
cacucaaaagucggccaaa

SEQ ID NO: 1954078 - RNA, 19 nt, Artificial Sequence
  Description of Artificial Sequence: Synthetic oligonucleotide
gccucacucaaaagucggc

SEQ ID NO: 1954079 - RNA, 19 nt, Artificial Sequence
  Description of Artificial Sequence: Synthetic oligonucleotide
gccaaggaacagcacccuc

SEQ ID NO: 1954080 - RNA, 19 nt, Artificial Sequence
  Description of Artificial Sequence: Synthetic oligonucleotide
gcauaauuguuacgccagu

SEQ ID NO: 1954081 - RNA, 19 nt, Artificial Sequence
  Description of Artificial Sequence: Synthetic oligonucleotide
cgucucccucgcaaagugg

SEQ ID NO: 1954082 - RNA, 19 nt, Artificial Sequence
  Description of Artificial Sequence: Synthetic oligonucleotide
ggucggugccaaggaacag

SEQ ID NO: 1954083 - RNA, 19 nt, Artificial Sequence
  Description of Artificial Sequence: Synthetic oligonucleotide
cucgggaggcaacugggau

SEQ ID NO: 1954084 - RNA, 19 nt, Artificial Sequence
  Description of Artificial Sequence: Synthetic oligonucleotide
guuacgccagugacugugu

SEQ ID NO: 1954085 - RNA, 19 nt, Artificial Sequence
  Description of Artificial Sequence: Synthetic oligonucleotide
ccucgcaaaguggucggug

SEQ ID NO: 1954086 - RNA, 19 nt, Artificial Sequence
  Description of Artificial Sequence: Synthetic oligonucleotide
gggccuauaucaaaccuuu

SEQ ID NO: 1954087 - RNA, 19 nt, Artificial Sequence
  Description of Artificial Sequence: Synthetic oligonucleotide
caauggcgaggugaagucu

SEQ ID NO: 1954088 - RNA, 19 nt, Artificial Sequence
  Description of Artificial Sequence: Synthetic oligonucleotide
gcagcgucucccucgcaaa

SEQ ID NO: 1954089 - RNA, 19 nt, Artificial Sequence
  Description of Artificial Sequence: Synthetic oligonucleotide
ggcauacgucacucccuca

SEQ ID NO: 1954090 - RNA, 19 nt, Artificial Sequence
  Description of Artificial Sequence: Synthetic oligonucleotide
cugugacugucugugguau

SEQ ID NO: 1954091 - RNA, 19 nt, Artificial Sequence
  Description of Artificial Sequence: Synthetic oligonucleotide
ccagggcggcuucucgcgg

SEQ ID NO: 1954092 - RNA, 19 nt, Artificial Sequence
  Description of Artificial Sequence: Synthetic oligonucleotide
gcaauagguccuugucagu

SEQ ID NO: 1954093 - RNA, 19 nt, Artificial Sequence
  Description of Artificial Sequence: Synthetic oligonucleotide
ggaccacgccaccucggga

SEQ ID NO: 1954094 - RNA, 19 nt, Artificial Sequence
  Description of Artificial Sequence: Synthetic oligonucleotide
cugugacaaccuccagucu

SEQ ID NO: 1954095 - RNA, 19 nt, Artificial Sequence
  Description of Artificial Sequence: Synthetic oligonucleotide
gcggcuucucgcggacucg

SEQ ID NO: 1954096 - RNA, 19 nt, Artificial Sequence
  Description of Artificial Sequence: Synthetic oligonucleotide
ucgcggacucgggagccuu

SEQ ID NO: 1954097 - RNA, 19 nt, Artificial Sequence
  Description of Artificial Sequence: Synthetic oligonucleotide
cccgcagcgucucccucgc

SEQ ID NO: 1954098 - RNA, 19 nt, Artificial Sequence
  Description of Artificial Sequence: Synthetic oligonucleotide
ggcacagggaugguuuccu

SEQ ID NO: 1954099 - RNA, 19 nt, Artificial Sequence
  Description of Artificial Sequence: Synthetic oligonucleotide
cccaauggcgaggugaagu

SEQ ID NO: 1954100 - RNA, 19 nt, Artificial Sequence
  Description of Artificial Sequence: Synthetic oligonucleotide
ggacucgggagccuugguu

SEQ ID NO: 1954101 - RNA, 19 nt, Artificial Sequence
  Description of Artificial Sequence: Synthetic oligonucleotide
cucuggcggcgugcagagc

SEQ ID NO: 1954102 - RNA, 19 nt, Artificial Sequence
  Description of Artificial Sequence: Synthetic oligonucleotide
cugaucccggagucauagu

SEQ ID NO: 1954103 - RNA, 19 nt, Artificial Sequence
  Description of Artificial Sequence: Synthetic oligonucleotide
cggagucauaguuuguccu

SEQ ID NO: 1954104 - RNA, 19 nt, Artificial Sequence
  Description of Artificial Sequence: Synthetic oligonucleotide
ccucgggaggcaacuggga

SEQ ID NO: 1954105 - RNA, 19 nt, Artificial Sequence
  Description of Artificial Sequence: Synthetic oligonucleotide
ggggcauacgucacucccu

SEQ ID NO: 1954106 - RNA, 19 nt, Artificial Sequence
  Description of Artificial Sequence: Synthetic oligonucleotide
ggccacucguacaccggga

SEQ ID NO: 1954107 - RNA, 19 nt, Artificial Sequence
  Description of Artificial Sequence: Synthetic oligonucleotide
ggcaacugggauguacauu

SEQ ID NO: 1954108 - RNA, 19 nt, Artificial Sequence
  Description of Artificial Sequence: Synthetic oligonucleotide
acgccaccucgggaggcaa

SEQ ID NO: 1954109 - RNA, 19 nt, Artificial Sequence
  Description of Artificial Sequence: Synthetic oligonucleotide
cggcuucucgcggacucgg

SEQ ID NO: 1954110 - RNA, 19 nt, Artificial Sequence
  Description of Artificial Sequence: Synthetic oligonucleotide
ccgcuuccaguuccuuuga

SEQ ID NO: 1954111 - RNA, 19 nt, Artificial Sequence
  Description of Artificial Sequence: Synthetic oligonucleotide
cgcggacucgggagccuug

SEQ ID NO: 1954112 - RNA, 19 nt, Artificial Sequence
  Description of Artificial Sequence: Synthetic oligonucleotide
cguacaccgggagcuggga

SEQ ID NO: 1954113 - RNA, 19 nt, Artificial Sequence
  Description of Artificial Sequence: Synthetic oligonucleotide
ggccuauaucaaaccuuuu

SEQ ID NO: 1954114 - RNA, 19 nt, Artificial Sequence
  Description of Artificial Sequence: Synthetic oligonucleotide
cucgcggacucgggagccu

SEQ ID NO: 1954115 - RNA, 19 nt, Artificial Sequence
  Description of Artificial Sequence: Synthetic oligonucleotide
gcuugagaauugggccuau

SEQ ID NO: 1954116 - RNA, 19 nt, Artificial Sequence
  Description of Artificial Sequence: Synthetic oligonucleotide
gggcggcuucucgcggacu

SEQ ID NO: 1954117 - RNA, 19 nt, Artificial Sequence
  Description of Artificial Sequence: Synthetic oligonucleotide
ccgcagcgucucccucgca

SEQ ID NO: 1954118 - RNA, 19 nt, Artificial Sequence
  Description of Artificial Sequence: Synthetic oligonucleotide
aaacggauaccucugcucc

SEQ ID NO: 1954119 - RNA, 19 nt, Artificial Sequence
  Description of Artificial Sequence: Synthetic oligonucleotide
gaugaaaagauacucccgg

SEQ ID NO: 1954120 - RNA, 19 nt, Artificial Sequence
  Description of Artificial Sequence: Synthetic oligonucleotide
uuguugaucagaaacacga

SEQ ID NO: 1954121 - RNA, 19 nt, Artificial Sequence
  Description of Artificial Sequence: Synthetic oligonucleotide
aacaccugcucccaguacc

SEQ ID NO: 1954122 - RNA, 19 nt, Artificial Sequence
  Description of Artificial Sequence: Synthetic oligonucleotide
aaugcugcggaaucggagg

SEQ ID NO: 1954123 - RNA, 19 nt, Artificial Sequence
  Description of Artificial Sequence: Synthetic oligonucleotide
aaugaauuccuguguccgc

SEQ ID NO: 1954124 - RNA, 19 nt, Artificial Sequence
  Description of Artificial Sequence: Synthetic oligonucleotide
gaaacuccgcauuacaucc

SEQ ID NO: 1954125 - RNA, 19 nt, Artificial Sequence
  Description of Artificial Sequence: Synthetic oligonucleotide
aaaagauacucccggcagg

SEQ ID NO: 1954126 - RNA, 19 nt, Artificial Sequence
  Description of Artificial Sequence: Synthetic oligonucleotide
auagcagucggccagguag

SEQ ID NO: 1954127 - RNA, 19 nt, Artificial Sequence
  Description of Artificial Sequence: Synthetic oligonucleotide
guaguuguugaucagaaac

SEQ ID NO: 1954128 - RNA, 19 nt, Artificial Sequence
  Description of Artificial Sequence: Synthetic oligonucleotide
uugaucagaaacacgagcu

SEQ ID NO: 1954129 - RNA, 19 nt, Artificial Sequence
  Description of Artificial Sequence: Synthetic oligonucleotide
uccacgcucaaucaaagcc

SEQ ID NO: 1954130 - RNA, 19 nt, Artificial Sequence
  Description of Artificial Sequence: Synthetic oligonucleotide
augaauguugaugagcucg

SEQ ID NO: 1954131 - RNA, 19 nt, Artificial Sequence
  Description of Artificial Sequence: Synthetic oligonucleotide
gaagcgaugguagagcugg

SEQ ID NO: 1954132 - RNA, 19 nt, Artificial Sequence
  Description of Artificial Sequence: Synthetic oligonucleotide
gaugacggggaucuggugg

SEQ ID NO: 1954133 - RNA, 19 nt, Artificial Sequence
  Description of Artificial Sequence: Synthetic oligonucleotide
gaaaagauacucccggcag

SEQ ID NO: 1954134 - RNA, 19 nt, Artificial Sequence
  Description of Artificial Sequence: Synthetic oligonucleotide
uccaggaucagcucaaacc

SEQ ID NO: 1954135 - RNA, 19 nt, Artificial Sequence
  Description of Artificial Sequence: Synthetic oligonucleotide
aacacgagcugcuccuucc

SEQ ID NO: 1954136 - RNA, 19 nt, Artificial Sequence
  Description of Artificial Sequence: Synthetic oligonucleotide
aauguggauacagagaaaa

SEQ ID NO: 1954137 - RNA, 19 nt, Artificial Sequence
  Description of Artificial Sequence: Synthetic oligonucleotide
ugaaaagauacucccggca

SEQ ID NO: 1954138 - RNA, 19 nt, Artificial Sequence
  Description of Artificial Sequence: Synthetic oligonucleotide
gagaacucggcauagcggc

SEQ ID NO: 1954139 - RNA, 19 nt, Artificial Sequence
  Description of Artificial Sequence: Synthetic oligonucleotide
uaguuguugaucagaaaca

SEQ ID NO: 1954140 - RNA, 19 nt, Artificial Sequence
  Description of Artificial Sequence: Synthetic oligonucleotide
gaaucggaggacaaugugg

SEQ ID NO: 1954141 - RNA, 19 nt, Artificial Sequence
  Description of Artificial Sequence: Synthetic oligonucleotide
caggaauugucaaggagcg

SEQ ID NO: 1954142 - RNA, 19 nt, Artificial Sequence
  Description of Artificial Sequence: Synthetic oligonucleotide
ugacucagagacuccaccg

SEQ ID NO: 1954143 - RNA, 19 nt, Artificial Sequence
  Description of Artificial Sequence: Synthetic oligonucleotide
guugaucagaaacacgagc

SEQ ID NO: 1954144 - RNA, 19 nt, Artificial Sequence
  Description of Artificial Sequence: Synthetic oligonucleotide
gaaaguuggugaaacuccg

SEQ ID NO: 1954145 - RNA, 19 nt, Artificial Sequence
  Description of Artificial Sequence: Synthetic oligonucleotide
aaguuggugaaacuccgca

SEQ ID NO: 1954146 - RNA, 19 nt, Artificial Sequence
  Description of Artificial Sequence: Synthetic oligonucleotide
aacggauaccucugcuccc

SEQ ID NO: 1954147 - RNA, 19 nt, Artificial Sequence
  Description of Artificial Sequence: Synthetic oligonucleotide
uucgaugcaaugcugcgga

SEQ ID NO: 1954148 - RNA, 19 nt, Artificial Sequence
  Description of Artificial Sequence: Synthetic oligonucleotide
agcaucaugucguaguugu

SEQ ID NO: 1954149 - RNA, 19 nt, Artificial Sequence
  Description of Artificial Sequence: Synthetic oligonucleotide
ggaauugucaaggagcgcg

SEQ ID NO: 1954150 - RNA, 19 nt, Artificial Sequence
  Description of Artificial Sequence: Synthetic oligonucleotide
acgagaacucggcauagcg

SEQ ID NO: 1954151 - RNA, 19 nt, Artificial Sequence
  Description of Artificial Sequence: Synthetic oligonucleotide
uguugaucagaaacacgag

SEQ ID NO: 1954152 - RNA, 19 nt, Artificial Sequence
  Description of Artificial Sequence: Synthetic oligonucleotide
uauggggcaccgaggaugg

SEQ ID NO: 1954153 - RNA, 19 nt, Artificial Sequence
  Description of Artificial Sequence: Synthetic oligonucleotide
gauaccucugcuccccacg

SEQ ID NO: 1954154 - RNA, 19 nt, Artificial Sequence
  Description of Artificial Sequence: Synthetic oligonucleotide
ugaaacuccgcauuacauc

SEQ ID NO: 1954155 - RNA, 19 nt, Artificial Sequence
  Description of Artificial Sequence: Synthetic oligonucleotide
aaaguuggugaaacuccgc

SEQ ID NO: 1954156 - RNA, 19 nt, Artificial Sequence
  Description of Artificial Sequence: Synthetic oligonucleotide
agagcuucaaacggauacc

SEQ ID NO: 1954157 - RNA, 19 nt, Artificial Sequence
  Description of Artificial Sequence: Synthetic oligonucleotide
gaggugaugaauguugaug

SEQ ID NO: 1954158 - RNA, 19 nt, Artificial Sequence
  Description of Artificial Sequence: Synthetic oligonucleotide
uguguccgcgcauugagca

SEQ ID NO: 1954159 - RNA, 19 nt, Artificial Sequence
  Description of Artificial Sequence: Synthetic oligonucleotide
caaucaaagccucagccuc

SEQ ID NO: 1954160 - RNA, 19 nt, Artificial Sequence
  Description of Artificial Sequence: Synthetic oligonucleotide
aaucggaggacaaugugga

SEQ ID NO: 1954161 - RNA, 19 nt, Artificial Sequence
  Description of Artificial Sequence: Synthetic oligonucleotide
uccaccgacgccuuccagg

SEQ ID NO: 1954162 - RNA, 19 nt, Artificial Sequence
  Description of Artificial Sequence: Synthetic oligonucleotide
aggagaacuccgcagccac

SEQ ID NO: 1954163 - RNA, 19 nt, Artificial Sequence
  Description of Artificial Sequence: Synthetic oligonucleotide
acacucuggacguucaucu

SEQ ID NO: 1954164 - RNA, 19 nt, Artificial Sequence
  Description of Artificial Sequence: Synthetic oligonucleotide
gaugcaaugcugcggaauc

SEQ ID NO: 1954165 - RNA, 19 nt, Artificial Sequence
  Description of Artificial Sequence: Synthetic oligonucleotide
gauauaguggggccgcgug

SEQ ID NO: 1954166 - RNA, 19 nt, Artificial Sequence
  Description of Artificial Sequence: Synthetic oligonucleotide
ucgguggaagcgaugguag

SEQ ID NO: 1954167 - RNA, 19 nt, Artificial Sequence
  Description of Artificial Sequence: Synthetic oligonucleotide
aaacacgagcugcuccuuc

SEQ ID NO: 1954168 - RNA, 19 nt, Artificial Sequence
  Description of Artificial Sequence: Synthetic oligonucleotide
ucagcucaaaccgaggcca

SEQ ID NO: 1954169 - RNA, 19 nt, Artificial Sequence
  Description of Artificial Sequence: Synthetic oligonucleotide
agaaacacgagcugcuccu

SEQ ID NO: 1954170 - RNA, 19 nt, Artificial Sequence
  Description of Artificial Sequence: Synthetic oligonucleotide
uuucgaaaguuggugaaac

SEQ ID NO: 1954171 - RNA, 19 nt, Artificial Sequence
  Description of Artificial Sequence: Synthetic oligonucleotide
caugacagcauggaacagg

SEQ ID NO: 1954172 - RNA, 19 nt, Artificial Sequence
  Description of Artificial Sequence: Synthetic oligonucleotide
aaagauacucccggcagga

SEQ ID NO: 1954173 - RNA, 19 nt, Artificial Sequence
  Description of Artificial Sequence: Synthetic oligonucleotide
accgacgccuuccaggaac

SEQ ID NO: 1954174 - RNA, 19 nt, Artificial Sequence
  Description of Artificial Sequence: Synthetic oligonucleotide
auggcgagcgugcggaccc

SEQ ID NO: 1954175 - RNA, 19 nt, Artificial Sequence
  Description of Artificial Sequence: Synthetic oligonucleotide
cacaaacgccaccagaccc

SEQ ID NO: 1954176 - RNA, 19 nt, Artificial Sequence
  Description of Artificial Sequence: Synthetic oligonucleotide
acccaugacagcauggaac

SEQ ID NO: 1954177 - RNA, 19 nt, Artificial Sequence
  Description of Artificial Sequence: Synthetic oligonucleotide
agaugaaaagauacucccg

SEQ ID NO: 1954178 - RNA, 19 nt, Artificial Sequence
  Description of Artificial Sequence: Synthetic oligonucleotide
ucgaaaguuggugaaacuc

SEQ ID NO: 1954179 - RNA, 19 nt, Artificial Sequence
  Description of Artificial Sequence: Synthetic oligonucleotide
cucuucgaugcaaugcugc

SEQ ID NO: 1954180 - RNA, 19 nt, Artificial Sequence
  Description of Artificial Sequence: Synthetic oligonucleotide
augaauuccuguguccgcg

SEQ ID NO: 1954181 - RNA, 19 nt, Artificial Sequence
  Description of Artificial Sequence: Synthetic oligonucleotide
uguccacgcucaaucaaag

SEQ ID NO: 1954182 - RNA, 19 nt, Artificial Sequence
  Description of Artificial Sequence: Synthetic oligonucleotide
acaggucaugugcagcugg

SEQ ID NO: 1954183 - RNA, 19 nt, Artificial Sequence
  Description of Artificial Sequence: Synthetic oligonucleotide
auugucaaggagcgcguag

SEQ ID NO: 1954184 - RNA, 19 nt, Artificial Sequence
  Description of Artificial Sequence: Synthetic oligonucleotide
aacuccgcauuacauccug

SEQ ID NO: 1954185 - RNA, 19 nt, Artificial Sequence
  Description of Artificial Sequence: Synthetic oligonucleotide
uccguuucgaaaguuggug

SEQ ID NO: 1954186 - RNA, 19 nt, Artificial Sequence
  Description of Artificial Sequence: Synthetic oligonucleotide
uucaaacggauaccucugc

SEQ ID NO: 1954187 - RNA, 19 nt, Artificial Sequence
  Description of Artificial Sequence: Synthetic oligonucleotide
ucacaaacgccaccagacc

SEQ ID NO: 1954188 - RNA, 19 nt, Artificial Sequence
  Description of Artificial Sequence: Synthetic oligonucleotide
cacagaugaaaagauacuc

SEQ ID NO: 1954189 - RNA, 19 nt, Artificial Sequence
  Description of Artificial Sequence: Synthetic oligonucleotide
acaaacgccaccagacccc

SEQ ID NO: 1954190 - RNA, 19 nt, Artificial Sequence
  Description of Artificial Sequence: Synthetic oligonucleotide
gcugguuccguuucgaaag

SEQ ID NO: 1954191 - RNA, 19 nt, Artificial Sequence
  Description of Artificial Sequence: Synthetic oligonucleotide
guuccguuucgaaaguugg

SEQ ID NO: 1954192 - RNA, 19 nt, Artificial Sequence
  Description of Artificial Sequence: Synthetic oligonucleotide
ucaaacggauaccucugcu

SEQ ID NO: 1954193 - RNA, 19 nt, Artificial Sequence
  Description of Artificial Sequence: Synthetic oligonucleotide
uguccaguccuccgaggcg

SEQ ID NO: 1954194 - RNA, 19 nt, Artificial Sequence
  Description of Artificial Sequence: Synthetic oligonucleotide
cuucaaacggauaccucug

SEQ ID NO: 1954195 - RNA, 19 nt, Artificial Sequence
  Description of Artificial Sequence: Synthetic oligonucleotide
agagucauggcgagcgugc

SEQ ID NO: 1954196 - RNA, 19 nt, Artificial Sequence
  Description of Artificial Sequence: Synthetic oligonucleotide
augagcucggcccuggcug

SEQ ID NO: 1954197 - RNA, 19 nt, Artificial Sequence
  Description of Artificial Sequence: Synthetic oligonucleotide
guuguugaucagaaacacg

SEQ ID NO: 1954198 - RNA, 19 nt, Artificial Sequence
  Description of Artificial Sequence: Synthetic oligonucleotide
auggcgucauagcagucgg

SEQ ID NO: 1954199 - RNA, 19 nt, Artificial Sequence
  Description of Artificial Sequence: Synthetic oligonucleotide
aagggcagacgagaacucg

SEQ ID NO: 1954200 - RNA, 19 nt, Artificial Sequence
  Description of Artificial Sequence: Synthetic oligonucleotide
augaugcugguuccguuuc

SEQ ID NO: 1954201 - RNA, 19 nt, Artificial Sequence
  Description of Artificial Sequence: Synthetic oligonucleotide
aguaccuguccagagcagg

SEQ ID NO: 1954202 - RNA, 19 nt, Artificial Sequence
  Description of Artificial Sequence: Synthetic oligonucleotide
ugguagagcuggaucagcu

SEQ ID NO: 1954203 - RNA, 19 nt, Artificial Sequence
  Description of Artificial Sequence: Synthetic oligonucleotide
accuguccagagcagggac

SEQ ID NO: 1954204 - RNA, 19 nt, Artificial Sequence
  Description of Artificial Sequence: Synthetic oligonucleotide
uagcagucggccagguagg

SEQ ID NO: 1954205 - RNA, 19 nt, Artificial Sequence
  Description of Artificial Sequence: Synthetic oligonucleotide
ugaugcugguuccguuucg

SEQ ID NO: 1954206 - RNA, 19 nt, Artificial Sequence
  Description of Artificial Sequence: Synthetic oligonucleotide
agagacuccaccgacgccu

SEQ ID NO: 1954207 - RNA, 19 nt, Artificial Sequence
  Description of Artificial Sequence: Synthetic oligonucleotide
cucagagacuccaccgacg

SEQ ID NO: 1954208 - RNA, 19 nt, Artificial Sequence
  Description of Artificial Sequence: Synthetic oligonucleotide
gaacuccgcagccacucgg

SEQ ID NO: 1954209 - RNA, 19 nt, Artificial Sequence
  Description of Artificial Sequence: Synthetic oligonucleotide
caaugcugcggaaucggag

SEQ ID NO: 1954210 - RNA, 19 nt, Artificial Sequence
  Description of Artificial Sequence: Synthetic oligonucleotide
gcaggaauugucaaggagc

SEQ ID NO: 1954211 - RNA, 19 nt, Artificial Sequence
  Description of Artificial Sequence: Synthetic oligonucleotide
agcgcguagugcuggcugc

SEQ ID NO: 1954212 - RNA, 19 nt, Artificial Sequence
  Description of Artificial Sequence: Synthetic oligonucleotide
ugucaaggagcgcguagug

SEQ ID NO: 1954213 - RNA, 19 nt, Artificial Sequence
  Description of Artificial Sequence: Synthetic oligonucleotide
cagaaacacgagcugcucc

SEQ ID NO: 1954214 - RNA, 19 nt, Artificial Sequence
  Description of Artificial Sequence: Synthetic oligonucleotide
gaugcugacaagggcagac

SEQ ID NO: 1954215 - RNA, 19 nt, Artificial Sequence
  Description of Artificial Sequence: Synthetic oligonucleotide
agcaauggcgucauagcag

SEQ ID NO: 1954216 - RNA, 19 nt, Artificial Sequence
  Description of Artificial Sequence: Synthetic oligonucleotide
cauccugacucagagacuc

SEQ ID NO: 1954217 - RNA, 19 nt, Artificial Sequence
  Description of Artificial Sequence: Synthetic oligonucleotide
gaagagagcuucaaacgga

SEQ ID NO: 1954218 - RNA, 19 nt, Artificial Sequence
  Description of Artificial Sequence: Synthetic oligonucleotide
uccgcauuacauccugacu

SEQ ID NO: 1954219 - RNA, 19 nt, Artificial Sequence
  Description of Artificial Sequence: Synthetic oligonucleotide
aaccaccaaagccacggau

SEQ ID NO: 1954220 - RNA, 19 nt, Artificial Sequence
  Description of Artificial Sequence: Synthetic oligonucleotide
aacucggcauagcggcgcg

SEQ ID NO: 1954221 - RNA, 19 nt, Artificial Sequence
  Description of Artificial Sequence: Synthetic oligonucleotide
guauggggcaccgaggaug

SEQ ID NO: 1954222 - RNA, 19 nt, Artificial Sequence
  Description of Artificial Sequence: Synthetic oligonucleotide
cacacccagcaucaugucg

SEQ ID NO: 1954223 - RNA, 19 nt, Artificial Sequence
  Description of Artificial Sequence: Synthetic oligonucleotide
acgccuuccaggaaccacc

SEQ ID NO: 1954224 - RNA, 19 nt, Artificial Sequence
  Description of Artificial Sequence: Synthetic oligonucleotide
uucgaaaguuggugaaacu

SEQ ID NO: 1954225 - RNA, 19 nt, Artificial Sequence
  Description of Artificial Sequence: Synthetic oligonucleotide
agcggcgcgugauauagug

SEQ ID NO: 1954226 - RNA, 19 nt, Artificial Sequence
  Description of Artificial Sequence: Synthetic oligonucleotide
acggauaccucugcucccc

SEQ ID NO: 1954227 - RNA, 19 nt, Artificial Sequence
  Description of Artificial Sequence: Synthetic oligonucleotide
uuggugaaacuccgcauua

SEQ ID NO: 1954228 - RNA, 19 nt, Artificial Sequence
  Description of Artificial Sequence: Synthetic oligonucleotide
auaguggggccgcgugucc

SEQ ID NO: 1954229 - RNA, 19 nt, Artificial Sequence
  Description of Artificial Sequence: Synthetic oligonucleotide
ugucguaguuguugaucag

SEQ ID NO: 1954230 - RNA, 19 nt, Artificial Sequence
  Description of Artificial Sequence: Synthetic oligonucleotide
ggcaguauggggcaccgag

SEQ ID NO: 1954231 - RNA, 19 nt, Artificial Sequence
  Description of Artificial Sequence: Synthetic oligonucleotide
uucuuccccucgaagucgc

SEQ ID NO: 1954232 - RNA, 19 nt, Artificial Sequence
  Description of Artificial Sequence: Synthetic oligonucleotide
cagggugcgcucauugggg

SEQ ID NO: 1954233 - RNA, 19 nt, Artificial Sequence
  Description of Artificial Sequence: Synthetic oligonucleotide
agauacucccggcaggaau

SEQ ID NO: 1954234 - RNA, 19 nt, Artificial Sequence
  Description of Artificial Sequence: Synthetic oligonucleotide
uccaccaugaggugaugaa

SEQ ID NO: 1954235 - RNA, 19 nt, Artificial Sequence
  Description of Artificial Sequence: Synthetic oligonucleotide
ugaauuccuguguccgcgc

SEQ ID NO: 1954236 - RNA, 19 nt, Artificial Sequence
  Description of Artificial Sequence: Synthetic oligonucleotide
ugagcucggcccuggcugg

SEQ ID NO: 1954237 - RNA, 19 nt, Artificial Sequence
  Description of Artificial Sequence: Synthetic oligonucleotide
cuucgaugcaaugcugcgg

SEQ ID NO: 1954238 - RNA, 19 nt, Artificial Sequence
  Description of Artificial Sequence: Synthetic oligonucleotide
augguagagcuggaucagc

SEQ ID NO: 1954239 - RNA, 19 nt, Artificial Sequence
  Description of Artificial Sequence: Synthetic oligonucleotide
agcacacccagcaucaugu

SEQ ID NO: 1954240 - RNA, 19 nt, Artificial Sequence
  Description of Artificial Sequence: Synthetic oligonucleotide
uuccccucgaagucgcuca

SEQ ID NO: 1954241 - RNA, 19 nt, Artificial Sequence
  Description of Artificial Sequence: Synthetic oligonucleotide
acguucaucuccaggauca

SEQ ID NO: 1954242 - RNA, 19 nt, Artificial Sequence
  Description of Artificial Sequence: Synthetic oligonucleotide
aggaucagcucaaaccgag

SEQ ID NO: 1954243 - RNA, 19 nt, Artificial Sequence
  Description of Artificial Sequence: Synthetic oligonucleotide
aauuccuguguccgcgcau

SEQ ID NO: 1954244 - RNA, 19 nt, Artificial Sequence
  Description of Artificial Sequence: Synthetic oligonucleotide
aagagagcuucaaacggau

SEQ ID NO: 1954245 - RNA, 19 nt, Artificial Sequence
  Description of Artificial Sequence: Synthetic oligonucleotide
gaugaauguugaugagcuc

SEQ ID NO: 1954246 - RNA, 19 nt, Artificial Sequence
  Description of Artificial Sequence: Synthetic oligonucleotide
uugucaaggagcgcguagu

SEQ ID NO: 1954247 - RNA, 19 nt, Artificial Sequence
  Description of Artificial Sequence: Synthetic oligonucleotide
agggacaucccucuucgau

SEQ ID NO: 1954248 - RNA, 19 nt, Artificial Sequence
  Description of Artificial Sequence: Synthetic oligonucleotide
ugcugguuccguuucgaaa

SEQ ID NO: 1954249 - RNA, 19 nt, Artificial Sequence
  Description of Artificial Sequence: Synthetic oligonucleotide
cacggaucagcugagugac

SEQ ID NO: 1954250 - RNA, 19 nt, Artificial Sequence
  Description of Artificial Sequence: Synthetic oligonucleotide
augacggggaucugguggu

SEQ ID NO: 1954251 - RNA, 19 nt, Artificial Sequence
  Description of Artificial Sequence: Synthetic oligonucleotide
ggacaucccucuucgaugc

SEQ ID NO: 1954252 - RNA, 19 nt, Artificial Sequence
  Description of Artificial Sequence: Synthetic oligonucleotide
gacaagggcagacgagaac

SEQ ID NO: 1954253 - RNA, 19 nt, Artificial Sequence
  Description of Artificial Sequence: Synthetic oligonucleotide
guguccaguccuccgaggc

SEQ ID NO: 1954254 - RNA, 19 nt, Artificial Sequence
  Description of Artificial Sequence: Synthetic oligonucleotide
cuccgcauuacauccugac

SEQ ID NO: 1954255 - RNA, 19 nt, Artificial Sequence
  Description of Artificial Sequence: Synthetic oligonucleotide
ggcaggaauugucaaggag

SEQ ID NO: 1954256 - RNA, 19 nt, Artificial Sequence
  Description of Artificial Sequence: Synthetic oligonucleotide
gguugaugcugacaagggc

SEQ ID NO: 1954257 - RNA, 19 nt, Artificial Sequence
  Description of Artificial Sequence: Synthetic oligonucleotide
ggugaugaauguugaugag

SEQ ID NO: 1954258 - RNA, 19 nt, Artificial Sequence
  Description of Artificial Sequence: Synthetic oligonucleotide
ucccaguaccuguccagag

SEQ ID NO: 1954259 - RNA, 19 nt, Artificial Sequence
  Description of Artificial Sequence: Synthetic oligonucleotide
ugcggaagagagcuucaaa

SEQ ID NO: 1954260 - RNA, 19 nt, Artificial Sequence
  Description of Artificial Sequence: Synthetic oligonucleotide
ucggaggacaauguggaua

SEQ ID NO: 1954261 - RNA, 19 nt, Artificial Sequence
  Description of Artificial Sequence: Synthetic oligonucleotide
aggaauugucaaggagcgc

SEQ ID NO: 1954262 - RNA, 19 nt, Artificial Sequence
  Description of Artificial Sequence: Synthetic oligonucleotide
guaccuguccagagcaggg

SEQ ID NO: 1954263 - RNA, 19 nt, Artificial Sequence
  Description of Artificial Sequence: Synthetic oligonucleotide
uguccgcgcauugagcagc

SEQ ID NO: 1954264 - RNA, 19 nt, Artificial Sequence
  Description of Artificial Sequence: Synthetic oligonucleotide
gguguuucagagucauggc

SEQ ID NO: 1954265 - RNA, 19 nt, Artificial Sequence
  Description of Artificial Sequence: Synthetic oligonucleotide
ggaaucggaggacaaugug

SEQ ID NO: 1954266 - RNA, 19 nt, Artificial Sequence
  Description of Artificial Sequence: Synthetic oligonucleotide
uauaguggggccgcguguc

SEQ ID NO: 1954267 - RNA, 19 nt, Artificial Sequence
  Description of Artificial Sequence: Synthetic oligonucleotide
ccgcauuacauccugacuc

SEQ ID NO: 1954268 - RNA, 19 nt, Artificial Sequence
  Description of Artificial Sequence: Synthetic oligonucleotide
aucagaaacacgagcugcu

SEQ ID NO: 1954269 - RNA, 19 nt, Artificial Sequence
  Description of Artificial Sequence: Synthetic oligonucleotide
agcaacucuucaaugaauu

SEQ ID NO: 1954270 - RNA, 19 nt, Artificial Sequence
  Description of Artificial Sequence: Synthetic oligonucleotide
cacgcucaaucaaagccuc

SEQ ID NO: 1954271 - RNA, 19 nt, Artificial Sequence
  Description of Artificial Sequence: Synthetic oligonucleotide
augcaaugcugcggaaucg

SEQ ID NO: 1954272 - RNA, 19 nt, Artificial Sequence
  Description of Artificial Sequence: Synthetic oligonucleotide
gagcgcguagugcuggcug

SEQ ID NO: 1954273 - RNA, 19 nt, Artificial Sequence
  Description of Artificial Sequence: Synthetic oligonucleotide
agggcagacgagaacucgg

SEQ ID NO: 1954274 - RNA, 19 nt, Artificial Sequence
  Description of Artificial Sequence: Synthetic oligonucleotide
gggacaucccucuucgaug

SEQ ID NO: 1954275 - RNA, 19 nt, Artificial Sequence
  Description of Artificial Sequence: Synthetic oligonucleotide
gaagucgcucagccugucc

SEQ ID NO: 1954276 - RNA, 19 nt, Artificial Sequence
  Description of Artificial Sequence: Synthetic oligonucleotide
aaccgaggccacagcaagg

SEQ ID NO: 1954277 - RNA, 19 nt, Artificial Sequence
  Description of Artificial Sequence: Synthetic oligonucleotide
agcgugcggacccaugaca

SEQ ID NO: 1954278 - RNA, 19 nt, Artificial Sequence
  Description of Artificial Sequence: Synthetic oligonucleotide
cauuacauccugacucaga

SEQ ID NO: 1954279 - RNA, 19 nt, Artificial Sequence
  Description of Artificial Sequence: Synthetic oligonucleotide
ucgaagucgcucagccugu

SEQ ID NO: 1954280 - RNA, 19 nt, Artificial Sequence
  Description of Artificial Sequence: Synthetic oligonucleotide
cuccgcagccacucggagg

SEQ ID NO: 1954281 - RNA, 19 nt, Artificial Sequence
  Description of Artificial Sequence: Synthetic oligonucleotide
gcuucaaacggauaccucu

SEQ ID NO: 1954282 - RNA, 19 nt, Artificial Sequence
  Description of Artificial Sequence: Synthetic oligonucleotide
caguauggggcaccgagga

SEQ ID NO: 1954283 - RNA, 19 nt, Artificial Sequence
  Description of Artificial Sequence: Synthetic oligonucleotide
aggagcgcguagugcuggc

SEQ ID NO: 1954284 - RNA, 19 nt, Artificial Sequence
  Description of Artificial Sequence: Synthetic oligonucleotide
augcugacaagggcagacg

SEQ ID NO: 1954285 - RNA, 19 nt, Artificial Sequence
  Description of Artificial Sequence: Synthetic oligonucleotide
cagcaauggcgucauagca

SEQ ID NO: 1954286 - RNA, 19 nt, Artificial Sequence
  Description of Artificial Sequence: Synthetic oligonucleotide
gagucauggcgagcgugcg

SEQ ID NO: 1954287 - RNA, 19 nt, Artificial Sequence
  Description of Artificial Sequence: Synthetic oligonucleotide
gaauuccuguguccgcgca

SEQ ID NO: 1954288 - RNA, 19 nt, Artificial Sequence
  Description of Artificial Sequence: Synthetic oligonucleotide
cuguguccgcgcauugagc

SEQ ID NO: 1954289 - RNA, 19 nt, Artificial Sequence
  Description of Artificial Sequence: Synthetic oligonucleotide
auggaacaggucaugugca

SEQ ID NO: 1954290 - RNA, 19 nt, Artificial Sequence
  Description of Artificial Sequence: Synthetic oligonucleotide
gucaaggagcgcguagugc

SEQ ID NO: 1954291 - RNA, 19 nt, Artificial Sequence
  Description of Artificial Sequence: Synthetic oligonucleotide
uggaugaugcugguuccgu

SEQ ID NO: 1954292 - RNA, 19 nt, Artificial Sequence
  Description of Artificial Sequence: Synthetic oligonucleotide
acggggaucuggugguuug

SEQ ID NO: 1954293 - RNA, 19 nt, Artificial Sequence
  Description of Artificial Sequence: Synthetic oligonucleotide
cuggaugaugcugguuccg

SEQ ID NO: 1954294 - RNA, 19 nt, Artificial Sequence
  Description of Artificial Sequence: Synthetic oligonucleotide
cucaaaccgaggccacagc

SEQ ID NO: 1954295 - RNA, 19 nt, Artificial Sequence
  Description of Artificial Sequence: Synthetic oligonucleotide
ucgucagcagcccgcucca

SEQ ID NO: 1954296 - RNA, 19 nt, Artificial Sequence
  Description of Artificial Sequence: Synthetic oligonucleotide
agacgagaacucggcauag

SEQ ID NO: 1954297 - RNA, 19 nt, Artificial Sequence
  Description of Artificial Sequence: Synthetic oligonucleotide
ugauauaguggggccgcgu

SEQ ID NO: 1954298 - RNA, 19 nt, Artificial Sequence
  Description of Artificial Sequence: Synthetic oligonucleotide
agcuucaaacggauaccuc

SEQ ID NO: 1954299 - RNA, 19 nt, Artificial Sequence
  Description of Artificial Sequence: Synthetic oligonucleotide
ucagagucauggcgagcgu

SEQ ID NO: 1954300 - RNA, 19 nt, Artificial Sequence
  Description of Artificial Sequence: Synthetic oligonucleotide
agaugacggggaucuggug

SEQ ID NO: 1954301 - RNA, 19 nt, Artificial Sequence
  Description of Artificial Sequence: Synthetic oligonucleotide
guccacgcucaaucaaagc

SEQ ID NO: 1954302 - RNA, 19 nt, Artificial Sequence
  Description of Artificial Sequence: Synthetic oligonucleotide
ucuggacguucaucuccag

SEQ ID NO: 1954303 - RNA, 19 nt, Artificial Sequence
  Description of Artificial Sequence: Synthetic oligonucleotide
agaacucggcauagcggcg

SEQ ID NO: 1954304 - RNA, 19 nt, Artificial Sequence
  Description of Artificial Sequence: Synthetic oligonucleotide
gaugaugcugguuccguuu

SEQ ID NO: 1954305 - RNA, 19 nt, Artificial Sequence
  Description of Artificial Sequence: Synthetic oligonucleotide
aaacuccgcauuacauccu

SEQ ID NO: 1954306 - RNA, 19 nt, Artificial Sequence
  Description of Artificial Sequence: Synthetic oligonucleotide
guccaguccuccgaggcgc

SEQ ID NO: 1954307 - RNA, 19 nt, Artificial Sequence
  Description of Artificial Sequence: Synthetic oligonucleotide
gguuccguuucgaaaguug

SEQ ID NO: 1954308 - RNA, 19 nt, Artificial Sequence
  Description of Artificial Sequence: Synthetic oligonucleotide
aauugucaaggagcgcgua

SEQ ID NO: 1954309 - RNA, 19 nt, Artificial Sequence
  Description of Artificial Sequence: Synthetic oligonucleotide
gguggugcggacacucugg

SEQ ID NO: 1954310 - RNA, 19 nt, Artificial Sequence
  Description of Artificial Sequence: Synthetic oligonucleotide
uuccuguguccgcgcauug

SEQ ID NO: 1954311 - RNA, 19 nt, Artificial Sequence
  Description of Artificial Sequence: Synthetic oligonucleotide
gaugcugguuccguuucga

SEQ ID NO: 1954312 - RNA, 19 nt, Artificial Sequence
  Description of Artificial Sequence: Synthetic oligonucleotide
cucuggacguucaucucca

SEQ ID NO: 1954313 - RNA, 19 nt, Artificial Sequence
  Description of Artificial Sequence: Synthetic oligonucleotide
aucccucuucgaugcaaug

SEQ ID NO: 1954314 - RNA, 19 nt, Artificial Sequence
  Description of Artificial Sequence: Synthetic oligonucleotide
gcauggaacaggucaugug

SEQ ID NO: 1954315 - RNA, 19 nt, Artificial Sequence
  Description of Artificial Sequence: Synthetic oligonucleotide
gucauggcgagcgugcgga

SEQ ID NO: 1954316 - RNA, 19 nt, Artificial Sequence
  Description of Artificial Sequence: Synthetic oligonucleotide
acuccgcagccacucggag

SEQ ID NO: 1954317 - RNA, 19 nt, Artificial Sequence
  Description of Artificial Sequence: Synthetic oligonucleotide
uggaaacucuccaccucuu

SEQ ID NO: 1954318 - RNA, 19 nt, Artificial Sequence
  Description of Artificial Sequence: Synthetic oligonucleotide
gacgagaacucggcauagc

SEQ ID NO: 1954319 - RNA, 19 nt, Artificial Sequence
  Description of Artificial Sequence: Synthetic oligonucleotide
cgagaacucggcauagcgg

SEQ ID NO: 1954320 - RNA, 19 nt, Artificial Sequence
  Description of Artificial Sequence: Synthetic oligonucleotide
aacuccgcagccacucgga

SEQ ID NO: 1954321 - RNA, 19 nt, Artificial Sequence
  Description of Artificial Sequence: Synthetic oligonucleotide
caaaccgaggccacagcaa

SEQ ID NO: 1954322 - RNA, 19 nt, Artificial Sequence
  Description of Artificial Sequence: Synthetic oligonucleotide
uccccucgaagucgcucag

SEQ ID NO: 1954323 - RNA, 19 nt, Artificial Sequence
  Description of Artificial Sequence: Synthetic oligonucleotide
ugcggcugugccagcacuc

SEQ ID NO: 1954324 - RNA, 19 nt, Artificial Sequence
  Description of Artificial Sequence: Synthetic oligonucleotide
cggaggacaauguggauac

SEQ ID NO: 1954325 - RNA, 19 nt, Artificial Sequence
  Description of Artificial Sequence: Synthetic oligonucleotide
agggugcgcucauugggga

SEQ ID NO: 1954326 - RNA, 19 nt, Artificial Sequence
  Description of Artificial Sequence: Synthetic oligonucleotide
uaccuguccagagcaggga

SEQ ID NO: 1954327 - RNA, 19 nt, Artificial Sequence
  Description of Artificial Sequence: Synthetic oligonucleotide
gacgccuuccaggaaccac

SEQ ID NO: 1954328 - RNA, 19 nt, Artificial Sequence
  Description of Artificial Sequence: Synthetic oligonucleotide
cagagucauggcgagcgug

SEQ ID NO: 1954329 - RNA, 19 nt, Artificial Sequence
  Description of Artificial Sequence: Synthetic oligonucleotide
acacgagcugcuccuuccu

SEQ ID NO: 1954330 - RNA, 19 nt, Artificial Sequence
  Description of Artificial Sequence: Synthetic oligonucleotide
guuucgaaaguuggugaaa

SEQ ID NO: 1954331 - RNA, 19 nt, Artificial Sequence
  Description of Artificial Sequence: Synthetic oligonucleotide
aguauggggcaccgaggau

SEQ ID NO: 1954332 - RNA, 19 nt, Artificial Sequence
  Description of Artificial Sequence: Synthetic oligonucleotide
guguccgcgcauugagcag

SEQ ID NO: 1954333 - RNA, 19 nt, Artificial Sequence
  Description of Artificial Sequence: Synthetic oligonucleotide
cggcgcgugauauaguggg

SEQ ID NO: 1954334 - RNA, 19 nt, Artificial Sequence
  Description of Artificial Sequence: Synthetic oligonucleotide
caguaccuguccagagcag

SEQ ID NO: 1954335 - RNA, 19 nt, Artificial Sequence
  Description of Artificial Sequence: Synthetic oligonucleotide
uggcgucauagcagucggc

SEQ ID NO: 1954336 - RNA, 19 nt, Artificial Sequence
  Description of Artificial Sequence: Synthetic oligonucleotide
ucggcauagcggcgcguga

SEQ ID NO: 1954337 - RNA, 19 nt, Artificial Sequence
  Description of Artificial Sequence: Synthetic oligonucleotide
ccuguguccgcgcauugag

SEQ ID NO: 1954338 - RNA, 19 nt, Artificial Sequence
  Description of Artificial Sequence: Synthetic oligonucleotide
gugauauaguggggccgcg

SEQ ID NO: 1954339 - RNA, 19 nt, Artificial Sequence
  Description of Artificial Sequence: Synthetic oligonucleotide
cuggcugcggaagagagcu

SEQ ID NO: 1954340 - RNA, 19 nt, Artificial Sequence
  Description of Artificial Sequence: Synthetic oligonucleotide
cuggaaacucuccaccucu

SEQ ID NO: 1954341 - RNA, 19 nt, Artificial Sequence
  Description of Artificial Sequence: Synthetic oligonucleotide
cccucgaagucgcucagcc

SEQ ID NO: 1954342 - RNA, 19 nt, Artificial Sequence
  Description of Artificial Sequence: Synthetic oligonucleotide
ggaggacaaaguucuccac

SEQ ID NO: 1954343 - RNA, 19 nt, Artificial Sequence
  Description of Artificial Sequence: Synthetic oligonucleotide
cucccggcaggaauuguca

SEQ ID NO: 1954344 - RNA, 19 nt, Artificial Sequence
  Description of Artificial Sequence: Synthetic oligonucleotide
gcggaaucggaggacaaug

SEQ ID NO: 1954345 - RNA, 19 nt, Artificial Sequence
  Description of Artificial Sequence: Synthetic oligonucleotide
gccacggaucagcugagug

SEQ ID NO: 1954346 - RNA, 19 nt, Artificial Sequence
  Description of Artificial Sequence: Synthetic oligonucleotide
gagcgugcggacccaugac

SEQ ID NO: 1954347 - RNA, 19 nt, Artificial Sequence
  Description of Artificial Sequence: Synthetic oligonucleotide
uaccucugcuccccacgcu

SEQ ID NO: 1954348 - RNA, 19 nt, Artificial Sequence
  Description of Artificial Sequence: Synthetic oligonucleotide
gugcggacccaugacagca

SEQ ID NO: 1954349 - RNA, 19 nt, Artificial Sequence
  Description of Artificial Sequence: Synthetic oligonucleotide
cagacgagaacucggcaua

SEQ ID NO: 1954350 - RNA, 19 nt, Artificial Sequence
  Description of Artificial Sequence: Synthetic oligonucleotide
cagucggccagguaggacu

SEQ ID NO: 1954351 - RNA, 19 nt, Artificial Sequence
  Description of Artificial Sequence: Synthetic oligonucleotide
gcucccaguaccuguccag

SEQ ID NO: 1954352 - RNA, 19 nt, Artificial Sequence
  Description of Artificial Sequence: Synthetic oligonucleotide
gcaguauggggcaccgagg

SEQ ID NO: 1954353 - RNA, 19 nt, Artificial Sequence
  Description of Artificial Sequence: Synthetic oligonucleotide
auacucccggcaggaauug

SEQ ID NO: 1954354 - RNA, 19 nt, Artificial Sequence
  Description of Artificial Sequence: Synthetic oligonucleotide
caguccuccgaggcgcugg

SEQ ID NO: 1954355 - RNA, 19 nt, Artificial Sequence
  Description of Artificial Sequence: Synthetic oligonucleotide
gcgugauauaguggggccg

SEQ ID NO: 1954356 - RNA, 19 nt, Artificial Sequence
  Description of Artificial Sequence: Synthetic oligonucleotide
gauacucccggcaggaauu

SEQ ID NO: 1954357 - RNA, 19 nt, Artificial Sequence
  Description of Artificial Sequence: Synthetic oligonucleotide
gugcgcucauuggggaugg

SEQ ID NO: 1954358 - RNA, 19 nt, Artificial Sequence
  Description of Artificial Sequence: Synthetic oligonucleotide
ccaguaccuguccagagca

SEQ ID NO: 1954359 - RNA, 19 nt, Artificial Sequence
  Description of Artificial Sequence: Synthetic oligonucleotide
aagauacucccggcaggaa

SEQ ID NO: 1954360 - RNA, 19 nt, Artificial Sequence
  Description of Artificial Sequence: Synthetic oligonucleotide
ucccggcaggaauugucaa

SEQ ID NO: 1954361 - RNA, 19 nt, Artificial Sequence
  Description of Artificial Sequence: Synthetic oligonucleotide
cgucauagcagucggccag

SEQ ID NO: 1954362 - RNA, 19 nt, Artificial Sequence
  Description of Artificial Sequence: Synthetic oligonucleotide
uggucugguugaugcugac

SEQ ID NO: 1954363 - RNA, 19 nt, Artificial Sequence
  Description of Artificial Sequence: Synthetic oligonucleotide
ucggccagguaggacucca

SEQ ID NO: 1954364 - RNA, 19 nt, Artificial Sequence
  Description of Artificial Sequence: Synthetic oligonucleotide
ugcggaaucggaggacaau

SEQ ID NO: 1954365 - RNA, 19 nt, Artificial Sequence
  Description of Artificial Sequence: Synthetic oligonucleotide
cucggcauagcggcgcgug

SEQ ID NO: 1954366 - RNA, 19 nt, Artificial Sequence
  Description of Artificial Sequence: Synthetic oligonucleotide
acuccaccgacgccuucca

SEQ ID NO: 1954367 - RNA, 19 nt, Artificial Sequence
  Description of Artificial Sequence: Synthetic oligonucleotide
ugcggacccaugacagcau

SEQ ID NO: 1954368 - RNA, 19 nt, Artificial Sequence
  Description of Artificial Sequence: Synthetic oligonucleotide
cccaguaccuguccagagc

SEQ ID NO: 1954369 - RNA, 19 nt, Artificial Sequence
  Description of Artificial Sequence: Synthetic oligonucleotide
cccacgcugggcaguaugg

SEQ ID NO: 1954370 - RNA, 19 nt, Artificial Sequence
  Description of Artificial Sequence: Synthetic oligonucleotide
uugcugucgucagcagccc

SEQ ID NO: 1954371 - RNA, 19 nt, Artificial Sequence
  Description of Artificial Sequence: Synthetic oligonucleotide
aucggaggacaauguggau

SEQ ID NO: 1954372 - RNA, 19 nt, Artificial Sequence
  Description of Artificial Sequence: Synthetic oligonucleotide
cagcaucaugucguaguug

SEQ ID NO: 1954373 - RNA, 19 nt, Artificial Sequence
  Description of Artificial Sequence: Synthetic oligonucleotide
acaucccucuucgaugcaa

SEQ ID NO: 1954374 - RNA, 19 nt, Artificial Sequence
  Description of Artificial Sequence: Synthetic oligonucleotide
gcugacaagggcagacgag

SEQ ID NO: 1954375 - RNA, 19 nt, Artificial Sequence
  Description of Artificial Sequence: Synthetic oligonucleotide
gcaauggcgucauagcagu

SEQ ID NO: 1954376 - RNA, 19 nt, Artificial Sequence
  Description of Artificial Sequence: Synthetic oligonucleotide
cacgagcugcuccuuccug

SEQ ID NO: 1954377 - RNA, 19 nt, Artificial Sequence
  Description of Artificial Sequence: Synthetic oligonucleotide
gaauugucaaggagcgcgu

SEQ ID NO: 1954378 - RNA, 19 nt, Artificial Sequence
  Description of Artificial Sequence: Synthetic oligonucleotide
ugccagcacucgguggaag

SEQ ID NO: 1954379 - RNA, 19 nt, Artificial Sequence
  Description of Artificial Sequence: Synthetic oligonucleotide
ucggcccuggcuggcagug

SEQ ID NO: 1954380 - RNA, 19 nt, Artificial Sequence
  Description of Artificial Sequence: Synthetic oligonucleotide
cagguaggacuccaggugu

SEQ ID NO: 1954381 - RNA, 19 nt, Artificial Sequence
  Description of Artificial Sequence: Synthetic oligonucleotide
uaguggggccgcgugucca

SEQ ID NO: 1954382 - RNA, 19 nt, Artificial Sequence
  Description of Artificial Sequence: Synthetic oligonucleotide
uccaguccuccgaggcgcu

SEQ ID NO: 1954383 - RNA, 19 nt, Artificial Sequence
  Description of Artificial Sequence: Synthetic oligonucleotide
ggugcgcucauuggggaug

SEQ ID NO: 1954384 - RNA, 19 nt, Artificial Sequence
  Description of Artificial Sequence: Synthetic oligonucleotide
ucgaugcaaugcugcggaa

SEQ ID NO: 1954385 - RNA, 19 nt, Artificial Sequence
  Description of Artificial Sequence: Synthetic oligonucleotide
caauggcgucauagcaguc

SEQ ID NO: 1954386 - RNA, 19 nt, Artificial Sequence
  Description of Artificial Sequence: Synthetic oligonucleotide
ugcugcggaaucggaggac

SEQ ID NO: 1954387 - RNA, 19 nt, Artificial Sequence
  Description of Artificial Sequence: Synthetic oligonucleotide
gccuccgagguucgguggg

SEQ ID NO: 1954388 - RNA, 19 nt, Artificial Sequence
  Description of Artificial Sequence: Synthetic oligonucleotide
ccgcgcauugagcagcugc

SEQ ID NO: 1954389 - RNA, 19 nt, Artificial Sequence
  Description of Artificial Sequence: Synthetic oligonucleotide
cuuccccucgaagucgcuc

SEQ ID NO: 1954390 - RNA, 19 nt, Artificial Sequence
  Description of Artificial Sequence: Synthetic oligonucleotide
gcgcgugauauaguggggc

SEQ ID NO: 1954391 - RNA, 19 nt, Artificial Sequence
  Description of Artificial Sequence: Synthetic oligonucleotide
agcgaugguagagcuggau

SEQ ID NO: 1954392 - RNA, 19 nt, Artificial Sequence
  Description of Artificial Sequence: Synthetic oligonucleotide
ucauggcgagcgugcggac

SEQ ID NO: 1954393 - RNA, 19 nt, Artificial Sequence
  Description of Artificial Sequence: Synthetic oligonucleotide
cgugauauaguggggccgc

SEQ ID NO: 1954394 - RNA, 19 nt, Artificial Sequence
  Description of Artificial Sequence: Synthetic oligonucleotide
gcgugcggacccaugacag

SEQ ID NO: 1954395 - RNA, 19 nt, Artificial Sequence
  Description of Artificial Sequence: Synthetic oligonucleotide
gcauuacauccugacucag

SEQ ID NO: 1954396 - RNA, 19 nt, Artificial Sequence
  Description of Artificial Sequence: Synthetic oligonucleotide
cucgguggaagcgauggua

SEQ ID NO: 1954397 - RNA, 19 nt, Artificial Sequence
  Description of Artificial Sequence: Synthetic oligonucleotide
cccggcaggaauugucaag

SEQ ID NO: 1954398 - RNA, 19 nt, Artificial Sequence
  Description of Artificial Sequence: Synthetic oligonucleotide
cauugagcagcugcuggaa

SEQ ID NO: 1954399 - RNA, 19 nt, Artificial Sequence
  Description of Artificial Sequence: Synthetic oligonucleotide
ggacaaaguucuccaccuc

SEQ ID NO: 1954400 - RNA, 19 nt, Artificial Sequence
  Description of Artificial Sequence: Synthetic oligonucleotide
gcugucgucagcagcccgc

SEQ ID NO: 1954401 - RNA, 19 nt, Artificial Sequence
  Description of Artificial Sequence: Synthetic oligonucleotide
gggucgguggugcggacac

SEQ ID NO: 1954402 - RNA, 19 nt, Artificial Sequence
  Description of Artificial Sequence: Synthetic oligonucleotide
ggccuccgagguucggugg

SEQ ID NO: 1954403 - RNA, 19 nt, Artificial Sequence
  Description of Artificial Sequence: Synthetic oligonucleotide
ccguuucgaaaguugguga

SEQ ID NO: 1954404 - RNA, 19 nt, Artificial Sequence
  Description of Artificial Sequence: Synthetic oligonucleotide
gacaucccucuucgaugca

SEQ ID NO: 1954405 - RNA, 19 nt, Artificial Sequence
  Description of Artificial Sequence: Synthetic oligonucleotide
cgcgugauauaguggggcc

SEQ ID NO: 1954406 - RNA, 19 nt, Artificial Sequence
  Description of Artificial Sequence: Synthetic oligonucleotide
ccucuucgaugcaaugcug

SEQ ID NO: 1954407 - RNA, 19 nt, Artificial Sequence
  Description of Artificial Sequence: Synthetic oligonucleotide
uagcggcgcgugauauagu

SEQ ID NO: 1954408 - RNA, 19 nt, Artificial Sequence
  Description of Artificial Sequence: Synthetic oligonucleotide
ugguuccguuucgaaaguu

SEQ ID NO: 1954409 - RNA, 19 nt, Artificial Sequence
  Description of Artificial Sequence: Synthetic oligonucleotide
ggcugcggaagagagcuuc

SEQ ID NO: 1954410 - RNA, 19 nt, Artificial Sequence
  Description of Artificial Sequence: Synthetic oligonucleotide
gggcagacgagaacucggc

SEQ ID NO: 1954411 - RNA, 19 nt, Artificial Sequence
  Description of Artificial Sequence: Synthetic oligonucleotide
ggcagacgagaacucggca

SEQ ID NO: 1954412 - RNA, 19 nt, Artificial Sequence
  Description of Artificial Sequence: Synthetic oligonucleotide
gcguguccaguccuccgag

SEQ ID NO: 1954413 - RNA, 19 nt, Artificial Sequence
  Description of Artificial Sequence: Synthetic oligonucleotide
ggauaccucugcuccccac

SEQ ID NO: 1954414 - RNA, 19 nt, Artificial Sequence
  Description of Artificial Sequence: Synthetic oligonucleotide
ggcgcgugauauagugggg

SEQ ID NO: 1954415 - RNA, 19 nt, Artificial Sequence
  Description of Artificial Sequence: Synthetic oligonucleotide
gggccuccgagguucggug

SEQ ID NO: 1954416 - RNA, 19 nt, Artificial Sequence
  Description of Artificial Sequence: Synthetic oligonucleotide
gcagacgagaacucggcau

SEQ ID NO: 1954417 - RNA, 19 nt, Artificial Sequence
  Description of Artificial Sequence: Synthetic oligonucleotide
cucccaguaccuguccaga

SEQ ID NO: 1954418 - RNA, 19 nt, Artificial Sequence
  Description of Artificial Sequence: Synthetic oligonucleotide
gggagacagcaacucuuca

SEQ ID NO: 1954419 - RNA, 19 nt, Artificial Sequence
  Description of Artificial Sequence: Synthetic oligonucleotide
ggggagacagcaacucuuc

SEQ ID NO: 1954420 - RNA, 19 nt, Artificial Sequence
  Description of Artificial Sequence: Synthetic oligonucleotide
agcacucgguggaagcgau

SEQ ID NO: 1954421 - RNA, 19 nt, Artificial Sequence
  Description of Artificial Sequence: Synthetic oligonucleotide
agagagcuucaaacggaua

SEQ ID NO: 1954422 - RNA, 19 nt, Artificial Sequence
  Description of Artificial Sequence: Synthetic oligonucleotide
acuccgcauuacauccuga

SEQ ID NO: 1954423 - RNA, 19 nt, Artificial Sequence
  Description of Artificial Sequence: Synthetic oligonucleotide
gcugcggaaucggaggaca

SEQ ID NO: 1954424 - RNA, 19 nt, Artificial Sequence
  Description of Artificial Sequence: Synthetic oligonucleotide
ccgacgccuuccaggaacc

SEQ ID NO: 1954425 - RNA, 19 nt, Artificial Sequence
  Description of Artificial Sequence: Synthetic oligonucleotide
agcagucggccagguagga

SEQ ID NO: 1954426 - RNA, 19 nt, Artificial Sequence
  Description of Artificial Sequence: Synthetic oligonucleotide
cagcaacucuucaaugaau

SEQ ID NO: 1954427 - RNA, 19 nt, Artificial Sequence
  Description of Artificial Sequence: Synthetic oligonucleotide
cagcccgcuccaucagcac

SEQ ID NO: 1954428 - RNA, 19 nt, Artificial Sequence
  Description of Artificial Sequence: Synthetic oligonucleotide
gcggacccaugacagcaug

SEQ ID NO: 1954429 - RNA, 19 nt, Artificial Sequence
  Description of Artificial Sequence: Synthetic oligonucleotide
cauagcggcgcgugauaua

SEQ ID NO: 1954430 - RNA, 19 nt, Artificial Sequence
  Description of Artificial Sequence: Synthetic oligonucleotide
cggacccaugacagcaugg

SEQ ID NO: 1954431 - RNA, 19 nt, Artificial Sequence
  Description of Artificial Sequence: Synthetic oligonucleotide
ccacgcucaaucaaagccu

SEQ ID NO: 1954432 - RNA, 19 nt, Artificial Sequence
  Description of Artificial Sequence: Synthetic oligonucleotide
ccaccgacgccuuccagga

SEQ ID NO: 1954433 - RNA, 19 nt, Artificial Sequence
  Description of Artificial Sequence: Synthetic oligonucleotide
gcggcgcgugauauagugg

SEQ ID NO: 1954434 - RNA, 19 nt, Artificial Sequence
  Description of Artificial Sequence: Synthetic oligonucleotide
cugcggaaucggaggacaa

SEQ ID NO: 1954435 - RNA, 19 nt, Artificial Sequence
  Description of Artificial Sequence: Synthetic oligonucleotide
cguuucgaaaguuggugaa

SEQ ID NO: 1954436 - RNA, 19 nt, Artificial Sequence
  Description of Artificial Sequence: Synthetic oligonucleotide
cagcacucgguggaagcga

SEQ ID NO: 1954437 - RNA, 19 nt, Artificial Sequence
  Description of Artificial Sequence: Synthetic oligonucleotide
acgcucaaucaaagccuca

SEQ ID NO: 1954438 - RNA, 19 nt, Artificial Sequence
  Description of Artificial Sequence: Synthetic oligonucleotide
agguaggacuccagguguu

SEQ ID NO: 1954439 - RNA, 19 nt, Artificial Sequence
  Description of Artificial Sequence: Synthetic oligonucleotide
caucccucuucgaugcaau

SEQ ID NO: 1954440 - RNA, 19 nt, Artificial Sequence
  Description of Artificial Sequence: Synthetic oligonucleotide
ggucugguugaugcugaca

SEQ ID NO: 1954441 - RNA, 19 nt, Artificial Sequence
  Description of Artificial Sequence: Synthetic oligonucleotide
cguguccaguccuccgagg

SEQ ID NO: 1954442 - RNA, 19 nt, Artificial Sequence
  Description of Artificial Sequence: Synthetic oligonucleotide
cauagcagucggccaggua

SEQ ID NO: 1954443 - RNA, 19 nt, Artificial Sequence
  Description of Artificial Sequence: Synthetic oligonucleotide
cugguuccguuucgaaagu

SEQ ID NO: 1954444 - RNA, 19 nt, Artificial Sequence
  Description of Artificial Sequence: Synthetic oligonucleotide
gcccgcuccaucagcacac

SEQ ID NO: 1954445 - RNA, 19 nt, Artificial Sequence
  Description of Artificial Sequence: Synthetic oligonucleotide
gcaaugcugcggaaucgga

SEQ ID NO: 1954446 - RNA, 19 nt, Artificial Sequence
  Description of Artificial Sequence: Synthetic oligonucleotide
gcagcccgcuccaucagca

SEQ ID NO: 1954447 - RNA, 19 nt, Artificial Sequence
  Description of Artificial Sequence: Synthetic oligonucleotide
auggggcaccgaggauggg

SEQ ID NO: 1954448 - RNA, 19 nt, Artificial Sequence
  Description of Artificial Sequence: Synthetic oligonucleotide
gcagugcccgcagcugcgg

SEQ ID NO: 1954449 - RNA, 19 nt, Artificial Sequence
  Description of Artificial Sequence: Synthetic oligonucleotide
ccgcguguccaguccuccg

SEQ ID NO: 1954450 - RNA, 19 nt, Artificial Sequence
  Description of Artificial Sequence: Synthetic oligonucleotide
cgugcggacccaugacagc

SEQ ID NO: 1954451 - RNA, 19 nt, Artificial Sequence
  Description of Artificial Sequence: Synthetic oligonucleotide
gcguagugcuggcugcgga

SEQ ID NO: 1954452 - RNA, 19 nt, Artificial Sequence
  Description of Artificial Sequence: Synthetic oligonucleotide
gcgcguagugcuggcugcg

SEQ ID NO: 1954453 - RNA, 19 nt, Artificial Sequence
  Description of Artificial Sequence: Synthetic oligonucleotide
cagggacaucccucuucga

SEQ ID NO: 1954454 - RNA, 19 nt, Artificial Sequence
  Description of Artificial Sequence: Synthetic oligonucleotide
ccuguccacgcucaaucaa

SEQ ID NO: 1954455 - RNA, 19 nt, Artificial Sequence
  Description of Artificial Sequence: Synthetic oligonucleotide
gaaacacgagcugcuccuu

SEQ ID NO: 1954456 - RNA, 19 nt, Artificial Sequence
  Description of Artificial Sequence: Synthetic oligonucleotide
uccgcgcauugagcagcug

SEQ ID NO: 1954457 - RNA, 19 nt, Artificial Sequence
  Description of Artificial Sequence: Synthetic oligonucleotide
acggaucagcugagugacu

SEQ ID NO: 1954458 - RNA, 19 nt, Artificial Sequence
  Description of Artificial Sequence: Synthetic oligonucleotide
uggcugcggaagagagcuu

SEQ ID NO: 1954459 - RNA, 19 nt, Artificial Sequence
  Description of Artificial Sequence: Synthetic oligonucleotide
gcgcauugagcagcugcug

SEQ ID NO: 1954460 - RNA, 19 nt, Artificial Sequence
  Description of Artificial Sequence: Synthetic oligonucleotide
cugcggaagagagcuucaa

SEQ ID NO: 1954461 - RNA, 19 nt, Artificial Sequence
  Description of Artificial Sequence: Synthetic oligonucleotide
gcggacacucuggacguuc

SEQ ID NO: 1954462 - RNA, 19 nt, Artificial Sequence
  Description of Artificial Sequence: Synthetic oligonucleotide
ugacggggaucuggugguu

SEQ ID NO: 1954463 - RNA, 19 nt, Artificial Sequence
  Description of Artificial Sequence: Synthetic oligonucleotide
gccaacaccugcucccagu

SEQ ID NO: 1954464 - RNA, 19 nt, Artificial Sequence
  Description of Artificial Sequence: Synthetic oligonucleotide
ggaaacucuccaccucuuu

SEQ ID NO: 1954465 - RNA, 19 nt, Artificial Sequence
  Description of Artificial Sequence: Synthetic oligonucleotide
ggcauagcggcgcgugaua

SEQ ID NO: 1954466 - RNA, 19 nt, Artificial Sequence
  Description of Artificial Sequence: Synthetic oligonucleotide
cacccagcaucaugucgua

SEQ ID NO: 1954467 - RNA, 19 nt, Artificial Sequence
  Description of Artificial Sequence: Synthetic oligonucleotide
acucggcauagcggcgcgu

SEQ ID NO: 1954468 - RNA, 19 nt, Artificial Sequence
  Description of Artificial Sequence: Synthetic oligonucleotide
uggcgagcgugcggaccca

SEQ ID NO: 1954469 - RNA, 19 nt, Artificial Sequence
  Description of Artificial Sequence: Synthetic oligonucleotide
gcugcggaagagagcuuca

SEQ ID NO: 1954470 - RNA, 19 nt, Artificial Sequence
  Description of Artificial Sequence: Synthetic oligonucleotide
ccgcuccaucagcacaccc

SEQ ID NO: 1954471 - RNA, 19 nt, Artificial Sequence
  Description of Artificial Sequence: Synthetic oligonucleotide
cguaguuguugaucagaaa

SEQ ID NO: 1954472 - RNA, 19 nt, Artificial Sequence
  Description of Artificial Sequence: Synthetic oligonucleotide
gccgcguguccaguccucc

SEQ ID NO: 1954473 - RNA, 19 nt, Artificial Sequence
  Description of Artificial Sequence: Synthetic oligonucleotide
gcagucggccagguaggac

SEQ ID NO: 1954474 - RNA, 19 nt, Artificial Sequence
  Description of Artificial Sequence: Synthetic oligonucleotide
ggaugaugcugguuccguu

SEQ ID NO: 1954475 - RNA, 19 nt, Artificial Sequence
  Description of Artificial Sequence: Synthetic oligonucleotide
ugcgcucauuggggauggu

SEQ ID NO: 1954476 - RNA, 19 nt, Artificial Sequence
  Description of Artificial Sequence: Synthetic oligonucleotide
cgagcgugcggacccauga

SEQ ID NO: 1954477 - RNA, 19 nt, Artificial Sequence
  Description of Artificial Sequence: Synthetic oligonucleotide
ugcggacacucuggacguu

SEQ ID NO: 1954478 - RNA, 19 nt, Artificial Sequence
  Description of Artificial Sequence: Synthetic oligonucleotide
cugcggcugugccagcacu

SEQ ID NO: 1954479 - RNA, 19 nt, Artificial Sequence
  Description of Artificial Sequence: Synthetic oligonucleotide
gcacucgguggaagcgaug

SEQ ID NO: 1954480 - RNA, 19 nt, Artificial Sequence
  Description of Artificial Sequence: Synthetic oligonucleotide
cugucgucagcagcccgcu

SEQ ID NO: 1954481 - RNA, 19 nt, Artificial Sequence
  Description of Artificial Sequence: Synthetic oligonucleotide
gggagaugacggggaucug

SEQ ID NO: 1954482 - RNA, 19 nt, Artificial Sequence
  Description of Artificial Sequence: Synthetic oligonucleotide
cccgcagcugcggcugugc

SEQ ID NO: 1954483 - RNA, 19 nt, Artificial Sequence
  Description of Artificial Sequence: Synthetic oligonucleotide
cauuggggauggucugguu

SEQ ID NO: 1954484 - RNA, 19 nt, Artificial Sequence
  Description of Artificial Sequence: Synthetic oligonucleotide
ggggucgguggugcggaca

SEQ ID NO: 1954485 - RNA, 19 nt, Artificial Sequence
  Description of Artificial Sequence: Synthetic oligonucleotide
gcauagcggcgcgugauau

SEQ ID NO: 1954486 - RNA, 19 nt, Artificial Sequence
  Description of Artificial Sequence: Synthetic oligonucleotide
cggaaucggaggacaaugu

SEQ ID NO: 1954487 - RNA, 19 nt, Artificial Sequence
  Description of Artificial Sequence: Synthetic oligonucleotide
cgcguagugcuggcugcgg

SEQ ID NO: 1954488 - RNA, 19 nt, Artificial Sequence
  Description of Artificial Sequence: Synthetic oligonucleotide
ccccucgaagucgcucagc

SEQ ID NO: 1954489 - RNA, 19 nt, Artificial Sequence
  Description of Artificial Sequence: Synthetic oligonucleotide
cggacacucuggacguuca

SEQ ID NO: 1954490 - RNA, 19 nt, Artificial Sequence
  Description of Artificial Sequence: Synthetic oligonucleotide
gguaggacuccagguguuu

SEQ ID NO: 1954491 - RNA, 19 nt, Artificial Sequence
  Description of Artificial Sequence: Synthetic oligonucleotide
cgcgcauugagcagcugcu

SEQ ID NO: 1954492 - RNA, 19 nt, Artificial Sequence
  Description of Artificial Sequence: Synthetic oligonucleotide
ggagaacuccgcagccacu

SEQ ID NO: 1954493 - RNA, 19 nt, Artificial Sequence
  Description of Artificial Sequence: Synthetic oligonucleotide
gcgagcgugcggacccaug

SEQ ID NO: 1954494 - RNA, 19 nt, Artificial Sequence
  Description of Artificial Sequence: Synthetic oligonucleotide
cgcguguccaguccuccga

SEQ ID NO: 1954495 - RNA, 19 nt, Artificial Sequence
  Description of Artificial Sequence: Synthetic oligonucleotide
cccgcuccaucagcacacc

SEQ ID NO: 1954496 - RNA, 19 nt, Artificial Sequence
  Description of Artificial Sequence: Synthetic oligonucleotide
uccccacgcugggcaguau

SEQ ID NO: 1954497 - RNA, 19 nt, Artificial Sequence
  Description of Artificial Sequence: Synthetic oligonucleotide
ggacacucuggacguucau

SEQ ID NO: 1954498 - RNA, 19 nt, Artificial Sequence
  Description of Artificial Sequence: Synthetic oligonucleotide
guccgcgcauugagcagcu

SEQ ID NO: 1954499 - RNA, 19 nt, Artificial Sequence
  Description of Artificial Sequence: Synthetic oligonucleotide
cuccccacgcugggcagua

SEQ ID NO: 1954500 - RNA, 19 nt, Artificial Sequence
  Description of Artificial Sequence: Synthetic oligonucleotide
caccgacgccuuccaggaa

SEQ ID NO: 1954501 - RNA, 19 nt, Artificial Sequence
  Description of Artificial Sequence: Synthetic oligonucleotide
cucggcccuggcuggcagu

SEQ ID NO: 1954502 - RNA, 19 nt, Artificial Sequence
  Description of Artificial Sequence: Synthetic oligonucleotide
cgccuuccaggaaccacca

SEQ ID NO: 1954503 - RNA, 19 nt, Artificial Sequence
  Description of Artificial Sequence: Synthetic oligonucleotide
cggcaggaauugucaagga

SEQ ID NO: 1954504 - RNA, 19 nt, Artificial Sequence
  Description of Artificial Sequence: Synthetic oligonucleotide
gggccgcguguccaguccu

SEQ ID NO: 1954505 - RNA, 19 nt, Artificial Sequence
  Description of Artificial Sequence: Synthetic oligonucleotide
ggccgcguguccaguccuc

SEQ ID NO: 1954506 - RNA, 19 nt, Artificial Sequence
  Description of Artificial Sequence: Synthetic oligonucleotide
ggggccuccgagguucggu

SEQ ID NO: 1954507 - RNA, 19 nt, Artificial Sequence
  Description of Artificial Sequence: Synthetic oligonucleotide
ggagcgcguagugcuggcu

SEQ ID NO: 1954508 - RNA, 19 nt, Artificial Sequence
  Description of Artificial Sequence: Synthetic oligonucleotide
ccaugaggugaugaauguu

SEQ ID NO: 1954509 - RNA, 19 nt, Artificial Sequence
  Description of Artificial Sequence: Synthetic oligonucleotide
gggcaguauggggcaccga

SEQ ID NO: 1954510 - RNA, 19 nt, Artificial Sequence
  Description of Artificial Sequence: Synthetic oligonucleotide
gcccgcagcugcggcugug

SEQ ID NO: 1954511 - RNA, 19 nt, Artificial Sequence
  Description of Artificial Sequence: Synthetic oligonucleotide
ggucgguggugcggacacu

SEQ ID NO: 1954512 - RNA, 19 nt, Artificial Sequence
  Description of Artificial Sequence: Synthetic oligonucleotide
cgacgccuuccaggaacca

SEQ ID NO: 1954513 - RNA, 19 nt, Artificial Sequence
  Description of Artificial Sequence: Synthetic oligonucleotide
ggcgagcgugcggacccau

SEQ ID NO: 1954514 - RNA, 19 nt, Artificial Sequence
  Description of Artificial Sequence: Synthetic oligonucleotide
cauaaaauaacuuaguccg

SEQ ID NO: 1954515 - RNA, 19 nt, Artificial Sequence
  Description of Artificial Sequence: Synthetic oligonucleotide
aaauaaguugacuuaaggc

SEQ ID NO: 1954516 - RNA, 19 nt, Artificial Sequence
  Description of Artificial Sequence: Synthetic oligonucleotide
aaagucaucuccuagcccc

SEQ ID NO: 1954517 - RNA, 19 nt, Artificial Sequence
  Description of Artificial Sequence: Synthetic oligonucleotide
aauaaguugacuuaaggca

SEQ ID NO: 1954518 - RNA, 19 nt, Artificial Sequence
  Description of Artificial Sequence: Synthetic oligonucleotide
aaaaccaaacuauugcuac

SEQ ID NO: 1954519 - RNA, 19 nt, Artificial Sequence
  Description of Artificial Sequence: Synthetic oligonucleotide
aauacauuaaccuguagcu

SEQ ID NO: 1954520 - RNA, 19 nt, Artificial Sequence
  Description of Artificial Sequence: Synthetic oligonucleotide
uauugcuacacauuuaagg

SEQ ID NO: 1954521 - RNA, 19 nt, Artificial Sequence
  Description of Artificial Sequence: Synthetic oligonucleotide
uuuaauguaacucagccau

SEQ ID NO: 1954522 - RNA, 19 nt, Artificial Sequence
  Description of Artificial Sequence: Synthetic oligonucleotide
uauuuaauguaacucagcc

SEQ ID NO: 1954523 - RNA, 19 nt, Artificial Sequence
  Description of Artificial Sequence: Synthetic oligonucleotide
uauaauaaaauuucugaga

SEQ ID NO: 1954524 - RNA, 19 nt, Artificial Sequence
  Description of Artificial Sequence: Synthetic oligonucleotide
ucgacauugagcaacuugg

SEQ ID NO: 1954525 - RNA, 19 nt, Artificial Sequence
  Description of Artificial Sequence: Synthetic oligonucleotide
uuagauuucuguuucaaca

SEQ ID NO: 1954526 - RNA, 19 nt, Artificial Sequence
  Description of Artificial Sequence: Synthetic oligonucleotide
uuauuuuagauauugugcu

SEQ ID NO: 1954527 - RNA, 19 nt, Artificial Sequence
  Description of Artificial Sequence: Synthetic oligonucleotide
uguaguugaacucacucag

SEQ ID NO: 1954528 - RNA, 19 nt, Artificial Sequence
  Description of Artificial Sequence: Synthetic oligonucleotide
agauuaaucacuggaaccc

SEQ ID NO: 1954529 - RNA, 19 nt, Artificial Sequence
  Description of Artificial Sequence: Synthetic oligonucleotide
auaauaaaauuucugagaa

SEQ ID NO: 1954530 - RNA, 19 nt, Artificial Sequence
  Description of Artificial Sequence: Synthetic oligonucleotide
ugaguaacuacaaagguau

SEQ ID NO: 1954531 - RNA, 19 nt, Artificial Sequence
  Description of Artificial Sequence: Synthetic oligonucleotide
uaagguuucaacaaagcaa

SEQ ID NO: 1954532 - RNA, 19 nt, Artificial Sequence
  Description of Artificial Sequence: Synthetic oligonucleotide
uucauaucauaaaauaacu

SEQ ID NO: 1954533 - RNA, 19 nt, Artificial Sequence
  Description of Artificial Sequence: Synthetic oligonucleotide
agaauuuaacaucucauca

SEQ ID NO: 1954534 - RNA, 19 nt, Artificial Sequence
  Description of Artificial Sequence: Synthetic oligonucleotide
uuaagguuucaacaaagca

SEQ ID NO: 1954535 - RNA, 19 nt, Artificial Sequence
  Description of Artificial Sequence: Synthetic oligonucleotide
auaaauaaccuuucauauc

SEQ ID NO: 1954536 - RNA, 19 nt, Artificial Sequence
  Description of Artificial Sequence: Synthetic oligonucleotide
auugcuacacauuuaaggu

SEQ ID NO: 1954537 - RNA, 19 nt, Artificial Sequence
  Description of Artificial Sequence: Synthetic oligonucleotide
uguaauccuugcaucagcg

SEQ ID NO: 1954538 - RNA, 19 nt, Artificial Sequence
  Description of Artificial Sequence: Synthetic oligonucleotide
uucaacaaagcaauauuug

SEQ ID NO: 1954539 - RNA, 19 nt, Artificial Sequence
  Description of Artificial Sequence: Synthetic oligonucleotide
ucccuuuugacuuagauuu

SEQ ID NO: 1954540 - RNA, 19 nt, Artificial Sequence
  Description of Artificial Sequence: Synthetic oligonucleotide
ugcaauuugguucaguuau

SEQ ID NO: 1954541 - RNA, 19 nt, Artificial Sequence
  Description of Artificial Sequence: Synthetic oligonucleotide
accaguuuauuuuagauau

SEQ ID NO: 1954542 - RNA, 19 nt, Artificial Sequence
  Description of Artificial Sequence: Synthetic oligonucleotide
uuauuuucaccucugucca

SEQ ID NO: 1954543 - RNA, 19 nt, Artificial Sequence
  Description of Artificial Sequence: Synthetic oligonucleotide
ucaguuauuuccauugaga

SEQ ID NO: 1954544 - RNA, 19 nt, Artificial Sequence
  Description of Artificial Sequence: Synthetic oligonucleotide
gagauuaaucacuggaacc

SEQ ID NO: 1954545 - RNA, 19 nt, Artificial Sequence
  Description of Artificial Sequence: Synthetic oligonucleotide
acaaagguauuucaaaacu

SEQ ID NO: 1954546 - RNA, 19 nt, Artificial Sequence
  Description of Artificial Sequence: Synthetic oligonucleotide
caaauaaguugacuuaagg

SEQ ID NO: 1954547 - RNA, 19 nt, Artificial Sequence
  Description of Artificial Sequence: Synthetic oligonucleotide
aauuauuccauaccaguuu

SEQ ID NO: 1954548 - RNA, 19 nt, Artificial Sequence
  Description of Artificial Sequence: Synthetic oligonucleotide
aaacuauugcuacacauuu

SEQ ID NO: 1954549 - RNA, 19 nt, Artificial Sequence
  Description of Artificial Sequence: Synthetic oligonucleotide
uuaaccuguagcuuuaaaa

SEQ ID NO: 1954550 - RNA, 19 nt, Artificial Sequence
  Description of Artificial Sequence: Synthetic oligonucleotide
cauugagaugccaucaccg

SEQ ID NO: 1954551 - RNA, 19 nt, Artificial Sequence
  Description of Artificial Sequence: Synthetic oligonucleotide
guugaacucacucagcccc

SEQ ID NO: 1954552 - RNA, 19 nt, Artificial Sequence
  Description of Artificial Sequence: Synthetic oligonucleotide
gaugccaucaccguucggg

SEQ ID NO: 1954553 - RNA, 19 nt, Artificial Sequence
  Description of Artificial Sequence: Synthetic oligonucleotide
auuuuagauauugugcuuc

SEQ ID NO: 1954554 - RNA, 19 nt, Artificial Sequence
  Description of Artificial Sequence: Synthetic oligonucleotide
aacuuaguccgauuuauaa

SEQ ID NO: 1954555 - RNA, 19 nt, Artificial Sequence
  Description of Artificial Sequence: Synthetic oligonucleotide
uaguugaacucacucagcc

SEQ ID NO: 1954556 - RNA, 19 nt, Artificial Sequence
  Description of Artificial Sequence: Synthetic oligonucleotide
cuugcaucagcguagggag

SEQ ID NO: 1954557 - RNA, 19 nt, Artificial Sequence
  Description of Artificial Sequence: Synthetic oligonucleotide
uuuggcuuauuuaauguaa

SEQ ID NO: 1954558 - RNA, 19 nt, Artificial Sequence
  Description of Artificial Sequence: Synthetic oligonucleotide
uaaccuguagcuuuaaaau

SEQ ID NO: 1954559 - RNA, 19 nt, Artificial Sequence
  Description of Artificial Sequence: Synthetic oligonucleotide
ugagaauuuaacaucucau

SEQ ID NO: 1954560 - RNA, 19 nt, Artificial Sequence
  Description of Artificial Sequence: Synthetic oligonucleotide
aauuccuccaaagucauau

SEQ ID NO: 1954561 - RNA, 19 nt, Artificial Sequence
  Description of Artificial Sequence: Synthetic oligonucleotide
gauccuuccacugugauga

SEQ ID NO: 1954562 - RNA, 19 nt, Artificial Sequence
  Description of Artificial Sequence: Synthetic oligonucleotide
gacauugagcaacuuggcg

SEQ ID NO: 1954563 - RNA, 19 nt, Artificial Sequence
  Description of Artificial Sequence: Synthetic oligonucleotide
acaauuaauccuuuucacu

SEQ ID NO: 1954564 - RNA, 19 nt, Artificial Sequence
  Description of Artificial Sequence: Synthetic oligonucleotide
uaaguugacuuaaggcagg

SEQ ID NO: 1954565 - RNA, 19 nt, Artificial Sequence
  Description of Artificial Sequence: Synthetic oligonucleotide
uagauauugugcuucaaaa

SEQ ID NO: 1954566 - RNA, 19 nt, Artificial Sequence
  Description of Artificial Sequence: Synthetic oligonucleotide
ucguucucgcagcagaacg

SEQ ID NO: 1954567 - RNA, 19 nt, Artificial Sequence
  Description of Artificial Sequence: Synthetic oligonucleotide
augaggguaaaauggaucu

SEQ ID NO: 1954568 - RNA, 19 nt, Artificial Sequence
  Description of Artificial Sequence: Synthetic oligonucleotide
uuagauauugugcuucaaa

SEQ ID NO: 1954569 - RNA, 19 nt, Artificial Sequence
  Description of Artificial Sequence: Synthetic oligonucleotide
uacaauuaauccuuuucac

SEQ ID NO: 1954570 - RNA, 19 nt, Artificial Sequence
  Description of Artificial Sequence: Synthetic oligonucleotide
aguugaacucacucagccc

SEQ ID NO: 1954571 - RNA, 19 nt, Artificial Sequence
  Description of Artificial Sequence: Synthetic oligonucleotide
acuauugcuacacauuuaa

SEQ ID NO: 1954572 - RNA, 19 nt, Artificial Sequence
  Description of Artificial Sequence: Synthetic oligonucleotide
auguugaugucguucucgc

SEQ ID NO: 1954573 - RNA, 19 nt, Artificial Sequence
  Description of Artificial Sequence: Synthetic oligonucleotide
uguaacucagccauccuaa

SEQ ID NO: 1954574 - RNA, 19 nt, Artificial Sequence
  Description of Artificial Sequence: Synthetic oligonucleotide
ugcaaagucaucuccuagc

SEQ ID NO: 1954575 - RNA, 19 nt, Artificial Sequence
  Description of Artificial Sequence: Synthetic oligonucleotide
uguagcuuuaaaauacaau

SEQ ID NO: 1954576 - RNA, 19 nt, Artificial Sequence
  Description of Artificial Sequence: Synthetic oligonucleotide
ucggggucgacauugagca

SEQ ID NO: 1954577 - RNA, 19 nt, Artificial Sequence
  Description of Artificial Sequence: Synthetic oligonucleotide
uccgauuuauaauaaaauu

SEQ ID NO: 1954578 - RNA, 19 nt, Artificial Sequence
  Description of Artificial Sequence: Synthetic oligonucleotide
auaaguugacuuaaggcag

SEQ ID NO: 1954579 - RNA, 19 nt, Artificial Sequence
  Description of Artificial Sequence: Synthetic oligonucleotide
uccuaaaucaacaguuuuc

SEQ ID NO: 1954580 - RNA, 19 nt, Artificial Sequence
  Description of Artificial Sequence: Synthetic oligonucleotide
aagguuucaacaaagcaau

SEQ ID NO: 1954581 - RNA, 19 nt, Artificial Sequence
  Description of Artificial Sequence: Synthetic oligonucleotide
aauaacuuaguccgauuua

SEQ ID NO: 1954582 - RNA, 19 nt, Artificial Sequence
  Description of Artificial Sequence: Synthetic oligonucleotide
auuuaauguaacucagcca

SEQ ID NO: 1954583 - RNA, 19 nt, Artificial Sequence
  Description of Artificial Sequence: Synthetic oligonucleotide
aguuauuuccauugagaug

SEQ ID NO: 1954584 - RNA, 19 nt, Artificial Sequence
  Description of Artificial Sequence: Synthetic oligonucleotide
cacauuuaagguuucaaca

SEQ ID NO: 1954585 - RNA, 19 nt, Artificial Sequence
  Description of Artificial Sequence: Synthetic oligonucleotide
gauuucuguuucaacacag

SEQ ID NO: 1954586 - RNA, 19 nt, Artificial Sequence
  Description of Artificial Sequence: Synthetic oligonucleotide
ucauaucauaaaauaacuu

SEQ ID NO: 1954587 - RNA, 19 nt, Artificial Sequence
  Description of Artificial Sequence: Synthetic oligonucleotide
aacaguuuucuuucuugca

SEQ ID NO: 1954588 - RNA, 19 nt, Artificial Sequence
  Description of Artificial Sequence: Synthetic oligonucleotide
uuugacuuagauuucuguu

SEQ ID NO: 1954589 - RNA, 19 nt, Artificial Sequence
  Description of Artificial Sequence: Synthetic oligonucleotide
uacauuaaccuguagcuuu

SEQ ID NO: 1954590 - RNA, 19 nt, Artificial Sequence
  Description of Artificial Sequence: Synthetic oligonucleotide
cauugagcaacuuggcggc

SEQ ID NO: 1954591 - RNA, 19 nt, Artificial Sequence
  Description of Artificial Sequence: Synthetic oligonucleotide
aagcaaauaaguugacuua

SEQ ID NO: 1954592 - RNA, 19 nt, Artificial Sequence
  Description of Artificial Sequence: Synthetic oligonucleotide
uuuuagauauugugcuuca

SEQ ID NO: 1954593 - RNA, 19 nt, Artificial Sequence
  Description of Artificial Sequence: Synthetic oligonucleotide
uugacuuagauuucuguuu

SEQ ID NO: 1954594 - RNA, 19 nt, Artificial Sequence
  Description of Artificial Sequence: Synthetic oligonucleotide
aauccuugcaucagcguag

SEQ ID NO: 1954595 - RNA, 19 nt, Artificial Sequence
  Description of Artificial Sequence: Synthetic oligonucleotide
cauauugcaagugcgaguc

SEQ ID NO: 1954596 - RNA, 19 nt, Artificial Sequence
  Description of Artificial Sequence: Synthetic oligonucleotide
aacugcuugaguaacuaca

SEQ ID NO: 1954597 - RNA, 19 nt, Artificial Sequence
  Description of Artificial Sequence: Synthetic oligonucleotide
uaaucacuggaacccacug

SEQ ID NO: 1954598 - RNA, 19 nt, Artificial Sequence
  Description of Artificial Sequence: Synthetic oligonucleotide
uuggcuuauuuaauguaac

SEQ ID NO: 1954599 - RNA, 19 nt, Artificial Sequence
  Description of Artificial Sequence: Synthetic oligonucleotide
cauguaguugaacucacuc

SEQ ID NO: 1954600 - RNA, 19 nt, Artificial Sequence
  Description of Artificial Sequence: Synthetic oligonucleotide
uucggggagauuaaucacu

SEQ ID NO: 1954601 - RNA, 19 nt, Artificial Sequence
  Description of Artificial Sequence: Synthetic oligonucleotide
aaucacuggaacccacuga

SEQ ID NO: 1954602 - RNA, 19 nt, Artificial Sequence
  Description of Artificial Sequence: Synthetic oligonucleotide
uacacgccgacggugaugg

SEQ ID NO: 1954603 - RNA, 19 nt, Artificial Sequence
  Description of Artificial Sequence: Synthetic oligonucleotide
ugugaugaauguggguucg

SEQ ID NO: 1954604 - RNA, 19 nt, Artificial Sequence
  Description of Artificial Sequence: Synthetic oligonucleotide
cuuaguccgauuuauaaua

SEQ ID NO: 1954605 - RNA, 19 nt, Artificial Sequence
  Description of Artificial Sequence: Synthetic oligonucleotide
uauugcaagugcgaguccc

SEQ ID NO: 1954606 - RNA, 19 nt, Artificial Sequence
  Description of Artificial Sequence: Synthetic oligonucleotide
auguaguugaacucacuca

SEQ ID NO: 1954607 - RNA, 19 nt, Artificial Sequence
  Description of Artificial Sequence: Synthetic oligonucleotide
agcaauauuuggcuuauuu

SEQ ID NO: 1954608 - RNA, 19 nt, Artificial Sequence
  Description of Artificial Sequence: Synthetic oligonucleotide
caucaaaauacauuaaccu

SEQ ID NO: 1954609 - RNA, 19 nt, Artificial Sequence
  Description of Artificial Sequence: Synthetic oligonucleotide
cacugauccauguagcgac

SEQ ID NO: 1954610 - RNA, 19 nt, Artificial Sequence
  Description of Artificial Sequence: Synthetic oligonucleotide
cuuagauuucuguuucaac

SEQ ID NO: 1954611 - RNA, 19 nt, Artificial Sequence
  Description of Artificial Sequence: Synthetic oligonucleotide
uuaaucacuggaacccacu

SEQ ID NO: 1954612 - RNA, 19 nt, Artificial Sequence
  Description of Artificial Sequence: Synthetic oligonucleotide
cucgucugcagccagcagg

SEQ ID NO: 1954613 - RNA, 19 nt, Artificial Sequence
  Description of Artificial Sequence: Synthetic oligonucleotide
cuugacaucaguuucugua

SEQ ID NO: 1954614 - RNA, 19 nt, Artificial Sequence
  Description of Artificial Sequence: Synthetic oligonucleotide
guaacuacaaagguauuuc

SEQ ID NO: 1954615 - RNA, 19 nt, Artificial Sequence
  Description of Artificial Sequence: Synthetic oligonucleotide
aucacuggaacccacugau

SEQ ID NO: 1954616 - RNA, 19 nt, Artificial Sequence
  Description of Artificial Sequence: Synthetic oligonucleotide
gaugaauguggguucguca

SEQ ID NO: 1954617 - RNA, 19 nt, Artificial Sequence
  Description of Artificial Sequence: Synthetic oligonucleotide
uuaguccgauuuauaauaa

SEQ ID NO: 1954618 - RNA, 19 nt, Artificial Sequence
  Description of Artificial Sequence: Synthetic oligonucleotide
ucauauugcaagugcgagu

SEQ ID NO: 1954619 - RNA, 19 nt, Artificial Sequence
  Description of Artificial Sequence: Synthetic oligonucleotide
uucgucaccagcacgcagu

SEQ ID NO: 1954620 - RNA, 19 nt, Artificial Sequence
  Description of Artificial Sequence: Synthetic oligonucleotide
cgauuuauaauaaaauuuc

SEQ ID NO: 1954621 - RNA, 19 nt, Artificial Sequence
  Description of Artificial Sequence: Synthetic oligonucleotide
cuugcacaguucuuuguag

SEQ ID NO: 1954622 - RNA, 19 nt, Artificial Sequence
  Description of Artificial Sequence: Synthetic oligonucleotide
auaaccuuucauaucauaa

SEQ ID NO: 1954623 - RNA, 19 nt, Artificial Sequence
  Description of Artificial Sequence: Synthetic oligonucleotide
aauguaacucagccauccu

SEQ ID NO: 1954624 - RNA, 19 nt, Artificial Sequence
  Description of Artificial Sequence: Synthetic oligonucleotide
agauuucuguuucaacaca

SEQ ID NO: 1954625 - RNA, 19 nt, Artificial Sequence
  Description of Artificial Sequence: Synthetic oligonucleotide
acuuaguccgauuuauaau

SEQ ID NO: 1954626 - RNA, 19 nt, Artificial Sequence
  Description of Artificial Sequence: Synthetic oligonucleotide
uaccaguuuauuuuagaua

SEQ ID NO: 1954627 - RNA, 19 nt, Artificial Sequence
  Description of Artificial Sequence: Synthetic oligonucleotide
ucuugcacaguucuuugua

SEQ ID NO: 1954628 - RNA, 19 nt, Artificial Sequence
  Description of Artificial Sequence: Synthetic oligonucleotide
ugauggugcgcugacuccg

SEQ ID NO: 1954629 - RNA, 19 nt, Artificial Sequence
  Description of Artificial Sequence: Synthetic oligonucleotide
acugugaugaauguggguu

SEQ ID NO: 1954630 - RNA, 19 nt, Artificial Sequence
  Description of Artificial Sequence: Synthetic oligonucleotide
gaugaggguaaaauggauc

SEQ ID NO: 1954631 - RNA, 19 nt, Artificial Sequence
  Description of Artificial Sequence: Synthetic oligonucleotide
aacacagcuuccuucuuua

SEQ ID NO: 1954632 - RNA, 19 nt, Artificial Sequence
  Description of Artificial Sequence: Synthetic oligonucleotide
auugagaugccaucaccgu

SEQ ID NO: 1954633 - RNA, 19 nt, Artificial Sequence
  Description of Artificial Sequence: Synthetic oligonucleotide
auaacuuaguccgauuuau

SEQ ID NO: 1954634 - RNA, 19 nt, Artificial Sequence
  Description of Artificial Sequence: Synthetic oligonucleotide
uuucccgacaaaagcaaau

SEQ ID NO: 1954635 - RNA, 19 nt, Artificial Sequence
  Description of Artificial Sequence: Synthetic oligonucleotide
auauugcaagugcgagucc

SEQ ID NO: 1954636 - RNA, 19 nt, Artificial Sequence
  Description of Artificial Sequence: Synthetic oligonucleotide
auuaaucacuggaacccac

SEQ ID NO: 1954637 - RNA, 19 nt, Artificial Sequence
  Description of Artificial Sequence: Synthetic oligonucleotide
aacuuggcggccucguaca

SEQ ID NO: 1954638 - RNA, 19 nt, Artificial Sequence
  Description of Artificial Sequence: Synthetic oligonucleotide
ggagauuaaucacuggaac

SEQ ID NO: 1954639 - RNA, 19 nt, Artificial Sequence
  Description of Artificial Sequence: Synthetic oligonucleotide
acccgcaggauguugaugu

SEQ ID NO: 1954640 - RNA, 19 nt, Artificial Sequence
  Description of Artificial Sequence: Synthetic oligonucleotide
uggcuuauuuaauguaacu

SEQ ID NO: 1954641 - RNA, 19 nt, Artificial Sequence
  Description of Artificial Sequence: Synthetic oligonucleotide
ucgucugcagccagcaggc

SEQ ID NO: 1954642 - RNA, 19 nt, Artificial Sequence
  Description of Artificial Sequence: Synthetic oligonucleotide
uuuccauugagaugccauc

SEQ ID NO: 1954643 - RNA, 19 nt, Artificial Sequence
  Description of Artificial Sequence: Synthetic oligonucleotide
auuccauaccaguuuauuu

SEQ ID NO: 1954644 - RNA, 19 nt, Artificial Sequence
  Description of Artificial Sequence: Synthetic oligonucleotide
gucgacauugagcaacuug

SEQ ID NO: 1954645 - RNA, 19 nt, Artificial Sequence
  Description of Artificial Sequence: Synthetic oligonucleotide
cuacaaagguauuucaaaa

SEQ ID NO: 1954646 - RNA, 19 nt, Artificial Sequence
  Description of Artificial Sequence: Synthetic oligonucleotide
cauguagcgacuuucccga

SEQ ID NO: 1954647 - RNA, 19 nt, Artificial Sequence
  Description of Artificial Sequence: Synthetic oligonucleotide
uccauguagcgacuuuccc

SEQ ID NO: 1954648 - RNA, 19 nt, Artificial Sequence
  Description of Artificial Sequence: Synthetic oligonucleotide
ucagcguagggaguaacug

SEQ ID NO: 1954649 - RNA, 19 nt, Artificial Sequence
  Description of Artificial Sequence: Synthetic oligonucleotide
aaagcaauauuuggcuuau

SEQ ID NO: 1954650 - RNA, 19 nt, Artificial Sequence
  Description of Artificial Sequence: Synthetic oligonucleotide
uguuucaacacagcuuccu

SEQ ID NO: 1954651 - RNA, 19 nt, Artificial Sequence
  Description of Artificial Sequence: Synthetic oligonucleotide
uuggcggccucguacacgc

SEQ ID NO: 1954652 - RNA, 19 nt, Artificial Sequence
  Description of Artificial Sequence: Synthetic oligonucleotide
acucacucagccccuugac

SEQ ID NO: 1954653 - RNA, 19 nt, Artificial Sequence
  Description of Artificial Sequence: Synthetic oligonucleotide
ucucgcagcagaacgccug

SEQ ID NO: 1954654 - RNA, 19 nt, Artificial Sequence
  Description of Artificial Sequence: Synthetic oligonucleotide
uggguucgucaccagcacg

SEQ ID NO: 1954655 - RNA, 19 nt, Artificial Sequence
  Description of Artificial Sequence: Synthetic oligonucleotide
uccauugagaugccaucac

SEQ ID NO: 1954656 - RNA, 19 nt, Artificial Sequence
  Description of Artificial Sequence: Synthetic oligonucleotide
uguagcgacuuucccgaca

SEQ ID NO: 1954657 - RNA, 19 nt, Artificial Sequence
  Description of Artificial Sequence: Synthetic oligonucleotide
agagccacgucccugucgu

SEQ ID NO: 1954658 - RNA, 19 nt, Artificial Sequence
  Description of Artificial Sequence: Synthetic oligonucleotide
aguuucuguaauccuugca

SEQ ID NO: 1954659 - RNA, 19 nt, Artificial Sequence
  Description of Artificial Sequence: Synthetic oligonucleotide
agcaaauaaguugacuuaa

SEQ ID NO: 1954660 - RNA, 19 nt, Artificial Sequence
  Description of Artificial Sequence: Synthetic oligonucleotide
uugcacaguucuuuguagu

SEQ ID NO: 1954661 - RNA, 19 nt, Artificial Sequence
  Description of Artificial Sequence: Synthetic oligonucleotide
uuccauugagaugccauca

SEQ ID NO: 1954662 - RNA, 19 nt, Artificial Sequence
  Description of Artificial Sequence: Synthetic oligonucleotide
ucccgacaaaagcaaauaa

SEQ ID NO: 1954663 - RNA, 19 nt, Artificial Sequence
  Description of Artificial Sequence: Synthetic oligonucleotide
auccauguagcgacuuucc

SEQ ID NO: 1954664 - RNA, 19 nt, Artificial Sequence
  Description of Artificial Sequence: Synthetic oligonucleotide
cuguaauccuugcaucagc

SEQ ID NO: 1954665 - RNA, 19 nt, Artificial Sequence
  Description of Artificial Sequence: Synthetic oligonucleotide
guugucggggucgacauug

SEQ ID NO: 1954666 - RNA, 19 nt, Artificial Sequence
  Description of Artificial Sequence: Synthetic oligonucleotide
gacaucaguuucuguaauc

SEQ ID NO: 1954667 - RNA, 19 nt, Artificial Sequence
  Description of Artificial Sequence: Synthetic oligonucleotide
augccaucaccguucgggg

SEQ ID NO: 1954668 - RNA, 19 nt, Artificial Sequence
  Description of Artificial Sequence: Synthetic oligonucleotide
aguccgauuuauaauaaaa

SEQ ID NO: 1954669 - RNA, 19 nt, Artificial Sequence
  Description of Artificial Sequence: Synthetic oligonucleotide
agugcgagucccucacgcg

SEQ ID NO: 1954670 - RNA, 19 nt, Artificial Sequence
  Description of Artificial Sequence: Synthetic oligonucleotide
aauguggguucgucaccag

SEQ ID NO: 1954671 - RNA, 19 nt, Artificial Sequence
  Description of Artificial Sequence: Synthetic oligonucleotide
uugcugacccgcaggaugu

SEQ ID NO: 1954672 - RNA, 19 nt, Artificial Sequence
  Description of Artificial Sequence: Synthetic oligonucleotide
cagcguagggaguaacugc

SEQ ID NO: 1954673 - RNA, 19 nt, Artificial Sequence
  Description of Artificial Sequence: Synthetic oligonucleotide
uaacucagccauccuaaau

SEQ ID NO: 1954674 - RNA, 19 nt, Artificial Sequence
  Description of Artificial Sequence: Synthetic oligonucleotide
aacuucagugcaauuuggu

SEQ ID NO: 1954675 - RNA, 19 nt, Artificial Sequence
  Description of Artificial Sequence: Synthetic oligonucleotide
ccauguagcgacuuucccg

SEQ ID NO: 1954676 - RNA, 19 nt, Artificial Sequence
  Description of Artificial Sequence: Synthetic oligonucleotide
aaauggaucugcagagcca

SEQ ID NO: 1954677 - RNA, 19 nt, Artificial Sequence
  Description of Artificial Sequence: Synthetic oligonucleotide
uugcuacacauuuaagguu

SEQ ID NO: 1954678 - RNA, 19 nt, Artificial Sequence
  Description of Artificial Sequence: Synthetic oligonucleotide
uucggucuucugcucugcg

SEQ ID NO: 1954679 - RNA, 19 nt, Artificial Sequence
  Description of Artificial Sequence: Synthetic oligonucleotide
gcaaagucaucuccuagcc

SEQ ID NO: 1954680 - RNA, 19 nt, Artificial Sequence
  Description of Artificial Sequence: Synthetic oligonucleotide
ucaccguucggggagauua

SEQ ID NO: 1954681 - RNA, 19 nt, Artificial Sequence
  Description of Artificial Sequence: Synthetic oligonucleotide
gugcgagucccucacgcgg

SEQ ID NO: 1954682 - RNA, 19 nt, Artificial Sequence
  Description of Artificial Sequence: Synthetic oligonucleotide
cccgacaaaagcaaauaag

SEQ ID NO: 1954683 - RNA, 19 nt, Artificial Sequence
  Description of Artificial Sequence: Synthetic oligonucleotide
cauaccaguuuauuuuaga

SEQ ID NO: 1954684 - RNA, 19 nt, Artificial Sequence
  Description of Artificial Sequence: Synthetic oligonucleotide
gauccauguagcgacuuuc

SEQ ID NO: 1954685 - RNA, 19 nt, Artificial Sequence
  Description of Artificial Sequence: Synthetic oligonucleotide
gauuaaucacuggaaccca

SEQ ID NO: 1954686 - RNA, 19 nt, Artificial Sequence
  Description of Artificial Sequence: Synthetic oligonucleotide
uuuuacuugagggcauaaa

SEQ ID NO: 1954687 - RNA, 19 nt, Artificial Sequence
  Description of Artificial Sequence: Synthetic oligonucleotide
cauuuaagguuucaacaaa

SEQ ID NO: 1954688 - RNA, 19 nt, Artificial Sequence
  Description of Artificial Sequence: Synthetic oligonucleotide
uauuccauaccaguuuauu

SEQ ID NO: 1954689 - RNA, 19 nt, Artificial Sequence
  Description of Artificial Sequence: Synthetic oligonucleotide
uaacuuaguccgauuuaua

SEQ ID NO: 1954690 - RNA, 19 nt, Artificial Sequence
  Description of Artificial Sequence: Synthetic oligonucleotide
accucuguccaucugcaaa

SEQ ID NO: 1954691 - RNA, 19 nt, Artificial Sequence
  Description of Artificial Sequence: Synthetic oligonucleotide
auaaaauaacuuaguccga

SEQ ID NO: 1954692 - RNA, 19 nt, Artificial Sequence
  Description of Artificial Sequence: Synthetic oligonucleotide
auuuccauugagaugccau

SEQ ID NO: 1954693 - RNA, 19 nt, Artificial Sequence
  Description of Artificial Sequence: Synthetic oligonucleotide
ggcuuauuuaauguaacuc

SEQ ID NO: 1954694 - RNA, 19 nt, Artificial Sequence
  Description of Artificial Sequence: Synthetic oligonucleotide
acgccgacggugauggugc

SEQ ID NO: 1954695 - RNA, 19 nt, Artificial Sequence
  Description of Artificial Sequence: Synthetic oligonucleotide
caacuuggcggccucguac

SEQ ID NO: 1954696 - RNA, 19 nt, Artificial Sequence
  Description of Artificial Sequence: Synthetic oligonucleotide
ugaggguaaaauggaucug

SEQ ID NO: 1954697 - RNA, 19 nt, Artificial Sequence
  Description of Artificial Sequence: Synthetic oligonucleotide
uaccacguugucggggucg

SEQ ID NO: 1954698 - RNA, 19 nt, Artificial Sequence
  Description of Artificial Sequence: Synthetic oligonucleotide
gaguaacugcuugaguaac

SEQ ID NO: 1954699 - RNA, 19 nt, Artificial Sequence
  Description of Artificial Sequence: Synthetic oligonucleotide
guucggggagauuaaucac

SEQ ID NO: 1954700 - RNA, 19 nt, Artificial Sequence
  Description of Artificial Sequence: Synthetic oligonucleotide
agucauauugcaagugcga

SEQ ID NO: 1954701 - RNA, 19 nt, Artificial Sequence
  Description of Artificial Sequence: Synthetic oligonucleotide
uaguccgauuuauaauaaa

SEQ ID NO: 1954702 - RNA, 19 nt, Artificial Sequence
  Description of Artificial Sequence: Synthetic oligonucleotide
ugacuccgcgccuugcuga

SEQ ID NO: 1954703 - RNA, 19 nt, Artificial Sequence
  Description of Artificial Sequence: Synthetic oligonucleotide
ugcaagugcgagucccuca

SEQ ID NO: 1954704 - RNA, 19 nt, Artificial Sequence
  Description of Artificial Sequence: Synthetic oligonucleotide
ugaugucguucucgcagca

SEQ ID NO: 1954705 - RNA, 19 nt, Artificial Sequence
  Description of Artificial Sequence: Synthetic oligonucleotide
aaguugacuuaaggcagga

SEQ ID NO: 1954706 - RNA, 19 nt, Artificial Sequence
  Description of Artificial Sequence: Synthetic oligonucleotide
caguuucuguaauccuugc

SEQ ID NO: 1954707 - RNA, 19 nt, Artificial Sequence
  Description of Artificial Sequence: Synthetic oligonucleotide
ggguaaaauggaucugcag

SEQ ID NO: 1954708 - RNA, 19 nt, Artificial Sequence
  Description of Artificial Sequence: Synthetic oligonucleotide
cuuucggucuucugcucug

SEQ ID NO: 1954709 - RNA, 19 nt, Artificial Sequence
  Description of Artificial Sequence: Synthetic oligonucleotide
ugucguucucgcagcagaa

SEQ ID NO: 1954710 - RNA, 19 nt, Artificial Sequence
  Description of Artificial Sequence: Synthetic oligonucleotide
uccuuuuacuugagggcau

SEQ ID NO: 1954711 - RNA, 19 nt, Artificial Sequence
  Description of Artificial Sequence: Synthetic oligonucleotide
ugaugaauguggguucguc

SEQ ID NO: 1954712 - RNA, 19 nt, Artificial Sequence
  Description of Artificial Sequence: Synthetic oligonucleotide
ugucggggucgacauugag

SEQ ID NO: 1954713 - RNA, 19 nt, Artificial Sequence
  Description of Artificial Sequence: Synthetic oligonucleotide
accaaacuauugcuacaca

SEQ ID NO: 1954714 - RNA, 19 nt, Artificial Sequence
  Description of Artificial Sequence: Synthetic oligonucleotide
acaguaccacguugucggg

SEQ ID NO: 1954715 - RNA, 19 nt, Artificial Sequence
  Description of Artificial Sequence: Synthetic oligonucleotide
gacuuagauuucuguuuca

SEQ ID NO: 1954716 - RNA, 19 nt, Artificial Sequence
  Description of Artificial Sequence: Synthetic oligonucleotide
caguuauuuccauugagau

SEQ ID NO: 1954717 - RNA, 19 nt, Artificial Sequence
  Description of Artificial Sequence: Synthetic oligonucleotide
ugacuuaaggcaggauccu

SEQ ID NO: 1954718 - RNA, 19 nt, Artificial Sequence
  Description of Artificial Sequence: Synthetic oligonucleotide
agcguagggaguaacugcu

SEQ ID NO: 1954719 - RNA, 19 nt, Artificial Sequence
  Description of Artificial Sequence: Synthetic oligonucleotide
cagccauccuaaaucaaca

SEQ ID NO: 1954720 - RNA, 19 nt, Artificial Sequence
  Description of Artificial Sequence: Synthetic oligonucleotide
guaguugaacucacucagc

SEQ ID NO: 1954721 - RNA, 19 nt, Artificial Sequence
  Description of Artificial Sequence: Synthetic oligonucleotide
caccguguccauccuuucg

SEQ ID NO: 1954722 - RNA, 19 nt, Artificial Sequence
  Description of Artificial Sequence: Synthetic oligonucleotide
guagcgacuuucccgacaa

SEQ ID NO: 1954723 - RNA, 19 nt, Artificial Sequence
  Description of Artificial Sequence: Synthetic oligonucleotide
gcaauauuuggcuuauuua

SEQ ID NO: 1954724 - RNA, 19 nt, Artificial Sequence
  Description of Artificial Sequence: Synthetic oligonucleotide
cucgcagcagaacgccugg

SEQ ID NO: 1954725 - RNA, 19 nt, Artificial Sequence
  Description of Artificial Sequence: Synthetic oligonucleotide
guucucgcagcagaacgcc

SEQ ID NO: 1954726 - RNA, 19 nt, Artificial Sequence
  Description of Artificial Sequence: Synthetic oligonucleotide
agcgacuuucccgacaaaa

SEQ ID NO: 1954727 - RNA, 19 nt, Artificial Sequence
  Description of Artificial Sequence: Synthetic oligonucleotide
gucggggucgacauugagc

SEQ ID NO: 1954728 - RNA, 19 nt, Artificial Sequence
  Description of Artificial Sequence: Synthetic oligonucleotide
gugauggugcgcugacucc

SEQ ID NO: 1954729 - RNA, 19 nt, Artificial Sequence
  Description of Artificial Sequence: Synthetic oligonucleotide
uugguucaguuauuuccau

SEQ ID NO: 1954730 - RNA, 19 nt, Artificial Sequence
  Description of Artificial Sequence: Synthetic oligonucleotide
aacuauugcuacacauuua

SEQ ID NO: 1954731 - RNA, 19 nt, Artificial Sequence
  Description of Artificial Sequence: Synthetic oligonucleotide
agccccuugacaucaguuu

SEQ ID NO: 1954732 - RNA, 19 nt, Artificial Sequence
  Description of Artificial Sequence: Synthetic oligonucleotide
agggaguaacugcuugagu

SEQ ID NO: 1954733 - RNA, 19 nt, Artificial Sequence
  Description of Artificial Sequence: Synthetic oligonucleotide
gccgagaauuccuccaaag

SEQ ID NO: 1954734 - RNA, 19 nt, Artificial Sequence
  Description of Artificial Sequence: Synthetic oligonucleotide
uauuuucaccucuguccau

SEQ ID NO: 1954735 - RNA, 19 nt, Artificial Sequence
  Description of Artificial Sequence: Synthetic oligonucleotide
auccuugcaucagcguagg

SEQ ID NO: 1954736 - RNA, 19 nt, Artificial Sequence
  Description of Artificial Sequence: Synthetic oligonucleotide
auguagcgacuuucccgac

SEQ ID NO: 1954737 - RNA, 19 nt, Artificial Sequence
  Description of Artificial Sequence: Synthetic oligonucleotide
guucgucaccagcacgcag

SEQ ID NO: 1954738 - RNA, 19 nt, Artificial Sequence
  Description of Artificial Sequence: Synthetic oligonucleotide
ugcggccgagaauuccucc

SEQ ID NO: 1954739 - RNA, 19 nt, Artificial Sequence
  Description of Artificial Sequence: Synthetic oligonucleotide
ugguucaguuauuuccauu

SEQ ID NO: 1954740 - RNA, 19 nt, Artificial Sequence
  Description of Artificial Sequence: Synthetic oligonucleotide
uccuugcaucagcguaggg

SEQ ID NO: 1954741 - RNA, 19 nt, Artificial Sequence
  Description of Artificial Sequence: Synthetic oligonucleotide
caucucaucaaaauacauu

SEQ ID NO: 1954742 - RNA, 19 nt, Artificial Sequence
  Description of Artificial Sequence: Synthetic oligonucleotide
acuuucccgacaaaagcaa

SEQ ID NO: 1954743 - RNA, 19 nt, Artificial Sequence
  Description of Artificial Sequence: Synthetic oligonucleotide
gacuccgcgccuugcugag

SEQ ID NO: 1954744 - RNA, 19 nt, Artificial Sequence
  Description of Artificial Sequence: Synthetic oligonucleotide
uucucgcagcagaacgccu

SEQ ID NO: 1954745 - RNA, 19 nt, Artificial Sequence
  Description of Artificial Sequence: Synthetic oligonucleotide
caaacuauugcuacacauu

SEQ ID NO: 1954746 - RNA, 19 nt, Artificial Sequence
  Description of Artificial Sequence: Synthetic oligonucleotide
cccacugauccauguagcg

SEQ ID NO: 1954747 - RNA, 19 nt, Artificial Sequence
  Description of Artificial Sequence: Synthetic oligonucleotide
aggcaggauccuuccacug

SEQ ID NO: 1954748 - RNA, 19 nt, Artificial Sequence
  Description of Artificial Sequence: Synthetic oligonucleotide
aacgccuggaugaggguaa

SEQ ID NO: 1954749 - RNA, 19 nt, Artificial Sequence
  Description of Artificial Sequence: Synthetic oligonucleotide
caaagguauuucaaaacuu

SEQ ID NO: 1954750 - RNA, 19 nt, Artificial Sequence
  Description of Artificial Sequence: Synthetic oligonucleotide
acguugucggggucgacau

SEQ ID NO: 1954751 - RNA, 19 nt, Artificial Sequence
  Description of Artificial Sequence: Synthetic oligonucleotide
uugagcaacuuggcggccu

SEQ ID NO: 1954752 - RNA, 19 nt, Artificial Sequence
  Description of Artificial Sequence: Synthetic oligonucleotide
ccauugagaugccaucacc

SEQ ID NO: 1954753 - RNA, 19 nt, Artificial Sequence
  Description of Artificial Sequence: Synthetic oligonucleotide
caauuauuccauaccaguu

SEQ ID NO: 1954754 - RNA, 19 nt, Artificial Sequence
  Description of Artificial Sequence: Synthetic oligonucleotide
ggugcgcugacuccgcgcc

SEQ ID NO: 1954755 - RNA, 19 nt, Artificial Sequence
  Description of Artificial Sequence: Synthetic oligonucleotide
uugcaucagcguagggagu

SEQ ID NO: 1954756 - RNA, 19 nt, Artificial Sequence
  Description of Artificial Sequence: Synthetic oligonucleotide
ugccaucaccguucgggga

SEQ ID NO: 1954757 - RNA, 19 nt, Artificial Sequence
  Description of Artificial Sequence: Synthetic oligonucleotide
ccgacaaaagcaaauaagu

SEQ ID NO: 1954758 - RNA, 19 nt, Artificial Sequence
  Description of Artificial Sequence: Synthetic oligonucleotide
caguaccacguugucgggg

SEQ ID NO: 1954759 - RNA, 19 nt, Artificial Sequence
  Description of Artificial Sequence: Synthetic oligonucleotide
uuucggucuucugcucugc

SEQ ID NO: 1954760 - RNA, 19 nt, Artificial Sequence
  Description of Artificial Sequence: Synthetic oligonucleotide
aggguaaaauggaucugca

SEQ ID NO: 1954761 - RNA, 19 nt, Artificial Sequence
  Description of Artificial Sequence: Synthetic oligonucleotide
ccgauuuauaauaaaauuu

SEQ ID NO: 1954762 - RNA, 19 nt, Artificial Sequence
  Description of Artificial Sequence: Synthetic oligonucleotide
ggguucgucaccagcacgc

SEQ ID NO: 1954763 - RNA, 19 nt, Artificial Sequence
  Description of Artificial Sequence: Synthetic oligonucleotide
gcacaguaccacguugucg

SEQ ID NO: 1954764 - RNA, 19 nt, Artificial Sequence
  Description of Artificial Sequence: Synthetic oligonucleotide
aucagcguagggaguaacu

SEQ ID NO: 1954765 - RNA, 19 nt, Artificial Sequence
  Description of Artificial Sequence: Synthetic oligonucleotide
gcgacuuucccgacaaaag

SEQ ID NO: 1954766 - RNA, 19 nt, Artificial Sequence
  Description of Artificial Sequence: Synthetic oligonucleotide
guccgauuuauaauaaaau

SEQ ID NO: 1954767 - RNA, 19 nt, Artificial Sequence
  Description of Artificial Sequence: Synthetic oligonucleotide
gauggugcgcugacuccgc

SEQ ID NO: 1954768 - RNA, 19 nt, Artificial Sequence
  Description of Artificial Sequence: Synthetic oligonucleotide
gugcaauuugguucaguua

SEQ ID NO: 1954769 - RNA, 19 nt, Artificial Sequence
  Description of Artificial Sequence: Synthetic oligonucleotide
aggcacaguaccacguugu

SEQ ID NO: 1954770 - RNA, 19 nt, Artificial Sequence
  Description of Artificial Sequence: Synthetic oligonucleotide
gcaagugcgagucccucac

SEQ ID NO: 1954771 - RNA, 19 nt, Artificial Sequence
  Description of Artificial Sequence: Synthetic oligonucleotide
cugacuccgcgccuugcug

SEQ ID NO: 1954772 - RNA, 19 nt, Artificial Sequence
  Description of Artificial Sequence: Synthetic oligonucleotide
uugucggggucgacauuga

SEQ ID NO: 1954773 - RNA, 19 nt, Artificial Sequence
  Description of Artificial Sequence: Synthetic oligonucleotide
cucacucagccccuugaca

SEQ ID NO: 1954774 - RNA, 19 nt, Artificial Sequence
  Description of Artificial Sequence: Synthetic oligonucleotide
ggggucgacauugagcaac

SEQ ID NO: 1954775 - RNA, 19 nt, Artificial Sequence
  Description of Artificial Sequence: Synthetic oligonucleotide
cugacccgcaggauguuga

SEQ ID NO: 1954776 - RNA, 19 nt, Artificial Sequence
  Description of Artificial Sequence: Synthetic oligonucleotide
agaacgccuggaugagggu

SEQ ID NO: 1954777 - RNA, 19 nt, Artificial Sequence
  Description of Artificial Sequence: Synthetic oligonucleotide
ggcggccucguacacgccg

SEQ ID NO: 1954778 - RNA, 19 nt, Artificial Sequence
  Description of Artificial Sequence: Synthetic oligonucleotide
cacgccgacggugauggug

SEQ ID NO: 1954779 - RNA, 19 nt, Artificial Sequence
  Description of Artificial Sequence: Synthetic oligonucleotide
cuuucccgacaaaagcaaa

SEQ ID NO: 1954780 - RNA, 19 nt, Artificial Sequence
  Description of Artificial Sequence: Synthetic oligonucleotide
guggguucgucaccagcac

SEQ ID NO: 1954781 - RNA, 19 nt, Artificial Sequence
  Description of Artificial Sequence: Synthetic oligonucleotide
guaacucagccauccuaaa

SEQ ID NO: 1954782 - RNA, 19 nt, Artificial Sequence
  Description of Artificial Sequence: Synthetic oligonucleotide
cagcacgcagugcagguca

SEQ ID NO: 1954783 - RNA, 19 nt, Artificial Sequence
  Description of Artificial Sequence: Synthetic oligonucleotide
acauuaaccuguagcuuua

SEQ ID NO: 1954784 - RNA, 19 nt, Artificial Sequence
  Description of Artificial Sequence: Synthetic oligonucleotide
uccuuucggucuucugcuc

SEQ ID NO: 1954785 - RNA, 19 nt, Artificial Sequence
  Description of Artificial Sequence: Synthetic oligonucleotide
gggagauuaaucacuggaa

SEQ ID NO: 1954786 - RNA, 19 nt, Artificial Sequence
  Description of Artificial Sequence: Synthetic oligonucleotide
cguucggggagauuaauca

SEQ ID NO: 1954787 - RNA, 19 nt, Artificial Sequence
  Description of Artificial Sequence: Synthetic oligonucleotide
agucccucacgcggcgcgc

SEQ ID NO: 1954788 - RNA, 19 nt, Artificial Sequence
  Description of Artificial Sequence: Synthetic oligonucleotide
ucccucacgcggcgcgcgg

SEQ ID NO: 1954789 - RNA, 19 nt, Artificial Sequence
  Description of Artificial Sequence: Synthetic oligonucleotide
cucugcggccgagaauucc

SEQ ID NO: 1954790 - RNA, 19 nt, Artificial Sequence
  Description of Artificial Sequence: Synthetic oligonucleotide
cacucagccccuugacauc

SEQ ID NO: 1954791 - RNA, 19 nt, Artificial Sequence
  Description of Artificial Sequence: Synthetic oligonucleotide
guaauccuugcaucagcgu

SEQ ID NO: 1954792 - RNA, 19 nt, Artificial Sequence
  Description of Artificial Sequence: Synthetic oligonucleotide
gaacgccuggaugagggua

SEQ ID NO: 1954793 - RNA, 19 nt, Artificial Sequence
  Description of Artificial Sequence: Synthetic oligonucleotide
gagcaacuuggcggccucg

SEQ ID NO: 1954794 - RNA, 19 nt, Artificial Sequence
  Description of Artificial Sequence: Synthetic oligonucleotide
uugcaagugcgagucccuc

SEQ ID NO: 1954795 - RNA, 19 nt, Artificial Sequence
  Description of Artificial Sequence: Synthetic oligonucleotide
ucacgcggcgcgcgggcug

SEQ ID NO: 1954796 - RNA, 19 nt, Artificial Sequence
  Description of Artificial Sequence: Synthetic oligonucleotide
ugacccgcaggauguugau

SEQ ID NO: 1954797 - RNA, 19 nt, Artificial Sequence
  Description of Artificial Sequence: Synthetic oligonucleotide
ccauccuaaaucaacaguu

SEQ ID NO: 1954798 - RNA, 19 nt, Artificial Sequence
  Description of Artificial Sequence: Synthetic oligonucleotide
agcaacuuggcggccucgu

SEQ ID NO: 1954799 - RNA, 19 nt, Artificial Sequence
  Description of Artificial Sequence: Synthetic oligonucleotide
cuacacauuuaagguuuca

SEQ ID NO: 1954800 - RNA, 19 nt, Artificial Sequence
  Description of Artificial Sequence: Synthetic oligonucleotide
gccccuugacaucaguuuc

SEQ ID NO: 1954801 - RNA, 19 nt, Artificial Sequence
  Description of Artificial Sequence: Synthetic oligonucleotide
acugauccauguagcgacu

SEQ ID NO: 1954802 - RNA, 19 nt, Artificial Sequence
  Description of Artificial Sequence: Synthetic oligonucleotide
cguucucgcagcagaacgc

SEQ ID NO: 1954803 - RNA, 19 nt, Artificial Sequence
  Description of Artificial Sequence: Synthetic oligonucleotide
cacgucccugucgucgucc

SEQ ID NO: 1954804 - RNA, 19 nt, Artificial Sequence
  Description of Artificial Sequence: Synthetic oligonucleotide
gucguucucgcagcagaac

SEQ ID NO: 1954805 - RNA, 19 nt, Artificial Sequence
  Description of Artificial Sequence: Synthetic oligonucleotide
guacacgccgacggugaug

SEQ ID NO: 1954806 - RNA, 19 nt, Artificial Sequence
  Description of Artificial Sequence: Synthetic oligonucleotide
cuuuuacuugagggcauaa

SEQ ID NO: 1954807 - RNA, 19 nt, Artificial Sequence
  Description of Artificial Sequence: Synthetic oligonucleotide
cugcuugaguaacuacaaa

SEQ ID NO: 1954808 - RNA, 19 nt, Artificial Sequence
  Description of Artificial Sequence: Synthetic oligonucleotide
cucagccauccuaaaucaa

SEQ ID NO: 1954809 - RNA, 19 nt, Artificial Sequence
  Description of Artificial Sequence: Synthetic oligonucleotide
ccaaacuauugcuacacau

SEQ ID NO: 1954810 - RNA, 19 nt, Artificial Sequence
  Description of Artificial Sequence: Synthetic oligonucleotide
gccauccuaaaucaacagu

SEQ ID NO: 1954811 - RNA, 19 nt, Artificial Sequence
  Description of Artificial Sequence: Synthetic oligonucleotide
caggauccuuccacuguga

SEQ ID NO: 1954812 - RNA, 19 nt, Artificial Sequence
  Description of Artificial Sequence: Synthetic oligonucleotide
acgucccugucgucguccu

SEQ ID NO: 1954813 - RNA, 19 nt, Artificial Sequence
  Description of Artificial Sequence: Synthetic oligonucleotide
ccgcaggauguugaugucg

SEQ ID NO: 1954814 - RNA, 19 nt, Artificial Sequence
  Description of Artificial Sequence: Synthetic oligonucleotide
ggcacaguaccacguuguc

SEQ ID NO: 1954815 - RNA, 19 nt, Artificial Sequence
  Description of Artificial Sequence: Synthetic oligonucleotide
cagugcgcggcgccagccc

SEQ ID NO: 1954816 - RNA, 19 nt, Artificial Sequence
  Description of Artificial Sequence: Synthetic oligonucleotide
ucccugucgucguccucgu

SEQ ID NO: 1954817 - RNA, 19 nt, Artificial Sequence
  Description of Artificial Sequence: Synthetic oligonucleotide
accacguugucggggucga

SEQ ID NO: 1954818 - RNA, 19 nt, Artificial Sequence
  Description of Artificial Sequence: Synthetic oligonucleotide
ccguucggggagauuaauc

SEQ ID NO: 1954819 - RNA, 19 nt, Artificial Sequence
  Description of Artificial Sequence: Synthetic oligonucleotide
ugcgcugacuccgcgccuu

SEQ ID NO: 1954820 - RNA, 19 nt, Artificial Sequence
  Description of Artificial Sequence: Synthetic oligonucleotide
uagcgacuuucccgacaaa

SEQ ID NO: 1954821 - RNA, 19 nt, Artificial Sequence
  Description of Artificial Sequence: Synthetic oligonucleotide
ucccaccguguccauccuu

SEQ ID NO: 1954822 - RNA, 19 nt, Artificial Sequence
  Description of Artificial Sequence: Synthetic oligonucleotide
agcacgcagugcaggucag

SEQ ID NO: 1954823 - RNA, 19 nt, Artificial Sequence
  Description of Artificial Sequence: Synthetic oligonucleotide
cccuuuugacuuagauuuc

SEQ ID NO: 1954824 - RNA, 19 nt, Artificial Sequence
  Description of Artificial Sequence: Synthetic oligonucleotide
gucccucacgcggcgcgcg

SEQ ID NO: 1954825 - RNA, 19 nt, Artificial Sequence
  Description of Artificial Sequence: Synthetic oligonucleotide
ucgcagcagaacgccugga

SEQ ID NO: 1954826 - RNA, 19 nt, Artificial Sequence
  Description of Artificial Sequence: Synthetic oligonucleotide
accguucggggagauuaau

SEQ ID NO: 1954827 - RNA, 19 nt, Artificial Sequence
  Description of Artificial Sequence: Synthetic oligonucleotide
agguuucaacaaagcaaua

SEQ ID NO: 1954828 - RNA, 19 nt, Artificial Sequence
  Description of Artificial Sequence: Synthetic oligonucleotide
gcgagucccucacgcggcg

SEQ ID NO: 1954829 - RNA, 19 nt, Artificial Sequence
  Description of Artificial Sequence: Synthetic oligonucleotide
cauuaaccuguagcuuuaa

SEQ ID NO: 1954830 - RNA, 19 nt, Artificial Sequence
  Description of Artificial Sequence: Synthetic oligonucleotide
guaccacguugucgggguc

SEQ ID NO: 1954831 - RNA, 19 nt, Artificial Sequence
  Description of Artificial Sequence: Synthetic oligonucleotide
gacuuaaggcaggauccuu

SEQ ID NO: 1954832 - RNA, 19 nt, Artificial Sequence
  Description of Artificial Sequence: Synthetic oligonucleotide
cuccgccgggcccgcgucg

SEQ ID NO: 1954833 - RNA, 19 nt, Artificial Sequence
  Description of Artificial Sequence: Synthetic oligonucleotide
cggguugcugacccgcagg

SEQ ID NO: 1954834 - RNA, 19 nt, Artificial Sequence
  Description of Artificial Sequence: Synthetic oligonucleotide
cggggagauuaaucacugg

SEQ ID NO: 1954835 - RNA, 19 nt, Artificial Sequence
  Description of Artificial Sequence: Synthetic oligonucleotide
uggcggccucguacacgcc

SEQ ID NO: 1954836 - RNA, 19 nt, Artificial Sequence
  Description of Artificial Sequence: Synthetic oligonucleotide
ccacugauccauguagcga

SEQ ID NO: 1954837 - RNA, 19 nt, Artificial Sequence
  Description of Artificial Sequence: Synthetic oligonucleotide
caccguucggggagauuaa

SEQ ID NO: 1954838 - RNA, 19 nt, Artificial Sequence
  Description of Artificial Sequence: Synthetic oligonucleotide
ccgagaauuccuccaaagu

SEQ ID NO: 1954839 - RNA, 19 nt, Artificial Sequence
  Description of Artificial Sequence: Synthetic oligonucleotide
gugcgcggcgccagccccg

SEQ ID NO: 1954840 - RNA, 19 nt, Artificial Sequence
  Description of Artificial Sequence: Synthetic oligonucleotide
gaguaacuacaaagguauu

SEQ ID NO: 1954841 - RNA, 19 nt, Artificial Sequence
  Description of Artificial Sequence: Synthetic oligonucleotide
gccuggaugaggguaaaau

SEQ ID NO: 1954842 - RNA, 19 nt, Artificial Sequence
  Description of Artificial Sequence: Synthetic oligonucleotide
gguucgucaccagcacgca

SEQ ID NO: 1954843 - RNA, 19 nt, Artificial Sequence
  Description of Artificial Sequence: Synthetic oligonucleotide
gcacgcagugcaggucagg

SEQ ID NO: 1954844 - RNA, 19 nt, Artificial Sequence
  Description of Artificial Sequence: Synthetic oligonucleotide
gagccacgucccugucguc

SEQ ID NO: 1954845 - RNA, 19 nt, Artificial Sequence
  Description of Artificial Sequence: Synthetic oligonucleotide
gcccggguugcugacccgc

SEQ ID NO: 1954846 - RNA, 19 nt, Artificial Sequence
  Description of Artificial Sequence: Synthetic oligonucleotide
cagccccuugacaucaguu

SEQ ID NO: 1954847 - RNA, 19 nt, Artificial Sequence
  Description of Artificial Sequence: Synthetic oligonucleotide
ccggguugcugacccgcag

SEQ ID NO: 1954848 - RNA, 19 nt, Artificial Sequence
  Description of Artificial Sequence: Synthetic oligonucleotide
ugcugacccgcaggauguu

SEQ ID NO: 1954849 - RNA, 19 nt, Artificial Sequence
  Description of Artificial Sequence: Synthetic oligonucleotide
aucaccguucggggagauu

SEQ ID NO: 1954850 - RNA, 19 nt, Artificial Sequence
  Description of Artificial Sequence: Synthetic oligonucleotide
ggcccggguugcugacccg

SEQ ID NO: 1954851 - RNA, 19 nt, Artificial Sequence
  Description of Artificial Sequence: Synthetic oligonucleotide
ccaccguguccauccuuuc

SEQ ID NO: 1954852 - RNA, 19 nt, Artificial Sequence
  Description of Artificial Sequence: Synthetic oligonucleotide
ccucacgcggcgcgcgggc

SEQ ID NO: 1954853 - RNA, 19 nt, Artificial Sequence
  Description of Artificial Sequence: Synthetic oligonucleotide
gcggcgcgcgggcugcucc

SEQ ID NO: 1954854 - RNA, 19 nt, Artificial Sequence
  Description of Artificial Sequence: Synthetic oligonucleotide
acgccuggaugaggguaaa

SEQ ID NO: 1954855 - RNA, 19 nt, Artificial Sequence
  Description of Artificial Sequence: Synthetic oligonucleotide
cccgcaggauguugauguc

SEQ ID NO: 1954856 - RNA, 19 nt, Artificial Sequence
  Description of Artificial Sequence: Synthetic oligonucleotide
ccucgucugcagccagcag

SEQ ID NO: 1954857 - RNA, 19 nt, Artificial Sequence
  Description of Artificial Sequence: Synthetic oligonucleotide
gcaacuuggcggccucgua

SEQ ID NO: 1954858 - RNA, 19 nt, Artificial Sequence
  Description of Artificial Sequence: Synthetic oligonucleotide
acacgccgacggugauggu

SEQ ID NO: 1954859 - RNA, 19 nt, Artificial Sequence
  Description of Artificial Sequence: Synthetic oligonucleotide
ccccuugacaucaguuucu

SEQ ID NO: 1954860 - RNA, 19 nt, Artificial Sequence
  Description of Artificial Sequence: Synthetic oligonucleotide
gcgcgggcugcuccugccc

SEQ ID NO: 1954861 - RNA, 19 nt, Artificial Sequence
  Description of Artificial Sequence: Synthetic oligonucleotide
ccauguaguugaacucacu

SEQ ID NO: 1954862 - RNA, 19 nt, Artificial Sequence
  Description of Artificial Sequence: Synthetic oligonucleotide
gggucgacauugagcaacu

SEQ ID NO: 1954863 - RNA, 19 nt, Artificial Sequence
  Description of Artificial Sequence: Synthetic oligonucleotide
gccgacggugauggugcgc

SEQ ID NO: 1954864 - RNA, 19 nt, Artificial Sequence
  Description of Artificial Sequence: Synthetic oligonucleotide
cgcgggcugcuccugcccc

SEQ ID NO: 1954865 - RNA, 19 nt, Artificial Sequence
  Description of Artificial Sequence: Synthetic oligonucleotide
gcaauuugguucaguuauu

SEQ ID NO: 1954866 - RNA, 19 nt, Artificial Sequence
  Description of Artificial Sequence: Synthetic oligonucleotide
cccagugcgcggcgccagc

SEQ ID NO: 1954867 - RNA, 19 nt, Artificial Sequence
  Description of Artificial Sequence: Synthetic oligonucleotide
gcgcugacuccgcgccuug

SEQ ID NO: 1954868 - RNA, 19 nt, Artificial Sequence
  Description of Artificial Sequence: Synthetic oligonucleotide
gcaucagcguagggaguaa

SEQ ID NO: 1954869 - RNA, 19 nt, Artificial Sequence
  Description of Artificial Sequence: Synthetic oligonucleotide
ccgacggugauggugcgcu

SEQ ID NO: 1954870 - RNA, 19 nt, Artificial Sequence
  Description of Artificial Sequence: Synthetic oligonucleotide
cccucacgcggcgcgcggg

SEQ ID NO: 1954871 - RNA, 19 nt, Artificial Sequence
  Description of Artificial Sequence: Synthetic oligonucleotide
gcgcgcgggcugcuccugc

SEQ ID NO: 1954872 - RNA, 19 nt, Artificial Sequence
  Description of Artificial Sequence: Synthetic oligonucleotide
cucuccgccgggcccgcgu

SEQ ID NO: 1954873 - RNA, 19 nt, Artificial Sequence
  Description of Artificial Sequence: Synthetic oligonucleotide
gccggcccggguugcugac

SEQ ID NO: 1954874 - RNA, 19 nt, Artificial Sequence
  Description of Artificial Sequence: Synthetic oligonucleotide
cgccgacggugauggugcg

SEQ ID NO: 1954875 - RNA, 19 nt, Artificial Sequence
  Description of Artificial Sequence: Synthetic oligonucleotide
cccggguugcugacccgca

SEQ ID NO: 1954876 - RNA, 19 nt, Artificial Sequence
  Description of Artificial Sequence: Synthetic oligonucleotide
ccguguccauccuuucggu

SEQ ID NO: 1954877 - RNA, 19 nt, Artificial Sequence
  Description of Artificial Sequence: Synthetic oligonucleotide
cucccaccguguccauccu

SEQ ID NO: 1954878 - RNA, 19 nt, Artificial Sequence
  Description of Artificial Sequence: Synthetic oligonucleotide
ccccagugcgcggcgccag

SEQ ID NO: 1954879 - RNA, 19 nt, Artificial Sequence
  Description of Artificial Sequence: Synthetic oligonucleotide
cgacggugauggugcgcug

SEQ ID NO: 1954880 - RNA, 19 nt, Artificial Sequence
  Description of Artificial Sequence: Synthetic oligonucleotide
cgucgcucuccagcagcag

SEQ ID NO: 1954881 - RNA, 19 nt, Artificial Sequence
  Description of Artificial Sequence: Synthetic oligonucleotide
cgagucccucacgcggcgc

SEQ ID NO: 1954882 - RNA, 19 nt, Artificial Sequence
  Description of Artificial Sequence: Synthetic oligonucleotide
ggcgcgcgggcugcuccug

SEQ ID NO: 1954883 - RNA, 19 nt, Artificial Sequence
  Description of Artificial Sequence: Synthetic oligonucleotide
ccggcccggguugcugacc

SEQ ID NO: 1954884 - RNA, 19 nt, Artificial Sequence
  Description of Artificial Sequence: Synthetic oligonucleotide
cggccgagaauuccuccaa

SEQ ID NO: 1954885 - RNA, 19 nt, Artificial Sequence
  Description of Artificial Sequence: Synthetic oligonucleotide
caucucccaccguguccau

SEQ ID NO: 1954886 - RNA, 19 nt, Artificial Sequence
  Description of Artificial Sequence: Synthetic oligonucleotide
cucacgcggcgcgcgggcu

SEQ ID NO: 1954887 - RNA, 19 nt, Artificial Sequence
  Description of Artificial Sequence: Synthetic oligonucleotide
ccacguugucggggucgac

SEQ ID NO: 1954888 - RNA, 19 nt, Artificial Sequence
  Description of Artificial Sequence: Synthetic oligonucleotide
gcggcgccagccccgcgcu

SEQ ID NO: 1954889 - RNA, 19 nt, Artificial Sequence
  Description of Artificial Sequence: Synthetic oligonucleotide
ggucgacauugagcaacuu

SEQ ID NO: 1954890 - RNA, 19 nt, Artificial Sequence
  Description of Artificial Sequence: Synthetic oligonucleotide
cggggucgacauugagcaa

SEQ ID NO: 1954891 - RNA, 19 nt, Artificial Sequence
  Description of Artificial Sequence: Synthetic oligonucleotide
ccgcgccuugcugagcacu

SEQ ID NO: 1954892 - RNA, 19 nt, Artificial Sequence
  Description of Artificial Sequence: Synthetic oligonucleotide
cguacacgccgacggugau

SEQ ID NO: 1954893 - RNA, 19 nt, Artificial Sequence
  Description of Artificial Sequence: Synthetic oligonucleotide
cgcgccuugcugagcacuu

SEQ ID NO: 1954894 - RNA, 19 nt, Artificial Sequence
  Description of Artificial Sequence: Synthetic oligonucleotide
ccgggcccgcgucgcucuc

SEQ ID NO: 1954895 - RNA, 19 nt, Artificial Sequence
  Description of Artificial Sequence: Synthetic oligonucleotide
cgccuggaugaggguaaaa

SEQ ID NO: 1954896 - RNA, 19 nt, Artificial Sequence
  Description of Artificial Sequence: Synthetic oligonucleotide
cggugauggugcgcugacu

SEQ ID NO: 1954897 - RNA, 19 nt, Artificial Sequence
  Description of Artificial Sequence: Synthetic oligonucleotide
cguugucggggucgacauu

SEQ ID NO: 1954898 - RNA, 19 nt, Artificial Sequence
  Description of Artificial Sequence: Synthetic oligonucleotide
cggcgccagccccgcgcuc

SEQ ID NO: 1954899 - RNA, 19 nt, Artificial Sequence
  Description of Artificial Sequence: Synthetic oligonucleotide
cggcgcgcgggcugcuccu

SEQ ID NO: 1954900 - RNA, 19 nt, Artificial Sequence
  Description of Artificial Sequence: Synthetic oligonucleotide
aauugggccguccaguccc

SEQ ID NO: 1954901 - RNA, 19 nt, Artificial Sequence
  Description of Artificial Sequence: Synthetic oligonucleotide
uucuacauccuccugaggc

SEQ ID NO: 1954902 - RNA, 19 nt, Artificial Sequence
  Description of Artificial Sequence: Synthetic oligonucleotide
uggugaaugguccauacag

SEQ ID NO: 1954903 - RNA, 19 nt, Artificial Sequence
  Description of Artificial Sequence: Synthetic oligonucleotide
auaucauacuugcuggacc

SEQ ID NO: 1954904 - RNA, 19 nt, Artificial Sequence
  Description of Artificial Sequence: Synthetic oligonucleotide
aaaucaaugcgcuuggaau

SEQ ID NO: 1954905 - RNA, 19 nt, Artificial Sequence
  Description of Artificial Sequence: Synthetic oligonucleotide
agagaucaaaaucaaugcg

SEQ ID NO: 1954906 - RNA, 19 nt, Artificial Sequence
  Description of Artificial Sequence: Synthetic oligonucleotide
auauucccacaucacaucc

SEQ ID NO: 1954907 - RNA, 19 nt, Artificial Sequence
  Description of Artificial Sequence: Synthetic oligonucleotide
acucaucggagucugaccc

SEQ ID NO: 1954908 - RNA, 19 nt, Artificial Sequence
  Description of Artificial Sequence: Synthetic oligonucleotide
agaguagcuuccaagaucc

SEQ ID NO: 1954909 - RNA, 19 nt, Artificial Sequence
  Description of Artificial Sequence: Synthetic oligonucleotide
aaacccuucagacgcauag

SEQ ID NO: 1954910 - RNA, 19 nt, Artificial Sequence
  Description of Artificial Sequence: Synthetic oligonucleotide
uguucucccacuuauauuc

SEQ ID NO: 1954911 - RNA, 19 nt, Artificial Sequence
  Description of Artificial Sequence: Synthetic oligonucleotide
accaagguugccucgagcc

SEQ ID NO: 1954912 - RNA, 19 nt, Artificial Sequence
  Description of Artificial Sequence: Synthetic oligonucleotide
guagagaucaaaaucaaug

SEQ ID NO: 1954913 - RNA, 19 nt, Artificial Sequence
  Description of Artificial Sequence: Synthetic oligonucleotide
aguccgacaccccaaaccc

SEQ ID NO: 1954914 - RNA, 19 nt, Artificial Sequence
  Description of Artificial Sequence: Synthetic oligonucleotide
cugguauacaccaagguug

SEQ ID NO: 1954915 - RNA, 19 nt, Artificial Sequence
  Description of Artificial Sequence: Synthetic oligonucleotide
ucugccaaguccaagaaaa

SEQ ID NO: 1954916 - RNA, 19 nt, Artificial Sequence
  Description of Artificial Sequence: Synthetic oligonucleotide
uuuauugggaaagggaaag

SEQ ID NO: 1954917 - RNA, 19 nt, Artificial Sequence
  Description of Artificial Sequence: Synthetic oligonucleotide
agaacugaccaccuggagg

SEQ ID NO: 1954918 - RNA, 19 nt, Artificial Sequence
  Description of Artificial Sequence: Synthetic oligonucleotide
gaucagccaacccagagag

SEQ ID NO: 1954919 - RNA, 19 nt, Artificial Sequence
  Description of Artificial Sequence: Synthetic oligonucleotide
acguguagagaucaaaauc

SEQ ID NO: 1954920 - RNA, 19 nt, Artificial Sequence
  Description of Artificial Sequence: Synthetic oligonucleotide
aaaaggggcuaccacacug

SEQ ID NO: 1954921 - RNA, 19 nt, Artificial Sequence
  Description of Artificial Sequence: Synthetic oligonucleotide
uuauauucccacaucacau

SEQ ID NO: 1954922 - RNA, 19 nt, Artificial Sequence
  Description of Artificial Sequence: Synthetic oligonucleotide
accuugaaaagucacuuuc

SEQ ID NO: 1954923 - RNA, 19 nt, Artificial Sequence
  Description of Artificial Sequence: Synthetic oligonucleotide
acacucaaggcuuuauugg

SEQ ID NO: 1954924 - RNA, 19 nt, Artificial Sequence
  Description of Artificial Sequence: Synthetic oligonucleotide
gaaguaguugccaucaagc

SEQ ID NO: 1954925 - RNA, 19 nt, Artificial Sequence
  Description of Artificial Sequence: Synthetic oligonucleotide
aguguuugccuuugaagcg

SEQ ID NO: 1954926 - RNA, 19 nt, Artificial Sequence
  Description of Artificial Sequence: Synthetic oligonucleotide
uuuccugguauacaccaag

SEQ ID NO: 1954927 - RNA, 19 nt, Artificial Sequence
  Description of Artificial Sequence: Synthetic oligonucleotide
aaaaucaaugcgcuuggaa

SEQ ID NO: 1954928 - RNA, 19 nt, Artificial Sequence
  Description of Artificial Sequence: Synthetic oligonucleotide
caucacauccauuagacca

SEQ ID NO: 1954929 - RNA, 19 nt, Artificial Sequence
  Description of Artificial Sequence: Synthetic oligonucleotide
agagagccggucuaggcgc

SEQ ID NO: 1954930 - RNA, 19 nt, Artificial Sequence
  Description of Artificial Sequence: Synthetic oligonucleotide
cuuguuuccugguauacac

SEQ ID NO: 1954931 - RNA, 19 nt, Artificial Sequence
  Description of Artificial Sequence: Synthetic oligonucleotide
caggauaucauacuugcug

SEQ ID NO: 1954932 - RNA, 19 nt, Artificial Sequence
  Description of Artificial Sequence: Synthetic oligonucleotide
uuugaagcggcucccagga

SEQ ID NO: 1954933 - RNA, 19 nt, Artificial Sequence
  Description of Artificial Sequence: Synthetic oligonucleotide
ugaaaccuggugcuuauca

SEQ ID NO: 1954934 - RNA, 19 nt, Artificial Sequence
  Description of Artificial Sequence: Synthetic oligonucleotide
aagggaaaguggcugaaga

SEQ ID NO: 1954935 - RNA, 19 nt, Artificial Sequence
  Description of Artificial Sequence: Synthetic oligonucleotide
agucacuuuccucuuuggc

SEQ ID NO: 1954936 - RNA, 19 nt, Artificial Sequence
  Description of Artificial Sequence: Synthetic oligonucleotide
aaguaguugccaucaagca

SEQ ID NO: 1954937 - RNA, 19 nt, Artificial Sequence
  Description of Artificial Sequence: Synthetic oligonucleotide
ucagccaacccagagagcc

SEQ ID NO: 1954938 - RNA, 19 nt, Artificial Sequence
  Description of Artificial Sequence: Synthetic oligonucleotide
guagccuucagucacccag

SEQ ID NO: 1954939 - RNA, 19 nt, Artificial Sequence
  Description of Artificial Sequence: Synthetic oligonucleotide
auccauuagaccaucuccc

SEQ ID NO: 1954940 - RNA, 19 nt, Artificial Sequence
  Description of Artificial Sequence: Synthetic oligonucleotide
ggaauuguagaacugacca

SEQ ID NO: 1954941 - RNA, 19 nt, Artificial Sequence
  Description of Artificial Sequence: Synthetic oligonucleotide
ugucuaaagaguguuugcc

SEQ ID NO: 1954942 - RNA, 19 nt, Artificial Sequence
  Description of Artificial Sequence: Synthetic oligonucleotide
ucgucagcaaacaugucca

SEQ ID NO: 1954943 - RNA, 19 nt, Artificial Sequence
  Description of Artificial Sequence: Synthetic oligonucleotide
aaaagucccuccaggaggg

SEQ ID NO: 1954944 - RNA, 19 nt, Artificial Sequence
  Description of Artificial Sequence: Synthetic oligonucleotide
uggaauuguagaacugacc

SEQ ID NO: 1954945 - RNA, 19 nt, Artificial Sequence
  Description of Artificial Sequence: Synthetic oligonucleotide
ucagacgcauagccaaucg

SEQ ID NO: 1954946 - RNA, 19 nt, Artificial Sequence
  Description of Artificial Sequence: Synthetic oligonucleotide
uccauuagaccaucucccg

SEQ ID NO: 1954947 - RNA, 19 nt, Artificial Sequence
  Description of Artificial Sequence: Synthetic oligonucleotide
gcaauaaacaccauccggg

SEQ ID NO: 1954948 - RNA, 19 nt, Artificial Sequence
  Description of Artificial Sequence: Synthetic oligonucleotide
uauugggaaagggaaagug

SEQ ID NO: 1954949 - RNA, 19 nt, Artificial Sequence
  Description of Artificial Sequence: Synthetic oligonucleotide
ugguauacaccaagguugc

SEQ ID NO: 1954950 - RNA, 19 nt, Artificial Sequence
  Description of Artificial Sequence: Synthetic oligonucleotide
acuggugaaugguccauac

SEQ ID NO: 1954951 - RNA, 19 nt, Artificial Sequence
  Description of Artificial Sequence: Synthetic oligonucleotide
uugaucagccaacccagag

SEQ ID NO: 1954952 - RNA, 19 nt, Artificial Sequence
  Description of Artificial Sequence: Synthetic oligonucleotide
acgcauagccaaucguucc

SEQ ID NO: 1954953 - RNA, 19 nt, Artificial Sequence
  Description of Artificial Sequence: Synthetic oligonucleotide
ucuacauccuccugaggcc

SEQ ID NO: 1954954 - RNA, 19 nt, Artificial Sequence
  Description of Artificial Sequence: Synthetic oligonucleotide
auguuguccagccagcugu

SEQ ID NO: 1954955 - RNA, 19 nt, Artificial Sequence
  Description of Artificial Sequence: Synthetic oligonucleotide
ugugcauccugguucagga

SEQ ID NO: 1954956 - RNA, 19 nt, Artificial Sequence
  Description of Artificial Sequence: Synthetic oligonucleotide
uccaagauccucacugccc

SEQ ID NO: 1954957 - RNA, 19 nt, Artificial Sequence
  Description of Artificial Sequence: Synthetic oligonucleotide
acuugcuggacccuucauc

SEQ ID NO: 1954958 - RNA, 19 nt, Artificial Sequence
  Description of Artificial Sequence: Synthetic oligonucleotide
aucggagucugacccaggc

SEQ ID NO: 1954959 - RNA, 19 nt, Artificial Sequence
  Description of Artificial Sequence: Synthetic oligonucleotide
cuuauauucccacaucaca

SEQ ID NO: 1954960 - RNA, 19 nt, Artificial Sequence
  Description of Artificial Sequence: Synthetic oligonucleotide
cauuugaucagccaaccca

SEQ ID NO: 1954961 - RNA, 19 nt, Artificial Sequence
  Description of Artificial Sequence: Synthetic oligonucleotide
cacacucaaggcuuuauug

SEQ ID NO: 1954962 - RNA, 19 nt, Artificial Sequence
  Description of Artificial Sequence: Synthetic oligonucleotide
caugggaucccugaguccg

SEQ ID NO: 1954963 - RNA, 19 nt, Artificial Sequence
  Description of Artificial Sequence: Synthetic oligonucleotide
ugucacuucgucagcaaac

SEQ ID NO: 1954964 - RNA, 19 nt, Artificial Sequence
  Description of Artificial Sequence: Synthetic oligonucleotide
ucacguguagagaucaaaa

SEQ ID NO: 1954965 - RNA, 19 nt, Artificial Sequence
  Description of Artificial Sequence: Synthetic oligonucleotide
ugaucagccaacccagaga

SEQ ID NO: 1954966 - RNA, 19 nt, Artificial Sequence
  Description of Artificial Sequence: Synthetic oligonucleotide
ucuaaagaguguuugccuu

SEQ ID NO: 1954967 - RNA, 19 nt, Artificial Sequence
  Description of Artificial Sequence: Synthetic oligonucleotide
uuggcuaacagcagcucca

SEQ ID NO: 1954968 - RNA, 19 nt, Artificial Sequence
  Description of Artificial Sequence: Synthetic oligonucleotide
ugguccauacagcucagca

SEQ ID NO: 1954969 - RNA, 19 nt, Artificial Sequence
  Description of Artificial Sequence: Synthetic oligonucleotide
auuugaucagccaacccag

SEQ ID NO: 1954970 - RNA, 19 nt, Artificial Sequence
  Description of Artificial Sequence: Synthetic oligonucleotide
uugccuuugaagcggcucc

SEQ ID NO: 1954971 - RNA, 19 nt, Artificial Sequence
  Description of Artificial Sequence: Synthetic oligonucleotide
uauacaccaagguugccuc

SEQ ID NO: 1954972 - RNA, 19 nt, Artificial Sequence
  Description of Artificial Sequence: Synthetic oligonucleotide
gaguccgacaccccaaacc

SEQ ID NO: 1954973 - RNA, 19 nt, Artificial Sequence
  Description of Artificial Sequence: Synthetic oligonucleotide
ucacuuuccucuuuggcau

SEQ ID NO: 1954974 - RNA, 19 nt, Artificial Sequence
  Description of Artificial Sequence: Synthetic oligonucleotide
acugucuaaagaguguuug

SEQ ID NO: 1954975 - RNA, 19 nt, Artificial Sequence
  Description of Artificial Sequence: Synthetic oligonucleotide
accuggaggguccagcuuc

SEQ ID NO: 1954976 - RNA, 19 nt, Artificial Sequence
  Description of Artificial Sequence: Synthetic oligonucleotide
acuucgucagcaaacaugu

SEQ ID NO: 1954977 - RNA, 19 nt, Artificial Sequence
  Description of Artificial Sequence: Synthetic oligonucleotide
cuuggcuaacagcagcucc

SEQ ID NO: 1954978 - RNA, 19 nt, Artificial Sequence
  Description of Artificial Sequence: Synthetic oligonucleotide
cacuucgucagcaaacaug

SEQ ID NO: 1954979 - RNA, 19 nt, Artificial Sequence
  Description of Artificial Sequence: Synthetic oligonucleotide
ucgagccaccauuugauca

SEQ ID NO: 1954980 - RNA, 19 nt, Artificial Sequence
  Description of Artificial Sequence: Synthetic oligonucleotide
gcuuccaagauccucacug

SEQ ID NO: 1954981 - RNA, 19 nt, Artificial Sequence
  Description of Artificial Sequence: Synthetic oligonucleotide
acgccuaagugccccaagc

SEQ ID NO: 1954982 - RNA, 19 nt, Artificial Sequence
  Description of Artificial Sequence: Synthetic oligonucleotide
aaaggggcuaccacacugg

SEQ ID NO: 1954983 - RNA, 19 nt, Artificial Sequence
  Description of Artificial Sequence: Synthetic oligonucleotide
cuuccggcaauaaacacca

SEQ ID NO: 1954984 - RNA, 19 nt, Artificial Sequence
  Description of Artificial Sequence: Synthetic oligonucleotide
ugcgcuuggaauuguagaa

SEQ ID NO: 1954985 - RNA, 19 nt, Artificial Sequence
  Description of Artificial Sequence: Synthetic oligonucleotide
cuugcuggacccuucauca

SEQ ID NO: 1954986 - RNA, 19 nt, Artificial Sequence
  Description of Artificial Sequence: Synthetic oligonucleotide
aaugcgcuuggaauuguag

SEQ ID NO: 1954987 - RNA, 19 nt, Artificial Sequence
  Description of Artificial Sequence: Synthetic oligonucleotide
uugaaaagucacuuuccuc

SEQ ID NO: 1954988 - RNA, 19 nt, Artificial Sequence
  Description of Artificial Sequence: Synthetic oligonucleotide
aaggggcuaccacacuggg

SEQ ID NO: 1954989 - RNA, 19 nt, Artificial Sequence
  Description of Artificial Sequence: Synthetic oligonucleotide
guccauacagcucagcauc

SEQ ID NO: 1954990 - RNA, 19 nt, Artificial Sequence
  Description of Artificial Sequence: Synthetic oligonucleotide
aagaguguuugccuuugaa

SEQ ID NO: 1954991 - RNA, 19 nt, Artificial Sequence
  Description of Artificial Sequence: Synthetic oligonucleotide
gauaucauacuugcuggac

SEQ ID NO: 1954992 - RNA, 19 nt, Artificial Sequence
  Description of Artificial Sequence: Synthetic oligonucleotide
ggggcuaccacacugggcc

SEQ ID NO: 1954993 - RNA, 19 nt, Artificial Sequence
  Description of Artificial Sequence: Synthetic oligonucleotide
ccggcaauaaacaccaucc

SEQ ID NO: 1954994 - RNA, 19 nt, Artificial Sequence
  Description of Artificial Sequence: Synthetic oligonucleotide
aguagcuuccaagauccuc

SEQ ID NO: 1954995 - RNA, 19 nt, Artificial Sequence
  Description of Artificial Sequence: Synthetic oligonucleotide
cugucuaaagaguguuugc

SEQ ID NO: 1954996 - RNA, 19 nt, Artificial Sequence
  Description of Artificial Sequence: Synthetic oligonucleotide
uagccuucagucacccagg

SEQ ID NO: 1954997 - RNA, 19 nt, Artificial Sequence
  Description of Artificial Sequence: Synthetic oligonucleotide
aagucccuccaggaggggc

SEQ ID NO: 1954998 - RNA, 19 nt, Artificial Sequence
  Description of Artificial Sequence: Synthetic oligonucleotide
uccugguauacaccaaggu

SEQ ID NO: 1954999 - RNA, 19 nt, Artificial Sequence
  Description of Artificial Sequence: Synthetic oligonucleotide
cuuccaagauccucacugc

SEQ ID NO: 1955000 - RNA, 19 nt, Artificial Sequence
  Description of Artificial Sequence: Synthetic oligonucleotide
ucucccacuuauauuccca

SEQ ID NO: 1955001 - RNA, 19 nt, Artificial Sequence
  Description of Artificial Sequence: Synthetic oligonucleotide
cagagagccggucuaggcg

SEQ ID NO: 1955002 - RNA, 19 nt, Artificial Sequence
  Description of Artificial Sequence: Synthetic oligonucleotide
cacuuauauucccacauca

SEQ ID NO: 1955003 - RNA, 19 nt, Artificial Sequence
  Description of Artificial Sequence: Synthetic oligonucleotide
uagaacugaccaccuggag

SEQ ID NO: 1955004 - RNA, 19 nt, Artificial Sequence
  Description of Artificial Sequence: Synthetic oligonucleotide
uauucccacaucacaucca

SEQ ID NO: 1955005 - RNA, 19 nt, Artificial Sequence
  Description of Artificial Sequence: Synthetic oligonucleotide
ggaaguagccuucagucac

SEQ ID NO: 1955006 - RNA, 19 nt, Artificial Sequence
  Description of Artificial Sequence: Synthetic oligonucleotide
accccaaacccuucagacg

SEQ ID NO: 1955007 - RNA, 19 nt, Artificial Sequence
  Description of Artificial Sequence: Synthetic oligonucleotide
uccucugagucugaaaccu

SEQ ID NO: 1955008 - RNA, 19 nt, Artificial Sequence
  Description of Artificial Sequence: Synthetic oligonucleotide
uagccaaucguucccuugu

SEQ ID NO: 1955009 - RNA, 19 nt, Artificial Sequence
  Description of Artificial Sequence: Synthetic oligonucleotide
uccuuuaugcgcagggguc

SEQ ID NO: 1955010 - RNA, 19 nt, Artificial Sequence
  Description of Artificial Sequence: Synthetic oligonucleotide
uaaagaguguuugccuuug

SEQ ID NO: 1955011 - RNA, 19 nt, Artificial Sequence
  Description of Artificial Sequence: Synthetic oligonucleotide
uucacccagucaauguugu

SEQ ID NO: 1955012 - RNA, 19 nt, Artificial Sequence
  Description of Artificial Sequence: Synthetic oligonucleotide
cauacagcucagcaucccc

SEQ ID NO: 1955013 - RNA, 19 nt, Artificial Sequence
  Description of Artificial Sequence: Synthetic oligonucleotide
cuuaucagguggccgcucc

SEQ ID NO: 1955014 - RNA, 19 nt, Artificial Sequence
  Description of Artificial Sequence: Synthetic oligonucleotide
gccaucaagcaucaaagug

SEQ ID NO: 1955015 - RNA, 19 nt, Artificial Sequence
  Description of Artificial Sequence: Synthetic oligonucleotide
gugcuuaucagguggccgc

SEQ ID NO: 1955016 - RNA, 19 nt, Artificial Sequence
  Description of Artificial Sequence: Synthetic oligonucleotide
auagccaaucguucccuug

SEQ ID NO: 1955017 - RNA, 19 nt, Artificial Sequence
  Description of Artificial Sequence: Synthetic oligonucleotide
guguuugccuuugaagcgg

SEQ ID NO: 1955018 - RNA, 19 nt, Artificial Sequence
  Description of Artificial Sequence: Synthetic oligonucleotide
guggcugaagaguagcuuc

SEQ ID NO: 1955019 - RNA, 19 nt, Artificial Sequence
  Description of Artificial Sequence: Synthetic oligonucleotide
augcgcuuggaauuguaga

SEQ ID NO: 1955020 - RNA, 19 nt, Artificial Sequence
  Description of Artificial Sequence: Synthetic oligonucleotide
aacgccuaagugccccaag

SEQ ID NO: 1955021 - RNA, 19 nt, Artificial Sequence
  Description of Artificial Sequence: Synthetic oligonucleotide
guagcuuccaagauccuca

SEQ ID NO: 1955022 - RNA, 19 nt, Artificial Sequence
  Description of Artificial Sequence: Synthetic oligonucleotide
caccauuugaucagccaac

SEQ ID NO: 1955023 - RNA, 19 nt, Artificial Sequence
  Description of Artificial Sequence: Synthetic oligonucleotide
uucucccacuuauauuccc

SEQ ID NO: 1955024 - RNA, 19 nt, Artificial Sequence
  Description of Artificial Sequence: Synthetic oligonucleotide
gucaugggaucccugaguc

SEQ ID NO: 1955025 - RNA, 19 nt, Artificial Sequence
  Description of Artificial Sequence: Synthetic oligonucleotide
uucccuuguuuccugguau

SEQ ID NO: 1955026 - RNA, 19 nt, Artificial Sequence
  Description of Artificial Sequence: Synthetic oligonucleotide
cauguagcugcuuccugac

SEQ ID NO: 1955027 - RNA, 19 nt, Artificial Sequence
  Description of Artificial Sequence: Synthetic oligonucleotide
auacaccaagguugccucg

SEQ ID NO: 1955028 - RNA, 19 nt, Artificial Sequence
  Description of Artificial Sequence: Synthetic oligonucleotide
ucaucggagucugacccag

SEQ ID NO: 1955029 - RNA, 19 nt, Artificial Sequence
  Description of Artificial Sequence: Synthetic oligonucleotide
aucaaugcgcuuggaauug

SEQ ID NO: 1955030 - RNA, 19 nt, Artificial Sequence
  Description of Artificial Sequence: Synthetic oligonucleotide
uuaugcgcaggggucgggg

SEQ ID NO: 1955031 - RNA, 19 nt, Artificial Sequence
  Description of Artificial Sequence: Synthetic oligonucleotide
gaauugggccguccagucc

SEQ ID NO: 1955032 - RNA, 19 nt, Artificial Sequence
  Description of Artificial Sequence: Synthetic oligonucleotide
aagguugccucgagccacc

SEQ ID NO: 1955033 - RNA, 19 nt, Artificial Sequence
  Description of Artificial Sequence: Synthetic oligonucleotide
auuagaccaucucccgcug

SEQ ID NO: 1955034 - RNA, 19 nt, Artificial Sequence
  Description of Artificial Sequence: Synthetic oligonucleotide
aagugccccaagcccacug

SEQ ID NO: 1955035 - RNA, 19 nt, Artificial Sequence
  Description of Artificial Sequence: Synthetic oligonucleotide
cacucaucggagucugacc

SEQ ID NO: 1955036 - RNA, 19 nt, Artificial Sequence
  Description of Artificial Sequence: Synthetic oligonucleotide
gugaaugguccauacagcu

SEQ ID NO: 1955037 - RNA, 19 nt, Artificial Sequence
  Description of Artificial Sequence: Synthetic oligonucleotide
ucaugggaucccugagucc

SEQ ID NO: 1955038 - RNA, 19 nt, Artificial Sequence
  Description of Artificial Sequence: Synthetic oligonucleotide
gacaccccaaacccuucag

SEQ ID NO: 1955039 - RNA, 19 nt, Artificial Sequence
  Description of Artificial Sequence: Synthetic oligonucleotide
gcuguggggaauugggccg

SEQ ID NO: 1955040 - RNA, 19 nt, Artificial Sequence
  Description of Artificial Sequence: Synthetic oligonucleotide
uggggaauugggccgucca

SEQ ID NO: 1955041 - RNA, 19 nt, Artificial Sequence
  Description of Artificial Sequence: Synthetic oligonucleotide
ucugaaaccuggugcuuau

SEQ ID NO: 1955042 - RNA, 19 nt, Artificial Sequence
  Description of Artificial Sequence: Synthetic oligonucleotide
uucacguguagagaucaaa

SEQ ID NO: 1955043 - RNA, 19 nt, Artificial Sequence
  Description of Artificial Sequence: Synthetic oligonucleotide
caucaaaguggccuuccuc

SEQ ID NO: 1955044 - RNA, 19 nt, Artificial Sequence
  Description of Artificial Sequence: Synthetic oligonucleotide
uaguugccaucaagcauca

SEQ ID NO: 1955045 - RNA, 19 nt, Artificial Sequence
  Description of Artificial Sequence: Synthetic oligonucleotide
accaccuggaggguccagc

SEQ ID NO: 1955046 - RNA, 19 nt, Artificial Sequence
  Description of Artificial Sequence: Synthetic oligonucleotide
gagguguggggucauggga

SEQ ID NO: 1955047 - RNA, 19 nt, Artificial Sequence
  Description of Artificial Sequence: Synthetic oligonucleotide
gacgcauagccaaucguuc

SEQ ID NO: 1955048 - RNA, 19 nt, Artificial Sequence
  Description of Artificial Sequence: Synthetic oligonucleotide
ucccacuuauauucccaca

SEQ ID NO: 1955049 - RNA, 19 nt, Artificial Sequence
  Description of Artificial Sequence: Synthetic oligonucleotide
ucacugucuaaagaguguu

SEQ ID NO: 1955050 - RNA, 19 nt, Artificial Sequence
  Description of Artificial Sequence: Synthetic oligonucleotide
aaguggccuuccuccaugu

SEQ ID NO: 1955051 - RNA, 19 nt, Artificial Sequence
  Description of Artificial Sequence: Synthetic oligonucleotide
cuugaaaagucacuuuccu

SEQ ID NO: 1955052 - RNA, 19 nt, Artificial Sequence
  Description of Artificial Sequence: Synthetic oligonucleotide
cucccacuuauauucccac

SEQ ID NO: 1955053 - RNA, 19 nt, Artificial Sequence
  Description of Artificial Sequence: Synthetic oligonucleotide
cuggugcuuaucagguggc

SEQ ID NO: 1955054 - RNA, 19 nt, Artificial Sequence
  Description of Artificial Sequence: Synthetic oligonucleotide
cuaagugccccaagcccac

SEQ ID NO: 1955055 - RNA, 19 nt, Artificial Sequence
  Description of Artificial Sequence: Synthetic oligonucleotide
uuguccagccagcugucuc

SEQ ID NO: 1955056 - RNA, 19 nt, Artificial Sequence
  Description of Artificial Sequence: Synthetic oligonucleotide
auacuugcuggacccuuca

SEQ ID NO: 1955057 - RNA, 19 nt, Artificial Sequence
  Description of Artificial Sequence: Synthetic oligonucleotide
caagguugccucgagccac

SEQ ID NO: 1955058 - RNA, 19 nt, Artificial Sequence
  Description of Artificial Sequence: Synthetic oligonucleotide
uccugaggccaggauauca

SEQ ID NO: 1955059 - RNA, 19 nt, Artificial Sequence
  Description of Artificial Sequence: Synthetic oligonucleotide
uuaucagguggccgcuccu

SEQ ID NO: 1955060 - RNA, 19 nt, Artificial Sequence
  Description of Artificial Sequence: Synthetic oligonucleotide
ccccaaacgccuaagugcc

SEQ ID NO: 1955061 - RNA, 19 nt, Artificial Sequence
  Description of Artificial Sequence: Synthetic oligonucleotide
gaucccugaguccgacacc

SEQ ID NO: 1955062 - RNA, 19 nt, Artificial Sequence
  Description of Artificial Sequence: Synthetic oligonucleotide
ugggcccuuagcagguuca

SEQ ID NO: 1955063 - RNA, 19 nt, Artificial Sequence
  Description of Artificial Sequence: Synthetic oligonucleotide
auuguagaacugaccaccu

SEQ ID NO: 1955064 - RNA, 19 nt, Artificial Sequence
  Description of Artificial Sequence: Synthetic oligonucleotide
aacccagagagccggucua

SEQ ID NO: 1955065 - RNA, 19 nt, Artificial Sequence
  Description of Artificial Sequence: Synthetic oligonucleotide
cauuagaccaucucccgcu

SEQ ID NO: 1955066 - RNA, 19 nt, Artificial Sequence
  Description of Artificial Sequence: Synthetic oligonucleotide
gggaaagggaaaguggcug

SEQ ID NO: 1955067 - RNA, 19 nt, Artificial Sequence
  Description of Artificial Sequence: Synthetic oligonucleotide
gcugucuuccuccucugag

SEQ ID NO: 1955068 - RNA, 19 nt, Artificial Sequence
  Description of Artificial Sequence: Synthetic oligonucleotide
gucuaaagaguguuugccu

SEQ ID NO: 1955069 - RNA, 19 nt, Artificial Sequence
  Description of Artificial Sequence: Synthetic oligonucleotide
gcuuccggcaauaaacacc

SEQ ID NO: 1955070 - RNA, 19 nt, Artificial Sequence
  Description of Artificial Sequence: Synthetic oligonucleotide
uuuaugcgcaggggucggg

SEQ ID NO: 1955071 - RNA, 19 nt, Artificial Sequence
  Description of Artificial Sequence: Synthetic oligonucleotide
cuuuaugcgcaggggucgg

SEQ ID NO: 1955072 - RNA, 19 nt, Artificial Sequence
  Description of Artificial Sequence: Synthetic oligonucleotide
gccuaagugccccaagccc

SEQ ID NO: 1955073 - RNA, 19 nt, Artificial Sequence
  Description of Artificial Sequence: Synthetic oligonucleotide
cuucuacauccuccugagg

SEQ ID NO: 1955074 - RNA, 19 nt, Artificial Sequence
  Description of Artificial Sequence: Synthetic oligonucleotide
ggugaaugguccauacagc

SEQ ID NO: 1955075 - RNA, 19 nt, Artificial Sequence
  Description of Artificial Sequence: Synthetic oligonucleotide
ucucccucugucacuucgu

SEQ ID NO: 1955076 - RNA, 19 nt, Artificial Sequence
  Description of Artificial Sequence: Synthetic oligonucleotide
uuuuggggacacugauuuc

SEQ ID NO: 1955077 - RNA, 19 nt, Artificial Sequence
  Description of Artificial Sequence: Synthetic oligonucleotide
ucacuucgucagcaaacau

SEQ ID NO: 1955078 - RNA, 19 nt, Artificial Sequence
  Description of Artificial Sequence: Synthetic oligonucleotide
uccgggaaguagccuucag

SEQ ID NO: 1955079 - RNA, 19 nt, Artificial Sequence
  Description of Artificial Sequence: Synthetic oligonucleotide
ugaguccgacaccccaaac

SEQ ID NO: 1955080 - RNA, 19 nt, Artificial Sequence
  Description of Artificial Sequence: Synthetic oligonucleotide
caggaaguaguugccauca

SEQ ID NO: 1955081 - RNA, 19 nt, Artificial Sequence
  Description of Artificial Sequence: Synthetic oligonucleotide
aucacauccauuagaccau

SEQ ID NO: 1955082 - RNA, 19 nt, Artificial Sequence
  Description of Artificial Sequence: Synthetic oligonucleotide
uucagacgcauagccaauc

SEQ ID NO: 1955083 - RNA, 19 nt, Artificial Sequence
  Description of Artificial Sequence: Synthetic oligonucleotide
aucaagcaucaaaguggcc

SEQ ID NO: 1955084 - RNA, 19 nt, Artificial Sequence
  Description of Artificial Sequence: Synthetic oligonucleotide
agacgcauagccaaucguu

SEQ ID NO: 1955085 - RNA, 19 nt, Artificial Sequence
  Description of Artificial Sequence: Synthetic oligonucleotide
guauacaccaagguugccu

SEQ ID NO: 1955086 - RNA, 19 nt, Artificial Sequence
  Description of Artificial Sequence: Synthetic oligonucleotide
agccagcugucucggaucu

SEQ ID NO: 1955087 - RNA, 19 nt, Artificial Sequence
  Description of Artificial Sequence: Synthetic oligonucleotide
ccuucagucacccaggucu

SEQ ID NO: 1955088 - RNA, 19 nt, Artificial Sequence
  Description of Artificial Sequence: Synthetic oligonucleotide
cagcuuccggcaauaaaca

SEQ ID NO: 1955089 - RNA, 19 nt, Artificial Sequence
  Description of Artificial Sequence: Synthetic oligonucleotide
uaugcgcaggggucggggu

SEQ ID NO: 1955090 - RNA, 19 nt, Artificial Sequence
  Description of Artificial Sequence: Synthetic oligonucleotide
gucucggaucugugcaucc

SEQ ID NO: 1955091 - RNA, 19 nt, Artificial Sequence
  Description of Artificial Sequence: Synthetic oligonucleotide
cugguucaggaaguaguug

SEQ ID NO: 1955092 - RNA, 19 nt, Artificial Sequence
  Description of Artificial Sequence: Synthetic oligonucleotide
accaucucccgcugacucu

SEQ ID NO: 1955093 - RNA, 19 nt, Artificial Sequence
  Description of Artificial Sequence: Synthetic oligonucleotide
uagcagguucacguguaga

SEQ ID NO: 1955094 - RNA, 19 nt, Artificial Sequence
  Description of Artificial Sequence: Synthetic oligonucleotide
aggggcuaccacacugggc

SEQ ID NO: 1955095 - RNA, 19 nt, Artificial Sequence
  Description of Artificial Sequence: Synthetic oligonucleotide
gguucacguguagagauca

SEQ ID NO: 1955096 - RNA, 19 nt, Artificial Sequence
  Description of Artificial Sequence: Synthetic oligonucleotide
ggauaucauacuugcugga

SEQ ID NO: 1955097 - RNA, 19 nt, Artificial Sequence
  Description of Artificial Sequence: Synthetic oligonucleotide
agguucacguguagagauc

SEQ ID NO: 1955098 - RNA, 19 nt, Artificial Sequence
  Description of Artificial Sequence: Synthetic oligonucleotide
aguucucccucugucacuu

SEQ ID NO: 1955099 - RNA, 19 nt, Artificial Sequence
  Description of Artificial Sequence: Synthetic oligonucleotide
uggugcuuaucagguggcc

SEQ ID NO: 1955100 - RNA, 19 nt, Artificial Sequence
  Description of Artificial Sequence: Synthetic oligonucleotide
accuggugcuuaucaggug

SEQ ID NO: 1955101 - RNA, 19 nt, Artificial Sequence
  Description of Artificial Sequence: Synthetic oligonucleotide
ggaauugggccguccaguc

SEQ ID NO: 1955102 - RNA, 19 nt, Artificial Sequence
  Description of Artificial Sequence: Synthetic oligonucleotide
ugccuuugaagcggcuccc

SEQ ID NO: 1955103 - RNA, 19 nt, Artificial Sequence
  Description of Artificial Sequence: Synthetic oligonucleotide
ucccuuguuuccugguaua

SEQ ID NO: 1955104 - RNA, 19 nt, Artificial Sequence
  Description of Artificial Sequence: Synthetic oligonucleotide
ugucucggaucugugcauc

SEQ ID NO: 1955105 - RNA, 19 nt, Artificial Sequence
  Description of Artificial Sequence: Synthetic oligonucleotide
ccauuagaccaucucccgc

SEQ ID NO: 1955106 - RNA, 19 nt, Artificial Sequence
  Description of Artificial Sequence: Synthetic oligonucleotide
aucagccaacccagagagc

SEQ ID NO: 1955107 - RNA, 19 nt, Artificial Sequence
  Description of Artificial Sequence: Synthetic oligonucleotide
caccaagguugccucgagc

SEQ ID NO: 1955108 - RNA, 19 nt, Artificial Sequence
  Description of Artificial Sequence: Synthetic oligonucleotide
ccuuuaugcgcaggggucg

SEQ ID NO: 1955109 - RNA, 19 nt, Artificial Sequence
  Description of Artificial Sequence: Synthetic oligonucleotide
ucaaugcgcuuggaauugu

SEQ ID NO: 1955110 - RNA, 19 nt, Artificial Sequence
  Description of Artificial Sequence: Synthetic oligonucleotide
ugccucgagccaccauuug

SEQ ID NO: 1955111 - RNA, 19 nt, Artificial Sequence
  Description of Artificial Sequence: Synthetic oligonucleotide
uggggucaugggaucccug

SEQ ID NO: 1955112 - RNA, 19 nt, Artificial Sequence
  Description of Artificial Sequence: Synthetic oligonucleotide
ggaaaguggcugaagagua

SEQ ID NO: 1955113 - RNA, 19 nt, Artificial Sequence
  Description of Artificial Sequence: Synthetic oligonucleotide
agguggccgcuccuugauc

SEQ ID NO: 1955114 - RNA, 19 nt, Artificial Sequence
  Description of Artificial Sequence: Synthetic oligonucleotide
uccaguccccuugcugucc

SEQ ID NO: 1955115 - RNA, 19 nt, Artificial Sequence
  Description of Artificial Sequence: Synthetic oligonucleotide
ugcuuaucagguggccgcu

SEQ ID NO: 1955116 - RNA, 19 nt, Artificial Sequence
  Description of Artificial Sequence: Synthetic oligonucleotide
uugaagcggcucccaggac

SEQ ID NO: 1955117 - RNA, 19 nt, Artificial Sequence
  Description of Artificial Sequence: Synthetic oligonucleotide
cacaccuugaaaagucacu

SEQ ID NO: 1955118 - RNA, 19 nt, Artificial Sequence
  Description of Artificial Sequence: Synthetic oligonucleotide
caucggagucugacccagg

SEQ ID NO: 1955119 - RNA, 19 nt, Artificial Sequence
  Description of Artificial Sequence: Synthetic oligonucleotide
ggggaauugggccguccag

SEQ ID NO: 1955120 - RNA, 19 nt, Artificial Sequence
  Description of Artificial Sequence: Synthetic oligonucleotide
agguguggggucaugggau

SEQ ID NO: 1955121 - RNA, 19 nt, Artificial Sequence
  Description of Artificial Sequence: Synthetic oligonucleotide
cagguucacguguagagau

SEQ ID NO: 1955122 - RNA, 19 nt, Artificial Sequence
  Description of Artificial Sequence: Synthetic oligonucleotide
uggggacacugauuucauc

SEQ ID NO: 1955123 - RNA, 19 nt, Artificial Sequence
  Description of Artificial Sequence: Synthetic oligonucleotide
guugccucgagccaccauu

SEQ ID NO: 1955124 - RNA, 19 nt, Artificial Sequence
  Description of Artificial Sequence: Synthetic oligonucleotide
ccauuugaucagccaaccc

SEQ ID NO: 1955125 - RNA, 19 nt, Artificial Sequence
  Description of Artificial Sequence: Synthetic oligonucleotide
auugggccguccagucccc

SEQ ID NO: 1955126 - RNA, 19 nt, Artificial Sequence
  Description of Artificial Sequence: Synthetic oligonucleotide
aggggucgggguuuccagu

SEQ ID NO: 1955127 - RNA, 19 nt, Artificial Sequence
  Description of Artificial Sequence: Synthetic oligonucleotide
agcuuccaagauccucacu

SEQ ID NO: 1955128 - RNA, 19 nt, Artificial Sequence
  Description of Artificial Sequence: Synthetic oligonucleotide
cacguguagagaucaaaau

SEQ ID NO: 1955129 - RNA, 19 nt, Artificial Sequence
  Description of Artificial Sequence: Synthetic oligonucleotide
aaacgccuaagugccccaa

SEQ ID NO: 1955130 - RNA, 19 nt, Artificial Sequence
  Description of Artificial Sequence: Synthetic oligonucleotide
ccagucaauguuguccagc

SEQ ID NO: 1955131 - RNA, 19 nt, Artificial Sequence
  Description of Artificial Sequence: Synthetic oligonucleotide
gggucaugggaucccugag

SEQ ID NO: 1955132 - RNA, 19 nt, Artificial Sequence
  Description of Artificial Sequence: Synthetic oligonucleotide
ccaaacgccuaagugcccc

SEQ ID NO: 1955133 - RNA, 19 nt, Artificial Sequence
  Description of Artificial Sequence: Synthetic oligonucleotide
cuggugaaugguccauaca

SEQ ID NO: 1955134 - RNA, 19 nt, Artificial Sequence
  Description of Artificial Sequence: Synthetic oligonucleotide
agucccuccaggaggggcu

SEQ ID NO: 1955135 - RNA, 19 nt, Artificial Sequence
  Description of Artificial Sequence: Synthetic oligonucleotide
cuccuuuaugcgcaggggu

SEQ ID NO: 1955136 - RNA, 19 nt, Artificial Sequence
  Description of Artificial Sequence: Synthetic oligonucleotide
gcuuggaauuguagaacug

SEQ ID NO: 1955137 - RNA, 19 nt, Artificial Sequence
  Description of Artificial Sequence: Synthetic oligonucleotide
cuucgucagcaaacauguc

SEQ ID NO: 1955138 - RNA, 19 nt, Artificial Sequence
  Description of Artificial Sequence: Synthetic oligonucleotide
cacugucuccucuuggcua

SEQ ID NO: 1955139 - RNA, 19 nt, Artificial Sequence
  Description of Artificial Sequence: Synthetic oligonucleotide
ggcaugacuggcagaacac

SEQ ID NO: 1955140 - RNA, 19 nt, Artificial Sequence
  Description of Artificial Sequence: Synthetic oligonucleotide
cucaucggagucugaccca

SEQ ID NO: 1955141 - RNA, 19 nt, Artificial Sequence
  Description of Artificial Sequence: Synthetic oligonucleotide
ucccugaguccgacacccc

SEQ ID NO: 1955142 - RNA, 19 nt, Artificial Sequence
  Description of Artificial Sequence: Synthetic oligonucleotide
uggcuaacagcagcuccaa

SEQ ID NO: 1955143 - RNA, 19 nt, Artificial Sequence
  Description of Artificial Sequence: Synthetic oligonucleotide
cucugucacuucgucagca

SEQ ID NO: 1955144 - RNA, 19 nt, Artificial Sequence
  Description of Artificial Sequence: Synthetic oligonucleotide
ccucaucucccacaccuug

SEQ ID NO: 1955145 - RNA, 19 nt, Artificial Sequence
  Description of Artificial Sequence: Synthetic oligonucleotide
ccggucuaggcgcuguggg

SEQ ID NO: 1955146 - RNA, 19 nt, Artificial Sequence
  Description of Artificial Sequence: Synthetic oligonucleotide
gggaaaguggcugaagagu

SEQ ID NO: 1955147 - RNA, 19 nt, Artificial Sequence
  Description of Artificial Sequence: Synthetic oligonucleotide
ggggucaugggaucccuga

SEQ ID NO: 1955148 - RNA, 19 nt, Artificial Sequence
  Description of Artificial Sequence: Synthetic oligonucleotide
agucugacccaggcugucu

SEQ ID NO: 1955149 - RNA, 19 nt, Artificial Sequence
  Description of Artificial Sequence: Synthetic oligonucleotide
aacugaccaccuggagggu

SEQ ID NO: 1955150 - RNA, 19 nt, Artificial Sequence
  Description of Artificial Sequence: Synthetic oligonucleotide
cggcaauaaacaccauccg

SEQ ID NO: 1955151 - RNA, 19 nt, Artificial Sequence
  Description of Artificial Sequence: Synthetic oligonucleotide
uucccacaucacauccauu

SEQ ID NO: 1955152 - RNA, 19 nt, Artificial Sequence
  Description of Artificial Sequence: Synthetic oligonucleotide
ggucuaggcgcugugggga

SEQ ID NO: 1955153 - RNA, 19 nt, Artificial Sequence
  Description of Artificial Sequence: Synthetic oligonucleotide
uuggcaugacuggcagaac

SEQ ID NO: 1955154 - RNA, 19 nt, Artificial Sequence
  Description of Artificial Sequence: Synthetic oligonucleotide
ccuuugaagcggcucccag

SEQ ID NO: 1955155 - RNA, 19 nt, Artificial Sequence
  Description of Artificial Sequence: Synthetic oligonucleotide
ugggaucccugaguccgac

SEQ ID NO: 1955156 - RNA, 19 nt, Artificial Sequence
  Description of Artificial Sequence: Synthetic oligonucleotide
gcccuuagcagguucacgu

SEQ ID NO: 1955157 - RNA, 19 nt, Artificial Sequence
  Description of Artificial Sequence: Synthetic oligonucleotide
cgcauagccaaucguuccc

SEQ ID NO: 1955158 - RNA, 19 nt, Artificial Sequence
  Description of Artificial Sequence: Synthetic oligonucleotide
cuuuccucuuuggcaugac

SEQ ID NO: 1955159 - RNA, 19 nt, Artificial Sequence
  Description of Artificial Sequence: Synthetic oligonucleotide
agccaaucguucccuuguu

SEQ ID NO: 1955160 - RNA, 19 nt, Artificial Sequence
  Description of Artificial Sequence: Synthetic oligonucleotide
caaaaucaaugcgcuugga

SEQ ID NO: 1955161 - RNA, 19 nt, Artificial Sequence
  Description of Artificial Sequence: Synthetic oligonucleotide
caucucccgcugacucugc

SEQ ID NO: 1955162 - RNA, 19 nt, Artificial Sequence
  Description of Artificial Sequence: Synthetic oligonucleotide
caaacgccuaagugcccca

SEQ ID NO: 1955163 - RNA, 19 nt, Artificial Sequence
  Description of Artificial Sequence: Synthetic oligonucleotide
gguguggggucaugggauc

SEQ ID NO: 1955164 - RNA, 19 nt, Artificial Sequence
  Description of Artificial Sequence: Synthetic oligonucleotide
cagcugucucggaucugug

SEQ ID NO: 1955165 - RNA, 19 nt, Artificial Sequence
  Description of Artificial Sequence: Synthetic oligonucleotide
gccucgagccaccauuuga

SEQ ID NO: 1955166 - RNA, 19 nt, Artificial Sequence
  Description of Artificial Sequence: Synthetic oligonucleotide
uaggcgcuguggggaauug

SEQ ID NO: 1955167 - RNA, 19 nt, Artificial Sequence
  Description of Artificial Sequence: Synthetic oligonucleotide
gggcuugggcacucaucgg

SEQ ID NO: 1955168 - RNA, 19 nt, Artificial Sequence
  Description of Artificial Sequence: Synthetic oligonucleotide
ggcccuuagcagguucacg

SEQ ID NO: 1955169 - RNA, 19 nt, Artificial Sequence
  Description of Artificial Sequence: Synthetic oligonucleotide
cugaggccaggauaucaua

SEQ ID NO: 1955170 - RNA, 19 nt, Artificial Sequence
  Description of Artificial Sequence: Synthetic oligonucleotide
gguauacaccaagguugcc

SEQ ID NO: 1955171 - RNA, 19 nt, Artificial Sequence
  Description of Artificial Sequence: Synthetic oligonucleotide
gcgcuuggaauuguagaac

SEQ ID NO: 1955172 - RNA, 19 nt, Artificial Sequence
  Description of Artificial Sequence: Synthetic oligonucleotide
gagucugacccaggcuguc

SEQ ID NO: 1955173 - RNA, 19 nt, Artificial Sequence
  Description of Artificial Sequence: Synthetic oligonucleotide
auccuccugaggccaggau

SEQ ID NO: 1955174 - RNA, 19 nt, Artificial Sequence
  Description of Artificial Sequence: Synthetic oligonucleotide
uccagccagcugucucgga

SEQ ID NO: 1955175 - RNA, 19 nt, Artificial Sequence
  Description of Artificial Sequence: Synthetic oligonucleotide
caaugcgcuuggaauugua

SEQ ID NO: 1955176 - RNA, 19 nt, Artificial Sequence
  Description of Artificial Sequence: Synthetic oligonucleotide
ggucaugggaucccugagu

SEQ ID NO: 1955177 - RNA, 19 nt, Artificial Sequence
  Description of Artificial Sequence: Synthetic oligonucleotide
uaagugccccaagcccacu

SEQ ID NO: 1955178 - RNA, 19 nt, Artificial Sequence
  Description of Artificial Sequence: Synthetic oligonucleotide
cccuuagcagguucacgug

SEQ ID NO: 1955179 - RNA, 19 nt, Artificial Sequence
  Description of Artificial Sequence: Synthetic oligonucleotide
cugaaaccuggugcuuauc

SEQ ID NO: 1955180 - RNA, 19 nt, Artificial Sequence
  Description of Artificial Sequence: Synthetic oligonucleotide
gggccguccaguccccuug

SEQ ID NO: 1955181 - RNA, 19 nt, Artificial Sequence
  Description of Artificial Sequence: Synthetic oligonucleotide
ccaggucugcaucugggca

SEQ ID NO: 1955182 - RNA, 19 nt, Artificial Sequence
  Description of Artificial Sequence: Synthetic oligonucleotide
guguucucccacuuauauu

SEQ ID NO: 1955183 - RNA, 19 nt, Artificial Sequence
  Description of Artificial Sequence: Synthetic oligonucleotide
aggguccagcuuccggcaa

SEQ ID NO: 1955184 - RNA, 19 nt, Artificial Sequence
  Description of Artificial Sequence: Synthetic oligonucleotide
gucuaggcgcuguggggaa

SEQ ID NO: 1955185 - RNA, 19 nt, Artificial Sequence
  Description of Artificial Sequence: Synthetic oligonucleotide
cgccuaagugccccaagcc

SEQ ID NO: 1955186 - RNA, 19 nt, Artificial Sequence
  Description of Artificial Sequence: Synthetic oligonucleotide
ucuaggcgcuguggggaau

SEQ ID NO: 1955187 - RNA, 19 nt, Artificial Sequence
  Description of Artificial Sequence: Synthetic oligonucleotide
auccgggaaguagccuuca

SEQ ID NO: 1955188 - RNA, 19 nt, Artificial Sequence
  Description of Artificial Sequence: Synthetic oligonucleotide
cagacgcauagccaaucgu

SEQ ID NO: 1955189 - RNA, 19 nt, Artificial Sequence
  Description of Artificial Sequence: Synthetic oligonucleotide
uuccggcaauaaacaccau

SEQ ID NO: 1955190 - RNA, 19 nt, Artificial Sequence
  Description of Artificial Sequence: Synthetic oligonucleotide
caucucccacaccuugaaa

SEQ ID NO: 1955191 - RNA, 19 nt, Artificial Sequence
  Description of Artificial Sequence: Synthetic oligonucleotide
cuugggcacucaucggagu

SEQ ID NO: 1955192 - RNA, 19 nt, Artificial Sequence
  Description of Artificial Sequence: Synthetic oligonucleotide
gugcauccugguucaggaa

SEQ ID NO: 1955193 - RNA, 19 nt, Artificial Sequence
  Description of Artificial Sequence: Synthetic oligonucleotide
caguccccuugcugucccc

SEQ ID NO: 1955194 - RNA, 19 nt, Artificial Sequence
  Description of Artificial Sequence: Synthetic oligonucleotide
ccugguauacaccaagguu

SEQ ID NO: 1955195 - RNA, 19 nt, Artificial Sequence
  Description of Artificial Sequence: Synthetic oligonucleotide
caaacccuucagacgcaua

SEQ ID NO: 1955196 - RNA, 19 nt, Artificial Sequence
  Description of Artificial Sequence: Synthetic oligonucleotide
cccuuguuuccugguauac

SEQ ID NO: 1955197 - RNA, 19 nt, Artificial Sequence
  Description of Artificial Sequence: Synthetic oligonucleotide
cuucagacgcauagccaau

SEQ ID NO: 1955198 - RNA, 19 nt, Artificial Sequence
  Description of Artificial Sequence: Synthetic oligonucleotide
ccaguccccuugcuguccc

SEQ ID NO: 1955199 - RNA, 19 nt, Artificial Sequence
  Description of Artificial Sequence: Synthetic oligonucleotide
cggucuaggcgcugugggg

SEQ ID NO: 1955200 - RNA, 19 nt, Artificial Sequence
  Description of Artificial Sequence: Synthetic oligonucleotide
gccggucuaggcgcugugg

SEQ ID NO: 1955201 - RNA, 19 nt, Artificial Sequence
  Description of Artificial Sequence: Synthetic oligonucleotide
ccucugucacuucgucagc

SEQ ID NO: 1955202 - RNA, 19 nt, Artificial Sequence
  Description of Artificial Sequence: Synthetic oligonucleotide
uguggggaauugggccguc

SEQ ID NO: 1955203 - RNA, 19 nt, Artificial Sequence
  Description of Artificial Sequence: Synthetic oligonucleotide
cccaaacgccuaagugccc

SEQ ID NO: 1955204 - RNA, 19 nt, Artificial Sequence
  Description of Artificial Sequence: Synthetic oligonucleotide
caccuugaaaagucacuuu

SEQ ID NO: 1955205 - RNA, 19 nt, Artificial Sequence
  Description of Artificial Sequence: Synthetic oligonucleotide
cgucagcaaacauguccag

SEQ ID NO: 1955206 - RNA, 19 nt, Artificial Sequence
  Description of Artificial Sequence: Synthetic oligonucleotide
caagcccacugucuccucu

SEQ ID NO: 1955207 - RNA, 19 nt, Artificial Sequence
  Description of Artificial Sequence: Synthetic oligonucleotide
agagccggucuaggcgcug

SEQ ID NO: 1955208 - RNA, 19 nt, Artificial Sequence
  Description of Artificial Sequence: Synthetic oligonucleotide
gggaauugggccguccagu

SEQ ID NO: 1955209 - RNA, 19 nt, Artificial Sequence
  Description of Artificial Sequence: Synthetic oligonucleotide
guucacguguagagaucaa

SEQ ID NO: 1955210 - RNA, 19 nt, Artificial Sequence
  Description of Artificial Sequence: Synthetic oligonucleotide
ggucgggguuuccaguucu

SEQ ID NO: 1955211 - RNA, 19 nt, Artificial Sequence
  Description of Artificial Sequence: Synthetic oligonucleotide
cuccauguagcugcuuccu

SEQ ID NO: 1955212 - RNA, 19 nt, Artificial Sequence
  Description of Artificial Sequence: Synthetic oligonucleotide
augggaucccugaguccga

SEQ ID NO: 1955213 - RNA, 19 nt, Artificial Sequence
  Description of Artificial Sequence: Synthetic oligonucleotide
ccguccaguccccuugcug

SEQ ID NO: 1955214 - RNA, 19 nt, Artificial Sequence
  Description of Artificial Sequence: Synthetic oligonucleotide
caaaguggccuuccuccau

SEQ ID NO: 1955215 - RNA, 19 nt, Artificial Sequence
  Description of Artificial Sequence: Synthetic oligonucleotide
cacugucuaaagaguguuu

SEQ ID NO: 1955216 - RNA, 19 nt, Artificial Sequence
  Description of Artificial Sequence: Synthetic oligonucleotide
ccgcuccuugaucuucacc

SEQ ID NO: 1955217 - RNA, 19 nt, Artificial Sequence
  Description of Artificial Sequence: Synthetic oligonucleotide
ggccguccaguccccuugc

SEQ ID NO: 1955218 - RNA, 19 nt, Artificial Sequence
  Description of Artificial Sequence: Synthetic oligonucleotide
cauccuccugaggccagga

SEQ ID NO: 1955219 - RNA, 19 nt, Artificial Sequence
  Description of Artificial Sequence: Synthetic oligonucleotide
cauguccagggagggugga

SEQ ID NO: 1955220 - RNA, 19 nt, Artificial Sequence
  Description of Artificial Sequence: Synthetic oligonucleotide
ccuuagcagguucacgugu

SEQ ID NO: 1955221 - RNA, 19 nt, Artificial Sequence
  Description of Artificial Sequence: Synthetic oligonucleotide
caguucucccucugucacu

SEQ ID NO: 1955222 - RNA, 19 nt, Artificial Sequence
  Description of Artificial Sequence: Synthetic oligonucleotide
gccuuccuccauguagcug

SEQ ID NO: 1955223 - RNA, 19 nt, Artificial Sequence
  Description of Artificial Sequence: Synthetic oligonucleotide
cugucucggaucugugcau

SEQ ID NO: 1955224 - RNA, 19 nt, Artificial Sequence
  Description of Artificial Sequence: Synthetic oligonucleotide
gggucgggguuuccaguuc

SEQ ID NO: 1955225 - RNA, 19 nt, Artificial Sequence
  Description of Artificial Sequence: Synthetic oligonucleotide
ccugaguccgacaccccaa

SEQ ID NO: 1955226 - RNA, 19 nt, Artificial Sequence
  Description of Artificial Sequence: Synthetic oligonucleotide
cuccugaggccaggauauc

SEQ ID NO: 1955227 - RNA, 19 nt, Artificial Sequence
  Description of Artificial Sequence: Synthetic oligonucleotide
uugggccguccaguccccu

SEQ ID NO: 1955228 - RNA, 19 nt, Artificial Sequence
  Description of Artificial Sequence: Synthetic oligonucleotide
gcaucaaaguggccuuccu

SEQ ID NO: 1955229 - RNA, 19 nt, Artificial Sequence
  Description of Artificial Sequence: Synthetic oligonucleotide
cauagccaaucguucccuu

SEQ ID NO: 1955230 - RNA, 19 nt, Artificial Sequence
  Description of Artificial Sequence: Synthetic oligonucleotide
agguugccucgagccacca

SEQ ID NO: 1955231 - RNA, 19 nt, Artificial Sequence
  Description of Artificial Sequence: Synthetic oligonucleotide
cccugaguccgacacccca

SEQ ID NO: 1955232 - RNA, 19 nt, Artificial Sequence
  Description of Artificial Sequence: Synthetic oligonucleotide
cguccaguccccuugcugu

SEQ ID NO: 1955233 - RNA, 19 nt, Artificial Sequence
  Description of Artificial Sequence: Synthetic oligonucleotide
ggcuaacagcagcuccaaa

SEQ ID NO: 1955234 - RNA, 19 nt, Artificial Sequence
  Description of Artificial Sequence: Synthetic oligonucleotide
gcacacucaaggcuuuauu

SEQ ID NO: 1955235 - RNA, 19 nt, Artificial Sequence
  Description of Artificial Sequence: Synthetic oligonucleotide
cguguucucccacuuauau

SEQ ID NO: 1955236 - RNA, 19 nt, Artificial Sequence
  Description of Artificial Sequence: Synthetic oligonucleotide
gcauagccaaucguucccu

SEQ ID NO: 1955237 - RNA, 19 nt, Artificial Sequence
  Description of Artificial Sequence: Synthetic oligonucleotide
gaguagcuuccaagauccu

SEQ ID NO: 1955238 - RNA, 19 nt, Artificial Sequence
  Description of Artificial Sequence: Synthetic oligonucleotide
gcuuaucagguggccgcuc

SEQ ID NO: 1955239 - RNA, 19 nt, Artificial Sequence
  Description of Artificial Sequence: Synthetic oligonucleotide
ccaacccagagagccgguc

SEQ ID NO: 1955240 - RNA, 19 nt, Artificial Sequence
  Description of Artificial Sequence: Synthetic oligonucleotide
gggcccuuagcagguucac

SEQ ID NO: 1955241 - RNA, 19 nt, Artificial Sequence
  Description of Artificial Sequence: Synthetic oligonucleotide
ccgacaccccaaacccuuc

SEQ ID NO: 1955242 - RNA, 19 nt, Artificial Sequence
  Description of Artificial Sequence: Synthetic oligonucleotide
ccauccgggaaguagccuu

SEQ ID NO: 1955243 - RNA, 19 nt, Artificial Sequence
  Description of Artificial Sequence: Synthetic oligonucleotide
guccgacaccccaaacccu

SEQ ID NO: 1955244 - RNA, 19 nt, Artificial Sequence
  Description of Artificial Sequence: Synthetic oligonucleotide
ccaggauaucauacuugcu

SEQ ID NO: 1955245 - RNA, 19 nt, Artificial Sequence
  Description of Artificial Sequence: Synthetic oligonucleotide
gccuuugaagcggcuccca

SEQ ID NO: 1955246 - RNA, 19 nt, Artificial Sequence
  Description of Artificial Sequence: Synthetic oligonucleotide
guccagcuuccggcaauaa

SEQ ID NO: 1955247 - RNA, 19 nt, Artificial Sequence
  Description of Artificial Sequence: Synthetic oligonucleotide
cccguguucucccacuuau

SEQ ID NO: 1955248 - RNA, 19 nt, Artificial Sequence
  Description of Artificial Sequence: Synthetic oligonucleotide
cccaaacccuucagacgca

SEQ ID NO: 1955249 - RNA, 19 nt, Artificial Sequence
  Description of Artificial Sequence: Synthetic oligonucleotide
ggggucgggguuuccaguu

SEQ ID NO: 1955250 - RNA, 19 nt, Artificial Sequence
  Description of Artificial Sequence: Synthetic oligonucleotide
gguccagcuuccggcaaua

SEQ ID NO: 1955251 - RNA, 19 nt, Artificial Sequence
  Description of Artificial Sequence: Synthetic oligonucleotide
gccaaucguucccuuguuu

SEQ ID NO: 1955252 - RNA, 19 nt, Artificial Sequence
  Description of Artificial Sequence: Synthetic oligonucleotide
cccgcugacucugcuucuc

SEQ ID NO: 1955253 - RNA, 19 nt, Artificial Sequence
  Description of Artificial Sequence: Synthetic oligonucleotide
cuaggcgcuguggggaauu

SEQ ID NO: 1955254 - RNA, 19 nt, Artificial Sequence
  Description of Artificial Sequence: Synthetic oligonucleotide
ccagccagcugucucggau

SEQ ID NO: 1955255 - RNA, 19 nt, Artificial Sequence
  Description of Artificial Sequence: Synthetic oligonucleotide
ggcuaccacacugggcccu

SEQ ID NO: 1955256 - RNA, 19 nt, Artificial Sequence
  Description of Artificial Sequence: Synthetic oligonucleotide
ggguccagcuuccggcaau

SEQ ID NO: 1955257 - RNA, 19 nt, Artificial Sequence
  Description of Artificial Sequence: Synthetic oligonucleotide
cgacaccccaaacccuuca

SEQ ID NO: 1955258 - RNA, 19 nt, Artificial Sequence
  Description of Artificial Sequence: Synthetic oligonucleotide
ggcacucaucggagucuga

SEQ ID NO: 1955259 - RNA, 19 nt, Artificial Sequence
  Description of Artificial Sequence: Synthetic oligonucleotide
ccguguucucccacuuaua

SEQ ID NO: 1955260 - RNA, 19 nt, Artificial Sequence
  Description of Artificial Sequence: Synthetic oligonucleotide
cggaucugugcauccuggu

SEQ ID NO: 1955261 - RNA, 19 nt, Artificial Sequence
  Description of Artificial Sequence: Synthetic oligonucleotide
ccaaacccuucagacgcau

SEQ ID NO: 1955262 - RNA, 19 nt, Artificial Sequence
  Description of Artificial Sequence: Synthetic oligonucleotide
ccccguguucucccacuua

SEQ ID NO: 1955263 - RNA, 19 nt, Artificial Sequence
  Description of Artificial Sequence: Synthetic oligonucleotide
gccguccaguccccuugcu

SEQ ID NO: 1955264 - RNA, 19 nt, Artificial Sequence
  Description of Artificial Sequence: Synthetic oligonucleotide
gcuaccacacugggcccuu

SEQ ID NO: 1955265 - RNA, 19 nt, Artificial Sequence
  Description of Artificial Sequence: Synthetic oligonucleotide
gcgcaggggucgggguuuc

SEQ ID NO: 1955266 - RNA, 19 nt, Artificial Sequence
  Description of Artificial Sequence: Synthetic oligonucleotide
aauauuaacagucaccucu

SEQ ID NO: 1955267 - RNA, 19 nt, Artificial Sequence
  Description of Artificial Sequence: Synthetic oligonucleotide
aaaauauuaacagucaccu

SEQ ID NO: 1955268 - RNA, 19 nt, Artificial Sequence
  Description of Artificial Sequence: Synthetic oligonucleotide
ugauauacaaaauauuaac

SEQ ID NO: 1955269 - RNA, 19 nt, Artificial Sequence
  Description of Artificial Sequence: Synthetic oligonucleotide
acauacaguauucauaguc

SEQ ID NO: 1955270 - RNA, 19 nt, Artificial Sequence
  Description of Artificial Sequence: Synthetic oligonucleotide
auuaauagcaucaagcuug

SEQ ID NO: 1955271 - RNA, 19 nt, Artificial Sequence
  Description of Artificial Sequence: Synthetic oligonucleotide
uguucauucgaucaaguug

SEQ ID NO: 1955272 - RNA, 19 nt, Artificial Sequence
  Description of Artificial Sequence: Synthetic oligonucleotide
aggacuaacagguuuaauc

SEQ ID NO: 1955273 - RNA, 19 nt, Artificial Sequence
  Description of Artificial Sequence: Synthetic oligonucleotide
agauccaucaccgucaagc

SEQ ID NO: 1955274 - RNA, 19 nt, Artificial Sequence
  Description of Artificial Sequence: Synthetic oligonucleotide
uuaacagucaccucuaggu

SEQ ID NO: 1955275 - RNA, 19 nt, Artificial Sequence
  Description of Artificial Sequence: Synthetic oligonucleotide
aggaauagcacacauccgg

SEQ ID NO: 1955276 - RNA, 19 nt, Artificial Sequence
  Description of Artificial Sequence: Synthetic oligonucleotide
gagaguguagagcagaugc

SEQ ID NO: 1955277 - RNA, 19 nt, Artificial Sequence
  Description of Artificial Sequence: Synthetic oligonucleotide
gauagugacauccuucugc

SEQ ID NO: 1955278 - RNA, 19 nt, Artificial Sequence
  Description of Artificial Sequence: Synthetic oligonucleotide
ucaauuucuccccaaaugu

SEQ ID NO: 1955279 - RNA, 19 nt, Artificial Sequence
  Description of Artificial Sequence: Synthetic oligonucleotide
aaggauccaccauaucucc

SEQ ID NO: 1955280 - RNA, 19 nt, Artificial Sequence
  Description of Artificial Sequence: Synthetic oligonucleotide
gauauucacccucugaagc

SEQ ID NO: 1955281 - RNA, 19 nt, Artificial Sequence
  Description of Artificial Sequence: Synthetic oligonucleotide
accaucaaaguucauacag

SEQ ID NO: 1955282 - RNA, 19 nt, Artificial Sequence
  Description of Artificial Sequence: Synthetic oligonucleotide
cauucgaucaaguugcccc

SEQ ID NO: 1955283 - RNA, 19 nt, Artificial Sequence
  Description of Artificial Sequence: Synthetic oligonucleotide
cacgcuaaaaugaagcugc

SEQ ID NO: 1955284 - RNA, 19 nt, Artificial Sequence
  Description of Artificial Sequence: Synthetic oligonucleotide
aagcuugcccaagagagcc

SEQ ID NO: 1955285 - RNA, 19 nt, Artificial Sequence
  Description of Artificial Sequence: Synthetic oligonucleotide
gcaacaauagaucuggccg

SEQ ID NO: 1955286 - RNA, 19 nt, Artificial Sequence
  Description of Artificial Sequence: Synthetic oligonucleotide
aaaggauccaccauaucuc

SEQ ID NO: 1955287 - RNA, 19 nt, Artificial Sequence
  Description of Artificial Sequence: Synthetic oligonucleotide
acaucgauggcaugaacac

SEQ ID NO: 1955288 - RNA, 19 nt, Artificial Sequence
  Description of Artificial Sequence: Synthetic oligonucleotide
aaauauuaacagucaccuc

SEQ ID NO: 1955289 - RNA, 19 nt, Artificial Sequence
  Description of Artificial Sequence: Synthetic oligonucleotide
aauuaucuucagugaggcc

SEQ ID NO: 1955290 - RNA, 19 nt, Artificial Sequence
  Description of Artificial Sequence: Synthetic oligonucleotide
auuaucuucagugaggcca

SEQ ID NO: 1955291 - RNA, 19 nt, Artificial Sequence
  Description of Artificial Sequence: Synthetic oligonucleotide
uacgaagcgauguaauccg

SEQ ID NO: 1955292 - RNA, 19 nt, Artificial Sequence
  Description of Artificial Sequence: Synthetic oligonucleotide
aaccaagcaagucagaguu

SEQ ID NO: 1955293 - RNA, 19 nt, Artificial Sequence
  Description of Artificial Sequence: Synthetic oligonucleotide
aagccucccaauuaucuuc

SEQ ID NO: 1955294 - RNA, 19 nt, Artificial Sequence
  Description of Artificial Sequence: Synthetic oligonucleotide
agcgauguaauccgcgugc

SEQ ID NO: 1955295 - RNA, 19 nt, Artificial Sequence
  Description of Artificial Sequence: Synthetic oligonucleotide
guucauucgaucaaguugc

SEQ ID NO: 1955296 - RNA, 19 nt, Artificial Sequence
  Description of Artificial Sequence: Synthetic oligonucleotide
ucuagguuugauaaacacu

SEQ ID NO: 1955297 - RNA, 19 nt, Artificial Sequence
  Description of Artificial Sequence: Synthetic oligonucleotide
aaguugccccaugagaucc

SEQ ID NO: 1955298 - RNA, 19 nt, Artificial Sequence
  Description of Artificial Sequence: Synthetic oligonucleotide
uacaucgauggcaugaaca

SEQ ID NO: 1955299 - RNA, 19 nt, Artificial Sequence
  Description of Artificial Sequence: Synthetic oligonucleotide
uuuccuaucugacucuagc

SEQ ID NO: 1955300 - RNA, 19 nt, Artificial Sequence
  Description of Artificial Sequence: Synthetic oligonucleotide
uaauuauauaauuuaucau

SEQ ID NO: 1955301 - RNA, 19 nt, Artificial Sequence
  Description of Artificial Sequence: Synthetic oligonucleotide
ggugcaucggacuugauag

SEQ ID NO: 1955302 - RNA, 19 nt, Artificial Sequence
  Description of Artificial Sequence: Synthetic oligonucleotide
ucaaguugccccaugagau

SEQ ID NO: 1955303 - RNA, 19 nt, Artificial Sequence
  Description of Artificial Sequence: Synthetic oligonucleotide
auuaacagucaccucuagg

SEQ ID NO: 1955304 - RNA, 19 nt, Artificial Sequence
  Description of Artificial Sequence: Synthetic oligonucleotide
aaauaagguauggaaagga

SEQ ID NO: 1955305 - RNA, 19 nt, Artificial Sequence
  Description of Artificial Sequence: Synthetic oligonucleotide
aauagcacacauccgguaa

SEQ ID NO: 1955306 - RNA, 19 nt, Artificial Sequence
  Description of Artificial Sequence: Synthetic oligonucleotide
aacuggcguucacaaagcc

SEQ ID NO: 1955307 - RNA, 19 nt, Artificial Sequence
  Description of Artificial Sequence: Synthetic oligonucleotide
agaaccugguaucaauuuc

SEQ ID NO: 1955308 - RNA, 19 nt, Artificial Sequence
  Description of Artificial Sequence: Synthetic oligonucleotide
ucuucgggcaugcaaaaga

SEQ ID NO: 1955309 - RNA, 19 nt, Artificial Sequence
  Description of Artificial Sequence: Synthetic oligonucleotide
uggcacgcuaaaaugaagc

SEQ ID NO: 1955310 - RNA, 19 nt, Artificial Sequence
  Description of Artificial Sequence: Synthetic oligonucleotide
auaggccacaacuuuaucu

SEQ ID NO: 1955311 - RNA, 19 nt, Artificial Sequence
  Description of Artificial Sequence: Synthetic oligonucleotide
ugcaacaauagaucuggcc

SEQ ID NO: 1955312 - RNA, 19 nt, Artificial Sequence
  Description of Artificial Sequence: Synthetic oligonucleotide
aaugaagcugcgcaguuuu

SEQ ID NO: 1955313 - RNA, 19 nt, Artificial Sequence
  Description of Artificial Sequence: Synthetic oligonucleotide
uagacucuggacauaggcc

SEQ ID NO: 1955314 - RNA, 19 nt, Artificial Sequence
  Description of Artificial Sequence: Synthetic oligonucleotide
caacaauagaucuggccgg

SEQ ID NO: 1955315 - RNA, 19 nt, Artificial Sequence
  Description of Artificial Sequence: Synthetic oligonucleotide
uuaauagcaucaagcuugc

SEQ ID NO: 1955316 - RNA, 19 nt, Artificial Sequence
  Description of Artificial Sequence: Synthetic oligonucleotide
guagacucuggacauaggc

SEQ ID NO: 1955317 - RNA, 19 nt, Artificial Sequence
  Description of Artificial Sequence: Synthetic oligonucleotide
ucuucagugaggccaaaac

SEQ ID NO: 1955318 - RNA, 19 nt, Artificial Sequence
  Description of Artificial Sequence: Synthetic oligonucleotide
ugccaaauaagguauggaa

SEQ ID NO: 1955319 - RNA, 19 nt, Artificial Sequence
  Description of Artificial Sequence: Synthetic oligonucleotide
acuaguucaggcuggauau

SEQ ID NO: 1955320 - RNA, 19 nt, Artificial Sequence
  Description of Artificial Sequence: Synthetic oligonucleotide
aauagaugccgcucauucu

SEQ ID NO: 1955321 - RNA, 19 nt, Artificial Sequence
  Description of Artificial Sequence: Synthetic oligonucleotide
aguucauacaggacaaaac

SEQ ID NO: 1955322 - RNA, 19 nt, Artificial Sequence
  Description of Artificial Sequence: Synthetic oligonucleotide
agugacauccuucugcggu

SEQ ID NO: 1955323 - RNA, 19 nt, Artificial Sequence
  Description of Artificial Sequence: Synthetic oligonucleotide
cauugagcccgccugaggg

SEQ ID NO: 1955324 - RNA, 19 nt, Artificial Sequence
  Description of Artificial Sequence: Synthetic oligonucleotide
ugaagccucccaauuaucu

SEQ ID NO: 1955325 - RNA, 19 nt, Artificial Sequence
  Description of Artificial Sequence: Synthetic oligonucleotide
cugguuauggccaggaauc

SEQ ID NO: 1955326 - RNA, 19 nt, Artificial Sequence
  Description of Artificial Sequence: Synthetic oligonucleotide
accucuagguuugauaaac

SEQ ID NO: 1955327 - RNA, 19 nt, Artificial Sequence
  Description of Artificial Sequence: Synthetic oligonucleotide
caauuaucuucagugaggc

SEQ ID NO: 1955328 - RNA, 19 nt, Artificial Sequence
  Description of Artificial Sequence: Synthetic oligonucleotide
uucacuugaugcaacugac

SEQ ID NO: 1955329 - RNA, 19 nt, Artificial Sequence
  Description of Artificial Sequence: Synthetic oligonucleotide
gucaagccccaauagaugc

SEQ ID NO: 1955330 - RNA, 19 nt, Artificial Sequence
  Description of Artificial Sequence: Synthetic oligonucleotide
cauccgguaacuucucugg

SEQ ID NO: 1955331 - RNA, 19 nt, Artificial Sequence
  Description of Artificial Sequence: Synthetic oligonucleotide
auagcacacauccgguaac

SEQ ID NO: 1955332 - RNA, 19 nt, Artificial Sequence
  Description of Artificial Sequence: Synthetic oligonucleotide
agguuugauaaacacuuca

SEQ ID NO: 1955333 - RNA, 19 nt, Artificial Sequence
  Description of Artificial Sequence: Synthetic oligonucleotide
ucucuggucuuccauugag

SEQ ID NO: 1955334 - RNA, 19 nt, Artificial Sequence
  Description of Artificial Sequence: Synthetic oligonucleotide
gaguguagagcagaugcgg

SEQ ID NO: 1955335 - RNA, 19 nt, Artificial Sequence
  Description of Artificial Sequence: Synthetic oligonucleotide
ugccccaugagauccauca

SEQ ID NO: 1955336 - RNA, 19 nt, Artificial Sequence
  Description of Artificial Sequence: Synthetic oligonucleotide
aucaaguugccccaugaga

SEQ ID NO: 1955337 - RNA, 19 nt, Artificial Sequence
  Description of Artificial Sequence: Synthetic oligonucleotide
ugucaauccagugaagccu

SEQ ID NO: 1955338 - RNA, 19 nt, Artificial Sequence
  Description of Artificial Sequence: Synthetic oligonucleotide
ucaaguauucagacauaca

SEQ ID NO: 1955339 - RNA, 19 nt, Artificial Sequence
  Description of Artificial Sequence: Synthetic oligonucleotide
aaaacccaccaggaauagc

SEQ ID NO: 1955340 - RNA, 19 nt, Artificial Sequence
  Description of Artificial Sequence: Synthetic oligonucleotide
cugguaucaauuucucccc

SEQ ID NO: 1955341 - RNA, 19 nt, Artificial Sequence
  Description of Artificial Sequence: Synthetic oligonucleotide
gacuaacagguuuaaucug

SEQ ID NO: 1955342 - RNA, 19 nt, Artificial Sequence
  Description of Artificial Sequence: Synthetic oligonucleotide
uccuaucugacucuagcuc

SEQ ID NO: 1955343 - RNA, 19 nt, Artificial Sequence
  Description of Artificial Sequence: Synthetic oligonucleotide
aaguauucagacauacagu

SEQ ID NO: 1955344 - RNA, 19 nt, Artificial Sequence
  Description of Artificial Sequence: Synthetic oligonucleotide
aagagagccaaaguugcca

SEQ ID NO: 1955345 - RNA, 19 nt, Artificial Sequence
  Description of Artificial Sequence: Synthetic oligonucleotide
gauguaauccgcgugcuuc

SEQ ID NO: 1955346 - RNA, 19 nt, Artificial Sequence
  Description of Artificial Sequence: Synthetic oligonucleotide
guacgaagcgauguaaucc

SEQ ID NO: 1955347 - RNA, 19 nt, Artificial Sequence
  Description of Artificial Sequence: Synthetic oligonucleotide
caucaaaguucauacagga

SEQ ID NO: 1955348 - RNA, 19 nt, Artificial Sequence
  Description of Artificial Sequence: Synthetic oligonucleotide
cacgacuugaugaacacca

SEQ ID NO: 1955349 - RNA, 19 nt, Artificial Sequence
  Description of Artificial Sequence: Synthetic oligonucleotide
uauuaacagucaccucuag

SEQ ID NO: 1955350 - RNA, 19 nt, Artificial Sequence
  Description of Artificial Sequence: Synthetic oligonucleotide
cuagcucacuaguucaggc

SEQ ID NO: 1955351 - RNA, 19 nt, Artificial Sequence
  Description of Artificial Sequence: Synthetic oligonucleotide
ugaugcaacugacugguua

SEQ ID NO: 1955352 - RNA, 19 nt, Artificial Sequence
  Description of Artificial Sequence: Synthetic oligonucleotide
ugcaacugacugguuaugg

SEQ ID NO: 1955353 - RNA, 19 nt, Artificial Sequence
  Description of Artificial Sequence: Synthetic oligonucleotide
cuuggagccguacgaagcg

SEQ ID NO: 1955354 - RNA, 19 nt, Artificial Sequence
  Description of Artificial Sequence: Synthetic oligonucleotide
aaucuguucuucucccaga

SEQ ID NO: 1955355 - RNA, 19 nt, Artificial Sequence
  Description of Artificial Sequence: Synthetic oligonucleotide
gaucaaguugccccaugag

SEQ ID NO: 1955356 - RNA, 19 nt, Artificial Sequence
  Description of Artificial Sequence: Synthetic oligonucleotide
aauccagcaaugccaaaua

SEQ ID NO: 1955357 - RNA, 19 nt, Artificial Sequence
  Description of Artificial Sequence: Synthetic oligonucleotide
agcgcugauuccuccacac

SEQ ID NO: 1955358 - RNA, 19 nt, Artificial Sequence
  Description of Artificial Sequence: Synthetic oligonucleotide
auugagcccgccugagggc

SEQ ID NO: 1955359 - RNA, 19 nt, Artificial Sequence
  Description of Artificial Sequence: Synthetic oligonucleotide
aucgauggcaugaacacug

SEQ ID NO: 1955360 - RNA, 19 nt, Artificial Sequence
  Description of Artificial Sequence: Synthetic oligonucleotide
gacucuagcucacuaguuc

SEQ ID NO: 1955361 - RNA, 19 nt, Artificial Sequence
  Description of Artificial Sequence: Synthetic oligonucleotide
ucuagcucacuaguucagg

SEQ ID NO: 1955362 - RNA, 19 nt, Artificial Sequence
  Description of Artificial Sequence: Synthetic oligonucleotide
ucuguucauucgaucaagu

SEQ ID NO: 1955363 - RNA, 19 nt, Artificial Sequence
  Description of Artificial Sequence: Synthetic oligonucleotide
agugaagccucccaauuau

SEQ ID NO: 1955364 - RNA, 19 nt, Artificial Sequence
  Description of Artificial Sequence: Synthetic oligonucleotide
ucccaauuaucuucaguga

SEQ ID NO: 1955365 - RNA, 19 nt, Artificial Sequence
  Description of Artificial Sequence: Synthetic oligonucleotide
uucuuggagccguacgaag

SEQ ID NO: 1955366 - RNA, 19 nt, Artificial Sequence
  Description of Artificial Sequence: Synthetic oligonucleotide
auggaaaggauccaccaua

SEQ ID NO: 1955367 - RNA, 19 nt, Artificial Sequence
  Description of Artificial Sequence: Synthetic oligonucleotide
acuaacagguuuaaucugu

SEQ ID NO: 1955368 - RNA, 19 nt, Artificial Sequence
  Description of Artificial Sequence: Synthetic oligonucleotide
aguauucauagucauccuu

SEQ ID NO: 1955369 - RNA, 19 nt, Artificial Sequence
  Description of Artificial Sequence: Synthetic oligonucleotide
guugggauugcacuuaucu

SEQ ID NO: 1955370 - RNA, 19 nt, Artificial Sequence
  Description of Artificial Sequence: Synthetic oligonucleotide
uuccuaucugacucuagcu

SEQ ID NO: 1955371 - RNA, 19 nt, Artificial Sequence
  Description of Artificial Sequence: Synthetic oligonucleotide
gucguguccaaugcuagcg

SEQ ID NO: 1955372 - RNA, 19 nt, Artificial Sequence
  Description of Artificial Sequence: Synthetic oligonucleotide
ggcaugaacacugucauac

SEQ ID NO: 1955373 - RNA, 19 nt, Artificial Sequence
  Description of Artificial Sequence: Synthetic oligonucleotide
ggacuugauagugacaucc

SEQ ID NO: 1955374 - RNA, 19 nt, Artificial Sequence
  Description of Artificial Sequence: Synthetic oligonucleotide
uuggcacgcuaaaaugaag

SEQ ID NO: 1955375 - RNA, 19 nt, Artificial Sequence
  Description of Artificial Sequence: Synthetic oligonucleotide
uggccaggaauccugugca

SEQ ID NO: 1955376 - RNA, 19 nt, Artificial Sequence
  Description of Artificial Sequence: Synthetic oligonucleotide
caauuucuccccaaauguc

SEQ ID NO: 1955377 - RNA, 19 nt, Artificial Sequence
  Description of Artificial Sequence: Synthetic oligonucleotide
agggacaauccagcaaugc

SEQ ID NO: 1955378 - RNA, 19 nt, Artificial Sequence
  Description of Artificial Sequence: Synthetic oligonucleotide
ucaagccccaauagaugcc

SEQ ID NO: 1955379 - RNA, 19 nt, Artificial Sequence
  Description of Artificial Sequence: Synthetic oligonucleotide
agguauggaaaggauccac

SEQ ID NO: 1955380 - RNA, 19 nt, Artificial Sequence
  Description of Artificial Sequence: Synthetic oligonucleotide
uggcacgacuugaugaaca

SEQ ID NO: 1955381 - RNA, 19 nt, Artificial Sequence
  Description of Artificial Sequence: Synthetic oligonucleotide
agguuuaaucuguucuucu

SEQ ID NO: 1955382 - RNA, 19 nt, Artificial Sequence
  Description of Artificial Sequence: Synthetic oligonucleotide
guuauggccaggaauccug

SEQ ID NO: 1955383 - RNA, 19 nt, Artificial Sequence
  Description of Artificial Sequence: Synthetic oligonucleotide
aucuacaucgauggcauga

SEQ ID NO: 1955384 - RNA, 19 nt, Artificial Sequence
  Description of Artificial Sequence: Synthetic oligonucleotide
caaaguucauacaggacaa

SEQ ID NO: 1955385 - RNA, 19 nt, Artificial Sequence
  Description of Artificial Sequence: Synthetic oligonucleotide
uccacacucgugcuggcac

SEQ ID NO: 1955386 - RNA, 19 nt, Artificial Sequence
  Description of Artificial Sequence: Synthetic oligonucleotide
uugcacuuaucuuuccuau

SEQ ID NO: 1955387 - RNA, 19 nt, Artificial Sequence
  Description of Artificial Sequence: Synthetic oligonucleotide
aacuucucuggucuuccau

SEQ ID NO: 1955388 - RNA, 19 nt, Artificial Sequence
  Description of Artificial Sequence: Synthetic oligonucleotide
agcaacagggugucgggug

SEQ ID NO: 1955389 - RNA, 19 nt, Artificial Sequence
  Description of Artificial Sequence: Synthetic oligonucleotide
uaauccgcgugcuucucca

SEQ ID NO: 1955390 - RNA, 19 nt, Artificial Sequence
  Description of Artificial Sequence: Synthetic oligonucleotide
ugauagugacauccuucug

SEQ ID NO: 1955391 - RNA, 19 nt, Artificial Sequence
  Description of Artificial Sequence: Synthetic oligonucleotide
ccaagagagccaaaguugc

SEQ ID NO: 1955392 - RNA, 19 nt, Artificial Sequence
  Description of Artificial Sequence: Synthetic oligonucleotide
agcacuucuucgggcaugc

SEQ ID NO: 1955393 - RNA, 19 nt, Artificial Sequence
  Description of Artificial Sequence: Synthetic oligonucleotide
cuuuaucuacaucgauggc

SEQ ID NO: 1955394 - RNA, 19 nt, Artificial Sequence
  Description of Artificial Sequence: Synthetic oligonucleotide
ccaucaaaguucauacagg

SEQ ID NO: 1955395 - RNA, 19 nt, Artificial Sequence
  Description of Artificial Sequence: Synthetic oligonucleotide
caggaauagcacacauccg

SEQ ID NO: 1955396 - RNA, 19 nt, Artificial Sequence
  Description of Artificial Sequence: Synthetic oligonucleotide
agaguguagagcagaugcg

SEQ ID NO: 1955397 - RNA, 19 nt, Artificial Sequence
  Description of Artificial Sequence: Synthetic oligonucleotide
cugugcaacaauagaucug

SEQ ID NO: 1955398 - RNA, 19 nt, Artificial Sequence
  Description of Artificial Sequence: Synthetic oligonucleotide
ucguguccaaugcuagcgc

SEQ ID NO: 1955399 - RNA, 19 nt, Artificial Sequence
  Description of Artificial Sequence: Synthetic oligonucleotide
ugagauucggagcccgguc

SEQ ID NO: 1955400 - RNA, 19 nt, Artificial Sequence
  Description of Artificial Sequence: Synthetic oligonucleotide
cuaucugacucuagcucac

SEQ ID NO: 1955401 - RNA, 19 nt, Artificial Sequence
  Description of Artificial Sequence: Synthetic oligonucleotide
ugcgggucguguccaaugc

SEQ ID NO: 1955402 - RNA, 19 nt, Artificial Sequence
  Description of Artificial Sequence: Synthetic oligonucleotide
caagcuugcccaagagagc

SEQ ID NO: 1955403 - RNA, 19 nt, Artificial Sequence
  Description of Artificial Sequence: Synthetic oligonucleotide
gggacaauccagcaaugcc

SEQ ID NO: 1955404 - RNA, 19 nt, Artificial Sequence
  Description of Artificial Sequence: Synthetic oligonucleotide
uuauggccaggaauccugu

SEQ ID NO: 1955405 - RNA, 19 nt, Artificial Sequence
  Description of Artificial Sequence: Synthetic oligonucleotide
uucauucgaucaaguugcc

SEQ ID NO: 1955406 - RNA, 19 nt, Artificial Sequence
  Description of Artificial Sequence: Synthetic oligonucleotide
cucuggucuuccauugagc

SEQ ID NO: 1955407 - RNA, 19 nt, Artificial Sequence
  Description of Artificial Sequence: Synthetic oligonucleotide
ucaccgucaagccccaaua

SEQ ID NO: 1955408 - RNA, 19 nt, Artificial Sequence
  Description of Artificial Sequence: Synthetic oligonucleotide
agaguucacuugaugcaac

SEQ ID NO: 1955409 - RNA, 19 nt, Artificial Sequence
  Description of Artificial Sequence: Synthetic oligonucleotide
ggacuaacagguuuaaucu

SEQ ID NO: 1955410 - RNA, 19 nt, Artificial Sequence
  Description of Artificial Sequence: Synthetic oligonucleotide
cucuagcucacuaguucag

SEQ ID NO: 1955411 - RNA, 19 nt, Artificial Sequence
  Description of Artificial Sequence: Synthetic oligonucleotide
uaacagguuuaaucuguuc

SEQ ID NO: 1955412 - RNA, 19 nt, Artificial Sequence
  Description of Artificial Sequence: Synthetic oligonucleotide
accgucaagccccaauaga

SEQ ID NO: 1955413 - RNA, 19 nt, Artificial Sequence
  Description of Artificial Sequence: Synthetic oligonucleotide
ccggucugcacccaaaucc

SEQ ID NO: 1955414 - RNA, 19 nt, Artificial Sequence
  Description of Artificial Sequence: Synthetic oligonucleotide
cuggucugucugcaaagcc

SEQ ID NO: 1955415 - RNA, 19 nt, Artificial Sequence
  Description of Artificial Sequence: Synthetic oligonucleotide
acaugauauacaaaauauu

SEQ ID NO: 1955416 - RNA, 19 nt, Artificial Sequence
  Description of Artificial Sequence: Synthetic oligonucleotide
auguaauccgcgugcuucu

SEQ ID NO: 1955417 - RNA, 19 nt, Artificial Sequence
  Description of Artificial Sequence: Synthetic oligonucleotide
uccgguaacuucucugguc

SEQ ID NO: 1955418 - RNA, 19 nt, Artificial Sequence
  Description of Artificial Sequence: Synthetic oligonucleotide
ugcacuuaucuuuccuauc

SEQ ID NO: 1955419 - RNA, 19 nt, Artificial Sequence
  Description of Artificial Sequence: Synthetic oligonucleotide
uugggauugcacuuaucuu

SEQ ID NO: 1955420 - RNA, 19 nt, Artificial Sequence
  Description of Artificial Sequence: Synthetic oligonucleotide
cccaagagagccaaaguug

SEQ ID NO: 1955421 - RNA, 19 nt, Artificial Sequence
  Description of Artificial Sequence: Synthetic oligonucleotide
ucauucgaucaaguugccc

SEQ ID NO: 1955422 - RNA, 19 nt, Artificial Sequence
  Description of Artificial Sequence: Synthetic oligonucleotide
ucuacaucgauggcaugaa

SEQ ID NO: 1955423 - RNA, 19 nt, Artificial Sequence
  Description of Artificial Sequence: Synthetic oligonucleotide
agucagaaucuggacagca

SEQ ID NO: 1955424 - RNA, 19 nt, Artificial Sequence
  Description of Artificial Sequence: Synthetic oligonucleotide
ggacaaaacaaauucaauu

SEQ ID NO: 1955425 - RNA, 19 nt, Artificial Sequence
  Description of Artificial Sequence: Synthetic oligonucleotide
ucaauccagugaagccucc

SEQ ID NO: 1955426 - RNA, 19 nt, Artificial Sequence
  Description of Artificial Sequence: Synthetic oligonucleotide
uagugacauccuucugcgg

SEQ ID NO: 1955427 - RNA, 19 nt, Artificial Sequence
  Description of Artificial Sequence: Synthetic oligonucleotide
caaugccaaauaagguaug

SEQ ID NO: 1955428 - RNA, 19 nt, Artificial Sequence
  Description of Artificial Sequence: Synthetic oligonucleotide
acuucuucgggcaugcaaa

SEQ ID NO: 1955429 - RNA, 19 nt, Artificial Sequence
  Description of Artificial Sequence: Synthetic oligonucleotide
ucggagcccggucugcacc

SEQ ID NO: 1955430 - RNA, 19 nt, Artificial Sequence
  Description of Artificial Sequence: Synthetic oligonucleotide
aguucacuugaugcaacug

SEQ ID NO: 1955431 - RNA, 19 nt, Artificial Sequence
  Description of Artificial Sequence: Synthetic oligonucleotide
ucgaucaaguugccccaug

SEQ ID NO: 1955432 - RNA, 19 nt, Artificial Sequence
  Description of Artificial Sequence: Synthetic oligonucleotide
ugagaguguagagcagaug

SEQ ID NO: 1955433 - RNA, 19 nt, Artificial Sequence
  Description of Artificial Sequence: Synthetic oligonucleotide
guaauccgcgugcuucucc

SEQ ID NO: 1955434 - RNA, 19 nt, Artificial Sequence
  Description of Artificial Sequence: Synthetic oligonucleotide
ugguuauggccaggaaucc

SEQ ID NO: 1955435 - RNA, 19 nt, Artificial Sequence
  Description of Artificial Sequence: Synthetic oligonucleotide
ugacucuagcucacuaguu

SEQ ID NO: 1955436 - RNA, 19 nt, Artificial Sequence
  Description of Artificial Sequence: Synthetic oligonucleotide
agauucggagcccggucug

SEQ ID NO: 1955437 - RNA, 19 nt, Artificial Sequence
  Description of Artificial Sequence: Synthetic oligonucleotide
accaggaauagcacacauc

SEQ ID NO: 1955438 - RNA, 19 nt, Artificial Sequence
  Description of Artificial Sequence: Synthetic oligonucleotide
gaaccugguaucaauuucu

SEQ ID NO: 1955439 - RNA, 19 nt, Artificial Sequence
  Description of Artificial Sequence: Synthetic oligonucleotide
guaucaauuucuccccaaa

SEQ ID NO: 1955440 - RNA, 19 nt, Artificial Sequence
  Description of Artificial Sequence: Synthetic oligonucleotide
cuuggcacgcuaaaaugaa

SEQ ID NO: 1955441 - RNA, 19 nt, Artificial Sequence
  Description of Artificial Sequence: Synthetic oligonucleotide
gacaauccagcaaugccaa

SEQ ID NO: 1955442 - RNA, 19 nt, Artificial Sequence
  Description of Artificial Sequence: Synthetic oligonucleotide
gaauagcacacauccggua

SEQ ID NO: 1955443 - RNA, 19 nt, Artificial Sequence
  Description of Artificial Sequence: Synthetic oligonucleotide
caaguugccccaugagauc

SEQ ID NO: 1955444 - RNA, 19 nt, Artificial Sequence
  Description of Artificial Sequence: Synthetic oligonucleotide
uucuucgggcaugcaaaag

SEQ ID NO: 1955445 - RNA, 19 nt, Artificial Sequence
  Description of Artificial Sequence: Synthetic oligonucleotide
gaagcgauguaauccgcgu

SEQ ID NO: 1955446 - RNA, 19 nt, Artificial Sequence
  Description of Artificial Sequence: Synthetic oligonucleotide
gcaacugacugguuauggc

SEQ ID NO: 1955447 - RNA, 19 nt, Artificial Sequence
  Description of Artificial Sequence: Synthetic oligonucleotide
caguaucucuucucuguuc

SEQ ID NO: 1955448 - RNA, 19 nt, Artificial Sequence
  Description of Artificial Sequence: Synthetic oligonucleotide
acgaagcgauguaauccgc

SEQ ID NO: 1955449 - RNA, 19 nt, Artificial Sequence
  Description of Artificial Sequence: Synthetic oligonucleotide
acaauagaucuggccggcg

SEQ ID NO: 1955450 - RNA, 19 nt, Artificial Sequence
  Description of Artificial Sequence: Synthetic oligonucleotide
cuagcgcugauuccuccac

SEQ ID NO: 1955451 - RNA, 19 nt, Artificial Sequence
  Description of Artificial Sequence: Synthetic oligonucleotide
aggacaaaacaaauucaau

SEQ ID NO: 1955452 - RNA, 19 nt, Artificial Sequence
  Description of Artificial Sequence: Synthetic oligonucleotide
ucgauggcaugaacacugu

SEQ ID NO: 1955453 - RNA, 19 nt, Artificial Sequence
  Description of Artificial Sequence: Synthetic oligonucleotide
aagcacuucuucgggcaug

SEQ ID NO: 1955454 - RNA, 19 nt, Artificial Sequence
  Description of Artificial Sequence: Synthetic oligonucleotide
ugcuagcgcugauuccucc

SEQ ID NO: 1955455 - RNA, 19 nt, Artificial Sequence
  Description of Artificial Sequence: Synthetic oligonucleotide
uccuucugcggugugccca

SEQ ID NO: 1955456 - RNA, 19 nt, Artificial Sequence
  Description of Artificial Sequence: Synthetic oligonucleotide
augcgggucguguccaaug

SEQ ID NO: 1955457 - RNA, 19 nt, Artificial Sequence
  Description of Artificial Sequence: Synthetic oligonucleotide
uaucuacaucgauggcaug

SEQ ID NO: 1955458 - RNA, 19 nt, Artificial Sequence
  Description of Artificial Sequence: Synthetic oligonucleotide
ugucgggugcaucggacuu

SEQ ID NO: 1955459 - RNA, 19 nt, Artificial Sequence
  Description of Artificial Sequence: Synthetic oligonucleotide
cacuaguucaggcuggaua

SEQ ID NO: 1955460 - RNA, 19 nt, Artificial Sequence
  Description of Artificial Sequence: Synthetic oligonucleotide
augccaaauaagguaugga

SEQ ID NO: 1955461 - RNA, 19 nt, Artificial Sequence
  Description of Artificial Sequence: Synthetic oligonucleotide
aagggacaauccagcaaug

SEQ ID NO: 1955462 - RNA, 19 nt, Artificial Sequence
  Description of Artificial Sequence: Synthetic oligonucleotide
gacaggacuaacagguuua

SEQ ID NO: 1955463 - RNA, 19 nt, Artificial Sequence
  Description of Artificial Sequence: Synthetic oligonucleotide
ccaaugcuagcgcugauuc

SEQ ID NO: 1955464 - RNA, 19 nt, Artificial Sequence
  Description of Artificial Sequence: Synthetic oligonucleotide
caccgucaagccccaauag

SEQ ID NO: 1955465 - RNA, 19 nt, Artificial Sequence
  Description of Artificial Sequence: Synthetic oligonucleotide
gucaauccagugaagccuc

SEQ ID NO: 1955466 - RNA, 19 nt, Artificial Sequence
  Description of Artificial Sequence: Synthetic oligonucleotide
ccuaucugacucuagcuca

SEQ ID NO: 1955467 - RNA, 19 nt, Artificial Sequence
  Description of Artificial Sequence: Synthetic oligonucleotide
uugagcccgccugagggca

SEQ ID NO: 1955468 - RNA, 19 nt, Artificial Sequence
  Description of Artificial Sequence: Synthetic oligonucleotide
acuggcguucacaaagcca

SEQ ID NO: 1955469 - RNA, 19 nt, Artificial Sequence
  Description of Artificial Sequence: Synthetic oligonucleotide
uagcacacauccgguaacu

SEQ ID NO: 1955470 - RNA, 19 nt, Artificial Sequence
  Description of Artificial Sequence: Synthetic oligonucleotide
uagcgcugauuccuccaca

SEQ ID NO: 1955471 - RNA, 19 nt, Artificial Sequence
  Description of Artificial Sequence: Synthetic oligonucleotide
uggcguucacaaagccacc

SEQ ID NO: 1955472 - RNA, 19 nt, Artificial Sequence
  Description of Artificial Sequence: Synthetic oligonucleotide
cucugucaauccagugaag

SEQ ID NO: 1955473 - RNA, 19 nt, Artificial Sequence
  Description of Artificial Sequence: Synthetic oligonucleotide
cuacaucgauggcaugaac

SEQ ID NO: 1955474 - RNA, 19 nt, Artificial Sequence
  Description of Artificial Sequence: Synthetic oligonucleotide
ucuggccggcgugagauuc

SEQ ID NO: 1955475 - RNA, 19 nt, Artificial Sequence
  Description of Artificial Sequence: Synthetic oligonucleotide
auccgguaacuucucuggu

SEQ ID NO: 1955476 - RNA, 19 nt, Artificial Sequence
  Description of Artificial Sequence: Synthetic oligonucleotide
aggaauccugugcaacaau

SEQ ID NO: 1955477 - RNA, 19 nt, Artificial Sequence
  Description of Artificial Sequence: Synthetic oligonucleotide
uguugggauugcacuuauc

SEQ ID NO: 1955478 - RNA, 19 nt, Artificial Sequence
  Description of Artificial Sequence: Synthetic oligonucleotide
ucuuuccuaucugacucua

SEQ ID NO: 1955479 - RNA, 19 nt, Artificial Sequence
  Description of Artificial Sequence: Synthetic oligonucleotide
gucagaaucuggacagcac

SEQ ID NO: 1955480 - RNA, 19 nt, Artificial Sequence
  Description of Artificial Sequence: Synthetic oligonucleotide
agccccaauagaugccgcu

SEQ ID NO: 1955481 - RNA, 19 nt, Artificial Sequence
  Description of Artificial Sequence: Synthetic oligonucleotide
uccaaugcuagcgcugauu

SEQ ID NO: 1955482 - RNA, 19 nt, Artificial Sequence
  Description of Artificial Sequence: Synthetic oligonucleotide
gccaaauaagguauggaaa

SEQ ID NO: 1955483 - RNA, 19 nt, Artificial Sequence
  Description of Artificial Sequence: Synthetic oligonucleotide
acgcuaaaaugaagcugcg

SEQ ID NO: 1955484 - RNA, 19 nt, Artificial Sequence
  Description of Artificial Sequence: Synthetic oligonucleotide
gauucggagcccggucugc

SEQ ID NO: 1955485 - RNA, 19 nt, Artificial Sequence
  Description of Artificial Sequence: Synthetic oligonucleotide
ucucuucaucuuggcacgc

SEQ ID NO: 1955486 - RNA, 19 nt, Artificial Sequence
  Description of Artificial Sequence: Synthetic oligonucleotide
ucgggugcaucggacuuga

SEQ ID NO: 1955487 - RNA, 19 nt, Artificial Sequence
  Description of Artificial Sequence: Synthetic oligonucleotide
ccaccaaccaagcaaguca

SEQ ID NO: 1955488 - RNA, 19 nt, Artificial Sequence
  Description of Artificial Sequence: Synthetic oligonucleotide
gcaacagggugucgggugc

SEQ ID NO: 1955489 - RNA, 19 nt, Artificial Sequence
  Description of Artificial Sequence: Synthetic oligonucleotide
aggccaaaacccaccagga

SEQ ID NO: 1955490 - RNA, 19 nt, Artificial Sequence
  Description of Artificial Sequence: Synthetic oligonucleotide
gcacacauccgguaacuuc

SEQ ID NO: 1955491 - RNA, 19 nt, Artificial Sequence
  Description of Artificial Sequence: Synthetic oligonucleotide
cuggccggcgugagauucg

SEQ ID NO: 1955492 - RNA, 19 nt, Artificial Sequence
  Description of Artificial Sequence: Synthetic oligonucleotide
ggcacgacuugaugaacac

SEQ ID NO: 1955493 - RNA, 19 nt, Artificial Sequence
  Description of Artificial Sequence: Synthetic oligonucleotide
cgaagcgauguaauccgcg

SEQ ID NO: 1955494 - RNA, 19 nt, Artificial Sequence
  Description of Artificial Sequence: Synthetic oligonucleotide
ugccgcucauucucaagua

SEQ ID NO: 1955495 - RNA, 19 nt, Artificial Sequence
  Description of Artificial Sequence: Synthetic oligonucleotide
aguugccacagcacaaaau

SEQ ID NO: 1955496 - RNA, 19 nt, Artificial Sequence
  Description of Artificial Sequence: Synthetic oligonucleotide
uuggagccguacgaagcga

SEQ ID NO: 1955497 - RNA, 19 nt, Artificial Sequence
  Description of Artificial Sequence: Synthetic oligonucleotide
ucgugcuggcacgacuuga

SEQ ID NO: 1955498 - RNA, 19 nt, Artificial Sequence
  Description of Artificial Sequence: Synthetic oligonucleotide
augcaacugacugguuaug

SEQ ID NO: 1955499 - RNA, 19 nt, Artificial Sequence
  Description of Artificial Sequence: Synthetic oligonucleotide
ggucguguccaaugcuagc

SEQ ID NO: 1955500 - RNA, 19 nt, Artificial Sequence
  Description of Artificial Sequence: Synthetic oligonucleotide
gaagccucccaauuaucuu

SEQ ID NO: 1955501 - RNA, 19 nt, Artificial Sequence
  Description of Artificial Sequence: Synthetic oligonucleotide
uggccggcgugagauucgg

SEQ ID NO: 1955502 - RNA, 19 nt, Artificial Sequence
  Description of Artificial Sequence: Synthetic oligonucleotide
uguaauccgcgugcuucuc

SEQ ID NO: 1955503 - RNA, 19 nt, Artificial Sequence
  Description of Artificial Sequence: Synthetic oligonucleotide
gaucuggccggcgugagau

SEQ ID NO: 1955504 - RNA, 19 nt, Artificial Sequence
  Description of Artificial Sequence: Synthetic oligonucleotide
acaggacuaacagguuuaa

SEQ ID NO: 1955505 - RNA, 19 nt, Artificial Sequence
  Description of Artificial Sequence: Synthetic oligonucleotide
cuucuucgggcaugcaaaa

SEQ ID NO: 1955506 - RNA, 19 nt, Artificial Sequence
  Description of Artificial Sequence: Synthetic oligonucleotide
agaucuggccggcgugaga

SEQ ID NO: 1955507 - RNA, 19 nt, Artificial Sequence
  Description of Artificial Sequence: Synthetic oligonucleotide
agaugccgcucauucucaa

SEQ ID NO: 1955508 - RNA, 19 nt, Artificial Sequence
  Description of Artificial Sequence: Synthetic oligonucleotide
cauaucuccuggucugucu

SEQ ID NO: 1955509 - RNA, 19 nt, Artificial Sequence
  Description of Artificial Sequence: Synthetic oligonucleotide
uggcaugaacacugucaua

SEQ ID NO: 1955510 - RNA, 19 nt, Artificial Sequence
  Description of Artificial Sequence: Synthetic oligonucleotide
caaauccaccaucaaaguu

SEQ ID NO: 1955511 - RNA, 19 nt, Artificial Sequence
  Description of Artificial Sequence: Synthetic oligonucleotide
augcuagcgcugauuccuc

SEQ ID NO: 1955512 - RNA, 19 nt, Artificial Sequence
  Description of Artificial Sequence: Synthetic oligonucleotide
accauaucuccuggucugu

SEQ ID NO: 1955513 - RNA, 19 nt, Artificial Sequence
  Description of Artificial Sequence: Synthetic oligonucleotide
acaauccagcaaugccaaa

SEQ ID NO: 1955514 - RNA, 19 nt, Artificial Sequence
  Description of Artificial Sequence: Synthetic oligonucleotide
caauagaucuggccggcgu

SEQ ID NO: 1955515 - RNA, 19 nt, Artificial Sequence
  Description of Artificial Sequence: Synthetic oligonucleotide
agccguacgaagcgaugua

SEQ ID NO: 1955516 - RNA, 19 nt, Artificial Sequence
  Description of Artificial Sequence: Synthetic oligonucleotide
cguacgaagcgauguaauc

SEQ ID NO: 1955517 - RNA, 19 nt, Artificial Sequence
  Description of Artificial Sequence: Synthetic oligonucleotide
uucgaucaaguugccccau

SEQ ID NO: 1955518 - RNA, 19 nt, Artificial Sequence
  Description of Artificial Sequence: Synthetic oligonucleotide
cuggcacgacuugaugaac

SEQ ID NO: 1955519 - RNA, 19 nt, Artificial Sequence
  Description of Artificial Sequence: Synthetic oligonucleotide
cucgugcuggcacgacuug

SEQ ID NO: 1955520 - RNA, 19 nt, Artificial Sequence
  Description of Artificial Sequence: Synthetic oligonucleotide
gggucguguccaaugcuag

SEQ ID NO: 1955521 - RNA, 19 nt, Artificial Sequence
  Description of Artificial Sequence: Synthetic oligonucleotide
acacucgugcuggcacgac

SEQ ID NO: 1955522 - RNA, 19 nt, Artificial Sequence
  Description of Artificial Sequence: Synthetic oligonucleotide
gagccguacgaagcgaugu

SEQ ID NO: 1955523 - RNA, 19 nt, Artificial Sequence
  Description of Artificial Sequence: Synthetic oligonucleotide
aggauccaccauaucuccu

SEQ ID NO: 1955524 - RNA, 19 nt, Artificial Sequence
  Description of Artificial Sequence: Synthetic oligonucleotide
ccacacucgugcuggcacg

SEQ ID NO: 1955525 - RNA, 19 nt, Artificial Sequence
  Description of Artificial Sequence: Synthetic oligonucleotide
ccggcgugagauucggagc

SEQ ID NO: 1955526 - RNA, 19 nt, Artificial Sequence
  Description of Artificial Sequence: Synthetic oligonucleotide
ccgccugagggcaacuggc

SEQ ID NO: 1955527 - RNA, 19 nt, Artificial Sequence
  Description of Artificial Sequence: Synthetic oligonucleotide
cggcgugagauucggagcc

SEQ ID NO: 1955528 - RNA, 19 nt, Artificial Sequence
  Description of Artificial Sequence: Synthetic oligonucleotide
gcaugaacacugucauaca

SEQ ID NO: 1955529 - RNA, 19 nt, Artificial Sequence
  Description of Artificial Sequence: Synthetic oligonucleotide
gucgggugcaucggacuug

SEQ ID NO: 1955530 - RNA, 19 nt, Artificial Sequence
  Description of Artificial Sequence: Synthetic oligonucleotide
gugaagccucccaauuauc

SEQ ID NO: 1955531 - RNA, 19 nt, Artificial Sequence
  Description of Artificial Sequence: Synthetic oligonucleotide
gugcaacaauagaucuggc

SEQ ID NO: 1955532 - RNA, 19 nt, Artificial Sequence
  Description of Artificial Sequence: Synthetic oligonucleotide
ccugugcaacaauagaucu

SEQ ID NO: 1955533 - RNA, 19 nt, Artificial Sequence
  Description of Artificial Sequence: Synthetic oligonucleotide
cgucaagccccaauagaug

SEQ ID NO: 1955534 - RNA, 19 nt, Artificial Sequence
  Description of Artificial Sequence: Synthetic oligonucleotide
uugccccaugagauccauc

SEQ ID NO: 1955535 - RNA, 19 nt, Artificial Sequence
  Description of Artificial Sequence: Synthetic oligonucleotide
gaagcacuucuucgggcau

SEQ ID NO: 1955536 - RNA, 19 nt, Artificial Sequence
  Description of Artificial Sequence: Synthetic oligonucleotide
gcuagcgcugauuccucca

SEQ ID NO: 1955537 - RNA, 19 nt, Artificial Sequence
  Description of Artificial Sequence: Synthetic oligonucleotide
ugagggcaacuggcguuca

SEQ ID NO: 1955538 - RNA, 19 nt, Artificial Sequence
  Description of Artificial Sequence: Synthetic oligonucleotide
gcgugagauucggagcccg

SEQ ID NO: 1955539 - RNA, 19 nt, Artificial Sequence
  Description of Artificial Sequence: Synthetic oligonucleotide
cacccucugaagcacuucu

SEQ ID NO: 1955540 - RNA, 19 nt, Artificial Sequence
  Description of Artificial Sequence: Synthetic oligonucleotide
gcacgacuugaugaacacc

SEQ ID NO: 1955541 - RNA, 19 nt, Artificial Sequence
  Description of Artificial Sequence: Synthetic oligonucleotide
cccgccugagggcaacugg

SEQ ID NO: 1955542 - RNA, 19 nt, Artificial Sequence
  Description of Artificial Sequence: Synthetic oligonucleotide
ugagcccgccugagggcaa

SEQ ID NO: 1955543 - RNA, 19 nt, Artificial Sequence
  Description of Artificial Sequence: Synthetic oligonucleotide
cucacuaguucaggcugga

SEQ ID NO: 1955544 - RNA, 19 nt, Artificial Sequence
  Description of Artificial Sequence: Synthetic oligonucleotide
ggaauagcacacauccggu

SEQ ID NO: 1955545 - RNA, 19 nt, Artificial Sequence
  Description of Artificial Sequence: Synthetic oligonucleotide
ggugucgggugcaucggac

SEQ ID NO: 1955546 - RNA, 19 nt, Artificial Sequence
  Description of Artificial Sequence: Synthetic oligonucleotide
cugagaguguagagcagau

SEQ ID NO: 1955547 - RNA, 19 nt, Artificial Sequence
  Description of Artificial Sequence: Synthetic oligonucleotide
gcccaagagagccaaaguu

SEQ ID NO: 1955548 - RNA, 19 nt, Artificial Sequence
  Description of Artificial Sequence: Synthetic oligonucleotide
agaugcgggucguguccaa

SEQ ID NO: 1955549 - RNA, 19 nt, Artificial Sequence
  Description of Artificial Sequence: Synthetic oligonucleotide
gugucgggugcaucggacu

SEQ ID NO: 1955550 - RNA, 19 nt, Artificial Sequence
  Description of Artificial Sequence: Synthetic oligonucleotide
gccaccaaccaagcaaguc

SEQ ID NO: 1955551 - RNA, 19 nt, Artificial Sequence
  Description of Artificial Sequence: Synthetic oligonucleotide
gagcagaugcgggucgugu

SEQ ID NO: 1955552 - RNA, 19 nt, Artificial Sequence
  Description of Artificial Sequence: Synthetic oligonucleotide
ggagccguacgaagcgaug

SEQ ID NO: 1955553 - RNA, 19 nt, Artificial Sequence
  Description of Artificial Sequence: Synthetic oligonucleotide
ggccaaaacccaccaggaa

SEQ ID NO: 1955554 - RNA, 19 nt, Artificial Sequence
  Description of Artificial Sequence: Synthetic oligonucleotide
ccacaacuuuaucuacauc

SEQ ID NO: 1955555 - RNA, 19 nt, Artificial Sequence
  Description of Artificial Sequence: Synthetic oligonucleotide
gugcaucggacuugauagu

SEQ ID NO: 1955556 - RNA, 19 nt, Artificial Sequence
  Description of Artificial Sequence: Synthetic oligonucleotide
cagaugcgggucgugucca

SEQ ID NO: 1955557 - RNA, 19 nt, Artificial Sequence
  Description of Artificial Sequence: Synthetic oligonucleotide
cgcuaaaaugaagcugcgc

SEQ ID NO: 1955558 - RNA, 19 nt, Artificial Sequence
  Description of Artificial Sequence: Synthetic oligonucleotide
ccgguaacuucucuggucu

SEQ ID NO: 1955559 - RNA, 19 nt, Artificial Sequence
  Description of Artificial Sequence: Synthetic oligonucleotide
caucgauggcaugaacacu

SEQ ID NO: 1955560 - RNA, 19 nt, Artificial Sequence
  Description of Artificial Sequence: Synthetic oligonucleotide
cacacucgugcuggcacga

SEQ ID NO: 1955561 - RNA, 19 nt, Artificial Sequence
  Description of Artificial Sequence: Synthetic oligonucleotide
ccgucaagccccaauagau

SEQ ID NO: 1955562 - RNA, 19 nt, Artificial Sequence
  Description of Artificial Sequence: Synthetic oligonucleotide
guguugggauugcacuuau

SEQ ID NO: 1955563 - RNA, 19 nt, Artificial Sequence
  Description of Artificial Sequence: Synthetic oligonucleotide
agccaccaaccaagcaagu

SEQ ID NO: 1955564 - RNA, 19 nt, Artificial Sequence
  Description of Artificial Sequence: Synthetic oligonucleotide
ggcgugagauucggagccc

SEQ ID NO: 1955565 - RNA, 19 nt, Artificial Sequence
  Description of Artificial Sequence: Synthetic oligonucleotide
gccccaauagaugccgcuc

SEQ ID NO: 1955566 - RNA, 19 nt, Artificial Sequence
  Description of Artificial Sequence: Synthetic oligonucleotide
cacucgugcuggcacgacu

SEQ ID NO: 1955567 - RNA, 19 nt, Artificial Sequence
  Description of Artificial Sequence: Synthetic oligonucleotide
gccguacgaagcgauguaa

SEQ ID NO: 1955568 - RNA, 19 nt, Artificial Sequence
  Description of Artificial Sequence: Synthetic oligonucleotide
gagcccggucugcacccaa

SEQ ID NO: 1955569 - RNA, 19 nt, Artificial Sequence
  Description of Artificial Sequence: Synthetic oligonucleotide
ccauaucuccuggucuguc

SEQ ID NO: 1955570 - RNA, 19 nt, Artificial Sequence
  Description of Artificial Sequence: Synthetic oligonucleotide
cggagcccggucugcaccc

SEQ ID NO: 1955571 - RNA, 19 nt, Artificial Sequence
  Description of Artificial Sequence: Synthetic oligonucleotide
gccgcucauucucaaguau

SEQ ID NO: 1955572 - RNA, 19 nt, Artificial Sequence
  Description of Artificial Sequence: Synthetic oligonucleotide
agcccggucugcacccaaa

SEQ ID NO: 1955573 - RNA, 19 nt, Artificial Sequence
  Description of Artificial Sequence: Synthetic oligonucleotide
ccucccaauuaucuucagu

SEQ ID NO: 1955574 - RNA, 19 nt, Artificial Sequence
  Description of Artificial Sequence: Synthetic oligonucleotide
cuucugcggugugcccauc

SEQ ID NO: 1955575 - RNA, 19 nt, Artificial Sequence
  Description of Artificial Sequence: Synthetic oligonucleotide
ccagugaagccucccaauu

SEQ ID NO: 1955576 - RNA, 19 nt, Artificial Sequence
  Description of Artificial Sequence: Synthetic oligonucleotide
gcgauguaauccgcgugcu

SEQ ID NO: 1955577 - RNA, 19 nt, Artificial Sequence
  Description of Artificial Sequence: Synthetic oligonucleotide
caggacuaacagguuuaau

SEQ ID NO: 1955578 - RNA, 19 nt, Artificial Sequence
  Description of Artificial Sequence: Synthetic oligonucleotide
cuaguucaggcuggauauu

SEQ ID NO: 1955579 - RNA, 19 nt, Artificial Sequence
  Description of Artificial Sequence: Synthetic oligonucleotide
cgggucguguccaaugcua

SEQ ID NO: 1955580 - RNA, 19 nt, Artificial Sequence
  Description of Artificial Sequence: Synthetic oligonucleotide
ccguacgaagcgauguaau

SEQ ID NO: 1955581 - RNA, 19 nt, Artificial Sequence
  Description of Artificial Sequence: Synthetic oligonucleotide
ccgcucauucucaaguauu

SEQ ID NO: 1955582 - RNA, 19 nt, Artificial Sequence
  Description of Artificial Sequence: Synthetic oligonucleotide
ccugagggcaacuggcguu

SEQ ID NO: 1955583 - RNA, 19 nt, Artificial Sequence
  Description of Artificial Sequence: Synthetic oligonucleotide
ccaucaccgucaagcccca

SEQ ID NO: 1955584 - RNA, 19 nt, Artificial Sequence
  Description of Artificial Sequence: Synthetic oligonucleotide
gcgcugauuccuccacacu

SEQ ID NO: 1955585 - RNA, 19 nt, Artificial Sequence
  Description of Artificial Sequence: Synthetic oligonucleotide
gcgggucguguccaaugcu

SEQ ID NO: 1955586 - RNA, 19 nt, Artificial Sequence
  Description of Artificial Sequence: Synthetic oligonucleotide
gcccgccugagggcaacug

SEQ ID NO: 1955587 - RNA, 19 nt, Artificial Sequence
  Description of Artificial Sequence: Synthetic oligonucleotide
cccaauagaugccgcucau

SEQ ID NO: 1955588 - RNA, 19 nt, Artificial Sequence
  Description of Artificial Sequence: Synthetic oligonucleotide
gcccggucugcacccaaau

SEQ ID NO: 1955589 - RNA, 19 nt, Artificial Sequence
  Description of Artificial Sequence: Synthetic oligonucleotide
ccuucugcggugugcccau

SEQ ID NO: 1955590 - RNA, 19 nt, Artificial Sequence
  Description of Artificial Sequence: Synthetic oligonucleotide
ggccggcgugagauucgga

SEQ ID NO: 1955591 - RNA, 19 nt, Artificial Sequence
  Description of Artificial Sequence: Synthetic oligonucleotide
cgauguaauccgcgugcuu

SEQ ID NO: 1955592 - RNA, 19 nt, Artificial Sequence
  Description of Artificial Sequence: Synthetic oligonucleotide
cgguaacuucucuggucuu

SEQ ID NO: 1955593 - RNA, 19 nt, Artificial Sequence
  Description of Artificial Sequence: Synthetic oligonucleotide
aaugcaaagauguacaguc

SEQ ID NO: 1955594 - RNA, 19 nt, Artificial Sequence
  Description of Artificial Sequence: Synthetic oligonucleotide
aaaacccugguacaaaagc

SEQ ID NO: 1955595 - RNA, 19 nt, Artificial Sequence
  Description of Artificial Sequence: Synthetic oligonucleotide
ugaacaaaugcaaagaugu

SEQ ID NO: 1955596 - RNA, 19 nt, Artificial Sequence
  Description of Artificial Sequence: Synthetic oligonucleotide
aaaacauucaugccauggc

SEQ ID NO: 1955597 - RNA, 19 nt, Artificial Sequence
  Description of Artificial Sequence: Synthetic oligonucleotide
aagauguacagucaggcuc

SEQ ID NO: 1955598 - RNA, 19 nt, Artificial Sequence
  Description of Artificial Sequence: Synthetic oligonucleotide
ucuaacaacaucaggaccc

SEQ ID NO: 1955599 - RNA, 19 nt, Artificial Sequence
  Description of Artificial Sequence: Synthetic oligonucleotide
uacuagaaaacauucaugc

SEQ ID NO: 1955600 - RNA, 19 nt, Artificial Sequence
  Description of Artificial Sequence: Synthetic oligonucleotide
augcauaucaccuucuccc

SEQ ID NO: 1955601 - RNA, 19 nt, Artificial Sequence
  Description of Artificial Sequence: Synthetic oligonucleotide
aaguacaaguuucaaggac

SEQ ID NO: 1955602 - RNA, 19 nt, Artificial Sequence
  Description of Artificial Sequence: Synthetic oligonucleotide
aaaacagucuacuauucca

SEQ ID NO: 1955603 - RNA, 19 nt, Artificial Sequence
  Description of Artificial Sequence: Synthetic oligonucleotide
aaaacaaggacagcaguac

SEQ ID NO: 1955604 - RNA, 19 nt, Artificial Sequence
  Description of Artificial Sequence: Synthetic oligonucleotide
aaggacgagacuuuucuuc

SEQ ID NO: 1955605 - RNA, 19 nt, Artificial Sequence
  Description of Artificial Sequence: Synthetic oligonucleotide
accacacuaagccaaauac

SEQ ID NO: 1955606 - RNA, 19 nt, Artificial Sequence
  Description of Artificial Sequence: Synthetic oligonucleotide
ugucucaccacacuaagcc

SEQ ID NO: 1955607 - RNA, 19 nt, Artificial Sequence
  Description of Artificial Sequence: Synthetic oligonucleotide
aaggaagcuaacccaagac

SEQ ID NO: 1955608 - RNA, 19 nt, Artificial Sequence
  Description of Artificial Sequence: Synthetic oligonucleotide
acuagaaaacauucaugcc

SEQ ID NO: 1955609 - RNA, 19 nt, Artificial Sequence
  Description of Artificial Sequence: Synthetic oligonucleotide
ugcuuaucaucccacacgg

SEQ ID NO: 1955610 - RNA, 19 nt, Artificial Sequence
  Description of Artificial Sequence: Synthetic oligonucleotide
cuuuuaaugaacaaaugca

SEQ ID NO: 1955611 - RNA, 19 nt, Artificial Sequence
  Description of Artificial Sequence: Synthetic oligonucleotide
ucacagaccacucuacagg

SEQ ID NO: 1955612 - RNA, 19 nt, Artificial Sequence
  Description of Artificial Sequence: Synthetic oligonucleotide
aggaagcuaacccaagacc

SEQ ID NO: 1955613 - RNA, 19 nt, Artificial Sequence
  Description of Artificial Sequence: Synthetic oligonucleotide
cacacuaagccaaauacag

SEQ ID NO: 1955614 - RNA, 19 nt, Artificial Sequence
  Description of Artificial Sequence: Synthetic oligonucleotide
uuccaaagaugcuagaggc

SEQ ID NO: 1955615 - RNA, 19 nt, Artificial Sequence
  Description of Artificial Sequence: Synthetic oligonucleotide
aaaacccgggagcuguucc

SEQ ID NO: 1955616 - RNA, 19 nt, Artificial Sequence
  Description of Artificial Sequence: Synthetic oligonucleotide
acagucuacuauuccagcc

SEQ ID NO: 1955617 - RNA, 19 nt, Artificial Sequence
  Description of Artificial Sequence: Synthetic oligonucleotide
aacauucaugccauggccc

SEQ ID NO: 1955618 - RNA, 19 nt, Artificial Sequence
  Description of Artificial Sequence: Synthetic oligonucleotide
uuagcgaaggacacugacg

SEQ ID NO: 1955619 - RNA, 19 nt, Artificial Sequence
  Description of Artificial Sequence: Synthetic oligonucleotide
ugcaaagauguacagucag

SEQ ID NO: 1955620 - RNA, 19 nt, Artificial Sequence
  Description of Artificial Sequence: Synthetic oligonucleotide
uacuuuaagcaacagucca

SEQ ID NO: 1955621 - RNA, 19 nt, Artificial Sequence
  Description of Artificial Sequence: Synthetic oligonucleotide
ucaagcaccagcgucaugc

SEQ ID NO: 1955622 - RNA, 19 nt, Artificial Sequence
  Description of Artificial Sequence: Synthetic oligonucleotide
aguacaaguuucaaggacg

SEQ ID NO: 1955623 - RNA, 19 nt, Artificial Sequence
  Description of Artificial Sequence: Synthetic oligonucleotide
gaugcuagaggccaucuug

SEQ ID NO: 1955624 - RNA, 19 nt, Artificial Sequence
  Description of Artificial Sequence: Synthetic oligonucleotide
uuacuuuaagcaacagucc

SEQ ID NO: 1955625 - RNA, 19 nt, Artificial Sequence
  Description of Artificial Sequence: Synthetic oligonucleotide
gacagaaggacagaguucc

SEQ ID NO: 1955626 - RNA, 19 nt, Artificial Sequence
  Description of Artificial Sequence: Synthetic oligonucleotide
acuacuagaaaacauucau

SEQ ID NO: 1955627 - RNA, 19 nt, Artificial Sequence
  Description of Artificial Sequence: Synthetic oligonucleotide
ucaaggacgagacuuuucu

SEQ ID NO: 1955628 - RNA, 19 nt, Artificial Sequence
  Description of Artificial Sequence: Synthetic oligonucleotide
uacuauuccagccuacuac

SEQ ID NO: 1955629 - RNA, 19 nt, Artificial Sequence
  Description of Artificial Sequence: Synthetic oligonucleotide
aauaccaaggagcuaccgu

SEQ ID NO: 1955630 - RNA, 19 nt, Artificial Sequence
  Description of Artificial Sequence: Synthetic oligonucleotide
guuccaaagaugcuagagg

SEQ ID NO: 1955631 - RNA, 19 nt, Artificial Sequence
  Description of Artificial Sequence: Synthetic oligonucleotide
caugccauggcccacagac

SEQ ID NO: 1955632 - RNA, 19 nt, Artificial Sequence
  Description of Artificial Sequence: Synthetic oligonucleotide
acagcaguacauaaagugc

SEQ ID NO: 1955633 - RNA, 19 nt, Artificial Sequence
  Description of Artificial Sequence: Synthetic oligonucleotide
agugcuucucuuuuaauga

SEQ ID NO: 1955634 - RNA, 19 nt, Artificial Sequence
  Description of Artificial Sequence: Synthetic oligonucleotide
ucuaagaagucuccagagc

SEQ ID NO: 1955635 - RNA, 19 nt, Artificial Sequence
  Description of Artificial Sequence: Synthetic oligonucleotide
uucaaucugccccaggcug

SEQ ID NO: 1955636 - RNA, 19 nt, Artificial Sequence
  Description of Artificial Sequence: Synthetic oligonucleotide
agaucauuuguucuuaaaa

SEQ ID NO: 1955637 - RNA, 19 nt, Artificial Sequence
  Description of Artificial Sequence: Synthetic oligonucleotide
augcacauggcaugcagac

SEQ ID NO: 1955638 - RNA, 19 nt, Artificial Sequence
  Description of Artificial Sequence: Synthetic oligonucleotide
gguaguaguggucauggcg

SEQ ID NO: 1955639 - RNA, 19 nt, Artificial Sequence
  Description of Artificial Sequence: Synthetic oligonucleotide
caaagauguacagucaggc

SEQ ID NO: 1955640 - RNA, 19 nt, Artificial Sequence
  Description of Artificial Sequence: Synthetic oligonucleotide
aaacagucuacuauuccag

SEQ ID NO: 1955641 - RNA, 19 nt, Artificial Sequence
  Description of Artificial Sequence: Synthetic oligonucleotide
cacguuuucaugcauauca

SEQ ID NO: 1955642 - RNA, 19 nt, Artificial Sequence
  Description of Artificial Sequence: Synthetic oligonucleotide
ucccacacggcacaggaag

SEQ ID NO: 1955643 - RNA, 19 nt, Artificial Sequence
  Description of Artificial Sequence: Synthetic oligonucleotide
ucugucucaccacacuaag

SEQ ID NO: 1955644 - RNA, 19 nt, Artificial Sequence
  Description of Artificial Sequence: Synthetic oligonucleotide
acgagacuuuucuucaugg

SEQ ID NO: 1955645 - RNA, 19 nt, Artificial Sequence
  Description of Artificial Sequence: Synthetic oligonucleotide
aacaguccaggacugagaa

SEQ ID NO: 1955646 - RNA, 19 nt, Artificial Sequence
  Description of Artificial Sequence: Synthetic oligonucleotide
cuacuacuagaaaacauuc

SEQ ID NO: 1955647 - RNA, 19 nt, Artificial Sequence
  Description of Artificial Sequence: Synthetic oligonucleotide
uacuacuagaaaacauuca

SEQ ID NO: 1955648 - RNA, 19 nt, Artificial Sequence
  Description of Artificial Sequence: Synthetic oligonucleotide
ucaaucugccccaggcugg

SEQ ID NO: 1955649 - RNA, 19 nt, Artificial Sequence
  Description of Artificial Sequence: Synthetic oligonucleotide
cuacuagaaaacauucaug

SEQ ID NO: 1955650 - RNA, 19 nt, Artificial Sequence
  Description of Artificial Sequence: Synthetic oligonucleotide
gugcuuaucaucccacacg

SEQ ID NO: 1955651 - RNA, 19 nt, Artificial Sequence
  Description of Artificial Sequence: Synthetic oligonucleotide
acuauuccagccuacuacu

SEQ ID NO: 1955652 - RNA, 19 nt, Artificial Sequence
  Description of Artificial Sequence: Synthetic oligonucleotide
ucccuugaggucuaagaag

SEQ ID NO: 1955653 - RNA, 19 nt, Artificial Sequence
  Description of Artificial Sequence: Synthetic oligonucleotide
gucuaagaagucuccagag

SEQ ID NO: 1955654 - RNA, 19 nt, Artificial Sequence
  Description of Artificial Sequence: Synthetic oligonucleotide
uuaucaucccacacggcac

SEQ ID NO: 1955655 - RNA, 19 nt, Artificial Sequence
  Description of Artificial Sequence: Synthetic oligonucleotide
ucaugcacauggcaugcag

SEQ ID NO: 1955656 - RNA, 19 nt, Artificial Sequence
  Description of Artificial Sequence: Synthetic oligonucleotide
guaguaguggucauggcgc

SEQ ID NO: 1955657 - RNA, 19 nt, Artificial Sequence
  Description of Artificial Sequence: Synthetic oligonucleotide
cuuaucaucccacacggca

SEQ ID NO: 1955658 - RNA, 19 nt, Artificial Sequence
  Description of Artificial Sequence: Synthetic oligonucleotide
caggaaggcgcacuuagcg

SEQ ID NO: 1955659 - RNA, 19 nt, Artificial Sequence
  Description of Artificial Sequence: Synthetic oligonucleotide
ucuacaggggcugaagggc

SEQ ID NO: 1955660 - RNA, 19 nt, Artificial Sequence
  Description of Artificial Sequence: Synthetic oligonucleotide
uugaggucuaagaagucuc

SEQ ID NO: 1955661 - RNA, 19 nt, Artificial Sequence
  Description of Artificial Sequence: Synthetic oligonucleotide
caaaugcaaagauguacag

SEQ ID NO: 1955662 - RNA, 19 nt, Artificial Sequence
  Description of Artificial Sequence: Synthetic oligonucleotide
uccaaagaugcuagaggcc

SEQ ID NO: 1955663 - RNA, 19 nt, Artificial Sequence
  Description of Artificial Sequence: Synthetic oligonucleotide
uucagguguuccaaagaug

SEQ ID NO: 1955664 - RNA, 19 nt, Artificial Sequence
  Description of Artificial Sequence: Synthetic oligonucleotide
ugaggucuaagaagucucc

SEQ ID NO: 1955665 - RNA, 19 nt, Artificial Sequence
  Description of Artificial Sequence: Synthetic oligonucleotide
uucugauggcucaucgaag

SEQ ID NO: 1955666 - RNA, 19 nt, Artificial Sequence
  Description of Artificial Sequence: Synthetic oligonucleotide
acucuacaggggcugaagg

SEQ ID NO: 1955667 - RNA, 19 nt, Artificial Sequence
  Description of Artificial Sequence: Synthetic oligonucleotide
aagcuaacccaagaccagg

SEQ ID NO: 1955668 - RNA, 19 nt, Artificial Sequence
  Description of Artificial Sequence: Synthetic oligonucleotide
uggucauggcgccaagggg

SEQ ID NO: 1955669 - RNA, 19 nt, Artificial Sequence
  Description of Artificial Sequence: Synthetic oligonucleotide
aagcgucucuaacaacauc

SEQ ID NO: 1955670 - RNA, 19 nt, Artificial Sequence
  Description of Artificial Sequence: Synthetic oligonucleotide
caugcauaucaccuucucc

SEQ ID NO: 1955671 - RNA, 19 nt, Artificial Sequence
  Description of Artificial Sequence: Synthetic oligonucleotide
ucgacuuggcaccugcuga

SEQ ID NO: 1955672 - RNA, 19 nt, Artificial Sequence
  Description of Artificial Sequence: Synthetic oligonucleotide
ucucccuugaggucuaaga

SEQ ID NO: 1955673 - RNA, 19 nt, Artificial Sequence
  Description of Artificial Sequence: Synthetic oligonucleotide
aggucuaagaagucuccag

SEQ ID NO: 1955674 - RNA, 19 nt, Artificial Sequence
  Description of Artificial Sequence: Synthetic oligonucleotide
cucuacaggggcugaaggg

SEQ ID NO: 1955675 - RNA, 19 nt, Artificial Sequence
  Description of Artificial Sequence: Synthetic oligonucleotide
gaaguacaaguuucaagga

SEQ ID NO: 1955676 - RNA, 19 nt, Artificial Sequence
  Description of Artificial Sequence: Synthetic oligonucleotide
gugguaguaguggucaugg

SEQ ID NO: 1955677 - RNA, 19 nt, Artificial Sequence
  Description of Artificial Sequence: Synthetic oligonucleotide
cuaagccaaauacagcauc

SEQ ID NO: 1955678 - RNA, 19 nt, Artificial Sequence
  Description of Artificial Sequence: Synthetic oligonucleotide
cagccuacuacuagaaaac

SEQ ID NO: 1955679 - RNA, 19 nt, Artificial Sequence
  Description of Artificial Sequence: Synthetic oligonucleotide
accgugcugugucacagac

SEQ ID NO: 1955680 - RNA, 19 nt, Artificial Sequence
  Description of Artificial Sequence: Synthetic oligonucleotide
cuaacccaagaccaggcug

SEQ ID NO: 1955681 - RNA, 19 nt, Artificial Sequence
  Description of Artificial Sequence: Synthetic oligonucleotide
cagaccacucuacaggggc

SEQ ID NO: 1955682 - RNA, 19 nt, Artificial Sequence
  Description of Artificial Sequence: Synthetic oligonucleotide
agcgucucuaacaacauca

SEQ ID NO: 1955683 - RNA, 19 nt, Artificial Sequence
  Description of Artificial Sequence: Synthetic oligonucleotide
uaucaucccacacggcaca

SEQ ID NO: 1955684 - RNA, 19 nt, Artificial Sequence
  Description of Artificial Sequence: Synthetic oligonucleotide
cuggaggccgcaaaacccg

SEQ ID NO: 1955685 - RNA, 19 nt, Artificial Sequence
  Description of Artificial Sequence: Synthetic oligonucleotide
cuuagcgaaggacacugac

SEQ ID NO: 1955686 - RNA, 19 nt, Artificial Sequence
  Description of Artificial Sequence: Synthetic oligonucleotide
cagaguuccaacaaaggaa

SEQ ID NO: 1955687 - RNA, 19 nt, Artificial Sequence
  Description of Artificial Sequence: Synthetic oligonucleotide
aaaauuggagccgccgccu

SEQ ID NO: 1955688 - RNA, 19 nt, Artificial Sequence
  Description of Artificial Sequence: Synthetic oligonucleotide
acacuaagccaaauacagc

SEQ ID NO: 1955689 - RNA, 19 nt, Artificial Sequence
  Description of Artificial Sequence: Synthetic oligonucleotide
uuuaagcaacaguccagga

SEQ ID NO: 1955690 - RNA, 19 nt, Artificial Sequence
  Description of Artificial Sequence: Synthetic oligonucleotide
ugacggugggaauaccaag

SEQ ID NO: 1955691 - RNA, 19 nt, Artificial Sequence
  Description of Artificial Sequence: Synthetic oligonucleotide
auuccagccuacuacuaga

SEQ ID NO: 1955692 - RNA, 19 nt, Artificial Sequence
  Description of Artificial Sequence: Synthetic oligonucleotide
uuuucaugcauaucaccuu

SEQ ID NO: 1955693 - RNA, 19 nt, Artificial Sequence
  Description of Artificial Sequence: Synthetic oligonucleotide
acacccuugaaggugguag

SEQ ID NO: 1955694 - RNA, 19 nt, Artificial Sequence
  Description of Artificial Sequence: Synthetic oligonucleotide
gaagucagacagaagaaaa

SEQ ID NO: 1955695 - RNA, 19 nt, Artificial Sequence
  Description of Artificial Sequence: Synthetic oligonucleotide
gacgagacuuuucuucaug

SEQ ID NO: 1955696 - RNA, 19 nt, Artificial Sequence
  Description of Artificial Sequence: Synthetic oligonucleotide
caaggggcgagguaggcug

SEQ ID NO: 1955697 - RNA, 19 nt, Artificial Sequence
  Description of Artificial Sequence: Synthetic oligonucleotide
cacaggaaggcgcacuuag

SEQ ID NO: 1955698 - RNA, 19 nt, Artificial Sequence
  Description of Artificial Sequence: Synthetic oligonucleotide
uccgaaucuucccugccac

SEQ ID NO: 1955699 - RNA, 19 nt, Artificial Sequence
  Description of Artificial Sequence: Synthetic oligonucleotide
acuccgaaucuucccugcc

SEQ ID NO: 1955700 - RNA, 19 nt, Artificial Sequence
  Description of Artificial Sequence: Synthetic oligonucleotide
cuguucugauggcucaucg

SEQ ID NO: 1955701 - RNA, 19 nt, Artificial Sequence
  Description of Artificial Sequence: Synthetic oligonucleotide
aggacgagacuuuucuuca

SEQ ID NO: 1955702 - RNA, 19 nt, Artificial Sequence
  Description of Artificial Sequence: Synthetic oligonucleotide
acuuuaagcaacaguccag

SEQ ID NO: 1955703 - RNA, 19 nt, Artificial Sequence
  Description of Artificial Sequence: Synthetic oligonucleotide
aacaaggacagcaguacau

SEQ ID NO: 1955704 - RNA, 19 nt, Artificial Sequence
  Description of Artificial Sequence: Synthetic oligonucleotide
cuaagaagucuccagagcu

SEQ ID NO: 1955705 - RNA, 19 nt, Artificial Sequence
  Description of Artificial Sequence: Synthetic oligonucleotide
uaccaaggagcuaccgugc

SEQ ID NO: 1955706 - RNA, 19 nt, Artificial Sequence
  Description of Artificial Sequence: Synthetic oligonucleotide
gaauaccaaggagcuaccg

SEQ ID NO: 1955707 - RNA, 19 nt, Artificial Sequence
  Description of Artificial Sequence: Synthetic oligonucleotide
guacaaaagcgucucuaac

SEQ ID NO: 1955708 - RNA, 19 nt, Artificial Sequence
  Description of Artificial Sequence: Synthetic oligonucleotide
uggcuuggaagucuguguc

SEQ ID NO: 1955709 - RNA, 19 nt, Artificial Sequence
  Description of Artificial Sequence: Synthetic oligonucleotide
gggaauaccaaggagcuac

SEQ ID NO: 1955710 - RNA, 19 nt, Artificial Sequence
  Description of Artificial Sequence: Synthetic oligonucleotide
ucuucccugccaccacucg

SEQ ID NO: 1955711 - RNA, 19 nt, Artificial Sequence
  Description of Artificial Sequence: Synthetic oligonucleotide
guucugauggcucaucgaa

SEQ ID NO: 1955712 - RNA, 19 nt, Artificial Sequence
  Description of Artificial Sequence: Synthetic oligonucleotide
aacccugguacaaaagcgu

SEQ ID NO: 1955713 - RNA, 19 nt, Artificial Sequence
  Description of Artificial Sequence: Synthetic oligonucleotide
guggguauuguuuacuuua

SEQ ID NO: 1955714 - RNA, 19 nt, Artificial Sequence
  Description of Artificial Sequence: Synthetic oligonucleotide
uggguauuguuuacuuuaa

SEQ ID NO: 1955715 - RNA, 19 nt, Artificial Sequence
  Description of Artificial Sequence: Synthetic oligonucleotide
ugcauaucaccuucucccu

SEQ ID NO: 1955716 - RNA, 19 nt, Artificial Sequence
  Description of Artificial Sequence: Synthetic oligonucleotide
agcuaacccaagaccaggc

SEQ ID NO: 1955717 - RNA, 19 nt, Artificial Sequence
  Description of Artificial Sequence: Synthetic oligonucleotide
caccacucgacuuggcacc

SEQ ID NO: 1955718 - RNA, 19 nt, Artificial Sequence
  Description of Artificial Sequence: Synthetic oligonucleotide
uccacguuuucaugcauau

SEQ ID NO: 1955719 - RNA, 19 nt, Artificial Sequence
  Description of Artificial Sequence: Synthetic oligonucleotide
ucaucgaagccuagugaaa

SEQ ID NO: 1955720 - RNA, 19 nt, Artificial Sequence
  Description of Artificial Sequence: Synthetic oligonucleotide
cacuuagcgaaggacacug

SEQ ID NO: 1955721 - RNA, 19 nt, Artificial Sequence
  Description of Artificial Sequence: Synthetic oligonucleotide
acgccgaggggacugggac

SEQ ID NO: 1955722 - RNA, 19 nt, Artificial Sequence
  Description of Artificial Sequence: Synthetic oligonucleotide
agauguacagucaggcuca

SEQ ID NO: 1955723 - RNA, 19 nt, Artificial Sequence
  Description of Artificial Sequence: Synthetic oligonucleotide
acguuuucaugcauaucac

SEQ ID NO: 1955724 - RNA, 19 nt, Artificial Sequence
  Description of Artificial Sequence: Synthetic oligonucleotide
gcagggagaacgccgaggg

SEQ ID NO: 1955725 - RNA, 19 nt, Artificial Sequence
  Description of Artificial Sequence: Synthetic oligonucleotide
uucccugccaccacucgac

SEQ ID NO: 1955726 - RNA, 19 nt, Artificial Sequence
  Description of Artificial Sequence: Synthetic oligonucleotide
aaacccgggagcuguuccu

SEQ ID NO: 1955727 - RNA, 19 nt, Artificial Sequence
  Description of Artificial Sequence: Synthetic oligonucleotide
aaguuucaaggacgagacu

SEQ ID NO: 1955728 - RNA, 19 nt, Artificial Sequence
  Description of Artificial Sequence: Synthetic oligonucleotide
ggaagcuaacccaagacca

SEQ ID NO: 1955729 - RNA, 19 nt, Artificial Sequence
  Description of Artificial Sequence: Synthetic oligonucleotide
agggagaacgccgagggga

SEQ ID NO: 1955730 - RNA, 19 nt, Artificial Sequence
  Description of Artificial Sequence: Synthetic oligonucleotide
uucaaggacgagacuuuuc

SEQ ID NO: 1955731 - RNA, 19 nt, Artificial Sequence
  Description of Artificial Sequence: Synthetic oligonucleotide
gacuccgaaucuucccugc

SEQ ID NO: 1955732 - RNA, 19 nt, Artificial Sequence
  Description of Artificial Sequence: Synthetic oligonucleotide
gugcacgugcuuaucaucc

SEQ ID NO: 1955733 - RNA, 19 nt, Artificial Sequence
  Description of Artificial Sequence: Synthetic oligonucleotide
auaaagugcuucucuuuua

SEQ ID NO: 1955734 - RNA, 19 nt, Artificial Sequence
  Description of Artificial Sequence: Synthetic oligonucleotide
cuggauuugccgccagggg

SEQ ID NO: 1955735 - RNA, 19 nt, Artificial Sequence
  Description of Artificial Sequence: Synthetic oligonucleotide
aaggcgcacuuagcgaagg

SEQ ID NO: 1955736 - RNA, 19 nt, Artificial Sequence
  Description of Artificial Sequence: Synthetic oligonucleotide
gaaggacacugacgguggg

SEQ ID NO: 1955737 - RNA, 19 nt, Artificial Sequence
  Description of Artificial Sequence: Synthetic oligonucleotide
aagguggguauuguuuacu

SEQ ID NO: 1955738 - RNA, 19 nt, Artificial Sequence
  Description of Artificial Sequence: Synthetic oligonucleotide
uguggcugucaucugucuc

SEQ ID NO: 1955739 - RNA, 19 nt, Artificial Sequence
  Description of Artificial Sequence: Synthetic oligonucleotide
acggugugcaguucacaag

SEQ ID NO: 1955740 - RNA, 19 nt, Artificial Sequence
  Description of Artificial Sequence: Synthetic oligonucleotide
cugucucaccacacuaagc

SEQ ID NO: 1955741 - RNA, 19 nt, Artificial Sequence
  Description of Artificial Sequence: Synthetic oligonucleotide
ugcuguugggguccacacc

SEQ ID NO: 1955742 - RNA, 19 nt, Artificial Sequence
  Description of Artificial Sequence: Synthetic oligonucleotide
gguguuccaaagaugcuag

SEQ ID NO: 1955743 - RNA, 19 nt, Artificial Sequence
  Description of Artificial Sequence: Synthetic oligonucleotide
cugagaaguacaaguuuca

SEQ ID NO: 1955744 - RNA, 19 nt, Artificial Sequence
  Description of Artificial Sequence: Synthetic oligonucleotide
uggaggccgcaaaacccgg

SEQ ID NO: 1955745 - RNA, 19 nt, Artificial Sequence
  Description of Artificial Sequence: Synthetic oligonucleotide
acacugacggugggaauac

SEQ ID NO: 1955746 - RNA, 19 nt, Artificial Sequence
  Description of Artificial Sequence: Synthetic oligonucleotide
aggaaggcgcacuuagcga

SEQ ID NO: 1955747 - RNA, 19 nt, Artificial Sequence
  Description of Artificial Sequence: Synthetic oligonucleotide
aagaugcuagaggccaucu

SEQ ID NO: 1955748 - RNA, 19 nt, Artificial Sequence
  Description of Artificial Sequence: Synthetic oligonucleotide
cuccaggcgacuccgaauc

SEQ ID NO: 1955749 - RNA, 19 nt, Artificial Sequence
  Description of Artificial Sequence: Synthetic oligonucleotide
ggacagaguuccaacaaag

SEQ ID NO: 1955750 - RNA, 19 nt, Artificial Sequence
  Description of Artificial Sequence: Synthetic oligonucleotide
acacggcacaggaaggcgc

SEQ ID NO: 1955751 - RNA, 19 nt, Artificial Sequence
  Description of Artificial Sequence: Synthetic oligonucleotide
ugcacgugcuuaucauccc

SEQ ID NO: 1955752 - RNA, 19 nt, Artificial Sequence
  Description of Artificial Sequence: Synthetic oligonucleotide
ccaacaaaggaagcuaacc

SEQ ID NO: 1955753 - RNA, 19 nt, Artificial Sequence
  Description of Artificial Sequence: Synthetic oligonucleotide
ggucauggcgccaaggggc

SEQ ID NO: 1955754 - RNA, 19 nt, Artificial Sequence
  Description of Artificial Sequence: Synthetic oligonucleotide
agagcuugcuucagagggg

SEQ ID NO: 1955755 - RNA, 19 nt, Artificial Sequence
  Description of Artificial Sequence: Synthetic oligonucleotide
ugguacaaaagcgucucua

SEQ ID NO: 1955756 - RNA, 19 nt, Artificial Sequence
  Description of Artificial Sequence: Synthetic oligonucleotide
acggugggaauaccaagga

SEQ ID NO: 1955757 - RNA, 19 nt, Artificial Sequence
  Description of Artificial Sequence: Synthetic oligonucleotide
ggucuaagaagucuccaga

SEQ ID NO: 1955758 - RNA, 19 nt, Artificial Sequence
  Description of Artificial Sequence: Synthetic oligonucleotide
gaaucuucccugccaccac

SEQ ID NO: 1955759 - RNA, 19 nt, Artificial Sequence
  Description of Artificial Sequence: Synthetic oligonucleotide
aaagcgucucuaacaacau

SEQ ID NO: 1955760 - RNA, 19 nt, Artificial Sequence
  Description of Artificial Sequence: Synthetic oligonucleotide
cugaagggcagcaccugug

SEQ ID NO: 1955761 - RNA, 19 nt, Artificial Sequence
  Description of Artificial Sequence: Synthetic oligonucleotide
ggagcuaccgugcuguguc

SEQ ID NO: 1955762 - RNA, 19 nt, Artificial Sequence
  Description of Artificial Sequence: Synthetic oligonucleotide
cucgacuuggcaccugcug

SEQ ID NO: 1955763 - RNA, 19 nt, Artificial Sequence
  Description of Artificial Sequence: Synthetic oligonucleotide
accuguggcugucaucugu

SEQ ID NO: 1955764 - RNA, 19 nt, Artificial Sequence
  Description of Artificial Sequence: Synthetic oligonucleotide
gcaaagauguacagucagg

SEQ ID NO: 1955765 - RNA, 19 nt, Artificial Sequence
  Description of Artificial Sequence: Synthetic oligonucleotide
cacgugcuuaucaucccac

SEQ ID NO: 1955766 - RNA, 19 nt, Artificial Sequence
  Description of Artificial Sequence: Synthetic oligonucleotide
gaggugcacgugcuuauca

SEQ ID NO: 1955767 - RNA, 19 nt, Artificial Sequence
  Description of Artificial Sequence: Synthetic oligonucleotide
acaguccaggacugagaag

SEQ ID NO: 1955768 - RNA, 19 nt, Artificial Sequence
  Description of Artificial Sequence: Synthetic oligonucleotide
caguucacaagcacggaaa

SEQ ID NO: 1955769 - RNA, 19 nt, Artificial Sequence
  Description of Artificial Sequence: Synthetic oligonucleotide
guacaaguuucaaggacga

SEQ ID NO: 1955770 - RNA, 19 nt, Artificial Sequence
  Description of Artificial Sequence: Synthetic oligonucleotide
agcaccuguggcugucauc

SEQ ID NO: 1955771 - RNA, 19 nt, Artificial Sequence
  Description of Artificial Sequence: Synthetic oligonucleotide
gguacaaaagcgucucuaa

SEQ ID NO: 1955772 - RNA, 19 nt, Artificial Sequence
  Description of Artificial Sequence: Synthetic oligonucleotide
acccugguacaaaagcguc

SEQ ID NO: 1955773 - RNA, 19 nt, Artificial Sequence
  Description of Artificial Sequence: Synthetic oligonucleotide
ggcucaucgaagccuagug

SEQ ID NO: 1955774 - RNA, 19 nt, Artificial Sequence
  Description of Artificial Sequence: Synthetic oligonucleotide
cacucgacuuggcaccugc

SEQ ID NO: 1955775 - RNA, 19 nt, Artificial Sequence
  Description of Artificial Sequence: Synthetic oligonucleotide
gagaacgccgaggggacug

SEQ ID NO: 1955776 - RNA, 19 nt, Artificial Sequence
  Description of Artificial Sequence: Synthetic oligonucleotide
ggagccgccgccuggaggc

SEQ ID NO: 1955777 - RNA, 19 nt, Artificial Sequence
  Description of Artificial Sequence: Synthetic oligonucleotide
cuaccgugcugugucacag

SEQ ID NO: 1955778 - RNA, 19 nt, Artificial Sequence
  Description of Artificial Sequence: Synthetic oligonucleotide
cagcaguacauaaagugcu

SEQ ID NO: 1955779 - RNA, 19 nt, Artificial Sequence
  Description of Artificial Sequence: Synthetic oligonucleotide
acccgggagcuguuccugc

SEQ ID NO: 1955780 - RNA, 19 nt, Artificial Sequence
  Description of Artificial Sequence: Synthetic oligonucleotide
agaaagcaggagaaggaaa

SEQ ID NO: 1955781 - RNA, 19 nt, Artificial Sequence
  Description of Artificial Sequence: Synthetic oligonucleotide
uccagccuacuacuagaaa

SEQ ID NO: 1955782 - RNA, 19 nt, Artificial Sequence
  Description of Artificial Sequence: Synthetic oligonucleotide
gugugcaguucacaagcac

SEQ ID NO: 1955783 - RNA, 19 nt, Artificial Sequence
  Description of Artificial Sequence: Synthetic oligonucleotide
ggguauuguuuacuuuaag

SEQ ID NO: 1955784 - RNA, 19 nt, Artificial Sequence
  Description of Artificial Sequence: Synthetic oligonucleotide
gggacugggaccaaccggc

SEQ ID NO: 1955785 - RNA, 19 nt, Artificial Sequence
  Description of Artificial Sequence: Synthetic oligonucleotide
ugguaguaguggucauggc

SEQ ID NO: 1955786 - RNA, 19 nt, Artificial Sequence
  Description of Artificial Sequence: Synthetic oligonucleotide
agguggguauuguuuacuu

SEQ ID NO: 1955787 - RNA, 19 nt, Artificial Sequence
  Description of Artificial Sequence: Synthetic oligonucleotide
ggggacugggaccaaccgg

SEQ ID NO: 1955788 - RNA, 19 nt, Artificial Sequence
  Description of Artificial Sequence: Synthetic oligonucleotide
caugcacauggcaugcaga

SEQ ID NO: 1955789 - RNA, 19 nt, Artificial Sequence
  Description of Artificial Sequence: Synthetic oligonucleotide
agcgucaugcacauggcau

SEQ ID NO: 1955790 - RNA, 19 nt, Artificial Sequence
  Description of Artificial Sequence: Synthetic oligonucleotide
gacacugacggugggaaua

SEQ ID NO: 1955791 - RNA, 19 nt, Artificial Sequence
  Description of Artificial Sequence: Synthetic oligonucleotide
auaucaccuucucccuuga

SEQ ID NO: 1955792 - RNA, 19 nt, Artificial Sequence
  Description of Artificial Sequence: Synthetic oligonucleotide
aaggagcuaccgugcugug

SEQ ID NO: 1955793 - RNA, 19 nt, Artificial Sequence
  Description of Artificial Sequence: Synthetic oligonucleotide
gacccagaucauuuguucu

SEQ ID NO: 1955794 - RNA, 19 nt, Artificial Sequence
  Description of Artificial Sequence: Synthetic oligonucleotide
caucccacacggcacagga

SEQ ID NO: 1955795 - RNA, 19 nt, Artificial Sequence
  Description of Artificial Sequence: Synthetic oligonucleotide
gaaggcgcacuuagcgaag

SEQ ID NO: 1955796 - RNA, 19 nt, Artificial Sequence
  Description of Artificial Sequence: Synthetic oligonucleotide
acauggcaugcagacagca

SEQ ID NO: 1955797 - RNA, 19 nt, Artificial Sequence
  Description of Artificial Sequence: Synthetic oligonucleotide
uguccacguuuucaugcau

SEQ ID NO: 1955798 - RNA, 19 nt, Artificial Sequence
  Description of Artificial Sequence: Synthetic oligonucleotide
cucccuugaggucuaagaa

SEQ ID NO: 1955799 - RNA, 19 nt, Artificial Sequence
  Description of Artificial Sequence: Synthetic oligonucleotide
acgugcuuaucaucccaca

SEQ ID NO: 1955800 - RNA, 19 nt, Artificial Sequence
  Description of Artificial Sequence: Synthetic oligonucleotide
augccauggcccacagacc

SEQ ID NO: 1955801 - RNA, 19 nt, Artificial Sequence
  Description of Artificial Sequence: Synthetic oligonucleotide
aucaggacccagaucauuu

SEQ ID NO: 1955802 - RNA, 19 nt, Artificial Sequence
  Description of Artificial Sequence: Synthetic oligonucleotide
uaggcuggcgcagggagaa

SEQ ID NO: 1955803 - RNA, 19 nt, Artificial Sequence
  Description of Artificial Sequence: Synthetic oligonucleotide
agccuacuacuagaaaaca

SEQ ID NO: 1955804 - RNA, 19 nt, Artificial Sequence
  Description of Artificial Sequence: Synthetic oligonucleotide
ggaaggcgcacuuagcgaa

SEQ ID NO: 1955805 - RNA, 19 nt, Artificial Sequence
  Description of Artificial Sequence: Synthetic oligonucleotide
caggcgacuccgaaucuuc

SEQ ID NO: 1955806 - RNA, 19 nt, Artificial Sequence
  Description of Artificial Sequence: Synthetic oligonucleotide
ccagccuacuacuagaaaa

SEQ ID NO: 1955807 - RNA, 19 nt, Artificial Sequence
  Description of Artificial Sequence: Synthetic oligonucleotide
cuguguccacguuuucaug

SEQ ID NO: 1955808 - RNA, 19 nt, Artificial Sequence
  Description of Artificial Sequence: Synthetic oligonucleotide
aggccgcaaaacccgggag

SEQ ID NO: 1955809 - RNA, 19 nt, Artificial Sequence
  Description of Artificial Sequence: Synthetic oligonucleotide
aggacacugacggugggaa

SEQ ID NO: 1955810 - RNA, 19 nt, Artificial Sequence
  Description of Artificial Sequence: Synthetic oligonucleotide
aggugcacgugcuuaucau

SEQ ID NO: 1955811 - RNA, 19 nt, Artificial Sequence
  Description of Artificial Sequence: Synthetic oligonucleotide
uuucaaggacgagacuuuu

SEQ ID NO: 1955812 - RNA, 19 nt, Artificial Sequence
  Description of Artificial Sequence: Synthetic oligonucleotide
gcgaaggacacugacggug

SEQ ID NO: 1955813 - RNA, 19 nt, Artificial Sequence
  Description of Artificial Sequence: Synthetic oligonucleotide
gaggccgcaaaacccggga

SEQ ID NO: 1955814 - RNA, 19 nt, Artificial Sequence
  Description of Artificial Sequence: Synthetic oligonucleotide
gaccacucuacaggggcug

SEQ ID NO: 1955815 - RNA, 19 nt, Artificial Sequence
  Description of Artificial Sequence: Synthetic oligonucleotide
gcuucucuuuuaaugaaca

SEQ ID NO: 1955816 - RNA, 19 nt, Artificial Sequence
  Description of Artificial Sequence: Synthetic oligonucleotide
ggacccagaucauuuguuc

SEQ ID NO: 1955817 - RNA, 19 nt, Artificial Sequence
  Description of Artificial Sequence: Synthetic oligonucleotide
caucgaagccuagugaaaa

SEQ ID NO: 1955818 - RNA, 19 nt, Artificial Sequence
  Description of Artificial Sequence: Synthetic oligonucleotide
cauaaagugcuucucuuuu

SEQ ID NO: 1955819 - RNA, 19 nt, Artificial Sequence
  Description of Artificial Sequence: Synthetic oligonucleotide
cuacaggggcugaagggca

SEQ ID NO: 1955820 - RNA, 19 nt, Artificial Sequence
  Description of Artificial Sequence: Synthetic oligonucleotide
gccaucuuguucuuccuca

SEQ ID NO: 1955821 - RNA, 19 nt, Artificial Sequence
  Description of Artificial Sequence: Synthetic oligonucleotide
cucacggugugcaguucac

SEQ ID NO: 1955822 - RNA, 19 nt, Artificial Sequence
  Description of Artificial Sequence: Synthetic oligonucleotide
aggcgacuccgaaucuucc

SEQ ID NO: 1955823 - RNA, 19 nt, Artificial Sequence
  Description of Artificial Sequence: Synthetic oligonucleotide
ccacagacccagaagucag

SEQ ID NO: 1955824 - RNA, 19 nt, Artificial Sequence
  Description of Artificial Sequence: Synthetic oligonucleotide
gauggcucaucgaagccua

SEQ ID NO: 1955825 - RNA, 19 nt, Artificial Sequence
  Description of Artificial Sequence: Synthetic oligonucleotide
gggguccacacccuugaag

SEQ ID NO: 1955826 - RNA, 19 nt, Artificial Sequence
  Description of Artificial Sequence: Synthetic oligonucleotide
ggcuuggaagucugugucc

SEQ ID NO: 1955827 - RNA, 19 nt, Artificial Sequence
  Description of Artificial Sequence: Synthetic oligonucleotide
cacucuacaggggcugaag

SEQ ID NO: 1955828 - RNA, 19 nt, Artificial Sequence
  Description of Artificial Sequence: Synthetic oligonucleotide
gcuagaggccaucuuguuc

SEQ ID NO: 1955829 - RNA, 19 nt, Artificial Sequence
  Description of Artificial Sequence: Synthetic oligonucleotide
cagaucauuuguucuuaaa

SEQ ID NO: 1955830 - RNA, 19 nt, Artificial Sequence
  Description of Artificial Sequence: Synthetic oligonucleotide
caacaguccaggacugaga

SEQ ID NO: 1955831 - RNA, 19 nt, Artificial Sequence
  Description of Artificial Sequence: Synthetic oligonucleotide
cggugugcaguucacaagc

SEQ ID NO: 1955832 - RNA, 19 nt, Artificial Sequence
  Description of Artificial Sequence: Synthetic oligonucleotide
cuaacaacaucaggaccca

SEQ ID NO: 1955833 - RNA, 19 nt, Artificial Sequence
  Description of Artificial Sequence: Synthetic oligonucleotide
aaggggcgagguaggcugg

SEQ ID NO: 1955834 - RNA, 19 nt, Artificial Sequence
  Description of Artificial Sequence: Synthetic oligonucleotide
cugacggugggaauaccaa

SEQ ID NO: 1955835 - RNA, 19 nt, Artificial Sequence
  Description of Artificial Sequence: Synthetic oligonucleotide
uccaggcgacuccgaaucu

SEQ ID NO: 1955836 - RNA, 19 nt, Artificial Sequence
  Description of Artificial Sequence: Synthetic oligonucleotide
gcgucaugcacauggcaug

SEQ ID NO: 1955837 - RNA, 19 nt, Artificial Sequence
  Description of Artificial Sequence: Synthetic oligonucleotide
ggccgcaaaacccgggagc

SEQ ID NO: 1955838 - RNA, 19 nt, Artificial Sequence
  Description of Artificial Sequence: Synthetic oligonucleotide
uaguggucauggcgccaag

SEQ ID NO: 1955839 - RNA, 19 nt, Artificial Sequence
  Description of Artificial Sequence: Synthetic oligonucleotide
agaugcuagaggccaucuu

SEQ ID NO: 1955840 - RNA, 19 nt, Artificial Sequence
  Description of Artificial Sequence: Synthetic oligonucleotide
caucugucucaccacacua

SEQ ID NO: 1955841 - RNA, 19 nt, Artificial Sequence
  Description of Artificial Sequence: Synthetic oligonucleotide
ggcgacuccgaaucuuccc

SEQ ID NO: 1955842 - RNA, 19 nt, Artificial Sequence
  Description of Artificial Sequence: Synthetic oligonucleotide
ugcuagaggccaucuuguu

SEQ ID NO: 1955843 - RNA, 19 nt, Artificial Sequence
  Description of Artificial Sequence: Synthetic oligonucleotide
aucugucucaccacacuaa

SEQ ID NO: 1955844 - RNA, 19 nt, Artificial Sequence
  Description of Artificial Sequence: Synthetic oligonucleotide
cgaaggacacugacggugg

SEQ ID NO: 1955845 - RNA, 19 nt, Artificial Sequence
  Description of Artificial Sequence: Synthetic oligonucleotide
agcgaaggacacugacggu

SEQ ID NO: 1955846 - RNA, 19 nt, Artificial Sequence
  Description of Artificial Sequence: Synthetic oligonucleotide
ccaccacucgacuuggcac

SEQ ID NO: 1955847 - RNA, 19 nt, Artificial Sequence
  Description of Artificial Sequence: Synthetic oligonucleotide
ggugcacgugcuuaucauc

SEQ ID NO: 1955848 - RNA, 19 nt, Artificial Sequence
  Description of Artificial Sequence: Synthetic oligonucleotide
uuuucacaagguggguauu

SEQ ID NO: 1955849 - RNA, 19 nt, Artificial Sequence
  Description of Artificial Sequence: Synthetic oligonucleotide
agaacgccgaggggacugg

SEQ ID NO: 1955850 - RNA, 19 nt, Artificial Sequence
  Description of Artificial Sequence: Synthetic oligonucleotide
cugggcacaggagcagcgg

SEQ ID NO: 1955851 - RNA, 19 nt, Artificial Sequence
  Description of Artificial Sequence: Synthetic oligonucleotide
auuggagccgccgccugga

SEQ ID NO: 1955852 - RNA, 19 nt, Artificial Sequence
  Description of Artificial Sequence: Synthetic oligonucleotide
caaucugccccaggcuggc

SEQ ID NO: 1955853 - RNA, 19 nt, Artificial Sequence
  Description of Artificial Sequence: Synthetic oligonucleotide
uaccgugcugugucacaga

SEQ ID NO: 1955854 - RNA, 19 nt, Artificial Sequence
  Description of Artificial Sequence: Synthetic oligonucleotide
uggcucaucgaagccuagu

SEQ ID NO: 1955855 - RNA, 19 nt, Artificial Sequence
  Description of Artificial Sequence: Synthetic oligonucleotide
cuacuauuccagccuacua

SEQ ID NO: 1955856 - RNA, 19 nt, Artificial Sequence
  Description of Artificial Sequence: Synthetic oligonucleotide
cauggcgccaaggggcgag

SEQ ID NO: 1955857 - RNA, 19 nt, Artificial Sequence
  Description of Artificial Sequence: Synthetic oligonucleotide
gcucaucgaagccuaguga

SEQ ID NO: 1955858 - RNA, 19 nt, Artificial Sequence
  Description of Artificial Sequence: Synthetic oligonucleotide
aacccaagaccaggcugga

SEQ ID NO: 1955859 - RNA, 19 nt, Artificial Sequence
  Description of Artificial Sequence: Synthetic oligonucleotide
aucaucccacacggcacag

SEQ ID NO: 1955860 - RNA, 19 nt, Artificial Sequence
  Description of Artificial Sequence: Synthetic oligonucleotide
guccaggacugagaaguac

SEQ ID NO: 1955861 - RNA, 19 nt, Artificial Sequence
  Description of Artificial Sequence: Synthetic oligonucleotide
cuucccugccaccacucga

SEQ ID NO: 1955862 - RNA, 19 nt, Artificial Sequence
  Description of Artificial Sequence: Synthetic oligonucleotide
caaggagcuaccgugcugu

SEQ ID NO: 1955863 - RNA, 19 nt, Artificial Sequence
  Description of Artificial Sequence: Synthetic oligonucleotide
aguaguggucauggcgcca

SEQ ID NO: 1955864 - RNA, 19 nt, Artificial Sequence
  Description of Artificial Sequence: Synthetic oligonucleotide
cgucucuaacaacaucagg

SEQ ID NO: 1955865 - RNA, 19 nt, Artificial Sequence
  Description of Artificial Sequence: Synthetic oligonucleotide
ugaggugcacgugcuuauc

SEQ ID NO: 1955866 - RNA, 19 nt, Artificial Sequence
  Description of Artificial Sequence: Synthetic oligonucleotide
cacggcacaggaaggcgca

SEQ ID NO: 1955867 - RNA, 19 nt, Artificial Sequence
  Description of Artificial Sequence: Synthetic oligonucleotide
cuauuccagccuacuacua

SEQ ID NO: 1955868 - RNA, 19 nt, Artificial Sequence
  Description of Artificial Sequence: Synthetic oligonucleotide
gcgccaaggggcgagguag

SEQ ID NO: 1955869 - RNA, 19 nt, Artificial Sequence
  Description of Artificial Sequence: Synthetic oligonucleotide
ccuacuacuagaaaacauu

SEQ ID NO: 1955870 - RNA, 19 nt, Artificial Sequence
  Description of Artificial Sequence: Synthetic oligonucleotide
aggcucacggugugcaguu

SEQ ID NO: 1955871 - RNA, 19 nt, Artificial Sequence
  Description of Artificial Sequence: Synthetic oligonucleotide
gaacgccgaggggacuggg

SEQ ID NO: 1955872 - RNA, 19 nt, Artificial Sequence
  Description of Artificial Sequence: Synthetic oligonucleotide
gauguacagucaggcucac

SEQ ID NO: 1955873 - RNA, 19 nt, Artificial Sequence
  Description of Artificial Sequence: Synthetic oligonucleotide
cuucauggucaagcaccag

SEQ ID NO: 1955874 - RNA, 19 nt, Artificial Sequence
  Description of Artificial Sequence: Synthetic oligonucleotide
gucuacuauuccagccuac

SEQ ID NO: 1955875 - RNA, 19 nt, Artificial Sequence
  Description of Artificial Sequence: Synthetic oligonucleotide
guaguggucauggcgccaa

SEQ ID NO: 1955876 - RNA, 19 nt, Artificial Sequence
  Description of Artificial Sequence: Synthetic oligonucleotide
aacgccgaggggacuggga

SEQ ID NO: 1955877 - RNA, 19 nt, Artificial Sequence
  Description of Artificial Sequence: Synthetic oligonucleotide
cagaaggacagaguuccaa

SEQ ID NO: 1955878 - RNA, 19 nt, Artificial Sequence
  Description of Artificial Sequence: Synthetic oligonucleotide
cgcacuuagcgaaggacac

SEQ ID NO: 1955879 - RNA, 19 nt, Artificial Sequence
  Description of Artificial Sequence: Synthetic oligonucleotide
guguuccaaagaugcuaga

SEQ ID NO: 1955880 - RNA, 19 nt, Artificial Sequence
  Description of Artificial Sequence: Synthetic oligonucleotide
agcagcgggcacaggcuuc

SEQ ID NO: 1955881 - RNA, 19 nt, Artificial Sequence
  Description of Artificial Sequence: Synthetic oligonucleotide
cuucaaucugccccaggcu

SEQ ID NO: 1955882 - RNA, 19 nt, Artificial Sequence
  Description of Artificial Sequence: Synthetic oligonucleotide
caaaacccgggagcuguuc

SEQ ID NO: 1955883 - RNA, 19 nt, Artificial Sequence
  Description of Artificial Sequence: Synthetic oligonucleotide
caagaccaggcuggauuug

SEQ ID NO: 1955884 - RNA, 19 nt, Artificial Sequence
  Description of Artificial Sequence: Synthetic oligonucleotide
cucaccacacuaagccaaa

SEQ ID NO: 1955885 - RNA, 19 nt, Artificial Sequence
  Description of Artificial Sequence: Synthetic oligonucleotide
cccacacggcacaggaagg

SEQ ID NO: 1955886 - RNA, 19 nt, Artificial Sequence
  Description of Artificial Sequence: Synthetic oligonucleotide
gcgucucuaacaacaucag

SEQ ID NO: 1955887 - RNA, 19 nt, Artificial Sequence
  Description of Artificial Sequence: Synthetic oligonucleotide
ucaccacacuaagccaaau

SEQ ID NO: 1955888 - RNA, 19 nt, Artificial Sequence
  Description of Artificial Sequence: Synthetic oligonucleotide
aggagcuaccgugcugugu

SEQ ID NO: 1955889 - RNA, 19 nt, Artificial Sequence
  Description of Artificial Sequence: Synthetic oligonucleotide
cgugcuuaucaucccacac

SEQ ID NO: 1955890 - RNA, 19 nt, Artificial Sequence
  Description of Artificial Sequence: Synthetic oligonucleotide
agcaacaguccaggacuga

SEQ ID NO: 1955891 - RNA, 19 nt, Artificial Sequence
  Description of Artificial Sequence: Synthetic oligonucleotide
aggacccagaucauuuguu

SEQ ID NO: 1955892 - RNA, 19 nt, Artificial Sequence
  Description of Artificial Sequence: Synthetic oligonucleotide
cccuugaggucuaagaagu

SEQ ID NO: 1955893 - RNA, 19 nt, Artificial Sequence
  Description of Artificial Sequence: Synthetic oligonucleotide
aggcgcacuuagcgaagga

SEQ ID NO: 1955894 - RNA, 19 nt, Artificial Sequence
  Description of Artificial Sequence: Synthetic oligonucleotide
ggcgcacuuagcgaaggac

SEQ ID NO: 1955895 - RNA, 19 nt, Artificial Sequence
  Description of Artificial Sequence: Synthetic oligonucleotide
gcaccuguggcugucaucu

SEQ ID NO: 1955896 - RNA, 19 nt, Artificial Sequence
  Description of Artificial Sequence: Synthetic oligonucleotide
acuuagcgaaggacacuga

SEQ ID NO: 1955897 - RNA, 19 nt, Artificial Sequence
  Description of Artificial Sequence: Synthetic oligonucleotide
gagcuaccgugcuguguca

SEQ ID NO: 1955898 - RNA, 19 nt, Artificial Sequence
  Description of Artificial Sequence: Synthetic oligonucleotide
cagcgucaugcacauggca

SEQ ID NO: 1955899 - RNA, 19 nt, Artificial Sequence
  Description of Artificial Sequence: Synthetic oligonucleotide
gcgcacuuagcgaaggaca

SEQ ID NO: 1955900 - RNA, 19 nt, Artificial Sequence
  Description of Artificial Sequence: Synthetic oligonucleotide
cccuugaaggugguaguag

SEQ ID NO: 1955901 - RNA, 19 nt, Artificial Sequence
  Description of Artificial Sequence: Synthetic oligonucleotide
ggcgagguaggcuggcgca

SEQ ID NO: 1955902 - RNA, 19 nt, Artificial Sequence
  Description of Artificial Sequence: Synthetic oligonucleotide
acggcacaggaaggcgcac

SEQ ID NO: 1955903 - RNA, 19 nt, Artificial Sequence
  Description of Artificial Sequence: Synthetic oligonucleotide
gcacgugcuuaucauccca

SEQ ID NO: 1955904 - RNA, 19 nt, Artificial Sequence
  Description of Artificial Sequence: Synthetic oligonucleotide
accacucgacuuggcaccu

SEQ ID NO: 1955905 - RNA, 19 nt, Artificial Sequence
  Description of Artificial Sequence: Synthetic oligonucleotide
guuucaaggacgagacuuu

SEQ ID NO: 1955906 - RNA, 19 nt, Artificial Sequence
  Description of Artificial Sequence: Synthetic oligonucleotide
acccuugaaggugguagua

SEQ ID NO: 1955907 - RNA, 19 nt, Artificial Sequence
  Description of Artificial Sequence: Synthetic oligonucleotide
aaucugccccaggcuggcu

SEQ ID NO: 1955908 - RNA, 19 nt, Artificial Sequence
  Description of Artificial Sequence: Synthetic oligonucleotide
ccuugaggucuaagaaguc

SEQ ID NO: 1955909 - RNA, 19 nt, Artificial Sequence
  Description of Artificial Sequence: Synthetic oligonucleotide
ggugaggugcacgugcuua

SEQ ID NO: 1955910 - RNA, 19 nt, Artificial Sequence
  Description of Artificial Sequence: Synthetic oligonucleotide
cccagaagucagacagaag

SEQ ID NO: 1955911 - RNA, 19 nt, Artificial Sequence
  Description of Artificial Sequence: Synthetic oligonucleotide
gucaagcaccagcgucaug

SEQ ID NO: 1955912 - RNA, 19 nt, Artificial Sequence
  Description of Artificial Sequence: Synthetic oligonucleotide
ggaggccgcaaaacccggg

SEQ ID NO: 1955913 - RNA, 19 nt, Artificial Sequence
  Description of Artificial Sequence: Synthetic oligonucleotide
caggacccagaucauuugu

SEQ ID NO: 1955914 - RNA, 19 nt, Artificial Sequence
  Description of Artificial Sequence: Synthetic oligonucleotide
cacugacggugggaauacc

SEQ ID NO: 1955915 - RNA, 19 nt, Artificial Sequence
  Description of Artificial Sequence: Synthetic oligonucleotide
guaggcuggcgcagggaga

SEQ ID NO: 1955916 - RNA, 19 nt, Artificial Sequence
  Description of Artificial Sequence: Synthetic oligonucleotide
auggcucaucgaagccuag

SEQ ID NO: 1955917 - RNA, 19 nt, Artificial Sequence
  Description of Artificial Sequence: Synthetic oligonucleotide
gggagaacgccgaggggac

SEQ ID NO: 1955918 - RNA, 19 nt, Artificial Sequence
  Description of Artificial Sequence: Synthetic oligonucleotide
gcuuaucaucccacacggc

SEQ ID NO: 1955919 - RNA, 19 nt, Artificial Sequence
  Description of Artificial Sequence: Synthetic oligonucleotide
cugcugacuuggcccaaga

SEQ ID NO: 1955920 - RNA, 19 nt, Artificial Sequence
  Description of Artificial Sequence: Synthetic oligonucleotide
gcuaccgugcugugucaca

SEQ ID NO: 1955921 - RNA, 19 nt, Artificial Sequence
  Description of Artificial Sequence: Synthetic oligonucleotide
gugaggugcacgugcuuau

SEQ ID NO: 1955922 - RNA, 19 nt, Artificial Sequence
  Description of Artificial Sequence: Synthetic oligonucleotide
cacccuugaaggugguagu

SEQ ID NO: 1955923 - RNA, 19 nt, Artificial Sequence
  Description of Artificial Sequence: Synthetic oligonucleotide
cauggucaagcaccagcgu

SEQ ID NO: 1955924 - RNA, 19 nt, Artificial Sequence
  Description of Artificial Sequence: Synthetic oligonucleotide
acucgacuuggcaccugcu

SEQ ID NO: 1955925 - RNA, 19 nt, Artificial Sequence
  Description of Artificial Sequence: Synthetic oligonucleotide
ccuugaaggugguaguagu

SEQ ID NO: 1955926 - RNA, 19 nt, Artificial Sequence
  Description of Artificial Sequence: Synthetic oligonucleotide
ucauggcgccaaggggcga

SEQ ID NO: 1955927 - RNA, 19 nt, Artificial Sequence
  Description of Artificial Sequence: Synthetic oligonucleotide
ccauggcccacagacccag

SEQ ID NO: 1955928 - RNA, 19 nt, Artificial Sequence
  Description of Artificial Sequence: Synthetic oligonucleotide
gcgacuccgaaucuucccu

SEQ ID NO: 1955929 - RNA, 19 nt, Artificial Sequence
  Description of Artificial Sequence: Synthetic oligonucleotide
cagguguuccaaagaugcu

SEQ ID NO: 1955930 - RNA, 19 nt, Artificial Sequence
  Description of Artificial Sequence: Synthetic oligonucleotide
gcuaacccaagaccaggcu

SEQ ID NO: 1955931 - RNA, 19 nt, Artificial Sequence
  Description of Artificial Sequence: Synthetic oligonucleotide
gccgaggggacugggacca

SEQ ID NO: 1955932 - RNA, 19 nt, Artificial Sequence
  Description of Artificial Sequence: Synthetic oligonucleotide
ggacugagaaguacaaguu

SEQ ID NO: 1955933 - RNA, 19 nt, Artificial Sequence
  Description of Artificial Sequence: Synthetic oligonucleotide
gguggguauuguuuacuuu

SEQ ID NO: 1955934 - RNA, 19 nt, Artificial Sequence
  Description of Artificial Sequence: Synthetic oligonucleotide
cuggggccggggccacugg

SEQ ID NO: 1955935 - RNA, 19 nt, Artificial Sequence
  Description of Artificial Sequence: Synthetic oligonucleotide
ggguuucuccuggauggca

SEQ ID NO: 1955936 - RNA, 19 nt, Artificial Sequence
  Description of Artificial Sequence: Synthetic oligonucleotide
gcugaagggcagcaccugu

SEQ ID NO: 1955937 - RNA, 19 nt, Artificial Sequence
  Description of Artificial Sequence: Synthetic oligonucleotide
cgaaucuucccugccacca

SEQ ID NO: 1955938 - RNA, 19 nt, Artificial Sequence
  Description of Artificial Sequence: Synthetic oligonucleotide
ggcugucaucugucucacc

SEQ ID NO: 1955939 - RNA, 19 nt, Artificial Sequence
  Description of Artificial Sequence: Synthetic oligonucleotide
cugguacaaaagcgucucu

SEQ ID NO: 1955940 - RNA, 19 nt, Artificial Sequence
  Description of Artificial Sequence: Synthetic oligonucleotide
aggcuggcgcagggagaac

SEQ ID NO: 1955941 - RNA, 19 nt, Artificial Sequence
  Description of Artificial Sequence: Synthetic oligonucleotide
ggcgcagggagaacgccga

SEQ ID NO: 1955942 - RNA, 19 nt, Artificial Sequence
  Description of Artificial Sequence: Synthetic oligonucleotide
uggcgccaaggggcgaggu

SEQ ID NO: 1955943 - RNA, 19 nt, Artificial Sequence
  Description of Artificial Sequence: Synthetic oligonucleotide
ggggcgagguaggcuggcg

SEQ ID NO: 1955944 - RNA, 19 nt, Artificial Sequence
  Description of Artificial Sequence: Synthetic oligonucleotide
gccuacuacuagaaaacau

SEQ ID NO: 1955945 - RNA, 19 nt, Artificial Sequence
  Description of Artificial Sequence: Synthetic oligonucleotide
ggacagcaguacauaaagu

SEQ ID NO: 1955946 - RNA, 19 nt, Artificial Sequence
  Description of Artificial Sequence: Synthetic oligonucleotide
cauggcccacagacccaga

SEQ ID NO: 1955947 - RNA, 19 nt, Artificial Sequence
  Description of Artificial Sequence: Synthetic oligonucleotide
gccgcaaaacccgggagcu

SEQ ID NO: 1955948 - RNA, 19 nt, Artificial Sequence
  Description of Artificial Sequence: Synthetic oligonucleotide
cccaagaccaggcuggauu

SEQ ID NO: 1955949 - RNA, 19 nt, Artificial Sequence
  Description of Artificial Sequence: Synthetic oligonucleotide
caggcucacggugugcagu

SEQ ID NO: 1955950 - RNA, 19 nt, Artificial Sequence
  Description of Artificial Sequence: Synthetic oligonucleotide
gcccacagacccagaaguc

SEQ ID NO: 1955951 - RNA, 19 nt, Artificial Sequence
  Description of Artificial Sequence: Synthetic oligonucleotide
ccgggagcuguuccugcug

SEQ ID NO: 1955952 - RNA, 19 nt, Artificial Sequence
  Description of Artificial Sequence: Synthetic oligonucleotide
gugcugugucacagaccac

SEQ ID NO: 1955953 - RNA, 19 nt, Artificial Sequence
  Description of Artificial Sequence: Synthetic oligonucleotide
ggacgagacuuuucuucau

SEQ ID NO: 1955954 - RNA, 19 nt, Artificial Sequence
  Description of Artificial Sequence: Synthetic oligonucleotide
cgccgaggggacugggacc

SEQ ID NO: 1955955 - RNA, 19 nt, Artificial Sequence
  Description of Artificial Sequence: Synthetic oligonucleotide
cccugguacaaaagcgucu

SEQ ID NO: 1955956 - RNA, 19 nt, Artificial Sequence
  Description of Artificial Sequence: Synthetic oligonucleotide
gcgcagggagaacgccgag

SEQ ID NO: 1955957 - RNA, 19 nt, Artificial Sequence
  Description of Artificial Sequence: Synthetic oligonucleotide
ccaagaccaggcuggauuu

SEQ ID NO: 1955958 - RNA, 19 nt, Artificial Sequence
  Description of Artificial Sequence: Synthetic oligonucleotide
gcauaucaccuucucccuu

SEQ ID NO: 1955959 - RNA, 19 nt, Artificial Sequence
  Description of Artificial Sequence: Synthetic oligonucleotide
ggcagcaccuguggcuguc

SEQ ID NO: 1955960 - RNA, 19 nt, Artificial Sequence
  Description of Artificial Sequence: Synthetic oligonucleotide
uccugcuguugggguccac

SEQ ID NO: 1955961 - RNA, 19 nt, Artificial Sequence
  Description of Artificial Sequence: Synthetic oligonucleotide
cccaagagggaggguuuuc

SEQ ID NO: 1955962 - RNA, 19 nt, Artificial Sequence
  Description of Artificial Sequence: Synthetic oligonucleotide
ccaagagggaggguuuucu

SEQ ID NO: 1955963 - RNA, 19 nt, Artificial Sequence
  Description of Artificial Sequence: Synthetic oligonucleotide
cgggcacaggcuucucuuc

SEQ ID NO: 1955964 - RNA, 19 nt, Artificial Sequence
  Description of Artificial Sequence: Synthetic oligonucleotide
gccgccuggaggccgcaaa

SEQ ID NO: 1955965 - RNA, 19 nt, Artificial Sequence
  Description of Artificial Sequence: Synthetic oligonucleotide
gcacuuagcgaaggacacu

SEQ ID NO: 1955966 - RNA, 19 nt, Artificial Sequence
  Description of Artificial Sequence: Synthetic oligonucleotide
ggcgccaaggggcgaggua

SEQ ID NO: 1955967 - RNA, 19 nt, Artificial Sequence
  Description of Artificial Sequence: Synthetic oligonucleotide
cacacccuugaagguggua

SEQ ID NO: 1955968 - RNA, 19 nt, Artificial Sequence
  Description of Artificial Sequence: Synthetic oligonucleotide
gcgggcacaggcuucucuu

SEQ ID NO: 1955969 - RNA, 19 nt, Artificial Sequence
  Description of Artificial Sequence: Synthetic oligonucleotide
caccagcgucaugcacaug

SEQ ID NO: 1955970 - RNA, 19 nt, Artificial Sequence
  Description of Artificial Sequence: Synthetic oligonucleotide
ggucaagcaccagcgucau

SEQ ID NO: 1955971 - RNA, 19 nt, Artificial Sequence
  Description of Artificial Sequence: Synthetic oligonucleotide
ccgcaaaacccgggagcug

SEQ ID NO: 1955972 - RNA, 19 nt, Artificial Sequence
  Description of Artificial Sequence: Synthetic oligonucleotide
cucugugcuccaggcgacu

SEQ ID NO: 1955973 - RNA, 19 nt, Artificial Sequence
  Description of Artificial Sequence: Synthetic oligonucleotide
ggcucacggugugcaguuc

SEQ ID NO: 1955974 - RNA, 19 nt, Artificial Sequence
  Description of Artificial Sequence: Synthetic oligonucleotide
cgaggggacugggaccaac

SEQ ID NO: 1955975 - RNA, 19 nt, Artificial Sequence
  Description of Artificial Sequence: Synthetic oligonucleotide
ggagaacgccgaggggacu

SEQ ID NO: 1955976 - RNA, 19 nt, Artificial Sequence
  Description of Artificial Sequence: Synthetic oligonucleotide
ccacucgacuuggcaccug

SEQ ID NO: 1955977 - RNA, 19 nt, Artificial Sequence
  Description of Artificial Sequence: Synthetic oligonucleotide
ccaaggggcgagguaggcu

SEQ ID NO: 1955978 - RNA, 19 nt, Artificial Sequence
  Description of Artificial Sequence: Synthetic oligonucleotide
ccacucuacaggggcugaa

SEQ ID NO: 1955979 - RNA, 19 nt, Artificial Sequence
  Description of Artificial Sequence: Synthetic oligonucleotide
gcaaaacccgggagcuguu

SEQ ID NO: 1955980 - RNA, 19 nt, Artificial Sequence
  Description of Artificial Sequence: Synthetic oligonucleotide
ccaggcgacuccgaaucuu

SEQ ID NO: 1955981 - RNA, 19 nt, Artificial Sequence
  Description of Artificial Sequence: Synthetic oligonucleotide
cccugccaccacucgacuu

SEQ ID NO: 1955982 - RNA, 19 nt, Artificial Sequence
  Description of Artificial Sequence: Synthetic oligonucleotide
ccgaggggacugggaccaa

SEQ ID NO: 1955983 - RNA, 19 nt, Artificial Sequence
  Description of Artificial Sequence: Synthetic oligonucleotide
cgccgccuggaggccgcaa

SEQ ID NO: 1955984 - RNA, 19 nt, Artificial Sequence
  Description of Artificial Sequence: Synthetic oligonucleotide
uauauugggauucaugugg

SEQ ID NO: 1955985 - RNA, 19 nt, Artificial Sequence
  Description of Artificial Sequence: Synthetic oligonucleotide
auuacuguuugguuuaugc

SEQ ID NO: 1955986 - RNA, 19 nt, Artificial Sequence
  Description of Artificial Sequence: Synthetic oligonucleotide
ucuacugacagccuggagg

SEQ ID NO: 1955987 - RNA, 19 nt, Artificial Sequence
  Description of Artificial Sequence: Synthetic oligonucleotide
gauugaacaguccacgugg

SEQ ID NO: 1955988 - RNA, 19 nt, Artificial Sequence
  Description of Artificial Sequence: Synthetic oligonucleotide
uacauugguaucaaugccg

SEQ ID NO: 1955989 - RNA, 19 nt, Artificial Sequence
  Description of Artificial Sequence: Synthetic oligonucleotide
aaacauugcgcccacaaug

SEQ ID NO: 1955990 - RNA, 19 nt, Artificial Sequence
  Description of Artificial Sequence: Synthetic oligonucleotide
accuccacaaccuauggcc

SEQ ID NO: 1955991 - RNA, 19 nt, Artificial Sequence
  Description of Artificial Sequence: Synthetic oligonucleotide
uacacgaaaacauugcgcc

SEQ ID NO: 1955992 - RNA, 19 nt, Artificial Sequence
  Description of Artificial Sequence: Synthetic oligonucleotide
uuuaucucuugauugaaca

SEQ ID NO: 1955993 - RNA, 19 nt, Artificial Sequence
  Description of Artificial Sequence: Synthetic oligonucleotide
uaugcgcucauacugaccc

SEQ ID NO: 1955994 - RNA, 19 nt, Artificial Sequence
  Description of Artificial Sequence: Synthetic oligonucleotide
ucaccguagguaauaaucg

SEQ ID NO: 1955995 - RNA, 19 nt, Artificial Sequence
  Description of Artificial Sequence: Synthetic oligonucleotide
uuuauuccgaagaucagga

SEQ ID NO: 1955996 - RNA, 19 nt, Artificial Sequence
  Description of Artificial Sequence: Synthetic oligonucleotide
auuucuuauauugggauuc

SEQ ID NO: 1955997 - RNA, 19 nt, Artificial Sequence
  Description of Artificial Sequence: Synthetic oligonucleotide
gaaacaacuggcuucgccc

SEQ ID NO: 1955998 - RNA, 19 nt, Artificial Sequence
  Description of Artificial Sequence: Synthetic oligonucleotide
uacuguuugguuuaugcgc

SEQ ID NO: 1955999 - RNA, 19 nt, Artificial Sequence
  Description of Artificial Sequence: Synthetic oligonucleotide
ucuuauauugggauucaug

SEQ ID NO: 1956000 - RNA, 19 nt, Artificial Sequence
  Description of Artificial Sequence: Synthetic oligonucleotide
aguacacgaaaacauugcg

SEQ ID NO: 1956001 - RNA, 19 nt, Artificial Sequence
  Description of Artificial Sequence: Synthetic oligonucleotide
gauccuaggcaccugagcc

SEQ ID NO: 1956002 - RNA, 19 nt, Artificial Sequence
  Description of Artificial Sequence: Synthetic oligonucleotide
uuacuguuugguuuaugcg

SEQ ID NO: 1956003 - RNA, 19 nt, Artificial Sequence
  Description of Artificial Sequence: Synthetic oligonucleotide
uguuccuagaugaagaauu

SEQ ID NO: 1956004 - RNA, 19 nt, Artificial Sequence
  Description of Artificial Sequence: Synthetic oligonucleotide
aaucgauugcagcagagaa

SEQ ID NO: 1956005 - RNA, 19 nt, Artificial Sequence
  Description of Artificial Sequence: Synthetic oligonucleotide
ucgauugcagcagagaaag

SEQ ID NO: 1956006 - RNA, 19 nt, Artificial Sequence
  Description of Artificial Sequence: Synthetic oligonucleotide
uucaccguagguaauaauc

SEQ ID NO: 1956007 - RNA, 19 nt, Artificial Sequence
  Description of Artificial Sequence: Synthetic oligonucleotide
aagauucuacuaaacacuc

SEQ ID NO: 1956008 - RNA, 19 nt, Artificial Sequence
  Description of Artificial Sequence: Synthetic oligonucleotide
aagugcuccaaagaacagc

SEQ ID NO: 1956009 - RNA, 19 nt, Artificial Sequence
  Description of Artificial Sequence: Synthetic oligonucleotide
uccagucugacuuuccccg

SEQ ID NO: 1956010 - RNA, 19 nt, Artificial Sequence
  Description of Artificial Sequence: Synthetic oligonucleotide
auuggacacuguuuauucc

SEQ ID NO: 1956011 - RNA, 19 nt, Artificial Sequence
  Description of Artificial Sequence: Synthetic oligonucleotide
uucuacuaaacacucagua

SEQ ID NO: 1956012 - RNA, 19 nt, Artificial Sequence
  Description of Artificial Sequence: Synthetic oligonucleotide
uagguaauaaucgauugca

SEQ ID NO: 1956013 - RNA, 19 nt, Artificial Sequence
  Description of Artificial Sequence: Synthetic oligonucleotide
aaagaucccaaacgcaccu

SEQ ID NO: 1956014 - RNA, 19 nt, Artificial Sequence
  Description of Artificial Sequence: Synthetic oligonucleotide
uuccucauaucaccgagag

SEQ ID NO: 1956015 - RNA, 19 nt, Artificial Sequence
  Description of Artificial Sequence: Synthetic oligonucleotide
ccucauaucaccgagaggg

SEQ ID NO: 1956016 - RNA, 19 nt, Artificial Sequence
  Description of Artificial Sequence: Synthetic oligonucleotide
aauaaucgauugcagcaga

SEQ ID NO: 1956017 - RNA, 19 nt, Artificial Sequence
  Description of Artificial Sequence: Synthetic oligonucleotide
guaguuuccucauaucacc

SEQ ID NO: 1956018 - RNA, 19 nt, Artificial Sequence
  Description of Artificial Sequence: Synthetic oligonucleotide
ugcuucaagauguuccuag

SEQ ID NO: 1956019 - RNA, 19 nt, Artificial Sequence
  Description of Artificial Sequence: Synthetic oligonucleotide
gaaguagaaaaguacagcu

SEQ ID NO: 1956020 - RNA, 19 nt, Artificial Sequence
  Description of Artificial Sequence: Synthetic oligonucleotide
uuauauugggauucaugug

SEQ ID NO: 1956021 - RNA, 19 nt, Artificial Sequence
  Description of Artificial Sequence: Synthetic oligonucleotide
cuugauugaacaguccacg

SEQ ID NO: 1956022 - RNA, 19 nt, Artificial Sequence
  Description of Artificial Sequence: Synthetic oligonucleotide
uugguuuaugcgcucauac

SEQ ID NO: 1956023 - RNA, 19 nt, Artificial Sequence
  Description of Artificial Sequence: Synthetic oligonucleotide
cuguuuauuccgaagauca

SEQ ID NO: 1956024 - RNA, 19 nt, Artificial Sequence
  Description of Artificial Sequence: Synthetic oligonucleotide
uaaagaucccaaacgcacc

SEQ ID NO: 1956025 - RNA, 19 nt, Artificial Sequence
  Description of Artificial Sequence: Synthetic oligonucleotide
augccaaguguguagaaag

SEQ ID NO: 1956026 - RNA, 19 nt, Artificial Sequence
  Description of Artificial Sequence: Synthetic oligonucleotide
aaagccuacauugguauca

SEQ ID NO: 1956027 - RNA, 19 nt, Artificial Sequence
  Description of Artificial Sequence: Synthetic oligonucleotide
aacuggugucuacugacag

SEQ ID NO: 1956028 - RNA, 19 nt, Artificial Sequence
  Description of Artificial Sequence: Synthetic oligonucleotide
uuucuuucaccguagguaa

SEQ ID NO: 1956029 - RNA, 19 nt, Artificial Sequence
  Description of Artificial Sequence: Synthetic oligonucleotide
uaauaaucgauugcagcag

SEQ ID NO: 1956030 - RNA, 19 nt, Artificial Sequence
  Description of Artificial Sequence: Synthetic oligonucleotide
auugcagcggagcuucggc

SEQ ID NO: 1956031 - RNA, 19 nt, Artificial Sequence
  Description of Artificial Sequence: Synthetic oligonucleotide
ugucccaugucuuucagaa

SEQ ID NO: 1956032 - RNA, 19 nt, Artificial Sequence
  Description of Artificial Sequence: Synthetic oligonucleotide
aaagauccuaggcaccuga

SEQ ID NO: 1956033 - RNA, 19 nt, Artificial Sequence
  Description of Artificial Sequence: Synthetic oligonucleotide
aaacgcaccucccaagaca

SEQ ID NO: 1956034 - RNA, 19 nt, Artificial Sequence
  Description of Artificial Sequence: Synthetic oligonucleotide
cuuauauugggauucaugu

SEQ ID NO: 1956035 - RNA, 19 nt, Artificial Sequence
  Description of Artificial Sequence: Synthetic oligonucleotide
cuacugacagccuggaggc

SEQ ID NO: 1956036 - RNA, 19 nt, Artificial Sequence
  Description of Artificial Sequence: Synthetic oligonucleotide
cagagaaagcagcaaaacc

SEQ ID NO: 1956037 - RNA, 19 nt, Artificial Sequence
  Description of Artificial Sequence: Synthetic oligonucleotide
aaacacucaguacacgaaa

SEQ ID NO: 1956038 - RNA, 19 nt, Artificial Sequence
  Description of Artificial Sequence: Synthetic oligonucleotide
ugucuuguucaacuggugu

SEQ ID NO: 1956039 - RNA, 19 nt, Artificial Sequence
  Description of Artificial Sequence: Synthetic oligonucleotide
aagucgccgacuccgcagc

SEQ ID NO: 1956040 - RNA, 19 nt, Artificial Sequence
  Description of Artificial Sequence: Synthetic oligonucleotide
agaugugucugcaaauuac

SEQ ID NO: 1956041 - RNA, 19 nt, Artificial Sequence
  Description of Artificial Sequence: Synthetic oligonucleotide
ucaaagccuacauugguau

SEQ ID NO: 1956042 - RNA, 19 nt, Artificial Sequence
  Description of Artificial Sequence: Synthetic oligonucleotide
acacgaaaacauugcgccc

SEQ ID NO: 1956043 - RNA, 19 nt, Artificial Sequence
  Description of Artificial Sequence: Synthetic oligonucleotide
gguuuaugcgcucauacug

SEQ ID NO: 1956044 - RNA, 19 nt, Artificial Sequence
  Description of Artificial Sequence: Synthetic oligonucleotide
uguuuauuccgaagaucag

SEQ ID NO: 1956045 - RNA, 19 nt, Artificial Sequence
  Description of Artificial Sequence: Synthetic oligonucleotide
uuuggcguaggacauuccu

SEQ ID NO: 1956046 - RNA, 19 nt, Artificial Sequence
  Description of Artificial Sequence: Synthetic oligonucleotide
guaaagaucccaaacgcac

SEQ ID NO: 1956047 - RNA, 19 nt, Artificial Sequence
  Description of Artificial Sequence: Synthetic oligonucleotide
gacacuguuuauuccgaag

SEQ ID NO: 1956048 - RNA, 19 nt, Artificial Sequence
  Description of Artificial Sequence: Synthetic oligonucleotide
agcaaugccaaguguguag

SEQ ID NO: 1956049 - RNA, 19 nt, Artificial Sequence
  Description of Artificial Sequence: Synthetic oligonucleotide
cuacauugguaucaaugcc

SEQ ID NO: 1956050 - RNA, 19 nt, Artificial Sequence
  Description of Artificial Sequence: Synthetic oligonucleotide
acaaccuauggccccggcc

SEQ ID NO: 1956051 - RNA, 19 nt, Artificial Sequence
  Description of Artificial Sequence: Synthetic oligonucleotide
aacauuucuuauauuggga

SEQ ID NO: 1956052 - RNA, 19 nt, Artificial Sequence
  Description of Artificial Sequence: Synthetic oligonucleotide
caagacaaauccucccacg

SEQ ID NO: 1956053 - RNA, 19 nt, Artificial Sequence
  Description of Artificial Sequence: Synthetic oligonucleotide
ugugauggcaacauuucuu

SEQ ID NO: 1956054 - RNA, 19 nt, Artificial Sequence
  Description of Artificial Sequence: Synthetic oligonucleotide
acuuuccccgguaagauuc

SEQ ID NO: 1956055 - RNA, 19 nt, Artificial Sequence
  Description of Artificial Sequence: Synthetic oligonucleotide
uaucucuugauugaacagu

SEQ ID NO: 1956056 - RNA, 19 nt, Artificial Sequence
  Description of Artificial Sequence: Synthetic oligonucleotide
uccgguaaggguccuuagg

SEQ ID NO: 1956057 - RNA, 19 nt, Artificial Sequence
  Description of Artificial Sequence: Synthetic oligonucleotide
gaaaaguacagcugcucca

SEQ ID NO: 1956058 - RNA, 19 nt, Artificial Sequence
  Description of Artificial Sequence: Synthetic oligonucleotide
aaaacauugcgcccacaau

SEQ ID NO: 1956059 - RNA, 19 nt, Artificial Sequence
  Description of Artificial Sequence: Synthetic oligonucleotide
caguacacgaaaacauugc

SEQ ID NO: 1956060 - RNA, 19 nt, Artificial Sequence
  Description of Artificial Sequence: Synthetic oligonucleotide
guuuccucauaucaccgag

SEQ ID NO: 1956061 - RNA, 19 nt, Artificial Sequence
  Description of Artificial Sequence: Synthetic oligonucleotide
auccuaggcaccugagccc

SEQ ID NO: 1956062 - RNA, 19 nt, Artificial Sequence
  Description of Artificial Sequence: Synthetic oligonucleotide
cauuggacacuguuuauuc

SEQ ID NO: 1956063 - RNA, 19 nt, Artificial Sequence
  Description of Artificial Sequence: Synthetic oligonucleotide
cuugaaggcgcaacuuucc

SEQ ID NO: 1956064 - RNA, 19 nt, Artificial Sequence
  Description of Artificial Sequence: Synthetic oligonucleotide
uguauugcagcggagcuuc

SEQ ID NO: 1956065 - RNA, 19 nt, Artificial Sequence
  Description of Artificial Sequence: Synthetic oligonucleotide
ugcuccaauggcuggaggc

SEQ ID NO: 1956066 - RNA, 19 nt, Artificial Sequence
  Description of Artificial Sequence: Synthetic oligonucleotide
auuuaucucuugauugaac

SEQ ID NO: 1956067 - RNA, 19 nt, Artificial Sequence
  Description of Artificial Sequence: Synthetic oligonucleotide
gaaaacauugcgcccacaa

SEQ ID NO: 1956068 - RNA, 19 nt, Artificial Sequence
  Description of Artificial Sequence: Synthetic oligonucleotide
aaaaguacagcugcuccaa

SEQ ID NO: 1956069 - RNA, 19 nt, Artificial Sequence
  Description of Artificial Sequence: Synthetic oligonucleotide
aagaccagcuggucaaaga

SEQ ID NO: 1956070 - RNA, 19 nt, Artificial Sequence
  Description of Artificial Sequence: Synthetic oligonucleotide
auaucaccgagagggaaac

SEQ ID NO: 1956071 - RNA, 19 nt, Artificial Sequence
  Description of Artificial Sequence: Synthetic oligonucleotide
uccacguggacaaggcuug

SEQ ID NO: 1956072 - RNA, 19 nt, Artificial Sequence
  Description of Artificial Sequence: Synthetic oligonucleotide
cuugucgcccaccagguac

SEQ ID NO: 1956073 - RNA, 19 nt, Artificial Sequence
  Description of Artificial Sequence: Synthetic oligonucleotide
uggcguaggacauuccucu

SEQ ID NO: 1956074 - RNA, 19 nt, Artificial Sequence
  Description of Artificial Sequence: Synthetic oligonucleotide
acauugguaucaaugccgg

SEQ ID NO: 1956075 - RNA, 19 nt, Artificial Sequence
  Description of Artificial Sequence: Synthetic oligonucleotide
guagaaagugcuccaaaga

SEQ ID NO: 1956076 - RNA, 19 nt, Artificial Sequence
  Description of Artificial Sequence: Synthetic oligonucleotide
cucugaaaccaauggcucc

SEQ ID NO: 1956077 - RNA, 19 nt, Artificial Sequence
  Description of Artificial Sequence: Synthetic oligonucleotide
auggccccggccuuuacac

SEQ ID NO: 1956078 - RNA, 19 nt, Artificial Sequence
  Description of Artificial Sequence: Synthetic oligonucleotide
uuuaugcgcucauacugac

SEQ ID NO: 1956079 - RNA, 19 nt, Artificial Sequence
  Description of Artificial Sequence: Synthetic oligonucleotide
ucaaagauccuaggcaccu

SEQ ID NO: 1956080 - RNA, 19 nt, Artificial Sequence
  Description of Artificial Sequence: Synthetic oligonucleotide
aaggcuugucuuguucaac

SEQ ID NO: 1956081 - RNA, 19 nt, Artificial Sequence
  Description of Artificial Sequence: Synthetic oligonucleotide
uugauugaacaguccacgu

SEQ ID NO: 1956082 - RNA, 19 nt, Artificial Sequence
  Description of Artificial Sequence: Synthetic oligonucleotide
ucucuugauugaacagucc

SEQ ID NO: 1956083 - RNA, 19 nt, Artificial Sequence
  Description of Artificial Sequence: Synthetic oligonucleotide
ucugaaaccaauggcuccu

SEQ ID NO: 1956084 - RNA, 19 nt, Artificial Sequence
  Description of Artificial Sequence: Synthetic oligonucleotide
uggaagaccagcuggucaa

SEQ ID NO: 1956085 - RNA, 19 nt, Artificial Sequence
  Description of Artificial Sequence: Synthetic oligonucleotide
gcaguagccgccaugaccg

SEQ ID NO: 1956086 - RNA, 19 nt, Artificial Sequence
  Description of Artificial Sequence: Synthetic oligonucleotide
agcucugaaaccaauggcu

SEQ ID NO: 1956087 - RNA, 19 nt, Artificial Sequence
  Description of Artificial Sequence: Synthetic oligonucleotide
guacacgaaaacauugcgc

SEQ ID NO: 1956088 - RNA, 19 nt, Artificial Sequence
  Description of Artificial Sequence: Synthetic oligonucleotide
gaagucgccgacuccgcag

SEQ ID NO: 1956089 - RNA, 19 nt, Artificial Sequence
  Description of Artificial Sequence: Synthetic oligonucleotide
aaugccaaguguguagaaa

SEQ ID NO: 1956090 - RNA, 19 nt, Artificial Sequence
  Description of Artificial Sequence: Synthetic oligonucleotide
acauugcgcccacaauggc

SEQ ID NO: 1956091 - RNA, 19 nt, Artificial Sequence
  Description of Artificial Sequence: Synthetic oligonucleotide
uuuccucauaucaccgaga

SEQ ID NO: 1956092 - RNA, 19 nt, Artificial Sequence
  Description of Artificial Sequence: Synthetic oligonucleotide
gauggcaacauuucuuaua

SEQ ID NO: 1956093 - RNA, 19 nt, Artificial Sequence
  Description of Artificial Sequence: Synthetic oligonucleotide
uugaaggcgcaacuuucca

SEQ ID NO: 1956094 - RNA, 19 nt, Artificial Sequence
  Description of Artificial Sequence: Synthetic oligonucleotide
ucccaagacaaauccuccc

SEQ ID NO: 1956095 - RNA, 19 nt, Artificial Sequence
  Description of Artificial Sequence: Synthetic oligonucleotide
cucuugauugaacagucca

SEQ ID NO: 1956096 - RNA, 19 nt, Artificial Sequence
  Description of Artificial Sequence: Synthetic oligonucleotide
ugguuuaugcgcucauacu

SEQ ID NO: 1956097 - RNA, 19 nt, Artificial Sequence
  Description of Artificial Sequence: Synthetic oligonucleotide
aguaaagaucccaaacgca

SEQ ID NO: 1956098 - RNA, 19 nt, Artificial Sequence
  Description of Artificial Sequence: Synthetic oligonucleotide
uccucauaucaccgagagg

SEQ ID NO: 1956099 - RNA, 19 nt, Artificial Sequence
  Description of Artificial Sequence: Synthetic oligonucleotide
uuaugcgcucauacugacc

SEQ ID NO: 1956100 - RNA, 19 nt, Artificial Sequence
  Description of Artificial Sequence: Synthetic oligonucleotide
aggcuugucuuguucaacu

SEQ ID NO: 1956101 - RNA, 19 nt, Artificial Sequence
  Description of Artificial Sequence: Synthetic oligonucleotide
uaaucgauugcagcagaga

SEQ ID NO: 1956102 - RNA, 19 nt, Artificial Sequence
  Description of Artificial Sequence: Synthetic oligonucleotide
cuagcacagccuugaaggc

SEQ ID NO: 1956103 - RNA, 19 nt, Artificial Sequence
  Description of Artificial Sequence: Synthetic oligonucleotide
acgaaaacauugcgcccac

SEQ ID NO: 1956104 - RNA, 19 nt, Artificial Sequence
  Description of Artificial Sequence: Synthetic oligonucleotide
acagccuugaaggcgcaac

SEQ ID NO: 1956105 - RNA, 19 nt, Artificial Sequence
  Description of Artificial Sequence: Synthetic oligonucleotide
ggcaguaaagaucccaaac

SEQ ID NO: 1956106 - RNA, 19 nt, Artificial Sequence
  Description of Artificial Sequence: Synthetic oligonucleotide
acucaguacacgaaaacau

SEQ ID NO: 1956107 - RNA, 19 nt, Artificial Sequence
  Description of Artificial Sequence: Synthetic oligonucleotide
ucaaugccggcaguaaaga

SEQ ID NO: 1956108 - RNA, 19 nt, Artificial Sequence
  Description of Artificial Sequence: Synthetic oligonucleotide
aagaauucacagcccugaa

SEQ ID NO: 1956109 - RNA, 19 nt, Artificial Sequence
  Description of Artificial Sequence: Synthetic oligonucleotide
aauuacuguuugguuuaug

SEQ ID NO: 1956110 - RNA, 19 nt, Artificial Sequence
  Description of Artificial Sequence: Synthetic oligonucleotide
acugacagccuggaggcuc

SEQ ID NO: 1956111 - RNA, 19 nt, Artificial Sequence
  Description of Artificial Sequence: Synthetic oligonucleotide
cagcucugaaaccaauggc

SEQ ID NO: 1956112 - RNA, 19 nt, Artificial Sequence
  Description of Artificial Sequence: Synthetic oligonucleotide
uuucuuauauugggauuca

SEQ ID NO: 1956113 - RNA, 19 nt, Artificial Sequence
  Description of Artificial Sequence: Synthetic oligonucleotide
gccgccaugaccguaaggg

SEQ ID NO: 1956114 - RNA, 19 nt, Artificial Sequence
  Description of Artificial Sequence: Synthetic oligonucleotide
acguggacaaggcuugucu

SEQ ID NO: 1956115 - RNA, 19 nt, Artificial Sequence
  Description of Artificial Sequence: Synthetic oligonucleotide
ucccacgcaggcuagcaca

SEQ ID NO: 1956116 - RNA, 19 nt, Artificial Sequence
  Description of Artificial Sequence: Synthetic oligonucleotide
uccccgguaagauucuacu

SEQ ID NO: 1956117 - RNA, 19 nt, Artificial Sequence
  Description of Artificial Sequence: Synthetic oligonucleotide
uauugcagcggagcuucgg

SEQ ID NO: 1956118 - RNA, 19 nt, Artificial Sequence
  Description of Artificial Sequence: Synthetic oligonucleotide
uccacaaccuauggccccg

SEQ ID NO: 1956119 - RNA, 19 nt, Artificial Sequence
  Description of Artificial Sequence: Synthetic oligonucleotide
cacgcaggcuagcacagcc

SEQ ID NO: 1956120 - RNA, 19 nt, Artificial Sequence
  Description of Artificial Sequence: Synthetic oligonucleotide
acaguccacguggacaagg

SEQ ID NO: 1956121 - RNA, 19 nt, Artificial Sequence
  Description of Artificial Sequence: Synthetic oligonucleotide
ggaaacaacuggcuucgcc

SEQ ID NO: 1956122 - RNA, 19 nt, Artificial Sequence
  Description of Artificial Sequence: Synthetic oligonucleotide
uguuugguuuaugcgcuca

SEQ ID NO: 1956123 - RNA, 19 nt, Artificial Sequence
  Description of Artificial Sequence: Synthetic oligonucleotide
gacuccgcagcugaagccc

SEQ ID NO: 1956124 - RNA, 19 nt, Artificial Sequence
  Description of Artificial Sequence: Synthetic oligonucleotide
aagaucccaaacgcaccuc

SEQ ID NO: 1956125 - RNA, 19 nt, Artificial Sequence
  Description of Artificial Sequence: Synthetic oligonucleotide
agguaauaaucgauugcag

SEQ ID NO: 1956126 - RNA, 19 nt, Artificial Sequence
  Description of Artificial Sequence: Synthetic oligonucleotide
ugaaggcgcaacuuuccau

SEQ ID NO: 1956127 - RNA, 19 nt, Artificial Sequence
  Description of Artificial Sequence: Synthetic oligonucleotide
gguaaggguccuuaggguc

SEQ ID NO: 1956128 - RNA, 19 nt, Artificial Sequence
  Description of Artificial Sequence: Synthetic oligonucleotide
uuauuccgaagaucaggaa

SEQ ID NO: 1956129 - RNA, 19 nt, Artificial Sequence
  Description of Artificial Sequence: Synthetic oligonucleotide
gugauggcaacauuucuua

SEQ ID NO: 1956130 - RNA, 19 nt, Artificial Sequence
  Description of Artificial Sequence: Synthetic oligonucleotide
guuuaugcgcucauacuga

SEQ ID NO: 1956131 - RNA, 19 nt, Artificial Sequence
  Description of Artificial Sequence: Synthetic oligonucleotide
uauggccccggccuuuaca

SEQ ID NO: 1956132 - RNA, 19 nt, Artificial Sequence
  Description of Artificial Sequence: Synthetic oligonucleotide
ugacgcuugucgcccacca

SEQ ID NO: 1956133 - RNA, 19 nt, Artificial Sequence
  Description of Artificial Sequence: Synthetic oligonucleotide
uuuuggcguaggacauucc

SEQ ID NO: 1956134 - RNA, 19 nt, Artificial Sequence
  Description of Artificial Sequence: Synthetic oligonucleotide
uggacaaggcuugucuugu

SEQ ID NO: 1956135 - RNA, 19 nt, Artificial Sequence
  Description of Artificial Sequence: Synthetic oligonucleotide
ucuuucaccguagguaaua

SEQ ID NO: 1956136 - RNA, 19 nt, Artificial Sequence
  Description of Artificial Sequence: Synthetic oligonucleotide
aacgcaccucccaagacaa

SEQ ID NO: 1956137 - RNA, 19 nt, Artificial Sequence
  Description of Artificial Sequence: Synthetic oligonucleotide
ggcaguagccgccaugacc

SEQ ID NO: 1956138 - RNA, 19 nt, Artificial Sequence
  Description of Artificial Sequence: Synthetic oligonucleotide
ccgguaaggguccuuaggg

SEQ ID NO: 1956139 - RNA, 19 nt, Artificial Sequence
  Description of Artificial Sequence: Synthetic oligonucleotide
aucaccgagagggaaacaa

SEQ ID NO: 1956140 - RNA, 19 nt, Artificial Sequence
  Description of Artificial Sequence: Synthetic oligonucleotide
cuccacaaccuauggcccc

SEQ ID NO: 1956141 - RNA, 19 nt, Artificial Sequence
  Description of Artificial Sequence: Synthetic oligonucleotide
cccuuugacagguaccagg

SEQ ID NO: 1956142 - RNA, 19 nt, Artificial Sequence
  Description of Artificial Sequence: Synthetic oligonucleotide
ucgccccugaagcaaugcc

SEQ ID NO: 1956143 - RNA, 19 nt, Artificial Sequence
  Description of Artificial Sequence: Synthetic oligonucleotide
aagauccuaggcaccugag

SEQ ID NO: 1956144 - RNA, 19 nt, Artificial Sequence
  Description of Artificial Sequence: Synthetic oligonucleotide
gccuacauugguaucaaug

SEQ ID NO: 1956145 - RNA, 19 nt, Artificial Sequence
  Description of Artificial Sequence: Synthetic oligonucleotide
cauaucaccgagagggaaa

SEQ ID NO: 1956146 - RNA, 19 nt, Artificial Sequence
  Description of Artificial Sequence: Synthetic oligonucleotide
uuccccgguaagauucuac

SEQ ID NO: 1956147 - RNA, 19 nt, Artificial Sequence
  Description of Artificial Sequence: Synthetic oligonucleotide
caguccacguggacaaggc

SEQ ID NO: 1956148 - RNA, 19 nt, Artificial Sequence
  Description of Artificial Sequence: Synthetic oligonucleotide
ucccaaacgcaccucccaa

SEQ ID NO: 1956149 - RNA, 19 nt, Artificial Sequence
  Description of Artificial Sequence: Synthetic oligonucleotide
auauugggauucaugugga

SEQ ID NO: 1956150 - RNA, 19 nt, Artificial Sequence
  Description of Artificial Sequence: Synthetic oligonucleotide
ugucugcaaauuacuguuu

SEQ ID NO: 1956151 - RNA, 19 nt, Artificial Sequence
  Description of Artificial Sequence: Synthetic oligonucleotide
guacugcagaagaaggcug

SEQ ID NO: 1956152 - RNA, 19 nt, Artificial Sequence
  Description of Artificial Sequence: Synthetic oligonucleotide
ugacuuuccccgguaagau

SEQ ID NO: 1956153 - RNA, 19 nt, Artificial Sequence
  Description of Artificial Sequence: Synthetic oligonucleotide
cauugcgcccacaauggca

SEQ ID NO: 1956154 - RNA, 19 nt, Artificial Sequence
  Description of Artificial Sequence: Synthetic oligonucleotide
cacucaguacacgaaaaca

SEQ ID NO: 1956155 - RNA, 19 nt, Artificial Sequence
  Description of Artificial Sequence: Synthetic oligonucleotide
guacagcugcuccaauggc

SEQ ID NO: 1956156 - RNA, 19 nt, Artificial Sequence
  Description of Artificial Sequence: Synthetic oligonucleotide
cauugguaucaaugccggc

SEQ ID NO: 1956157 - RNA, 19 nt, Artificial Sequence
  Description of Artificial Sequence: Synthetic oligonucleotide
ccgagagggaaacaacugg

SEQ ID NO: 1956158 - RNA, 19 nt, Artificial Sequence
  Description of Artificial Sequence: Synthetic oligonucleotide
ugaugacacuguucuucca

SEQ ID NO: 1956159 - RNA, 19 nt, Artificial Sequence
  Description of Artificial Sequence: Synthetic oligonucleotide
cacgaaaacauugcgccca

SEQ ID NO: 1956160 - RNA, 19 nt, Artificial Sequence
  Description of Artificial Sequence: Synthetic oligonucleotide
uauugggauucauguggaa

SEQ ID NO: 1956161 - RNA, 19 nt, Artificial Sequence
  Description of Artificial Sequence: Synthetic oligonucleotide
uuuccaucgcccucucgau

SEQ ID NO: 1956162 - RNA, 19 nt, Artificial Sequence
  Description of Artificial Sequence: Synthetic oligonucleotide
uuucaccguagguaauaau

SEQ ID NO: 1956163 - RNA, 19 nt, Artificial Sequence
  Description of Artificial Sequence: Synthetic oligonucleotide
ggcgcaacuuuccaucgcc

SEQ ID NO: 1956164 - RNA, 19 nt, Artificial Sequence
  Description of Artificial Sequence: Synthetic oligonucleotide
guaaggguccuuaggguca

SEQ ID NO: 1956165 - RNA, 19 nt, Artificial Sequence
  Description of Artificial Sequence: Synthetic oligonucleotide
gaucccaaacgcaccuccc

SEQ ID NO: 1956166 - RNA, 19 nt, Artificial Sequence
  Description of Artificial Sequence: Synthetic oligonucleotide
cuuuugcaguugguguccg

SEQ ID NO: 1956167 - RNA, 19 nt, Artificial Sequence
  Description of Artificial Sequence: Synthetic oligonucleotide
auucuacuaaacacucagu

SEQ ID NO: 1956168 - RNA, 19 nt, Artificial Sequence
  Description of Artificial Sequence: Synthetic oligonucleotide
ccucccaagacaaauccuc

SEQ ID NO: 1956169 - RNA, 19 nt, Artificial Sequence
  Description of Artificial Sequence: Synthetic oligonucleotide
guugguguccgguaagggu

SEQ ID NO: 1956170 - RNA, 19 nt, Artificial Sequence
  Description of Artificial Sequence: Synthetic oligonucleotide
ccuagaugaagaauucaca

SEQ ID NO: 1956171 - RNA, 19 nt, Artificial Sequence
  Description of Artificial Sequence: Synthetic oligonucleotide
aggaacagaugugucugca

SEQ ID NO: 1956172 - RNA, 19 nt, Artificial Sequence
  Description of Artificial Sequence: Synthetic oligonucleotide
ggaagcuauuuaucucuug

SEQ ID NO: 1956173 - RNA, 19 nt, Artificial Sequence
  Description of Artificial Sequence: Synthetic oligonucleotide
uucuuucaccguagguaau

SEQ ID NO: 1956174 - RNA, 19 nt, Artificial Sequence
  Description of Artificial Sequence: Synthetic oligonucleotide
aggguccuuagggucaaag

SEQ ID NO: 1956175 - RNA, 19 nt, Artificial Sequence
  Description of Artificial Sequence: Synthetic oligonucleotide
caccguagguaauaaucga

SEQ ID NO: 1956176 - RNA, 19 nt, Artificial Sequence
  Description of Artificial Sequence: Synthetic oligonucleotide
aagccuacauugguaucaa

SEQ ID NO: 1956177 - RNA, 19 nt, Artificial Sequence
  Description of Artificial Sequence: Synthetic oligonucleotide
guaccagguagaaaccauc

SEQ ID NO: 1956178 - RNA, 19 nt, Artificial Sequence
  Description of Artificial Sequence: Synthetic oligonucleotide
accguagguaauaaucgau

SEQ ID NO: 1956179 - RNA, 19 nt, Artificial Sequence
  Description of Artificial Sequence: Synthetic oligonucleotide
ugguaucaaugccggcagu

SEQ ID NO: 1956180 - RNA, 19 nt, Artificial Sequence
  Description of Artificial Sequence: Synthetic oligonucleotide
cugacuuuccccgguaaga

SEQ ID NO: 1956181 - RNA, 19 nt, Artificial Sequence
  Description of Artificial Sequence: Synthetic oligonucleotide
uucuuauauugggauucau

SEQ ID NO: 1956182 - RNA, 19 nt, Artificial Sequence
  Description of Artificial Sequence: Synthetic oligonucleotide
gcggaagucgccgacuccg

SEQ ID NO: 1956183 - RNA, 19 nt, Artificial Sequence
  Description of Artificial Sequence: Synthetic oligonucleotide
ugacagguaccagguagaa

SEQ ID NO: 1956184 - RNA, 19 nt, Artificial Sequence
  Description of Artificial Sequence: Synthetic oligonucleotide
aucgauugcagcagagaaa

SEQ ID NO: 1956185 - RNA, 19 nt, Artificial Sequence
  Description of Artificial Sequence: Synthetic oligonucleotide
ggcuguauugcagcggagc

SEQ ID NO: 1956186 - RNA, 19 nt, Artificial Sequence
  Description of Artificial Sequence: Synthetic oligonucleotide
caaccuauggccccggccu

SEQ ID NO: 1956187 - RNA, 19 nt, Artificial Sequence
  Description of Artificial Sequence: Synthetic oligonucleotide
uguccgguaaggguccuua

SEQ ID NO: 1956188 - RNA, 19 nt, Artificial Sequence
  Description of Artificial Sequence: Synthetic oligonucleotide
aucccgcccaggcugccag

SEQ ID NO: 1956189 - RNA, 19 nt, Artificial Sequence
  Description of Artificial Sequence: Synthetic oligonucleotide
gucuacugacagccuggag

SEQ ID NO: 1956190 - RNA, 19 nt, Artificial Sequence
  Description of Artificial Sequence: Synthetic oligonucleotide
gaacagcucugaagguggc

SEQ ID NO: 1956191 - RNA, 19 nt, Artificial Sequence
  Description of Artificial Sequence: Synthetic oligonucleotide
uucgccccugaagcaaugc

SEQ ID NO: 1956192 - RNA, 19 nt, Artificial Sequence
  Description of Artificial Sequence: Synthetic oligonucleotide
ggcaaagaacaacaaggua

SEQ ID NO: 1956193 - RNA, 19 nt, Artificial Sequence
  Description of Artificial Sequence: Synthetic oligonucleotide
aaccuauggccccggccuu

SEQ ID NO: 1956194 - RNA, 19 nt, Artificial Sequence
  Description of Artificial Sequence: Synthetic oligonucleotide
uccgcagcugaagccccgg

SEQ ID NO: 1956195 - RNA, 19 nt, Artificial Sequence
  Description of Artificial Sequence: Synthetic oligonucleotide
guaucaaugccggcaguaa

SEQ ID NO: 1956196 - RNA, 19 nt, Artificial Sequence
  Description of Artificial Sequence: Synthetic oligonucleotide
uggcuucgccccugaagca

SEQ ID NO: 1956197 - RNA, 19 nt, Artificial Sequence
  Description of Artificial Sequence: Synthetic oligonucleotide
agcuucggcggaagucgcc

SEQ ID NO: 1956198 - RNA, 19 nt, Artificial Sequence
  Description of Artificial Sequence: Synthetic oligonucleotide
caaaaccuccacaaccuau

SEQ ID NO: 1956199 - RNA, 19 nt, Artificial Sequence
  Description of Artificial Sequence: Synthetic oligonucleotide
ggggcugacgcuugucgcc

SEQ ID NO: 1956200 - RNA, 19 nt, Artificial Sequence
  Description of Artificial Sequence: Synthetic oligonucleotide
cagaugugucugcaaauua

SEQ ID NO: 1956201 - RNA, 19 nt, Artificial Sequence
  Description of Artificial Sequence: Synthetic oligonucleotide
caaagauccuaggcaccug

SEQ ID NO: 1956202 - RNA, 19 nt, Artificial Sequence
  Description of Artificial Sequence: Synthetic oligonucleotide
cucaguacacgaaaacauu

SEQ ID NO: 1956203 - RNA, 19 nt, Artificial Sequence
  Description of Artificial Sequence: Synthetic oligonucleotide
uaaggguccuuagggucaa

SEQ ID NO: 1956204 - RNA, 19 nt, Artificial Sequence
  Description of Artificial Sequence: Synthetic oligonucleotide
gcuucggcggaagucgccg

SEQ ID NO: 1956205 - RNA, 19 nt, Artificial Sequence
  Description of Artificial Sequence: Synthetic oligonucleotide
gacucgggaucccgcccag

SEQ ID NO: 1956206 - RNA, 19 nt, Artificial Sequence
  Description of Artificial Sequence: Synthetic oligonucleotide
caaggcuugucuuguucaa

SEQ ID NO: 1956207 - RNA, 19 nt, Artificial Sequence
  Description of Artificial Sequence: Synthetic oligonucleotide
gagggacucgggaucccgc

SEQ ID NO: 1956208 - RNA, 19 nt, Artificial Sequence
  Description of Artificial Sequence: Synthetic oligonucleotide
uagccgccaugaccguaag

SEQ ID NO: 1956209 - RNA, 19 nt, Artificial Sequence
  Description of Artificial Sequence: Synthetic oligonucleotide
ugcgcccacaauggcaaaa

SEQ ID NO: 1956210 - RNA, 19 nt, Artificial Sequence
  Description of Artificial Sequence: Synthetic oligonucleotide
uaucaccgagagggaaaca

SEQ ID NO: 1956211 - RNA, 19 nt, Artificial Sequence
  Description of Artificial Sequence: Synthetic oligonucleotide
gcucugaaaccaauggcuc

SEQ ID NO: 1956212 - RNA, 19 nt, Artificial Sequence
  Description of Artificial Sequence: Synthetic oligonucleotide
cuucgccccugaagcaaug

SEQ ID NO: 1956213 - RNA, 19 nt, Artificial Sequence
  Description of Artificial Sequence: Synthetic oligonucleotide
ggccauuucuuucaccgua

SEQ ID NO: 1956214 - RNA, 19 nt, Artificial Sequence
  Description of Artificial Sequence: Synthetic oligonucleotide
cccgguaagauucuacuaa

SEQ ID NO: 1956215 - RNA, 19 nt, Artificial Sequence
  Description of Artificial Sequence: Synthetic oligonucleotide
cuuucaccguagguaauaa

SEQ ID NO: 1956216 - RNA, 19 nt, Artificial Sequence
  Description of Artificial Sequence: Synthetic oligonucleotide
accucccaagacaaauccu

SEQ ID NO: 1956217 - RNA, 19 nt, Artificial Sequence
  Description of Artificial Sequence: Synthetic oligonucleotide
gggauucauguggaagacc

SEQ ID NO: 1956218 - RNA, 19 nt, Artificial Sequence
  Description of Artificial Sequence: Synthetic oligonucleotide
uggcaacauuucuuauauu

SEQ ID NO: 1956219 - RNA, 19 nt, Artificial Sequence
  Description of Artificial Sequence: Synthetic oligonucleotide
cucgcucuuggagggacuc

SEQ ID NO: 1956220 - RNA, 19 nt, Artificial Sequence
  Description of Artificial Sequence: Synthetic oligonucleotide
ccgacuccgcagcugaagc

SEQ ID NO: 1956221 - RNA, 19 nt, Artificial Sequence
  Description of Artificial Sequence: Synthetic oligonucleotide
gagcuucggcggaagucgc

SEQ ID NO: 1956222 - RNA, 19 nt, Artificial Sequence
  Description of Artificial Sequence: Synthetic oligonucleotide
cacaaccuauggccccggc

SEQ ID NO: 1956223 - RNA, 19 nt, Artificial Sequence
  Description of Artificial Sequence: Synthetic oligonucleotide
cucccacgcaggcuagcac

SEQ ID NO: 1956224 - RNA, 19 nt, Artificial Sequence
  Description of Artificial Sequence: Synthetic oligonucleotide
guauugcagcggagcuucg

SEQ ID NO: 1956225 - RNA, 19 nt, Artificial Sequence
  Description of Artificial Sequence: Synthetic oligonucleotide
cccaaacgcaccucccaag

SEQ ID NO: 1956226 - RNA, 19 nt, Artificial Sequence
  Description of Artificial Sequence: Synthetic oligonucleotide
gcaaugccaaguguguaga

SEQ ID NO: 1956227 - RNA, 19 nt, Artificial Sequence
  Description of Artificial Sequence: Synthetic oligonucleotide
acauuccucuuugucccau

SEQ ID NO: 1956228 - RNA, 19 nt, Artificial Sequence
  Description of Artificial Sequence: Synthetic oligonucleotide
cccaagacaaauccuccca

SEQ ID NO: 1956229 - RNA, 19 nt, Artificial Sequence
  Description of Artificial Sequence: Synthetic oligonucleotide
gucugacuuuccccgguaa

SEQ ID NO: 1956230 - RNA, 19 nt, Artificial Sequence
  Description of Artificial Sequence: Synthetic oligonucleotide
gcuguauugcagcggagcu

SEQ ID NO: 1956231 - RNA, 19 nt, Artificial Sequence
  Description of Artificial Sequence: Synthetic oligonucleotide
caaugccaaguguguagaa

SEQ ID NO: 1956232 - RNA, 19 nt, Artificial Sequence
  Description of Artificial Sequence: Synthetic oligonucleotide
cugaagcaaugccaagugu

SEQ ID NO: 1956233 - RNA, 19 nt, Artificial Sequence
  Description of Artificial Sequence: Synthetic oligonucleotide
aggaagcuauuuaucucuu

SEQ ID NO: 1956234 - RNA, 19 nt, Artificial Sequence
  Description of Artificial Sequence: Synthetic oligonucleotide
ccggggcugacgcuugucg

SEQ ID NO: 1956235 - RNA, 19 nt, Artificial Sequence
  Description of Artificial Sequence: Synthetic oligonucleotide
agccuacauugguaucaau

SEQ ID NO: 1956236 - RNA, 19 nt, Artificial Sequence
  Description of Artificial Sequence: Synthetic oligonucleotide
cugacgcuugucgcccacc

SEQ ID NO: 1956237 - RNA, 19 nt, Artificial Sequence
  Description of Artificial Sequence: Synthetic oligonucleotide
ucccgcccaggcugccagg

SEQ ID NO: 1956238 - RNA, 19 nt, Artificial Sequence
  Description of Artificial Sequence: Synthetic oligonucleotide
ccaaacgcaccucccaaga

SEQ ID NO: 1956239 - RNA, 19 nt, Artificial Sequence
  Description of Artificial Sequence: Synthetic oligonucleotide
agucgccgacuccgcagcu

SEQ ID NO: 1956240 - RNA, 19 nt, Artificial Sequence
  Description of Artificial Sequence: Synthetic oligonucleotide
gggacucgggaucccgccc

SEQ ID NO: 1956241 - RNA, 19 nt, Artificial Sequence
  Description of Artificial Sequence: Synthetic oligonucleotide
uacugacagccuggaggcu

SEQ ID NO: 1956242 - RNA, 19 nt, Artificial Sequence
  Description of Artificial Sequence: Synthetic oligonucleotide
cccacgcaggcuagcacag

SEQ ID NO: 1956243 - RNA, 19 nt, Artificial Sequence
  Description of Artificial Sequence: Synthetic oligonucleotide
cacguggacaaggcuuguc

SEQ ID NO: 1956244 - RNA, 19 nt, Artificial Sequence
  Description of Artificial Sequence: Synthetic oligonucleotide
gacuuuccccgguaagauu

SEQ ID NO: 1956245 - RNA, 19 nt, Artificial Sequence
  Description of Artificial Sequence: Synthetic oligonucleotide
ggacacuguuuauuccgaa

SEQ ID NO: 1956246 - RNA, 19 nt, Artificial Sequence
  Description of Artificial Sequence: Synthetic oligonucleotide
ggaagucgccgacuccgca

SEQ ID NO: 1956247 - RNA, 19 nt, Artificial Sequence
  Description of Artificial Sequence: Synthetic oligonucleotide
ggcggaagucgccgacucc

SEQ ID NO: 1956248 - RNA, 19 nt, Artificial Sequence
  Description of Artificial Sequence: Synthetic oligonucleotide
cuauggccccggccuuuac

SEQ ID NO: 1956249 - RNA, 19 nt, Artificial Sequence
  Description of Artificial Sequence: Synthetic oligonucleotide
aggcuguauugcagcggag

SEQ ID NO: 1956250 - RNA, 19 nt, Artificial Sequence
  Description of Artificial Sequence: Synthetic oligonucleotide
cuucggcggaagucgccga

SEQ ID NO: 1956251 - RNA, 19 nt, Artificial Sequence
  Description of Artificial Sequence: Synthetic oligonucleotide
acgcaggcuagcacagccu

SEQ ID NO: 1956252 - RNA, 19 nt, Artificial Sequence
  Description of Artificial Sequence: Synthetic oligonucleotide
gucgccgacuccgcagcug

SEQ ID NO: 1956253 - RNA, 19 nt, Artificial Sequence
  Description of Artificial Sequence: Synthetic oligonucleotide
uugcgcccacaauggcaaa

SEQ ID NO: 1956254 - RNA, 19 nt, Artificial Sequence
  Description of Artificial Sequence: Synthetic oligonucleotide
ccggcaguaaagaucccaa

SEQ ID NO: 1956255 - RNA, 19 nt, Artificial Sequence
  Description of Artificial Sequence: Synthetic oligonucleotide
caaugccggcaguaaagau

SEQ ID NO: 1956256 - RNA, 19 nt, Artificial Sequence
  Description of Artificial Sequence: Synthetic oligonucleotide
gccgacuccgcagcugaag

SEQ ID NO: 1956257 - RNA, 19 nt, Artificial Sequence
  Description of Artificial Sequence: Synthetic oligonucleotide
cagccuugaaggcgcaacu

SEQ ID NO: 1956258 - RNA, 19 nt, Artificial Sequence
  Description of Artificial Sequence: Synthetic oligonucleotide
cgacuccgcagcugaagcc

SEQ ID NO: 1956259 - RNA, 19 nt, Artificial Sequence
  Description of Artificial Sequence: Synthetic oligonucleotide
gucgcccaccagguacugc

SEQ ID NO: 1956260 - RNA, 19 nt, Artificial Sequence
  Description of Artificial Sequence: Synthetic oligonucleotide
gcgcaacuuuccaucgccc

SEQ ID NO: 1956261 - RNA, 19 nt, Artificial Sequence
  Description of Artificial Sequence: Synthetic oligonucleotide
gccgcugaugacacuguuc

SEQ ID NO: 1956262 - RNA, 19 nt, Artificial Sequence
  Description of Artificial Sequence: Synthetic oligonucleotide
gaucccgcccaggcugcca

SEQ ID NO: 1956263 - RNA, 19 nt, Artificial Sequence
  Description of Artificial Sequence: Synthetic oligonucleotide
cagucugacuuuccccggu

SEQ ID NO: 1956264 - RNA, 19 nt, Artificial Sequence
  Description of Artificial Sequence: Synthetic oligonucleotide
cggggcugacgcuugucgc

SEQ ID NO: 1956265 - RNA, 19 nt, Artificial Sequence
  Description of Artificial Sequence: Synthetic oligonucleotide
caacuggcuucgccccuga

SEQ ID NO: 1956266 - RNA, 19 nt, Artificial Sequence
  Description of Artificial Sequence: Synthetic oligonucleotide
gcugacgcuugucgcccac

SEQ ID NO: 1956267 - RNA, 19 nt, Artificial Sequence
  Description of Artificial Sequence: Synthetic oligonucleotide
ccguagguaauaaucgauu

SEQ ID NO: 1956268 - RNA, 19 nt, Artificial Sequence
  Description of Artificial Sequence: Synthetic oligonucleotide
agccggggcugacgcuugu

SEQ ID NO: 1956269 - RNA, 19 nt, Artificial Sequence
  Description of Artificial Sequence: Synthetic oligonucleotide
gcccuuugacagguaccag

SEQ ID NO: 1956270 - RNA, 19 nt, Artificial Sequence
  Description of Artificial Sequence: Synthetic oligonucleotide
gccuugaaggcgcaacuuu

SEQ ID NO: 1956271 - RNA, 19 nt, Artificial Sequence
  Description of Artificial Sequence: Synthetic oligonucleotide
accuauggccccggccuuu

SEQ ID NO: 1956272 - RNA, 19 nt, Artificial Sequence
  Description of Artificial Sequence: Synthetic oligonucleotide
aaggguccuuagggucaaa

SEQ ID NO: 1956273 - RNA, 19 nt, Artificial Sequence
  Description of Artificial Sequence: Synthetic oligonucleotide
gggaucccgcccaggcugc

SEQ ID NO: 1956274 - RNA, 19 nt, Artificial Sequence
  Description of Artificial Sequence: Synthetic oligonucleotide
cuguauugcagcggagcuu

SEQ ID NO: 1956275 - RNA, 19 nt, Artificial Sequence
  Description of Artificial Sequence: Synthetic oligonucleotide
cggaagucgccgacuccgc

SEQ ID NO: 1956276 - RNA, 19 nt, Artificial Sequence
  Description of Artificial Sequence: Synthetic oligonucleotide
ccccgguaagauucuacua

SEQ ID NO: 1956277 - RNA, 19 nt, Artificial Sequence
  Description of Artificial Sequence: Synthetic oligonucleotide
cggccuuuacaccagcucu

SEQ ID NO: 1956278 - RNA, 19 nt, Artificial Sequence
  Description of Artificial Sequence: Synthetic oligonucleotide
ccuuuacaccagcucugaa

SEQ ID NO: 1956279 - RNA, 19 nt, Artificial Sequence
  Description of Artificial Sequence: Synthetic oligonucleotide
ggcugacgcuugucgccca

SEQ ID NO: 1956280 - RNA, 19 nt, Artificial Sequence
  Description of Artificial Sequence: Synthetic oligonucleotide
ccauuggacacuguuuauu

SEQ ID NO: 1956281 - RNA, 19 nt, Artificial Sequence
  Description of Artificial Sequence: Synthetic oligonucleotide
cacagccuugaaggcgcaa

SEQ ID NO: 1956282 - RNA, 19 nt, Artificial Sequence
  Description of Artificial Sequence: Synthetic oligonucleotide
ccacgcaggcuagcacagc

SEQ ID NO: 1956283 - RNA, 19 nt, Artificial Sequence
  Description of Artificial Sequence: Synthetic oligonucleotide
cuccucgcucuuggaggga

SEQ ID NO: 1956284 - RNA, 19 nt, Artificial Sequence
  Description of Artificial Sequence: Synthetic oligonucleotide
cuaggcaccugagcccuuu

SEQ ID NO: 1956285 - RNA, 19 nt, Artificial Sequence
  Description of Artificial Sequence: Synthetic oligonucleotide
acgcaccucccaagacaaa

SEQ ID NO: 1956286 - RNA, 19 nt, Artificial Sequence
  Description of Artificial Sequence: Synthetic oligonucleotide
cggcggaagucgccgacuc

SEQ ID NO: 1956287 - RNA, 19 nt, Artificial Sequence
  Description of Artificial Sequence: Synthetic oligonucleotide
ggaucccgcccaggcugcc

SEQ ID NO: 1956288 - RNA, 19 nt, Artificial Sequence
  Description of Artificial Sequence: Synthetic oligonucleotide
cgguaaggguccuuagggu

SEQ ID NO: 1956289 - RNA, 19 nt, Artificial Sequence
  Description of Artificial Sequence: Synthetic oligonucleotide
ggcguaggacauuccucuu

SEQ ID NO: 1956290 - RNA, 19 nt, Artificial Sequence
  Description of Artificial Sequence: Synthetic oligonucleotide
caguagccgccaugaccgu

SEQ ID NO: 1956291 - RNA, 19 nt, Artificial Sequence
  Description of Artificial Sequence: Synthetic oligonucleotide
ggacaaggcuugucuuguu

SEQ ID NO: 1956292 - RNA, 19 nt, Artificial Sequence
  Description of Artificial Sequence: Synthetic oligonucleotide
gcgcccacaauggcaaaau

SEQ ID NO: 1956293 - RNA, 19 nt, Artificial Sequence
  Description of Artificial Sequence: Synthetic oligonucleotide
cagcggagcuucggcggaa

SEQ ID NO: 1956294 - RNA, 19 nt, Artificial Sequence
  Description of Artificial Sequence: Synthetic oligonucleotide
gcuucgccccugaagcaau

SEQ ID NO: 1956295 - RNA, 19 nt, Artificial Sequence
  Description of Artificial Sequence: Synthetic oligonucleotide
cgcuugucgcccaccaggu

SEQ ID NO: 1956296 - RNA, 19 nt, Artificial Sequence
  Description of Artificial Sequence: Synthetic oligonucleotide
gccggggcugacgcuuguc

SEQ ID NO: 1956297 - RNA, 19 nt, Artificial Sequence
  Description of Artificial Sequence: Synthetic oligonucleotide
ccucgcucuuggagggacu

SEQ ID NO: 1956298 - RNA, 19 nt, Artificial Sequence
  Description of Artificial Sequence: Synthetic oligonucleotide
cgcaggcuagcacagccuu

SEQ ID NO: 1956299 - RNA, 19 nt, Artificial Sequence
  Description of Artificial Sequence: Synthetic oligonucleotide
guguccgguaaggguccuu

SEQ ID NO: 1956300 - RNA, 19 nt, Artificial Sequence
  Description of Artificial Sequence: Synthetic oligonucleotide
ccacguggacaaggcuugu

SEQ ID NO: 1956301 - RNA, 19 nt, Artificial Sequence
  Description of Artificial Sequence: Synthetic oligonucleotide
cgccgacuccgcagcugaa

SEQ ID NO: 1956302 - RNA, 19 nt, Artificial Sequence
  Description of Artificial Sequence: Synthetic oligonucleotide
aauaaggugaaaauuaagc

SEQ ID NO: 1956303 - RNA, 19 nt, Artificial Sequence
  Description of Artificial Sequence: Synthetic oligonucleotide
aaacgcuugaaauacauac

SEQ ID NO: 1956304 - RNA, 19 nt, Artificial Sequence
  Description of Artificial Sequence: Synthetic oligonucleotide
auuucaaauuauuagagag

SEQ ID NO: 1956305 - RNA, 19 nt, Artificial Sequence
  Description of Artificial Sequence: Synthetic oligonucleotide
aaggugaaaauuaagcugc

SEQ ID NO: 1956306 - RNA, 19 nt, Artificial Sequence
  Description of Artificial Sequence: Synthetic oligonucleotide
uuuacuagguuucucaugc

SEQ ID NO: 1956307 - RNA, 19 nt, Artificial Sequence
  Description of Artificial Sequence: Synthetic oligonucleotide
aaaguuaaaugccagacau

SEQ ID NO: 1956308 - RNA, 19 nt, Artificial Sequence
  Description of Artificial Sequence: Synthetic oligonucleotide
aguuaaaugccagacaugc

SEQ ID NO: 1956309 - RNA, 19 nt, Artificial Sequence
  Description of Artificial Sequence: Synthetic oligonucleotide
uuuauaucaaugaggaagc

SEQ ID NO: 1956310 - RNA, 19 nt, Artificial Sequence
  Description of Artificial Sequence: Synthetic oligonucleotide
agcagaaugacaucgcucc

SEQ ID NO: 1956311 - RNA, 19 nt, Artificial Sequence
  Description of Artificial Sequence: Synthetic oligonucleotide
uuagagagaaucuaccagg

SEQ ID NO: 1956312 - RNA, 19 nt, Artificial Sequence
  Description of Artificial Sequence: Synthetic oligonucleotide
ugaaauacauacaagcugu

SEQ ID NO: 1956313 - RNA, 19 nt, Artificial Sequence
  Description of Artificial Sequence: Synthetic oligonucleotide
ugauacauagucaucaucu

SEQ ID NO: 1956314 - RNA, 19 nt, Artificial Sequence
  Description of Artificial Sequence: Synthetic oligonucleotide
caaauugaggacuagacac

SEQ ID NO: 1956315 - RNA, 19 nt, Artificial Sequence
  Description of Artificial Sequence: Synthetic oligonucleotide
uguguauaaaagauaagca

SEQ ID NO: 1956316 - RNA, 19 nt, Artificial Sequence
  Description of Artificial Sequence: Synthetic oligonucleotide
caagugagcauuauuaucc

SEQ ID NO: 1956317 - RNA, 19 nt, Artificial Sequence
  Description of Artificial Sequence: Synthetic oligonucleotide
uugaaauacauacaagcug

SEQ ID NO: 1956318 - RNA, 19 nt, Artificial Sequence
  Description of Artificial Sequence: Synthetic oligonucleotide
aagauaagcaucugucaac

SEQ ID NO: 1956319 - RNA, 19 nt, Artificial Sequence
  Description of Artificial Sequence: Synthetic oligonucleotide
uaaaagauaagcaucuguc

SEQ ID NO: 1956320 - RNA, 19 nt, Artificial Sequence
  Description of Artificial Sequence: Synthetic oligonucleotide
aguaauuccagcccuagag

SEQ ID NO: 1956321 - RNA, 19 nt, Artificial Sequence
  Description of Artificial Sequence: Synthetic oligonucleotide
caaauuauuagagagaauc

SEQ ID NO: 1956322 - RNA, 19 nt, Artificial Sequence
  Description of Artificial Sequence: Synthetic oligonucleotide
uaaagaaaguuaaaugcca

SEQ ID NO: 1956323 - RNA, 19 nt, Artificial Sequence
  Description of Artificial Sequence: Synthetic oligonucleotide
uccaaaauuugcucuagcg

SEQ ID NO: 1956324 - RNA, 19 nt, Artificial Sequence
  Description of Artificial Sequence: Synthetic oligonucleotide
aguuuaauauauuuugaug

SEQ ID NO: 1956325 - RNA, 19 nt, Artificial Sequence
  Description of Artificial Sequence: Synthetic oligonucleotide
uaaggcucaagaaacacug

SEQ ID NO: 1956326 - RNA, 19 nt, Artificial Sequence
  Description of Artificial Sequence: Synthetic oligonucleotide
aaaagauaagcaucuguca

SEQ ID NO: 1956327 - RNA, 19 nt, Artificial Sequence
  Description of Artificial Sequence: Synthetic oligonucleotide
uuauuagagagaaucuacc

SEQ ID NO: 1956328 - RNA, 19 nt, Artificial Sequence
  Description of Artificial Sequence: Synthetic oligonucleotide
auaaggugaaaauuaagcu

SEQ ID NO: 1956329 - RNA, 19 nt, Artificial Sequence
  Description of Artificial Sequence: Synthetic oligonucleotide
uacuaagaaaaucaucagc

SEQ ID NO: 1956330 - RNA, 19 nt, Artificial Sequence
  Description of Artificial Sequence: Synthetic oligonucleotide
aaccacauuaagugcaagg

SEQ ID NO: 1956331 - RNA, 19 nt, Artificial Sequence
  Description of Artificial Sequence: Synthetic oligonucleotide
auuagagagaaucuaccag

SEQ ID NO: 1956332 - RNA, 19 nt, Artificial Sequence
  Description of Artificial Sequence: Synthetic oligonucleotide
uggucgauaaggauugugg

SEQ ID NO: 1956333 - RNA, 19 nt, Artificial Sequence
  Description of Artificial Sequence: Synthetic oligonucleotide
uucauuauauccaguaacu

SEQ ID NO: 1956334 - RNA, 19 nt, Artificial Sequence
  Description of Artificial Sequence: Synthetic oligonucleotide
uaagcugcuguauaaguag

SEQ ID NO: 1956335 - RNA, 19 nt, Artificial Sequence
  Description of Artificial Sequence: Synthetic oligonucleotide
uguauaaguaguaauucau

SEQ ID NO: 1956336 - RNA, 19 nt, Artificial Sequence
  Description of Artificial Sequence: Synthetic oligonucleotide
guguaauuucuucauaagg

SEQ ID NO: 1956337 - RNA, 19 nt, Artificial Sequence
  Description of Artificial Sequence: Synthetic oligonucleotide
guuuaauauauuuugaugu

SEQ ID NO: 1956338 - RNA, 19 nt, Artificial Sequence
  Description of Artificial Sequence: Synthetic oligonucleotide
uauaaguaguaauucauau

SEQ ID NO: 1956339 - RNA, 19 nt, Artificial Sequence
  Description of Artificial Sequence: Synthetic oligonucleotide
aagauuuccaacaaauuga

SEQ ID NO: 1956340 - RNA, 19 nt, Artificial Sequence
  Description of Artificial Sequence: Synthetic oligonucleotide
ucuauuuucucucagcauu

SEQ ID NO: 1956341 - RNA, 19 nt, Artificial Sequence
  Description of Artificial Sequence: Synthetic oligonucleotide
auuguaguacuuuaaagaa

SEQ ID NO: 1956342 - RNA, 19 nt, Artificial Sequence
  Description of Artificial Sequence: Synthetic oligonucleotide
aaaugccagacaugcuucc

SEQ ID NO: 1956343 - RNA, 19 nt, Artificial Sequence
  Description of Artificial Sequence: Synthetic oligonucleotide
aaugacaucgcuccaacuu

SEQ ID NO: 1956344 - RNA, 19 nt, Artificial Sequence
  Description of Artificial Sequence: Synthetic oligonucleotide
uucaaauuauuagagagaa

SEQ ID NO: 1956345 - RNA, 19 nt, Artificial Sequence
  Description of Artificial Sequence: Synthetic oligonucleotide
guguguauaaaagauaagc

SEQ ID NO: 1956346 - RNA, 19 nt, Artificial Sequence
  Description of Artificial Sequence: Synthetic oligonucleotide
aggauuguggacaauaagg

SEQ ID NO: 1956347 - RNA, 19 nt, Artificial Sequence
  Description of Artificial Sequence: Synthetic oligonucleotide
aaguaguaauucauauucc

SEQ ID NO: 1956348 - RNA, 19 nt, Artificial Sequence
  Description of Artificial Sequence: Synthetic oligonucleotide
uccaacaugggguaccgcg

SEQ ID NO: 1956349 - RNA, 19 nt, Artificial Sequence
  Description of Artificial Sequence: Synthetic oligonucleotide
auaaaagauaagcaucugu

SEQ ID NO: 1956350 - RNA, 19 nt, Artificial Sequence
  Description of Artificial Sequence: Synthetic oligonucleotide
aaaauuaagcugcuguaua

SEQ ID NO: 1956351 - RNA, 19 nt, Artificial Sequence
  Description of Artificial Sequence: Synthetic oligonucleotide
auuauauccaguaacugug

SEQ ID NO: 1956352 - RNA, 19 nt, Artificial Sequence
  Description of Artificial Sequence: Synthetic oligonucleotide
auucaucuacuuugcaggc

SEQ ID NO: 1956353 - RNA, 19 nt, Artificial Sequence
  Description of Artificial Sequence: Synthetic oligonucleotide
cuuuccauaguaauuccag

SEQ ID NO: 1956354 - RNA, 19 nt, Artificial Sequence
  Description of Artificial Sequence: Synthetic oligonucleotide
ucgauaaaauggcagucag

SEQ ID NO: 1956355 - RNA, 19 nt, Artificial Sequence
  Description of Artificial Sequence: Synthetic oligonucleotide
uccauaguaauuccagccc

SEQ ID NO: 1956356 - RNA, 19 nt, Artificial Sequence
  Description of Artificial Sequence: Synthetic oligonucleotide
aaauuaagcugcuguauaa

SEQ ID NO: 1956357 - RNA, 19 nt, Artificial Sequence
  Description of Artificial Sequence: Synthetic oligonucleotide
ugaagguguguauaaaaga

SEQ ID NO: 1956358 - RNA, 19 nt, Artificial Sequence
  Description of Artificial Sequence: Synthetic oligonucleotide
uuaguuagcacugccguag

SEQ ID NO: 1956359 - RNA, 19 nt, Artificial Sequence
  Description of Artificial Sequence: Synthetic oligonucleotide
uuagccaccgcuuugcacu

SEQ ID NO: 1956360 - RNA, 19 nt, Artificial Sequence
  Description of Artificial Sequence: Synthetic oligonucleotide
uaauuccagcccuagaggc

SEQ ID NO: 1956361 - RNA, 19 nt, Artificial Sequence
  Description of Artificial Sequence: Synthetic oligonucleotide
aaauggucgauaaggauug

SEQ ID NO: 1956362 - RNA, 19 nt, Artificial Sequence
  Description of Artificial Sequence: Synthetic oligonucleotide
aaacaccgaacagaauucc

SEQ ID NO: 1956363 - RNA, 19 nt, Artificial Sequence
  Description of Artificial Sequence: Synthetic oligonucleotide
aacgcaauucuacuaagaa

SEQ ID NO: 1956364 - RNA, 19 nt, Artificial Sequence
  Description of Artificial Sequence: Synthetic oligonucleotide
ucgaagauuuccaacaaau

SEQ ID NO: 1956365 - RNA, 19 nt, Artificial Sequence
  Description of Artificial Sequence: Synthetic oligonucleotide
ucugucaacgcaauucuac

SEQ ID NO: 1956366 - RNA, 19 nt, Artificial Sequence
  Description of Artificial Sequence: Synthetic oligonucleotide
gaggcacucgauaaaaugg

SEQ ID NO: 1956367 - RNA, 19 nt, Artificial Sequence
  Description of Artificial Sequence: Synthetic oligonucleotide
ugagcauuauuauccgggg

SEQ ID NO: 1956368 - RNA, 19 nt, Artificial Sequence
  Description of Artificial Sequence: Synthetic oligonucleotide
uaaauagcuuuccauagua

SEQ ID NO: 1956369 - RNA, 19 nt, Artificial Sequence
  Description of Artificial Sequence: Synthetic oligonucleotide
uacuuugcaggccagaaau

SEQ ID NO: 1956370 - RNA, 19 nt, Artificial Sequence
  Description of Artificial Sequence: Synthetic oligonucleotide
aauuaagcugcuguauaag

SEQ ID NO: 1956371 - RNA, 19 nt, Artificial Sequence
  Description of Artificial Sequence: Synthetic oligonucleotide
ucaucuacuuugcaggcca

SEQ ID NO: 1956372 - RNA, 19 nt, Artificial Sequence
  Description of Artificial Sequence: Synthetic oligonucleotide
aagaaccuucccguuagcc

SEQ ID NO: 1956373 - RNA, 19 nt, Artificial Sequence
  Description of Artificial Sequence: Synthetic oligonucleotide
aaauuauuagagagaaucu

SEQ ID NO: 1956374 - RNA, 19 nt, Artificial Sequence
  Description of Artificial Sequence: Synthetic oligonucleotide
uggauucuccaacaugggg

SEQ ID NO: 1956375 - RNA, 19 nt, Artificial Sequence
  Description of Artificial Sequence: Synthetic oligonucleotide
uuaagugcaaggucagcag

SEQ ID NO: 1956376 - RNA, 19 nt, Artificial Sequence
  Description of Artificial Sequence: Synthetic oligonucleotide
ugauauuccauuacugaau

SEQ ID NO: 1956377 - RNA, 19 nt, Artificial Sequence
  Description of Artificial Sequence: Synthetic oligonucleotide
aguguaauuucuucauaag

SEQ ID NO: 1956378 - RNA, 19 nt, Artificial Sequence
  Description of Artificial Sequence: Synthetic oligonucleotide
ugcuuaguuagcacugccg

SEQ ID NO: 1956379 - RNA, 19 nt, Artificial Sequence
  Description of Artificial Sequence: Synthetic oligonucleotide
agauaagcaucugucaacg

SEQ ID NO: 1956380 - RNA, 19 nt, Artificial Sequence
  Description of Artificial Sequence: Synthetic oligonucleotide
aauuauuagagagaaucua

SEQ ID NO: 1956381 - RNA, 19 nt, Artificial Sequence
  Description of Artificial Sequence: Synthetic oligonucleotide
uguugcuuaguuagcacug

SEQ ID NO: 1956382 - RNA, 19 nt, Artificial Sequence
  Description of Artificial Sequence: Synthetic oligonucleotide
auuguggacaauaagguga

SEQ ID NO: 1956383 - RNA, 19 nt, Artificial Sequence
  Description of Artificial Sequence: Synthetic oligonucleotide
ucgauaaggauuguggaca

SEQ ID NO: 1956384 - RNA, 19 nt, Artificial Sequence
  Description of Artificial Sequence: Synthetic oligonucleotide
uugcacuugaauuugcggu

SEQ ID NO: 1956385 - RNA, 19 nt, Artificial Sequence
  Description of Artificial Sequence: Synthetic oligonucleotide
uguucuauuuucucucagc

SEQ ID NO: 1956386 - RNA, 19 nt, Artificial Sequence
  Description of Artificial Sequence: Synthetic oligonucleotide
agaaugacaucgcuccaac

SEQ ID NO: 1956387 - RNA, 19 nt, Artificial Sequence
  Description of Artificial Sequence: Synthetic oligonucleotide
gauuguggacaauaaggug

SEQ ID NO: 1956388 - RNA, 19 nt, Artificial Sequence
  Description of Artificial Sequence: Synthetic oligonucleotide
guaauuccagcccuagagg

SEQ ID NO: 1956389 - RNA, 19 nt, Artificial Sequence
  Description of Artificial Sequence: Synthetic oligonucleotide
ugguuuaaacaccgaacag

SEQ ID NO: 1956390 - RNA, 19 nt, Artificial Sequence
  Description of Artificial Sequence: Synthetic oligonucleotide
cacauuaagugcaagguca

SEQ ID NO: 1956391 - RNA, 19 nt, Artificial Sequence
  Description of Artificial Sequence: Synthetic oligonucleotide
uaaacaccgaacagaauuc

SEQ ID NO: 1956392 - RNA, 19 nt, Artificial Sequence
  Description of Artificial Sequence: Synthetic oligonucleotide
augacaucgcuccaacuuc

SEQ ID NO: 1956393 - RNA, 19 nt, Artificial Sequence
  Description of Artificial Sequence: Synthetic oligonucleotide
gucuuuauaucaaugagga

SEQ ID NO: 1956394 - RNA, 19 nt, Artificial Sequence
  Description of Artificial Sequence: Synthetic oligonucleotide
auugcugguuuaaacaccg

SEQ ID NO: 1956395 - RNA, 19 nt, Artificial Sequence
  Description of Artificial Sequence: Synthetic oligonucleotide
ugcuguauaaguaguaauu

SEQ ID NO: 1956396 - RNA, 19 nt, Artificial Sequence
  Description of Artificial Sequence: Synthetic oligonucleotide
gugagcauuauuauccggg

SEQ ID NO: 1956397 - RNA, 19 nt, Artificial Sequence
  Description of Artificial Sequence: Synthetic oligonucleotide
aguacuuuaaagaaaguua

SEQ ID NO: 1956398 - RNA, 19 nt, Artificial Sequence
  Description of Artificial Sequence: Synthetic oligonucleotide
agaggcacucgauaaaaug

SEQ ID NO: 1956399 - RNA, 19 nt, Artificial Sequence
  Description of Artificial Sequence: Synthetic oligonucleotide
caauaaggugaaaauuaag

SEQ ID NO: 1956400 - RNA, 19 nt, Artificial Sequence
  Description of Artificial Sequence: Synthetic oligonucleotide
ugugaagguguguauaaaa

SEQ ID NO: 1956401 - RNA, 19 nt, Artificial Sequence
  Description of Artificial Sequence: Synthetic oligonucleotide
uuaagcugcuguauaagua

SEQ ID NO: 1956402 - RNA, 19 nt, Artificial Sequence
  Description of Artificial Sequence: Synthetic oligonucleotide
aacagaauuccagcaaucu

SEQ ID NO: 1956403 - RNA, 19 nt, Artificial Sequence
  Description of Artificial Sequence: Synthetic oligonucleotide
auaaauagcuuuccauagu

SEQ ID NO: 1956404 - RNA, 19 nt, Artificial Sequence
  Description of Artificial Sequence: Synthetic oligonucleotide
gaaaguuaaaugccagaca

SEQ ID NO: 1956405 - RNA, 19 nt, Artificial Sequence
  Description of Artificial Sequence: Synthetic oligonucleotide
auuaagugcaaggucagca

SEQ ID NO: 1956406 - RNA, 19 nt, Artificial Sequence
  Description of Artificial Sequence: Synthetic oligonucleotide
uuugugaagguguguauaa

SEQ ID NO: 1956407 - RNA, 19 nt, Artificial Sequence
  Description of Artificial Sequence: Synthetic oligonucleotide
ucaucagcuguuuuccuca

SEQ ID NO: 1956408 - RNA, 19 nt, Artificial Sequence
  Description of Artificial Sequence: Synthetic oligonucleotide
acccacaacagaccguggc

SEQ ID NO: 1956409 - RNA, 19 nt, Artificial Sequence
  Description of Artificial Sequence: Synthetic oligonucleotide
uuguaguacuuuaaagaaa

SEQ ID NO: 1956410 - RNA, 19 nt, Artificial Sequence
  Description of Artificial Sequence: Synthetic oligonucleotide
uuauauccaguaacuguga

SEQ ID NO: 1956411 - RNA, 19 nt, Artificial Sequence
  Description of Artificial Sequence: Synthetic oligonucleotide
gaaccuucccguuagccac

SEQ ID NO: 1956412 - RNA, 19 nt, Artificial Sequence
  Description of Artificial Sequence: Synthetic oligonucleotide
agaaacacuggaucauuug

SEQ ID NO: 1956413 - RNA, 19 nt, Artificial Sequence
  Description of Artificial Sequence: Synthetic oligonucleotide
uauaucaaugaggaagccu

SEQ ID NO: 1956414 - RNA, 19 nt, Artificial Sequence
  Description of Artificial Sequence: Synthetic oligonucleotide
uucuguuucagaacagcaa

SEQ ID NO: 1956415 - RNA, 19 nt, Artificial Sequence
  Description of Artificial Sequence: Synthetic oligonucleotide
ucauaaggcucaagaaaca

SEQ ID NO: 1956416 - RNA, 19 nt, Artificial Sequence
  Description of Artificial Sequence: Synthetic oligonucleotide
aauuugugaagguguguau

SEQ ID NO: 1956417 - RNA, 19 nt, Artificial Sequence
  Description of Artificial Sequence: Synthetic oligonucleotide
ucaacgcaauucuacuaag

SEQ ID NO: 1956418 - RNA, 19 nt, Artificial Sequence
  Description of Artificial Sequence: Synthetic oligonucleotide
aguauuugcacaguguaau

SEQ ID NO: 1956419 - RNA, 19 nt, Artificial Sequence
  Description of Artificial Sequence: Synthetic oligonucleotide
cuuugcaggccagaaaugc

SEQ ID NO: 1956420 - RNA, 19 nt, Artificial Sequence
  Description of Artificial Sequence: Synthetic oligonucleotide
uaaggauuguggacaauaa

SEQ ID NO: 1956421 - RNA, 19 nt, Artificial Sequence
  Description of Artificial Sequence: Synthetic oligonucleotide
ugcucuagcgcuuucuccu

SEQ ID NO: 1956422 - RNA, 19 nt, Artificial Sequence
  Description of Artificial Sequence: Synthetic oligonucleotide
agugagcauuauuauccgg

SEQ ID NO: 1956423 - RNA, 19 nt, Artificial Sequence
  Description of Artificial Sequence: Synthetic oligonucleotide
caaaauuugcucuagcgcu

SEQ ID NO: 1956424 - RNA, 19 nt, Artificial Sequence
  Description of Artificial Sequence: Synthetic oligonucleotide
cugguuuaaacaccgaaca

SEQ ID NO: 1956425 - RNA, 19 nt, Artificial Sequence
  Description of Artificial Sequence: Synthetic oligonucleotide
uucuucguaaccacauuaa

SEQ ID NO: 1956426 - RNA, 19 nt, Artificial Sequence
  Description of Artificial Sequence: Synthetic oligonucleotide
uccucaaaaucucuggauu

SEQ ID NO: 1956427 - RNA, 19 nt, Artificial Sequence
  Description of Artificial Sequence: Synthetic oligonucleotide
cacuggaucauuuggaaga

SEQ ID NO: 1956428 - RNA, 19 nt, Artificial Sequence
  Description of Artificial Sequence: Synthetic oligonucleotide
uuugcaggccagaaaugca

SEQ ID NO: 1956429 - RNA, 19 nt, Artificial Sequence
  Description of Artificial Sequence: Synthetic oligonucleotide
ucguaaccacauuaagugc

SEQ ID NO: 1956430 - RNA, 19 nt, Artificial Sequence
  Description of Artificial Sequence: Synthetic oligonucleotide
acgcuugaaauacauacaa

SEQ ID NO: 1956431 - RNA, 19 nt, Artificial Sequence
  Description of Artificial Sequence: Synthetic oligonucleotide
ucaaauggucgauaaggau

SEQ ID NO: 1956432 - RNA, 19 nt, Artificial Sequence
  Description of Artificial Sequence: Synthetic oligonucleotide
gacuagacacauugaauuc

SEQ ID NO: 1956433 - RNA, 19 nt, Artificial Sequence
  Description of Artificial Sequence: Synthetic oligonucleotide
agaaccuucccguuagcca

SEQ ID NO: 1956434 - RNA, 19 nt, Artificial Sequence
  Description of Artificial Sequence: Synthetic oligonucleotide
ugaauucaucuacuuugca

SEQ ID NO: 1956435 - RNA, 19 nt, Artificial Sequence
  Description of Artificial Sequence: Synthetic oligonucleotide
auaucaaugaggaagccuu

SEQ ID NO: 1956436 - RNA, 19 nt, Artificial Sequence
  Description of Artificial Sequence: Synthetic oligonucleotide
cuucauaaggcucaagaaa

SEQ ID NO: 1956437 - RNA, 19 nt, Artificial Sequence
  Description of Artificial Sequence: Synthetic oligonucleotide
aggcacucgauaaaauggc

SEQ ID NO: 1956438 - RNA, 19 nt, Artificial Sequence
  Description of Artificial Sequence: Synthetic oligonucleotide
agacaugcuuccuacuucu

SEQ ID NO: 1956439 - RNA, 19 nt, Artificial Sequence
  Description of Artificial Sequence: Synthetic oligonucleotide
ugugguacaugcugcugcc

SEQ ID NO: 1956440 - RNA, 19 nt, Artificial Sequence
  Description of Artificial Sequence: Synthetic oligonucleotide
acucgauaaaauggcaguc

SEQ ID NO: 1956441 - RNA, 19 nt, Artificial Sequence
  Description of Artificial Sequence: Synthetic oligonucleotide
aauugaggacuagacacau

SEQ ID NO: 1956442 - RNA, 19 nt, Artificial Sequence
  Description of Artificial Sequence: Synthetic oligonucleotide
cuugaaauacauacaagcu

SEQ ID NO: 1956443 - RNA, 19 nt, Artificial Sequence
  Description of Artificial Sequence: Synthetic oligonucleotide
cuguauaaguaguaauuca

SEQ ID NO: 1956444 - RNA, 19 nt, Artificial Sequence
  Description of Artificial Sequence: Synthetic oligonucleotide
uuccaaaauuugcucuagc

SEQ ID NO: 1956445 - RNA, 19 nt, Artificial Sequence
  Description of Artificial Sequence: Synthetic oligonucleotide
ccaaaauuugcucuagcgc

SEQ ID NO: 1956446 - RNA, 19 nt, Artificial Sequence
  Description of Artificial Sequence: Synthetic oligonucleotide
accacauuaagugcaaggu

SEQ ID NO: 1956447 - RNA, 19 nt, Artificial Sequence
  Description of Artificial Sequence: Synthetic oligonucleotide
acuagacacauugaauuca

SEQ ID NO: 1956448 - RNA, 19 nt, Artificial Sequence
  Description of Artificial Sequence: Synthetic oligonucleotide
auuagacucucugauaaau

SEQ ID NO: 1956449 - RNA, 19 nt, Artificial Sequence
  Description of Artificial Sequence: Synthetic oligonucleotide
aacgcuugaaauacauaca

SEQ ID NO: 1956450 - RNA, 19 nt, Artificial Sequence
  Description of Artificial Sequence: Synthetic oligonucleotide
uugcuuaguuagcacugcc

SEQ ID NO: 1956451 - RNA, 19 nt, Artificial Sequence
  Description of Artificial Sequence: Synthetic oligonucleotide
ucucucgaagauuuccaac

SEQ ID NO: 1956452 - RNA, 19 nt, Artificial Sequence
  Description of Artificial Sequence: Synthetic oligonucleotide
uccuacuucuguugcuuag

SEQ ID NO: 1956453 - RNA, 19 nt, Artificial Sequence
  Description of Artificial Sequence: Synthetic oligonucleotide
accgaacagaauuccagca

SEQ ID NO: 1956454 - RNA, 19 nt, Artificial Sequence
  Description of Artificial Sequence: Synthetic oligonucleotide
ucaaugaggaagccuucaa

SEQ ID NO: 1956455 - RNA, 19 nt, Artificial Sequence
  Description of Artificial Sequence: Synthetic oligonucleotide
caauucuacuaagaaaauc

SEQ ID NO: 1956456 - RNA, 19 nt, Artificial Sequence
  Description of Artificial Sequence: Synthetic oligonucleotide
aggcauguucuauuuucuc

SEQ ID NO: 1956457 - RNA, 19 nt, Artificial Sequence
  Description of Artificial Sequence: Synthetic oligonucleotide
gauaagcaucugucaacgc

SEQ ID NO: 1956458 - RNA, 19 nt, Artificial Sequence
  Description of Artificial Sequence: Synthetic oligonucleotide
cauaaggcucaagaaacac

SEQ ID NO: 1956459 - RNA, 19 nt, Artificial Sequence
  Description of Artificial Sequence: Synthetic oligonucleotide
auaaggauuguggacaaua

SEQ ID NO: 1956460 - RNA, 19 nt, Artificial Sequence
  Description of Artificial Sequence: Synthetic oligonucleotide
ggucagcagaaugacaucg

SEQ ID NO: 1956461 - RNA, 19 nt, Artificial Sequence
  Description of Artificial Sequence: Synthetic oligonucleotide
ucaaauuauuagagagaau

SEQ ID NO: 1956462 - RNA, 19 nt, Artificial Sequence
  Description of Artificial Sequence: Synthetic oligonucleotide
cgucuuuauaucaaugagg

SEQ ID NO: 1956463 - RNA, 19 nt, Artificial Sequence
  Description of Artificial Sequence: Synthetic oligonucleotide
acuugaauuugcgguuggc

SEQ ID NO: 1956464 - RNA, 19 nt, Artificial Sequence
  Description of Artificial Sequence: Synthetic oligonucleotide
auaguaauuccagcccuag

SEQ ID NO: 1956465 - RNA, 19 nt, Artificial Sequence
  Description of Artificial Sequence: Synthetic oligonucleotide
ucaagaaacacuggaucau

SEQ ID NO: 1956466 - RNA, 19 nt, Artificial Sequence
  Description of Artificial Sequence: Synthetic oligonucleotide
ugaggacuagacacauuga

SEQ ID NO: 1956467 - RNA, 19 nt, Artificial Sequence
  Description of Artificial Sequence: Synthetic oligonucleotide
ugacaucgcuccaacuucu

SEQ ID NO: 1956468 - RNA, 19 nt, Artificial Sequence
  Description of Artificial Sequence: Synthetic oligonucleotide
acgcaauucuacuaagaaa

SEQ ID NO: 1956469 - RNA, 19 nt, Artificial Sequence
  Description of Artificial Sequence: Synthetic oligonucleotide
uucuauuuucucucagcau

SEQ ID NO: 1956470 - RNA, 19 nt, Artificial Sequence
  Description of Artificial Sequence: Synthetic oligonucleotide
uuagcacugccguagucau

SEQ ID NO: 1956471 - RNA, 19 nt, Artificial Sequence
  Description of Artificial Sequence: Synthetic oligonucleotide
gguuuaaacaccgaacaga

SEQ ID NO: 1956472 - RNA, 19 nt, Artificial Sequence
  Description of Artificial Sequence: Synthetic oligonucleotide
uacuagguuucucaugcuu

SEQ ID NO: 1956473 - RNA, 19 nt, Artificial Sequence
  Description of Artificial Sequence: Synthetic oligonucleotide
uucauagccuuuccucuuc

SEQ ID NO: 1956474 - RNA, 19 nt, Artificial Sequence
  Description of Artificial Sequence: Synthetic oligonucleotide
gaagguguguauaaaagau

SEQ ID NO: 1956475 - RNA, 19 nt, Artificial Sequence
  Description of Artificial Sequence: Synthetic oligonucleotide
cucugauaaauagcuuucc

SEQ ID NO: 1956476 - RNA, 19 nt, Artificial Sequence
  Description of Artificial Sequence: Synthetic oligonucleotide
cuggauucuccaacauggg

SEQ ID NO: 1956477 - RNA, 19 nt, Artificial Sequence
  Description of Artificial Sequence: Synthetic oligonucleotide
aggccgacacagcaacagc

SEQ ID NO: 1956478 - RNA, 19 nt, Artificial Sequence
  Description of Artificial Sequence: Synthetic oligonucleotide
ugucaacgcaauucuacua

SEQ ID NO: 1956479 - RNA, 19 nt, Artificial Sequence
  Description of Artificial Sequence: Synthetic oligonucleotide
acaccgaacagaauuccag

SEQ ID NO: 1956480 - RNA, 19 nt, Artificial Sequence
  Description of Artificial Sequence: Synthetic oligonucleotide
gucaacgcaauucuacuaa

SEQ ID NO: 1956481 - RNA, 19 nt, Artificial Sequence
  Description of Artificial Sequence: Synthetic oligonucleotide
guacccacaacagaccgug

SEQ ID NO: 1956482 - RNA, 19 nt, Artificial Sequence
  Description of Artificial Sequence: Synthetic oligonucleotide
aguuagcacugccguaguc

SEQ ID NO: 1956483 - RNA, 19 nt, Artificial Sequence
  Description of Artificial Sequence: Synthetic oligonucleotide
uccucgccggcgaaggucc

SEQ ID NO: 1956484 - RNA, 19 nt, Artificial Sequence
  Description of Artificial Sequence: Synthetic oligonucleotide
ggcauugcugguuuaaaca

SEQ ID NO: 1956485 - RNA, 19 nt, Artificial Sequence
  Description of Artificial Sequence: Synthetic oligonucleotide
cuucuguugcuuaguuagc

SEQ ID NO: 1956486 - RNA, 19 nt, Artificial Sequence
  Description of Artificial Sequence: Synthetic oligonucleotide
uaucaaugaggaagccuuc

SEQ ID NO: 1956487 - RNA, 19 nt, Artificial Sequence
  Description of Artificial Sequence: Synthetic oligonucleotide
uaguaauuccagcccuaga

SEQ ID NO: 1956488 - RNA, 19 nt, Artificial Sequence
  Description of Artificial Sequence: Synthetic oligonucleotide
uguacccacaacagaccgu

SEQ ID NO: 1956489 - RNA, 19 nt, Artificial Sequence
  Description of Artificial Sequence: Synthetic oligonucleotide
uucaucuacuuugcaggcc

SEQ ID NO: 1956490 - RNA, 19 nt, Artificial Sequence
  Description of Artificial Sequence: Synthetic oligonucleotide
ugccguagucauuucaaau

SEQ ID NO: 1956491 - RNA, 19 nt, Artificial Sequence
  Description of Artificial Sequence: Synthetic oligonucleotide
acagaauuccagcaaucuu

SEQ ID NO: 1956492 - RNA, 19 nt, Artificial Sequence
  Description of Artificial Sequence: Synthetic oligonucleotide
gcgucuuuauaucaaugag

SEQ ID NO: 1956493 - RNA, 19 nt, Artificial Sequence
  Description of Artificial Sequence: Synthetic oligonucleotide
uuguuuggguuucuuugau

SEQ ID NO: 1956494 - RNA, 19 nt, Artificial Sequence
  Description of Artificial Sequence: Synthetic oligonucleotide
uggaagaaccuucccguua

SEQ ID NO: 1956495 - RNA, 19 nt, Artificial Sequence
  Description of Artificial Sequence: Synthetic oligonucleotide
agggcaauuugugaaggug

SEQ ID NO: 1956496 - RNA, 19 nt, Artificial Sequence
  Description of Artificial Sequence: Synthetic oligonucleotide
cuggcgggacgcaaggccg

SEQ ID NO: 1956497 - RNA, 19 nt, Artificial Sequence
  Description of Artificial Sequence: Synthetic oligonucleotide
aaaauuugcucuagcgcuu

SEQ ID NO: 1956498 - RNA, 19 nt, Artificial Sequence
  Description of Artificial Sequence: Synthetic oligonucleotide
auaaggcucaagaaacacu

SEQ ID NO: 1956499 - RNA, 19 nt, Artificial Sequence
  Description of Artificial Sequence: Synthetic oligonucleotide
guuagcacugccguaguca

SEQ ID NO: 1956500 - RNA, 19 nt, Artificial Sequence
  Description of Artificial Sequence: Synthetic oligonucleotide
acauuaagugcaaggucag

SEQ ID NO: 1956501 - RNA, 19 nt, Artificial Sequence
  Description of Artificial Sequence: Synthetic oligonucleotide
gcauugcugguuuaaacac

SEQ ID NO: 1956502 - RNA, 19 nt, Artificial Sequence
  Description of Artificial Sequence: Synthetic oligonucleotide
aagguguguauaaaagaua

SEQ ID NO: 1956503 - RNA, 19 nt, Artificial Sequence
  Description of Artificial Sequence: Synthetic oligonucleotide
gcauuagacucucugauaa

SEQ ID NO: 1956504 - RNA, 19 nt, Artificial Sequence
  Description of Artificial Sequence: Synthetic oligonucleotide
gcucaagaaacacuggauc

SEQ ID NO: 1956505 - RNA, 19 nt, Artificial Sequence
  Description of Artificial Sequence: Synthetic oligonucleotide
caaauggucgauaaggauu

SEQ ID NO: 1956506 - RNA, 19 nt, Artificial Sequence
  Description of Artificial Sequence: Synthetic oligonucleotide
uccagcaaucuuuucucau

SEQ ID NO: 1956507 - RNA, 19 nt, Artificial Sequence
  Description of Artificial Sequence: Synthetic oligonucleotide
cgcaauucuacuaagaaaa

SEQ ID NO: 1956508 - RNA, 19 nt, Artificial Sequence
  Description of Artificial Sequence: Synthetic oligonucleotide
aacaccgaacagaauucca

SEQ ID NO: 1956509 - RNA, 19 nt, Artificial Sequence
  Description of Artificial Sequence: Synthetic oligonucleotide
guaacugugacaggcaugu

SEQ ID NO: 1956510 - RNA, 19 nt, Artificial Sequence
  Description of Artificial Sequence: Synthetic oligonucleotide
ucccaggggacucucucga

SEQ ID NO: 1956511 - RNA, 19 nt, Artificial Sequence
  Description of Artificial Sequence: Synthetic oligonucleotide
ugcgguuggcgucggcccg

SEQ ID NO: 1956512 - RNA, 19 nt, Artificial Sequence
  Description of Artificial Sequence: Synthetic oligonucleotide
guggacaauaaggugaaaa

SEQ ID NO: 1956513 - RNA, 19 nt, Artificial Sequence
  Description of Artificial Sequence: Synthetic oligonucleotide
aucaguccauuccuccucu

SEQ ID NO: 1956514 - RNA, 19 nt, Artificial Sequence
  Description of Artificial Sequence: Synthetic oligonucleotide
gcauguucuauuuucucuc

SEQ ID NO: 1956515 - RNA, 19 nt, Artificial Sequence
  Description of Artificial Sequence: Synthetic oligonucleotide
gugcaaggucagcagaaug

SEQ ID NO: 1956516 - RNA, 19 nt, Artificial Sequence
  Description of Artificial Sequence: Synthetic oligonucleotide
auagcuuuccauaguaauu

SEQ ID NO: 1956517 - RNA, 19 nt, Artificial Sequence
  Description of Artificial Sequence: Synthetic oligonucleotide
agcauuagacucucugaua

SEQ ID NO: 1956518 - RNA, 19 nt, Artificial Sequence
  Description of Artificial Sequence: Synthetic oligonucleotide
aagugcaaggucagcagaa

SEQ ID NO: 1956519 - RNA, 19 nt, Artificial Sequence
  Description of Artificial Sequence: Synthetic oligonucleotide
cacuugaauuugcgguugg

SEQ ID NO: 1956520 - RNA, 19 nt, Artificial Sequence
  Description of Artificial Sequence: Synthetic oligonucleotide
guauaaguaguaauucaua

SEQ ID NO: 1956521 - RNA, 19 nt, Artificial Sequence
  Description of Artificial Sequence: Synthetic oligonucleotide
ucuucuucguaaccacauu

SEQ ID NO: 1956522 - RNA, 19 nt, Artificial Sequence
  Description of Artificial Sequence: Synthetic oligonucleotide
cauaguauuugcacagugu

SEQ ID NO: 1956523 - RNA, 19 nt, Artificial Sequence
  Description of Artificial Sequence: Synthetic oligonucleotide
acaguguaauuucuucaua

SEQ ID NO: 1956524 - RNA, 19 nt, Artificial Sequence
  Description of Artificial Sequence: Synthetic oligonucleotide
cagacaugcuuccuacuuc

SEQ ID NO: 1956525 - RNA, 19 nt, Artificial Sequence
  Description of Artificial Sequence: Synthetic oligonucleotide
gaaucuaccaggucaucau

SEQ ID NO: 1956526 - RNA, 19 nt, Artificial Sequence
  Description of Artificial Sequence: Synthetic oligonucleotide
agcgcuuucuccuguccca

SEQ ID NO: 1956527 - RNA, 19 nt, Artificial Sequence
  Description of Artificial Sequence: Synthetic oligonucleotide
agcacugccguagucauuu

SEQ ID NO: 1956528 - RNA, 19 nt, Artificial Sequence
  Description of Artificial Sequence: Synthetic oligonucleotide
uaaccacauuaagugcaag

SEQ ID NO: 1956529 - RNA, 19 nt, Artificial Sequence
  Description of Artificial Sequence: Synthetic oligonucleotide
uacuucuguugcuuaguua

SEQ ID NO: 1956530 - RNA, 19 nt, Artificial Sequence
  Description of Artificial Sequence: Synthetic oligonucleotide
uuacuagguuucucaugcu

SEQ ID NO: 1956531 - RNA, 19 nt, Artificial Sequence
  Description of Artificial Sequence: Synthetic oligonucleotide
caucaguccauuccuccuc

SEQ ID NO: 1956532 - RNA, 19 nt, Artificial Sequence
  Description of Artificial Sequence: Synthetic oligonucleotide
guacaugcugcugcccugg

SEQ ID NO: 1956533 - RNA, 19 nt, Artificial Sequence
  Description of Artificial Sequence: Synthetic oligonucleotide
aaauuugcucuagcgcuuu

SEQ ID NO: 1956534 - RNA, 19 nt, Artificial Sequence
  Description of Artificial Sequence: Synthetic oligonucleotide
cucgauaaaauggcaguca

SEQ ID NO: 1956535 - RNA, 19 nt, Artificial Sequence
  Description of Artificial Sequence: Synthetic oligonucleotide
ggucgauaaggauugugga

SEQ ID NO: 1956536 - RNA, 19 nt, Artificial Sequence
  Description of Artificial Sequence: Synthetic oligonucleotide
cauuaagugcaaggucagc

SEQ ID NO: 1956537 - RNA, 19 nt, Artificial Sequence
  Description of Artificial Sequence: Synthetic oligonucleotide
guuagccaccgcuuugcac

SEQ ID NO: 1956538 - RNA, 19 nt, Artificial Sequence
  Description of Artificial Sequence: Synthetic oligonucleotide
uaccgcgucuuuauaucaa

SEQ ID NO: 1956539 - RNA, 19 nt, Artificial Sequence
  Description of Artificial Sequence: Synthetic oligonucleotide
gaagaaccuucccguuagc

SEQ ID NO: 1956540 - RNA, 19 nt, Artificial Sequence
  Description of Artificial Sequence: Synthetic oligonucleotide
cucucugauaaauagcuuu

SEQ ID NO: 1956541 - RNA, 19 nt, Artificial Sequence
  Description of Artificial Sequence: Synthetic oligonucleotide
acaucgcuccaacuucugu

SEQ ID NO: 1956542 - RNA, 19 nt, Artificial Sequence
  Description of Artificial Sequence: Synthetic oligonucleotide
uucuucagaccuggguggc

SEQ ID NO: 1956543 - RNA, 19 nt, Artificial Sequence
  Description of Artificial Sequence: Synthetic oligonucleotide
caacgcaauucuacuaaga

SEQ ID NO: 1956544 - RNA, 19 nt, Artificial Sequence
  Description of Artificial Sequence: Synthetic oligonucleotide
uaguuagcacugccguagu

SEQ ID NO: 1956545 - RNA, 19 nt, Artificial Sequence
  Description of Artificial Sequence: Synthetic oligonucleotide
ccaacuucuguuucagaac

SEQ ID NO: 1956546 - RNA, 19 nt, Artificial Sequence
  Description of Artificial Sequence: Synthetic oligonucleotide
ugggguaccgcgucuuuau

SEQ ID NO: 1956547 - RNA, 19 nt, Artificial Sequence
  Description of Artificial Sequence: Synthetic oligonucleotide
ccucaaaaucucuggauuc

SEQ ID NO: 1956548 - RNA, 19 nt, Artificial Sequence
  Description of Artificial Sequence: Synthetic oligonucleotide
auccaguaacugugacagg

SEQ ID NO: 1956549 - RNA, 19 nt, Artificial Sequence
  Description of Artificial Sequence: Synthetic oligonucleotide
aggacuagacacauugaau

SEQ ID NO: 1956550 - RNA, 19 nt, Artificial Sequence
  Description of Artificial Sequence: Synthetic oligonucleotide
ggacuagacacauugaauu

SEQ ID NO: 1956551 - RNA, 19 nt, Artificial Sequence
  Description of Artificial Sequence: Synthetic oligonucleotide
acuagguuucucaugcuuu

SEQ ID NO: 1956552 - RNA, 19 nt, Artificial Sequence
  Description of Artificial Sequence: Synthetic oligonucleotide
gguccagugccgcuucugg

SEQ ID NO: 1956553 - RNA, 19 nt, Artificial Sequence
  Description of Artificial Sequence: Synthetic oligonucleotide
uacccacaacagaccgugg

SEQ ID NO: 1956554 - RNA, 19 nt, Artificial Sequence
  Description of Artificial Sequence: Synthetic oligonucleotide
uucuccugucccaggggac

SEQ ID NO: 1956555 - RNA, 19 nt, Artificial Sequence
  Description of Artificial Sequence: Synthetic oligonucleotide
auggucgauaaggauugug

SEQ ID NO: 1956556 - RNA, 19 nt, Artificial Sequence
  Description of Artificial Sequence: Synthetic oligonucleotide
guaccgcgucuuuauauca

SEQ ID NO: 1956557 - RNA, 19 nt, Artificial Sequence
  Description of Artificial Sequence: Synthetic oligonucleotide
ggccgacacagcaacagcg

SEQ ID NO: 1956558 - RNA, 19 nt, Artificial Sequence
  Description of Artificial Sequence: Synthetic oligonucleotide
auuugcgguuggcgucggc

SEQ ID NO: 1956559 - RNA, 19 nt, Artificial Sequence
  Description of Artificial Sequence: Synthetic oligonucleotide
gguaccgcgucuuuauauc

SEQ ID NO: 1956560 - RNA, 19 nt, Artificial Sequence
  Description of Artificial Sequence: Synthetic oligonucleotide
gauacauagucaucaucuu

SEQ ID NO: 1956561 - RNA, 19 nt, Artificial Sequence
  Description of Artificial Sequence: Synthetic oligonucleotide
agaauuccagcaaucuuuu

SEQ ID NO: 1956562 - RNA, 19 nt, Artificial Sequence
  Description of Artificial Sequence: Synthetic oligonucleotide
gcacucgauaaaauggcag

SEQ ID NO: 1956563 - RNA, 19 nt, Artificial Sequence
  Description of Artificial Sequence: Synthetic oligonucleotide
uugugaagguguguauaaa

SEQ ID NO: 1956564 - RNA, 19 nt, Artificial Sequence
  Description of Artificial Sequence: Synthetic oligonucleotide
gguguguauaaaagauaag

SEQ ID NO: 1956565 - RNA, 19 nt, Artificial Sequence
  Description of Artificial Sequence: Synthetic oligonucleotide
uuggaagaaccuucccguu

SEQ ID NO: 1956566 - RNA, 19 nt, Artificial Sequence
  Description of Artificial Sequence: Synthetic oligonucleotide
cacucgauaaaauggcagu

SEQ ID NO: 1956567 - RNA, 19 nt, Artificial Sequence
  Description of Artificial Sequence: Synthetic oligonucleotide
acugccguagucauuucaa

SEQ ID NO: 1956568 - RNA, 19 nt, Artificial Sequence
  Description of Artificial Sequence: Synthetic oligonucleotide
cuagaggcacucgauaaaa

SEQ ID NO: 1956569 - RNA, 19 nt, Artificial Sequence
  Description of Artificial Sequence: Synthetic oligonucleotide
accgcgucuuuauaucaau

SEQ ID NO: 1956570 - RNA, 19 nt, Artificial Sequence
  Description of Artificial Sequence: Synthetic oligonucleotide
ggcaauuugugaaggugug

SEQ ID NO: 1956571 - RNA, 19 nt, Artificial Sequence
  Description of Artificial Sequence: Synthetic oligonucleotide
caacaugggguaccgcguc

SEQ ID NO: 1956572 - RNA, 19 nt, Artificial Sequence
  Description of Artificial Sequence: Synthetic oligonucleotide
uucccguuagccaccgcuu

SEQ ID NO: 1956573 - RNA, 19 nt, Artificial Sequence
  Description of Artificial Sequence: Synthetic oligonucleotide
ugcccuggcgggacgcaag

SEQ ID NO: 1956574 - RNA, 19 nt, Artificial Sequence
  Description of Artificial Sequence: Synthetic oligonucleotide
cguaaccacauuaagugca

SEQ ID NO: 1956575 - RNA, 19 nt, Artificial Sequence
  Description of Artificial Sequence: Synthetic oligonucleotide
cauaguaauuccagcccua

SEQ ID NO: 1956576 - RNA, 19 nt, Artificial Sequence
  Description of Artificial Sequence: Synthetic oligonucleotide
ccggcgaagguccagugcc

SEQ ID NO: 1956577 - RNA, 19 nt, Artificial Sequence
  Description of Artificial Sequence: Synthetic oligonucleotide
cuuaguuagcacugccgua

SEQ ID NO: 1956578 - RNA, 19 nt, Artificial Sequence
  Description of Artificial Sequence: Synthetic oligonucleotide
aauggucgauaaggauugu

SEQ ID NO: 1956579 - RNA, 19 nt, Artificial Sequence
  Description of Artificial Sequence: Synthetic oligonucleotide
ggauuguggacaauaaggu

SEQ ID NO: 1956580 - RNA, 19 nt, Artificial Sequence
  Description of Artificial Sequence: Synthetic oligonucleotide
cuucagaccuggguggcuc

SEQ ID NO: 1956581 - RNA, 19 nt, Artificial Sequence
  Description of Artificial Sequence: Synthetic oligonucleotide
uuccuacuucuguugcuua

SEQ ID NO: 1956582 - RNA, 19 nt, Artificial Sequence
  Description of Artificial Sequence: Synthetic oligonucleotide
ggcauguucuauuuucucu

SEQ ID NO: 1956583 - RNA, 19 nt, Artificial Sequence
  Description of Artificial Sequence: Synthetic oligonucleotide
ggauucuccaacauggggu

SEQ ID NO: 1956584 - RNA, 19 nt, Artificial Sequence
  Description of Artificial Sequence: Synthetic oligonucleotide
ccacauuaagugcaagguc

SEQ ID NO: 1956585 - RNA, 19 nt, Artificial Sequence
  Description of Artificial Sequence: Synthetic oligonucleotide
gguacaugcugcugcccug

SEQ ID NO: 1956586 - RNA, 19 nt, Artificial Sequence
  Description of Artificial Sequence: Synthetic oligonucleotide
gcuuaguuagcacugccgu

SEQ ID NO: 1956587 - RNA, 19 nt, Artificial Sequence
  Description of Artificial Sequence: Synthetic oligonucleotide
cucgaagauuuccaacaaa

SEQ ID NO: 1956588 - RNA, 19 nt, Artificial Sequence
  Description of Artificial Sequence: Synthetic oligonucleotide
cauuagacucucugauaaa

SEQ ID NO: 1956589 - RNA, 19 nt, Artificial Sequence
  Description of Artificial Sequence: Synthetic oligonucleotide
guaaccacauuaagugcaa

SEQ ID NO: 1956590 - RNA, 19 nt, Artificial Sequence
  Description of Artificial Sequence: Synthetic oligonucleotide
cugucaacgcaauucuacu

SEQ ID NO: 1956591 - RNA, 19 nt, Artificial Sequence
  Description of Artificial Sequence: Synthetic oligonucleotide
cucucagcauuagacucuc

SEQ ID NO: 1956592 - RNA, 19 nt, Artificial Sequence
  Description of Artificial Sequence: Synthetic oligonucleotide
cuguuucagaacagcaacu

SEQ ID NO: 1956593 - RNA, 19 nt, Artificial Sequence
  Description of Artificial Sequence: Synthetic oligonucleotide
gacaucgcuccaacuucug

SEQ ID NO: 1956594 - RNA, 19 nt, Artificial Sequence
  Description of Artificial Sequence: Synthetic oligonucleotide
gaaugacaucgcuccaacu

SEQ ID NO: 1956595 - RNA, 19 nt, Artificial Sequence
  Description of Artificial Sequence: Synthetic oligonucleotide
ucccguuagccaccgcuuu

SEQ ID NO: 1956596 - RNA, 19 nt, Artificial Sequence
  Description of Artificial Sequence: Synthetic oligonucleotide
aauggcagucagggcaauu

SEQ ID NO: 1956597 - RNA, 19 nt, Artificial Sequence
  Description of Artificial Sequence: Synthetic oligonucleotide
ucuucagaccuggguggcu

SEQ ID NO: 1956598 - RNA, 19 nt, Artificial Sequence
  Description of Artificial Sequence: Synthetic oligonucleotide
cuucccguuagccaccgcu

SEQ ID NO: 1956599 - RNA, 19 nt, Artificial Sequence
  Description of Artificial Sequence: Synthetic oligonucleotide
cuacuuugcaggccagaaa

SEQ ID NO: 1956600 - RNA, 19 nt, Artificial Sequence
  Description of Artificial Sequence: Synthetic oligonucleotide
aggugaaaauuaagcugcu

SEQ ID NO: 1956601 - RNA, 19 nt, Artificial Sequence
  Description of Artificial Sequence: Synthetic oligonucleotide
ccuggcgggacgcaaggcc

SEQ ID NO: 1956602 - RNA, 19 nt, Artificial Sequence
  Description of Artificial Sequence: Synthetic oligonucleotide
caugcuuccuacuucuguu

SEQ ID NO: 1956603 - RNA, 19 nt, Artificial Sequence
  Description of Artificial Sequence: Synthetic oligonucleotide
cgcuugaaauacauacaag

SEQ ID NO: 1956604 - RNA, 19 nt, Artificial Sequence
  Description of Artificial Sequence: Synthetic oligonucleotide
cagaaugacaucgcuccaa

SEQ ID NO: 1956605 - RNA, 19 nt, Artificial Sequence
  Description of Artificial Sequence: Synthetic oligonucleotide
cagcaacuucuucagaccu

SEQ ID NO: 1956606 - RNA, 19 nt, Artificial Sequence
  Description of Artificial Sequence: Synthetic oligonucleotide
cugcuguauaaguaguaau

SEQ ID NO: 1956607 - RNA, 19 nt, Artificial Sequence
  Description of Artificial Sequence: Synthetic oligonucleotide
cacugccguagucauuuca

SEQ ID NO: 1956608 - RNA, 19 nt, Artificial Sequence
  Description of Artificial Sequence: Synthetic oligonucleotide
accuucccguuagccaccg

SEQ ID NO: 1956609 - RNA, 19 nt, Artificial Sequence
  Description of Artificial Sequence: Synthetic oligonucleotide
ccaggggacucucucgaag

SEQ ID NO: 1956610 - RNA, 19 nt, Artificial Sequence
  Description of Artificial Sequence: Synthetic oligonucleotide
guuaaaugccagacaugcu

SEQ ID NO: 1956611 - RNA, 19 nt, Artificial Sequence
  Description of Artificial Sequence: Synthetic oligonucleotide
cgcgucuuuauaucaauga

SEQ ID NO: 1956612 - RNA, 19 nt, Artificial Sequence
  Description of Artificial Sequence: Synthetic oligonucleotide
cagcccuagaggcacucga

SEQ ID NO: 1956613 - RNA, 19 nt, Artificial Sequence
  Description of Artificial Sequence: Synthetic oligonucleotide
uguggacaauaaggugaaa

SEQ ID NO: 1956614 - RNA, 19 nt, Artificial Sequence
  Description of Artificial Sequence: Synthetic oligonucleotide
caucgcuccaacuucuguu

SEQ ID NO: 1956615 - RNA, 19 nt, Artificial Sequence
  Description of Artificial Sequence: Synthetic oligonucleotide
cugccguagucauuucaaa

SEQ ID NO: 1956616 - RNA, 19 nt, Artificial Sequence
  Description of Artificial Sequence: Synthetic oligonucleotide
ggacaauaaggugaaaauu

SEQ ID NO: 1956617 - RNA, 19 nt, Artificial Sequence
  Description of Artificial Sequence: Synthetic oligonucleotide
gccguagucauuucaaauu

SEQ ID NO: 1956618 - RNA, 19 nt, Artificial Sequence
  Description of Artificial Sequence: Synthetic oligonucleotide
ggaucauuuggaagaaccu

SEQ ID NO: 1956619 - RNA, 19 nt, Artificial Sequence
  Description of Artificial Sequence: Synthetic oligonucleotide
gugguacaugcugcugccc

SEQ ID NO: 1956620 - RNA, 19 nt, Artificial Sequence
  Description of Artificial Sequence: Synthetic oligonucleotide
cuccucgccggcgaagguc

SEQ ID NO: 1956621 - RNA, 19 nt, Artificial Sequence
  Description of Artificial Sequence: Synthetic oligonucleotide
agguccagugccgcuucug

SEQ ID NO: 1956622 - RNA, 19 nt, Artificial Sequence
  Description of Artificial Sequence: Synthetic oligonucleotide
ccgcgucuuuauaucaaug

SEQ ID NO: 1956623 - RNA, 19 nt, Artificial Sequence
  Description of Artificial Sequence: Synthetic oligonucleotide
ccguagucauuucaaauua

SEQ ID NO: 1956624 - RNA, 19 nt, Artificial Sequence
  Description of Artificial Sequence: Synthetic oligonucleotide
gggcaauuugugaaggugu

SEQ ID NO: 1956625 - RNA, 19 nt, Artificial Sequence
  Description of Artificial Sequence: Synthetic oligonucleotide
uccagcccuagaggcacuc

SEQ ID NO: 1956626 - RNA, 19 nt, Artificial Sequence
  Description of Artificial Sequence: Synthetic oligonucleotide
caguaacugugacaggcau

SEQ ID NO: 1956627 - RNA, 19 nt, Artificial Sequence
  Description of Artificial Sequence: Synthetic oligonucleotide
ucgccggcgaagguccagu

SEQ ID NO: 1956628 - RNA, 19 nt, Artificial Sequence
  Description of Artificial Sequence: Synthetic oligonucleotide
uagcacugccguagucauu

SEQ ID NO: 1956629 - RNA, 19 nt, Artificial Sequence
  Description of Artificial Sequence: Synthetic oligonucleotide
cccuagaggcacucgauaa

SEQ ID NO: 1956630 - RNA, 19 nt, Artificial Sequence
  Description of Artificial Sequence: Synthetic oligonucleotide
auugaggacuagacacauu

SEQ ID NO: 1956631 - RNA, 19 nt, Artificial Sequence
  Description of Artificial Sequence: Synthetic oligonucleotide
ccguuagccaccgcuuugc

SEQ ID NO: 1956632 - RNA, 19 nt, Artificial Sequence
  Description of Artificial Sequence: Synthetic oligonucleotide
acaugggguaccgcgucuu

SEQ ID NO: 1956633 - RNA, 19 nt, Artificial Sequence
  Description of Artificial Sequence: Synthetic oligonucleotide
cuacuucuguugcuuaguu

SEQ ID NO: 1956634 - RNA, 19 nt, Artificial Sequence
  Description of Artificial Sequence: Synthetic oligonucleotide
agcccuagaggcacucgau

SEQ ID NO: 1956635 - RNA, 19 nt, Artificial Sequence
  Description of Artificial Sequence: Synthetic oligonucleotide
gccggcgaagguccagugc

SEQ ID NO: 1956636 - RNA, 19 nt, Artificial Sequence
  Description of Artificial Sequence: Synthetic oligonucleotide
gcccuggcgggacgcaagg

SEQ ID NO: 1956637 - RNA, 19 nt, Artificial Sequence
  Description of Artificial Sequence: Synthetic oligonucleotide
ccgaacagaauuccagcaa

SEQ ID NO: 1956638 - RNA, 19 nt, Artificial Sequence
  Description of Artificial Sequence: Synthetic oligonucleotide
augggguaccgcgucuuua

SEQ ID NO: 1956639 - RNA, 19 nt, Artificial Sequence
  Description of Artificial Sequence: Synthetic oligonucleotide
ccagugccgcuucuggcug

SEQ ID NO: 1956640 - RNA, 19 nt, Artificial Sequence
  Description of Artificial Sequence: Synthetic oligonucleotide
ccuagaggcacucgauaaa

SEQ ID NO: 1956641 - RNA, 19 nt, Artificial Sequence
  Description of Artificial Sequence: Synthetic oligonucleotide
ggguaccgcgucuuuauau

SEQ ID NO: 1956642 - RNA, 19 nt, Artificial Sequence
  Description of Artificial Sequence: Synthetic oligonucleotide
cugcugcccuggcgggacg

SEQ ID NO: 1956643 - RNA, 19 nt, Artificial Sequence
  Description of Artificial Sequence: Synthetic oligonucleotide
cccguuagccaccgcuuug

SEQ ID NO: 1956644 - RNA, 19 nt, Artificial Sequence
  Description of Artificial Sequence: Synthetic oligonucleotide
cucgccggcgaagguccag

SEQ ID NO: 1956645 - RNA, 19 nt, Artificial Sequence
  Description of Artificial Sequence: Synthetic oligonucleotide
gccgacacagcaacagcga

SEQ ID NO: 1956646 - RNA, 19 nt, Artificial Sequence
  Description of Artificial Sequence: Synthetic oligonucleotide
gcgcuuucuccugucccag

SEQ ID NO: 1956647 - RNA, 19 nt, Artificial Sequence
  Description of Artificial Sequence: Synthetic oligonucleotide
ggcagucagggcaauuugu

SEQ ID NO: 1956648 - RNA, 19 nt, Artificial Sequence
  Description of Artificial Sequence: Synthetic oligonucleotide
caccgcuuugcacuugaau

SEQ ID NO: 1956649 - RNA, 19 nt, Artificial Sequence
  Description of Artificial Sequence: Synthetic oligonucleotide
cucuagcgcuuucuccugu

SEQ ID NO: 1956650 - RNA, 19 nt, Artificial Sequence
  Description of Artificial Sequence: Synthetic oligonucleotide
ccaacaugggguaccgcgu

SEQ ID NO: 1956651 - RNA, 19 nt, Artificial Sequence
  Description of Artificial Sequence: Synthetic oligonucleotide
cggcgaagguccagugccg

SEQ ID NO: 1956652 - RNA, 19 nt, Artificial Sequence
  Description of Artificial Sequence: Synthetic oligonucleotide
ccagcccuagaggcacucg

SEQ ID NO: 1956653 - RNA, 19 nt, Artificial Sequence
  Description of Artificial Sequence: Synthetic oligonucleotide
gggacgcaaggccgacaca

SEQ ID NO: 1956654 - RNA, 19 nt, Artificial Sequence
  Description of Artificial Sequence: Synthetic oligonucleotide
cguagucauuucaaauuau

SEQ ID NO: 1956655 - RNA, 19 nt, Artificial Sequence
  Description of Artificial Sequence: Synthetic oligonucleotide
gggguaccgcgucuuuaua

SEQ ID NO: 1956656 - RNA, 19 nt, Artificial Sequence
  Description of Artificial Sequence: Synthetic oligonucleotide
gccuuuccucuucuucgua

SEQ ID NO: 1956657 - RNA, 19 nt, Artificial Sequence
  Description of Artificial Sequence: Synthetic oligonucleotide
gcacugccguagucauuuc

SEQ ID NO: 1956658 - RNA, 19 nt, Artificial Sequence
  Description of Artificial Sequence: Synthetic oligonucleotide
caugggguaccgcgucuuu

SEQ ID NO: 1956659 - RNA, 19 nt, Artificial Sequence
  Description of Artificial Sequence: Synthetic oligonucleotide
cagaccuggguggcucaua

SEQ ID NO: 1956660 - RNA, 19 nt, Artificial Sequence
  Description of Artificial Sequence: Synthetic oligonucleotide
ggcgggacgcaaggccgac

SEQ ID NO: 1956661 - RNA, 19 nt, Artificial Sequence
  Description of Artificial Sequence: Synthetic oligonucleotide
cccuggcgggacgcaaggc

SEQ ID NO: 1956662 - RNA, 19 nt, Artificial Sequence
  Description of Artificial Sequence: Synthetic oligonucleotide
ccuucccguuagccaccgc

SEQ ID NO: 1956663 - RNA, 19 nt, Artificial Sequence
  Description of Artificial Sequence: Synthetic oligonucleotide
cugcccuggcgggacgcaa

SEQ ID NO: 1956664 - RNA, 19 nt, Artificial Sequence
  Description of Artificial Sequence: Synthetic oligonucleotide
cccaggggacucucucgaa

SEQ ID NO: 1956665 - RNA, 19 nt, Artificial Sequence
  Description of Artificial Sequence: Synthetic oligonucleotide
cgccggcgaagguccagug

SEQ ID NO: 1956666 - RNA, 19 nt, Artificial Sequence
  Description of Artificial Sequence: Synthetic oligonucleotide
gcugcccuggcgggacgca

SEQ ID NO: 1956667 - RNA, 19 nt, Artificial Sequence
  Description of Artificial Sequence: Synthetic oligonucleotide
gcgggacgcaaggccgaca

SEQ ID NO: 1956668 - RNA, 19 nt, Artificial Sequence
  Description of Artificial Sequence: Synthetic oligonucleotide
ccaccgcuuugcacuugaa

SEQ ID NO: 1956669 - RNA, 19 nt, Artificial Sequence
  Description of Artificial Sequence: Synthetic oligonucleotide
gcuccucgccggcgaaggu

SEQ ID NO: 1956670 - RNA, 19 nt, Artificial Sequence
  Description of Artificial Sequence: Synthetic oligonucleotide
ccucgccggcgaaggucca

SEQ ID NO: 1956671 - RNA, 19 nt, Artificial Sequence
  Description of Artificial Sequence: Synthetic oligonucleotide
ccguggcauugcugguuua

SEQ ID NO: 1956672 - RNA, 19 nt, Artificial Sequence
  Description of Artificial Sequence: Synthetic oligonucleotide
ugaaaauuuaacuuaaagg

SEQ ID NO: 1956673 - RNA, 19 nt, Artificial Sequence
  Description of Artificial Sequence: Synthetic oligonucleotide
aauauagucauugacaaac

SEQ ID NO: 1956674 - RNA, 19 nt, Artificial Sequence
  Description of Artificial Sequence: Synthetic oligonucleotide
gaaaauuuaacuuaaagga

SEQ ID NO: 1956675 - RNA, 19 nt, Artificial Sequence
  Description of Artificial Sequence: Synthetic oligonucleotide
ucuuaauuuaacaagugcg

SEQ ID NO: 1956676 - RNA, 19 nt, Artificial Sequence
  Description of Artificial Sequence: Synthetic oligonucleotide
auagcuaugagaugaaacc

SEQ ID NO: 1956677 - RNA, 19 nt, Artificial Sequence
  Description of Artificial Sequence: Synthetic oligonucleotide
uuugaaaugguuuuguaag

SEQ ID NO: 1956678 - RNA, 19 nt, Artificial Sequence
  Description of Artificial Sequence: Synthetic oligonucleotide
uuacauauaagcaaccgag

SEQ ID NO: 1956679 - RNA, 19 nt, Artificial Sequence
  Description of Artificial Sequence: Synthetic oligonucleotide
aaaaucagagucguaaccc

SEQ ID NO: 1956680 - RNA, 19 nt, Artificial Sequence
  Description of Artificial Sequence: Synthetic oligonucleotide
auaaucuuaauuuaacaag

SEQ ID NO: 1956681 - RNA, 19 nt, Artificial Sequence
  Description of Artificial Sequence: Synthetic oligonucleotide
aauauaaccaaaguuaacu

SEQ ID NO: 1956682 - RNA, 19 nt, Artificial Sequence
  Description of Artificial Sequence: Synthetic oligonucleotide
uuaacuuaaaggaacauuc

SEQ ID NO: 1956683 - RNA, 19 nt, Artificial Sequence
  Description of Artificial Sequence: Synthetic oligonucleotide
cauaguacaaaauauaguc

SEQ ID NO: 1956684 - RNA, 19 nt, Artificial Sequence
  Description of Artificial Sequence: Synthetic oligonucleotide
aauaauuuaucauaguauu

SEQ ID NO: 1956685 - RNA, 19 nt, Artificial Sequence
  Description of Artificial Sequence: Synthetic oligonucleotide
aaaauauagucauugacaa

SEQ ID NO: 1956686 - RNA, 19 nt, Artificial Sequence
  Description of Artificial Sequence: Synthetic oligonucleotide
acaaaauauagucauugac

SEQ ID NO: 1956687 - RNA, 19 nt, Artificial Sequence
  Description of Artificial Sequence: Synthetic oligonucleotide
aaaucuaugguuuucucgu

SEQ ID NO: 1956688 - RNA, 19 nt, Artificial Sequence
  Description of Artificial Sequence: Synthetic oligonucleotide
aacuuauuuucuuuguauc

SEQ ID NO: 1956689 - RNA, 19 nt, Artificial Sequence
  Description of Artificial Sequence: Synthetic oligonucleotide
aaaucagagucguaacccc

SEQ ID NO: 1956690 - RNA, 19 nt, Artificial Sequence
  Description of Artificial Sequence: Synthetic oligonucleotide
agagcuccgauucugaagc

SEQ ID NO: 1956691 - RNA, 19 nt, Artificial Sequence
  Description of Artificial Sequence: Synthetic oligonucleotide
auuccauagaaaucuaugg

SEQ ID NO: 1956692 - RNA, 19 nt, Artificial Sequence
  Description of Artificial Sequence: Synthetic oligonucleotide
auaaccaaaguuaacuucc

SEQ ID NO: 1956693 - RNA, 19 nt, Artificial Sequence
  Description of Artificial Sequence: Synthetic oligonucleotide
uaaaggaacauucuugaca

SEQ ID NO: 1956694 - RNA, 19 nt, Artificial Sequence
  Description of Artificial Sequence: Synthetic oligonucleotide
gaaaucuaugguuuucucg

SEQ ID NO: 1956695 - RNA, 19 nt, Artificial Sequence
  Description of Artificial Sequence: Synthetic oligonucleotide
ucguauaacauccaagucu

SEQ ID NO: 1956696 - RNA, 19 nt, Artificial Sequence
  Description of Artificial Sequence: Synthetic oligonucleotide
uaucauucuccccuaagcg

SEQ ID NO: 1956697 - RNA, 19 nt, Artificial Sequence
  Description of Artificial Sequence: Synthetic oligonucleotide
uagucauugacaaacuuug

SEQ ID NO: 1956698 - RNA, 19 nt, Artificial Sequence
  Description of Artificial Sequence: Synthetic oligonucleotide
aaaguuaacuucccagcuc

SEQ ID NO: 1956699 - RNA, 19 nt, Artificial Sequence
  Description of Artificial Sequence: Synthetic oligonucleotide
aaaugguuuuguaagcagc

SEQ ID NO: 1956700 - RNA, 19 nt, Artificial Sequence
  Description of Artificial Sequence: Synthetic oligonucleotide
auugacaaacuuugugugc

SEQ ID NO: 1956701 - RNA, 19 nt, Artificial Sequence
  Description of Artificial Sequence: Synthetic oligonucleotide
aaaacugaccuuuuccuga

SEQ ID NO: 1956702 - RNA, 19 nt, Artificial Sequence
  Description of Artificial Sequence: Synthetic oligonucleotide
uuaugcuugauucuccacc

SEQ ID NO: 1956703 - RNA, 19 nt, Artificial Sequence
  Description of Artificial Sequence: Synthetic oligonucleotide
ucaauauaaccaaaguuaa

SEQ ID NO: 1956704 - RNA, 19 nt, Artificial Sequence
  Description of Artificial Sequence: Synthetic oligonucleotide
uaaaaucagagucguaacc

SEQ ID NO: 1956705 - RNA, 19 nt, Artificial Sequence
  Description of Artificial Sequence: Synthetic oligonucleotide
ugugaugaaaauuuaacuu

SEQ ID NO: 1956706 - RNA, 19 nt, Artificial Sequence
  Description of Artificial Sequence: Synthetic oligonucleotide
uuaucauucuccccuaagc

SEQ ID NO: 1956707 - RNA, 19 nt, Artificial Sequence
  Description of Artificial Sequence: Synthetic oligonucleotide
uuuucuauucgccaccuga

SEQ ID NO: 1956708 - RNA, 19 nt, Artificial Sequence
  Description of Artificial Sequence: Synthetic oligonucleotide
agauuuacauauaagcaac

SEQ ID NO: 1956709 - RNA, 19 nt, Artificial Sequence
  Description of Artificial Sequence: Synthetic oligonucleotide
aucauucuccccuaagcgc

SEQ ID NO: 1956710 - RNA, 19 nt, Artificial Sequence
  Description of Artificial Sequence: Synthetic oligonucleotide
caaaauauagucauugaca

SEQ ID NO: 1956711 - RNA, 19 nt, Artificial Sequence
  Description of Artificial Sequence: Synthetic oligonucleotide
uggugaaucaucauacuca

SEQ ID NO: 1956712 - RNA, 19 nt, Artificial Sequence
  Description of Artificial Sequence: Synthetic oligonucleotide
ucucguauaacauccaagu

SEQ ID NO: 1956713 - RNA, 19 nt, Artificial Sequence
  Description of Artificial Sequence: Synthetic oligonucleotide
caucacuaaaaucagaguc

SEQ ID NO: 1956714 - RNA, 19 nt, Artificial Sequence
  Description of Artificial Sequence: Synthetic oligonucleotide
uaauuuaucauaguauuuc

SEQ ID NO: 1956715 - RNA, 19 nt, Artificial Sequence
  Description of Artificial Sequence: Synthetic oligonucleotide
cucaauauaaccaaaguua

SEQ ID NO: 1956716 - RNA, 19 nt, Artificial Sequence
  Description of Artificial Sequence: Synthetic oligonucleotide
gaugcuacacaaaggaggg

SEQ ID NO: 1956717 - RNA, 19 nt, Artificial Sequence
  Description of Artificial Sequence: Synthetic oligonucleotide
ucaaucuugguuuuagccu

SEQ ID NO: 1956718 - RNA, 19 nt, Artificial Sequence
  Description of Artificial Sequence: Synthetic oligonucleotide
aaguccucccuuuugccac

SEQ ID NO: 1956719 - RNA, 19 nt, Artificial Sequence
  Description of Artificial Sequence: Synthetic oligonucleotide
uuuugaaaugguuuuguaa

SEQ ID NO: 1956720 - RNA, 19 nt, Artificial Sequence
  Description of Artificial Sequence: Synthetic oligonucleotide
uaagcaaccgagaugcuac

SEQ ID NO: 1956721 - RNA, 19 nt, Artificial Sequence
  Description of Artificial Sequence: Synthetic oligonucleotide
ucuauuucucgcuucuucc

SEQ ID NO: 1956722 - RNA, 19 nt, Artificial Sequence
  Description of Artificial Sequence: Synthetic oligonucleotide
uguuucuagaaucuuccga

SEQ ID NO: 1956723 - RNA, 19 nt, Artificial Sequence
  Description of Artificial Sequence: Synthetic oligonucleotide
accaaaguuaacuucccag

SEQ ID NO: 1956724 - RNA, 19 nt, Artificial Sequence
  Description of Artificial Sequence: Synthetic oligonucleotide
ucauucuccccuaagcgcc

SEQ ID NO: 1956725 - RNA, 19 nt, Artificial Sequence
  Description of Artificial Sequence: Synthetic oligonucleotide
guuucuagaaucuuccgac

SEQ ID NO: 1956726 - RNA, 19 nt, Artificial Sequence
  Description of Artificial Sequence: Synthetic oligonucleotide
uuugacuugacuucuuuuc

SEQ ID NO: 1956727 - RNA, 19 nt, Artificial Sequence
  Description of Artificial Sequence: Synthetic oligonucleotide
aucacuaaaaucagagucg

SEQ ID NO: 1956728 - RNA, 19 nt, Artificial Sequence
  Description of Artificial Sequence: Synthetic oligonucleotide
cuauucgccaccugaaucc

SEQ ID NO: 1956729 - RNA, 19 nt, Artificial Sequence
  Description of Artificial Sequence: Synthetic oligonucleotide
aaggagugaggcucucucc

SEQ ID NO: 1956730 - RNA, 19 nt, Artificial Sequence
  Description of Artificial Sequence: Synthetic oligonucleotide
auuuacauauaagcaaccg

SEQ ID NO: 1956731 - RNA, 19 nt, Artificial Sequence
  Description of Artificial Sequence: Synthetic oligonucleotide
ucaucuguaucucuguuuc

SEQ ID NO: 1956732 - RNA, 19 nt, Artificial Sequence
  Description of Artificial Sequence: Synthetic oligonucleotide
acuuauuuucuuuguaucu

SEQ ID NO: 1956733 - RNA, 19 nt, Artificial Sequence
  Description of Artificial Sequence: Synthetic oligonucleotide
ucugaaacagucccugagc

SEQ ID NO: 1956734 - RNA, 19 nt, Artificial Sequence
  Description of Artificial Sequence: Synthetic oligonucleotide
uuaacaagugcguuucucu

SEQ ID NO: 1956735 - RNA, 19 nt, Artificial Sequence
  Description of Artificial Sequence: Synthetic oligonucleotide
aaaccuucuauuucucgcu

SEQ ID NO: 1956736 - RNA, 19 nt, Artificial Sequence
  Description of Artificial Sequence: Synthetic oligonucleotide
cauagcuaugagaugaaac

SEQ ID NO: 1956737 - RNA, 19 nt, Artificial Sequence
  Description of Artificial Sequence: Synthetic oligonucleotide
agagcuguggacaaaacag

SEQ ID NO: 1956738 - RNA, 19 nt, Artificial Sequence
  Description of Artificial Sequence: Synthetic oligonucleotide
uucucguauaacauccaag

SEQ ID NO: 1956739 - RNA, 19 nt, Artificial Sequence
  Description of Artificial Sequence: Synthetic oligonucleotide
uuucuuauguggugaauca

SEQ ID NO: 1956740 - RNA, 19 nt, Artificial Sequence
  Description of Artificial Sequence: Synthetic oligonucleotide
guacaaaauauagucauug

SEQ ID NO: 1956741 - RNA, 19 nt, Artificial Sequence
  Description of Artificial Sequence: Synthetic oligonucleotide
accgagaugcuacacaaag

SEQ ID NO: 1956742 - RNA, 19 nt, Artificial Sequence
  Description of Artificial Sequence: Synthetic oligonucleotide
ucuacugagaucagcuaug

SEQ ID NO: 1956743 - RNA, 19 nt, Artificial Sequence
  Description of Artificial Sequence: Synthetic oligonucleotide
guuuucucguauaacaucc

SEQ ID NO: 1956744 - RNA, 19 nt, Artificial Sequence
  Description of Artificial Sequence: Synthetic oligonucleotide
uauguggugaaucaucaua

SEQ ID NO: 1956745 - RNA, 19 nt, Artificial Sequence
  Description of Artificial Sequence: Synthetic oligonucleotide
ucugucuuaucauucuccc

SEQ ID NO: 1956746 - RNA, 19 nt, Artificial Sequence
  Description of Artificial Sequence: Synthetic oligonucleotide
ugacauaaucuuaauuuaa

SEQ ID NO: 1956747 - RNA, 19 nt, Artificial Sequence
  Description of Artificial Sequence: Synthetic oligonucleotide
cauuccauagaaaucuaug

SEQ ID NO: 1956748 - RNA, 19 nt, Artificial Sequence
  Description of Artificial Sequence: Synthetic oligonucleotide
gaaacagucccugagcccc

SEQ ID NO: 1956749 - RNA, 19 nt, Artificial Sequence
  Description of Artificial Sequence: Synthetic oligonucleotide
accauaguacaaaauauag

SEQ ID NO: 1956750 - RNA, 19 nt, Artificial Sequence
  Description of Artificial Sequence: Synthetic oligonucleotide
uugacaaacuuugugugcc

SEQ ID NO: 1956751 - RNA, 19 nt, Artificial Sequence
  Description of Artificial Sequence: Synthetic oligonucleotide
cauugacaaacuuugugug

SEQ ID NO: 1956752 - RNA, 19 nt, Artificial Sequence
  Description of Artificial Sequence: Synthetic oligonucleotide
ucagcuaugcaguauuccu

SEQ ID NO: 1956753 - RNA, 19 nt, Artificial Sequence
  Description of Artificial Sequence: Synthetic oligonucleotide
uuugcaagucucuucuccc

SEQ ID NO: 1956754 - RNA, 19 nt, Artificial Sequence
  Description of Artificial Sequence: Synthetic oligonucleotide
cuuugugugccuuugauaa

SEQ ID NO: 1956755 - RNA, 19 nt, Artificial Sequence
  Description of Artificial Sequence: Synthetic oligonucleotide
aaucuuaauuuaacaagug

SEQ ID NO: 1956756 - RNA, 19 nt, Artificial Sequence
  Description of Artificial Sequence: Synthetic oligonucleotide
agugcguuucucuuuucac

SEQ ID NO: 1956757 - RNA, 19 nt, Artificial Sequence
  Description of Artificial Sequence: Synthetic oligonucleotide
ucuuuaugcuugauucucc

SEQ ID NO: 1956758 - RNA, 19 nt, Artificial Sequence
  Description of Artificial Sequence: Synthetic oligonucleotide
uuauggaccaccuuuccau

SEQ ID NO: 1956759 - RNA, 19 nt, Artificial Sequence
  Description of Artificial Sequence: Synthetic oligonucleotide
gucauugacaaacuuugug

SEQ ID NO: 1956760 - RNA, 19 nt, Artificial Sequence
  Description of Artificial Sequence: Synthetic oligonucleotide
gaugaaaccuucuauuucu

SEQ ID NO: 1956761 - RNA, 19 nt, Artificial Sequence
  Description of Artificial Sequence: Synthetic oligonucleotide
uacauauaagcaaccgaga

SEQ ID NO: 1956762 - RNA, 19 nt, Artificial Sequence
  Description of Artificial Sequence: Synthetic oligonucleotide
agcaacucaucuucgacug

SEQ ID NO: 1956763 - RNA, 19 nt, Artificial Sequence
  Description of Artificial Sequence: Synthetic oligonucleotide
cauauaagcaaccgagaug

SEQ ID NO: 1956764 - RNA, 19 nt, Artificial Sequence
  Description of Artificial Sequence: Synthetic oligonucleotide
ugcucaauauaaccaaagu

SEQ ID NO: 1956765 - RNA, 19 nt, Artificial Sequence
  Description of Artificial Sequence: Synthetic oligonucleotide
ucuauucgccaccugaauc

SEQ ID NO: 1956766 - RNA, 19 nt, Artificial Sequence
  Description of Artificial Sequence: Synthetic oligonucleotide
ugaaaugguuuuguaagca

SEQ ID NO: 1956767 - RNA, 19 nt, Artificial Sequence
  Description of Artificial Sequence: Synthetic oligonucleotide
ugcaguauuccuugaauaa

SEQ ID NO: 1956768 - RNA, 19 nt, Artificial Sequence
  Description of Artificial Sequence: Synthetic oligonucleotide
uaugcuugauucuccaccu

SEQ ID NO: 1956769 - RNA, 19 nt, Artificial Sequence
  Description of Artificial Sequence: Synthetic oligonucleotide
ugcguuucucuuuucacca

SEQ ID NO: 1956770 - RNA, 19 nt, Artificial Sequence
  Description of Artificial Sequence: Synthetic oligonucleotide
uuuucaucugucucuggca

SEQ ID NO: 1956771 - RNA, 19 nt, Artificial Sequence
  Description of Artificial Sequence: Synthetic oligonucleotide
acauucuugacauaaucuu

SEQ ID NO: 1956772 - RNA, 19 nt, Artificial Sequence
  Description of Artificial Sequence: Synthetic oligonucleotide
cugaaacagucccugagcc

SEQ ID NO: 1956773 - RNA, 19 nt, Artificial Sequence
  Description of Artificial Sequence: Synthetic oligonucleotide
ugaaaccucuguccggcgg

SEQ ID NO: 1956774 - RNA, 19 nt, Artificial Sequence
  Description of Artificial Sequence: Synthetic oligonucleotide
cuugacauaaucuuaauuu

SEQ ID NO: 1956775 - RNA, 19 nt, Artificial Sequence
  Description of Artificial Sequence: Synthetic oligonucleotide
aagucugucuuaucauucu

SEQ ID NO: 1956776 - RNA, 19 nt, Artificial Sequence
  Description of Artificial Sequence: Synthetic oligonucleotide
ugccgcaacuugcuuaugg

SEQ ID NO: 1956777 - RNA, 19 nt, Artificial Sequence
  Description of Artificial Sequence: Synthetic oligonucleotide
uaugcaguauuccuugaau

SEQ ID NO: 1956778 - RNA, 19 nt, Artificial Sequence
  Description of Artificial Sequence: Synthetic oligonucleotide
uuuaacuuaaaggaacauu

SEQ ID NO: 1956779 - RNA, 19 nt, Artificial Sequence
  Description of Artificial Sequence: Synthetic oligonucleotide
aaauauagucauugacaaa

SEQ ID NO: 1956780 - RNA, 19 nt, Artificial Sequence
  Description of Artificial Sequence: Synthetic oligonucleotide
auagaaaucuaugguuuuc

SEQ ID NO: 1956781 - RNA, 19 nt, Artificial Sequence
  Description of Artificial Sequence: Synthetic oligonucleotide
ugaauguccuucaucuuuc

SEQ ID NO: 1956782 - RNA, 19 nt, Artificial Sequence
  Description of Artificial Sequence: Synthetic oligonucleotide
aagucauaucugcuucauc

SEQ ID NO: 1956783 - RNA, 19 nt, Artificial Sequence
  Description of Artificial Sequence: Synthetic oligonucleotide
uugguuuuagccuuucuuu

SEQ ID NO: 1956784 - RNA, 19 nt, Artificial Sequence
  Description of Artificial Sequence: Synthetic oligonucleotide
ucgacugucuucuucuucu

SEQ ID NO: 1956785 - RNA, 19 nt, Artificial Sequence
  Description of Artificial Sequence: Synthetic oligonucleotide
cauggagcuucacaguacg

SEQ ID NO: 1956786 - RNA, 19 nt, Artificial Sequence
  Description of Artificial Sequence: Synthetic oligonucleotide
aagucucuucucccaaguc

SEQ ID NO: 1956787 - RNA, 19 nt, Artificial Sequence
  Description of Artificial Sequence: Synthetic oligonucleotide
uggacaaaacagauuuaca

SEQ ID NO: 1956788 - RNA, 19 nt, Artificial Sequence
  Description of Artificial Sequence: Synthetic oligonucleotide
uugaauaauuuaucauagu

SEQ ID NO: 1956789 - RNA, 19 nt, Artificial Sequence
  Description of Artificial Sequence: Synthetic oligonucleotide
agcuaugcaguauuccuug

SEQ ID NO: 1956790 - RNA, 19 nt, Artificial Sequence
  Description of Artificial Sequence: Synthetic oligonucleotide
aucagcuaugcaguauucc

SEQ ID NO: 1956791 - RNA, 19 nt, Artificial Sequence
  Description of Artificial Sequence: Synthetic oligonucleotide
auauaaccaaaguuaacuu

SEQ ID NO: 1956792 - RNA, 19 nt, Artificial Sequence
  Description of Artificial Sequence: Synthetic oligonucleotide
ucuugacauaaucuuaauu

SEQ ID NO: 1956793 - RNA, 19 nt, Artificial Sequence
  Description of Artificial Sequence: Synthetic oligonucleotide
uugcuuauggaccaccuuu

SEQ ID NO: 1956794 - RNA, 19 nt, Artificial Sequence
  Description of Artificial Sequence: Synthetic oligonucleotide
cuauuucucgcuucuuccc

SEQ ID NO: 1956795 - RNA, 19 nt, Artificial Sequence
  Description of Artificial Sequence: Synthetic oligonucleotide
uauaacauccaagucuguc

SEQ ID NO: 1956796 - RNA, 19 nt, Artificial Sequence
  Description of Artificial Sequence: Synthetic oligonucleotide
acaaguccugaaaauaauc

SEQ ID NO: 1956797 - RNA, 19 nt, Artificial Sequence
  Description of Artificial Sequence: Synthetic oligonucleotide
uugugugccuuugauaagc

SEQ ID NO: 1956798 - RNA, 19 nt, Artificial Sequence
  Description of Artificial Sequence: Synthetic oligonucleotide
cuuuguaucuacugagauc

SEQ ID NO: 1956799 - RNA, 19 nt, Artificial Sequence
  Description of Artificial Sequence: Synthetic oligonucleotide
uauuucucgcuucuucccu

SEQ ID NO: 1956800 - RNA, 19 nt, Artificial Sequence
  Description of Artificial Sequence: Synthetic oligonucleotide
aacuuugugugccuuugau

SEQ ID NO: 1956801 - RNA, 19 nt, Artificial Sequence
  Description of Artificial Sequence: Synthetic oligonucleotide
cucccuuuugccaccauag

SEQ ID NO: 1956802 - RNA, 19 nt, Artificial Sequence
  Description of Artificial Sequence: Synthetic oligonucleotide
uuucuauucgccaccugaa

SEQ ID NO: 1956803 - RNA, 19 nt, Artificial Sequence
  Description of Artificial Sequence: Synthetic oligonucleotide
uuaacuucccagcucuuua

SEQ ID NO: 1956804 - RNA, 19 nt, Artificial Sequence
  Description of Artificial Sequence: Synthetic oligonucleotide
ucaucacuaaaaucagagu

SEQ ID NO: 1956805 - RNA, 19 nt, Artificial Sequence
  Description of Artificial Sequence: Synthetic oligonucleotide
ugcucaucaucacuaaaau

SEQ ID NO: 1956806 - RNA, 19 nt, Artificial Sequence
  Description of Artificial Sequence: Synthetic oligonucleotide
uguaucuacugagaucagc

SEQ ID NO: 1956807 - RNA, 19 nt, Artificial Sequence
  Description of Artificial Sequence: Synthetic oligonucleotide
caauauaaccaaaguuaac

SEQ ID NO: 1956808 - RNA, 19 nt, Artificial Sequence
  Description of Artificial Sequence: Synthetic oligonucleotide
aagugcguuucucuuuuca

SEQ ID NO: 1956809 - RNA, 19 nt, Artificial Sequence
  Description of Artificial Sequence: Synthetic oligonucleotide
augagaugaaaccuucuau

SEQ ID NO: 1956810 - RNA, 19 nt, Artificial Sequence
  Description of Artificial Sequence: Synthetic oligonucleotide
uacucaaucuugguuuuag

SEQ ID NO: 1956811 - RNA, 19 nt, Artificial Sequence
  Description of Artificial Sequence: Synthetic oligonucleotide
ucacaguacgcuuccuucc

SEQ ID NO: 1956812 - RNA, 19 nt, Artificial Sequence
  Description of Artificial Sequence: Synthetic oligonucleotide
cuuaauuuaacaagugcgu

SEQ ID NO: 1956813 - RNA, 19 nt, Artificial Sequence
  Description of Artificial Sequence: Synthetic oligonucleotide
aucuacugagaucagcuau

SEQ ID NO: 1956814 - RNA, 19 nt, Artificial Sequence
  Description of Artificial Sequence: Synthetic oligonucleotide
uccuccucauuccauagaa

SEQ ID NO: 1956815 - RNA, 19 nt, Artificial Sequence
  Description of Artificial Sequence: Synthetic oligonucleotide
uacgcuuccuucccaagga

SEQ ID NO: 1956816 - RNA, 19 nt, Artificial Sequence
  Description of Artificial Sequence: Synthetic oligonucleotide
ucacuaaaaucagagucgu

SEQ ID NO: 1956817 - RNA, 19 nt, Artificial Sequence
  Description of Artificial Sequence: Synthetic oligonucleotide
aaccaaaguuaacuuccca

SEQ ID NO: 1956818 - RNA, 19 nt, Artificial Sequence
  Description of Artificial Sequence: Synthetic oligonucleotide
uuugccaccauaguacaaa

SEQ ID NO: 1956819 - RNA, 19 nt, Artificial Sequence
  Description of Artificial Sequence: Synthetic oligonucleotide
uagaaaucuaugguuuucu

SEQ ID NO: 1956820 - RNA, 19 nt, Artificial Sequence
  Description of Artificial Sequence: Synthetic oligonucleotide
agcucuuuaagccuucuuu

SEQ ID NO: 1956821 - RNA, 19 nt, Artificial Sequence
  Description of Artificial Sequence: Synthetic oligonucleotide
aucauacucaaucuugguu

SEQ ID NO: 1956822 - RNA, 19 nt, Artificial Sequence
  Description of Artificial Sequence: Synthetic oligonucleotide
uuucucguauaacauccaa

SEQ ID NO: 1956823 - RNA, 19 nt, Artificial Sequence
  Description of Artificial Sequence: Synthetic oligonucleotide
ugaggaugaauguccuuca

SEQ ID NO: 1956824 - RNA, 19 nt, Artificial Sequence
  Description of Artificial Sequence: Synthetic oligonucleotide
gaaucaucauacucaaucu

SEQ ID NO: 1956825 - RNA, 19 nt, Artificial Sequence
  Description of Artificial Sequence: Synthetic oligonucleotide
gucugaaacagucccugag

SEQ ID NO: 1956826 - RNA, 19 nt, Artificial Sequence
  Description of Artificial Sequence: Synthetic oligonucleotide
ugaccuuuuccugaaauua

SEQ ID NO: 1956827 - RNA, 19 nt, Artificial Sequence
  Description of Artificial Sequence: Synthetic oligonucleotide
uuuucucguauaacaucca

SEQ ID NO: 1956828 - RNA, 19 nt, Artificial Sequence
  Description of Artificial Sequence: Synthetic oligonucleotide
aucuucgacugucuucuuc

SEQ ID NO: 1956829 - RNA, 19 nt, Artificial Sequence
  Description of Artificial Sequence: Synthetic oligonucleotide
cuccgauucugaagcaucg

SEQ ID NO: 1956830 - RNA, 19 nt, Artificial Sequence
  Description of Artificial Sequence: Synthetic oligonucleotide
ugaaguccucccuuuugcc

SEQ ID NO: 1956831 - RNA, 19 nt, Artificial Sequence
  Description of Artificial Sequence: Synthetic oligonucleotide
uuugugugccuuugauaag

SEQ ID NO: 1956832 - RNA, 19 nt, Artificial Sequence
  Description of Artificial Sequence: Synthetic oligonucleotide
aggaacauucuugacauaa

SEQ ID NO: 1956833 - RNA, 19 nt, Artificial Sequence
  Description of Artificial Sequence: Synthetic oligonucleotide
aacaagugcguuucucuuu

SEQ ID NO: 1956834 - RNA, 19 nt, Artificial Sequence
  Description of Artificial Sequence: Synthetic oligonucleotide
acgggcaugcucauggagc

SEQ ID NO: 1956835 - RNA, 19 nt, Artificial Sequence
  Description of Artificial Sequence: Synthetic oligonucleotide
gaaaccucuguccggcggc

SEQ ID NO: 1956836 - RNA, 19 nt, Artificial Sequence
  Description of Artificial Sequence: Synthetic oligonucleotide
guacgcuuccuucccaagg

SEQ ID NO: 1956837 - RNA, 19 nt, Artificial Sequence
  Description of Artificial Sequence: Synthetic oligonucleotide
ucauuccauagaaaucuau

SEQ ID NO: 1956838 - RNA, 19 nt, Artificial Sequence
  Description of Artificial Sequence: Synthetic oligonucleotide
uagcuaugagaugaaaccu

SEQ ID NO: 1956839 - RNA, 19 nt, Artificial Sequence
  Description of Artificial Sequence: Synthetic oligonucleotide
gagagcuguggacaaaaca

SEQ ID NO: 1956840 - RNA, 19 nt, Artificial Sequence
  Description of Artificial Sequence: Synthetic oligonucleotide
aaacugaccuuuuccugaa

SEQ ID NO: 1956841 - RNA, 19 nt, Artificial Sequence
  Description of Artificial Sequence: Synthetic oligonucleotide
uuuaugcuugauucuccac

SEQ ID NO: 1956842 - RNA, 19 nt, Artificial Sequence
  Description of Artificial Sequence: Synthetic oligonucleotide
cuguuucuagaaucuuccg

SEQ ID NO: 1956843 - RNA, 19 nt, Artificial Sequence
  Description of Artificial Sequence: Synthetic oligonucleotide
gugcguuucucuuuucacc

SEQ ID NO: 1956844 - RNA, 19 nt, Artificial Sequence
  Description of Artificial Sequence: Synthetic oligonucleotide
ugcuuauggaccaccuuuc

SEQ ID NO: 1956845 - RNA, 19 nt, Artificial Sequence
  Description of Artificial Sequence: Synthetic oligonucleotide
uaugguuuucucguauaac

SEQ ID NO: 1956846 - RNA, 19 nt, Artificial Sequence
  Description of Artificial Sequence: Synthetic oligonucleotide
uauggaccaccuuuccaug

SEQ ID NO: 1956847 - RNA, 19 nt, Artificial Sequence
  Description of Artificial Sequence: Synthetic oligonucleotide
agcauccauagcuaugaga

SEQ ID NO: 1956848 - RNA, 19 nt, Artificial Sequence
  Description of Artificial Sequence: Synthetic oligonucleotide
accaugcucaauauaacca

SEQ ID NO: 1956849 - RNA, 19 nt, Artificial Sequence
  Description of Artificial Sequence: Synthetic oligonucleotide
uucccaaggagugaggcuc

SEQ ID NO: 1956850 - RNA, 19 nt, Artificial Sequence
  Description of Artificial Sequence: Synthetic oligonucleotide
ucauggagcuucacaguac

SEQ ID NO: 1956851 - RNA, 19 nt, Artificial Sequence
  Description of Artificial Sequence: Synthetic oligonucleotide
uguggugaaucaucauacu

SEQ ID NO: 1956852 - RNA, 19 nt, Artificial Sequence
  Description of Artificial Sequence: Synthetic oligonucleotide
uuuucaucacaacguuuau

SEQ ID NO: 1956853 - RNA, 19 nt, Artificial Sequence
  Description of Artificial Sequence: Synthetic oligonucleotide
uggagcuucacaguacgcu

SEQ ID NO: 1956854 - RNA, 19 nt, Artificial Sequence
  Description of Artificial Sequence: Synthetic oligonucleotide
ugacuugacuucuuuucuc

SEQ ID NO: 1956855 - RNA, 19 nt, Artificial Sequence
  Description of Artificial Sequence: Synthetic oligonucleotide
acugaccuuuuccugaaau

SEQ ID NO: 1956856 - RNA, 19 nt, Artificial Sequence
  Description of Artificial Sequence: Synthetic oligonucleotide
aacaaguccugaaaauaau

SEQ ID NO: 1956857 - RNA, 19 nt, Artificial Sequence
  Description of Artificial Sequence: Synthetic oligonucleotide
ucuggcaggggacccuucc

SEQ ID NO: 1956858 - RNA, 19 nt, Artificial Sequence
  Description of Artificial Sequence: Synthetic oligonucleotide
ucuaugguuuucucguaua

SEQ ID NO: 1956859 - RNA, 19 nt, Artificial Sequence
  Description of Artificial Sequence: Synthetic oligonucleotide
auuucucgcuucuucccug

SEQ ID NO: 1956860 - RNA, 19 nt, Artificial Sequence
  Description of Artificial Sequence: Synthetic oligonucleotide
aucacaacguuuauuucca

SEQ ID NO: 1956861 - RNA, 19 nt, Artificial Sequence
  Description of Artificial Sequence: Synthetic oligonucleotide
augcucaauauaaccaaag

SEQ ID NO: 1956862 - RNA, 19 nt, Artificial Sequence
  Description of Artificial Sequence: Synthetic oligonucleotide
aaucuaugguuuucucgua

SEQ ID NO: 1956863 - RNA, 19 nt, Artificial Sequence
  Description of Artificial Sequence: Synthetic oligonucleotide
cugugaugaaaauuuaacu

SEQ ID NO: 1956864 - RNA, 19 nt, Artificial Sequence
  Description of Artificial Sequence: Synthetic oligonucleotide
ucaucacaacguuuauuuc

SEQ ID NO: 1956865 - RNA, 19 nt, Artificial Sequence
  Description of Artificial Sequence: Synthetic oligonucleotide
ucugccgcaacuugcuuau

SEQ ID NO: 1956866 - RNA, 19 nt, Artificial Sequence
  Description of Artificial Sequence: Synthetic oligonucleotide
cagagcuccgauucugaag

SEQ ID NO: 1956867 - RNA, 19 nt, Artificial Sequence
  Description of Artificial Sequence: Synthetic oligonucleotide
cucguauaacauccaaguc

SEQ ID NO: 1956868 - RNA, 19 nt, Artificial Sequence
  Description of Artificial Sequence: Synthetic oligonucleotide
uaacaagugcguuucucuu

SEQ ID NO: 1956869 - RNA, 19 nt, Artificial Sequence
  Description of Artificial Sequence: Synthetic oligonucleotide
uggcaggggacccuuccag

SEQ ID NO: 1956870 - RNA, 19 nt, Artificial Sequence
  Description of Artificial Sequence: Synthetic oligonucleotide
cacaguacgcuuccuuccc

SEQ ID NO: 1956871 - RNA, 19 nt, Artificial Sequence
  Description of Artificial Sequence: Synthetic oligonucleotide
uugcaagucucuucuccca

SEQ ID NO: 1956872 - RNA, 19 nt, Artificial Sequence
  Description of Artificial Sequence: Synthetic oligonucleotide
uucuauucgccaccugaau

SEQ ID NO: 1956873 - RNA, 19 nt, Artificial Sequence
  Description of Artificial Sequence: Synthetic oligonucleotide
caaacuuugugugccuuug

SEQ ID NO: 1956874 - RNA, 19 nt, Artificial Sequence
  Description of Artificial Sequence: Synthetic oligonucleotide
aucuaugguuuucucguau

SEQ ID NO: 1956875 - RNA, 19 nt, Artificial Sequence
  Description of Artificial Sequence: Synthetic oligonucleotide
uucgccaccugaauccaaa

SEQ ID NO: 1956876 - RNA, 19 nt, Artificial Sequence
  Description of Artificial Sequence: Synthetic oligonucleotide
cauucuugacauaaucuua

SEQ ID NO: 1956877 - RNA, 19 nt, Artificial Sequence
  Description of Artificial Sequence: Synthetic oligonucleotide
auaagcauccauagcuaug

SEQ ID NO: 1956878 - RNA, 19 nt, Artificial Sequence
  Description of Artificial Sequence: Synthetic oligonucleotide
acuuugugugccuuugaua

SEQ ID NO: 1956879 - RNA, 19 nt, Artificial Sequence
  Description of Artificial Sequence: Synthetic oligonucleotide
cuacugagaucagcuaugc

SEQ ID NO: 1956880 - RNA, 19 nt, Artificial Sequence
  Description of Artificial Sequence: Synthetic oligonucleotide
ggacaaaacagauuuacau

SEQ ID NO: 1956881 - RNA, 19 nt, Artificial Sequence
  Description of Artificial Sequence: Synthetic oligonucleotide
ucauccuccucauuccaua

SEQ ID NO: 1956882 - RNA, 19 nt, Artificial Sequence
  Description of Artificial Sequence: Synthetic oligonucleotide
uguggacaaaacagauuua

SEQ ID NO: 1956883 - RNA, 19 nt, Artificial Sequence
  Description of Artificial Sequence: Synthetic oligonucleotide
uaucuacugagaucagcua

SEQ ID NO: 1956884 - RNA, 19 nt, Artificial Sequence
  Description of Artificial Sequence: Synthetic oligonucleotide
uucgacugucuucuucuuc

SEQ ID NO: 1956885 - RNA, 19 nt, Artificial Sequence
  Description of Artificial Sequence: Synthetic oligonucleotide
ugcaagucucuucucccaa

SEQ ID NO: 1956886 - RNA, 19 nt, Artificial Sequence
  Description of Artificial Sequence: Synthetic oligonucleotide
aguacgcuuccuucccaag

SEQ ID NO: 1956887 - RNA, 19 nt, Artificial Sequence
  Description of Artificial Sequence: Synthetic oligonucleotide
aucucuguuucuagaaucu

SEQ ID NO: 1956888 - RNA, 19 nt, Artificial Sequence
  Description of Artificial Sequence: Synthetic oligonucleotide
uuuugccaccauaguacaa

SEQ ID NO: 1956889 - RNA, 19 nt, Artificial Sequence
  Description of Artificial Sequence: Synthetic oligonucleotide
ugucugaaacagucccuga

SEQ ID NO: 1956890 - RNA, 19 nt, Artificial Sequence
  Description of Artificial Sequence: Synthetic oligonucleotide
aagcagcaacucaucuucg

SEQ ID NO: 1956891 - RNA, 19 nt, Artificial Sequence
  Description of Artificial Sequence: Synthetic oligonucleotide
gugucugaaacagucccug

SEQ ID NO: 1956892 - RNA, 19 nt, Artificial Sequence
  Description of Artificial Sequence: Synthetic oligonucleotide
guaucuacugagaucagcu

SEQ ID NO: 1956893 - RNA, 19 nt, Artificial Sequence
  Description of Artificial Sequence: Synthetic oligonucleotide
gauaagcauccauagcuau

SEQ ID NO: 1956894 - RNA, 19 nt, Artificial Sequence
  Description of Artificial Sequence: Synthetic oligonucleotide
uuauguggugaaucaucau

SEQ ID NO: 1956895 - RNA, 19 nt, Artificial Sequence
  Description of Artificial Sequence: Synthetic oligonucleotide
cacaacguuuauuuccaca

SEQ ID NO: 1956896 - RNA, 19 nt, Artificial Sequence
  Description of Artificial Sequence: Synthetic oligonucleotide
uccauagcuaugagaugaa

SEQ ID NO: 1956897 - RNA, 19 nt, Artificial Sequence
  Description of Artificial Sequence: Synthetic oligonucleotide
ucgucuuccucaucuguau

SEQ ID NO: 1956898 - RNA, 19 nt, Artificial Sequence
  Description of Artificial Sequence: Synthetic oligonucleotide
aagcaaccgagaugcuaca

SEQ ID NO: 1956899 - RNA, 19 nt, Artificial Sequence
  Description of Artificial Sequence: Synthetic oligonucleotide
auauagucauugacaaacu

SEQ ID NO: 1956900 - RNA, 19 nt, Artificial Sequence
  Description of Artificial Sequence: Synthetic oligonucleotide
ucccaagucauaucugcuu

SEQ ID NO: 1956901 - RNA, 19 nt, Artificial Sequence
  Description of Artificial Sequence: Synthetic oligonucleotide
cuuauggaccaccuuucca

SEQ ID NO: 1956902 - RNA, 19 nt, Artificial Sequence
  Description of Artificial Sequence: Synthetic oligonucleotide
agcagcaacucaucuucga

SEQ ID NO: 1956903 - RNA, 19 nt, Artificial Sequence
  Description of Artificial Sequence: Synthetic oligonucleotide
ugaagaagauuuggauuuc

SEQ ID NO: 1956904 - RNA, 19 nt, Artificial Sequence
  Description of Artificial Sequence: Synthetic oligonucleotide
caccauaguacaaaauaua

SEQ ID NO: 1956905 - RNA, 19 nt, Artificial Sequence
  Description of Artificial Sequence: Synthetic oligonucleotide
augaaaccuucuauuucuc

SEQ ID NO: 1956906 - RNA, 19 nt, Artificial Sequence
  Description of Artificial Sequence: Synthetic oligonucleotide
agacccaacagcacgggca

SEQ ID NO: 1956907 - RNA, 19 nt, Artificial Sequence
  Description of Artificial Sequence: Synthetic oligonucleotide
ggugaaucaucauacucaa

SEQ ID NO: 1956908 - RNA, 19 nt, Artificial Sequence
  Description of Artificial Sequence: Synthetic oligonucleotide
gcaacuugcuuauggacca

SEQ ID NO: 1956909 - RNA, 19 nt, Artificial Sequence
  Description of Artificial Sequence: Synthetic oligonucleotide
gagugaggcucucucccug

SEQ ID NO: 1956910 - RNA, 19 nt, Artificial Sequence
  Description of Artificial Sequence: Synthetic oligonucleotide
caaacuuauuuucuuugua

SEQ ID NO: 1956911 - RNA, 19 nt, Artificial Sequence
  Description of Artificial Sequence: Synthetic oligonucleotide
caaccgagaugcuacacaa

SEQ ID NO: 1956912 - RNA, 19 nt, Artificial Sequence
  Description of Artificial Sequence: Synthetic oligonucleotide
ugacuucuuuucuccugug

SEQ ID NO: 1956913 - RNA, 19 nt, Artificial Sequence
  Description of Artificial Sequence: Synthetic oligonucleotide
caacucaucuucgacuguc

SEQ ID NO: 1956914 - RNA, 19 nt, Artificial Sequence
  Description of Artificial Sequence: Synthetic oligonucleotide
acaaacuuugugugccuuu

SEQ ID NO: 1956915 - RNA, 19 nt, Artificial Sequence
  Description of Artificial Sequence: Synthetic oligonucleotide
auaagcaaccgagaugcua

SEQ ID NO: 1956916 - RNA, 19 nt, Artificial Sequence
  Description of Artificial Sequence: Synthetic oligonucleotide
agcaaccgagaugcuacac

SEQ ID NO: 1956917 - RNA, 19 nt, Artificial Sequence
  Description of Artificial Sequence: Synthetic oligonucleotide
cgcaacuugcuuauggacc

SEQ ID NO: 1956918 - RNA, 19 nt, Artificial Sequence
  Description of Artificial Sequence: Synthetic oligonucleotide
uugccaccauaguacaaaa

SEQ ID NO: 1956919 - RNA, 19 nt, Artificial Sequence
  Description of Artificial Sequence: Synthetic oligonucleotide
uucuuauguggugaaucau

SEQ ID NO: 1956920 - RNA, 19 nt, Artificial Sequence
  Description of Artificial Sequence: Synthetic oligonucleotide
caaaguuaacuucccagcu

SEQ ID NO: 1956921 - RNA, 19 nt, Artificial Sequence
  Description of Artificial Sequence: Synthetic oligonucleotide
uauucgccaccugaaucca

SEQ ID NO: 1956922 - RNA, 19 nt, Artificial Sequence
  Description of Artificial Sequence: Synthetic oligonucleotide
aacucaucuucgacugucu

SEQ ID NO: 1956923 - RNA, 19 nt, Artificial Sequence
  Description of Artificial Sequence: Synthetic oligonucleotide
aucuguaucucuguuucua

SEQ ID NO: 1956924 - RNA, 19 nt, Artificial Sequence
  Description of Artificial Sequence: Synthetic oligonucleotide
cuucucccaagucauaucu

SEQ ID NO: 1956925 - RNA, 19 nt, Artificial Sequence
  Description of Artificial Sequence: Synthetic oligonucleotide
gagcuguggacaaaacaga

SEQ ID NO: 1956926 - RNA, 19 nt, Artificial Sequence
  Description of Artificial Sequence: Synthetic oligonucleotide
auggagcuucacaguacgc

SEQ ID NO: 1956927 - RNA, 19 nt, Artificial Sequence
  Description of Artificial Sequence: Synthetic oligonucleotide
aguacaaaauauagucauu

SEQ ID NO: 1956928 - RNA, 19 nt, Artificial Sequence
  Description of Artificial Sequence: Synthetic oligonucleotide
cugcgcagacccaacagca

SEQ ID NO: 1956929 - RNA, 19 nt, Artificial Sequence
  Description of Artificial Sequence: Synthetic oligonucleotide
cucauggagcuucacagua

SEQ ID NO: 1956930 - RNA, 19 nt, Artificial Sequence
  Description of Artificial Sequence: Synthetic oligonucleotide
ucacaacguuuauuuccac

SEQ ID NO: 1956931 - RNA, 19 nt, Artificial Sequence
  Description of Artificial Sequence: Synthetic oligonucleotide
cugaaaccucuguccggcg

SEQ ID NO: 1956932 - RNA, 19 nt, Artificial Sequence
  Description of Artificial Sequence: Synthetic oligonucleotide
gcgcagacccaacagcacg

SEQ ID NO: 1956933 - RNA, 19 nt, Artificial Sequence
  Description of Artificial Sequence: Synthetic oligonucleotide
ugccaccauaguacaaaau

SEQ ID NO: 1956934 - RNA, 19 nt, Artificial Sequence
  Description of Artificial Sequence: Synthetic oligonucleotide
acgcuuccuucccaaggag

SEQ ID NO: 1956935 - RNA, 19 nt, Artificial Sequence
  Description of Artificial Sequence: Synthetic oligonucleotide
agcuaugagaugaaaccuu

SEQ ID NO: 1956936 - RNA, 19 nt, Artificial Sequence
  Description of Artificial Sequence: Synthetic oligonucleotide
uggaccaccuuuccauguu

SEQ ID NO: 1956937 - RNA, 19 nt, Artificial Sequence
  Description of Artificial Sequence: Synthetic oligonucleotide
acaguacgcuuccuuccca

SEQ ID NO: 1956938 - RNA, 19 nt, Artificial Sequence
  Description of Artificial Sequence: Synthetic oligonucleotide
agcuguggacaaaacagau

SEQ ID NO: 1956939 - RNA, 19 nt, Artificial Sequence
  Description of Artificial Sequence: Synthetic oligonucleotide
gaucagcuaugcaguauuc

SEQ ID NO: 1956940 - RNA, 19 nt, Artificial Sequence
  Description of Artificial Sequence: Synthetic oligonucleotide
cacgggcaugcucauggag

SEQ ID NO: 1956941 - RNA, 19 nt, Artificial Sequence
  Description of Artificial Sequence: Synthetic oligonucleotide
gcuacacaaaggagggagg

SEQ ID NO: 1956942 - RNA, 19 nt, Artificial Sequence
  Description of Artificial Sequence: Synthetic oligonucleotide
cuuggcagccucugaagaa

SEQ ID NO: 1956943 - RNA, 19 nt, Artificial Sequence
  Description of Artificial Sequence: Synthetic oligonucleotide
agcgccugaaguccucccu

SEQ ID NO: 1956944 - RNA, 19 nt, Artificial Sequence
  Description of Artificial Sequence: Synthetic oligonucleotide
gcuuccuucccaaggagug

SEQ ID NO: 1956945 - RNA, 19 nt, Artificial Sequence
  Description of Artificial Sequence: Synthetic oligonucleotide
gcuuauggaccaccuuucc

SEQ ID NO: 1956946 - RNA, 19 nt, Artificial Sequence
  Description of Artificial Sequence: Synthetic oligonucleotide
acuugcuuauggaccaccu

SEQ ID NO: 1956947 - RNA, 19 nt, Artificial Sequence
  Description of Artificial Sequence: Synthetic oligonucleotide
gcagcaacucaucuucgac

SEQ ID NO: 1956948 - RNA, 19 nt, Artificial Sequence
  Description of Artificial Sequence: Synthetic oligonucleotide
cuaugcaguauuccuugaa

SEQ ID NO: 1956949 - RNA, 19 nt, Artificial Sequence
  Description of Artificial Sequence: Synthetic oligonucleotide
caaucuugguuuuagccuu

SEQ ID NO: 1956950 - RNA, 19 nt, Artificial Sequence
  Description of Artificial Sequence: Synthetic oligonucleotide
gaagaagauuuggauuucu

SEQ ID NO: 1956951 - RNA, 19 nt, Artificial Sequence
  Description of Artificial Sequence: Synthetic oligonucleotide
agucauugacaaacuuugu

SEQ ID NO: 1956952 - RNA, 19 nt, Artificial Sequence
  Description of Artificial Sequence: Synthetic oligonucleotide
gcucaauauaaccaaaguu

SEQ ID NO: 1956953 - RNA, 19 nt, Artificial Sequence
  Description of Artificial Sequence: Synthetic oligonucleotide
caggggacccuuccagagc

SEQ ID NO: 1956954 - RNA, 19 nt, Artificial Sequence
  Description of Artificial Sequence: Synthetic oligonucleotide
cugaauccaaacuuauuuu

SEQ ID NO: 1956955 - RNA, 19 nt, Artificial Sequence
  Description of Artificial Sequence: Synthetic oligonucleotide
accuugcucaucaucacua

SEQ ID NO: 1956956 - RNA, 19 nt, Artificial Sequence
  Description of Artificial Sequence: Synthetic oligonucleotide
aaaccucuguccggcggcu

SEQ ID NO: 1956957 - RNA, 19 nt, Artificial Sequence
  Description of Artificial Sequence: Synthetic oligonucleotide
gcuaugagaugaaaccuuc

SEQ ID NO: 1956958 - RNA, 19 nt, Artificial Sequence
  Description of Artificial Sequence: Synthetic oligonucleotide
cagacccaacagcacgggc

SEQ ID NO: 1956959 - RNA, 19 nt, Artificial Sequence
  Description of Artificial Sequence: Synthetic oligonucleotide
ccuuugauaagcauccaua

SEQ ID NO: 1956960 - RNA, 19 nt, Artificial Sequence
  Description of Artificial Sequence: Synthetic oligonucleotide
gaagcaucgucuuccucau

SEQ ID NO: 1956961 - RNA, 19 nt, Artificial Sequence
  Description of Artificial Sequence: Synthetic oligonucleotide
caguauuccuugaauaauu

SEQ ID NO: 1956962 - RNA, 19 nt, Artificial Sequence
  Description of Artificial Sequence: Synthetic oligonucleotide
gcaaccgagaugcuacaca

SEQ ID NO: 1956963 - RNA, 19 nt, Artificial Sequence
  Description of Artificial Sequence: Synthetic oligonucleotide
ccccugaaaccucuguccg

SEQ ID NO: 1956964 - RNA, 19 nt, Artificial Sequence
  Description of Artificial Sequence: Synthetic oligonucleotide
cuugcucaucaucacuaaa

SEQ ID NO: 1956965 - RNA, 19 nt, Artificial Sequence
  Description of Artificial Sequence: Synthetic oligonucleotide
cccaagucauaucugcuuc

SEQ ID NO: 1956966 - RNA, 19 nt, Artificial Sequence
  Description of Artificial Sequence: Synthetic oligonucleotide
ucgcuucuucccuguccag

SEQ ID NO: 1956967 - RNA, 19 nt, Artificial Sequence
  Description of Artificial Sequence: Synthetic oligonucleotide
cagcaacucaucuucgacu

SEQ ID NO: 1956968 - RNA, 19 nt, Artificial Sequence
  Description of Artificial Sequence: Synthetic oligonucleotide
cuccccuaagcgccugaag

SEQ ID NO: 1956969 - RNA, 19 nt, Artificial Sequence
  Description of Artificial Sequence: Synthetic oligonucleotide
gagggaggaagugucugaa

SEQ ID NO: 1956970 - RNA, 19 nt, Artificial Sequence
  Description of Artificial Sequence: Synthetic oligonucleotide
cuaugagaugaaaccuucu

SEQ ID NO: 1956971 - RNA, 19 nt, Artificial Sequence
  Description of Artificial Sequence: Synthetic oligonucleotide
gucugccgcaacuugcuua

SEQ ID NO: 1956972 - RNA, 19 nt, Artificial Sequence
  Description of Artificial Sequence: Synthetic oligonucleotide
uguccggcggcugcgcaga

SEQ ID NO: 1956973 - RNA, 19 nt, Artificial Sequence
  Description of Artificial Sequence: Synthetic oligonucleotide
caucauacucaaucuuggu

SEQ ID NO: 1956974 - RNA, 19 nt, Artificial Sequence
  Description of Artificial Sequence: Synthetic oligonucleotide
aucgucuuccucaucugua

SEQ ID NO: 1956975 - RNA, 19 nt, Artificial Sequence
  Description of Artificial Sequence: Synthetic oligonucleotide
ccuucccaaggagugaggc

SEQ ID NO: 1956976 - RNA, 19 nt, Artificial Sequence
  Description of Artificial Sequence: Synthetic oligonucleotide
aaccgagaugcuacacaaa

SEQ ID NO: 1956977 - RNA, 19 nt, Artificial Sequence
  Description of Artificial Sequence: Synthetic oligonucleotide
ccgauucugaagcaucguc

SEQ ID NO: 1956978 - RNA, 19 nt, Artificial Sequence
  Description of Artificial Sequence: Synthetic oligonucleotide
ugccuuugauaagcaucca

SEQ ID NO: 1956979 - RNA, 19 nt, Artificial Sequence
  Description of Artificial Sequence: Synthetic oligonucleotide
aggucugccgcaacuugcu

SEQ ID NO: 1956980 - RNA, 19 nt, Artificial Sequence
  Description of Artificial Sequence: Synthetic oligonucleotide
cccuaagcgccugaagucc

SEQ ID NO: 1956981 - RNA, 19 nt, Artificial Sequence
  Description of Artificial Sequence: Synthetic oligonucleotide
ccugcucacagaaacaagu

SEQ ID NO: 1956982 - RNA, 19 nt, Artificial Sequence
  Description of Artificial Sequence: Synthetic oligonucleotide
ccauaguacaaaauauagu

SEQ ID NO: 1956983 - RNA, 19 nt, Artificial Sequence
  Description of Artificial Sequence: Synthetic oligonucleotide
ccgcaacuugcuuauggac

SEQ ID NO: 1956984 - RNA, 19 nt, Artificial Sequence
  Description of Artificial Sequence: Synthetic oligonucleotide
caaaggagggaggaagugu

SEQ ID NO: 1956985 - RNA, 19 nt, Artificial Sequence
  Description of Artificial Sequence: Synthetic oligonucleotide
agcuccgauucugaagcau

SEQ ID NO: 1956986 - RNA, 19 nt, Artificial Sequence
  Description of Artificial Sequence: Synthetic oligonucleotide
cgcagacccaacagcacgg

SEQ ID NO: 1956987 - RNA, 19 nt, Artificial Sequence
  Description of Artificial Sequence: Synthetic oligonucleotide
cauacucaaucuugguuuu

SEQ ID NO: 1956988 - RNA, 19 nt, Artificial Sequence
  Description of Artificial Sequence: Synthetic oligonucleotide
ccggcggcugcgcagaccc

SEQ ID NO: 1956989 - RNA, 19 nt, Artificial Sequence
  Description of Artificial Sequence: Synthetic oligonucleotide
gccgcaacuugcuuaugga

SEQ ID NO: 1956990 - RNA, 19 nt, Artificial Sequence
  Description of Artificial Sequence: Synthetic oligonucleotide
ccauagaaaucuaugguuu

SEQ ID NO: 1956991 - RNA, 19 nt, Artificial Sequence
  Description of Artificial Sequence: Synthetic oligonucleotide
aaccucuguccggcggcug

SEQ ID NO: 1956992 - RNA, 19 nt, Artificial Sequence
  Description of Artificial Sequence: Synthetic oligonucleotide
ucuccccuaagcgccugaa

SEQ ID NO: 1956993 - RNA, 19 nt, Artificial Sequence
  Description of Artificial Sequence: Synthetic oligonucleotide
gaggaugaauguccuucau

SEQ ID NO: 1956994 - RNA, 19 nt, Artificial Sequence
  Description of Artificial Sequence: Synthetic oligonucleotide
gcucuuuaagccuucuuuu

SEQ ID NO: 1956995 - RNA, 19 nt, Artificial Sequence
  Description of Artificial Sequence: Synthetic oligonucleotide
cuuccuucccaaggaguga

SEQ ID NO: 1956996 - RNA, 19 nt, Artificial Sequence
  Description of Artificial Sequence: Synthetic oligonucleotide
caguacgcuuccuucccaa

SEQ ID NO: 1956997 - RNA, 19 nt, Artificial Sequence
  Description of Artificial Sequence: Synthetic oligonucleotide
ccccuaagcgccugaaguc

SEQ ID NO: 1956998 - RNA, 19 nt, Artificial Sequence
  Description of Artificial Sequence: Synthetic oligonucleotide
cuucccaaggagugaggcu

SEQ ID NO: 1956999 - RNA, 19 nt, Artificial Sequence
  Description of Artificial Sequence: Synthetic oligonucleotide
gcuaugcaguauuccuuga

SEQ ID NO: 1957000 - RNA, 19 nt, Artificial Sequence
  Description of Artificial Sequence: Synthetic oligonucleotide
auacucaaucuugguuuua

SEQ ID NO: 1957001 - RNA, 19 nt, Artificial Sequence
  Description of Artificial Sequence: Synthetic oligonucleotide
ccaaacuuauuuucuuugu

SEQ ID NO: 1957002 - RNA, 19 nt, Artificial Sequence
  Description of Artificial Sequence: Synthetic oligonucleotide
ccaagucauaucugcuuca

SEQ ID NO: 1957003 - RNA, 19 nt, Artificial Sequence
  Description of Artificial Sequence: Synthetic oligonucleotide
gcuccgauucugaagcauc

SEQ ID NO: 1957004 - RNA, 19 nt, Artificial Sequence
  Description of Artificial Sequence: Synthetic oligonucleotide
gagaucagcuaugcaguau

SEQ ID NO: 1957005 - RNA, 19 nt, Artificial Sequence
  Description of Artificial Sequence: Synthetic oligonucleotide
gcagacccaacagcacggg

SEQ ID NO: 1957006 - RNA, 19 nt, Artificial Sequence
  Description of Artificial Sequence: Synthetic oligonucleotide
cuagaaucuuccgaccuuu

SEQ ID NO: 1957007 - RNA, 19 nt, Artificial Sequence
  Description of Artificial Sequence: Synthetic oligonucleotide
guuaacuucccagcucuuu

SEQ ID NO: 1957008 - RNA, 19 nt, Artificial Sequence
  Description of Artificial Sequence: Synthetic oligonucleotide
cacuaaaaucagagucgua

SEQ ID NO: 1957009 - RNA, 19 nt, Artificial Sequence
  Description of Artificial Sequence: Synthetic oligonucleotide
gacaaacuuugugugccuu

SEQ ID NO: 1957010 - RNA, 19 nt, Artificial Sequence
  Description of Artificial Sequence: Synthetic oligonucleotide
cuucacaguacgcuuccuu

SEQ ID NO: 1957011 - RNA, 19 nt, Artificial Sequence
  Description of Artificial Sequence: Synthetic oligonucleotide
ggagcuucacaguacgcuu

SEQ ID NO: 1957012 - RNA, 19 nt, Artificial Sequence
  Description of Artificial Sequence: Synthetic oligonucleotide
cagcuaugcaguauuccuu

SEQ ID NO: 1957013 - RNA, 19 nt, Artificial Sequence
  Description of Artificial Sequence: Synthetic oligonucleotide
ccuuggcagccucugaaga

SEQ ID NO: 1957014 - RNA, 19 nt, Artificial Sequence
  Description of Artificial Sequence: Synthetic oligonucleotide
ggagagcuguggacaaaac

SEQ ID NO: 1957015 - RNA, 19 nt, Artificial Sequence
  Description of Artificial Sequence: Synthetic oligonucleotide
caccuugcucaucaucacu

SEQ ID NO: 1957016 - RNA, 19 nt, Artificial Sequence
  Description of Artificial Sequence: Synthetic oligonucleotide
aguuaacuucccagcucuu

SEQ ID NO: 1957017 - RNA, 19 nt, Artificial Sequence
  Description of Artificial Sequence: Synthetic oligonucleotide
gcaguauuccuugaauaau

SEQ ID NO: 1957018 - RNA, 19 nt, Artificial Sequence
  Description of Artificial Sequence: Synthetic oligonucleotide
cgauucugaagcaucgucu

SEQ ID NO: 1957019 - RNA, 19 nt, Artificial Sequence
  Description of Artificial Sequence: Synthetic oligonucleotide
uccggcggcugcgcagacc

SEQ ID NO: 1957020 - RNA, 19 nt, Artificial Sequence
  Description of Artificial Sequence: Synthetic oligonucleotide
gccuuugauaagcauccau

SEQ ID NO: 1957021 - RNA, 19 nt, Artificial Sequence
  Description of Artificial Sequence: Synthetic oligonucleotide
cucuggcaggggacccuuc

SEQ ID NO: 1957022 - RNA, 19 nt, Artificial Sequence
  Description of Artificial Sequence: Synthetic oligonucleotide
uccucccuuuugccaccau

SEQ ID NO: 1957023 - RNA, 19 nt, Artificial Sequence
  Description of Artificial Sequence: Synthetic oligonucleotide
auucgccaccugaauccaa

SEQ ID NO: 1957024 - RNA, 19 nt, Artificial Sequence
  Description of Artificial Sequence: Synthetic oligonucleotide
guauaacauccaagucugu

SEQ ID NO: 1957025 - RNA, 19 nt, Artificial Sequence
  Description of Artificial Sequence: Synthetic oligonucleotide
ggagugaggcucucucccu

SEQ ID NO: 1957026 - RNA, 19 nt, Artificial Sequence
  Description of Artificial Sequence: Synthetic oligonucleotide
ccuugcucaucaucacuaa

SEQ ID NO: 1957027 - RNA, 19 nt, Artificial Sequence
  Description of Artificial Sequence: Synthetic oligonucleotide
cagcaggucugccgcaacu

SEQ ID NO: 1957028 - RNA, 19 nt, Artificial Sequence
  Description of Artificial Sequence: Synthetic oligonucleotide
ccucuguccggcggcugcg

SEQ ID NO: 1957029 - RNA, 19 nt, Artificial Sequence
  Description of Artificial Sequence: Synthetic oligonucleotide
gcaacucaucuucgacugu

SEQ ID NO: 1957030 - RNA, 19 nt, Artificial Sequence
  Description of Artificial Sequence: Synthetic oligonucleotide
gcuguggacaaaacagauu

SEQ ID NO: 1957031 - RNA, 19 nt, Artificial Sequence
  Description of Artificial Sequence: Synthetic oligonucleotide
ccauagcuaugagaugaaa

SEQ ID NO: 1957032 - RNA, 19 nt, Artificial Sequence
  Description of Artificial Sequence: Synthetic oligonucleotide
cugccgcaacuugcuuaug

SEQ ID NO: 1957033 - RNA, 19 nt, Artificial Sequence
  Description of Artificial Sequence: Synthetic oligonucleotide
ccuaagcgccugaaguccu

SEQ ID NO: 1957034 - RNA, 19 nt, Artificial Sequence
  Description of Artificial Sequence: Synthetic oligonucleotide
ggcucucucccugcucaca

SEQ ID NO: 1957035 - RNA, 19 nt, Artificial Sequence
  Description of Artificial Sequence: Synthetic oligonucleotide
ccucccuuuugccaccaua

SEQ ID NO: 1957036 - RNA, 19 nt, Artificial Sequence
  Description of Artificial Sequence: Synthetic oligonucleotide
gcaugcucauggagcuuca

SEQ ID NO: 1957037 - RNA, 19 nt, Artificial Sequence
  Description of Artificial Sequence: Synthetic oligonucleotide
guccggcggcugcgcagac

SEQ ID NO: 1957038 - RNA, 19 nt, Artificial Sequence
  Description of Artificial Sequence: Synthetic oligonucleotide
gcguuucucuuuucaccau

SEQ ID NO: 1957039 - RNA, 19 nt, Artificial Sequence
  Description of Artificial Sequence: Synthetic oligonucleotide
gcgccugaaguccucccuu

SEQ ID NO: 1957040 - RNA, 19 nt, Artificial Sequence
  Description of Artificial Sequence: Synthetic oligonucleotide
caucuucgacugucuucuu

SEQ ID NO: 1957041 - RNA, 19 nt, Artificial Sequence
  Description of Artificial Sequence: Synthetic oligonucleotide
cccaaggagugaggcucuc

SEQ ID NO: 1957042 - RNA, 19 nt, Artificial Sequence
  Description of Artificial Sequence: Synthetic oligonucleotide
ggucugccgcaacuugcuu

SEQ ID NO: 1957043 - RNA, 19 nt, Artificial Sequence
  Description of Artificial Sequence: Synthetic oligonucleotide
ccaaggagugaggcucucu

SEQ ID NO: 1957044 - RNA, 19 nt, Artificial Sequence
  Description of Artificial Sequence: Synthetic oligonucleotide
cggcggcugcgcagaccca

SEQ ID NO: 1957045 - RNA, 19 nt, Artificial Sequence
  Description of Artificial Sequence: Synthetic oligonucleotide
uuuaacauuuaaaacaggg

SEQ ID NO: 1957046 - RNA, 19 nt, Artificial Sequence
  Description of Artificial Sequence: Synthetic oligonucleotide
aaguccaaaagguauaggc

SEQ ID NO: 1957047 - RNA, 19 nt, Artificial Sequence
  Description of Artificial Sequence: Synthetic oligonucleotide
aauucugccacaaucaccc

SEQ ID NO: 1957048 - RNA, 19 nt, Artificial Sequence
  Description of Artificial Sequence: Synthetic oligonucleotide
aaaggcuuuaucccaacgc

SEQ ID NO: 1957049 - RNA, 19 nt, Artificial Sequence
  Description of Artificial Sequence: Synthetic oligonucleotide
uguaaguuacuucagcagg

SEQ ID NO: 1957050 - RNA, 19 nt, Artificial Sequence
  Description of Artificial Sequence: Synthetic oligonucleotide
aaaucaaaaccccggggcc

SEQ ID NO: 1957051 - RNA, 19 nt, Artificial Sequence
  Description of Artificial Sequence: Synthetic oligonucleotide
cuugcaaaaggcuuuaucc

SEQ ID NO: 1957052 - RNA, 19 nt, Artificial Sequence
  Description of Artificial Sequence: Synthetic oligonucleotide
ucagaaacuugcaaaaggc

SEQ ID NO: 1957053 - RNA, 19 nt, Artificial Sequence
  Description of Artificial Sequence: Synthetic oligonucleotide
ugagcauuugguuucuugg

SEQ ID NO: 1957054 - RNA, 19 nt, Artificial Sequence
  Description of Artificial Sequence: Synthetic oligonucleotide
auaagagacuuugagaggg

SEQ ID NO: 1957055 - RNA, 19 nt, Artificial Sequence
  Description of Artificial Sequence: Synthetic oligonucleotide
ucuucuuaauccaggcucg

SEQ ID NO: 1957056 - RNA, 19 nt, Artificial Sequence
  Description of Artificial Sequence: Synthetic oligonucleotide
augagccacauugagaucc

SEQ ID NO: 1957057 - RNA, 19 nt, Artificial Sequence
  Description of Artificial Sequence: Synthetic oligonucleotide
uuuaucccaacgcugucgg

SEQ ID NO: 1957058 - RNA, 19 nt, Artificial Sequence
  Description of Artificial Sequence: Synthetic oligonucleotide
uucuucuuaauccaggcuc

SEQ ID NO: 1957059 - RNA, 19 nt, Artificial Sequence
  Description of Artificial Sequence: Synthetic oligonucleotide
acguuuuauuaucuggagc

SEQ ID NO: 1957060 - RNA, 19 nt, Artificial Sequence
  Description of Artificial Sequence: Synthetic oligonucleotide
ucaugagccacauugagau

SEQ ID NO: 1957061 - RNA, 19 nt, Artificial Sequence
  Description of Artificial Sequence: Synthetic oligonucleotide
uugagauccccacauagca

SEQ ID NO: 1957062 - RNA, 19 nt, Artificial Sequence
  Description of Artificial Sequence: Synthetic oligonucleotide
gacgaaagcccuuaggcgc

SEQ ID NO: 1957063 - RNA, 19 nt, Artificial Sequence
  Description of Artificial Sequence: Synthetic oligonucleotide
cuuucgggaagcuaagucc

SEQ ID NO: 1957064 - RNA, 19 nt, Artificial Sequence
  Description of Artificial Sequence: Synthetic oligonucleotide
uccuuugggguuacgaagg

SEQ ID NO: 1957065 - RNA, 19 nt, Artificial Sequence
  Description of Artificial Sequence: Synthetic oligonucleotide
uaaaccuuucuucuuaauc

SEQ ID NO: 1957066 - RNA, 19 nt, Artificial Sequence
  Description of Artificial Sequence: Synthetic oligonucleotide
ugccauaagagacuuugag

SEQ ID NO: 1957067 - RNA, 19 nt, Artificial Sequence
  Description of Artificial Sequence: Synthetic oligonucleotide
acuauauccuucuuugucu

SEQ ID NO: 1957068 - RNA, 19 nt, Artificial Sequence
  Description of Artificial Sequence: Synthetic oligonucleotide
aaggcuuuaucccaacgcu

SEQ ID NO: 1957069 - RNA, 19 nt, Artificial Sequence
  Description of Artificial Sequence: Synthetic oligonucleotide
uguagcaacuccccaaagc

SEQ ID NO: 1957070 - RNA, 19 nt, Artificial Sequence
  Description of Artificial Sequence: Synthetic oligonucleotide
ugacguuuuauuaucugga

SEQ ID NO: 1957071 - RNA, 19 nt, Artificial Sequence
  Description of Artificial Sequence: Synthetic oligonucleotide
ugacgaaagcccuuaggcg

SEQ ID NO: 1957072 - RNA, 19 nt, Artificial Sequence
  Description of Artificial Sequence: Synthetic oligonucleotide
guagcaacuccccaaagcc

SEQ ID NO: 1957073 - RNA, 19 nt, Artificial Sequence
  Description of Artificial Sequence: Synthetic oligonucleotide
ccauaagagacuuugagag

SEQ ID NO: 1957074 - RNA, 19 nt, Artificial Sequence
  Description of Artificial Sequence: Synthetic oligonucleotide
gaagcuaaguccuucagaa

SEQ ID NO: 1957075 - RNA, 19 nt, Artificial Sequence
  Description of Artificial Sequence: Synthetic oligonucleotide
uugcaaaaggcuuuauccc

SEQ ID NO: 1957076 - RNA, 19 nt, Artificial Sequence
  Description of Artificial Sequence: Synthetic oligonucleotide
gugacguuuuauuaucugg

SEQ ID NO: 1957077 - RNA, 19 nt, Artificial Sequence
  Description of Artificial Sequence: Synthetic oligonucleotide
aggagucaaauucugccac

SEQ ID NO: 1957078 - RNA, 19 nt, Artificial Sequence
  Description of Artificial Sequence: Synthetic oligonucleotide
acuuugagagggcacuggc

SEQ ID NO: 1957079 - RNA, 19 nt, Artificial Sequence
  Description of Artificial Sequence: Synthetic oligonucleotide
agguguaaguuacuucagc

SEQ ID NO: 1957080 - RNA, 19 nt, Artificial Sequence
  Description of Artificial Sequence: Synthetic oligonucleotide
ucaccaaugccauaagaga

SEQ ID NO: 1957081 - RNA, 19 nt, Artificial Sequence
  Description of Artificial Sequence: Synthetic oligonucleotide
ugugacgaaagcccuuagg

SEQ ID NO: 1957082 - RNA, 19 nt, Artificial Sequence
  Description of Artificial Sequence: Synthetic oligonucleotide
aguaaucaaggcgccaucc

SEQ ID NO: 1957083 - RNA, 19 nt, Artificial Sequence
  Description of Artificial Sequence: Synthetic oligonucleotide
uguuaccaggacaaaggag

SEQ ID NO: 1957084 - RNA, 19 nt, Artificial Sequence
  Description of Artificial Sequence: Synthetic oligonucleotide
gugacgaaagcccuuaggc

SEQ ID NO: 1957085 - RNA, 19 nt, Artificial Sequence
  Description of Artificial Sequence: Synthetic oligonucleotide
uuuggagcggaucuugcug

SEQ ID NO: 1957086 - RNA, 19 nt, Artificial Sequence
  Description of Artificial Sequence: Synthetic oligonucleotide
uuucccagguguaaguuac

SEQ ID NO: 1957087 - RNA, 19 nt, Artificial Sequence
  Description of Artificial Sequence: Synthetic oligonucleotide
cauugagauccccacauag

SEQ ID NO: 1957088 - RNA, 19 nt, Artificial Sequence
  Description of Artificial Sequence: Synthetic oligonucleotide
cauuugguuucuuggaggc

SEQ ID NO: 1957089 - RNA, 19 nt, Artificial Sequence
  Description of Artificial Sequence: Synthetic oligonucleotide
gacguuuuauuaucuggag

SEQ ID NO: 1957090 - RNA, 19 nt, Artificial Sequence
  Description of Artificial Sequence: Synthetic oligonucleotide
uuccuuugggguuacgaag

SEQ ID NO: 1957091 - RNA, 19 nt, Artificial Sequence
  Description of Artificial Sequence: Synthetic oligonucleotide
uuucgggaagcuaaguccu

SEQ ID NO: 1957092 - RNA, 19 nt, Artificial Sequence
  Description of Artificial Sequence: Synthetic oligonucleotide
aaucaaggcgccauccgac

SEQ ID NO: 1957093 - RNA, 19 nt, Artificial Sequence
  Description of Artificial Sequence: Synthetic oligonucleotide
aaguuugccaccgggugac

SEQ ID NO: 1957094 - RNA, 19 nt, Artificial Sequence
  Description of Artificial Sequence: Synthetic oligonucleotide
ucugccacaaucacccggc

SEQ ID NO: 1957095 - RNA, 19 nt, Artificial Sequence
  Description of Artificial Sequence: Synthetic oligonucleotide
agccuuaccagaccccugc

SEQ ID NO: 1957096 - RNA, 19 nt, Artificial Sequence
  Description of Artificial Sequence: Synthetic oligonucleotide
cuugaguguggcaaguuug

SEQ ID NO: 1957097 - RNA, 19 nt, Artificial Sequence
  Description of Artificial Sequence: Synthetic oligonucleotide
agacaaaagggagugugac

SEQ ID NO: 1957098 - RNA, 19 nt, Artificial Sequence
  Description of Artificial Sequence: Synthetic oligonucleotide
guaaguuacuucagcaggg

SEQ ID NO: 1957099 - RNA, 19 nt, Artificial Sequence
  Description of Artificial Sequence: Synthetic oligonucleotide
uguaaguccaaaagguaua

SEQ ID NO: 1957100 - RNA, 19 nt, Artificial Sequence
  Description of Artificial Sequence: Synthetic oligonucleotide
aucccugugacgaaagccc

SEQ ID NO: 1957101 - RNA, 19 nt, Artificial Sequence
  Description of Artificial Sequence: Synthetic oligonucleotide
auugagauccccacauagc

SEQ ID NO: 1957102 - RNA, 19 nt, Artificial Sequence
  Description of Artificial Sequence: Synthetic oligonucleotide
guguaaguuacuucagcag

SEQ ID NO: 1957103 - RNA, 19 nt, Artificial Sequence
  Description of Artificial Sequence: Synthetic oligonucleotide
uaaucaaggcgccauccga

SEQ ID NO: 1957104 - RNA, 19 nt, Artificial Sequence
  Description of Artificial Sequence: Synthetic oligonucleotide
cugccaagagcuuuggagc

SEQ ID NO: 1957105 - RNA, 19 nt, Artificial Sequence
  Description of Artificial Sequence: Synthetic oligonucleotide
ugccaagagcuuuggagcg

SEQ ID NO: 1957106 - RNA, 19 nt, Artificial Sequence
  Description of Artificial Sequence: Synthetic oligonucleotide
caccaaugccauaagagac

SEQ ID NO: 1957107 - RNA, 19 nt, Artificial Sequence
  Description of Artificial Sequence: Synthetic oligonucleotide
aaaguaaucaaggcgccau

SEQ ID NO: 1957108 - RNA, 19 nt, Artificial Sequence
  Description of Artificial Sequence: Synthetic oligonucleotide
aaaccccggggccuaaagg

SEQ ID NO: 1957109 - RNA, 19 nt, Artificial Sequence
  Description of Artificial Sequence: Synthetic oligonucleotide
accgaagcaguguuuacag

SEQ ID NO: 1957110 - RNA, 19 nt, Artificial Sequence
  Description of Artificial Sequence: Synthetic oligonucleotide
uuagcccgagcauucauca

SEQ ID NO: 1957111 - RNA, 19 nt, Artificial Sequence
  Description of Artificial Sequence: Synthetic oligonucleotide
uccuuuacccaaucuaaac

SEQ ID NO: 1957112 - RNA, 19 nt, Artificial Sequence
  Description of Artificial Sequence: Synthetic oligonucleotide
uaaguuacuucagcagggg

SEQ ID NO: 1957113 - RNA, 19 nt, Artificial Sequence
  Description of Artificial Sequence: Synthetic oligonucleotide
ucuucaugagccacauuga

SEQ ID NO: 1957114 - RNA, 19 nt, Artificial Sequence
  Description of Artificial Sequence: Synthetic oligonucleotide
ugggacagugaucacugcc

SEQ ID NO: 1957115 - RNA, 19 nt, Artificial Sequence
  Description of Artificial Sequence: Synthetic oligonucleotide
guaaucaaggcgccauccg

SEQ ID NO: 1957116 - RNA, 19 nt, Artificial Sequence
  Description of Artificial Sequence: Synthetic oligonucleotide
agaagcuugguuuaacauu

SEQ ID NO: 1957117 - RNA, 19 nt, Artificial Sequence
  Description of Artificial Sequence: Synthetic oligonucleotide
uguggcaaguuugccaccg

SEQ ID NO: 1957118 - RNA, 19 nt, Artificial Sequence
  Description of Artificial Sequence: Synthetic oligonucleotide
ugcugucacacaaggaaga

SEQ ID NO: 1957119 - RNA, 19 nt, Artificial Sequence
  Description of Artificial Sequence: Synthetic oligonucleotide
cauccgacauucuuagccc

SEQ ID NO: 1957120 - RNA, 19 nt, Artificial Sequence
  Description of Artificial Sequence: Synthetic oligonucleotide
aguguuuacagcguugccu

SEQ ID NO: 1957121 - RNA, 19 nt, Artificial Sequence
  Description of Artificial Sequence: Synthetic oligonucleotide
cuagguaaagggugauggg

SEQ ID NO: 1957122 - RNA, 19 nt, Artificial Sequence
  Description of Artificial Sequence: Synthetic oligonucleotide
aaaaccccggggccuaaag

SEQ ID NO: 1957123 - RNA, 19 nt, Artificial Sequence
  Description of Artificial Sequence: Synthetic oligonucleotide
gcuagguaaagggugaugg

SEQ ID NO: 1957124 - RNA, 19 nt, Artificial Sequence
  Description of Artificial Sequence: Synthetic oligonucleotide
agacuuggguucuuucccg

SEQ ID NO: 1957125 - RNA, 19 nt, Artificial Sequence
  Description of Artificial Sequence: Synthetic oligonucleotide
aagcccacgccacuauauc

SEQ ID NO: 1957126 - RNA, 19 nt, Artificial Sequence
  Description of Artificial Sequence: Synthetic oligonucleotide
uagguaaagggugauggga

SEQ ID NO: 1957127 - RNA, 19 nt, Artificial Sequence
  Description of Artificial Sequence: Synthetic oligonucleotide
ugauggagcagaccaguac

SEQ ID NO: 1957128 - RNA, 19 nt, Artificial Sequence
  Description of Artificial Sequence: Synthetic oligonucleotide
caggagcauaucuugagug

SEQ ID NO: 1957129 - RNA, 19 nt, Artificial Sequence
  Description of Artificial Sequence: Synthetic oligonucleotide
cuucaugagccacauugag

SEQ ID NO: 1957130 - RNA, 19 nt, Artificial Sequence
  Description of Artificial Sequence: Synthetic oligonucleotide
aaaguaagcccacgccacu

SEQ ID NO: 1957131 - RNA, 19 nt, Artificial Sequence
  Description of Artificial Sequence: Synthetic oligonucleotide
cuauauccuucuuugucug

SEQ ID NO: 1957132 - RNA, 19 nt, Artificial Sequence
  Description of Artificial Sequence: Synthetic oligonucleotide
caguaagugguacagccug

SEQ ID NO: 1957133 - RNA, 19 nt, Artificial Sequence
  Description of Artificial Sequence: Synthetic oligonucleotide
agguaaagggugaugggac

SEQ ID NO: 1957134 - RNA, 19 nt, Artificial Sequence
  Description of Artificial Sequence: Synthetic oligonucleotide
aaucacccggccuucuuga

SEQ ID NO: 1957135 - RNA, 19 nt, Artificial Sequence
  Description of Artificial Sequence: Synthetic oligonucleotide
ucucugagcauuugguuuc

SEQ ID NO: 1957136 - RNA, 19 nt, Artificial Sequence
  Description of Artificial Sequence: Synthetic oligonucleotide
cuuaccagaccccugccug

SEQ ID NO: 1957137 - RNA, 19 nt, Artificial Sequence
  Description of Artificial Sequence: Synthetic oligonucleotide
ucaguaagugguacagccu

SEQ ID NO: 1957138 - RNA, 19 nt, Artificial Sequence
  Description of Artificial Sequence: Synthetic oligonucleotide
cuuuaucccaacgcugucg

SEQ ID NO: 1957139 - RNA, 19 nt, Artificial Sequence
  Description of Artificial Sequence: Synthetic oligonucleotide
gaggaggcuauuucccagg

SEQ ID NO: 1957140 - RNA, 19 nt, Artificial Sequence
  Description of Artificial Sequence: Synthetic oligonucleotide
uggcaaguuugccaccggg

SEQ ID NO: 1957141 - RNA, 19 nt, Artificial Sequence
  Description of Artificial Sequence: Synthetic oligonucleotide
aggggugucacagugcuag

SEQ ID NO: 1957142 - RNA, 19 nt, Artificial Sequence
  Description of Artificial Sequence: Synthetic oligonucleotide
aaguuacuucagcaggggu

SEQ ID NO: 1957143 - RNA, 19 nt, Artificial Sequence
  Description of Artificial Sequence: Synthetic oligonucleotide
gaaaguaagcccacgccac

SEQ ID NO: 1957144 - RNA, 19 nt, Artificial Sequence
  Description of Artificial Sequence: Synthetic oligonucleotide
ggcacaagauaucuggugc

SEQ ID NO: 1957145 - RNA, 19 nt, Artificial Sequence
  Description of Artificial Sequence: Synthetic oligonucleotide
gacacuggacuugagagga

SEQ ID NO: 1957146 - RNA, 19 nt, Artificial Sequence
  Description of Artificial Sequence: Synthetic oligonucleotide
guaaguccaaaagguauag

SEQ ID NO: 1957147 - RNA, 19 nt, Artificial Sequence
  Description of Artificial Sequence: Synthetic oligonucleotide
aaucaaaaccccggggccu

SEQ ID NO: 1957148 - RNA, 19 nt, Artificial Sequence
  Description of Artificial Sequence: Synthetic oligonucleotide
cuugagaggaggcuauuuc

SEQ ID NO: 1957149 - RNA, 19 nt, Artificial Sequence
  Description of Artificial Sequence: Synthetic oligonucleotide
aaaaguaaucaaggcgcca

SEQ ID NO: 1957150 - RNA, 19 nt, Artificial Sequence
  Description of Artificial Sequence: Synthetic oligonucleotide
gaacguaggcuguuaccag

SEQ ID NO: 1957151 - RNA, 19 nt, Artificial Sequence
  Description of Artificial Sequence: Synthetic oligonucleotide
ucgaagcccauccacguuc

SEQ ID NO: 1957152 - RNA, 19 nt, Artificial Sequence
  Description of Artificial Sequence: Synthetic oligonucleotide
acuccagccuuaccagacc

SEQ ID NO: 1957153 - RNA, 19 nt, Artificial Sequence
  Description of Artificial Sequence: Synthetic oligonucleotide
aaagggugaugggacagug

SEQ ID NO: 1957154 - RNA, 19 nt, Artificial Sequence
  Description of Artificial Sequence: Synthetic oligonucleotide
guuaccaggacaaaggagu

SEQ ID NO: 1957155 - RNA, 19 nt, Artificial Sequence
  Description of Artificial Sequence: Synthetic oligonucleotide
uaagagacuuugagagggc

SEQ ID NO: 1957156 - RNA, 19 nt, Artificial Sequence
  Description of Artificial Sequence: Synthetic oligonucleotide
ugcauugggaacguaggcu

SEQ ID NO: 1957157 - RNA, 19 nt, Artificial Sequence
  Description of Artificial Sequence: Synthetic oligonucleotide
ucuuguuuccuuugggguu

SEQ ID NO: 1957158 - RNA, 19 nt, Artificial Sequence
  Description of Artificial Sequence: Synthetic oligonucleotide
ugagauccccacauagcac

SEQ ID NO: 1957159 - RNA, 19 nt, Artificial Sequence
  Description of Artificial Sequence: Synthetic oligonucleotide
gcuguuaccaggacaaagg

SEQ ID NO: 1957160 - RNA, 19 nt, Artificial Sequence
  Description of Artificial Sequence: Synthetic oligonucleotide
aaggcgccauccgacauuc

SEQ ID NO: 1957161 - RNA, 19 nt, Artificial Sequence
  Description of Artificial Sequence: Synthetic oligonucleotide
gagcauaucuugagugugg

SEQ ID NO: 1957162 - RNA, 19 nt, Artificial Sequence
  Description of Artificial Sequence: Synthetic oligonucleotide
ggucaauuucuucaugagc

SEQ ID NO: 1957163 - RNA, 19 nt, Artificial Sequence
  Description of Artificial Sequence: Synthetic oligonucleotide
aagggagugugacaacaaa

SEQ ID NO: 1957164 - RNA, 19 nt, Artificial Sequence
  Description of Artificial Sequence: Synthetic oligonucleotide
uuaggcgccuggagcaccg

SEQ ID NO: 1957165 - RNA, 19 nt, Artificial Sequence
  Description of Artificial Sequence: Synthetic oligonucleotide
ggugaugggacagugauca

SEQ ID NO: 1957166 - RNA, 19 nt, Artificial Sequence
  Description of Artificial Sequence: Synthetic oligonucleotide
auccgacauucuuagcccg

SEQ ID NO: 1957167 - RNA, 19 nt, Artificial Sequence
  Description of Artificial Sequence: Synthetic oligonucleotide
aggagcauaucuugagugu

SEQ ID NO: 1957168 - RNA, 19 nt, Artificial Sequence
  Description of Artificial Sequence: Synthetic oligonucleotide
agcccgagcauucaucaug

SEQ ID NO: 1957169 - RNA, 19 nt, Artificial Sequence
  Description of Artificial Sequence: Synthetic oligonucleotide
ccauccgacauucuuagcc

SEQ ID NO: 1957170 - RNA, 19 nt, Artificial Sequence
  Description of Artificial Sequence: Synthetic oligonucleotide
cgagcauucaucauguaag

SEQ ID NO: 1957171 - RNA, 19 nt, Artificial Sequence
  Description of Artificial Sequence: Synthetic oligonucleotide
uuuacccaaucuaaaccuu

SEQ ID NO: 1957172 - RNA, 19 nt, Artificial Sequence
  Description of Artificial Sequence: Synthetic oligonucleotide
gguguaaguuacuucagca

SEQ ID NO: 1957173 - RNA, 19 nt, Artificial Sequence
  Description of Artificial Sequence: Synthetic oligonucleotide
cauaucuugaguguggcaa

SEQ ID NO: 1957174 - RNA, 19 nt, Artificial Sequence
  Description of Artificial Sequence: Synthetic oligonucleotide
acaagauaucuggugcuuc

SEQ ID NO: 1957175 - RNA, 19 nt, Artificial Sequence
  Description of Artificial Sequence: Synthetic oligonucleotide
ucuuucccgucuucugccg

SEQ ID NO: 1957176 - RNA, 19 nt, Artificial Sequence
  Description of Artificial Sequence: Synthetic oligonucleotide
cuuuacccaaucuaaaccu

SEQ ID NO: 1957177 - RNA, 19 nt, Artificial Sequence
  Description of Artificial Sequence: Synthetic oligonucleotide
aguccaaaagguauaggca

SEQ ID NO: 1957178 - RNA, 19 nt, Artificial Sequence
  Description of Artificial Sequence: Synthetic oligonucleotide
uuccuuuacccaaucuaaa

SEQ ID NO: 1957179 - RNA, 19 nt, Artificial Sequence
  Description of Artificial Sequence: Synthetic oligonucleotide
ggaguuuguucucugagca

SEQ ID NO: 1957180 - RNA, 19 nt, Artificial Sequence
  Description of Artificial Sequence: Synthetic oligonucleotide
agaaacuugcaaaaggcuu

SEQ ID NO: 1957181 - RNA, 19 nt, Artificial Sequence
  Description of Artificial Sequence: Synthetic oligonucleotide
ucuugaguguggcaaguuu

SEQ ID NO: 1957182 - RNA, 19 nt, Artificial Sequence
  Description of Artificial Sequence: Synthetic oligonucleotide
ugguacagccuguagcaac

SEQ ID NO: 1957183 - RNA, 19 nt, Artificial Sequence
  Description of Artificial Sequence: Synthetic oligonucleotide
uuaccaggacaaaggaguc

SEQ ID NO: 1957184 - RNA, 19 nt, Artificial Sequence
  Description of Artificial Sequence: Synthetic oligonucleotide
aagacaaaagggaguguga

SEQ ID NO: 1957185 - RNA, 19 nt, Artificial Sequence
  Description of Artificial Sequence: Synthetic oligonucleotide
aacgcugucgguacuccag

SEQ ID NO: 1957186 - RNA, 19 nt, Artificial Sequence
  Description of Artificial Sequence: Synthetic oligonucleotide
uuacccaaucuaaaccuuu

SEQ ID NO: 1957187 - RNA, 19 nt, Artificial Sequence
  Description of Artificial Sequence: Synthetic oligonucleotide
gaguguggcaaguuugcca

SEQ ID NO: 1957188 - RNA, 19 nt, Artificial Sequence
  Description of Artificial Sequence: Synthetic oligonucleotide
agcauucaucauguaaguc

SEQ ID NO: 1957189 - RNA, 19 nt, Artificial Sequence
  Description of Artificial Sequence: Synthetic oligonucleotide
ggaaaguaagcccacgcca

SEQ ID NO: 1957190 - RNA, 19 nt, Artificial Sequence
  Description of Artificial Sequence: Synthetic oligonucleotide
caaucuaaaccuuucuucu

SEQ ID NO: 1957191 - RNA, 19 nt, Artificial Sequence
  Description of Artificial Sequence: Synthetic oligonucleotide
aggacaaaggagucaaauu

SEQ ID NO: 1957192 - RNA, 19 nt, Artificial Sequence
  Description of Artificial Sequence: Synthetic oligonucleotide
auucuuagcccgagcauuc

SEQ ID NO: 1957193 - RNA, 19 nt, Artificial Sequence
  Description of Artificial Sequence: Synthetic oligonucleotide
agcguccucauacaggaaa

SEQ ID NO: 1957194 - RNA, 19 nt, Artificial Sequence
  Description of Artificial Sequence: Synthetic oligonucleotide
ggaagcugucaguaagugg

SEQ ID NO: 1957195 - RNA, 19 nt, Artificial Sequence
  Description of Artificial Sequence: Synthetic oligonucleotide
uuccucaccaaugccauaa

SEQ ID NO: 1957196 - RNA, 19 nt, Artificial Sequence
  Description of Artificial Sequence: Synthetic oligonucleotide
auccccacauagcacaaga

SEQ ID NO: 1957197 - RNA, 19 nt, Artificial Sequence
  Description of Artificial Sequence: Synthetic oligonucleotide
gaucaugcucuuccucacc

SEQ ID NO: 1957198 - RNA, 19 nt, Artificial Sequence
  Description of Artificial Sequence: Synthetic oligonucleotide
ugucacagugcuagguaaa

SEQ ID NO: 1957199 - RNA, 19 nt, Artificial Sequence
  Description of Artificial Sequence: Synthetic oligonucleotide
gugaucacugccaagagcu

SEQ ID NO: 1957200 - RNA, 19 nt, Artificial Sequence
  Description of Artificial Sequence: Synthetic oligonucleotide
cuuuacucuucuuggucuc

SEQ ID NO: 1957201 - RNA, 19 nt, Artificial Sequence
  Description of Artificial Sequence: Synthetic oligonucleotide
uuacgaaggucaauuucuu

SEQ ID NO: 1957202 - RNA, 19 nt, Artificial Sequence
  Description of Artificial Sequence: Synthetic oligonucleotide
cuuagcccgagcauucauc

SEQ ID NO: 1957203 - RNA, 19 nt, Artificial Sequence
  Description of Artificial Sequence: Synthetic oligonucleotide
acuuggguucuuucccguc

SEQ ID NO: 1957204 - RNA, 19 nt, Artificial Sequence
  Description of Artificial Sequence: Synthetic oligonucleotide
aagcuaaguccuucagaaa

SEQ ID NO: 1957205 - RNA, 19 nt, Artificial Sequence
  Description of Artificial Sequence: Synthetic oligonucleotide
cugcauugggaacguaggc

SEQ ID NO: 1957206 - RNA, 19 nt, Artificial Sequence
  Description of Artificial Sequence: Synthetic oligonucleotide
gaggcuuucgggaagcuaa

SEQ ID NO: 1957207 - RNA, 19 nt, Artificial Sequence
  Description of Artificial Sequence: Synthetic oligonucleotide
aguuuguucucugagcauu

SEQ ID NO: 1957208 - RNA, 19 nt, Artificial Sequence
  Description of Artificial Sequence: Synthetic oligonucleotide
ggacacuggacuugagagg

SEQ ID NO: 1957209 - RNA, 19 nt, Artificial Sequence
  Description of Artificial Sequence: Synthetic oligonucleotide
ucuggagcguccucauaca

SEQ ID NO: 1957210 - RNA, 19 nt, Artificial Sequence
  Description of Artificial Sequence: Synthetic oligonucleotide
gguguugggguagaggugc

SEQ ID NO: 1957211 - RNA, 19 nt, Artificial Sequence
  Description of Artificial Sequence: Synthetic oligonucleotide
agcugucaguaagugguac

SEQ ID NO: 1957212 - RNA, 19 nt, Artificial Sequence
  Description of Artificial Sequence: Synthetic oligonucleotide
cagguguaaguuacuucag

SEQ ID NO: 1957213 - RNA, 19 nt, Artificial Sequence
  Description of Artificial Sequence: Synthetic oligonucleotide
gguuacgaaggucaauuuc

SEQ ID NO: 1957214 - RNA, 19 nt, Artificial Sequence
  Description of Artificial Sequence: Synthetic oligonucleotide
ccugcauugggaacguagg

SEQ ID NO: 1957215 - RNA, 19 nt, Artificial Sequence
  Description of Artificial Sequence: Synthetic oligonucleotide
ggagcguccucauacagga

SEQ ID NO: 1957216 - RNA, 19 nt, Artificial Sequence
  Description of Artificial Sequence: Synthetic oligonucleotide
ugucaguaagugguacagc

SEQ ID NO: 1957217 - RNA, 19 nt, Artificial Sequence
  Description of Artificial Sequence: Synthetic oligonucleotide
ugggaacguaggcuguuac

SEQ ID NO: 1957218 - RNA, 19 nt, Artificial Sequence
  Description of Artificial Sequence: Synthetic oligonucleotide
gaagcuugguuuaacauuu

SEQ ID NO: 1957219 - RNA, 19 nt, Artificial Sequence
  Description of Artificial Sequence: Synthetic oligonucleotide
cauguaaguccaaaaggua

SEQ ID NO: 1957220 - RNA, 19 nt, Artificial Sequence
  Description of Artificial Sequence: Synthetic oligonucleotide
agugcuagguaaaggguga

SEQ ID NO: 1957221 - RNA, 19 nt, Artificial Sequence
  Description of Artificial Sequence: Synthetic oligonucleotide
uauuaucuggagcguccuc

SEQ ID NO: 1957222 - RNA, 19 nt, Artificial Sequence
  Description of Artificial Sequence: Synthetic oligonucleotide
uccgacauucuuagcccga

SEQ ID NO: 1957223 - RNA, 19 nt, Artificial Sequence
  Description of Artificial Sequence: Synthetic oligonucleotide
ggugacguuuuauuaucug

SEQ ID NO: 1957224 - RNA, 19 nt, Artificial Sequence
  Description of Artificial Sequence: Synthetic oligonucleotide
aagcaguguuuacagcguu

SEQ ID NO: 1957225 - RNA, 19 nt, Artificial Sequence
  Description of Artificial Sequence: Synthetic oligonucleotide
guccaaaagguauaggcau

SEQ ID NO: 1957226 - RNA, 19 nt, Artificial Sequence
  Description of Artificial Sequence: Synthetic oligonucleotide
uccucaccaaugccauaag

SEQ ID NO: 1957227 - RNA, 19 nt, Artificial Sequence
  Description of Artificial Sequence: Synthetic oligonucleotide
ccauccacguuccaggagc

SEQ ID NO: 1957228 - RNA, 19 nt, Artificial Sequence
  Description of Artificial Sequence: Synthetic oligonucleotide
gcaaguuugccaccgggug

SEQ ID NO: 1957229 - RNA, 19 nt, Artificial Sequence
  Description of Artificial Sequence: Synthetic oligonucleotide
gccauaagagacuuugaga

SEQ ID NO: 1957230 - RNA, 19 nt, Artificial Sequence
  Description of Artificial Sequence: Synthetic oligonucleotide
gagcggaucuugcugucac

SEQ ID NO: 1957231 - RNA, 19 nt, Artificial Sequence
  Description of Artificial Sequence: Synthetic oligonucleotide
ucccugugacgaaagcccu

SEQ ID NO: 1957232 - RNA, 19 nt, Artificial Sequence
  Description of Artificial Sequence: Synthetic oligonucleotide
aucaaggcgccauccgaca

SEQ ID NO: 1957233 - RNA, 19 nt, Artificial Sequence
  Description of Artificial Sequence: Synthetic oligonucleotide
auauccuucuuugucugau

SEQ ID NO: 1957234 - RNA, 19 nt, Artificial Sequence
  Description of Artificial Sequence: Synthetic oligonucleotide
caaucacccggccuucuug

SEQ ID NO: 1957235 - RNA, 19 nt, Artificial Sequence
  Description of Artificial Sequence: Synthetic oligonucleotide
ucuuagcccgagcauucau

SEQ ID NO: 1957236 - RNA, 19 nt, Artificial Sequence
  Description of Artificial Sequence: Synthetic oligonucleotide
ggaacguaggcuguuacca

SEQ ID NO: 1957237 - RNA, 19 nt, Artificial Sequence
  Description of Artificial Sequence: Synthetic oligonucleotide
aaagggagugugacaacaa

SEQ ID NO: 1957238 - RNA, 19 nt, Artificial Sequence
  Description of Artificial Sequence: Synthetic oligonucleotide
cuuugucugauggagcaga

SEQ ID NO: 1957239 - RNA, 19 nt, Artificial Sequence
  Description of Artificial Sequence: Synthetic oligonucleotide
uggggaguaaagccagcau

SEQ ID NO: 1957240 - RNA, 19 nt, Artificial Sequence
  Description of Artificial Sequence: Synthetic oligonucleotide
uauuucccagguguaaguu

SEQ ID NO: 1957241 - RNA, 19 nt, Artificial Sequence
  Description of Artificial Sequence: Synthetic oligonucleotide
auagcacaagaggcuuucg

SEQ ID NO: 1957242 - RNA, 19 nt, Artificial Sequence
  Description of Artificial Sequence: Synthetic oligonucleotide
cacccggccuucuugauca

SEQ ID NO: 1957243 - RNA, 19 nt, Artificial Sequence
  Description of Artificial Sequence: Synthetic oligonucleotide
ugcuagguaaagggugaug

SEQ ID NO: 1957244 - RNA, 19 nt, Artificial Sequence
  Description of Artificial Sequence: Synthetic oligonucleotide
gcuauuucccagguguaag

SEQ ID NO: 1957245 - RNA, 19 nt, Artificial Sequence
  Description of Artificial Sequence: Synthetic oligonucleotide
ucaaggcgccauccgacau

SEQ ID NO: 1957246 - RNA, 19 nt, Artificial Sequence
  Description of Artificial Sequence: Synthetic oligonucleotide
cagugaucacugccaagag

SEQ ID NO: 1957247 - RNA, 19 nt, Artificial Sequence
  Description of Artificial Sequence: Synthetic oligonucleotide
ggagcauaucuugagugug

SEQ ID NO: 1957248 - RNA, 19 nt, Artificial Sequence
  Description of Artificial Sequence: Synthetic oligonucleotide
gguucuuucccgucuucug

SEQ ID NO: 1957249 - RNA, 19 nt, Artificial Sequence
  Description of Artificial Sequence: Synthetic oligonucleotide
aggaaagggcccucuccug

SEQ ID NO: 1957250 - RNA, 19 nt, Artificial Sequence
  Description of Artificial Sequence: Synthetic oligonucleotide
cuuuggcaucccugugacg

SEQ ID NO: 1957251 - RNA, 19 nt, Artificial Sequence
  Description of Artificial Sequence: Synthetic oligonucleotide
gaccaguacugauggguga

SEQ ID NO: 1957252 - RNA, 19 nt, Artificial Sequence
  Description of Artificial Sequence: Synthetic oligonucleotide
accgggugacguuuuauua

SEQ ID NO: 1957253 - RNA, 19 nt, Artificial Sequence
  Description of Artificial Sequence: Synthetic oligonucleotide
aguaagcccacgccacuau

SEQ ID NO: 1957254 - RNA, 19 nt, Artificial Sequence
  Description of Artificial Sequence: Synthetic oligonucleotide
gccggaagcugucaguaag

SEQ ID NO: 1957255 - RNA, 19 nt, Artificial Sequence
  Description of Artificial Sequence: Synthetic oligonucleotide
ggugaguccaggcaggucu

SEQ ID NO: 1957256 - RNA, 19 nt, Artificial Sequence
  Description of Artificial Sequence: Synthetic oligonucleotide
uugggguuacgaaggucaa

SEQ ID NO: 1957257 - RNA, 19 nt, Artificial Sequence
  Description of Artificial Sequence: Synthetic oligonucleotide
cuuucccgucuucugccgc

SEQ ID NO: 1957258 - RNA, 19 nt, Artificial Sequence
  Description of Artificial Sequence: Synthetic oligonucleotide
gggaguaaagccagcauuc

SEQ ID NO: 1957259 - RNA, 19 nt, Artificial Sequence
  Description of Artificial Sequence: Synthetic oligonucleotide
caaguuugccaccggguga

SEQ ID NO: 1957260 - RNA, 19 nt, Artificial Sequence
  Description of Artificial Sequence: Synthetic oligonucleotide
uggagcaccgaagcagugu

SEQ ID NO: 1957261 - RNA, 19 nt, Artificial Sequence
  Description of Artificial Sequence: Synthetic oligonucleotide
agggagugugacaacaaaa

SEQ ID NO: 1957262 - RNA, 19 nt, Artificial Sequence
  Description of Artificial Sequence: Synthetic oligonucleotide
caguguuuacagcguugcc

SEQ ID NO: 1957263 - RNA, 19 nt, Artificial Sequence
  Description of Artificial Sequence: Synthetic oligonucleotide
aggaggcuauuucccaggu

SEQ ID NO: 1957264 - RNA, 19 nt, Artificial Sequence
  Description of Artificial Sequence: Synthetic oligonucleotide
cagaaacuugcaaaaggcu

SEQ ID NO: 1957265 - RNA, 19 nt, Artificial Sequence
  Description of Artificial Sequence: Synthetic oligonucleotide
ucacccggccuucuugauc

SEQ ID NO: 1957266 - RNA, 19 nt, Artificial Sequence
  Description of Artificial Sequence: Synthetic oligonucleotide
gcuuucgggaagcuaaguc

SEQ ID NO: 1957267 - RNA, 19 nt, Artificial Sequence
  Description of Artificial Sequence: Synthetic oligonucleotide
gcaguguuuacagcguugc

SEQ ID NO: 1957268 - RNA, 19 nt, Artificial Sequence
  Description of Artificial Sequence: Synthetic oligonucleotide
uugggguagaggugccgga

SEQ ID NO: 1957269 - RNA, 19 nt, Artificial Sequence
  Description of Artificial Sequence: Synthetic oligonucleotide
aggcuuuaucccaacgcug

SEQ ID NO: 1957270 - RNA, 19 nt, Artificial Sequence
  Description of Artificial Sequence: Synthetic oligonucleotide
aaguaagcccacgccacua

SEQ ID NO: 1957271 - RNA, 19 nt, Artificial Sequence
  Description of Artificial Sequence: Synthetic oligonucleotide
gguaaagggugaugggaca

SEQ ID NO: 1957272 - RNA, 19 nt, Artificial Sequence
  Description of Artificial Sequence: Synthetic oligonucleotide
cacaagaggcuuucgggaa

SEQ ID NO: 1957273 - RNA, 19 nt, Artificial Sequence
  Description of Artificial Sequence: Synthetic oligonucleotide
uccacguuccaggagcaua

SEQ ID NO: 1957274 - RNA, 19 nt, Artificial Sequence
  Description of Artificial Sequence: Synthetic oligonucleotide
gggaacguaggcuguuacc

SEQ ID NO: 1957275 - RNA, 19 nt, Artificial Sequence
  Description of Artificial Sequence: Synthetic oligonucleotide
uuugccaccgggugacguu

SEQ ID NO: 1957276 - RNA, 19 nt, Artificial Sequence
  Description of Artificial Sequence: Synthetic oligonucleotide
cuguagcaacuccccaaag

SEQ ID NO: 1957277 - RNA, 19 nt, Artificial Sequence
  Description of Artificial Sequence: Synthetic oligonucleotide
ccggccuucuugaucaugc

SEQ ID NO: 1957278 - RNA, 19 nt, Artificial Sequence
  Description of Artificial Sequence: Synthetic oligonucleotide
aaaggacacuggacuugag

SEQ ID NO: 1957279 - RNA, 19 nt, Artificial Sequence
  Description of Artificial Sequence: Synthetic oligonucleotide
auggagcagaccaguacug

SEQ ID NO: 1957280 - RNA, 19 nt, Artificial Sequence
  Description of Artificial Sequence: Synthetic oligonucleotide
agaggugccggaagcuguc

SEQ ID NO: 1957281 - RNA, 19 nt, Artificial Sequence
  Description of Artificial Sequence: Synthetic oligonucleotide
guggcaaguuugccaccgg

SEQ ID NO: 1957282 - RNA, 19 nt, Artificial Sequence
  Description of Artificial Sequence: Synthetic oligonucleotide
uucuuagcccgagcauuca

SEQ ID NO: 1957283 - RNA, 19 nt, Artificial Sequence
  Description of Artificial Sequence: Synthetic oligonucleotide
agcaccgaagcaguguuua

SEQ ID NO: 1957284 - RNA, 19 nt, Artificial Sequence
  Description of Artificial Sequence: Synthetic oligonucleotide
uucccagguguaaguuacu

SEQ ID NO: 1957285 - RNA, 19 nt, Artificial Sequence
  Description of Artificial Sequence: Synthetic oligonucleotide
ucgguacuccagccuuacc

SEQ ID NO: 1957286 - RNA, 19 nt, Artificial Sequence
  Description of Artificial Sequence: Synthetic oligonucleotide
caguacugaugggugaguc

SEQ ID NO: 1957287 - RNA, 19 nt, Artificial Sequence
  Description of Artificial Sequence: Synthetic oligonucleotide
aggcaggucuugaaguucu

SEQ ID NO: 1957288 - RNA, 19 nt, Artificial Sequence
  Description of Artificial Sequence: Synthetic oligonucleotide
uucccgucuucugccgccg

SEQ ID NO: 1957289 - RNA, 19 nt, Artificial Sequence
  Description of Artificial Sequence: Synthetic oligonucleotide
ugucgguacuccagccuua

SEQ ID NO: 1957290 - RNA, 19 nt, Artificial Sequence
  Description of Artificial Sequence: Synthetic oligonucleotide
cuuaggcgccuggagcacc

SEQ ID NO: 1957291 - RNA, 19 nt, Artificial Sequence
  Description of Artificial Sequence: Synthetic oligonucleotide
agccuguagcaacucccca

SEQ ID NO: 1957292 - RNA, 19 nt, Artificial Sequence
  Description of Artificial Sequence: Synthetic oligonucleotide
guacuccagccuuaccaga

SEQ ID NO: 1957293 - RNA, 19 nt, Artificial Sequence
  Description of Artificial Sequence: Synthetic oligonucleotide
caugagccacauugagauc

SEQ ID NO: 1957294 - RNA, 19 nt, Artificial Sequence
  Description of Artificial Sequence: Synthetic oligonucleotide
gggccuaaaggacacugga

SEQ ID NO: 1957295 - RNA, 19 nt, Artificial Sequence
  Description of Artificial Sequence: Synthetic oligonucleotide
cuuugggguuacgaagguc

SEQ ID NO: 1957296 - RNA, 19 nt, Artificial Sequence
  Description of Artificial Sequence: Synthetic oligonucleotide
uaucuggagcguccucaua

SEQ ID NO: 1957297 - RNA, 19 nt, Artificial Sequence
  Description of Artificial Sequence: Synthetic oligonucleotide
gccugcauugggaacguag

SEQ ID NO: 1957298 - RNA, 19 nt, Artificial Sequence
  Description of Artificial Sequence: Synthetic oligonucleotide
aagcccuuaggcgccugga

SEQ ID NO: 1957299 - RNA, 19 nt, Artificial Sequence
  Description of Artificial Sequence: Synthetic oligonucleotide
aacuugcaaaaggcuuuau

SEQ ID NO: 1957300 - RNA, 19 nt, Artificial Sequence
  Description of Artificial Sequence: Synthetic oligonucleotide
cugugacgaaagcccuuag

SEQ ID NO: 1957301 - RNA, 19 nt, Artificial Sequence
  Description of Artificial Sequence: Synthetic oligonucleotide
ggagucaaauucugccaca

SEQ ID NO: 1957302 - RNA, 19 nt, Artificial Sequence
  Description of Artificial Sequence: Synthetic oligonucleotide
accccggggccuaaaggac

SEQ ID NO: 1957303 - RNA, 19 nt, Artificial Sequence
  Description of Artificial Sequence: Synthetic oligonucleotide
uguuuccuuugggguuacg

SEQ ID NO: 1957304 - RNA, 19 nt, Artificial Sequence
  Description of Artificial Sequence: Synthetic oligonucleotide
agccacauugagaucccca

SEQ ID NO: 1957305 - RNA, 19 nt, Artificial Sequence
  Description of Artificial Sequence: Synthetic oligonucleotide
guuuuauuaucuggagcgu

SEQ ID NO: 1957306 - RNA, 19 nt, Artificial Sequence
  Description of Artificial Sequence: Synthetic oligonucleotide
agcggaucuugcugucaca

SEQ ID NO: 1957307 - RNA, 19 nt, Artificial Sequence
  Description of Artificial Sequence: Synthetic oligonucleotide
uucgggaagcuaaguccuu

SEQ ID NO: 1957308 - RNA, 19 nt, Artificial Sequence
  Description of Artificial Sequence: Synthetic oligonucleotide
acguaggcuguuaccagga

SEQ ID NO: 1957309 - RNA, 19 nt, Artificial Sequence
  Description of Artificial Sequence: Synthetic oligonucleotide
acaaucacccggccuucuu

SEQ ID NO: 1957310 - RNA, 19 nt, Artificial Sequence
  Description of Artificial Sequence: Synthetic oligonucleotide
uaccagaccccugccugca

SEQ ID NO: 1957311 - RNA, 19 nt, Artificial Sequence
  Description of Artificial Sequence: Synthetic oligonucleotide
gcccuuaggcgccuggagc

SEQ ID NO: 1957312 - RNA, 19 nt, Artificial Sequence
  Description of Artificial Sequence: Synthetic oligonucleotide
caccgaagcaguguuuaca

SEQ ID NO: 1957313 - RNA, 19 nt, Artificial Sequence
  Description of Artificial Sequence: Synthetic oligonucleotide
cagaccaguacugaugggu

SEQ ID NO: 1957314 - RNA, 19 nt, Artificial Sequence
  Description of Artificial Sequence: Synthetic oligonucleotide
uucccacgcuuuggcaucc

SEQ ID NO: 1957315 - RNA, 19 nt, Artificial Sequence
  Description of Artificial Sequence: Synthetic oligonucleotide
cagaagcuugguuuaacau

SEQ ID NO: 1957316 - RNA, 19 nt, Artificial Sequence
  Description of Artificial Sequence: Synthetic oligonucleotide
cugucacacaaggaagaca

SEQ ID NO: 1957317 - RNA, 19 nt, Artificial Sequence
  Description of Artificial Sequence: Synthetic oligonucleotide
ggugucacagugcuaggua

SEQ ID NO: 1957318 - RNA, 19 nt, Artificial Sequence
  Description of Artificial Sequence: Synthetic oligonucleotide
cuggagcaccgaagcagug

SEQ ID NO: 1957319 - RNA, 19 nt, Artificial Sequence
  Description of Artificial Sequence: Synthetic oligonucleotide
uggagcggaucuugcuguc

SEQ ID NO: 1957320 - RNA, 19 nt, Artificial Sequence
  Description of Artificial Sequence: Synthetic oligonucleotide
ugccggaagcugucaguaa

SEQ ID NO: 1957321 - RNA, 19 nt, Artificial Sequence
  Description of Artificial Sequence: Synthetic oligonucleotide
guucucugagcauuugguu

SEQ ID NO: 1957322 - RNA, 19 nt, Artificial Sequence
  Description of Artificial Sequence: Synthetic oligonucleotide
caggcaggucuugaaguuc

SEQ ID NO: 1957323 - RNA, 19 nt, Artificial Sequence
  Description of Artificial Sequence: Synthetic oligonucleotide
cauccacguuccaggagca

SEQ ID NO: 1957324 - RNA, 19 nt, Artificial Sequence
  Description of Artificial Sequence: Synthetic oligonucleotide
ggggccuaaaggacacugg

SEQ ID NO: 1957325 - RNA, 19 nt, Artificial Sequence
  Description of Artificial Sequence: Synthetic oligonucleotide
cuggggaguaaagccagca

SEQ ID NO: 1957326 - RNA, 19 nt, Artificial Sequence
  Description of Artificial Sequence: Synthetic oligonucleotide
cagggaguuuguucucuga

SEQ ID NO: 1957327 - RNA, 19 nt, Artificial Sequence
  Description of Artificial Sequence: Synthetic oligonucleotide
cuuuggagcggaucuugcu

SEQ ID NO: 1957328 - RNA, 19 nt, Artificial Sequence
  Description of Artificial Sequence: Synthetic oligonucleotide
ggaggcuauuucccaggug

SEQ ID NO: 1957329 - RNA, 19 nt, Artificial Sequence
  Description of Artificial Sequence: Synthetic oligonucleotide
gacuuggguucuuucccgu

SEQ ID NO: 1957330 - RNA, 19 nt, Artificial Sequence
  Description of Artificial Sequence: Synthetic oligonucleotide
aggcuuucgggaagcuaag

SEQ ID NO: 1957331 - RNA, 19 nt, Artificial Sequence
  Description of Artificial Sequence: Synthetic oligonucleotide
gcguccucauacaggaaag

SEQ ID NO: 1957332 - RNA, 19 nt, Artificial Sequence
  Description of Artificial Sequence: Synthetic oligonucleotide
ugggugaguccaggcaggu

SEQ ID NO: 1957333 - RNA, 19 nt, Artificial Sequence
  Description of Artificial Sequence: Synthetic oligonucleotide
gaguuuguucucugagcau

SEQ ID NO: 1957334 - RNA, 19 nt, Artificial Sequence
  Description of Artificial Sequence: Synthetic oligonucleotide
uugggaacguaggcuguua

SEQ ID NO: 1957335 - RNA, 19 nt, Artificial Sequence
  Description of Artificial Sequence: Synthetic oligonucleotide
cugccacaaucacccggcc

SEQ ID NO: 1957336 - RNA, 19 nt, Artificial Sequence
  Description of Artificial Sequence: Synthetic oligonucleotide
ugggguuacgaaggucaau

SEQ ID NO: 1957337 - RNA, 19 nt, Artificial Sequence
  Description of Artificial Sequence: Synthetic oligonucleotide
gagccacauugagaucccc

SEQ ID NO: 1957338 - RNA, 19 nt, Artificial Sequence
  Description of Artificial Sequence: Synthetic oligonucleotide
cagccuuaccagaccccug

SEQ ID NO: 1957339 - RNA, 19 nt, Artificial Sequence
  Description of Artificial Sequence: Synthetic oligonucleotide
cugcagggaguuuguucuc

SEQ ID NO: 1957340 - RNA, 19 nt, Artificial Sequence
  Description of Artificial Sequence: Synthetic oligonucleotide
aguuugccaccgggugacg

SEQ ID NO: 1957341 - RNA, 19 nt, Artificial Sequence
  Description of Artificial Sequence: Synthetic oligonucleotide
ggccuaaaggacacuggac

SEQ ID NO: 1957342 - RNA, 19 nt, Artificial Sequence
  Description of Artificial Sequence: Synthetic oligonucleotide
uagcccgagcauucaucau

SEQ ID NO: 1957343 - RNA, 19 nt, Artificial Sequence
  Description of Artificial Sequence: Synthetic oligonucleotide
gccaagagcuuuggagcgg

SEQ ID NO: 1957344 - RNA, 19 nt, Artificial Sequence
  Description of Artificial Sequence: Synthetic oligonucleotide
ccgaagcaguguuuacagc

SEQ ID NO: 1957345 - RNA, 19 nt, Artificial Sequence
  Description of Artificial Sequence: Synthetic oligonucleotide
ggacagugaucacugccaa

SEQ ID NO: 1957346 - RNA, 19 nt, Artificial Sequence
  Description of Artificial Sequence: Synthetic oligonucleotide
cuucuuaauccaggcucga

SEQ ID NO: 1957347 - RNA, 19 nt, Artificial Sequence
  Description of Artificial Sequence: Synthetic oligonucleotide
ggcaucccugugacgaaag

SEQ ID NO: 1957348 - RNA, 19 nt, Artificial Sequence
  Description of Artificial Sequence: Synthetic oligonucleotide
caggacaaaggagucaaau

SEQ ID NO: 1957349 - RNA, 19 nt, Artificial Sequence
  Description of Artificial Sequence: Synthetic oligonucleotide
aucacccggccuucuugau

SEQ ID NO: 1957350 - RNA, 19 nt, Artificial Sequence
  Description of Artificial Sequence: Synthetic oligonucleotide
ggggaguaaagccagcauu

SEQ ID NO: 1957351 - RNA, 19 nt, Artificial Sequence
  Description of Artificial Sequence: Synthetic oligonucleotide
aagcuugguuuaacauuua

SEQ ID NO: 1957352 - RNA, 19 nt, Artificial Sequence
  Description of Artificial Sequence: Synthetic oligonucleotide
ggggugucacagugcuagg

SEQ ID NO: 1957353 - RNA, 19 nt, Artificial Sequence
  Description of Artificial Sequence: Synthetic oligonucleotide
agaggcuuucgggaagcua

SEQ ID NO: 1957354 - RNA, 19 nt, Artificial Sequence
  Description of Artificial Sequence: Synthetic oligonucleotide
uugccaccgggugacguuu

SEQ ID NO: 1957355 - RNA, 19 nt, Artificial Sequence
  Description of Artificial Sequence: Synthetic oligonucleotide
acacuggacuugagaggag

SEQ ID NO: 1957356 - RNA, 19 nt, Artificial Sequence
  Description of Artificial Sequence: Synthetic oligonucleotide
ggcuuuaucccaacgcugu

SEQ ID NO: 1957357 - RNA, 19 nt, Artificial Sequence
  Description of Artificial Sequence: Synthetic oligonucleotide
gcuuuaucccaacgcuguc

SEQ ID NO: 1957358 - RNA, 19 nt, Artificial Sequence
  Description of Artificial Sequence: Synthetic oligonucleotide
ccgagcauucaucauguaa

SEQ ID NO: 1957359 - RNA, 19 nt, Artificial Sequence
  Description of Artificial Sequence: Synthetic oligonucleotide
cgggugacguuuuauuauc

SEQ ID NO: 1957360 - RNA, 19 nt, Artificial Sequence
  Description of Artificial Sequence: Synthetic oligonucleotide
ggcacuggcgggaaaguaa

SEQ ID NO: 1957361 - RNA, 19 nt, Artificial Sequence
  Description of Artificial Sequence: Synthetic oligonucleotide
gguacagccuguagcaacu

SEQ ID NO: 1957362 - RNA, 19 nt, Artificial Sequence
  Description of Artificial Sequence: Synthetic oligonucleotide
gugccggaagcugucagua

SEQ ID NO: 1957363 - RNA, 19 nt, Artificial Sequence
  Description of Artificial Sequence: Synthetic oligonucleotide
gcgggaaaguaagcccacg

SEQ ID NO: 1957364 - RNA, 19 nt, Artificial Sequence
  Description of Artificial Sequence: Synthetic oligonucleotide
ucaaaaccccggggccuaa

SEQ ID NO: 1957365 - RNA, 19 nt, Artificial Sequence
  Description of Artificial Sequence: Synthetic oligonucleotide
guguugggguagaggugcc

SEQ ID NO: 1957366 - RNA, 19 nt, Artificial Sequence
  Description of Artificial Sequence: Synthetic oligonucleotide
gggguuacgaaggucaauu

SEQ ID NO: 1957367 - RNA, 19 nt, Artificial Sequence
  Description of Artificial Sequence: Synthetic oligonucleotide
guacagccuguagcaacuc

SEQ ID NO: 1957368 - RNA, 19 nt, Artificial Sequence
  Description of Artificial Sequence: Synthetic oligonucleotide
caggcucgaagcccaucca

SEQ ID NO: 1957369 - RNA, 19 nt, Artificial Sequence
  Description of Artificial Sequence: Synthetic oligonucleotide
ccuguagcaacuccccaaa

SEQ ID NO: 1957370 - RNA, 19 nt, Artificial Sequence
  Description of Artificial Sequence: Synthetic oligonucleotide
ggcuauuucccagguguaa

SEQ ID NO: 1957371 - RNA, 19 nt, Artificial Sequence
  Description of Artificial Sequence: Synthetic oligonucleotide
gcaccgaagcaguguuuac

SEQ ID NO: 1957372 - RNA, 19 nt, Artificial Sequence
  Description of Artificial Sequence: Synthetic oligonucleotide
gccuuaccagaccccugcc

SEQ ID NO: 1957373 - RNA, 19 nt, Artificial Sequence
  Description of Artificial Sequence: Synthetic oligonucleotide
ccgacauucuuagcccgag

SEQ ID NO: 1957374 - RNA, 19 nt, Artificial Sequence
  Description of Artificial Sequence: Synthetic oligonucleotide
aggcuauuucccaggugua

SEQ ID NO: 1957375 - RNA, 19 nt, Artificial Sequence
  Description of Artificial Sequence: Synthetic oligonucleotide
ggaguaaagccagcauucu

SEQ ID NO: 1957376 - RNA, 19 nt, Artificial Sequence
  Description of Artificial Sequence: Synthetic oligonucleotide
aggcgccuggagcaccgaa

SEQ ID NO: 1957377 - RNA, 19 nt, Artificial Sequence
  Description of Artificial Sequence: Synthetic oligonucleotide
cugucgguacuccagccuu

SEQ ID NO: 1957378 - RNA, 19 nt, Artificial Sequence
  Description of Artificial Sequence: Synthetic oligonucleotide
cccggggccuaaaggacac

SEQ ID NO: 1957379 - RNA, 19 nt, Artificial Sequence
  Description of Artificial Sequence: Synthetic oligonucleotide
cccauccacguuccaggag

SEQ ID NO: 1957380 - RNA, 19 nt, Artificial Sequence
  Description of Artificial Sequence: Synthetic oligonucleotide
gugguacagccuguagcaa

SEQ ID NO: 1957381 - RNA, 19 nt, Artificial Sequence
  Description of Artificial Sequence: Synthetic oligonucleotide
ugccaccgggugacguuuu

SEQ ID NO: 1957382 - RNA, 19 nt, Artificial Sequence
  Description of Artificial Sequence: Synthetic oligonucleotide
cacguuccaggagcauauc

SEQ ID NO: 1957383 - RNA, 19 nt, Artificial Sequence
  Description of Artificial Sequence: Synthetic oligonucleotide
guuugccaccgggugacgu

SEQ ID NO: 1957384 - RNA, 19 nt, Artificial Sequence
  Description of Artificial Sequence: Synthetic oligonucleotide
ggcgggaaaguaagcccac

SEQ ID NO: 1957385 - RNA, 19 nt, Artificial Sequence
  Description of Artificial Sequence: Synthetic oligonucleotide
ggcaaguuugccaccgggu

SEQ ID NO: 1957386 - RNA, 19 nt, Artificial Sequence
  Description of Artificial Sequence: Synthetic oligonucleotide
gguagaggugccggaagcu

SEQ ID NO: 1957387 - RNA, 19 nt, Artificial Sequence
  Description of Artificial Sequence: Synthetic oligonucleotide
cccaaagcccuggcgcucc

SEQ ID NO: 1957388 - RNA, 19 nt, Artificial Sequence
  Description of Artificial Sequence: Synthetic oligonucleotide
ggugccggaagcugucagu

SEQ ID NO: 1957389 - RNA, 19 nt, Artificial Sequence
  Description of Artificial Sequence: Synthetic oligonucleotide
ccuaaaggacacuggacuu

SEQ ID NO: 1957390 - RNA, 19 nt, Artificial Sequence
  Description of Artificial Sequence: Synthetic oligonucleotide
gcugucgguacuccagccu

SEQ ID NO: 1957391 - RNA, 19 nt, Artificial Sequence
  Description of Artificial Sequence: Synthetic oligonucleotide
cgacauucuuagcccgagc

SEQ ID NO: 1957392 - RNA, 19 nt, Artificial Sequence
  Description of Artificial Sequence: Synthetic oligonucleotide
cacaagauaucuggugcuu

SEQ ID NO: 1957393 - RNA, 19 nt, Artificial Sequence
  Description of Artificial Sequence: Synthetic oligonucleotide
caccgggugacguuuuauu

SEQ ID NO: 1957394 - RNA, 19 nt, Artificial Sequence
  Description of Artificial Sequence: Synthetic oligonucleotide
gcccauccacguuccagga

SEQ ID NO: 1957395 - RNA, 19 nt, Artificial Sequence
  Description of Artificial Sequence: Synthetic oligonucleotide
ggagcggaucuugcuguca

SEQ ID NO: 1957396 - RNA, 19 nt, Artificial Sequence
  Description of Artificial Sequence: Synthetic oligonucleotide
auccacguuccaggagcau

SEQ ID NO: 1957397 - RNA, 19 nt, Artificial Sequence
  Description of Artificial Sequence: Synthetic oligonucleotide
ccacgccacuauauccuuc

SEQ ID NO: 1957398 - RNA, 19 nt, Artificial Sequence
  Description of Artificial Sequence: Synthetic oligonucleotide
gcugcuccuuuacucuucu

SEQ ID NO: 1957399 - RNA, 19 nt, Artificial Sequence
  Description of Artificial Sequence: Synthetic oligonucleotide
ggcgccauccgacauucuu

SEQ ID NO: 1957400 - RNA, 19 nt, Artificial Sequence
  Description of Artificial Sequence: Synthetic oligonucleotide
cccugccugcauugggaac

SEQ ID NO: 1957401 - RNA, 19 nt, Artificial Sequence
  Description of Artificial Sequence: Synthetic oligonucleotide
cccaaucuaaaccuuucuu

SEQ ID NO: 1957402 - RNA, 19 nt, Artificial Sequence
  Description of Artificial Sequence: Synthetic oligonucleotide
ccaggagcauaucuugagu

SEQ ID NO: 1957403 - RNA, 19 nt, Artificial Sequence
  Description of Artificial Sequence: Synthetic oligonucleotide
gggugacguuuuauuaucu

SEQ ID NO: 1957404 - RNA, 19 nt, Artificial Sequence
  Description of Artificial Sequence: Synthetic oligonucleotide
cguaggcuguuaccaggac

SEQ ID NO: 1957405 - RNA, 19 nt, Artificial Sequence
  Description of Artificial Sequence: Synthetic oligonucleotide
ggguucuuucccgucuucu

SEQ ID NO: 1957406 - RNA, 19 nt, Artificial Sequence
  Description of Artificial Sequence: Synthetic oligonucleotide
ggguuacgaaggucaauuu

SEQ ID NO: 1957407 - RNA, 19 nt, Artificial Sequence
  Description of Artificial Sequence: Synthetic oligonucleotide
cggggccuaaaggacacug

SEQ ID NO: 1957408 - RNA, 19 nt, Artificial Sequence
  Description of Artificial Sequence: Synthetic oligonucleotide
cccaacgcugucgguacuc

SEQ ID NO: 1957409 - RNA, 19 nt, Artificial Sequence
  Description of Artificial Sequence: Synthetic oligonucleotide
ccgggugacguuuuauuau

SEQ ID NO: 1957410 - RNA, 19 nt, Artificial Sequence
  Description of Artificial Sequence: Synthetic oligonucleotide
ccugugacgaaagcccuua

SEQ ID NO: 1957411 - RNA, 19 nt, Artificial Sequence
  Description of Artificial Sequence: Synthetic oligonucleotide
gcccgagcauucaucaugu

SEQ ID NO: 1957412 - RNA, 19 nt, Artificial Sequence
  Description of Artificial Sequence: Synthetic oligonucleotide
gcccacgccacuauauccu

SEQ ID NO: 1957413 - RNA, 19 nt, Artificial Sequence
  Description of Artificial Sequence: Synthetic oligonucleotide
ccacguuccaggagcauau

SEQ ID NO: 1957414 - RNA, 19 nt, Artificial Sequence
  Description of Artificial Sequence: Synthetic oligonucleotide
ccuuaggcgccuggagcac

SEQ ID NO: 1957415 - RNA, 19 nt, Artificial Sequence
  Description of Artificial Sequence: Synthetic oligonucleotide
cucugagcauuugguuucu

SEQ ID NO: 1957416 - RNA, 19 nt, Artificial Sequence
  Description of Artificial Sequence: Synthetic oligonucleotide
gacuugagaggaggcuauu

SEQ ID NO: 1957417 - RNA, 19 nt, Artificial Sequence
  Description of Artificial Sequence: Synthetic oligonucleotide
cgaaggucaauuucuucau

SEQ ID NO: 1957418 - RNA, 19 nt, Artificial Sequence
  Description of Artificial Sequence: Synthetic oligonucleotide
caaaaccccggggccuaaa

SEQ ID NO: 1957419 - RNA, 19 nt, Artificial Sequence
  Description of Artificial Sequence: Synthetic oligonucleotide
uggcgcuccuggggaguaa

SEQ ID NO: 1957420 - RNA, 19 nt, Artificial Sequence
  Description of Artificial Sequence: Synthetic oligonucleotide
ccacaaucacccggccuuc

SEQ ID NO: 1957421 - RNA, 19 nt, Artificial Sequence
  Description of Artificial Sequence: Synthetic oligonucleotide
ccggaagcugucaguaagu

SEQ ID NO: 1957422 - RNA, 19 nt, Artificial Sequence
  Description of Artificial Sequence: Synthetic oligonucleotide
ugccugcauugggaacgua

SEQ ID NO: 1957423 - RNA, 19 nt, Artificial Sequence
  Description of Artificial Sequence: Synthetic oligonucleotide
ccuuaccagaccccugccu

SEQ ID NO: 1957424 - RNA, 19 nt, Artificial Sequence
  Description of Artificial Sequence: Synthetic oligonucleotide
cccuggcgcuccuggggag

SEQ ID NO: 1957425 - RNA, 19 nt, Artificial Sequence
  Description of Artificial Sequence: Synthetic oligonucleotide
cacaaucacccggccuucu

SEQ ID NO: 1957426 - RNA, 19 nt, Artificial Sequence
  Description of Artificial Sequence: Synthetic oligonucleotide
caagagcuuuggagcggau

SEQ ID NO: 1957427 - RNA, 19 nt, Artificial Sequence
  Description of Artificial Sequence: Synthetic oligonucleotide
ggcuuucgggaagcuaagu

SEQ ID NO: 1957428 - RNA, 19 nt, Artificial Sequence
  Description of Artificial Sequence: Synthetic oligonucleotide
ccagccuuaccagaccccu

SEQ ID NO: 1957429 - RNA, 19 nt, Artificial Sequence
  Description of Artificial Sequence: Synthetic oligonucleotide
gagcaccgaagcaguguuu

SEQ ID NO: 1957430 - RNA, 19 nt, Artificial Sequence
  Description of Artificial Sequence: Synthetic oligonucleotide
guucugcagggaguuuguu

SEQ ID NO: 1957431 - RNA, 19 nt, Artificial Sequence
  Description of Artificial Sequence: Synthetic oligonucleotide
ccuuugggguuacgaaggu

SEQ ID NO: 1957432 - RNA, 19 nt, Artificial Sequence
  Description of Artificial Sequence: Synthetic oligonucleotide
cccggccuucuugaucaug

SEQ ID NO: 1957433 - RNA, 19 nt, Artificial Sequence
  Description of Artificial Sequence: Synthetic oligonucleotide
cuggcgcuccuggggagua

SEQ ID NO: 1957434 - RNA, 19 nt, Artificial Sequence
  Description of Artificial Sequence: Synthetic oligonucleotide
ccccaaagcccuggcgcuc

SEQ ID NO: 1957435 - RNA, 19 nt, Artificial Sequence
  Description of Artificial Sequence: Synthetic oligonucleotide
gccgcucucuucccacgcu

SEQ ID NO: 1957436 - RNA, 19 nt, Artificial Sequence
  Description of Artificial Sequence: Synthetic oligonucleotide
aggcgccauccgacauucu

SEQ ID NO: 1957437 - RNA, 19 nt, Artificial Sequence
  Description of Artificial Sequence: Synthetic oligonucleotide
gccaccgggugacguuuua

SEQ ID NO: 1957438 - RNA, 19 nt, Artificial Sequence
  Description of Artificial Sequence: Synthetic oligonucleotide
cccacgccacuauauccuu

SEQ ID NO: 1957439 - RNA, 19 nt, Artificial Sequence
  Description of Artificial Sequence: Synthetic oligonucleotide
cccgagcauucaucaugua

SEQ ID NO: 1957440 - RNA, 19 nt, Artificial Sequence
  Description of Artificial Sequence: Synthetic oligonucleotide
ccgcucucuucccacgcuu

SEQ ID NO: 1957441 - RNA, 19 nt, Artificial Sequence
  Description of Artificial Sequence: Synthetic oligonucleotide
ccggggccuaaaggacacu

SEQ ID NO: 1957442 - RNA, 19 nt, Artificial Sequence
  Description of Artificial Sequence: Synthetic oligonucleotide
ugaacuguaaucaaaaugg

SEQ ID NO: 1957443 - RNA, 19 nt, Artificial Sequence
  Description of Artificial Sequence: Synthetic oligonucleotide
aaauuaaugucacagaaug

SEQ ID NO: 1957444 - RNA, 19 nt, Artificial Sequence
  Description of Artificial Sequence: Synthetic oligonucleotide
uuuaguggcacaaauauac

SEQ ID NO: 1957445 - RNA, 19 nt, Artificial Sequence
  Description of Artificial Sequence: Synthetic oligonucleotide
aaguacugcaucccgaucc

SEQ ID NO: 1957446 - RNA, 19 nt, Artificial Sequence
  Description of Artificial Sequence: Synthetic oligonucleotide
uaguaaaguaauuauauca

SEQ ID NO: 1957447 - RNA, 19 nt, Artificial Sequence
  Description of Artificial Sequence: Synthetic oligonucleotide
uguaguaaaguaauuauau

SEQ ID NO: 1957448 - RNA, 19 nt, Artificial Sequence
  Description of Artificial Sequence: Synthetic oligonucleotide
uaaaagauauguaguaaag

SEQ ID NO: 1957449 - RNA, 19 nt, Artificial Sequence
  Description of Artificial Sequence: Synthetic oligonucleotide
ucuuuaagaacucuccaag

SEQ ID NO: 1957450 - RNA, 19 nt, Artificial Sequence
  Description of Artificial Sequence: Synthetic oligonucleotide
guuuacaacauuucugugg

SEQ ID NO: 1957451 - RNA, 19 nt, Artificial Sequence
  Description of Artificial Sequence: Synthetic oligonucleotide
uuagucucaccacagaacc

SEQ ID NO: 1957452 - RNA, 19 nt, Artificial Sequence
  Description of Artificial Sequence: Synthetic oligonucleotide
ucaucaauaagcuucgaga

SEQ ID NO: 1957453 - RNA, 19 nt, Artificial Sequence
  Description of Artificial Sequence: Synthetic oligonucleotide
uuaggcuccagucuuaacc

SEQ ID NO: 1957454 - RNA, 19 nt, Artificial Sequence
  Description of Artificial Sequence: Synthetic oligonucleotide
cauuugggaaucaagacag

SEQ ID NO: 1957455 - RNA, 19 nt, Artificial Sequence
  Description of Artificial Sequence: Synthetic oligonucleotide
gaaaggauagaguaaccag

SEQ ID NO: 1957456 - RNA, 19 nt, Artificial Sequence
  Description of Artificial Sequence: Synthetic oligonucleotide
auuuuaguggcacaaauau

SEQ ID NO: 1957457 - RNA, 19 nt, Artificial Sequence
  Description of Artificial Sequence: Synthetic oligonucleotide
uuauaucaauaaaauagcu

SEQ ID NO: 1957458 - RNA, 19 nt, Artificial Sequence
  Description of Artificial Sequence: Synthetic oligonucleotide
uaaaauagcuauuacuaaa

SEQ ID NO: 1957459 - RNA, 19 nt, Artificial Sequence
  Description of Artificial Sequence: Synthetic oligonucleotide
aauguuccccuauaaaaga

SEQ ID NO: 1957460 - RNA, 19 nt, Artificial Sequence
  Description of Artificial Sequence: Synthetic oligonucleotide
uauaucaauaaaauagcua

SEQ ID NO: 1957461 - RNA, 19 nt, Artificial Sequence
  Description of Artificial Sequence: Synthetic oligonucleotide
aaugcuugcaguucagaca

SEQ ID NO: 1957462 - RNA, 19 nt, Artificial Sequence
  Description of Artificial Sequence: Synthetic oligonucleotide
aacucuccaagguaucugg

SEQ ID NO: 1957463 - RNA, 19 nt, Artificial Sequence
  Description of Artificial Sequence: Synthetic oligonucleotide
ucaauaagcuucgagaacu

SEQ ID NO: 1957464 - RNA, 19 nt, Artificial Sequence
  Description of Artificial Sequence: Synthetic oligonucleotide
aaucaaaaugggcauuucu

SEQ ID NO: 1957465 - RNA, 19 nt, Artificial Sequence
  Description of Artificial Sequence: Synthetic oligonucleotide
agaacccacaccuaaaugu

SEQ ID NO: 1957466 - RNA, 19 nt, Artificial Sequence
  Description of Artificial Sequence: Synthetic oligonucleotide
gacuuaagaacagaguucc

SEQ ID NO: 1957467 - RNA, 19 nt, Artificial Sequence
  Description of Artificial Sequence: Synthetic oligonucleotide
ucuucucugacccagacuu

SEQ ID NO: 1957468 - RNA, 19 nt, Artificial Sequence
  Description of Artificial Sequence: Synthetic oligonucleotide
uucaucaauaagcuucgag

SEQ ID NO: 1957469 - RNA, 19 nt, Artificial Sequence
  Description of Artificial Sequence: Synthetic oligonucleotide
cuuucaucaauaagcuucg

SEQ ID NO: 1957470 - RNA, 19 nt, Artificial Sequence
  Description of Artificial Sequence: Synthetic oligonucleotide
agaauguuccccuauaaaa

SEQ ID NO: 1957471 - RNA, 19 nt, Artificial Sequence
  Description of Artificial Sequence: Synthetic oligonucleotide
gaauguuccccuauaaaag

SEQ ID NO: 1957472 - RNA, 19 nt, Artificial Sequence
  Description of Artificial Sequence: Synthetic oligonucleotide
cuuuaagaacucuccaagg

SEQ ID NO: 1957473 - RNA, 19 nt, Artificial Sequence
  Description of Artificial Sequence: Synthetic oligonucleotide
uccccuauaaaagauaugu

SEQ ID NO: 1957474 - RNA, 19 nt, Artificial Sequence
  Description of Artificial Sequence: Synthetic oligonucleotide
acuaccucagaacuguguc

SEQ ID NO: 1957475 - RNA, 19 nt, Artificial Sequence
  Description of Artificial Sequence: Synthetic oligonucleotide
aauggcuucacaaaauggu

SEQ ID NO: 1957476 - RNA, 19 nt, Artificial Sequence
  Description of Artificial Sequence: Synthetic oligonucleotide
uuugggaaucaagacaggg

SEQ ID NO: 1957477 - RNA, 19 nt, Artificial Sequence
  Description of Artificial Sequence: Synthetic oligonucleotide
agaacagaguuccauccac

SEQ ID NO: 1957478 - RNA, 19 nt, Artificial Sequence
  Description of Artificial Sequence: Synthetic oligonucleotide
accuaaaugucacccauuc

SEQ ID NO: 1957479 - RNA, 19 nt, Artificial Sequence
  Description of Artificial Sequence: Synthetic oligonucleotide
aaacccuaccaaaaucugc

SEQ ID NO: 1957480 - RNA, 19 nt, Artificial Sequence
  Description of Artificial Sequence: Synthetic oligonucleotide
uucagagagguccagucgc

SEQ ID NO: 1957481 - RNA, 19 nt, Artificial Sequence
  Description of Artificial Sequence: Synthetic oligonucleotide
aucaauaagcuucgagaac

SEQ ID NO: 1957482 - RNA, 19 nt, Artificial Sequence
  Description of Artificial Sequence: Synthetic oligonucleotide
aucaagacagggcaagggg

SEQ ID NO: 1957483 - RNA, 19 nt, Artificial Sequence
  Description of Artificial Sequence: Synthetic oligonucleotide
caagguaucuggaggagcg

SEQ ID NO: 1957484 - RNA, 19 nt, Artificial Sequence
  Description of Artificial Sequence: Synthetic oligonucleotide
ucuugcauccgcuuuaccu

SEQ ID NO: 1957485 - RNA, 19 nt, Artificial Sequence
  Description of Artificial Sequence: Synthetic oligonucleotide
acauuugggaaucaagaca

SEQ ID NO: 1957486 - RNA, 19 nt, Artificial Sequence
  Description of Artificial Sequence: Synthetic oligonucleotide
ucgagaacuuugaaggaag

SEQ ID NO: 1957487 - RNA, 19 nt, Artificial Sequence
  Description of Artificial Sequence: Synthetic oligonucleotide
aaucaagacagggcaaggg

SEQ ID NO: 1957488 - RNA, 19 nt, Artificial Sequence
  Description of Artificial Sequence: Synthetic oligonucleotide
aguucagagagguccaguc

SEQ ID NO: 1957489 - RNA, 19 nt, Artificial Sequence
  Description of Artificial Sequence: Synthetic oligonucleotide
uguacucagagaaguacug

SEQ ID NO: 1957490 - RNA, 19 nt, Artificial Sequence
  Description of Artificial Sequence: Synthetic oligonucleotide
aaaugguaguccagguucc

SEQ ID NO: 1957491 - RNA, 19 nt, Artificial Sequence
  Description of Artificial Sequence: Synthetic oligonucleotide
uaagcuucgagaacuuuga

SEQ ID NO: 1957492 - RNA, 19 nt, Artificial Sequence
  Description of Artificial Sequence: Synthetic oligonucleotide
ugcccgguggcacaaagcg

SEQ ID NO: 1957493 - RNA, 19 nt, Artificial Sequence
  Description of Artificial Sequence: Synthetic oligonucleotide
aaggauagaguaaccagag

SEQ ID NO: 1957494 - RNA, 19 nt, Artificial Sequence
  Description of Artificial Sequence: Synthetic oligonucleotide
aacuuccuuagauccucgc

SEQ ID NO: 1957495 - RNA, 19 nt, Artificial Sequence
  Description of Artificial Sequence: Synthetic oligonucleotide
uggcuucacaaaaugguag

SEQ ID NO: 1957496 - RNA, 19 nt, Artificial Sequence
  Description of Artificial Sequence: Synthetic oligonucleotide
guggcacaaauauacaaag

SEQ ID NO: 1957497 - RNA, 19 nt, Artificial Sequence
  Description of Artificial Sequence: Synthetic oligonucleotide
uuaaugucacagaauguuc

SEQ ID NO: 1957498 - RNA, 19 nt, Artificial Sequence
  Description of Artificial Sequence: Synthetic oligonucleotide
agagaaguacugcaucccg

SEQ ID NO: 1957499 - RNA, 19 nt, Artificial Sequence
  Description of Artificial Sequence: Synthetic oligonucleotide
uugggaaucaagacagggc

SEQ ID NO: 1957500 - RNA, 19 nt, Artificial Sequence
  Description of Artificial Sequence: Synthetic oligonucleotide
ucaaacacaggaagugccc

SEQ ID NO: 1957501 - RNA, 19 nt, Artificial Sequence
  Description of Artificial Sequence: Synthetic oligonucleotide
uuaagaacagaguuccauc

SEQ ID NO: 1957502 - RNA, 19 nt, Artificial Sequence
  Description of Artificial Sequence: Synthetic oligonucleotide
gacauuugggaaucaagac

SEQ ID NO: 1957503 - RNA, 19 nt, Artificial Sequence
  Description of Artificial Sequence: Synthetic oligonucleotide
uuaagaacucuccaaggua

SEQ ID NO: 1957504 - RNA, 19 nt, Artificial Sequence
  Description of Artificial Sequence: Synthetic oligonucleotide
auuaaugucacagaauguu

SEQ ID NO: 1957505 - RNA, 19 nt, Artificial Sequence
  Description of Artificial Sequence: Synthetic oligonucleotide
acauggaaaguguucagcu

SEQ ID NO: 1957506 - RNA, 19 nt, Artificial Sequence
  Description of Artificial Sequence: Synthetic oligonucleotide
ugugucagagauucugcag

SEQ ID NO: 1957507 - RNA, 19 nt, Artificial Sequence
  Description of Artificial Sequence: Synthetic oligonucleotide
uuccuacuaccucagaacu

SEQ ID NO: 1957508 - RNA, 19 nt, Artificial Sequence
  Description of Artificial Sequence: Synthetic oligonucleotide
auccgcuuuaccugguacc

SEQ ID NO: 1957509 - RNA, 19 nt, Artificial Sequence
  Description of Artificial Sequence: Synthetic oligonucleotide
acaucgaucacaggcuugc

SEQ ID NO: 1957510 - RNA, 19 nt, Artificial Sequence
  Description of Artificial Sequence: Synthetic oligonucleotide
cccuauaaaagauauguag

SEQ ID NO: 1957511 - RNA, 19 nt, Artificial Sequence
  Description of Artificial Sequence: Synthetic oligonucleotide
ucuuccuacuaccucagaa

SEQ ID NO: 1957512 - RNA, 19 nt, Artificial Sequence
  Description of Artificial Sequence: Synthetic oligonucleotide
cuugcauccgcuuuaccug

SEQ ID NO: 1957513 - RNA, 19 nt, Artificial Sequence
  Description of Artificial Sequence: Synthetic oligonucleotide
ugucaaagugcccugcccu

SEQ ID NO: 1957514 - RNA, 19 nt, Artificial Sequence
  Description of Artificial Sequence: Synthetic oligonucleotide
augacuucccauuuaggcu

SEQ ID NO: 1957515 - RNA, 19 nt, Artificial Sequence
  Description of Artificial Sequence: Synthetic oligonucleotide
agaugaauggcauucuuua

SEQ ID NO: 1957516 - RNA, 19 nt, Artificial Sequence
  Description of Artificial Sequence: Synthetic oligonucleotide
gaacuguaaucaaaauggg

SEQ ID NO: 1957517 - RNA, 19 nt, Artificial Sequence
  Description of Artificial Sequence: Synthetic oligonucleotide
gaugugagcgagcaguuca

SEQ ID NO: 1957518 - RNA, 19 nt, Artificial Sequence
  Description of Artificial Sequence: Synthetic oligonucleotide
cuuccuacuaccucagaac

SEQ ID NO: 1957519 - RNA, 19 nt, Artificial Sequence
  Description of Artificial Sequence: Synthetic oligonucleotide
agagaauggcuucacaaaa

SEQ ID NO: 1957520 - RNA, 19 nt, Artificial Sequence
  Description of Artificial Sequence: Synthetic oligonucleotide
aagaaugaacuuccuuaga

SEQ ID NO: 1957521 - RNA, 19 nt, Artificial Sequence
  Description of Artificial Sequence: Synthetic oligonucleotide
cuugagggacuuaagaaca

SEQ ID NO: 1957522 - RNA, 19 nt, Artificial Sequence
  Description of Artificial Sequence: Synthetic oligonucleotide
aaugguaguccagguuccc

SEQ ID NO: 1957523 - RNA, 19 nt, Artificial Sequence
  Description of Artificial Sequence: Synthetic oligonucleotide
aacccuaccaaaaucugca

SEQ ID NO: 1957524 - RNA, 19 nt, Artificial Sequence
  Description of Artificial Sequence: Synthetic oligonucleotide
cagcccucgauuuuagugg

SEQ ID NO: 1957525 - RNA, 19 nt, Artificial Sequence
  Description of Artificial Sequence: Synthetic oligonucleotide
cugacauuugggaaucaag

SEQ ID NO: 1957526 - RNA, 19 nt, Artificial Sequence
  Description of Artificial Sequence: Synthetic oligonucleotide
ucgaucacaggcuugccac

SEQ ID NO: 1957527 - RNA, 19 nt, Artificial Sequence
  Description of Artificial Sequence: Synthetic oligonucleotide
aggagacugaaacccuacc

SEQ ID NO: 1957528 - RNA, 19 nt, Artificial Sequence
  Description of Artificial Sequence: Synthetic oligonucleotide
acauuucuguggcuggcac

SEQ ID NO: 1957529 - RNA, 19 nt, Artificial Sequence
  Description of Artificial Sequence: Synthetic oligonucleotide
guaguaaaguaauuauauc

SEQ ID NO: 1957530 - RNA, 19 nt, Artificial Sequence
  Description of Artificial Sequence: Synthetic oligonucleotide
ucacaaaaugguaguccag

SEQ ID NO: 1957531 - RNA, 19 nt, Artificial Sequence
  Description of Artificial Sequence: Synthetic oligonucleotide
augcuugcaguucagacau

SEQ ID NO: 1957532 - RNA, 19 nt, Artificial Sequence
  Description of Artificial Sequence: Synthetic oligonucleotide
caucccgauccguacaucg

SEQ ID NO: 1957533 - RNA, 19 nt, Artificial Sequence
  Description of Artificial Sequence: Synthetic oligonucleotide
aauuaaugucacagaaugu

SEQ ID NO: 1957534 - RNA, 19 nt, Artificial Sequence
  Description of Artificial Sequence: Synthetic oligonucleotide
aguacugcaucccgauccg

SEQ ID NO: 1957535 - RNA, 19 nt, Artificial Sequence
  Description of Artificial Sequence: Synthetic oligonucleotide
agauauguaguaaaguaau

SEQ ID NO: 1957536 - RNA, 19 nt, Artificial Sequence
  Description of Artificial Sequence: Synthetic oligonucleotide
gacauucaaucucaucaug

SEQ ID NO: 1957537 - RNA, 19 nt, Artificial Sequence
  Description of Artificial Sequence: Synthetic oligonucleotide
uugcaguucagacauucaa

SEQ ID NO: 1957538 - RNA, 19 nt, Artificial Sequence
  Description of Artificial Sequence: Synthetic oligonucleotide
caaaaucugcaugacuucc

SEQ ID NO: 1957539 - RNA, 19 nt, Artificial Sequence
  Description of Artificial Sequence: Synthetic oligonucleotide
ugagcgagcaguucagaga

SEQ ID NO: 1957540 - RNA, 19 nt, Artificial Sequence
  Description of Artificial Sequence: Synthetic oligonucleotide
agagagguccagucgccgc

SEQ ID NO: 1957541 - RNA, 19 nt, Artificial Sequence
  Description of Artificial Sequence: Synthetic oligonucleotide
uuaugccuggggaugugag

SEQ ID NO: 1957542 - RNA, 19 nt, Artificial Sequence
  Description of Artificial Sequence: Synthetic oligonucleotide
acuaaagugggcuggggaa

SEQ ID NO: 1957543 - RNA, 19 nt, Artificial Sequence
  Description of Artificial Sequence: Synthetic oligonucleotide
uaggcuccagucuuaacca

SEQ ID NO: 1957544 - RNA, 19 nt, Artificial Sequence
  Description of Artificial Sequence: Synthetic oligonucleotide
cauucaaucucaucauguc

SEQ ID NO: 1957545 - RNA, 19 nt, Artificial Sequence
  Description of Artificial Sequence: Synthetic oligonucleotide
auagaguaaccagagggug

SEQ ID NO: 1957546 - RNA, 19 nt, Artificial Sequence
  Description of Artificial Sequence: Synthetic oligonucleotide
auaagcuucgagaacuuug

SEQ ID NO: 1957547 - RNA, 19 nt, Artificial Sequence
  Description of Artificial Sequence: Synthetic oligonucleotide
guucagagagguccagucg

SEQ ID NO: 1957548 - RNA, 19 nt, Artificial Sequence
  Description of Artificial Sequence: Synthetic oligonucleotide
uagauccucgccuuggccu

SEQ ID NO: 1957549 - RNA, 19 nt, Artificial Sequence
  Description of Artificial Sequence: Synthetic oligonucleotide
uaccucagaacugugucag

SEQ ID NO: 1957550 - RNA, 19 nt, Artificial Sequence
  Description of Artificial Sequence: Synthetic oligonucleotide
cauugcuguacucagagaa

SEQ ID NO: 1957551 - RNA, 19 nt, Artificial Sequence
  Description of Artificial Sequence: Synthetic oligonucleotide
uaguggcacaaauauacaa

SEQ ID NO: 1957552 - RNA, 19 nt, Artificial Sequence
  Description of Artificial Sequence: Synthetic oligonucleotide
uugagggacuuaagaacag

SEQ ID NO: 1957553 - RNA, 19 nt, Artificial Sequence
  Description of Artificial Sequence: Synthetic oligonucleotide
ugcaguucagacauucaau

SEQ ID NO: 1957554 - RNA, 19 nt, Artificial Sequence
  Description of Artificial Sequence: Synthetic oligonucleotide
uuagauccucgccuuggcc

SEQ ID NO: 1957555 - RNA, 19 nt, Artificial Sequence
  Description of Artificial Sequence: Synthetic oligonucleotide
cauccgaacauggaaagug

SEQ ID NO: 1957556 - RNA, 19 nt, Artificial Sequence
  Description of Artificial Sequence: Synthetic oligonucleotide
auggaaaguguucagcuua

SEQ ID NO: 1957557 - RNA, 19 nt, Artificial Sequence
  Description of Artificial Sequence: Synthetic oligonucleotide
ugggcgucaucuuccaucc

SEQ ID NO: 1957558 - RNA, 19 nt, Artificial Sequence
  Description of Artificial Sequence: Synthetic oligonucleotide
agggcugcaagaaugaacu

SEQ ID NO: 1957559 - RNA, 19 nt, Artificial Sequence
  Description of Artificial Sequence: Synthetic oligonucleotide
cugcaggagacugaaaccc

SEQ ID NO: 1957560 - RNA, 19 nt, Artificial Sequence
  Description of Artificial Sequence: Synthetic oligonucleotide
uaccaaaaucugcaugacu

SEQ ID NO: 1957561 - RNA, 19 nt, Artificial Sequence
  Description of Artificial Sequence: Synthetic oligonucleotide
gcuauuacuaaagcaaagc

SEQ ID NO: 1957562 - RNA, 19 nt, Artificial Sequence
  Description of Artificial Sequence: Synthetic oligonucleotide
guaaccagagggugugggg

SEQ ID NO: 1957563 - RNA, 19 nt, Artificial Sequence
  Description of Artificial Sequence: Synthetic oligonucleotide
ucccauuuaggcuccaguc

SEQ ID NO: 1957564 - RNA, 19 nt, Artificial Sequence
  Description of Artificial Sequence: Synthetic oligonucleotide
ugucagagauucugcagga

SEQ ID NO: 1957565 - RNA, 19 nt, Artificial Sequence
  Description of Artificial Sequence: Synthetic oligonucleotide
gaaucaagacagggcaagg

SEQ ID NO: 1957566 - RNA, 19 nt, Artificial Sequence
  Description of Artificial Sequence: Synthetic oligonucleotide
uguucuagggguucugcau

SEQ ID NO: 1957567 - RNA, 19 nt, Artificial Sequence
  Description of Artificial Sequence: Synthetic oligonucleotide
aguaaccagaggguguggg

SEQ ID NO: 1957568 - RNA, 19 nt, Artificial Sequence
  Description of Artificial Sequence: Synthetic oligonucleotide
uaaccagaggguguggggc

SEQ ID NO: 1957569 - RNA, 19 nt, Artificial Sequence
  Description of Artificial Sequence: Synthetic oligonucleotide
agacauucaaucucaucau

SEQ ID NO: 1957570 - RNA, 19 nt, Artificial Sequence
  Description of Artificial Sequence: Synthetic oligonucleotide
uccuacuaccucagaacug

SEQ ID NO: 1957571 - RNA, 19 nt, Artificial Sequence
  Description of Artificial Sequence: Synthetic oligonucleotide
acauucaaucucaucaugu

SEQ ID NO: 1957572 - RNA, 19 nt, Artificial Sequence
  Description of Artificial Sequence: Synthetic oligonucleotide
ccguacaucgaucacaggc

SEQ ID NO: 1957573 - RNA, 19 nt, Artificial Sequence
  Description of Artificial Sequence: Synthetic oligonucleotide
ucagcuuaugccuggggau

SEQ ID NO: 1957574 - RNA, 19 nt, Artificial Sequence
  Description of Artificial Sequence: Synthetic oligonucleotide
agaaguacugcaucccgau

SEQ ID NO: 1957575 - RNA, 19 nt, Artificial Sequence
  Description of Artificial Sequence: Synthetic oligonucleotide
uugggcgucaucuuccauc

SEQ ID NO: 1957576 - RNA, 19 nt, Artificial Sequence
  Description of Artificial Sequence: Synthetic oligonucleotide
uacuaccucagaacugugu

SEQ ID NO: 1957577 - RNA, 19 nt, Artificial Sequence
  Description of Artificial Sequence: Synthetic oligonucleotide
cugaaacccuaccaaaauc

SEQ ID NO: 1957578 - RNA, 19 nt, Artificial Sequence
  Description of Artificial Sequence: Synthetic oligonucleotide
cucuccaagguaucuggag

SEQ ID NO: 1957579 - RNA, 19 nt, Artificial Sequence
  Description of Artificial Sequence: Synthetic oligonucleotide
uguuccccuauaaaagaua

SEQ ID NO: 1957580 - RNA, 19 nt, Artificial Sequence
  Description of Artificial Sequence: Synthetic oligonucleotide
gaaacccuaccaaaaucug

SEQ ID NO: 1957581 - RNA, 19 nt, Artificial Sequence
  Description of Artificial Sequence: Synthetic oligonucleotide
uucccauuuaggcuccagu

SEQ ID NO: 1957582 - RNA, 19 nt, Artificial Sequence
  Description of Artificial Sequence: Synthetic oligonucleotide
agaguaaccagagggugug

SEQ ID NO: 1957583 - RNA, 19 nt, Artificial Sequence
  Description of Artificial Sequence: Synthetic oligonucleotide
aagaacucuccaagguauc

SEQ ID NO: 1957584 - RNA, 19 nt, Artificial Sequence
  Description of Artificial Sequence: Synthetic oligonucleotide
acaggcuugccacaaugcu

SEQ ID NO: 1957585 - RNA, 19 nt, Artificial Sequence
  Description of Artificial Sequence: Synthetic oligonucleotide
guacaggggugucaaagug

SEQ ID NO: 1957586 - RNA, 19 nt, Artificial Sequence
  Description of Artificial Sequence: Synthetic oligonucleotide
uucgagaacuuugaaggaa

SEQ ID NO: 1957587 - RNA, 19 nt, Artificial Sequence
  Description of Artificial Sequence: Synthetic oligonucleotide
gaccacuaaagugggcugg

SEQ ID NO: 1957588 - RNA, 19 nt, Artificial Sequence
  Description of Artificial Sequence: Synthetic oligonucleotide
uaugccuggggaugugagc

SEQ ID NO: 1957589 - RNA, 19 nt, Artificial Sequence
  Description of Artificial Sequence: Synthetic oligonucleotide
acagaacccacaccuaaau

SEQ ID NO: 1957590 - RNA, 19 nt, Artificial Sequence
  Description of Artificial Sequence: Synthetic oligonucleotide
ucagacauucaaucucauc

SEQ ID NO: 1957591 - RNA, 19 nt, Artificial Sequence
  Description of Artificial Sequence: Synthetic oligonucleotide
uagucucaccacagaaccc

SEQ ID NO: 1957592 - RNA, 19 nt, Artificial Sequence
  Description of Artificial Sequence: Synthetic oligonucleotide
gauccguacaucgaucaca

SEQ ID NO: 1957593 - RNA, 19 nt, Artificial Sequence
  Description of Artificial Sequence: Synthetic oligonucleotide
gaguuccauccacuagugg

SEQ ID NO: 1957594 - RNA, 19 nt, Artificial Sequence
  Description of Artificial Sequence: Synthetic oligonucleotide
aaccagaggguguggggcu

SEQ ID NO: 1957595 - RNA, 19 nt, Artificial Sequence
  Description of Artificial Sequence: Synthetic oligonucleotide
aguggcacaaauauacaaa

SEQ ID NO: 1957596 - RNA, 19 nt, Artificial Sequence
  Description of Artificial Sequence: Synthetic oligonucleotide
agaaacuguacaggggugu

SEQ ID NO: 1957597 - RNA, 19 nt, Artificial Sequence
  Description of Artificial Sequence: Synthetic oligonucleotide
acuagugggaacuguucaa

SEQ ID NO: 1957598 - RNA, 19 nt, Artificial Sequence
  Description of Artificial Sequence: Synthetic oligonucleotide
gauuuuaguggcacaaaua

SEQ ID NO: 1957599 - RNA, 19 nt, Artificial Sequence
  Description of Artificial Sequence: Synthetic oligonucleotide
ugcaggagacugaaacccu

SEQ ID NO: 1957600 - RNA, 19 nt, Artificial Sequence
  Description of Artificial Sequence: Synthetic oligonucleotide
gcaguucagacauucaauc

SEQ ID NO: 1957601 - RNA, 19 nt, Artificial Sequence
  Description of Artificial Sequence: Synthetic oligonucleotide
uccacuagugggaacuguu

SEQ ID NO: 1957602 - RNA, 19 nt, Artificial Sequence
  Description of Artificial Sequence: Synthetic oligonucleotide
gauagaguaaccagagggu

SEQ ID NO: 1957603 - RNA, 19 nt, Artificial Sequence
  Description of Artificial Sequence: Synthetic oligonucleotide
aacauuucuguggcuggca

SEQ ID NO: 1957604 - RNA, 19 nt, Artificial Sequence
  Description of Artificial Sequence: Synthetic oligonucleotide
gaauggcauucuuuaagaa

SEQ ID NO: 1957605 - RNA, 19 nt, Artificial Sequence
  Description of Artificial Sequence: Synthetic oligonucleotide
uggacacugcuggacauug

SEQ ID NO: 1957606 - RNA, 19 nt, Artificial Sequence
  Description of Artificial Sequence: Synthetic oligonucleotide
ucacccauucuuccuacua

SEQ ID NO: 1957607 - RNA, 19 nt, Artificial Sequence
  Description of Artificial Sequence: Synthetic oligonucleotide
ggaaucaagacagggcaag

SEQ ID NO: 1957608 - RNA, 19 nt, Artificial Sequence
  Description of Artificial Sequence: Synthetic oligonucleotide
gaacccacaccuaaauguc

SEQ ID NO: 1957609 - RNA, 19 nt, Artificial Sequence
  Description of Artificial Sequence: Synthetic oligonucleotide
uguucagcuuaugccuggg

SEQ ID NO: 1957610 - RNA, 19 nt, Artificial Sequence
  Description of Artificial Sequence: Synthetic oligonucleotide
uuaaccacacacugacauu

SEQ ID NO: 1957611 - RNA, 19 nt, Artificial Sequence
  Description of Artificial Sequence: Synthetic oligonucleotide
ccuaccaaaaucugcauga

SEQ ID NO: 1957612 - RNA, 19 nt, Artificial Sequence
  Description of Artificial Sequence: Synthetic oligonucleotide
uccgcuuuaccugguacca

SEQ ID NO: 1957613 - RNA, 19 nt, Artificial Sequence
  Description of Artificial Sequence: Synthetic oligonucleotide
ucacagaauguuccccuau

SEQ ID NO: 1957614 - RNA, 19 nt, Artificial Sequence
  Description of Artificial Sequence: Synthetic oligonucleotide
gaacucuccaagguaucug

SEQ ID NO: 1957615 - RNA, 19 nt, Artificial Sequence
  Description of Artificial Sequence: Synthetic oligonucleotide
ucgccuuggccuacuuggg

SEQ ID NO: 1957616 - RNA, 19 nt, Artificial Sequence
  Description of Artificial Sequence: Synthetic oligonucleotide
cuuguucuagggguucugc

SEQ ID NO: 1957617 - RNA, 19 nt, Artificial Sequence
  Description of Artificial Sequence: Synthetic oligonucleotide
cagagaaguacugcauccc

SEQ ID NO: 1957618 - RNA, 19 nt, Artificial Sequence
  Description of Artificial Sequence: Synthetic oligonucleotide
cacagcgacaggaacagaa

SEQ ID NO: 1957619 - RNA, 19 nt, Artificial Sequence
  Description of Artificial Sequence: Synthetic oligonucleotide
uccaagguaucuggaggag

SEQ ID NO: 1957620 - RNA, 19 nt, Artificial Sequence
  Description of Artificial Sequence: Synthetic oligonucleotide
cagaaacuguacaggggug

SEQ ID NO: 1957621 - RNA, 19 nt, Artificial Sequence
  Description of Artificial Sequence: Synthetic oligonucleotide
gcagcccucgauuuuagug

SEQ ID NO: 1957622 - RNA, 19 nt, Artificial Sequence
  Description of Artificial Sequence: Synthetic oligonucleotide
aaagugcccugcccugugu

SEQ ID NO: 1957623 - RNA, 19 nt, Artificial Sequence
  Description of Artificial Sequence: Synthetic oligonucleotide
gagggcugcaagaaugaac

SEQ ID NO: 1957624 - RNA, 19 nt, Artificial Sequence
  Description of Artificial Sequence: Synthetic oligonucleotide
aucuuccauccgaacaugg

SEQ ID NO: 1957625 - RNA, 19 nt, Artificial Sequence
  Description of Artificial Sequence: Synthetic oligonucleotide
gucaaagugcccugcccug

SEQ ID NO: 1957626 - RNA, 19 nt, Artificial Sequence
  Description of Artificial Sequence: Synthetic oligonucleotide
cagaacccacaccuaaaug

SEQ ID NO: 1957627 - RNA, 19 nt, Artificial Sequence
  Description of Artificial Sequence: Synthetic oligonucleotide
accacuaaagugggcuggg

SEQ ID NO: 1957628 - RNA, 19 nt, Artificial Sequence
  Description of Artificial Sequence: Synthetic oligonucleotide
ggaaaggauagaguaacca

SEQ ID NO: 1957629 - RNA, 19 nt, Artificial Sequence
  Description of Artificial Sequence: Synthetic oligonucleotide
acagacagcccagcugaac

SEQ ID NO: 1957630 - RNA, 19 nt, Artificial Sequence
  Description of Artificial Sequence: Synthetic oligonucleotide
agugcccgguggcacaaag

SEQ ID NO: 1957631 - RNA, 19 nt, Artificial Sequence
  Description of Artificial Sequence: Synthetic oligonucleotide
uccgaacauggaaaguguu

SEQ ID NO: 1957632 - RNA, 19 nt, Artificial Sequence
  Description of Artificial Sequence: Synthetic oligonucleotide
aguguucagcuuaugccug

SEQ ID NO: 1957633 - RNA, 19 nt, Artificial Sequence
  Description of Artificial Sequence: Synthetic oligonucleotide
uguguucuucucugaccca

SEQ ID NO: 1957634 - RNA, 19 nt, Artificial Sequence
  Description of Artificial Sequence: Synthetic oligonucleotide
ugucacccauucuuccuac

SEQ ID NO: 1957635 - RNA, 19 nt, Artificial Sequence
  Description of Artificial Sequence: Synthetic oligonucleotide
ucccgauccguacaucgau

SEQ ID NO: 1957636 - RNA, 19 nt, Artificial Sequence
  Description of Artificial Sequence: Synthetic oligonucleotide
caggagacugaaacccuac

SEQ ID NO: 1957637 - RNA, 19 nt, Artificial Sequence
  Description of Artificial Sequence: Synthetic oligonucleotide
ugcaucccgauccguacau

SEQ ID NO: 1957638 - RNA, 19 nt, Artificial Sequence
  Description of Artificial Sequence: Synthetic oligonucleotide
aagcuucgagaacuuugaa

SEQ ID NO: 1957639 - RNA, 19 nt, Artificial Sequence
  Description of Artificial Sequence: Synthetic oligonucleotide
aggcucaagaugaauggca

SEQ ID NO: 1957640 - RNA, 19 nt, Artificial Sequence
  Description of Artificial Sequence: Synthetic oligonucleotide
uaaucaaaaugggcauuuc

SEQ ID NO: 1957641 - RNA, 19 nt, Artificial Sequence
  Description of Artificial Sequence: Synthetic oligonucleotide
uucagacauucaaucucau

SEQ ID NO: 1957642 - RNA, 19 nt, Artificial Sequence
  Description of Artificial Sequence: Synthetic oligonucleotide
ccuauaaaagauauguagu

SEQ ID NO: 1957643 - RNA, 19 nt, Artificial Sequence
  Description of Artificial Sequence: Synthetic oligonucleotide
cacuagugggaacuguuca

SEQ ID NO: 1957644 - RNA, 19 nt, Artificial Sequence
  Description of Artificial Sequence: Synthetic oligonucleotide
uuuaggcuccagucuuaac

SEQ ID NO: 1957645 - RNA, 19 nt, Artificial Sequence
  Description of Artificial Sequence: Synthetic oligonucleotide
ugcccuguguacagacagc

SEQ ID NO: 1957646 - RNA, 19 nt, Artificial Sequence
  Description of Artificial Sequence: Synthetic oligonucleotide
cauccgcuuuaccugguac

SEQ ID NO: 1957647 - RNA, 19 nt, Artificial Sequence
  Description of Artificial Sequence: Synthetic oligonucleotide
cuucgagaacuuugaagga

SEQ ID NO: 1957648 - RNA, 19 nt, Artificial Sequence
  Description of Artificial Sequence: Synthetic oligonucleotide
agcgcaguuuacaacauuu

SEQ ID NO: 1957649 - RNA, 19 nt, Artificial Sequence
  Description of Artificial Sequence: Synthetic oligonucleotide
ccgcagaaacuguacaggg

SEQ ID NO: 1957650 - RNA, 19 nt, Artificial Sequence
  Description of Artificial Sequence: Synthetic oligonucleotide
gggacuuaagaacagaguu

SEQ ID NO: 1957651 - RNA, 19 nt, Artificial Sequence
  Description of Artificial Sequence: Synthetic oligonucleotide
cuaccucagaacuguguca

SEQ ID NO: 1957652 - RNA, 19 nt, Artificial Sequence
  Description of Artificial Sequence: Synthetic oligonucleotide
agggacuuaagaacagagu

SEQ ID NO: 1957653 - RNA, 19 nt, Artificial Sequence
  Description of Artificial Sequence: Synthetic oligonucleotide
cacuaaagugggcugggga

SEQ ID NO: 1957654 - RNA, 19 nt, Artificial Sequence
  Description of Artificial Sequence: Synthetic oligonucleotide
cugugucagagauucugca

SEQ ID NO: 1957655 - RNA, 19 nt, Artificial Sequence
  Description of Artificial Sequence: Synthetic oligonucleotide
ucgauuuuaguggcacaaa

SEQ ID NO: 1957656 - RNA, 19 nt, Artificial Sequence
  Description of Artificial Sequence: Synthetic oligonucleotide
gcacaaauauacaaaguaa

SEQ ID NO: 1957657 - RNA, 19 nt, Artificial Sequence
  Description of Artificial Sequence: Synthetic oligonucleotide
aagcgcaguuuacaacauu

SEQ ID NO: 1957658 - RNA, 19 nt, Artificial Sequence
  Description of Artificial Sequence: Synthetic oligonucleotide
gcagaaacuguacaggggu

SEQ ID NO: 1957659 - RNA, 19 nt, Artificial Sequence
  Description of Artificial Sequence: Synthetic oligonucleotide
uccguacaucgaucacagg

SEQ ID NO: 1957660 - RNA, 19 nt, Artificial Sequence
  Description of Artificial Sequence: Synthetic oligonucleotide
caccuuuagucucaccaca

SEQ ID NO: 1957661 - RNA, 19 nt, Artificial Sequence
  Description of Artificial Sequence: Synthetic oligonucleotide
aaagcgcaguuuacaacau

SEQ ID NO: 1957662 - RNA, 19 nt, Artificial Sequence
  Description of Artificial Sequence: Synthetic oligonucleotide
cucagaacugugucagaga

SEQ ID NO: 1957663 - RNA, 19 nt, Artificial Sequence
  Description of Artificial Sequence: Synthetic oligonucleotide
ggagcggggaccacuaaag

SEQ ID NO: 1957664 - RNA, 19 nt, Artificial Sequence
  Description of Artificial Sequence: Synthetic oligonucleotide
gccgcagaaacuguacagg

SEQ ID NO: 1957665 - RNA, 19 nt, Artificial Sequence
  Description of Artificial Sequence: Synthetic oligonucleotide
cagaauguuccccuauaaa

SEQ ID NO: 1957666 - RNA, 19 nt, Artificial Sequence
  Description of Artificial Sequence: Synthetic oligonucleotide
cucgauuuuaguggcacaa

SEQ ID NO: 1957667 - RNA, 19 nt, Artificial Sequence
  Description of Artificial Sequence: Synthetic oligonucleotide
acugacauuugggaaucaa

SEQ ID NO: 1957668 - RNA, 19 nt, Artificial Sequence
  Description of Artificial Sequence: Synthetic oligonucleotide
auccgaacauggaaagugu

SEQ ID NO: 1957669 - RNA, 19 nt, Artificial Sequence
  Description of Artificial Sequence: Synthetic oligonucleotide
uggggaugugagcgagcag

SEQ ID NO: 1957670 - RNA, 19 nt, Artificial Sequence
  Description of Artificial Sequence: Synthetic oligonucleotide
gaguaaccagagggugugg

SEQ ID NO: 1957671 - RNA, 19 nt, Artificial Sequence
  Description of Artificial Sequence: Synthetic oligonucleotide
acaaugcuugcaguucaga

SEQ ID NO: 1957672 - RNA, 19 nt, Artificial Sequence
  Description of Artificial Sequence: Synthetic oligonucleotide
cuacuaccucagaacugug

SEQ ID NO: 1957673 - RNA, 19 nt, Artificial Sequence
  Description of Artificial Sequence: Synthetic oligonucleotide
ggcugcaagaaugaacuuc

SEQ ID NO: 1957674 - RNA, 19 nt, Artificial Sequence
  Description of Artificial Sequence: Synthetic oligonucleotide
aggagcggggaccacuaaa

SEQ ID NO: 1957675 - RNA, 19 nt, Artificial Sequence
  Description of Artificial Sequence: Synthetic oligonucleotide
uuucaucaauaagcuucga

SEQ ID NO: 1957676 - RNA, 19 nt, Artificial Sequence
  Description of Artificial Sequence: Synthetic oligonucleotide
auuuaggcuccagucuuaa

SEQ ID NO: 1957677 - RNA, 19 nt, Artificial Sequence
  Description of Artificial Sequence: Synthetic oligonucleotide
augugagcgagcaguucag

SEQ ID NO: 1957678 - RNA, 19 nt, Artificial Sequence
  Description of Artificial Sequence: Synthetic oligonucleotide
gucagagauucugcaggag

SEQ ID NO: 1957679 - RNA, 19 nt, Artificial Sequence
  Description of Artificial Sequence: Synthetic oligonucleotide
uugugaggcucaagaugaa

SEQ ID NO: 1957680 - RNA, 19 nt, Artificial Sequence
  Description of Artificial Sequence: Synthetic oligonucleotide
gcauuucugaacacauggc

SEQ ID NO: 1957681 - RNA, 19 nt, Artificial Sequence
  Description of Artificial Sequence: Synthetic oligonucleotide
agauccucgccuuggccua

SEQ ID NO: 1957682 - RNA, 19 nt, Artificial Sequence
  Description of Artificial Sequence: Synthetic oligonucleotide
ggcgucaucuuccauccga

SEQ ID NO: 1957683 - RNA, 19 nt, Artificial Sequence
  Description of Artificial Sequence: Synthetic oligonucleotide
ggaccacuaaagugggcug

SEQ ID NO: 1957684 - RNA, 19 nt, Artificial Sequence
  Description of Artificial Sequence: Synthetic oligonucleotide
accacaccuuuagucucac

SEQ ID NO: 1957685 - RNA, 19 nt, Artificial Sequence
  Description of Artificial Sequence: Synthetic oligonucleotide
ccgaacauggaaaguguuc

SEQ ID NO: 1957686 - RNA, 19 nt, Artificial Sequence
  Description of Artificial Sequence: Synthetic oligonucleotide
uccauccacuagugggaac

SEQ ID NO: 1957687 - RNA, 19 nt, Artificial Sequence
  Description of Artificial Sequence: Synthetic oligonucleotide
uggaggagcggggaccacu

SEQ ID NO: 1957688 - RNA, 19 nt, Artificial Sequence
  Description of Artificial Sequence: Synthetic oligonucleotide
uuccauccacuagugggaa

SEQ ID NO: 1957689 - RNA, 19 nt, Artificial Sequence
  Description of Artificial Sequence: Synthetic oligonucleotide
cuagugggaacuguucaaa

SEQ ID NO: 1957690 - RNA, 19 nt, Artificial Sequence
  Description of Artificial Sequence: Synthetic oligonucleotide
accugguaccagucugugu

SEQ ID NO: 1957691 - RNA, 19 nt, Artificial Sequence
  Description of Artificial Sequence: Synthetic oligonucleotide
cugcuggacauugcuguac

SEQ ID NO: 1957692 - RNA, 19 nt, Artificial Sequence
  Description of Artificial Sequence: Synthetic oligonucleotide
cuaaagugggcuggggaaa

SEQ ID NO: 1957693 - RNA, 19 nt, Artificial Sequence
  Description of Artificial Sequence: Synthetic oligonucleotide
ugcauccgcuuuaccuggu

SEQ ID NO: 1957694 - RNA, 19 nt, Artificial Sequence
  Description of Artificial Sequence: Synthetic oligonucleotide
agguucccacaguguggac

SEQ ID NO: 1957695 - RNA, 19 nt, Artificial Sequence
  Description of Artificial Sequence: Synthetic oligonucleotide
acccuaccaaaaucugcau

SEQ ID NO: 1957696 - RNA, 19 nt, Artificial Sequence
  Description of Artificial Sequence: Synthetic oligonucleotide
ucucugacccagacuucuu

SEQ ID NO: 1957697 - RNA, 19 nt, Artificial Sequence
  Description of Artificial Sequence: Synthetic oligonucleotide
gcccuguguacagacagcc

SEQ ID NO: 1957698 - RNA, 19 nt, Artificial Sequence
  Description of Artificial Sequence: Synthetic oligonucleotide
acuuaagaacagaguucca

SEQ ID NO: 1957699 - RNA, 19 nt, Artificial Sequence
  Description of Artificial Sequence: Synthetic oligonucleotide
cuggggaugugagcgagca

SEQ ID NO: 1957700 - RNA, 19 nt, Artificial Sequence
  Description of Artificial Sequence: Synthetic oligonucleotide
cagguucccacagugugga

SEQ ID NO: 1957701 - RNA, 19 nt, Artificial Sequence
  Description of Artificial Sequence: Synthetic oligonucleotide
cccuaccaaaaucugcaug

SEQ ID NO: 1957702 - RNA, 19 nt, Artificial Sequence
  Description of Artificial Sequence: Synthetic oligonucleotide
gaacagaguuccauccacu

SEQ ID NO: 1957703 - RNA, 19 nt, Artificial Sequence
  Description of Artificial Sequence: Synthetic oligonucleotide
cuucccauuuaggcuccag

SEQ ID NO: 1957704 - RNA, 19 nt, Artificial Sequence
  Description of Artificial Sequence: Synthetic oligonucleotide
gguucccacaguguggaca

SEQ ID NO: 1957705 - RNA, 19 nt, Artificial Sequence
  Description of Artificial Sequence: Synthetic oligonucleotide
ugccuggggaugugagcga

SEQ ID NO: 1957706 - RNA, 19 nt, Artificial Sequence
  Description of Artificial Sequence: Synthetic oligonucleotide
cacagaauguuccccuaua

SEQ ID NO: 1957707 - RNA, 19 nt, Artificial Sequence
  Description of Artificial Sequence: Synthetic oligonucleotide
accucagaacugugucaga

SEQ ID NO: 1957708 - RNA, 19 nt, Artificial Sequence
  Description of Artificial Sequence: Synthetic oligonucleotide
auccacuagugggaacugu

SEQ ID NO: 1957709 - RNA, 19 nt, Artificial Sequence
  Description of Artificial Sequence: Synthetic oligonucleotide
gucgccgcagaaacuguac

SEQ ID NO: 1957710 - RNA, 19 nt, Artificial Sequence
  Description of Artificial Sequence: Synthetic oligonucleotide
cccgguggcacaaagcgca

SEQ ID NO: 1957711 - RNA, 19 nt, Artificial Sequence
  Description of Artificial Sequence: Synthetic oligonucleotide
cauccacuagugggaacug

SEQ ID NO: 1957712 - RNA, 19 nt, Artificial Sequence
  Description of Artificial Sequence: Synthetic oligonucleotide
cuuaugccuggggauguga

SEQ ID NO: 1957713 - RNA, 19 nt, Artificial Sequence
  Description of Artificial Sequence: Synthetic oligonucleotide
gguguggggcuuguucuag

SEQ ID NO: 1957714 - RNA, 19 nt, Artificial Sequence
  Description of Artificial Sequence: Synthetic oligonucleotide
ccaagguaucuggaggagc

SEQ ID NO: 1957715 - RNA, 19 nt, Artificial Sequence
  Description of Artificial Sequence: Synthetic oligonucleotide
caucgaucacaggcuugcc

SEQ ID NO: 1957716 - RNA, 19 nt, Artificial Sequence
  Description of Artificial Sequence: Synthetic oligonucleotide
cgaacauggaaaguguuca

SEQ ID NO: 1957717 - RNA, 19 nt, Artificial Sequence
  Description of Artificial Sequence: Synthetic oligonucleotide
uuggccuacuugggcguca

SEQ ID NO: 1957718 - RNA, 19 nt, Artificial Sequence
  Description of Artificial Sequence: Synthetic oligonucleotide
acuguacaggggugucaaa

SEQ ID NO: 1957719 - RNA, 19 nt, Artificial Sequence
  Description of Artificial Sequence: Synthetic oligonucleotide
caaucucaucaugucuuga

SEQ ID NO: 1957720 - RNA, 19 nt, Artificial Sequence
  Description of Artificial Sequence: Synthetic oligonucleotide
acucuccaagguaucugga

SEQ ID NO: 1957721 - RNA, 19 nt, Artificial Sequence
  Description of Artificial Sequence: Synthetic oligonucleotide
ccacuagugggaacuguuc

SEQ ID NO: 1957722 - RNA, 19 nt, Artificial Sequence
  Description of Artificial Sequence: Synthetic oligonucleotide
ggggaugugagcgagcagu

SEQ ID NO: 1957723 - RNA, 19 nt, Artificial Sequence
  Description of Artificial Sequence: Synthetic oligonucleotide
ggcacaaagcgcaguuuac

SEQ ID NO: 1957724 - RNA, 19 nt, Artificial Sequence
  Description of Artificial Sequence: Synthetic oligonucleotide
gggaccacuaaagugggcu

SEQ ID NO: 1957725 - RNA, 19 nt, Artificial Sequence
  Description of Artificial Sequence: Synthetic oligonucleotide
cauuucuguggcuggcacu

SEQ ID NO: 1957726 - RNA, 19 nt, Artificial Sequence
  Description of Artificial Sequence: Synthetic oligonucleotide
cccacaccuaaaugucacc

SEQ ID NO: 1957727 - RNA, 19 nt, Artificial Sequence
  Description of Artificial Sequence: Synthetic oligonucleotide
agcgagcaguucagagagg

SEQ ID NO: 1957728 - RNA, 19 nt, Artificial Sequence
  Description of Artificial Sequence: Synthetic oligonucleotide
aucccgauccguacaucga

SEQ ID NO: 1957729 - RNA, 19 nt, Artificial Sequence
  Description of Artificial Sequence: Synthetic oligonucleotide
cugcaucccgauccguaca

SEQ ID NO: 1957730 - RNA, 19 nt, Artificial Sequence
  Description of Artificial Sequence: Synthetic oligonucleotide
ggaaaguguucagcuuaug

SEQ ID NO: 1957731 - RNA, 19 nt, Artificial Sequence
  Description of Artificial Sequence: Synthetic oligonucleotide
guacaucgaucacaggcuu

SEQ ID NO: 1957732 - RNA, 19 nt, Artificial Sequence
  Description of Artificial Sequence: Synthetic oligonucleotide
ggaagugcccgguggcaca

SEQ ID NO: 1957733 - RNA, 19 nt, Artificial Sequence
  Description of Artificial Sequence: Synthetic oligonucleotide
gagcggggaccacuaaagu

SEQ ID NO: 1957734 - RNA, 19 nt, Artificial Sequence
  Description of Artificial Sequence: Synthetic oligonucleotide
ccgauccguacaucgauca

SEQ ID NO: 1957735 - RNA, 19 nt, Artificial Sequence
  Description of Artificial Sequence: Synthetic oligonucleotide
cccucgauuuuaguggcac

SEQ ID NO: 1957736 - RNA, 19 nt, Artificial Sequence
  Description of Artificial Sequence: Synthetic oligonucleotide
gaagugcccgguggcacaa

SEQ ID NO: 1957737 - RNA, 19 nt, Artificial Sequence
  Description of Artificial Sequence: Synthetic oligonucleotide
gugcccgguggcacaaagc

SEQ ID NO: 1957738 - RNA, 19 nt, Artificial Sequence
  Description of Artificial Sequence: Synthetic oligonucleotide
ccagucuuaaccacacacu

SEQ ID NO: 1957739 - RNA, 19 nt, Artificial Sequence
  Description of Artificial Sequence: Synthetic oligonucleotide
cuuggccuacuugggcguc

SEQ ID NO: 1957740 - RNA, 19 nt, Artificial Sequence
  Description of Artificial Sequence: Synthetic oligonucleotide
gccuacuugggcgucaucu

SEQ ID NO: 1957741 - RNA, 19 nt, Artificial Sequence
  Description of Artificial Sequence: Synthetic oligonucleotide
ggcuccagucuuaaccaca

SEQ ID NO: 1957742 - RNA, 19 nt, Artificial Sequence
  Description of Artificial Sequence: Synthetic oligonucleotide
gauccucgccuuggccuac

SEQ ID NO: 1957743 - RNA, 19 nt, Artificial Sequence
  Description of Artificial Sequence: Synthetic oligonucleotide
gcuuuaccugguaccaguc

SEQ ID NO: 1957744 - RNA, 19 nt, Artificial Sequence
  Description of Artificial Sequence: Synthetic oligonucleotide
caauaagcuucgagaacuu

SEQ ID NO: 1957745 - RNA, 19 nt, Artificial Sequence
  Description of Artificial Sequence: Synthetic oligonucleotide
ugcuugcaguucagacauu

SEQ ID NO: 1957746 - RNA, 19 nt, Artificial Sequence
  Description of Artificial Sequence: Synthetic oligonucleotide
cugcaugacuucccauuua

SEQ ID NO: 1957747 - RNA, 19 nt, Artificial Sequence
  Description of Artificial Sequence: Synthetic oligonucleotide
cccgauccguacaucgauc

SEQ ID NO: 1957748 - RNA, 19 nt, Artificial Sequence
  Description of Artificial Sequence: Synthetic oligonucleotide
cccugcccuguguacagac

SEQ ID NO: 1957749 - RNA, 19 nt, Artificial Sequence
  Description of Artificial Sequence: Synthetic oligonucleotide
gggaaucaagacagggcaa

SEQ ID NO: 1957750 - RNA, 19 nt, Artificial Sequence
  Description of Artificial Sequence: Synthetic oligonucleotide
gccuggggaugugagcgag

SEQ ID NO: 1957751 - RNA, 19 nt, Artificial Sequence
  Description of Artificial Sequence: Synthetic oligonucleotide
gcgagcaguucagagaggu

SEQ ID NO: 1957752 - RNA, 19 nt, Artificial Sequence
  Description of Artificial Sequence: Synthetic oligonucleotide
uggccuacuugggcgucau

SEQ ID NO: 1957753 - RNA, 19 nt, Artificial Sequence
  Description of Artificial Sequence: Synthetic oligonucleotide
gggcaaggggcagcccucg

SEQ ID NO: 1957754 - RNA, 19 nt, Artificial Sequence
  Description of Artificial Sequence: Synthetic oligonucleotide
gaggagcggggaccacuaa

SEQ ID NO: 1957755 - RNA, 19 nt, Artificial Sequence
  Description of Artificial Sequence: Synthetic oligonucleotide
ccccuauaaaagauaugua

SEQ ID NO: 1957756 - RNA, 19 nt, Artificial Sequence
  Description of Artificial Sequence: Synthetic oligonucleotide
cugcaagaaugaacuuccu

SEQ ID NO: 1957757 - RNA, 19 nt, Artificial Sequence
  Description of Artificial Sequence: Synthetic oligonucleotide
caaggggcagcccucgauu

SEQ ID NO: 1957758 - RNA, 19 nt, Artificial Sequence
  Description of Artificial Sequence: Synthetic oligonucleotide
guaccagucuguguccuuu

SEQ ID NO: 1957759 - RNA, 19 nt, Artificial Sequence
  Description of Artificial Sequence: Synthetic oligonucleotide
ggcucaagaugaauggcau

SEQ ID NO: 1957760 - RNA, 19 nt, Artificial Sequence
  Description of Artificial Sequence: Synthetic oligonucleotide
uccucgccuuggccuacuu

SEQ ID NO: 1957761 - RNA, 19 nt, Artificial Sequence
  Description of Artificial Sequence: Synthetic oligonucleotide
ggccuugcuguguucuucu

SEQ ID NO: 1957762 - RNA, 19 nt, Artificial Sequence
  Description of Artificial Sequence: Synthetic oligonucleotide
ccauuuaggcuccagucuu

SEQ ID NO: 1957763 - RNA, 19 nt, Artificial Sequence
  Description of Artificial Sequence: Synthetic oligonucleotide
ccauccacuagugggaacu

SEQ ID NO: 1957764 - RNA, 19 nt, Artificial Sequence
  Description of Artificial Sequence: Synthetic oligonucleotide
acuucccauuuaggcucca

SEQ ID NO: 1957765 - RNA, 19 nt, Artificial Sequence
  Description of Artificial Sequence: Synthetic oligonucleotide
ccucgauuuuaguggcaca

SEQ ID NO: 1957766 - RNA, 19 nt, Artificial Sequence
  Description of Artificial Sequence: Synthetic oligonucleotide
caccuaaaugucacccauu

SEQ ID NO: 1957767 - RNA, 19 nt, Artificial Sequence
  Description of Artificial Sequence: Synthetic oligonucleotide
ggaggccuugcuguguucu

SEQ ID NO: 1957768 - RNA, 19 nt, Artificial Sequence
  Description of Artificial Sequence: Synthetic oligonucleotide
cgauccguacaucgaucac

SEQ ID NO: 1957769 - RNA, 19 nt, Artificial Sequence
  Description of Artificial Sequence: Synthetic oligonucleotide
cgauuuuaguggcacaaau

SEQ ID NO: 1957770 - RNA, 19 nt, Artificial Sequence
  Description of Artificial Sequence: Synthetic oligonucleotide
ccuaaaugucacccauucu

SEQ ID NO: 1957771 - RNA, 19 nt, Artificial Sequence
  Description of Artificial Sequence: Synthetic oligonucleotide
gcccgguggcacaaagcgc

SEQ ID NO: 1957772 - RNA, 19 nt, Artificial Sequence
  Description of Artificial Sequence: Synthetic oligonucleotide
gggcuuguucuagggguuc

SEQ ID NO: 1957773 - RNA, 19 nt, Artificial Sequence
  Description of Artificial Sequence: Synthetic oligonucleotide
cacugacauuugggaauca

SEQ ID NO: 1957774 - RNA, 19 nt, Artificial Sequence
  Description of Artificial Sequence: Synthetic oligonucleotide
ccgguggcacaaagcgcag

SEQ ID NO: 1957775 - RNA, 19 nt, Artificial Sequence
  Description of Artificial Sequence: Synthetic oligonucleotide
gcgucaucuuccauccgaa

SEQ ID NO: 1957776 - RNA, 19 nt, Artificial Sequence
  Description of Artificial Sequence: Synthetic oligonucleotide
ggguguggggcuuguucua

SEQ ID NO: 1957777 - RNA, 19 nt, Artificial Sequence
  Description of Artificial Sequence: Synthetic oligonucleotide
ggggaccacuaaagugggc

SEQ ID NO: 1957778 - RNA, 19 nt, Artificial Sequence
  Description of Artificial Sequence: Synthetic oligonucleotide
auccucgccuuggccuacu

SEQ ID NO: 1957779 - RNA, 19 nt, Artificial Sequence
  Description of Artificial Sequence: Synthetic oligonucleotide
ccgcuuuaccugguaccag

SEQ ID NO: 1957780 - RNA, 19 nt, Artificial Sequence
  Description of Artificial Sequence: Synthetic oligonucleotide
cagucgccgcagaaacugu

SEQ ID NO: 1957781 - RNA, 19 nt, Artificial Sequence
  Description of Artificial Sequence: Synthetic oligonucleotide
guacugcaucccgauccgu

SEQ ID NO: 1957782 - RNA, 19 nt, Artificial Sequence
  Description of Artificial Sequence: Synthetic oligonucleotide
gcauccgcuuuaccuggua

SEQ ID NO: 1957783 - RNA, 19 nt, Artificial Sequence
  Description of Artificial Sequence: Synthetic oligonucleotide
cgcuuuaccugguaccagu

SEQ ID NO: 1957784 - RNA, 19 nt, Artificial Sequence
  Description of Artificial Sequence: Synthetic oligonucleotide
ggcaaggggcagcccucga

SEQ ID NO: 1957785 - RNA, 19 nt, Artificial Sequence
  Description of Artificial Sequence: Synthetic oligonucleotide
cgaucacaggcuugccaca

SEQ ID NO: 1957786 - RNA, 19 nt, Artificial Sequence
  Description of Artificial Sequence: Synthetic oligonucleotide
gcaaggggcagcccucgau

SEQ ID NO: 1957787 - RNA, 19 nt, Artificial Sequence
  Description of Artificial Sequence: Synthetic oligonucleotide
guggacacugcuggacauu

SEQ ID NO: 1957788 - RNA, 19 nt, Artificial Sequence
  Description of Artificial Sequence: Synthetic oligonucleotide
gcaucccgauccguacauc

SEQ ID NO: 1957789 - RNA, 19 nt, Artificial Sequence
  Description of Artificial Sequence: Synthetic oligonucleotide
cuugggcgucaucuuccau

SEQ ID NO: 1957790 - RNA, 19 nt, Artificial Sequence
  Description of Artificial Sequence: Synthetic oligonucleotide
ccuuggccuacuugggcgu

SEQ ID NO: 1957791 - RNA, 19 nt, Artificial Sequence
  Description of Artificial Sequence: Synthetic oligonucleotide
ggcccugcccacagcgaca

SEQ ID NO: 1957792 - RNA, 19 nt, Artificial Sequence
  Description of Artificial Sequence: Synthetic oligonucleotide
ggcagcccucgauuuuagu

SEQ ID NO: 1957793 - RNA, 19 nt, Artificial Sequence
  Description of Artificial Sequence: Synthetic oligonucleotide
gggaugugagcgagcaguu

SEQ ID NO: 1957794 - RNA, 19 nt, Artificial Sequence
  Description of Artificial Sequence: Synthetic oligonucleotide
ggccuacuugggcgucauc

SEQ ID NO: 1957795 - RNA, 19 nt, Artificial Sequence
  Description of Artificial Sequence: Synthetic oligonucleotide
ccauccgaacauggaaagu

SEQ ID NO: 1957796 - RNA, 19 nt, Artificial Sequence
  Description of Artificial Sequence: Synthetic oligonucleotide
uuuaagauuuuccugcugg

SEQ ID NO: 1957797 - RNA, 19 nt, Artificial Sequence
  Description of Artificial Sequence: Synthetic oligonucleotide
uuaaaagucgugaaguaca

SEQ ID NO: 1957798 - RNA, 19 nt, Artificial Sequence
  Description of Artificial Sequence: Synthetic oligonucleotide
acuucgaguaauuucaggg

SEQ ID NO: 1957799 - RNA, 19 nt, Artificial Sequence
  Description of Artificial Sequence: Synthetic oligonucleotide
uuagaaggugguaucagcg

SEQ ID NO: 1957800 - RNA, 19 nt, Artificial Sequence
  Description of Artificial Sequence: Synthetic oligonucleotide
aaagucgugaaguacauuu

SEQ ID NO: 1957801 - RNA, 19 nt, Artificial Sequence
  Description of Artificial Sequence: Synthetic oligonucleotide
uccauuaacaggcugaaaa

SEQ ID NO: 1957802 - RNA, 19 nt, Artificial Sequence
  Description of Artificial Sequence: Synthetic oligonucleotide
agcgaaaggacucggaucg

SEQ ID NO: 1957803 - RNA, 19 nt, Artificial Sequence
  Description of Artificial Sequence: Synthetic oligonucleotide
aggaagaacucucucgucc

SEQ ID NO: 1957804 - RNA, 19 nt, Artificial Sequence
  Description of Artificial Sequence: Synthetic oligonucleotide
aacacgcucuuucuggggc

SEQ ID NO: 1957805 - RNA, 19 nt, Artificial Sequence
  Description of Artificial Sequence: Synthetic oligonucleotide
auucguacacaucaucggc

SEQ ID NO: 1957806 - RNA, 19 nt, Artificial Sequence
  Description of Artificial Sequence: Synthetic oligonucleotide
ugaagugcagaacuugcgg

SEQ ID NO: 1957807 - RNA, 19 nt, Artificial Sequence
  Description of Artificial Sequence: Synthetic oligonucleotide
auagaggucuucuguagcc

SEQ ID NO: 1957808 - RNA, 19 nt, Artificial Sequence
  Description of Artificial Sequence: Synthetic oligonucleotide
cucauaaacuccaaacucc

SEQ ID NO: 1957809 - RNA, 19 nt, Artificial Sequence
  Description of Artificial Sequence: Synthetic oligonucleotide
aucauugaguccuuagugg

SEQ ID NO: 1957810 - RNA, 19 nt, Artificial Sequence
  Description of Artificial Sequence: Synthetic oligonucleotide
cuuaauguggcucuucagc

SEQ ID NO: 1957811 - RNA, 19 nt, Artificial Sequence
  Description of Artificial Sequence: Synthetic oligonucleotide
gaucauugaguccuuagug

SEQ ID NO: 1957812 - RNA, 19 nt, Artificial Sequence
  Description of Artificial Sequence: Synthetic oligonucleotide
gauucguacacaucaucgg

SEQ ID NO: 1957813 - RNA, 19 nt, Artificial Sequence
  Description of Artificial Sequence: Synthetic oligonucleotide
ucuuagucuuuuaagauuu

SEQ ID NO: 1957814 - RNA, 19 nt, Artificial Sequence
  Description of Artificial Sequence: Synthetic oligonucleotide
ugaaguacauuuagaaggu

SEQ ID NO: 1957815 - RNA, 19 nt, Artificial Sequence
  Description of Artificial Sequence: Synthetic oligonucleotide
aauugccagucuuaaaagu

SEQ ID NO: 1957816 - RNA, 19 nt, Artificial Sequence
  Description of Artificial Sequence: Synthetic oligonucleotide
  modified_base (3)..(3): a, c, u, g, unknown or other
agngaaacuuucuccagag

SEQ ID NO: 1957817 - RNA, 19 nt, Artificial Sequence
  Description of Artificial Sequence: Synthetic oligonucleotide
ucauaaacuccaaacucca

SEQ ID NO: 1957818 - RNA, 19 nt, Artificial Sequence
  Description of Artificial Sequence: Synthetic oligonucleotide
ugguuucugccccacagcg

SEQ ID NO: 1957819 - RNA, 19 nt, Artificial Sequence
  Description of Artificial Sequence: Synthetic oligonucleotide
aagcgaaaggacucggauc

SEQ ID NO: 1957820 - RNA, 19 nt, Artificial Sequence
  Description of Artificial Sequence: Synthetic oligonucleotide
agaaggugguaucagcgac

SEQ ID NO: 1957821 - RNA, 19 nt, Artificial Sequence
  Description of Artificial Sequence: Synthetic oligonucleotide
aguaauuucagggacuuca

SEQ ID NO: 1957822 - RNA, 19 nt, Artificial Sequence
  Description of Artificial Sequence: Synthetic oligonucleotide
ugucucuuagucuuuuaag

SEQ ID NO: 1957823 - RNA, 19 nt, Artificial Sequence
  Description of Artificial Sequence: Synthetic oligonucleotide
auugaguccuuagugggcc

SEQ ID NO: 1957824 - RNA, 19 nt, Artificial Sequence
  Description of Artificial Sequence: Synthetic oligonucleotide
acauuuagaaggugguauc

SEQ ID NO: 1957825 - RNA, 19 nt, Artificial Sequence
  Description of Artificial Sequence: Synthetic oligonucleotide
acuugcggaucauugaguc

SEQ ID NO: 1957826 - RNA, 19 nt, Artificial Sequence
  Description of Artificial Sequence: Synthetic oligonucleotide
cucucaagggucaugacug

SEQ ID NO: 1957827 - RNA, 19 nt, Artificial Sequence
  Description of Artificial Sequence: Synthetic oligonucleotide
uucgaguaauuucagggac

SEQ ID NO: 1957828 - RNA, 19 nt, Artificial Sequence
  Description of Artificial Sequence: Synthetic oligonucleotide
ugaguugccauucuuugaa

SEQ ID NO: 1957829 - RNA, 19 nt, Artificial Sequence
  Description of Artificial Sequence: Synthetic oligonucleotide
ucgugaaguacauuuagaa

SEQ ID NO: 1957830 - RNA, 19 nt, Artificial Sequence
  Description of Artificial Sequence: Synthetic oligonucleotide
acugcucacacugaggagg

SEQ ID NO: 1957831 - RNA, 19 nt, Artificial Sequence
  Description of Artificial Sequence: Synthetic oligonucleotide
uucguacacaucaucggcc

SEQ ID NO: 1957832 - RNA, 19 nt, Artificial Sequence
  Description of Artificial Sequence: Synthetic oligonucleotide
ugggcuacgacuucgagua

SEQ ID NO: 1957833 - RNA, 19 nt, Artificial Sequence
  Description of Artificial Sequence: Synthetic oligonucleotide
uuagaggccucugugaggc

SEQ ID NO: 1957834 - RNA, 19 nt, Artificial Sequence
  Description of Artificial Sequence: Synthetic oligonucleotide
agucgugaaguacauuuag

SEQ ID NO: 1957835 - RNA, 19 nt, Artificial Sequence
  Description of Artificial Sequence: Synthetic oligonucleotide
augcuuucccgauuucugc

SEQ ID NO: 1957836 - RNA, 19 nt, Artificial Sequence
  Description of Artificial Sequence: Synthetic oligonucleotide
uacucgaucgguuacucgu

SEQ ID NO: 1957837 - RNA, 19 nt, Artificial Sequence
  Description of Artificial Sequence: Synthetic oligonucleotide
uaacaggcugaaaauugcc

SEQ ID NO: 1957838 - RNA, 19 nt, Artificial Sequence
  Description of Artificial Sequence: Synthetic oligonucleotide
cucguagagcuccucaucg

SEQ ID NO: 1957839 - RNA, 19 nt, Artificial Sequence
  Description of Artificial Sequence: Synthetic oligonucleotide
guugaguugccauucuuug

SEQ ID NO: 1957840 - RNA, 19 nt, Artificial Sequence
  Description of Artificial Sequence: Synthetic oligonucleotide
uacucgucgaugaacuggc

SEQ ID NO: 1957841 - RNA, 19 nt, Artificial Sequence
  Description of Artificial Sequence: Synthetic oligonucleotide
uacauuuagaaggugguau

SEQ ID NO: 1957842 - RNA, 19 nt, Artificial Sequence
  Description of Artificial Sequence: Synthetic oligonucleotide
aaacacgcucuuucugggg

SEQ ID NO: 1957843 - RNA, 19 nt, Artificial Sequence
  Description of Artificial Sequence: Synthetic oligonucleotide
ucucuuagucuuuuaagau

SEQ ID NO: 1957844 - RNA, 19 nt, Artificial Sequence
  Description of Artificial Sequence: Synthetic oligonucleotide
uucccagacgguaucuccg

SEQ ID NO: 1957845 - RNA, 19 nt, Artificial Sequence
  Description of Artificial Sequence: Synthetic oligonucleotide
uuugagagaggaagaacuc

SEQ ID NO: 1957846 - RNA, 19 nt, Artificial Sequence
  Description of Artificial Sequence: Synthetic oligonucleotide
cuuaaaagucgugaaguac

SEQ ID NO: 1957847 - RNA, 19 nt, Artificial Sequence
  Description of Artificial Sequence: Synthetic oligonucleotide
ucaagggucaugacuggug

SEQ ID NO: 1957848 - RNA, 19 nt, Artificial Sequence
  Description of Artificial Sequence: Synthetic oligonucleotide
gacuucgaguaauuucagg

SEQ ID NO: 1957849 - RNA, 19 nt, Artificial Sequence
  Description of Artificial Sequence: Synthetic oligonucleotide
uuaagauuuuccugcugga

SEQ ID NO: 1957850 - RNA, 19 nt, Artificial Sequence
  Description of Artificial Sequence: Synthetic oligonucleotide
ucuggggccgcucucauaa

SEQ ID NO: 1957851 - RNA, 19 nt, Artificial Sequence
  Description of Artificial Sequence: Synthetic oligonucleotide
cugaagcauuucaacauag

SEQ ID NO: 1957852 - RNA, 19 nt, Artificial Sequence
  Description of Artificial Sequence: Synthetic oligonucleotide
ugaagcauuucaacauaga

SEQ ID NO: 1957853 - RNA, 19 nt, Artificial Sequence
  Description of Artificial Sequence: Synthetic oligonucleotide
auacucgucgaugaacugg

SEQ ID NO: 1957854 - RNA, 19 nt, Artificial Sequence
  Description of Artificial Sequence: Synthetic oligonucleotide
ugccccacagcgaaugcgg

SEQ ID NO: 1957855 - RNA, 19 nt, Artificial Sequence
  Description of Artificial Sequence: Synthetic oligonucleotide
uccagcuugcaucucacaa

SEQ ID NO: 1957856 - RNA, 19 nt, Artificial Sequence
  Description of Artificial Sequence: Synthetic oligonucleotide
ggauucguacacaucaucg

SEQ ID NO: 1957857 - RNA, 19 nt, Artificial Sequence
  Description of Artificial Sequence: Synthetic oligonucleotide
gguaucagcgaccucuggg

SEQ ID NO: 1957858 - RNA, 19 nt, Artificial Sequence
  Description of Artificial Sequence: Synthetic oligonucleotide
uugcggaucauugaguccu

SEQ ID NO: 1957859 - RNA, 19 nt, Artificial Sequence
  Description of Artificial Sequence: Synthetic oligonucleotide
aaacuuucuccagagcccu

SEQ ID NO: 1957860 - RNA, 19 nt, Artificial Sequence
  Description of Artificial Sequence: Synthetic oligonucleotide
gaagugcagaacuugcgga

SEQ ID NO: 1957861 - RNA, 19 nt, Artificial Sequence
  Description of Artificial Sequence: Synthetic oligonucleotide
cuuugagagaggaagaacu

SEQ ID NO: 1957862 - RNA, 19 nt, Artificial Sequence
  Description of Artificial Sequence: Synthetic oligonucleotide
agacgguaucuccggaggc

SEQ ID NO: 1957863 - RNA, 19 nt, Artificial Sequence
  Description of Artificial Sequence: Synthetic oligonucleotide
agaacuugcggaucauuga

SEQ ID NO: 1957864 - RNA, 19 nt, Artificial Sequence
  Description of Artificial Sequence: Synthetic oligonucleotide
uugccauucuuugaagugc

SEQ ID NO: 1957865 - RNA, 19 nt, Artificial Sequence
  Description of Artificial Sequence: Synthetic oligonucleotide
  modified_base (4)..(4): a, c, u, g, unknown or other
gagngaaacuuucuccaga

SEQ ID NO: 1957866 - RNA, 19 nt, Artificial Sequence
  Description of Artificial Sequence: Synthetic oligonucleotide
ucgaguaauuucagggacu

SEQ ID NO: 1957867 - RNA, 19 nt, Artificial Sequence
  Description of Artificial Sequence: Synthetic oligonucleotide
caugcuuucccgauuucug

SEQ ID NO: 1957868 - RNA, 19 nt, Artificial Sequence
  Description of Artificial Sequence: Synthetic oligonucleotide
cauagaggucuucuguagc

SEQ ID NO: 1957869 - RNA, 19 nt, Artificial Sequence
  Description of Artificial Sequence: Synthetic oligonucleotide
aguugccauucuuugaagu

SEQ ID NO: 1957870 - RNA, 19 nt, Artificial Sequence
  Description of Artificial Sequence: Synthetic oligonucleotide
gagaaugccggauggggac

SEQ ID NO: 1957871 - RNA, 19 nt, Artificial Sequence
  Description of Artificial Sequence: Synthetic oligonucleotide
ugugaucuccagaucugca

SEQ ID NO: 1957872 - RNA, 19 nt, Artificial Sequence
  Description of Artificial Sequence: Synthetic oligonucleotide
  modified_base (14)..(14): a, c, u, g, unknown or other
uuagugggccgagngaaac

SEQ ID NO: 1957873 - RNA, 19 nt, Artificial Sequence
  Description of Artificial Sequence: Synthetic oligonucleotide
uguccugggcggaaacacg

SEQ ID NO: 1957874 - RNA, 19 nt, Artificial Sequence
  Description of Artificial Sequence: Synthetic oligonucleotide
uggguuaccugcacuggcc

SEQ ID NO: 1957875 - RNA, 19 nt, Artificial Sequence
  Description of Artificial Sequence: Synthetic oligonucleotide
uagaaggugguaucagcga

SEQ ID NO: 1957876 - RNA, 19 nt, Artificial Sequence
  Description of Artificial Sequence: Synthetic oligonucleotide
uaucagcgaccucugggag

SEQ ID NO: 1957877 - RNA, 19 nt, Artificial Sequence
  Description of Artificial Sequence: Synthetic oligonucleotide
cauugaguccuuagugggc

SEQ ID NO: 1957878 - RNA, 19 nt, Artificial Sequence
  Description of Artificial Sequence: Synthetic oligonucleotide
acucguagagcuccucauc

SEQ ID NO: 1957879 - RNA, 19 nt, Artificial Sequence
  Description of Artificial Sequence: Synthetic oligonucleotide
cucggaucguuucuucugg

SEQ ID NO: 1957880 - RNA, 19 nt, Artificial Sequence
  Description of Artificial Sequence: Synthetic oligonucleotide
uugaguugccauucuuuga

SEQ ID NO: 1957881 - RNA, 19 nt, Artificial Sequence
  Description of Artificial Sequence: Synthetic oligonucleotide
  modified_base (10)..(10): a, c, u, g, unknown or other
ugggccgagngaaacuuuc

SEQ ID NO: 1957882 - RNA, 19 nt, Artificial Sequence
  Description of Artificial Sequence: Synthetic oligonucleotide
ugucgccaccuucucaucc

SEQ ID NO: 1957883 - RNA, 19 nt, Artificial Sequence
  Description of Artificial Sequence: Synthetic oligonucleotide
caggugcugagaaugccgg

SEQ ID NO: 1957884 - RNA, 19 nt, Artificial Sequence
  Description of Artificial Sequence: Synthetic oligonucleotide
gcucucauaaacuccaaac

SEQ ID NO: 1957885 - RNA, 19 nt, Artificial Sequence
  Description of Artificial Sequence: Synthetic oligonucleotide
cuugcaucucacaaugaca

SEQ ID NO: 1957886 - RNA, 19 nt, Artificial Sequence
  Description of Artificial Sequence: Synthetic oligonucleotide
agggucaugacugguguuc

SEQ ID NO: 1957887 - RNA, 19 nt, Artificial Sequence
  Description of Artificial Sequence: Synthetic oligonucleotide
caauaugaagacuccauua

SEQ ID NO: 1957888 - RNA, 19 nt, Artificial Sequence
  Description of Artificial Sequence: Synthetic oligonucleotide
uggauucguacacaucauc

SEQ ID NO: 1957889 - RNA, 19 nt, Artificial Sequence
  Description of Artificial Sequence: Synthetic oligonucleotide
gguuagaggccucugugag

SEQ ID NO: 1957890 - RNA, 19 nt, Artificial Sequence
  Description of Artificial Sequence: Synthetic oligonucleotide
augacugguguuccgguca

SEQ ID NO: 1957891 - RNA, 19 nt, Artificial Sequence
  Description of Artificial Sequence: Synthetic oligonucleotide
ucguacacaucaucggccu

SEQ ID NO: 1957892 - RNA, 19 nt, Artificial Sequence
  Description of Artificial Sequence: Synthetic oligonucleotide
  modified_base (2)..(2): a, c, u, g, unknown or other
gngaaacuuucuccagagc

SEQ ID NO: 1957893 - RNA, 19 nt, Artificial Sequence
  Description of Artificial Sequence: Synthetic oligonucleotide
cagcuugcaucucacaaug

SEQ ID NO: 1957894 - RNA, 19 nt, Artificial Sequence
  Description of Artificial Sequence: Synthetic oligonucleotide
uuccggucacagcaggugc

SEQ ID NO: 1957895 - RNA, 19 nt, Artificial Sequence
  Description of Artificial Sequence: Synthetic oligonucleotide
cagacgguaucuccggagg

SEQ ID NO: 1957896 - RNA, 19 nt, Artificial Sequence
  Description of Artificial Sequence: Synthetic oligonucleotide
uuggguaggaccugggcua

SEQ ID NO: 1957897 - RNA, 19 nt, Artificial Sequence
  Description of Artificial Sequence: Synthetic oligonucleotide
aggcugaaaauugccaguc

SEQ ID NO: 1957898 - RNA, 19 nt, Artificial Sequence
  Description of Artificial Sequence: Synthetic oligonucleotide
uuacucgugcugcuugcug

SEQ ID NO: 1957899 - RNA, 19 nt, Artificial Sequence
  Description of Artificial Sequence: Synthetic oligonucleotide
gaucgguuacucgugcugc

SEQ ID NO: 1957900 - RNA, 19 nt, Artificial Sequence
  Description of Artificial Sequence: Synthetic oligonucleotide
cuucgaguaauuucaggga

SEQ ID NO: 1957901 - RNA, 19 nt, Artificial Sequence
  Description of Artificial Sequence: Synthetic oligonucleotide
acauacucgucgaugaacu

SEQ ID NO: 1957902 - RNA, 19 nt, Artificial Sequence
  Description of Artificial Sequence: Synthetic oligonucleotide
guaucagcgaccucuggga

SEQ ID NO: 1957903 - RNA, 19 nt, Artificial Sequence
  Description of Artificial Sequence: Synthetic oligonucleotide
aaggugguaucagcgaccu

SEQ ID NO: 1957904 - RNA, 19 nt, Artificial Sequence
  Description of Artificial Sequence: Synthetic oligonucleotide
ggaucguuucuucugguug

SEQ ID NO: 1957905 - RNA, 19 nt, Artificial Sequence
  Description of Artificial Sequence: Synthetic oligonucleotide
ucgcagccaggguugaggg

SEQ ID NO: 1957906 - RNA, 19 nt, Artificial Sequence
  Description of Artificial Sequence: Synthetic oligonucleotide
ggcuccucguacucgaucg

SEQ ID NO: 1957907 - RNA, 19 nt, Artificial Sequence
  Description of Artificial Sequence: Synthetic oligonucleotide
agcucgaggagguacccug

SEQ ID NO: 1957908 - RNA, 19 nt, Artificial Sequence
  Description of Artificial Sequence: Synthetic oligonucleotide
ucccagacgguaucuccgg

SEQ ID NO: 1957909 - RNA, 19 nt, Artificial Sequence
  Description of Artificial Sequence: Synthetic oligonucleotide
acagcgaaugcgguccggc

SEQ ID NO: 1957910 - RNA, 19 nt, Artificial Sequence
  Description of Artificial Sequence: Synthetic oligonucleotide
cauaaacuccaaacuccac

SEQ ID NO: 1957911 - RNA, 19 nt, Artificial Sequence
  Description of Artificial Sequence: Synthetic oligonucleotide
ugccagucuuaaaagucgu

SEQ ID NO: 1957912 - RNA, 19 nt, Artificial Sequence
  Description of Artificial Sequence: Synthetic oligonucleotide
uuuccaggcaggugcugag

SEQ ID NO: 1957913 - RNA, 19 nt, Artificial Sequence
  Description of Artificial Sequence: Synthetic oligonucleotide
gaguugccauucuuugaag

SEQ ID NO: 1957914 - RNA, 19 nt, Artificial Sequence
  Description of Artificial Sequence: Synthetic oligonucleotide
auccauuuggguaggaccu

SEQ ID NO: 1957915 - RNA, 19 nt, Artificial Sequence
  Description of Artificial Sequence: Synthetic oligonucleotide
guucccagacgguaucucc

SEQ ID NO: 1957916 - RNA, 19 nt, Artificial Sequence
  Description of Artificial Sequence: Synthetic oligonucleotide
gaaggugguaucagcgacc

SEQ ID NO: 1957917 - RNA, 19 nt, Artificial Sequence
  Description of Artificial Sequence: Synthetic oligonucleotide
gucaugacugguguuccgg

SEQ ID NO: 1957918 - RNA, 19 nt, Artificial Sequence
  Description of Artificial Sequence: Synthetic oligonucleotide
  modified_base (17)..(17): a, c, u, g, unknown or other
uccuuagugggccgagnga

SEQ ID NO: 1957919 - RNA, 19 nt, Artificial Sequence
  Description of Artificial Sequence: Synthetic oligonucleotide
  modified_base (18)..(18): a, c, u, g, unknown or other
guccuuagugggccgagng

SEQ ID NO: 1957920 - RNA, 19 nt, Artificial Sequence
  Description of Artificial Sequence: Synthetic oligonucleotide
agugcagaacuugcggauc

SEQ ID NO: 1957921 - RNA, 19 nt, Artificial Sequence
  Description of Artificial Sequence: Synthetic oligonucleotide
ucagguucccagacgguau

SEQ ID NO: 1957922 - RNA, 19 nt, Artificial Sequence
  Description of Artificial Sequence: Synthetic oligonucleotide
aacuggcgcagguacccug

SEQ ID NO: 1957923 - RNA, 19 nt, Artificial Sequence
  Description of Artificial Sequence: Synthetic oligonucleotide
aucgcagccaggguugagg

SEQ ID NO: 1957924 - RNA, 19 nt, Artificial Sequence
  Description of Artificial Sequence: Synthetic oligonucleotide
ucacaaugacauacacagu

SEQ ID NO: 1957925 - RNA, 19 nt, Artificial Sequence
  Description of Artificial Sequence: Synthetic oligonucleotide
ccaucagguucccagacgg

SEQ ID NO: 1957926 - RNA, 19 nt, Artificial Sequence
  Description of Artificial Sequence: Synthetic oligonucleotide
gaaguacauuuagaaggug

SEQ ID NO: 1957927 - RNA, 19 nt, Artificial Sequence
  Description of Artificial Sequence: Synthetic oligonucleotide
guacucgaucgguuacucg

SEQ ID NO: 1957928 - RNA, 19 nt, Artificial Sequence
  Description of Artificial Sequence: Synthetic oligonucleotide
ugguaucagcgaccucugg

SEQ ID NO: 1957929 - RNA, 19 nt, Artificial Sequence
  Description of Artificial Sequence: Synthetic oligonucleotide
uggaagcgaaaggacucgg

SEQ ID NO: 1957930 - RNA, 19 nt, Artificial Sequence
  Description of Artificial Sequence: Synthetic oligonucleotide
ucguagagcuccucaucgc

SEQ ID NO: 1957931 - RNA, 19 nt, Artificial Sequence
  Description of Artificial Sequence: Synthetic oligonucleotide
gugaugcugucucuuaguc

SEQ ID NO: 1957932 - RNA, 19 nt, Artificial Sequence
  Description of Artificial Sequence: Synthetic oligonucleotide
gaacucucucguccucagg

SEQ ID NO: 1957933 - RNA, 19 nt, Artificial Sequence
  Description of Artificial Sequence: Synthetic oligonucleotide
gacgguaucuccggaggcc

SEQ ID NO: 1957934 - RNA, 19 nt, Artificial Sequence
  Description of Artificial Sequence: Synthetic oligonucleotide
ugcuuugagagaggaagaa

SEQ ID NO: 1957935 - RNA, 19 nt, Artificial Sequence
  Description of Artificial Sequence: Synthetic oligonucleotide
ugaugugcugucugucuuc

SEQ ID NO: 1957936 - RNA, 19 nt, Artificial Sequence
  Description of Artificial Sequence: Synthetic oligonucleotide
agccauggacucguagagc

SEQ ID NO: 1957937 - RNA, 19 nt, Artificial Sequence
  Description of Artificial Sequence: Synthetic oligonucleotide
uccacuuuuccaggcaggu

SEQ ID NO: 1957938 - RNA, 19 nt, Artificial Sequence
  Description of Artificial Sequence: Synthetic oligonucleotide
aacuugcggaucauugagu

SEQ ID NO: 1957939 - RNA, 19 nt, Artificial Sequence
  Description of Artificial Sequence: Synthetic oligonucleotide
gcuugcaucucacaaugac

SEQ ID NO: 1957940 - RNA, 19 nt, Artificial Sequence
  Description of Artificial Sequence: Synthetic oligonucleotide
ugugcuugaugugcugucu

SEQ ID NO: 1957941 - RNA, 19 nt, Artificial Sequence
  Description of Artificial Sequence: Synthetic oligonucleotide
acgguaucuccggaggccg

SEQ ID NO: 1957942 - RNA, 19 nt, Artificial Sequence
  Description of Artificial Sequence: Synthetic oligonucleotide
uguuccggucacagcaggu

SEQ ID NO: 1957943 - RNA, 19 nt, Artificial Sequence
  Description of Artificial Sequence: Synthetic oligonucleotide
  modified_base (13)..(13): a, c, u, g, unknown or other
uagugggccgagngaaacu

SEQ ID NO: 1957944 - RNA, 19 nt, Artificial Sequence
  Description of Artificial Sequence: Synthetic oligonucleotide
cugaaaauugccagucuua

SEQ ID NO: 1957945 - RNA, 19 nt, Artificial Sequence
  Description of Artificial Sequence: Synthetic oligonucleotide
cauacucgucgaugaacug

SEQ ID NO: 1957946 - RNA, 19 nt, Artificial Sequence
  Description of Artificial Sequence: Synthetic oligonucleotide
ucugucgucgggugaugcu

SEQ ID NO: 1957947 - RNA, 19 nt, Artificial Sequence
  Description of Artificial Sequence: Synthetic oligonucleotide
uccggucacagcaggugcu

SEQ ID NO: 1957948 - RNA, 19 nt, Artificial Sequence
  Description of Artificial Sequence: Synthetic oligonucleotide
uggggccgcucucauaaac

SEQ ID NO: 1957949 - RNA, 19 nt, Artificial Sequence
  Description of Artificial Sequence: Synthetic oligonucleotide
uucugguugaguugccauu

SEQ ID NO: 1957950 - RNA, 19 nt, Artificial Sequence
  Description of Artificial Sequence: Synthetic oligonucleotide
gaagcgaaaggacucggau

SEQ ID NO: 1957951 - RNA, 19 nt, Artificial Sequence
  Description of Artificial Sequence: Synthetic oligonucleotide
cucguacucgaucgguuac

SEQ ID NO: 1957952 - RNA, 19 nt, Artificial Sequence
  Description of Artificial Sequence: Synthetic oligonucleotide
guagagcuccucaucgcag

SEQ ID NO: 1957953 - RNA, 19 nt, Artificial Sequence
  Description of Artificial Sequence: Synthetic oligonucleotide
ggagcacuucaugaggagg

SEQ ID NO: 1957954 - RNA, 19 nt, Artificial Sequence
  Description of Artificial Sequence: Synthetic oligonucleotide
ugacugguguuccggucac

SEQ ID NO: 1957955 - RNA, 19 nt, Artificial Sequence
  Description of Artificial Sequence: Synthetic oligonucleotide
ucugcaugcuuucccgauu

SEQ ID NO: 1957956 - RNA, 19 nt, Artificial Sequence
  Description of Artificial Sequence: Synthetic oligonucleotide
cugugaucuccagaucugc

SEQ ID NO: 1957957 - RNA, 19 nt, Artificial Sequence
  Description of Artificial Sequence: Synthetic oligonucleotide
aggcuccucguacucgauc

SEQ ID NO: 1957958 - RNA, 19 nt, Artificial Sequence
  Description of Artificial Sequence: Synthetic oligonucleotide
gaccugggcuacgacuucg

SEQ ID NO: 1957959 - RNA, 19 nt, Artificial Sequence
  Description of Artificial Sequence: Synthetic oligonucleotide
gaagaacucucucguccuc

SEQ ID NO: 1957960 - RNA, 19 nt, Artificial Sequence
  Description of Artificial Sequence: Synthetic oligonucleotide
caugacugguguuccgguc

SEQ ID NO: 1957961 - RNA, 19 nt, Artificial Sequence
  Description of Artificial Sequence: Synthetic oligonucleotide
acucucucguccucaggcu

SEQ ID NO: 1957962 - RNA, 19 nt, Artificial Sequence
  Description of Artificial Sequence: Synthetic oligonucleotide
uagaggucuucuguagccu

SEQ ID NO: 1957963 - RNA, 19 nt, Artificial Sequence
  Description of Artificial Sequence: Synthetic oligonucleotide
cucgaggagguacccuggg

SEQ ID NO: 1957964 - RNA, 19 nt, Artificial Sequence
  Description of Artificial Sequence: Synthetic oligonucleotide
gugcugagaaugccggaug

SEQ ID NO: 1957965 - RNA, 19 nt, Artificial Sequence
  Description of Artificial Sequence: Synthetic oligonucleotide
aagacuccauuaacaggcu

SEQ ID NO: 1957966 - RNA, 19 nt, Artificial Sequence
  Description of Artificial Sequence: Synthetic oligonucleotide
agcacuucaugaggagguc

SEQ ID NO: 1957967 - RNA, 19 nt, Artificial Sequence
  Description of Artificial Sequence: Synthetic oligonucleotide
cuuuuaagauuuuccugcu

SEQ ID NO: 1957968 - RNA, 19 nt, Artificial Sequence
  Description of Artificial Sequence: Synthetic oligonucleotide
ucgaucgguuacucgugcu

SEQ ID NO: 1957969 - RNA, 19 nt, Artificial Sequence
  Description of Artificial Sequence: Synthetic oligonucleotide
ucgugcugcuugcugugcu

SEQ ID NO: 1957970 - RNA, 19 nt, Artificial Sequence
  Description of Artificial Sequence: Synthetic oligonucleotide
ggugguaucagcgaccucu

SEQ ID NO: 1957971 - RNA, 19 nt, Artificial Sequence
  Description of Artificial Sequence: Synthetic oligonucleotide
ggcggaaacacgcucuuuc

SEQ ID NO: 1957972 - RNA, 19 nt, Artificial Sequence
  Description of Artificial Sequence: Synthetic oligonucleotide
aagucgugaaguacauuua

SEQ ID NO: 1957973 - RNA, 19 nt, Artificial Sequence
  Description of Artificial Sequence: Synthetic oligonucleotide
uccauuuggguaggaccug

SEQ ID NO: 1957974 - RNA, 19 nt, Artificial Sequence
  Description of Artificial Sequence: Synthetic oligonucleotide
guuccggucacagcaggug

SEQ ID NO: 1957975 - RNA, 19 nt, Artificial Sequence
  Description of Artificial Sequence: Synthetic oligonucleotide
ucuguccugggcggaaaca

SEQ ID NO: 1957976 - RNA, 19 nt, Artificial Sequence
  Description of Artificial Sequence: Synthetic oligonucleotide
acagugguuucugccccac

SEQ ID NO: 1957977 - RNA, 19 nt, Artificial Sequence
  Description of Artificial Sequence: Synthetic oligonucleotide
ugguugaguugccauucuu

SEQ ID NO: 1957978 - RNA, 19 nt, Artificial Sequence
  Description of Artificial Sequence: Synthetic oligonucleotide
aucgguuacucgugcugcu

SEQ ID NO: 1957979 - RNA, 19 nt, Artificial Sequence
  Description of Artificial Sequence: Synthetic oligonucleotide
cugugcuugaugugcuguc

SEQ ID NO: 1957980 - RNA, 19 nt, Artificial Sequence
  Description of Artificial Sequence: Synthetic oligonucleotide
cuguccugggcggaaacac

SEQ ID NO: 1957981 - RNA, 19 nt, Artificial Sequence
  Description of Artificial Sequence: Synthetic oligonucleotide
aucuccggaggccgguuug

SEQ ID NO: 1957982 - RNA, 19 nt, Artificial Sequence
  Description of Artificial Sequence: Synthetic oligonucleotide
guuaccugcacuggccuga

SEQ ID NO: 1957983 - RNA, 19 nt, Artificial Sequence
  Description of Artificial Sequence: Synthetic oligonucleotide
cugcuuugagagaggaaga

SEQ ID NO: 1957984 - RNA, 19 nt, Artificial Sequence
  Description of Artificial Sequence: Synthetic oligonucleotide
guccugggcggaaacacgc

SEQ ID NO: 1957985 - RNA, 19 nt, Artificial Sequence
  Description of Artificial Sequence: Synthetic oligonucleotide
uccucguacucgaucgguu

SEQ ID NO: 1957986 - RNA, 19 nt, Artificial Sequence
  Description of Artificial Sequence: Synthetic oligonucleotide
gguuacucgugcugcuugc

SEQ ID NO: 1957987 - RNA, 19 nt, Artificial Sequence
  Description of Artificial Sequence: Synthetic oligonucleotide
uggcgcagguacccugaag

SEQ ID NO: 1957988 - RNA, 19 nt, Artificial Sequence
  Description of Artificial Sequence: Synthetic oligonucleotide
uccggaggccgguuugucu

SEQ ID NO: 1957989 - RNA, 19 nt, Artificial Sequence
  Description of Artificial Sequence: Synthetic oligonucleotide
cugucgucgggugaugcug

SEQ ID NO: 1957990 - RNA, 19 nt, Artificial Sequence
  Description of Artificial Sequence: Synthetic oligonucleotide
ucggaucguuucuucuggu

SEQ ID NO: 1957991 - RNA, 19 nt, Artificial Sequence
  Description of Artificial Sequence: Synthetic oligonucleotide
cugguguuccggucacagc

SEQ ID NO: 1957992 - RNA, 19 nt, Artificial Sequence
  Description of Artificial Sequence: Synthetic oligonucleotide
gucgugaaguacauuuaga

SEQ ID NO: 1957993 - RNA, 19 nt, Artificial Sequence
  Description of Artificial Sequence: Synthetic oligonucleotide
acuccauuaacaggcugaa

SEQ ID NO: 1957994 - RNA, 19 nt, Artificial Sequence
  Description of Artificial Sequence: Synthetic oligonucleotide
ucguacucgaucgguuacu

SEQ ID NO: 1957995 - RNA, 19 nt, Artificial Sequence
  Description of Artificial Sequence: Synthetic oligonucleotide
uccacgucucagcucuguc

SEQ ID NO: 1957996 - RNA, 19 nt, Artificial Sequence
  Description of Artificial Sequence: Synthetic oligonucleotide
aggguugagggagcacuuc

SEQ ID NO: 1957997 - RNA, 19 nt, Artificial Sequence
  Description of Artificial Sequence: Synthetic oligonucleotide
agggagcacuucaugagga

SEQ ID NO: 1957998 - RNA, 19 nt, Artificial Sequence
  Description of Artificial Sequence: Synthetic oligonucleotide
cucucucguccucaggcuc

SEQ ID NO: 1957999 - RNA, 19 nt, Artificial Sequence
  Description of Artificial Sequence: Synthetic oligonucleotide
ugaguccuuagugggccga

SEQ ID NO: 1958000 - RNA, 19 nt, Artificial Sequence
  Description of Artificial Sequence: Synthetic oligonucleotide
cugcaccaccaucagguuc

SEQ ID NO: 1958001 - RNA, 19 nt, Artificial Sequence
  Description of Artificial Sequence: Synthetic oligonucleotide
gggugaugcugucucuuag

SEQ ID NO: 1958002 - RNA, 19 nt, Artificial Sequence
  Description of Artificial Sequence: Synthetic oligonucleotide
ggucaugacugguguuccg

SEQ ID NO: 1958003 - RNA, 19 nt, Artificial Sequence
  Description of Artificial Sequence: Synthetic oligonucleotide
gagcacuucaugaggaggu

SEQ ID NO: 1958004 - RNA, 19 nt, Artificial Sequence
  Description of Artificial Sequence: Synthetic oligonucleotide
ugcaucucacaaugacaua

SEQ ID NO: 1958005 - RNA, 19 nt, Artificial Sequence
  Description of Artificial Sequence: Synthetic oligonucleotide
  modified_base (12)..(12): a, c, u, g, unknown or other
agugggccgagngaaacuu

SEQ ID NO: 1958006 - RNA, 19 nt, Artificial Sequence
  Description of Artificial Sequence: Synthetic oligonucleotide
cucuuagucuuuuaagauu

SEQ ID NO: 1958007 - RNA, 19 nt, Artificial Sequence
  Description of Artificial Sequence: Synthetic oligonucleotide
gggacugugaucuccagau

SEQ ID NO: 1958008 - RNA, 19 nt, Artificial Sequence
  Description of Artificial Sequence: Synthetic oligonucleotide
auuucaacauagaggucuu

SEQ ID NO: 1958009 - RNA, 19 nt, Artificial Sequence
  Description of Artificial Sequence: Synthetic oligonucleotide
cugccccacagcgaaugcg

SEQ ID NO: 1958010 - RNA, 19 nt, Artificial Sequence
  Description of Artificial Sequence: Synthetic oligonucleotide
acucgaucgguuacucgug

SEQ ID NO: 1958011 - RNA, 19 nt, Artificial Sequence
  Description of Artificial Sequence: Synthetic oligonucleotide
ccacgucucagcucugucc

SEQ ID NO: 1958012 - RNA, 19 nt, Artificial Sequence
  Description of Artificial Sequence: Synthetic oligonucleotide
gcgaaugcgguccggcugc

SEQ ID NO: 1958013 - RNA, 19 nt, Artificial Sequence
  Description of Artificial Sequence: Synthetic oligonucleotide
ggaucauugaguccuuagu

SEQ ID NO: 1958014 - RNA, 19 nt, Artificial Sequence
  Description of Artificial Sequence: Synthetic oligonucleotide
caucaucggccuccucacc

SEQ ID NO: 1958015 - RNA, 19 nt, Artificial Sequence
  Description of Artificial Sequence: Synthetic oligonucleotide
cucugucgucgggugaugc

SEQ ID NO: 1958016 - RNA, 19 nt, Artificial Sequence
  Description of Artificial Sequence: Synthetic oligonucleotide
cccgauuucugcuucucuc

SEQ ID NO: 1958017 - RNA, 19 nt, Artificial Sequence
  Description of Artificial Sequence: Synthetic oligonucleotide
aggaccugggcuacgacuu

SEQ ID NO: 1958018 - RNA, 19 nt, Artificial Sequence
  Description of Artificial Sequence: Synthetic oligonucleotide
cacgcucuuucuggggccg

SEQ ID NO: 1958019 - RNA, 19 nt, Artificial Sequence
  Description of Artificial Sequence: Synthetic oligonucleotide
uaucuccggaggccgguuu

SEQ ID NO: 1958020 - RNA, 19 nt, Artificial Sequence
  Description of Artificial Sequence: Synthetic oligonucleotide
gcuuugagagaggaagaac

SEQ ID NO: 1958021 - RNA, 19 nt, Artificial Sequence
  Description of Artificial Sequence: Synthetic oligonucleotide
gggccauggauucguacac

SEQ ID NO: 1958022 - RNA, 19 nt, Artificial Sequence
  Description of Artificial Sequence: Synthetic oligonucleotide
auccagcuugcaucucaca

SEQ ID NO: 1958023 - RNA, 19 nt, Artificial Sequence
  Description of Artificial Sequence: Synthetic oligonucleotide
gcugagaaugccggauggg

SEQ ID NO: 1958024 - RNA, 19 nt, Artificial Sequence
  Description of Artificial Sequence: Synthetic oligonucleotide
ggguuagaggccucuguga

SEQ ID NO: 1958025 - RNA, 19 nt, Artificial Sequence
  Description of Artificial Sequence: Synthetic oligonucleotide
ccagacgguaucuccggag

SEQ ID NO: 1958026 - RNA, 19 nt, Artificial Sequence
  Description of Artificial Sequence: Synthetic oligonucleotide
gugggccauggauucguac

SEQ ID NO: 1958027 - RNA, 19 nt, Artificial Sequence
  Description of Artificial Sequence: Synthetic oligonucleotide
guacauuuagaagguggua

SEQ ID NO: 1958028 - RNA, 19 nt, Artificial Sequence
  Description of Artificial Sequence: Synthetic oligonucleotide
ccagucuuaaaagucguga

SEQ ID NO: 1958029 - RNA, 19 nt, Artificial Sequence
  Description of Artificial Sequence: Synthetic oligonucleotide
ugggcggaaacacgcucuu

SEQ ID NO: 1958030 - RNA, 19 nt, Artificial Sequence
  Description of Artificial Sequence: Synthetic oligonucleotide
caagggucaugacuggugu

SEQ ID NO: 1958031 - RNA, 19 nt, Artificial Sequence
  Description of Artificial Sequence: Synthetic oligonucleotide
gagagaggaagaacucucu

SEQ ID NO: 1958032 - RNA, 19 nt, Artificial Sequence
  Description of Artificial Sequence: Synthetic oligonucleotide
aggugcugagaaugccgga

SEQ ID NO: 1958033 - RNA, 19 nt, Artificial Sequence
  Description of Artificial Sequence: Synthetic oligonucleotide
gugguaucagcgaccucug

SEQ ID NO: 1958034 - RNA, 19 nt, Artificial Sequence
  Description of Artificial Sequence: Synthetic oligonucleotide
cucuguccugggcggaaac

SEQ ID NO: 1958035 - RNA, 19 nt, Artificial Sequence
  Description of Artificial Sequence: Synthetic oligonucleotide
  modified_base (15)..(15): a, c, u, g, unknown or other
cuuagugggccgagngaaa

SEQ ID NO: 1958036 - RNA, 19 nt, Artificial Sequence
  Description of Artificial Sequence: Synthetic oligonucleotide
cacgucucagcucuguccu

SEQ ID NO: 1958037 - RNA, 19 nt, Artificial Sequence
  Description of Artificial Sequence: Synthetic oligonucleotide
ggaagaacucucucguccu

SEQ ID NO: 1958038 - RNA, 19 nt, Artificial Sequence
  Description of Artificial Sequence: Synthetic oligonucleotide
  modified_base (8)..(8): a, c, u, g, unknown or other
ggccgagngaaacuuucuc

SEQ ID NO: 1958039 - RNA, 19 nt, Artificial Sequence
  Description of Artificial Sequence: Synthetic oligonucleotide
aggugggccauggauucgu

SEQ ID NO: 1958040 - RNA, 19 nt, Artificial Sequence
  Description of Artificial Sequence: Synthetic oligonucleotide
auggauucguacacaucau

SEQ ID NO: 1958041 - RNA, 19 nt, Artificial Sequence
  Description of Artificial Sequence: Synthetic oligonucleotide
guaggaccugggcuacgac

SEQ ID NO: 1958042 - RNA, 19 nt, Artificial Sequence
  Description of Artificial Sequence: Synthetic oligonucleotide
uggguaggaccugggcuac

SEQ ID NO: 1958043 - RNA, 19 nt, Artificial Sequence
  Description of Artificial Sequence: Synthetic oligonucleotide
ucguuucuucugguugagu

SEQ ID NO: 1958044 - RNA, 19 nt, Artificial Sequence
  Description of Artificial Sequence: Synthetic oligonucleotide
aggccgguuugucugcuuu

SEQ ID NO: 1958045 - RNA, 19 nt, Artificial Sequence
  Description of Artificial Sequence: Synthetic oligonucleotide
  modified_base (16)..(16): a, c, u, g, unknown or other
ccuuagugggccgagngaa

SEQ ID NO: 1958046 - RNA, 19 nt, Artificial Sequence
  Description of Artificial Sequence: Synthetic oligonucleotide
uucccgauuucugcuucuc

SEQ ID NO: 1958047 - RNA, 19 nt, Artificial Sequence
  Description of Artificial Sequence: Synthetic oligonucleotide
cccuggguuaccugcacug

SEQ ID NO: 1958048 - RNA, 19 nt, Artificial Sequence
  Description of Artificial Sequence: Synthetic oligonucleotide
uuucugccccacagcgaau

SEQ ID NO: 1958049 - RNA, 19 nt, Artificial Sequence
  Description of Artificial Sequence: Synthetic oligonucleotide
cugggcuacgacuucgagu

SEQ ID NO: 1958050 - RNA, 19 nt, Artificial Sequence
  Description of Artificial Sequence: Synthetic oligonucleotide
cuccagaucugcaugcuuu

SEQ ID NO: 1958051 - RNA, 19 nt, Artificial Sequence
  Description of Artificial Sequence: Synthetic oligonucleotide
aggugguaucagcgaccuc

SEQ ID NO: 1958052 - RNA, 19 nt, Artificial Sequence
  Description of Artificial Sequence: Synthetic oligonucleotide
ucgggugaugcugucucuu

SEQ ID NO: 1958053 - RNA, 19 nt, Artificial Sequence
  Description of Artificial Sequence: Synthetic oligonucleotide
ucuccggaggccgguuugu

SEQ ID NO: 1958054 - RNA, 19 nt, Artificial Sequence
  Description of Artificial Sequence: Synthetic oligonucleotide
ucaucgcagccaggguuga

SEQ ID NO: 1958055 - RNA, 19 nt, Artificial Sequence
  Description of Artificial Sequence: Synthetic oligonucleotide
gcgcagguacccugaagcc

SEQ ID NO: 1958056 - RNA, 19 nt, Artificial Sequence
  Description of Artificial Sequence: Synthetic oligonucleotide
ucucugucgucgggugaug

SEQ ID NO: 1958057 - RNA, 19 nt, Artificial Sequence
  Description of Artificial Sequence: Synthetic oligonucleotide
cuccagagcccuggguuac

SEQ ID NO: 1958058 - RNA, 19 nt, Artificial Sequence
  Description of Artificial Sequence: Synthetic oligonucleotide
agggaagggcucccggguu

SEQ ID NO: 1958059 - RNA, 19 nt, Artificial Sequence
  Description of Artificial Sequence: Synthetic oligonucleotide
  modified_base (19)..(19): a, c, u, g, unknown or other
aguccuuagugggccgagn

SEQ ID NO: 1958060 - RNA, 19 nt, Artificial Sequence
  Description of Artificial Sequence: Synthetic oligonucleotide
ccggaggccgguuugucug

SEQ ID NO: 1958061 - RNA, 19 nt, Artificial Sequence
  Description of Artificial Sequence: Synthetic oligonucleotide
gccugaagcauuucaacau

SEQ ID NO: 1958062 - RNA, 19 nt, Artificial Sequence
  Description of Artificial Sequence: Synthetic oligonucleotide
gaccucugggagggaacug

SEQ ID NO: 1958063 - RNA, 19 nt, Artificial Sequence
  Description of Artificial Sequence: Synthetic oligonucleotide
gggccgcucucauaaacuc

SEQ ID NO: 1958064 - RNA, 19 nt, Artificial Sequence
  Description of Artificial Sequence: Synthetic oligonucleotide
auguggcucuucagcaugu

SEQ ID NO: 1958065 - RNA, 19 nt, Artificial Sequence
  Description of Artificial Sequence: Synthetic oligonucleotide
gccgcucucauaaacucca

SEQ ID NO: 1958066 - RNA, 19 nt, Artificial Sequence
  Description of Artificial Sequence: Synthetic oligonucleotide
ugcagaacuugcggaucau

SEQ ID NO: 1958067 - RNA, 19 nt, Artificial Sequence
  Description of Artificial Sequence: Synthetic oligonucleotide
gaaaggacucggaucguuu

SEQ ID NO: 1958068 - RNA, 19 nt, Artificial Sequence
  Description of Artificial Sequence: Synthetic oligonucleotide
cagagcccuggguuaccug

SEQ ID NO: 1958069 - RNA, 19 nt, Artificial Sequence
  Description of Artificial Sequence: Synthetic oligonucleotide
ggcagcucgaggagguacc

SEQ ID NO: 1958070 - RNA, 19 nt, Artificial Sequence
  Description of Artificial Sequence: Synthetic oligonucleotide
ugcggaucauugaguccuu

SEQ ID NO: 1958071 - RNA, 19 nt, Artificial Sequence
  Description of Artificial Sequence: Synthetic oligonucleotide
caucggccuccucacccug

SEQ ID NO: 1958072 - RNA, 19 nt, Artificial Sequence
  Description of Artificial Sequence: Synthetic oligonucleotide
cccuccaucccacugcuca

SEQ ID NO: 1958073 - RNA, 19 nt, Artificial Sequence
  Description of Artificial Sequence: Synthetic oligonucleotide
ucgguuacucgugcugcuu

SEQ ID NO: 1958074 - RNA, 19 nt, Artificial Sequence
  Description of Artificial Sequence: Synthetic oligonucleotide
uuaccugcacuggccugaa

SEQ ID NO: 1958075 - RNA, 19 nt, Artificial Sequence
  Description of Artificial Sequence: Synthetic oligonucleotide
cacagcgaaugcgguccgg

SEQ ID NO: 1958076 - RNA, 19 nt, Artificial Sequence
  Description of Artificial Sequence: Synthetic oligonucleotide
agcuugcaucucacaauga

SEQ ID NO: 1958077 - RNA, 19 nt, Artificial Sequence
  Description of Artificial Sequence: Synthetic oligonucleotide
uagaggccucugugaggca

SEQ ID NO: 1958078 - RNA, 19 nt, Artificial Sequence
  Description of Artificial Sequence: Synthetic oligonucleotide
cacacugaggaggcuccuc

SEQ ID NO: 1958079 - RNA, 19 nt, Artificial Sequence
  Description of Artificial Sequence: Synthetic oligonucleotide
cugggcggaaacacgcucu

SEQ ID NO: 1958080 - RNA, 19 nt, Artificial Sequence
  Description of Artificial Sequence: Synthetic oligonucleotide
ggccgcucucauaaacucc

SEQ ID NO: 1958081 - RNA, 19 nt, Artificial Sequence
  Description of Artificial Sequence: Synthetic oligonucleotide
ggacucggaucguuucuuc

SEQ ID NO: 1958082 - RNA, 19 nt, Artificial Sequence
  Description of Artificial Sequence: Synthetic oligonucleotide
gcucgaggagguacccugg

SEQ ID NO: 1958083 - RNA, 19 nt, Artificial Sequence
  Description of Artificial Sequence: Synthetic oligonucleotide
ggccgguuugucugcuuug

SEQ ID NO: 1958084 - RNA, 19 nt, Artificial Sequence
  Description of Artificial Sequence: Synthetic oligonucleotide
uucuggggccgcucucaua

SEQ ID NO: 1958085 - RNA, 19 nt, Artificial Sequence
  Description of Artificial Sequence: Synthetic oligonucleotide
cugucgccaccuucucauc

SEQ ID NO: 1958086 - RNA, 19 nt, Artificial Sequence
  Description of Artificial Sequence: Synthetic oligonucleotide
agcgaccucugggagggaa

SEQ ID NO: 1958087 - RNA, 19 nt, Artificial Sequence
  Description of Artificial Sequence: Synthetic oligonucleotide
gcugucgccaccuucucau

SEQ ID NO: 1958088 - RNA, 19 nt, Artificial Sequence
  Description of Artificial Sequence: Synthetic oligonucleotide
gugcugucugucuuccagu

SEQ ID NO: 1958089 - RNA, 19 nt, Artificial Sequence
  Description of Artificial Sequence: Synthetic oligonucleotide
cagguacccugaagccaug

SEQ ID NO: 1958090 - RNA, 19 nt, Artificial Sequence
  Description of Artificial Sequence: Synthetic oligonucleotide
ggacugugaucuccagauc

SEQ ID NO: 1958091 - RNA, 19 nt, Artificial Sequence
  Description of Artificial Sequence: Synthetic oligonucleotide
cgaucgguuacucgugcug

SEQ ID NO: 1958092 - RNA, 19 nt, Artificial Sequence
  Description of Artificial Sequence: Synthetic oligonucleotide
ccugaagcauuucaacaua

SEQ ID NO: 1958093 - RNA, 19 nt, Artificial Sequence
  Description of Artificial Sequence: Synthetic oligonucleotide
cgacuucgaguaauuucag

SEQ ID NO: 1958094 - RNA, 19 nt, Artificial Sequence
  Description of Artificial Sequence: Synthetic oligonucleotide
ccugggcggaaacacgcuc

SEQ ID NO: 1958095 - RNA, 19 nt, Artificial Sequence
  Description of Artificial Sequence: Synthetic oligonucleotide
gaaugcgguccggcugcac

SEQ ID NO: 1958096 - RNA, 19 nt, Artificial Sequence
  Description of Artificial Sequence: Synthetic oligonucleotide
cguagagcuccucaucgca

SEQ ID NO: 1958097 - RNA, 19 nt, Artificial Sequence
  Description of Artificial Sequence: Synthetic oligonucleotide
caucgcagccaggguugag

SEQ ID NO: 1958098 - RNA, 19 nt, Artificial Sequence
  Description of Artificial Sequence: Synthetic oligonucleotide
ccuccaucccacugcucac

SEQ ID NO: 1958099 - RNA, 19 nt, Artificial Sequence
  Description of Artificial Sequence: Synthetic oligonucleotide
gguuucugccccacagcga

SEQ ID NO: 1958100 - RNA, 19 nt, Artificial Sequence
  Description of Artificial Sequence: Synthetic oligonucleotide
cugcaugcuuucccgauuu

SEQ ID NO: 1958101 - RNA, 19 nt, Artificial Sequence
  Description of Artificial Sequence: Synthetic oligonucleotide
gguucccagacgguaucuc

SEQ ID NO: 1958102 - RNA, 19 nt, Artificial Sequence
  Description of Artificial Sequence: Synthetic oligonucleotide
gccauggauucguacacau

SEQ ID NO: 1958103 - RNA, 19 nt, Artificial Sequence
  Description of Artificial Sequence: Synthetic oligonucleotide
ggcugaaaauugccagucu

SEQ ID NO: 1958104 - RNA, 19 nt, Artificial Sequence
  Description of Artificial Sequence: Synthetic oligonucleotide
guuacucgugcugcuugcu

SEQ ID NO: 1958105 - RNA, 19 nt, Artificial Sequence
  Description of Artificial Sequence: Synthetic oligonucleotide
ggaggagggaagggcuccc

SEQ ID NO: 1958106 - RNA, 19 nt, Artificial Sequence
  Description of Artificial Sequence: Synthetic oligonucleotide
cgucgggugaugcugucuc

SEQ ID NO: 1958107 - RNA, 19 nt, Artificial Sequence
  Description of Artificial Sequence: Synthetic oligonucleotide
accugggcuacgacuucga

SEQ ID NO: 1958108 - RNA, 19 nt, Artificial Sequence
  Description of Artificial Sequence: Synthetic oligonucleotide
gcagcucgaggagguaccc

SEQ ID NO: 1958109 - RNA, 19 nt, Artificial Sequence
  Description of Artificial Sequence: Synthetic oligonucleotide
ccggauggggacugugauc

SEQ ID NO: 1958110 - RNA, 19 nt, Artificial Sequence
  Description of Artificial Sequence: Synthetic oligonucleotide
cgguuacucgugcugcuug

SEQ ID NO: 1958111 - RNA, 19 nt, Artificial Sequence
  Description of Artificial Sequence: Synthetic oligonucleotide
gcggaaacacgcucuuucu

SEQ ID NO: 1958112 - RNA, 19 nt, Artificial Sequence
  Description of Artificial Sequence: Synthetic oligonucleotide
ggugcugagaaugccggau

SEQ ID NO: 1958113 - RNA, 19 nt, Artificial Sequence
  Description of Artificial Sequence: Synthetic oligonucleotide
ccacagcgaaugcgguccg

SEQ ID NO: 1958114 - RNA, 19 nt, Artificial Sequence
  Description of Artificial Sequence: Synthetic oligonucleotide
cugguugaguugccauucu

SEQ ID NO: 1958115 - RNA, 19 nt, Artificial Sequence
  Description of Artificial Sequence: Synthetic oligonucleotide
ccgauuucugcuucucucu

SEQ ID NO: 1958116 - RNA, 19 nt, Artificial Sequence
  Description of Artificial Sequence: Synthetic oligonucleotide
caucagguucccagacggu

SEQ ID NO: 1958117 - RNA, 19 nt, Artificial Sequence
  Description of Artificial Sequence: Synthetic oligonucleotide
gcaugcuuucccgauuucu

SEQ ID NO: 1958118 - RNA, 19 nt, Artificial Sequence
  Description of Artificial Sequence: Synthetic oligonucleotide
gacugguguuccggucaca

SEQ ID NO: 1958119 - RNA, 19 nt, Artificial Sequence
  Description of Artificial Sequence: Synthetic oligonucleotide
gccgguuugucugcuuuga

SEQ ID NO: 1958120 - RNA, 19 nt, Artificial Sequence
  Description of Artificial Sequence: Synthetic oligonucleotide
cagugguuucugccccaca

SEQ ID NO: 1958121 - RNA, 19 nt, Artificial Sequence
  Description of Artificial Sequence: Synthetic oligonucleotide
gcagguacccugaagccau

SEQ ID NO: 1958122 - RNA, 19 nt, Artificial Sequence
  Description of Artificial Sequence: Synthetic oligonucleotide
cuccauuaacaggcugaaa

SEQ ID NO: 1958123 - RNA, 19 nt, Artificial Sequence
  Description of Artificial Sequence: Synthetic oligonucleotide
ccucguacucgaucgguua

SEQ ID NO: 1958124 - RNA, 19 nt, Artificial Sequence
  Description of Artificial Sequence: Synthetic oligonucleotide
cuccggaggccgguuuguc

SEQ ID NO: 1958125 - RNA, 19 nt, Artificial Sequence
  Description of Artificial Sequence: Synthetic oligonucleotide
cacugaggaggcuccucgu

SEQ ID NO: 1958126 - RNA, 19 nt, Artificial Sequence
  Description of Artificial Sequence: Synthetic oligonucleotide
gaacuggcgcagguacccu

SEQ ID NO: 1958127 - RNA, 19 nt, Artificial Sequence
  Description of Artificial Sequence: Synthetic oligonucleotide
ccagcuugcaucucacaau

SEQ ID NO: 1958128 - RNA, 19 nt, Artificial Sequence
  Description of Artificial Sequence: Synthetic oligonucleotide
cagcgaaugcgguccggcu

SEQ ID NO: 1958129 - RNA, 19 nt, Artificial Sequence
  Description of Artificial Sequence: Synthetic oligonucleotide
gaagggcucccggguuaga

SEQ ID NO: 1958130 - RNA, 19 nt, Artificial Sequence
  Description of Artificial Sequence: Synthetic oligonucleotide
cguacucgaucgguuacuc

SEQ ID NO: 1958131 - RNA, 19 nt, Artificial Sequence
  Description of Artificial Sequence: Synthetic oligonucleotide
gcugugcuugaugugcugu

SEQ ID NO: 1958132 - RNA, 19 nt, Artificial Sequence
  Description of Artificial Sequence: Synthetic oligonucleotide
cucccggguuagaggccuc

SEQ ID NO: 1958133 - RNA, 19 nt, Artificial Sequence
  Description of Artificial Sequence: Synthetic oligonucleotide
cuccucguacucgaucggu

SEQ ID NO: 1958134 - RNA, 19 nt, Artificial Sequence
  Description of Artificial Sequence: Synthetic oligonucleotide
ggcuacgacuucgaguaau

SEQ ID NO: 1958135 - RNA, 19 nt, Artificial Sequence
  Description of Artificial Sequence: Synthetic oligonucleotide
ccaggguugagggagcacu

SEQ ID NO: 1958136 - RNA, 19 nt, Artificial Sequence
  Description of Artificial Sequence: Synthetic oligonucleotide
gcgaccucugggagggaac

SEQ ID NO: 1958137 - RNA, 19 nt, Artificial Sequence
  Description of Artificial Sequence: Synthetic oligonucleotide
cuacgacuucgaguaauuu

SEQ ID NO: 1958138 - RNA, 19 nt, Artificial Sequence
  Description of Artificial Sequence: Synthetic oligonucleotide
caggguugagggagcacuu

SEQ ID NO: 1958139 - RNA, 19 nt, Artificial Sequence
  Description of Artificial Sequence: Synthetic oligonucleotide
ggggccgcucucauaaacu

SEQ ID NO: 1958140 - RNA, 19 nt, Artificial Sequence
  Description of Artificial Sequence: Synthetic oligonucleotide
gcuacgacuucgaguaauu

SEQ ID NO: 1958141 - RNA, 19 nt, Artificial Sequence
  Description of Artificial Sequence: Synthetic oligonucleotide
cuggggccgcucucauaaa

SEQ ID NO: 1958142 - RNA, 19 nt, Artificial Sequence
  Description of Artificial Sequence: Synthetic oligonucleotide
gcgguccggcugcaccacc

SEQ ID NO: 1958143 - RNA, 19 nt, Artificial Sequence
  Description of Artificial Sequence: Synthetic oligonucleotide
cugcacuggccugaagcau

SEQ ID NO: 1958144 - RNA, 19 nt, Artificial Sequence
  Description of Artificial Sequence: Synthetic oligonucleotide
cgcagguacccugaagcca

SEQ ID NO: 1958145 - RNA, 19 nt, Artificial Sequence
  Description of Artificial Sequence: Synthetic oligonucleotide
ccggucacagcaggugcuc

SEQ ID NO: 1958146 - RNA, 19 nt, Artificial Sequence
  Description of Artificial Sequence: Synthetic oligonucleotide
cuccacgucucagcucugu

SEQ ID NO: 1958147 - RNA, 19 nt, Artificial Sequence
  Description of Artificial Sequence: Synthetic oligonucleotide
  modified_base (9)..(9): a, c, u, g, unknown or other
gggccgagngaaacuuucu

SEQ ID NO: 1958148 - RNA, 19 nt, Artificial Sequence
  Description of Artificial Sequence: Synthetic oligonucleotide
cgcucucauaaacuccaaa

SEQ ID NO: 1958149 - RNA, 19 nt, Artificial Sequence
  Description of Artificial Sequence: Synthetic oligonucleotide
gaggccgguuugucugcuu

SEQ ID NO: 1958150 - RNA, 19 nt, Artificial Sequence
  Description of Artificial Sequence: Synthetic oligonucleotide
cccagacgguaucuccgga

SEQ ID NO: 1958151 - RNA, 19 nt, Artificial Sequence
  Description of Artificial Sequence: Synthetic oligonucleotide
gcucccggguuagaggccu

SEQ ID NO: 1958152 - RNA, 19 nt, Artificial Sequence
  Description of Artificial Sequence: Synthetic oligonucleotide
cggucacagcaggugcucc

SEQ ID NO: 1958153 - RNA, 19 nt, Artificial Sequence
  Description of Artificial Sequence: Synthetic oligonucleotide
gaggcuccucguacucgau

SEQ ID NO: 1958154 - RNA, 19 nt, Artificial Sequence
  Description of Artificial Sequence: Synthetic oligonucleotide
cccggguuagaggccucug

SEQ ID NO: 1958155 - RNA, 19 nt, Artificial Sequence
  Description of Artificial Sequence: Synthetic oligonucleotide
guaucuccggaggccgguu

SEQ ID NO: 1958156 - RNA, 19 nt, Artificial Sequence
  Description of Artificial Sequence: Synthetic oligonucleotide
gggcuacgacuucgaguaa

SEQ ID NO: 1958157 - RNA, 19 nt, Artificial Sequence
  Description of Artificial Sequence: Synthetic oligonucleotide
cgaguaauuucagggacuu

SEQ ID NO: 1958158 - RNA, 19 nt, Artificial Sequence
  Description of Artificial Sequence: Synthetic oligonucleotide
gcagaacuugcggaucauu

SEQ ID NO: 1958159 - RNA, 19 nt, Artificial Sequence
  Description of Artificial Sequence: Synthetic oligonucleotide
  modified_base (11)..(11): a, c, u, g, unknown or other
gugggccgagngaaacuuu

SEQ ID NO: 1958160 - RNA, 19 nt, Artificial Sequence
  Description of Artificial Sequence: Synthetic oligonucleotide
gcccuggguuaccugcacu

SEQ ID NO: 1958161 - RNA, 19 nt, Artificial Sequence
  Description of Artificial Sequence: Synthetic oligonucleotide
cagcucgaggagguacccu

SEQ ID NO: 1958162 - RNA, 19 nt, Artificial Sequence
  Description of Artificial Sequence: Synthetic oligonucleotide
ccggguuagaggccucugu

SEQ ID NO: 1958163 - RNA, 19 nt, Artificial Sequence
  Description of Artificial Sequence: Synthetic oligonucleotide
ggugggccauggauucgua

SEQ ID NO: 1958164 - RNA, 19 nt, Artificial Sequence
  Description of Artificial Sequence: Synthetic oligonucleotide
gcggaucauugaguccuua

SEQ ID NO: 1958165 - RNA, 19 nt, Artificial Sequence
  Description of Artificial Sequence: Synthetic oligonucleotide
ccgcucucauaaacuccaa

SEQ ID NO: 1958166 - RNA, 19 nt, Artificial Sequence
  Description of Artificial Sequence: Synthetic oligonucleotide
cgggugaugcugucucuua

SEQ ID NO: 1958167 - RNA, 19 nt, Artificial Sequence
  Description of Artificial Sequence: Synthetic oligonucleotide
cgaugaacuggcgcaggua

SEQ ID NO: 1958168 - RNA, 19 nt, Artificial Sequence
  Description of Artificial Sequence: Synthetic oligonucleotide
gcgaaaggacucggaucgu

SEQ ID NO: 1958169 - RNA, 19 nt, Artificial Sequence
  Description of Artificial Sequence: Synthetic oligonucleotide
gccccacagcgaaugcggu

SEQ ID NO: 1958170 - RNA, 19 nt, Artificial Sequence
  Description of Artificial Sequence: Synthetic oligonucleotide
cgaaaggacucggaucguu

SEQ ID NO: 1958171 - RNA, 19 nt, Artificial Sequence
  Description of Artificial Sequence: Synthetic oligonucleotide
gggcggaaacacgcucuuu

SEQ ID NO: 1958172 - RNA, 19 nt, Artificial Sequence
  Description of Artificial Sequence: Synthetic oligonucleotide
cgaaugcgguccggcugca

SEQ ID NO: 1958173 - RNA, 19 nt, Artificial Sequence
  Description of Artificial Sequence: Synthetic oligonucleotide
aagaucagaagcaagagcc

SEQ ID NO: 1958174 - RNA, 19 nt, Artificial Sequence
  Description of Artificial Sequence: Synthetic oligonucleotide
uaaggguugaaguagaggc

SEQ ID NO: 1958175 - RNA, 19 nt, Artificial Sequence
  Description of Artificial Sequence: Synthetic oligonucleotide
gaacugaccauuuaugccg

SEQ ID NO: 1958176 - RNA, 19 nt, Artificial Sequence
  Description of Artificial Sequence: Synthetic oligonucleotide
acauaauccaugcuguggc

SEQ ID NO: 1958177 - RNA, 19 nt, Artificial Sequence
  Description of Artificial Sequence: Synthetic oligonucleotide
aaggagaauacauaguccu

SEQ ID NO: 1958178 - RNA, 19 nt, Artificial Sequence
  Description of Artificial Sequence: Synthetic oligonucleotide
aauacauaguccucaccac

SEQ ID NO: 1958179 - RNA, 19 nt, Artificial Sequence
  Description of Artificial Sequence: Synthetic oligonucleotide
agaacugaccauuuaugcc

SEQ ID NO: 1958180 - RNA, 19 nt, Artificial Sequence
  Description of Artificial Sequence: Synthetic oligonucleotide
aaugcagagccacagcuag

SEQ ID NO: 1958181 - RNA, 19 nt, Artificial Sequence
  Description of Artificial Sequence: Synthetic oligonucleotide
auuagggccauccuggaac

SEQ ID NO: 1958182 - RNA, 19 nt, Artificial Sequence
  Description of Artificial Sequence: Synthetic oligonucleotide
aauggaagaugccgggacc

SEQ ID NO: 1958183 - RNA, 19 nt, Artificial Sequence
  Description of Artificial Sequence: Synthetic oligonucleotide
uuaucaacaacaucuugag

SEQ ID NO: 1958184 - RNA, 19 nt, Artificial Sequence
  Description of Artificial Sequence: Synthetic oligonucleotide
auuuaugccgcuucauggc

SEQ ID NO: 1958185 - RNA, 19 nt, Artificial Sequence
  Description of Artificial Sequence: Synthetic oligonucleotide
uaaccagugagcaaggaga

SEQ ID NO: 1958186 - RNA, 19 nt, Artificial Sequence
  Description of Artificial Sequence: Synthetic oligonucleotide
auacauaguccucaccacc

SEQ ID NO: 1958187 - RNA, 19 nt, Artificial Sequence
  Description of Artificial Sequence: Synthetic oligonucleotide
cauuuaugccgcuucaugg

SEQ ID NO: 1958188 - RNA, 19 nt, Artificial Sequence
  Description of Artificial Sequence: Synthetic oligonucleotide
gacagcaucaccuuccggc

SEQ ID NO: 1958189 - RNA, 19 nt, Artificial Sequence
  Description of Artificial Sequence: Synthetic oligonucleotide
cuauuugugacaugguagc

SEQ ID NO: 1958190 - RNA, 19 nt, Artificial Sequence
  Description of Artificial Sequence: Synthetic oligonucleotide
cacaauguagcugaggucc

SEQ ID NO: 1958191 - RNA, 19 nt, Artificial Sequence
  Description of Artificial Sequence: Synthetic oligonucleotide
cauggcauaggucaggggc

SEQ ID NO: 1958192 - RNA, 19 nt, Artificial Sequence
  Description of Artificial Sequence: Synthetic oligonucleotide
uccguaauggaagaugccg

SEQ ID NO: 1958193 - RNA, 19 nt, Artificial Sequence
  Description of Artificial Sequence: Synthetic oligonucleotide
auuaucaacaacaucuuga

SEQ ID NO: 1958194 - RNA, 19 nt, Artificial Sequence
  Description of Artificial Sequence: Synthetic oligonucleotide
acuucgaggacaaggauac

SEQ ID NO: 1958195 - RNA, 19 nt, Artificial Sequence
  Description of Artificial Sequence: Synthetic oligonucleotide
ucaacaacaucuugagccc

SEQ ID NO: 1958196 - RNA, 19 nt, Artificial Sequence
  Description of Artificial Sequence: Synthetic oligonucleotide
ugguuuuggaaaguagucg

SEQ ID NO: 1958197 - RNA, 19 nt, Artificial Sequence
  Description of Artificial Sequence: Synthetic oligonucleotide
gguuuuggaaaguagucgg

SEQ ID NO: 1958198 - RNA, 19 nt, Artificial Sequence
  Description of Artificial Sequence: Synthetic oligonucleotide
uuccuucugaugaaaagga

SEQ ID NO: 1958199 - RNA, 19 nt, Artificial Sequence
  Description of Artificial Sequence: Synthetic oligonucleotide
gaaguagaggccuucucgc

SEQ ID NO: 1958200 - RNA, 19 nt, Artificial Sequence
  Description of Artificial Sequence: Synthetic oligonucleotide
ugggguaugguuuuggaaa

SEQ ID NO: 1958201 - RNA, 19 nt, Artificial Sequence
  Description of Artificial Sequence: Synthetic oligonucleotide
cagaacugaccauuuaugc

SEQ ID NO: 1958202 - RNA, 19 nt, Artificial Sequence
  Description of Artificial Sequence: Synthetic oligonucleotide
auaguccucaccaccaugc

SEQ ID NO: 1958203 - RNA, 19 nt, Artificial Sequence
  Description of Artificial Sequence: Synthetic oligonucleotide
agcacacuugcuuguauac

SEQ ID NO: 1958204 - RNA, 19 nt, Artificial Sequence
  Description of Artificial Sequence: Synthetic oligonucleotide
uucauuguagaugggagga

SEQ ID NO: 1958205 - RNA, 19 nt, Artificial Sequence
  Description of Artificial Sequence: Synthetic oligonucleotide
gucacuggcacucacagca

SEQ ID NO: 1958206 - RNA, 19 nt, Artificial Sequence
  Description of Artificial Sequence: Synthetic oligonucleotide
auaggucaggggcagcagc

SEQ ID NO: 1958207 - RNA, 19 nt, Artificial Sequence
  Description of Artificial Sequence: Synthetic oligonucleotide
cuagcucgcacaauguagc

SEQ ID NO: 1958208 - RNA, 19 nt, Artificial Sequence
  Description of Artificial Sequence: Synthetic oligonucleotide
uaauccaugcuguggcagg

SEQ ID NO: 1958209 - RNA, 19 nt, Artificial Sequence
  Description of Artificial Sequence: Synthetic oligonucleotide
uaauggaagaugccgggac

SEQ ID NO: 1958210 - RNA, 19 nt, Artificial Sequence
  Description of Artificial Sequence: Synthetic oligonucleotide
uuuggaaaguagucggaca

SEQ ID NO: 1958211 - RNA, 19 nt, Artificial Sequence
  Description of Artificial Sequence: Synthetic oligonucleotide
acaucuugagccccauucg

SEQ ID NO: 1958212 - RNA, 19 nt, Artificial Sequence
  Description of Artificial Sequence: Synthetic oligonucleotide
auaucggcccucuuuagug

SEQ ID NO: 1958213 - RNA, 19 nt, Artificial Sequence
  Description of Artificial Sequence: Synthetic oligonucleotide
ugcuuguauaccuggaaac

SEQ ID NO: 1958214 - RNA, 19 nt, Artificial Sequence
  Description of Artificial Sequence: Synthetic oligonucleotide
auccuuggcuauuugugac

SEQ ID NO: 1958215 - RNA, 19 nt, Artificial Sequence
  Description of Artificial Sequence: Synthetic oligonucleotide
uccaagacuucauuguaga

SEQ ID NO: 1958216 - RNA, 19 nt, Artificial Sequence
  Description of Artificial Sequence: Synthetic oligonucleotide
auaccuggaaaccccuucg

SEQ ID NO: 1958217 - RNA, 19 nt, Artificial Sequence
  Description of Artificial Sequence: Synthetic oligonucleotide
uguugagggcuucuucagg

SEQ ID NO: 1958218 - RNA, 19 nt, Artificial Sequence
  Description of Artificial Sequence: Synthetic oligonucleotide
auuguagaugggaggagcc

SEQ ID NO: 1958219 - RNA, 19 nt, Artificial Sequence
  Description of Artificial Sequence: Synthetic oligonucleotide
uuuaugccgcuucauggca

SEQ ID NO: 1958220 - RNA, 19 nt, Artificial Sequence
  Description of Artificial Sequence: Synthetic oligonucleotide
aggacaagcagacacugga

SEQ ID NO: 1958221 - RNA, 19 nt, Artificial Sequence
  Description of Artificial Sequence: Synthetic oligonucleotide
ugagcaaggagaauacaua

SEQ ID NO: 1958222 - RNA, 19 nt, Artificial Sequence
  Description of Artificial Sequence: Synthetic oligonucleotide
ucugaugcccaucgaagga

SEQ ID NO: 1958223 - RNA, 19 nt, Artificial Sequence
  Description of Artificial Sequence: Synthetic oligonucleotide
ucuucaggcaagaggacaa

SEQ ID NO: 1958224 - RNA, 19 nt, Artificial Sequence
  Description of Artificial Sequence: Synthetic oligonucleotide
uucgaggacaaggauacug

SEQ ID NO: 1958225 - RNA, 19 nt, Artificial Sequence
  Description of Artificial Sequence: Synthetic oligonucleotide
uccauuguuagcagcucug

SEQ ID NO: 1958226 - RNA, 19 nt, Artificial Sequence
  Description of Artificial Sequence: Synthetic oligonucleotide
uccaaggacgagaggaggc

SEQ ID NO: 1958227 - RNA, 19 nt, Artificial Sequence
  Description of Artificial Sequence: Synthetic oligonucleotide
gcaaugacaccccaguggg

SEQ ID NO: 1958228 - RNA, 19 nt, Artificial Sequence
  Description of Artificial Sequence: Synthetic oligonucleotide
cuguguagcacacuccuac

SEQ ID NO: 1958229 - RNA, 19 nt, Artificial Sequence
  Description of Artificial Sequence: Synthetic oligonucleotide
agucggacaguuucccugg

SEQ ID NO: 1958230 - RNA, 19 nt, Artificial Sequence
  Description of Artificial Sequence: Synthetic oligonucleotide
aucgaaggaagguggcaac

SEQ ID NO: 1958231 - RNA, 19 nt, Artificial Sequence
  Description of Artificial Sequence: Synthetic oligonucleotide
uggguggccgauaugccag

SEQ ID NO: 1958232 - RNA, 19 nt, Artificial Sequence
  Description of Artificial Sequence: Synthetic oligonucleotide
uggaaaccccuucggaugc

SEQ ID NO: 1958233 - RNA, 19 nt, Artificial Sequence
  Description of Artificial Sequence: Synthetic oligonucleotide
uagucggacaguuucccug

SEQ ID NO: 1958234 - RNA, 19 nt, Artificial Sequence
  Description of Artificial Sequence: Synthetic oligonucleotide
uggcacucacagcagaaug

SEQ ID NO: 1958235 - RNA, 19 nt, Artificial Sequence
  Description of Artificial Sequence: Synthetic oligonucleotide
acaaggauacugccugcgg

SEQ ID NO: 1958236 - RNA, 19 nt, Artificial Sequence
  Description of Artificial Sequence: Synthetic oligonucleotide
uaccagauggcgguaagcc

SEQ ID NO: 1958237 - RNA, 19 nt, Artificial Sequence
  Description of Artificial Sequence: Synthetic oligonucleotide
caucauuagggccauccug

SEQ ID NO: 1958238 - RNA, 19 nt, Artificial Sequence
  Description of Artificial Sequence: Synthetic oligonucleotide
acuccuaccagauggcggu

SEQ ID NO: 1958239 - RNA, 19 nt, Artificial Sequence
  Description of Artificial Sequence: Synthetic oligonucleotide
guaaggguugaaguagagg

SEQ ID NO: 1958240 - RNA, 19 nt, Artificial Sequence
  Description of Artificial Sequence: Synthetic oligonucleotide
cuucgcuucauccucugug

SEQ ID NO: 1958241 - RNA, 19 nt, Artificial Sequence
  Description of Artificial Sequence: Synthetic oligonucleotide
augccuagcucgcacaaug

SEQ ID NO: 1958242 - RNA, 19 nt, Artificial Sequence
  Description of Artificial Sequence: Synthetic oligonucleotide
ucggaugcugcuguggucc

SEQ ID NO: 1958243 - RNA, 19 nt, Artificial Sequence
  Description of Artificial Sequence: Synthetic oligonucleotide
gcuauuugugacaugguag

SEQ ID NO: 1958244 - RNA, 19 nt, Artificial Sequence
  Description of Artificial Sequence: Synthetic oligonucleotide
uuucccuggccucaugaac

SEQ ID NO: 1958245 - RNA, 19 nt, Artificial Sequence
  Description of Artificial Sequence: Synthetic oligonucleotide
gguaaggcuccauuguuag

SEQ ID NO: 1958246 - RNA, 19 nt, Artificial Sequence
  Description of Artificial Sequence: Synthetic oligonucleotide
cuggaaaccccuucggaug

SEQ ID NO: 1958247 - RNA, 19 nt, Artificial Sequence
  Description of Artificial Sequence: Synthetic oligonucleotide
gagaauacauaguccucac

SEQ ID NO: 1958248 - RNA, 19 nt, Artificial Sequence
  Description of Artificial Sequence: Synthetic oligonucleotide
gaucagaagcaagagccug

SEQ ID NO: 1958249 - RNA, 19 nt, Artificial Sequence
  Description of Artificial Sequence: Synthetic oligonucleotide
ugaccauuuaugccgcuuc

SEQ ID NO: 1958250 - RNA, 19 nt, Artificial Sequence
  Description of Artificial Sequence: Synthetic oligonucleotide
gacaaggauacugccugcg

SEQ ID NO: 1958251 - RNA, 19 nt, Artificial Sequence
  Description of Artificial Sequence: Synthetic oligonucleotide
gaaaaggccuaggacuucc

SEQ ID NO: 1958252 - RNA, 19 nt, Artificial Sequence
  Description of Artificial Sequence: Synthetic oligonucleotide
aaguagaggccuucucgca

SEQ ID NO: 1958253 - RNA, 19 nt, Artificial Sequence
  Description of Artificial Sequence: Synthetic oligonucleotide
uguguagcacacuccuacc

SEQ ID NO: 1958254 - RNA, 19 nt, Artificial Sequence
  Description of Artificial Sequence: Synthetic oligonucleotide
aagaugccgggaccgcgcg

SEQ ID NO: 1958255 - RNA, 19 nt, Artificial Sequence
  Description of Artificial Sequence: Synthetic oligonucleotide
cauaccaauggccuggcca

SEQ ID NO: 1958256 - RNA, 19 nt, Artificial Sequence
  Description of Artificial Sequence: Synthetic oligonucleotide
cccauuaucaacaacaucu

SEQ ID NO: 1958257 - RNA, 19 nt, Artificial Sequence
  Description of Artificial Sequence: Synthetic oligonucleotide
ugcgguguccguaauggaa

SEQ ID NO: 1958258 - RNA, 19 nt, Artificial Sequence
  Description of Artificial Sequence: Synthetic oligonucleotide
uuucgacucuucagaacug

SEQ ID NO: 1958259 - RNA, 19 nt, Artificial Sequence
  Description of Artificial Sequence: Synthetic oligonucleotide
gauggucaugcucuggcuc

SEQ ID NO: 1958260 - RNA, 19 nt, Artificial Sequence
  Description of Artificial Sequence: Synthetic oligonucleotide
auaauccaugcuguggcag

SEQ ID NO: 1958261 - RNA, 19 nt, Artificial Sequence
  Description of Artificial Sequence: Synthetic oligonucleotide
ggaaaggccagacuucgag

SEQ ID NO: 1958262 - RNA, 19 nt, Artificial Sequence
  Description of Artificial Sequence: Synthetic oligonucleotide
aaggcccacgccucgcggg

SEQ ID NO: 1958263 - RNA, 19 nt, Artificial Sequence
  Description of Artificial Sequence: Synthetic oligonucleotide
ucaucauuagggccauccu

SEQ ID NO: 1958264 - RNA, 19 nt, Artificial Sequence
  Description of Artificial Sequence: Synthetic oligonucleotide
auggaagaugccgggaccg

SEQ ID NO: 1958265 - RNA, 19 nt, Artificial Sequence
  Description of Artificial Sequence: Synthetic oligonucleotide
cauuguuagcagcucuggc

SEQ ID NO: 1958266 - RNA, 19 nt, Artificial Sequence
  Description of Artificial Sequence: Synthetic oligonucleotide
agaugggaggagccauacc

SEQ ID NO: 1958267 - RNA, 19 nt, Artificial Sequence
  Description of Artificial Sequence: Synthetic oligonucleotide
cacuccuaccagauggcgg

SEQ ID NO: 1958268 - RNA, 19 nt, Artificial Sequence
  Description of Artificial Sequence: Synthetic oligonucleotide
guaugguuuuggaaaguag

SEQ ID NO: 1958269 - RNA, 19 nt, Artificial Sequence
  Description of Artificial Sequence: Synthetic oligonucleotide
agccauaccaauggccugg

SEQ ID NO: 1958270 - RNA, 19 nt, Artificial Sequence
  Description of Artificial Sequence: Synthetic oligonucleotide
ucucgcaaugacaccccag

SEQ ID NO: 1958271 - RNA, 19 nt, Artificial Sequence
  Description of Artificial Sequence: Synthetic oligonucleotide
cauucguuuccgaugguca

SEQ ID NO: 1958272 - RNA, 19 nt, Artificial Sequence
  Description of Artificial Sequence: Synthetic oligonucleotide
cuuucgacucuucagaacu

SEQ ID NO: 1958273 - RNA, 19 nt, Artificial Sequence
  Description of Artificial Sequence: Synthetic oligonucleotide
aucggcccucuuuagugcg

SEQ ID NO: 1958274 - RNA, 19 nt, Artificial Sequence
  Description of Artificial Sequence: Synthetic oligonucleotide
aggcuccauuguuagcagc

SEQ ID NO: 1958275 - RNA, 19 nt, Artificial Sequence
  Description of Artificial Sequence: Synthetic oligonucleotide
guaccaucaucauacucca

SEQ ID NO: 1958276 - RNA, 19 nt, Artificial Sequence
  Description of Artificial Sequence: Synthetic oligonucleotide
uaucggcccucuuuagugc

SEQ ID NO: 1958277 - RNA, 19 nt, Artificial Sequence
  Description of Artificial Sequence: Synthetic oligonucleotide
uugagccccauucguuucc

SEQ ID NO: 1958278 - RNA, 19 nt, Artificial Sequence
  Description of Artificial Sequence: Synthetic oligonucleotide
cuggacagggucacuuggg

SEQ ID NO: 1958279 - RNA, 19 nt, Artificial Sequence
  Description of Artificial Sequence: Synthetic oligonucleotide
gauacugccugcggugucc

SEQ ID NO: 1958280 - RNA, 19 nt, Artificial Sequence
  Description of Artificial Sequence: Synthetic oligonucleotide
aaguaaggguugaaguaga

SEQ ID NO: 1958281 - RNA, 19 nt, Artificial Sequence
  Description of Artificial Sequence: Synthetic oligonucleotide
ucuugagccccauucguuu

SEQ ID NO: 1958282 - RNA, 19 nt, Artificial Sequence
  Description of Artificial Sequence: Synthetic oligonucleotide
ucauuguagaugggaggag

SEQ ID NO: 1958283 - RNA, 19 nt, Artificial Sequence
  Description of Artificial Sequence: Synthetic oligonucleotide
caagcagacacuggacagg

SEQ ID NO: 1958284 - RNA, 19 nt, Artificial Sequence
  Description of Artificial Sequence: Synthetic oligonucleotide
uugggguaugguuuuggaa

SEQ ID NO: 1958285 - RNA, 19 nt, Artificial Sequence
  Description of Artificial Sequence: Synthetic oligonucleotide
cagacuucgaggacaagga

SEQ ID NO: 1958286 - RNA, 19 nt, Artificial Sequence
  Description of Artificial Sequence: Synthetic oligonucleotide
acggugagaccauggguag

SEQ ID NO: 1958287 - RNA, 19 nt, Artificial Sequence
  Description of Artificial Sequence: Synthetic oligonucleotide
ucaggguugggguaugguu

SEQ ID NO: 1958288 - RNA, 19 nt, Artificial Sequence
  Description of Artificial Sequence: Synthetic oligonucleotide
ucauggcauaggucagggg

SEQ ID NO: 1958289 - RNA, 19 nt, Artificial Sequence
  Description of Artificial Sequence: Synthetic oligonucleotide
uauuugugacaugguagcu

SEQ ID NO: 1958290 - RNA, 19 nt, Artificial Sequence
  Description of Artificial Sequence: Synthetic oligonucleotide
augaacaucuucccuucau

SEQ ID NO: 1958291 - RNA, 19 nt, Artificial Sequence
  Description of Artificial Sequence: Synthetic oligonucleotide
uguagaugggaggagccau

SEQ ID NO: 1958292 - RNA, 19 nt, Artificial Sequence
  Description of Artificial Sequence: Synthetic oligonucleotide
ucgcaaugacaccccagug

SEQ ID NO: 1958293 - RNA, 19 nt, Artificial Sequence
  Description of Artificial Sequence: Synthetic oligonucleotide
acagcuagccccgcacccc

SEQ ID NO: 1958294 - RNA, 19 nt, Artificial Sequence
  Description of Artificial Sequence: Synthetic oligonucleotide
aguagaggccuucucgcaa

SEQ ID NO: 1958295 - RNA, 19 nt, Artificial Sequence
  Description of Artificial Sequence: Synthetic oligonucleotide
aaccccuucggaugcugcu

SEQ ID NO: 1958296 - RNA, 19 nt, Artificial Sequence
  Description of Artificial Sequence: Synthetic oligonucleotide
cuucucgcaaugacacccc

SEQ ID NO: 1958297 - RNA, 19 nt, Artificial Sequence
  Description of Artificial Sequence: Synthetic oligonucleotide
uggccgauaugccagcuuu

SEQ ID NO: 1958298 - RNA, 19 nt, Artificial Sequence
  Description of Artificial Sequence: Synthetic oligonucleotide
ucgacucuucagaacugac

SEQ ID NO: 1958299 - RNA, 19 nt, Artificial Sequence
  Description of Artificial Sequence: Synthetic oligonucleotide
ugcugugguccaaggacga

SEQ ID NO: 1958300 - RNA, 19 nt, Artificial Sequence
  Description of Artificial Sequence: Synthetic oligonucleotide
ugcccaucgaaggaaggug

SEQ ID NO: 1958301 - RNA, 19 nt, Artificial Sequence
  Description of Artificial Sequence: Synthetic oligonucleotide
cagcaagcccauuaucaac

SEQ ID NO: 1958302 - RNA, 19 nt, Artificial Sequence
  Description of Artificial Sequence: Synthetic oligonucleotide
aauccaugcuguggcagga

SEQ ID NO: 1958303 - RNA, 19 nt, Artificial Sequence
  Description of Artificial Sequence: Synthetic oligonucleotide
ggcgguaagccacauaauc

SEQ ID NO: 1958304 - RNA, 19 nt, Artificial Sequence
  Description of Artificial Sequence: Synthetic oligonucleotide
ccuagcucgcacaauguag

SEQ ID NO: 1958305 - RNA, 19 nt, Artificial Sequence
  Description of Artificial Sequence: Synthetic oligonucleotide
gggguaugguuuuggaaag

SEQ ID NO: 1958306 - RNA, 19 nt, Artificial Sequence
  Description of Artificial Sequence: Synthetic oligonucleotide
auucguuuccgauggucau

SEQ ID NO: 1958307 - RNA, 19 nt, Artificial Sequence
  Description of Artificial Sequence: Synthetic oligonucleotide
ccagacuucgaggacaagg

SEQ ID NO: 1958308 - RNA, 19 nt, Artificial Sequence
  Description of Artificial Sequence: Synthetic oligonucleotide
uccuaccccauuuccuucu

SEQ ID NO: 1958309 - RNA, 19 nt, Artificial Sequence
  Description of Artificial Sequence: Synthetic oligonucleotide
guguccguaauggaagaug

SEQ ID NO: 1958310 - RNA, 19 nt, Artificial Sequence
  Description of Artificial Sequence: Synthetic oligonucleotide
ccguaauggaagaugccgg

SEQ ID NO: 1958311 - RNA, 19 nt, Artificial Sequence
  Description of Artificial Sequence: Synthetic oligonucleotide
aguccucaccaccaugccu

SEQ ID NO: 1958312 - RNA, 19 nt, Artificial Sequence
  Description of Artificial Sequence: Synthetic oligonucleotide
accggcgaagcgaagccgc

SEQ ID NO: 1958313 - RNA, 19 nt, Artificial Sequence
  Description of Artificial Sequence: Synthetic oligonucleotide
uuaugccgcuucauggcau

SEQ ID NO: 1958314 - RNA, 19 nt, Artificial Sequence
  Description of Artificial Sequence: Synthetic oligonucleotide
cauaguccucaccaccaug

SEQ ID NO: 1958315 - RNA, 19 nt, Artificial Sequence
  Description of Artificial Sequence: Synthetic oligonucleotide
uucguuuccgauggucaug

SEQ ID NO: 1958316 - RNA, 19 nt, Artificial Sequence
  Description of Artificial Sequence: Synthetic oligonucleotide
accagauggcgguaagcca

SEQ ID NO: 1958317 - RNA, 19 nt, Artificial Sequence
  Description of Artificial Sequence: Synthetic oligonucleotide
gaagaugccgggaccgcgc

SEQ ID NO: 1958318 - RNA, 19 nt, Artificial Sequence
  Description of Artificial Sequence: Synthetic oligonucleotide
cacggugagaccaugggua

SEQ ID NO: 1958319 - RNA, 19 nt, Artificial Sequence
  Description of Artificial Sequence: Synthetic oligonucleotide
aguaaggguugaaguagag

SEQ ID NO: 1958320 - RNA, 19 nt, Artificial Sequence
  Description of Artificial Sequence: Synthetic oligonucleotide
agcaccgaccggcgaagcg

SEQ ID NO: 1958321 - RNA, 19 nt, Artificial Sequence
  Description of Artificial Sequence: Synthetic oligonucleotide
agcuuucgacucuucagaa

SEQ ID NO: 1958322 - RNA, 19 nt, Artificial Sequence
  Description of Artificial Sequence: Synthetic oligonucleotide
gaugccgggaccgcgcgcc

SEQ ID NO: 1958323 - RNA, 19 nt, Artificial Sequence
  Description of Artificial Sequence: Synthetic oligonucleotide
gcucgcacaauguagcuga

SEQ ID NO: 1958324 - RNA, 19 nt, Artificial Sequence
  Description of Artificial Sequence: Synthetic oligonucleotide
uucucgcaaugacacccca

SEQ ID NO: 1958325 - RNA, 19 nt, Artificial Sequence
  Description of Artificial Sequence: Synthetic oligonucleotide
gaccauuuaugccgcuuca

SEQ ID NO: 1958326 - RNA, 19 nt, Artificial Sequence
  Description of Artificial Sequence: Synthetic oligonucleotide
ucgcacaauguagcugagg

SEQ ID NO: 1958327 - RNA, 19 nt, Artificial Sequence
  Description of Artificial Sequence: Synthetic oligonucleotide
cagcuuucgacucuucaga

SEQ ID NO: 1958328 - RNA, 19 nt, Artificial Sequence
  Description of Artificial Sequence: Synthetic oligonucleotide
acacuccuaccagauggcg

SEQ ID NO: 1958329 - RNA, 19 nt, Artificial Sequence
  Description of Artificial Sequence: Synthetic oligonucleotide
guccaaggacgagaggagg

SEQ ID NO: 1958330 - RNA, 19 nt, Artificial Sequence
  Description of Artificial Sequence: Synthetic oligonucleotide
gcaugcccaacgcugacag

SEQ ID NO: 1958331 - RNA, 19 nt, Artificial Sequence
  Description of Artificial Sequence: Synthetic oligonucleotide
guaaggcuccauuguuagc

SEQ ID NO: 1958332 - RNA, 19 nt, Artificial Sequence
  Description of Artificial Sequence: Synthetic oligonucleotide
guguagcacacuccuacca

SEQ ID NO: 1958333 - RNA, 19 nt, Artificial Sequence
  Description of Artificial Sequence: Synthetic oligonucleotide
gacuucgaggacaaggaua

SEQ ID NO: 1958334 - RNA, 19 nt, Artificial Sequence
  Description of Artificial Sequence: Synthetic oligonucleotide
ugccuagcucgcacaaugu

SEQ ID NO: 1958335 - RNA, 19 nt, Artificial Sequence
  Description of Artificial Sequence: Synthetic oligonucleotide
ccuucucgcaaugacaccc

SEQ ID NO: 1958336 - RNA, 19 nt, Artificial Sequence
  Description of Artificial Sequence: Synthetic oligonucleotide
ucggcccucuuuagugcgg

SEQ ID NO: 1958337 - RNA, 19 nt, Artificial Sequence
  Description of Artificial Sequence: Synthetic oligonucleotide
ugagccccauucguuuccg

SEQ ID NO: 1958338 - RNA, 19 nt, Artificial Sequence
  Description of Artificial Sequence: Synthetic oligonucleotide
gcgguaagccacauaaucc

SEQ ID NO: 1958339 - RNA, 19 nt, Artificial Sequence
  Description of Artificial Sequence: Synthetic oligonucleotide
cuugagccccauucguuuc

SEQ ID NO: 1958340 - RNA, 19 nt, Artificial Sequence
  Description of Artificial Sequence: Synthetic oligonucleotide
caacaacaucuugagcccc

SEQ ID NO: 1958341 - RNA, 19 nt, Artificial Sequence
  Description of Artificial Sequence: Synthetic oligonucleotide
ucuguguagcacacuccua

SEQ ID NO: 1958342 - RNA, 19 nt, Artificial Sequence
  Description of Artificial Sequence: Synthetic oligonucleotide
uggcuauuugugacauggu

SEQ ID NO: 1958343 - RNA, 19 nt, Artificial Sequence
  Description of Artificial Sequence: Synthetic oligonucleotide
cgauaugccagcuuucgac

SEQ ID NO: 1958344 - RNA, 19 nt, Artificial Sequence
  Description of Artificial Sequence: Synthetic oligonucleotide
ccccauucguuuccgaugg

SEQ ID NO: 1958345 - RNA, 19 nt, Artificial Sequence
  Description of Artificial Sequence: Synthetic oligonucleotide
cguaauggaagaugccggg

SEQ ID NO: 1958346 - RNA, 19 nt, Artificial Sequence
  Description of Artificial Sequence: Synthetic oligonucleotide
cgcaaugacaccccagugg

SEQ ID NO: 1958347 - RNA, 19 nt, Artificial Sequence
  Description of Artificial Sequence: Synthetic oligonucleotide
cauaauccaugcuguggca

SEQ ID NO: 1958348 - RNA, 19 nt, Artificial Sequence
  Description of Artificial Sequence: Synthetic oligonucleotide
agggucacuuggguggccg

SEQ ID NO: 1958349 - RNA, 19 nt, Artificial Sequence
  Description of Artificial Sequence: Synthetic oligonucleotide
uagcucgcacaauguagcu

SEQ ID NO: 1958350 - RNA, 19 nt, Artificial Sequence
  Description of Artificial Sequence: Synthetic oligonucleotide
uggucuccuaccccauuuc

SEQ ID NO: 1958351 - RNA, 19 nt, Artificial Sequence
  Description of Artificial Sequence: Synthetic oligonucleotide
cagacacuggacaggguca

SEQ ID NO: 1958352 - RNA, 19 nt, Artificial Sequence
  Description of Artificial Sequence: Synthetic oligonucleotide
guuuuggaaaguagucgga

SEQ ID NO: 1958353 - RNA, 19 nt, Artificial Sequence
  Description of Artificial Sequence: Synthetic oligonucleotide
agaugccgggaccgcgcgc

SEQ ID NO: 1958354 - RNA, 19 nt, Artificial Sequence
  Description of Artificial Sequence: Synthetic oligonucleotide
caauguagcugagguccgg

SEQ ID NO: 1958355 - RNA, 19 nt, Artificial Sequence
  Description of Artificial Sequence: Synthetic oligonucleotide
cagcgccuucgcuucaucc

SEQ ID NO: 1958356 - RNA, 19 nt, Artificial Sequence
  Description of Artificial Sequence: Synthetic oligonucleotide
ccauuuaugccgcuucaug

SEQ ID NO: 1958357 - RNA, 19 nt, Artificial Sequence
  Description of Artificial Sequence: Synthetic oligonucleotide
agugagcaaggagaauaca

SEQ ID NO: 1958358 - RNA, 19 nt, Artificial Sequence
  Description of Artificial Sequence: Synthetic oligonucleotide
acucuucagaacugaccau

SEQ ID NO: 1958359 - RNA, 19 nt, Artificial Sequence
  Description of Artificial Sequence: Synthetic oligonucleotide
gagcacacuugcuuguaua

SEQ ID NO: 1958360 - RNA, 19 nt, Artificial Sequence
  Description of Artificial Sequence: Synthetic oligonucleotide
uaugccgcuucauggcaua

SEQ ID NO: 1958361 - RNA, 19 nt, Artificial Sequence
  Description of Artificial Sequence: Synthetic oligonucleotide
ggucuccuaccccauuucc

SEQ ID NO: 1958362 - RNA, 19 nt, Artificial Sequence
  Description of Artificial Sequence: Synthetic oligonucleotide
gccacggugagaccauggg

SEQ ID NO: 1958363 - RNA, 19 nt, Artificial Sequence
  Description of Artificial Sequence: Synthetic oligonucleotide
gagccuggucuccuacccc

SEQ ID NO: 1958364 - RNA, 19 nt, Artificial Sequence
  Description of Artificial Sequence: Synthetic oligonucleotide
gcucugaugcccaucgaag

SEQ ID NO: 1958365 - RNA, 19 nt, Artificial Sequence
  Description of Artificial Sequence: Synthetic oligonucleotide
guaauggaagaugccggga

SEQ ID NO: 1958366 - RNA, 19 nt, Artificial Sequence
  Description of Artificial Sequence: Synthetic oligonucleotide
cacuggacagggucacuug

SEQ ID NO: 1958367 - RNA, 19 nt, Artificial Sequence
  Description of Artificial Sequence: Synthetic oligonucleotide
augcccaucgaaggaaggu

SEQ ID NO: 1958368 - RNA, 19 nt, Artificial Sequence
  Description of Artificial Sequence: Synthetic oligonucleotide
gaaaccccuucggaugcug

SEQ ID NO: 1958369 - RNA, 19 nt, Artificial Sequence
  Description of Artificial Sequence: Synthetic oligonucleotide
cugccagcaugcccaacgc

SEQ ID NO: 1958370 - RNA, 19 nt, Artificial Sequence
  Description of Artificial Sequence: Synthetic oligonucleotide
gccgauaugccagcuuucg

SEQ ID NO: 1958371 - RNA, 19 nt, Artificial Sequence
  Description of Artificial Sequence: Synthetic oligonucleotide
agcucgcacaauguagcug

SEQ ID NO: 1958372 - RNA, 19 nt, Artificial Sequence
  Description of Artificial Sequence: Synthetic oligonucleotide
aaaaggccuaggacuuccu

SEQ ID NO: 1958373 - RNA, 19 nt, Artificial Sequence
  Description of Artificial Sequence: Synthetic oligonucleotide
gaccggcgaagcgaagccg

SEQ ID NO: 1958374 - RNA, 19 nt, Artificial Sequence
  Description of Artificial Sequence: Synthetic oligonucleotide
agccccauucguuuccgau

SEQ ID NO: 1958375 - RNA, 19 nt, Artificial Sequence
  Description of Artificial Sequence: Synthetic oligonucleotide
uuccgauggucaugcucug

SEQ ID NO: 1958376 - RNA, 19 nt, Artificial Sequence
  Description of Artificial Sequence: Synthetic oligonucleotide
aggccagacuucgaggaca

SEQ ID NO: 1958377 - RNA, 19 nt, Artificial Sequence
  Description of Artificial Sequence: Synthetic oligonucleotide
ggcuauuugugacauggua

SEQ ID NO: 1958378 - RNA, 19 nt, Artificial Sequence
  Description of Artificial Sequence: Synthetic oligonucleotide
uaccaauggccuggccagg

SEQ ID NO: 1958379 - RNA, 19 nt, Artificial Sequence
  Description of Artificial Sequence: Synthetic oligonucleotide
gguugggguaugguuuugg

SEQ ID NO: 1958380 - RNA, 19 nt, Artificial Sequence
  Description of Artificial Sequence: Synthetic oligonucleotide
acuugcuuguauaccugga

SEQ ID NO: 1958381 - RNA, 19 nt, Artificial Sequence
  Description of Artificial Sequence: Synthetic oligonucleotide
ggccuucucgcaaugacac

SEQ ID NO: 1958382 - RNA, 19 nt, Artificial Sequence
  Description of Artificial Sequence: Synthetic oligonucleotide
cucuguguagcacacuccu

SEQ ID NO: 1958383 - RNA, 19 nt, Artificial Sequence
  Description of Artificial Sequence: Synthetic oligonucleotide
auacugccugcgguguccg

SEQ ID NO: 1958384 - RNA, 19 nt, Artificial Sequence
  Description of Artificial Sequence: Synthetic oligonucleotide
aagagcacacuugcuugua

SEQ ID NO: 1958385 - RNA, 19 nt, Artificial Sequence
  Description of Artificial Sequence: Synthetic oligonucleotide
ccauggguagcugggaggg

SEQ ID NO: 1958386 - RNA, 19 nt, Artificial Sequence
  Description of Artificial Sequence: Synthetic oligonucleotide
ggaagaugccgggaccgcg

SEQ ID NO: 1958387 - RNA, 19 nt, Artificial Sequence
  Description of Artificial Sequence: Synthetic oligonucleotide
gaaaaggagccaggccuga

SEQ ID NO: 1958388 - RNA, 19 nt, Artificial Sequence
  Description of Artificial Sequence: Synthetic oligonucleotide
ccgauggucaugcucuggc

SEQ ID NO: 1958389 - RNA, 19 nt, Artificial Sequence
  Description of Artificial Sequence: Synthetic oligonucleotide
caucgaaggaagguggcaa

SEQ ID NO: 1958390 - RNA, 19 nt, Artificial Sequence
  Description of Artificial Sequence: Synthetic oligonucleotide
aggauacugccugcggugu

SEQ ID NO: 1958391 - RNA, 19 nt, Artificial Sequence
  Description of Artificial Sequence: Synthetic oligonucleotide
gcccaucgaaggaaggugg

SEQ ID NO: 1958392 - RNA, 19 nt, Artificial Sequence
  Description of Artificial Sequence: Synthetic oligonucleotide
cugaaaaggccuaggacuu

SEQ ID NO: 1958393 - RNA, 19 nt, Artificial Sequence
  Description of Artificial Sequence: Synthetic oligonucleotide
gguagcugggguaccauca

SEQ ID NO: 1958394 - RNA, 19 nt, Artificial Sequence
  Description of Artificial Sequence: Synthetic oligonucleotide
cuccuaccccauuuccuuc

SEQ ID NO: 1958395 - RNA, 19 nt, Artificial Sequence
  Description of Artificial Sequence: Synthetic oligonucleotide
gaaugcagagccacagcua

SEQ ID NO: 1958396 - RNA, 19 nt, Artificial Sequence
  Description of Artificial Sequence: Synthetic oligonucleotide
gcgguguccguaauggaag

SEQ ID NO: 1958397 - RNA, 19 nt, Artificial Sequence
  Description of Artificial Sequence: Synthetic oligonucleotide
gcuuucgacucuucagaac

SEQ ID NO: 1958398 - RNA, 19 nt, Artificial Sequence
  Description of Artificial Sequence: Synthetic oligonucleotide
cucgcaaugacaccccagu

SEQ ID NO: 1958399 - RNA, 19 nt, Artificial Sequence
  Description of Artificial Sequence: Synthetic oligonucleotide
agcccauuaucaacaacau

SEQ ID NO: 1958400 - RNA, 19 nt, Artificial Sequence
  Description of Artificial Sequence: Synthetic oligonucleotide
guccguaauggaagaugcc

SEQ ID NO: 1958401 - RNA, 19 nt, Artificial Sequence
  Description of Artificial Sequence: Synthetic oligonucleotide
cucgcacaauguagcugag

SEQ ID NO: 1958402 - RNA, 19 nt, Artificial Sequence
  Description of Artificial Sequence: Synthetic oligonucleotide
ccuaggacuuccugggcug

SEQ ID NO: 1958403 - RNA, 19 nt, Artificial Sequence
  Description of Artificial Sequence: Synthetic oligonucleotide
gccaggaaaguaaggguug

SEQ ID NO: 1958404 - RNA, 19 nt, Artificial Sequence
  Description of Artificial Sequence: Synthetic oligonucleotide
uggcgguaagccacauaau

SEQ ID NO: 1958405 - RNA, 19 nt, Artificial Sequence
  Description of Artificial Sequence: Synthetic oligonucleotide
caaggauacugccugcggu

SEQ ID NO: 1958406 - RNA, 19 nt, Artificial Sequence
  Description of Artificial Sequence: Synthetic oligonucleotide
accauuuaugccgcuucau

SEQ ID NO: 1958407 - RNA, 19 nt, Artificial Sequence
  Description of Artificial Sequence: Synthetic oligonucleotide
ggcgaagcgaagccgccgc

SEQ ID NO: 1958408 - RNA, 19 nt, Artificial Sequence
  Description of Artificial Sequence: Synthetic oligonucleotide
acugaccauuuaugccgcu

SEQ ID NO: 1958409 - RNA, 19 nt, Artificial Sequence
  Description of Artificial Sequence: Synthetic oligonucleotide
gcuccuggaaggcccacgc

SEQ ID NO: 1958410 - RNA, 19 nt, Artificial Sequence
  Description of Artificial Sequence: Synthetic oligonucleotide
agacuucauuguagauggg

SEQ ID NO: 1958411 - RNA, 19 nt, Artificial Sequence
  Description of Artificial Sequence: Synthetic oligonucleotide
caggccugaaaaggccuag

SEQ ID NO: 1958412 - RNA, 19 nt, Artificial Sequence
  Description of Artificial Sequence: Synthetic oligonucleotide
ugcccaacgcugacagcau

SEQ ID NO: 1958413 - RNA, 19 nt, Artificial Sequence
  Description of Artificial Sequence: Synthetic oligonucleotide
ggagccauaccaauggccu

SEQ ID NO: 1958414 - RNA, 19 nt, Artificial Sequence
  Description of Artificial Sequence: Synthetic oligonucleotide
gcagcaagcccauuaucaa

SEQ ID NO: 1958415 - RNA, 19 nt, Artificial Sequence
  Description of Artificial Sequence: Synthetic oligonucleotide
caugaacaucuucccuuca

SEQ ID NO: 1958416 - RNA, 19 nt, Artificial Sequence
  Description of Artificial Sequence: Synthetic oligonucleotide
uccuaccagauggcgguaa

SEQ ID NO: 1958417 - RNA, 19 nt, Artificial Sequence
  Description of Artificial Sequence: Synthetic oligonucleotide
gcacacuugcuuguauacc

SEQ ID NO: 1958418 - RNA, 19 nt, Artificial Sequence
  Description of Artificial Sequence: Synthetic oligonucleotide
ggccugaaaaggccuagga

SEQ ID NO: 1958419 - RNA, 19 nt, Artificial Sequence
  Description of Artificial Sequence: Synthetic oligonucleotide
acuggcacucacagcagaa

SEQ ID NO: 1958420 - RNA, 19 nt, Artificial Sequence
  Description of Artificial Sequence: Synthetic oligonucleotide
ucuggcucugaugcccauc

SEQ ID NO: 1958421 - RNA, 19 nt, Artificial Sequence
  Description of Artificial Sequence: Synthetic oligonucleotide
cauaucggcccucuuuagu

SEQ ID NO: 1958422 - RNA, 19 nt, Artificial Sequence
  Description of Artificial Sequence: Synthetic oligonucleotide
cuuccggccccgggaaagg

SEQ ID NO: 1958423 - RNA, 19 nt, Artificial Sequence
  Description of Artificial Sequence: Synthetic oligonucleotide
cccaucgaaggaagguggc

SEQ ID NO: 1958424 - RNA, 19 nt, Artificial Sequence
  Description of Artificial Sequence: Synthetic oligonucleotide
ccaaggacgagaggaggcc

SEQ ID NO: 1958425 - RNA, 19 nt, Artificial Sequence
  Description of Artificial Sequence: Synthetic oligonucleotide
aucuugagccccauucguu

SEQ ID NO: 1958426 - RNA, 19 nt, Artificial Sequence
  Description of Artificial Sequence: Synthetic oligonucleotide
cugaugcccaucgaaggaa

SEQ ID NO: 1958427 - RNA, 19 nt, Artificial Sequence
  Description of Artificial Sequence: Synthetic oligonucleotide
accccuucggaugcugcug

SEQ ID NO: 1958428 - RNA, 19 nt, Artificial Sequence
  Description of Artificial Sequence: Synthetic oligonucleotide
ggaggccacggugagacca

SEQ ID NO: 1958429 - RNA, 19 nt, Artificial Sequence
  Description of Artificial Sequence: Synthetic oligonucleotide
caauggccuggccaggaaa

SEQ ID NO: 1958430 - RNA, 19 nt, Artificial Sequence
  Description of Artificial Sequence: Synthetic oligonucleotide
gccauaucggcccucuuua

SEQ ID NO: 1958431 - RNA, 19 nt, Artificial Sequence
  Description of Artificial Sequence: Synthetic oligonucleotide
uggcaacauccuuggcuau

SEQ ID NO: 1958432 - RNA, 19 nt, Artificial Sequence
  Description of Artificial Sequence: Synthetic oligonucleotide
agaggccuucucgcaauga

SEQ ID NO: 1958433 - RNA, 19 nt, Artificial Sequence
  Description of Artificial Sequence: Synthetic oligonucleotide
ggacaagcagacacuggac

SEQ ID NO: 1958434 - RNA, 19 nt, Artificial Sequence
  Description of Artificial Sequence: Synthetic oligonucleotide
acgcugacagcaucaccuu

SEQ ID NO: 1958435 - RNA, 19 nt, Artificial Sequence
  Description of Artificial Sequence: Synthetic oligonucleotide
gucggacaguuucccuggc

SEQ ID NO: 1958436 - RNA, 19 nt, Artificial Sequence
  Description of Artificial Sequence: Synthetic oligonucleotide
caugguagcugggguacca

SEQ ID NO: 1958437 - RNA, 19 nt, Artificial Sequence
  Description of Artificial Sequence: Synthetic oligonucleotide
cagauggcgguaagccaca

SEQ ID NO: 1958438 - RNA, 19 nt, Artificial Sequence
  Description of Artificial Sequence: Synthetic oligonucleotide
uggccuggccaggaaagua

SEQ ID NO: 1958439 - RNA, 19 nt, Artificial Sequence
  Description of Artificial Sequence: Synthetic oligonucleotide
cuucggaugcugcuguggu

SEQ ID NO: 1958440 - RNA, 19 nt, Artificial Sequence
  Description of Artificial Sequence: Synthetic oligonucleotide
caggguugggguaugguuu

SEQ ID NO: 1958441 - RNA, 19 nt, Artificial Sequence
  Description of Artificial Sequence: Synthetic oligonucleotide
gacgagaggaggccacggu

SEQ ID NO: 1958442 - RNA, 19 nt, Artificial Sequence
  Description of Artificial Sequence: Synthetic oligonucleotide
gauggcgguaagccacaua

SEQ ID NO: 1958443 - RNA, 19 nt, Artificial Sequence
  Description of Artificial Sequence: Synthetic oligonucleotide
cauuagggccauccuggaa

SEQ ID NO: 1958444 - RNA, 19 nt, Artificial Sequence
  Description of Artificial Sequence: Synthetic oligonucleotide
ugggagggugcagcuccag

SEQ ID NO: 1958445 - RNA, 19 nt, Artificial Sequence
  Description of Artificial Sequence: Synthetic oligonucleotide
gcccauuaucaacaacauc

SEQ ID NO: 1958446 - RNA, 19 nt, Artificial Sequence
  Description of Artificial Sequence: Synthetic oligonucleotide
cgcuucauccucuguguag

SEQ ID NO: 1958447 - RNA, 19 nt, Artificial Sequence
  Description of Artificial Sequence: Synthetic oligonucleotide
ccauaucggcccucuuuag

SEQ ID NO: 1958448 - RNA, 19 nt, Artificial Sequence
  Description of Artificial Sequence: Synthetic oligonucleotide
guagaggccuucucgcaau

SEQ ID NO: 1958449 - RNA, 19 nt, Artificial Sequence
  Description of Artificial Sequence: Synthetic oligonucleotide
caaggacgagaggaggcca

SEQ ID NO: 1958450 - RNA, 19 nt, Artificial Sequence
  Description of Artificial Sequence: Synthetic oligonucleotide
guagucggacaguuucccu

SEQ ID NO: 1958451 - RNA, 19 nt, Artificial Sequence
  Description of Artificial Sequence: Synthetic oligonucleotide
ccuaccagauggcgguaag

SEQ ID NO: 1958452 - RNA, 19 nt, Artificial Sequence
  Description of Artificial Sequence: Synthetic oligonucleotide
ccuucggaugcugcugugg

SEQ ID NO: 1958453 - RNA, 19 nt, Artificial Sequence
  Description of Artificial Sequence: Synthetic oligonucleotide
uuccggccccgggaaaggc

SEQ ID NO: 1958454 - RNA, 19 nt, Artificial Sequence
  Description of Artificial Sequence: Synthetic oligonucleotide
ggugagaccauggguagcu

SEQ ID NO: 1958455 - RNA, 19 nt, Artificial Sequence
  Description of Artificial Sequence: Synthetic oligonucleotide
gccacauaauccaugcugu

SEQ ID NO: 1958456 - RNA, 19 nt, Artificial Sequence
  Description of Artificial Sequence: Synthetic oligonucleotide
gaaaguagucggacaguuu

SEQ ID NO: 1958457 - RNA, 19 nt, Artificial Sequence
  Description of Artificial Sequence: Synthetic oligonucleotide
ccauucguuuccgaugguc

SEQ ID NO: 1958458 - RNA, 19 nt, Artificial Sequence
  Description of Artificial Sequence: Synthetic oligonucleotide
cacuuggguggccgauaug

SEQ ID NO: 1958459 - RNA, 19 nt, Artificial Sequence
  Description of Artificial Sequence: Synthetic oligonucleotide
gugagaccauggguagcug

SEQ ID NO: 1958460 - RNA, 19 nt, Artificial Sequence
  Description of Artificial Sequence: Synthetic oligonucleotide
agaggaggccacggugaga

SEQ ID NO: 1958461 - RNA, 19 nt, Artificial Sequence
  Description of Artificial Sequence: Synthetic oligonucleotide
guagaugggaggagccaua

SEQ ID NO: 1958462 - RNA, 19 nt, Artificial Sequence
  Description of Artificial Sequence: Synthetic oligonucleotide
cccaacgcugacagcauca

SEQ ID NO: 1958463 - RNA, 19 nt, Artificial Sequence
  Description of Artificial Sequence: Synthetic oligonucleotide
gccuucucgcaaugacacc

SEQ ID NO: 1958464 - RNA, 19 nt, Artificial Sequence
  Description of Artificial Sequence: Synthetic oligonucleotide
accagugagcaaggagaau

SEQ ID NO: 1958465 - RNA, 19 nt, Artificial Sequence
  Description of Artificial Sequence: Synthetic oligonucleotide
augguagcugggguaccau

SEQ ID NO: 1958466 - RNA, 19 nt, Artificial Sequence
  Description of Artificial Sequence: Synthetic oligonucleotide
ccacagcuagccccgcacc

SEQ ID NO: 1958467 - RNA, 19 nt, Artificial Sequence
  Description of Artificial Sequence: Synthetic oligonucleotide
gccucgcgggcccagcacc

SEQ ID NO: 1958468 - RNA, 19 nt, Artificial Sequence
  Description of Artificial Sequence: Synthetic oligonucleotide
ggccuaggacuuccugggc

SEQ ID NO: 1958469 - RNA, 19 nt, Artificial Sequence
  Description of Artificial Sequence: Synthetic oligonucleotide
ggauacugccugcgguguc

SEQ ID NO: 1958470 - RNA, 19 nt, Artificial Sequence
  Description of Artificial Sequence: Synthetic oligonucleotide
gcaagcccauuaucaacaa

SEQ ID NO: 1958471 - RNA, 19 nt, Artificial Sequence
  Description of Artificial Sequence: Synthetic oligonucleotide
ccgaccggcgaagcgaagc

SEQ ID NO: 1958472 - RNA, 19 nt, Artificial Sequence
  Description of Artificial Sequence: Synthetic oligonucleotide
gagccccauucguuuccga

SEQ ID NO: 1958473 - RNA, 19 nt, Artificial Sequence
  Description of Artificial Sequence: Synthetic oligonucleotide
gcaggcccggagcacuagc

SEQ ID NO: 1958474 - RNA, 19 nt, Artificial Sequence
  Description of Artificial Sequence: Synthetic oligonucleotide
acgccucgcgggcccagca

SEQ ID NO: 1958475 - RNA, 19 nt, Artificial Sequence
  Description of Artificial Sequence: Synthetic oligonucleotide
caccgaccggcgaagcgaa

SEQ ID NO: 1958476 - RNA, 19 nt, Artificial Sequence
  Description of Artificial Sequence: Synthetic oligonucleotide
caggaaaguaaggguugaa

SEQ ID NO: 1958477 - RNA, 19 nt, Artificial Sequence
  Description of Artificial Sequence: Synthetic oligonucleotide
ccucgcgggcccagcaccg

SEQ ID NO: 1958478 - RNA, 19 nt, Artificial Sequence
  Description of Artificial Sequence: Synthetic oligonucleotide
gccuaggacuuccugggcu

SEQ ID NO: 1958479 - RNA, 19 nt, Artificial Sequence
  Description of Artificial Sequence: Synthetic oligonucleotide
gcaccgaccggcgaagcga

SEQ ID NO: 1958480 - RNA, 19 nt, Artificial Sequence
  Description of Artificial Sequence: Synthetic oligonucleotide
gcugugguccaaggacgag

SEQ ID NO: 1958481 - RNA, 19 nt, Artificial Sequence
  Description of Artificial Sequence: Synthetic oligonucleotide
cgaccggcgaagcgaagcc

SEQ ID NO: 1958482 - RNA, 19 nt, Artificial Sequence
  Description of Artificial Sequence: Synthetic oligonucleotide
gccuagcucgcacaaugua

SEQ ID NO: 1958483 - RNA, 19 nt, Artificial Sequence
  Description of Artificial Sequence: Synthetic oligonucleotide
agauggcgguaagccacau

SEQ ID NO: 1958484 - RNA, 19 nt, Artificial Sequence
  Description of Artificial Sequence: Synthetic oligonucleotide
cuggucuccuaccccauuu

SEQ ID NO: 1958485 - RNA, 19 nt, Artificial Sequence
  Description of Artificial Sequence: Synthetic oligonucleotide
gcgaagcgaagccgccgcc

SEQ ID NO: 1958486 - RNA, 19 nt, Artificial Sequence
  Description of Artificial Sequence: Synthetic oligonucleotide
accuuccggccccgggaaa

SEQ ID NO: 1958487 - RNA, 19 nt, Artificial Sequence
  Description of Artificial Sequence: Synthetic oligonucleotide
cagcaccgaccggcgaagc

SEQ ID NO: 1958488 - RNA, 19 nt, Artificial Sequence
  Description of Artificial Sequence: Synthetic oligonucleotide
gccauaccaauggccuggc

SEQ ID NO: 1958489 - RNA, 19 nt, Artificial Sequence
  Description of Artificial Sequence: Synthetic oligonucleotide
aggccacggugagaccaug

SEQ ID NO: 1958490 - RNA, 19 nt, Artificial Sequence
  Description of Artificial Sequence: Synthetic oligonucleotide
ccauaccaauggccuggcc

SEQ ID NO: 1958491 - RNA, 19 nt, Artificial Sequence
  Description of Artificial Sequence: Synthetic oligonucleotide
ggcccucuuuagugcggcc

SEQ ID NO: 1958492 - RNA, 19 nt, Artificial Sequence
  Description of Artificial Sequence: Synthetic oligonucleotide
ccgcuucauggcauagguc

SEQ ID NO: 1958493 - RNA, 19 nt, Artificial Sequence
  Description of Artificial Sequence: Synthetic oligonucleotide
ccucaugaacaucuucccu

SEQ ID NO: 1958494 - RNA, 19 nt, Artificial Sequence
  Description of Artificial Sequence: Synthetic oligonucleotide
ccgauaugccagcuuucga

SEQ ID NO: 1958495 - RNA, 19 nt, Artificial Sequence
  Description of Artificial Sequence: Synthetic oligonucleotide
ggcauaggucaggggcagc

SEQ ID NO: 1958496 - RNA, 19 nt, Artificial Sequence
  Description of Artificial Sequence: Synthetic oligonucleotide
ccaucgaaggaagguggca

SEQ ID NO: 1958497 - RNA, 19 nt, Artificial Sequence
  Description of Artificial Sequence: Synthetic oligonucleotide
gggaccgcgcgccgcccag

SEQ ID NO: 1958498 - RNA, 19 nt, Artificial Sequence
  Description of Artificial Sequence: Synthetic oligonucleotide
ggccgauaugccagcuuuc

SEQ ID NO: 1958499 - RNA, 19 nt, Artificial Sequence
  Description of Artificial Sequence: Synthetic oligonucleotide
gcaucaccuuccggccccg

SEQ ID NO: 1958500 - RNA, 19 nt, Artificial Sequence
  Description of Artificial Sequence: Synthetic oligonucleotide
cacgccucgcgggcccagc

SEQ ID NO: 1958501 - RNA, 19 nt, Artificial Sequence
  Description of Artificial Sequence: Synthetic oligonucleotide
ggccagacuucgaggacaa

SEQ ID NO: 1958502 - RNA, 19 nt, Artificial Sequence
  Description of Artificial Sequence: Synthetic oligonucleotide
ggguugggguaugguuuug

SEQ ID NO: 1958503 - RNA, 19 nt, Artificial Sequence
  Description of Artificial Sequence: Synthetic oligonucleotide
gccgggaccgcgcgccgcc

SEQ ID NO: 1958504 - RNA, 19 nt, Artificial Sequence
  Description of Artificial Sequence: Synthetic oligonucleotide
cugaccauuuaugccgcuu

SEQ ID NO: 1958505 - RNA, 19 nt, Artificial Sequence
  Description of Artificial Sequence: Synthetic oligonucleotide
accgaccggcgaagcgaag

SEQ ID NO: 1958506 - RNA, 19 nt, Artificial Sequence
  Description of Artificial Sequence: Synthetic oligonucleotide
ccaugccuagcucgcacaa

SEQ ID NO: 1958507 - RNA, 19 nt, Artificial Sequence
  Description of Artificial Sequence: Synthetic oligonucleotide
gaggccacggugagaccau

SEQ ID NO: 1958508 - RNA, 19 nt, Artificial Sequence
  Description of Artificial Sequence: Synthetic oligonucleotide
guggccgauaugccagcuu

SEQ ID NO: 1958509 - RNA, 19 nt, Artificial Sequence
  Description of Artificial Sequence: Synthetic oligonucleotide
gggguaccaucaucauacu

SEQ ID NO: 1958510 - RNA, 19 nt, Artificial Sequence
  Description of Artificial Sequence: Synthetic oligonucleotide
ccacggugagaccaugggu

SEQ ID NO: 1958511 - RNA, 19 nt, Artificial Sequence
  Description of Artificial Sequence: Synthetic oligonucleotide
cgguguccguaauggaaga

SEQ ID NO: 1958512 - RNA, 19 nt, Artificial Sequence
  Description of Artificial Sequence: Synthetic oligonucleotide
caugccuagcucgcacaau

SEQ ID NO: 1958513 - RNA, 19 nt, Artificial Sequence
  Description of Artificial Sequence: Synthetic oligonucleotide
gguguccguaauggaagau

SEQ ID NO: 1958514 - RNA, 19 nt, Artificial Sequence
  Description of Artificial Sequence: Synthetic oligonucleotide
cggugagaccauggguagc

SEQ ID NO: 1958515 - RNA, 19 nt, Artificial Sequence
  Description of Artificial Sequence: Synthetic oligonucleotide
ggcaacauccuuggcuauu

SEQ ID NO: 1958516 - RNA, 19 nt, Artificial Sequence
  Description of Artificial Sequence: Synthetic oligonucleotide
cggcgaagcgaagccgccg

SEQ ID NO: 1958517 - RNA, 19 nt, Artificial Sequence
  Description of Artificial Sequence: Synthetic oligonucleotide
ccucaccaccaugccuagc

SEQ ID NO: 1958518 - RNA, 19 nt, Artificial Sequence
  Description of Artificial Sequence: Synthetic oligonucleotide
cuucgaggacaaggauacu

SEQ ID NO: 1958519 - RNA, 19 nt, Artificial Sequence
  Description of Artificial Sequence: Synthetic oligonucleotide
ccagcgccuucgcuucauc

SEQ ID NO: 1958520 - RNA, 19 nt, Artificial Sequence
  Description of Artificial Sequence: Synthetic oligonucleotide
ccaauggccuggccaggaa

SEQ ID NO: 1958521 - RNA, 19 nt, Artificial Sequence
  Description of Artificial Sequence: Synthetic oligonucleotide
cauggguagcugggagggu

SEQ ID NO: 1958522 - RNA, 19 nt, Artificial Sequence
  Description of Artificial Sequence: Synthetic oligonucleotide
cggcccucuuuagugcggc

SEQ ID NO: 1958523 - RNA, 19 nt, Artificial Sequence
  Description of Artificial Sequence: Synthetic oligonucleotide
cuccuaccagauggcggua

SEQ ID NO: 1958524 - RNA, 19 nt, Artificial Sequence
  Description of Artificial Sequence: Synthetic oligonucleotide
gguggccgauaugccagcu

SEQ ID NO: 1958525 - RNA, 19 nt, Artificial Sequence
  Description of Artificial Sequence: Synthetic oligonucleotide
ggaccgcgcgccgcccagc

SEQ ID NO: 1958526 - RNA, 19 nt, Artificial Sequence
  Description of Artificial Sequence: Synthetic oligonucleotide
gccgccauaucggcccucu

SEQ ID NO: 1958527 - RNA, 19 nt, Artificial Sequence
  Description of Artificial Sequence: Synthetic oligonucleotide
cgccucgcgggcccagcac

SEQ ID NO: 1958528 - RNA, 19 nt, Artificial Sequence
  Description of Artificial Sequence: Synthetic oligonucleotide
cgccauaucggcccucuuu

SEQ ID NO: 1958529 - RNA, 19 nt, Artificial Sequence
  Description of Artificial Sequence: Synthetic oligonucleotide
ccacgccucgcgggcccag

SEQ ID NO: 1958530 - RNA, 19 nt, Artificial Sequence
  Description of Artificial Sequence: Synthetic oligonucleotide
cccauucguuuccgauggu

SEQ ID NO: 1958531 - RNA, 19 nt, Artificial Sequence
  Description of Artificial Sequence: Synthetic oligonucleotide
gccagcgccuucgcuucau

SEQ ID NO: 1958532 - RNA, 19 nt, Artificial Sequence
  Description of Artificial Sequence: Synthetic oligonucleotide
cguuuccgauggucaugcu

SEQ ID NO: 1958533 - RNA, 19 nt, Artificial Sequence
  Description of Artificial Sequence: Synthetic oligonucleotide
cgggaccgcgcgccgccca

SEQ ID NO: 1958534 - RNA, 19 nt, Artificial Sequence
  Description of Artificial Sequence: Synthetic oligonucleotide
cgccgccauaucggcccuc

SEQ ID NO: 1958535 - RNA, 19 nt, Artificial Sequence
  Description of Artificial Sequence: Synthetic oligonucleotide
ccgccgccauaucggcccu

SEQ ID NO: 1958536 - RNA, 19 nt, Artificial Sequence
  Description of Artificial Sequence: Synthetic oligonucleotide
ccgccauaucggcccucuu

SEQ ID NO: 1958537 - RNA, 19 nt, Artificial Sequence
  Description of Artificial Sequence: Synthetic oligonucleotide
aauaaccuaaguuagaaag

SEQ ID NO: 1958538 - RNA, 19 nt, Artificial Sequence
  Description of Artificial Sequence: Synthetic oligonucleotide
aauacuaugauucuacuau

SEQ ID NO: 1958539 - RNA, 19 nt, Artificial Sequence
  Description of Artificial Sequence: Synthetic oligonucleotide
aaaacuaacuuuguauucc

SEQ ID NO: 1958540 - RNA, 19 nt, Artificial Sequence
  Description of Artificial Sequence: Synthetic oligonucleotide
uuugaauauaagaaaauca

SEQ ID NO: 1958541 - RNA, 19 nt, Artificial Sequence
  Description of Artificial Sequence: Synthetic oligonucleotide
aaauuaguuuccgauaugc

SEQ ID NO: 1958542 - RNA, 19 nt, Artificial Sequence
  Description of Artificial Sequence: Synthetic oligonucleotide
acuaauacuaauuaaagau

SEQ ID NO: 1958543 - RNA, 19 nt, Artificial Sequence
  Description of Artificial Sequence: Synthetic oligonucleotide
aaaaugaagcuuuacauau

SEQ ID NO: 1958544 - RNA, 19 nt, Artificial Sequence
  Description of Artificial Sequence: Synthetic oligonucleotide
aagacauuagccuugaaaa

SEQ ID NO: 1958545 - RNA, 19 nt, Artificial Sequence
  Description of Artificial Sequence: Synthetic oligonucleotide
uuaucaucauccaauaacc

SEQ ID NO: 1958546 - RNA, 19 nt, Artificial Sequence
  Description of Artificial Sequence: Synthetic oligonucleotide
auuaguuuccgauaugcac

SEQ ID NO: 1958547 - RNA, 19 nt, Artificial Sequence
  Description of Artificial Sequence: Synthetic oligonucleotide
agauguaauagucagaaga

SEQ ID NO: 1958548 - RNA, 19 nt, Artificial Sequence
  Description of Artificial Sequence: Synthetic oligonucleotide
acuugaguaaagaaaaucc

SEQ ID NO: 1958549 - RNA, 19 nt, Artificial Sequence
  Description of Artificial Sequence: Synthetic oligonucleotide
aaacauuagauaugaaugu

SEQ ID NO: 1958550 - RNA, 19 nt, Artificial Sequence
  Description of Artificial Sequence: Synthetic oligonucleotide
aaauaccucaaguugacca

SEQ ID NO: 1958551 - RNA, 19 nt, Artificial Sequence
  Description of Artificial Sequence: Synthetic oligonucleotide
uggccaauaauccagacca

SEQ ID NO: 1958552 - RNA, 19 nt, Artificial Sequence
  Description of Artificial Sequence: Synthetic oligonucleotide
augauucuacuauagaagg

SEQ ID NO: 1958553 - RNA, 19 nt, Artificial Sequence
  Description of Artificial Sequence: Synthetic oligonucleotide
aauguuuugacaaaggaau

SEQ ID NO: 1958554 - RNA, 19 nt, Artificial Sequence
  Description of Artificial Sequence: Synthetic oligonucleotide
ugacaaaggaaucacucgg

SEQ ID NO: 1958555 - RNA, 19 nt, Artificial Sequence
  Description of Artificial Sequence: Synthetic oligonucleotide
uugaauauaagaaaaucau

SEQ ID NO: 1958556 - RNA, 19 nt, Artificial Sequence
  Description of Artificial Sequence: Synthetic oligonucleotide
aaucugagauccuaaaaug

SEQ ID NO: 1958557 - RNA, 19 nt, Artificial Sequence
  Description of Artificial Sequence: Synthetic oligonucleotide
auacuaauuaaagaugggc

SEQ ID NO: 1958558 - RNA, 19 nt, Artificial Sequence
  Description of Artificial Sequence: Synthetic oligonucleotide
ugaauauaagaaaaucaug

SEQ ID NO: 1958559 - RNA, 19 nt, Artificial Sequence
  Description of Artificial Sequence: Synthetic oligonucleotide
uuagauaugaauguuuuga

SEQ ID NO: 1958560 - RNA, 19 nt, Artificial Sequence
  Description of Artificial Sequence: Synthetic oligonucleotide
cuaauuuccauugauuugg

SEQ ID NO: 1958561 - RNA, 19 nt, Artificial Sequence
  Description of Artificial Sequence: Synthetic oligonucleotide
ugagauccuaaaaugaagc

SEQ ID NO: 1958562 - RNA, 19 nt, Artificial Sequence
  Description of Artificial Sequence: Synthetic oligonucleotide
acuaauuaaagaugggcag

SEQ ID NO: 1958563 - RNA, 19 nt, Artificial Sequence
  Description of Artificial Sequence: Synthetic oligonucleotide
uuuuacacuuucaugaagu

SEQ ID NO: 1958564 - RNA, 19 nt, Artificial Sequence
  Description of Artificial Sequence: Synthetic oligonucleotide
cuuaucaucauccaauaac

SEQ ID NO: 1958565 - RNA, 19 nt, Artificial Sequence
  Description of Artificial Sequence: Synthetic oligonucleotide
augcauauguuacuggagc

SEQ ID NO: 1958566 - RNA, 19 nt, Artificial Sequence
  Description of Artificial Sequence: Synthetic oligonucleotide
agcguauaaucugagaucc

SEQ ID NO: 1958567 - RNA, 19 nt, Artificial Sequence
  Description of Artificial Sequence: Synthetic oligonucleotide
ugaaaauauucuuucacac

SEQ ID NO: 1958568 - RNA, 19 nt, Artificial Sequence
  Description of Artificial Sequence: Synthetic oligonucleotide
aauuccagauguaauaguc

SEQ ID NO: 1958569 - RNA, 19 nt, Artificial Sequence
  Description of Artificial Sequence: Synthetic oligonucleotide
gauaugaauguuuugacaa

SEQ ID NO: 1958570 - RNA, 19 nt, Artificial Sequence
  Description of Artificial Sequence: Synthetic oligonucleotide
auuugaauauaagaaaauc

SEQ ID NO: 1958571 - RNA, 19 nt, Artificial Sequence
  Description of Artificial Sequence: Synthetic oligonucleotide
ugaguaaagaaaauccugu

SEQ ID NO: 1958572 - RNA, 19 nt, Artificial Sequence
  Description of Artificial Sequence: Synthetic oligonucleotide
cuuagaaaagcaacgacug

SEQ ID NO: 1958573 - RNA, 19 nt, Artificial Sequence
  Description of Artificial Sequence: Synthetic oligonucleotide
aguuuguucaaccagggga

SEQ ID NO: 1958574 - RNA, 19 nt, Artificial Sequence
  Description of Artificial Sequence: Synthetic oligonucleotide
uugaguaaagaaaauccug

SEQ ID NO: 1958575 - RNA, 19 nt, Artificial Sequence
  Description of Artificial Sequence: Synthetic oligonucleotide
uuaguuuccgauaugcacu

SEQ ID NO: 1958576 - RNA, 19 nt, Artificial Sequence
  Description of Artificial Sequence: Synthetic oligonucleotide
aaaagcaacgacuggccag

SEQ ID NO: 1958577 - RNA, 19 nt, Artificial Sequence
  Description of Artificial Sequence: Synthetic oligonucleotide
acuauagaagguuaccauc

SEQ ID NO: 1958578 - RNA, 19 nt, Artificial Sequence
  Description of Artificial Sequence: Synthetic oligonucleotide
uaugcuguauuuccaaugc

SEQ ID NO: 1958579 - RNA, 19 nt, Artificial Sequence
  Description of Artificial Sequence: Synthetic oligonucleotide
uuuuauauguucugaguca

SEQ ID NO: 1958580 - RNA, 19 nt, Artificial Sequence
  Description of Artificial Sequence: Synthetic oligonucleotide
acuugcauauaucauauca

SEQ ID NO: 1958581 - RNA, 19 nt, Artificial Sequence
  Description of Artificial Sequence: Synthetic oligonucleotide
ugugaaacuccacuaauac

SEQ ID NO: 1958582 - RNA, 19 nt, Artificial Sequence
  Description of Artificial Sequence: Synthetic oligonucleotide
uccaauaaaguacccaaug

SEQ ID NO: 1958583 - RNA, 19 nt, Artificial Sequence
  Description of Artificial Sequence: Synthetic oligonucleotide
ucccauuugaauauaagaa

SEQ ID NO: 1958584 - RNA, 19 nt, Artificial Sequence
  Description of Artificial Sequence: Synthetic oligonucleotide
uugacaaaggaaucacucg

SEQ ID NO: 1958585 - RNA, 19 nt, Artificial Sequence
  Description of Artificial Sequence: Synthetic oligonucleotide
uauucaaugaauucugcaa

SEQ ID NO: 1958586 - RNA, 19 nt, Artificial Sequence
  Description of Artificial Sequence: Synthetic oligonucleotide
aagaaaaucaugguaacaa

SEQ ID NO: 1958587 - RNA, 19 nt, Artificial Sequence
  Description of Artificial Sequence: Synthetic oligonucleotide
auaauccagaccaauaaac

SEQ ID NO: 1958588 - RNA, 19 nt, Artificial Sequence
  Description of Artificial Sequence: Synthetic oligonucleotide
ucaucauccaauaaccuaa

SEQ ID NO: 1958589 - RNA, 19 nt, Artificial Sequence
  Description of Artificial Sequence: Synthetic oligonucleotide
aacaaugaugcauauguua

SEQ ID NO: 1958590 - RNA, 19 nt, Artificial Sequence
  Description of Artificial Sequence: Synthetic oligonucleotide
aacuucuggccaauaaucc

SEQ ID NO: 1958591 - RNA, 19 nt, Artificial Sequence
  Description of Artificial Sequence: Synthetic oligonucleotide
aaugaugcauauguuacug

SEQ ID NO: 1958592 - RNA, 19 nt, Artificial Sequence
  Description of Artificial Sequence: Synthetic oligonucleotide
aauggcugcuuguuauggc

SEQ ID NO: 1958593 - RNA, 19 nt, Artificial Sequence
  Description of Artificial Sequence: Synthetic oligonucleotide
agaaauuaaaauacuauga

SEQ ID NO: 1958594 - RNA, 19 nt, Artificial Sequence
  Description of Artificial Sequence: Synthetic oligonucleotide
uucaugaaguuuuaaauua

SEQ ID NO: 1958595 - RNA, 19 nt, Artificial Sequence
  Description of Artificial Sequence: Synthetic oligonucleotide
uuaaagaugggcaggggac

SEQ ID NO: 1958596 - RNA, 19 nt, Artificial Sequence
  Description of Artificial Sequence: Synthetic oligonucleotide
ugagcguauaaucugagau

SEQ ID NO: 1958597 - RNA, 19 nt, Artificial Sequence
  Description of Artificial Sequence: Synthetic oligonucleotide
ucgaaauaccucaaguuga

SEQ ID NO: 1958598 - RNA, 19 nt, Artificial Sequence
  Description of Artificial Sequence: Synthetic oligonucleotide
uuagaaaagcaacgacugg

SEQ ID NO: 1958599 - RNA, 19 nt, Artificial Sequence
  Description of Artificial Sequence: Synthetic oligonucleotide
aauagucagaagaaauuag

SEQ ID NO: 1958600 - RNA, 19 nt, Artificial Sequence
  Description of Artificial Sequence: Synthetic oligonucleotide
aacacuugcauauaucaua

SEQ ID NO: 1958601 - RNA, 19 nt, Artificial Sequence
  Description of Artificial Sequence: Synthetic oligonucleotide
uaaccuaaguuagaaagag

SEQ ID NO: 1958602 - RNA, 19 nt, Artificial Sequence
  Description of Artificial Sequence: Synthetic oligonucleotide
aauaauccagaccaauaaa

SEQ ID NO: 1958603 - RNA, 19 nt, Artificial Sequence
  Description of Artificial Sequence: Synthetic oligonucleotide
uagaagguuaccaucaaau

SEQ ID NO: 1958604 - RNA, 19 nt, Artificial Sequence
  Description of Artificial Sequence: Synthetic oligonucleotide
ucaauuuuguguuuagguc

SEQ ID NO: 1958605 - RNA, 19 nt, Artificial Sequence
  Description of Artificial Sequence: Synthetic oligonucleotide
ucauaugaacacaucuaag

SEQ ID NO: 1958606 - RNA, 19 nt, Artificial Sequence
  Description of Artificial Sequence: Synthetic oligonucleotide
aaaauacuaugauucuacu

SEQ ID NO: 1958607 - RNA, 19 nt, Artificial Sequence
  Description of Artificial Sequence: Synthetic oligonucleotide
agaaauuaguuuccgauau

SEQ ID NO: 1958608 - RNA, 19 nt, Artificial Sequence
  Description of Artificial Sequence: Synthetic oligonucleotide
uuuguauuccacaugggua

SEQ ID NO: 1958609 - RNA, 19 nt, Artificial Sequence
  Description of Artificial Sequence: Synthetic oligonucleotide
uaauccagaccaauaaacu

SEQ ID NO: 1958610 - RNA, 19 nt, Artificial Sequence
  Description of Artificial Sequence: Synthetic oligonucleotide
uacuaaaagcccauagaug

SEQ ID NO: 1958611 - RNA, 19 nt, Artificial Sequence
  Description of Artificial Sequence: Synthetic oligonucleotide
aauggaagacauuagccuu

SEQ ID NO: 1958612 - RNA, 19 nt, Artificial Sequence
  Description of Artificial Sequence: Synthetic oligonucleotide
uauaucauaucauuccuua

SEQ ID NO: 1958613 - RNA, 19 nt, Artificial Sequence
  Description of Artificial Sequence: Synthetic oligonucleotide
aauauucuuucacacuuaa

SEQ ID NO: 1958614 - RNA, 19 nt, Artificial Sequence
  Description of Artificial Sequence: Synthetic oligonucleotide
aaguacccaauggacaagc

SEQ ID NO: 1958615 - RNA, 19 nt, Artificial Sequence
  Description of Artificial Sequence: Synthetic oligonucleotide
auagauggaugauuuauga

SEQ ID NO: 1958616 - RNA, 19 nt, Artificial Sequence
  Description of Artificial Sequence: Synthetic oligonucleotide
aauuuccauugauuugggg

SEQ ID NO: 1958617 - RNA, 19 nt, Artificial Sequence
  Description of Artificial Sequence: Synthetic oligonucleotide
uagaaaagcaacgacuggc

SEQ ID NO: 1958618 - RNA, 19 nt, Artificial Sequence
  Description of Artificial Sequence: Synthetic oligonucleotide
acuaauuuccauugauuug

SEQ ID NO: 1958619 - RNA, 19 nt, Artificial Sequence
  Description of Artificial Sequence: Synthetic oligonucleotide
aucaaauaaaucccauuug

SEQ ID NO: 1958620 - RNA, 19 nt, Artificial Sequence
  Description of Artificial Sequence: Synthetic oligonucleotide
gacuccaaacguuagaguc

SEQ ID NO: 1958621 - RNA, 19 nt, Artificial Sequence
  Description of Artificial Sequence: Synthetic oligonucleotide
uuguguuuaggucaguguc

SEQ ID NO: 1958622 - RNA, 19 nt, Artificial Sequence
  Description of Artificial Sequence: Synthetic oligonucleotide
acagcuaucucgccucucc

SEQ ID NO: 1958623 - RNA, 19 nt, Artificial Sequence
  Description of Artificial Sequence: Synthetic oligonucleotide
acguuagagucccagaaag

SEQ ID NO: 1958624 - RNA, 19 nt, Artificial Sequence
  Description of Artificial Sequence: Synthetic oligonucleotide
auuaaagaugggcagggga

SEQ ID NO: 1958625 - RNA, 19 nt, Artificial Sequence
  Description of Artificial Sequence: Synthetic oligonucleotide
uccuacuaaaagcccauag

SEQ ID NO: 1958626 - RNA, 19 nt, Artificial Sequence
  Description of Artificial Sequence: Synthetic oligonucleotide
uucugagucacaauggcau

SEQ ID NO: 1958627 - RNA, 19 nt, Artificial Sequence
  Description of Artificial Sequence: Synthetic oligonucleotide
aaacguuagagucccagaa

SEQ ID NO: 1958628 - RNA, 19 nt, Artificial Sequence
  Description of Artificial Sequence: Synthetic oligonucleotide
auaaaucccauuugaauau

SEQ ID NO: 1958629 - RNA, 19 nt, Artificial Sequence
  Description of Artificial Sequence: Synthetic oligonucleotide
cucgaaauaccucaaguug

SEQ ID NO: 1958630 - RNA, 19 nt, Artificial Sequence
  Description of Artificial Sequence: Synthetic oligonucleotide
cacaauggcaugaagucag

SEQ ID NO: 1958631 - RNA, 19 nt, Artificial Sequence
  Description of Artificial Sequence: Synthetic oligonucleotide
gaagguuaccaucaaauaa

SEQ ID NO: 1958632 - RNA, 19 nt, Artificial Sequence
  Description of Artificial Sequence: Synthetic oligonucleotide
uuuccauugauuuggggaa

SEQ ID NO: 1958633 - RNA, 19 nt, Artificial Sequence
  Description of Artificial Sequence: Synthetic oligonucleotide
aaacuaacuuuguauucca

SEQ ID NO: 1958634 - RNA, 19 nt, Artificial Sequence
  Description of Artificial Sequence: Synthetic oligonucleotide
ucugagauccuaaaaugaa

SEQ ID NO: 1958635 - RNA, 19 nt, Artificial Sequence
  Description of Artificial Sequence: Synthetic oligonucleotide
ugaugcauauguuacugga

SEQ ID NO: 1958636 - RNA, 19 nt, Artificial Sequence
  Description of Artificial Sequence: Synthetic oligonucleotide
aauccagaccaauaaacuu

SEQ ID NO: 1958637 - RNA, 19 nt, Artificial Sequence
  Description of Artificial Sequence: Synthetic oligonucleotide
auuuaugaugugugaacag

SEQ ID NO: 1958638 - RNA, 19 nt, Artificial Sequence
  Description of Artificial Sequence: Synthetic oligonucleotide
uuuagaauuccagauguaa

SEQ ID NO: 1958639 - RNA, 19 nt, Artificial Sequence
  Description of Artificial Sequence: Synthetic oligonucleotide
auaugaacacaucuaagaa

SEQ ID NO: 1958640 - RNA, 19 nt, Artificial Sequence
  Description of Artificial Sequence: Synthetic oligonucleotide
ucuauucaaugaauucugc

SEQ ID NO: 1958641 - RNA, 19 nt, Artificial Sequence
  Description of Artificial Sequence: Synthetic oligonucleotide
agaaaagcaacgacuggcc

SEQ ID NO: 1958642 - RNA, 19 nt, Artificial Sequence
  Description of Artificial Sequence: Synthetic oligonucleotide
aaagcccauagauggauga

SEQ ID NO: 1958643 - RNA, 19 nt, Artificial Sequence
  Description of Artificial Sequence: Synthetic oligonucleotide
aucccauuugaauauaaga

SEQ ID NO: 1958644 - RNA, 19 nt, Artificial Sequence
  Description of Artificial Sequence: Synthetic oligonucleotide
acuaacuuuguauuccaca

SEQ ID NO: 1958645 - RNA, 19 nt, Artificial Sequence
  Description of Artificial Sequence: Synthetic oligonucleotide
uuagaauuccagauguaau

SEQ ID NO: 1958646 - RNA, 19 nt, Artificial Sequence
  Description of Artificial Sequence: Synthetic oligonucleotide
aauuuuguguuuaggucag

SEQ ID NO: 1958647 - RNA, 19 nt, Artificial Sequence
  Description of Artificial Sequence: Synthetic oligonucleotide
uucucgaaauaccucaagu

SEQ ID NO: 1958648 - RNA, 19 nt, Artificial Sequence
  Description of Artificial Sequence: Synthetic oligonucleotide
auuagccuugaaaauauuc

SEQ ID NO: 1958649 - RNA, 19 nt, Artificial Sequence
  Description of Artificial Sequence: Synthetic oligonucleotide
uguuuugacaaaggaauca

SEQ ID NO: 1958650 - RNA, 19 nt, Artificial Sequence
  Description of Artificial Sequence: Synthetic oligonucleotide
uugacuccaaacguuagag

SEQ ID NO: 1958651 - RNA, 19 nt, Artificial Sequence
  Description of Artificial Sequence: Synthetic oligonucleotide
agauaugaauguuuugaca

SEQ ID NO: 1958652 - RNA, 19 nt, Artificial Sequence
  Description of Artificial Sequence: Synthetic oligonucleotide
ucaaguugaccaaaacuaa

SEQ ID NO: 1958653 - RNA, 19 nt, Artificial Sequence
  Description of Artificial Sequence: Synthetic oligonucleotide
uagauaugaauguuuugac

SEQ ID NO: 1958654 - RNA, 19 nt, Artificial Sequence
  Description of Artificial Sequence: Synthetic oligonucleotide
ucuacuauagaagguuacc

SEQ ID NO: 1958655 - RNA, 19 nt, Artificial Sequence
  Description of Artificial Sequence: Synthetic oligonucleotide
ugcauaacagccagugagc

SEQ ID NO: 1958656 - RNA, 19 nt, Artificial Sequence
  Description of Artificial Sequence: Synthetic oligonucleotide
aaagacuaauuuccauuga

SEQ ID NO: 1958657 - RNA, 19 nt, Artificial Sequence
  Description of Artificial Sequence: Synthetic oligonucleotide
uagaauuccagauguaaua

SEQ ID NO: 1958658 - RNA, 19 nt, Artificial Sequence
  Description of Artificial Sequence: Synthetic oligonucleotide
uaauuuccauugauuuggg

SEQ ID NO: 1958659 - RNA, 19 nt, Artificial Sequence
  Description of Artificial Sequence: Synthetic oligonucleotide
agaaagacuaauuuccauu

SEQ ID NO: 1958660 - RNA, 19 nt, Artificial Sequence
  Description of Artificial Sequence: Synthetic oligonucleotide
uuuauauguucugagucac

SEQ ID NO: 1958661 - RNA, 19 nt, Artificial Sequence
  Description of Artificial Sequence: Synthetic oligonucleotide
uuccacauggguaacugga

SEQ ID NO: 1958662 - RNA, 19 nt, Artificial Sequence
  Description of Artificial Sequence: Synthetic oligonucleotide
cauccaauaaccuaaguua

SEQ ID NO: 1958663 - RNA, 19 nt, Artificial Sequence
  Description of Artificial Sequence: Synthetic oligonucleotide
auuagauaugaauguuuug

SEQ ID NO: 1958664 - RNA, 19 nt, Artificial Sequence
  Description of Artificial Sequence: Synthetic oligonucleotide
cuaugauucuacuauagaa

SEQ ID NO: 1958665 - RNA, 19 nt, Artificial Sequence
  Description of Artificial Sequence: Synthetic oligonucleotide
ucacggaucauaugaacac

SEQ ID NO: 1958666 - RNA, 19 nt, Artificial Sequence
  Description of Artificial Sequence: Synthetic oligonucleotide
uuccgauaugcacuuaucu

SEQ ID NO: 1958667 - RNA, 19 nt, Artificial Sequence
  Description of Artificial Sequence: Synthetic oligonucleotide
cauagauggaugauuuaug

SEQ ID NO: 1958668 - RNA, 19 nt, Artificial Sequence
  Description of Artificial Sequence: Synthetic oligonucleotide
gaugauuuaugauguguga

SEQ ID NO: 1958669 - RNA, 19 nt, Artificial Sequence
  Description of Artificial Sequence: Synthetic oligonucleotide
aucauaucauuccuuagaa

SEQ ID NO: 1958670 - RNA, 19 nt, Artificial Sequence
  Description of Artificial Sequence: Synthetic oligonucleotide
uuguuauggcccuugacuc

SEQ ID NO: 1958671 - RNA, 19 nt, Artificial Sequence
  Description of Artificial Sequence: Synthetic oligonucleotide
aauuaaagaugggcagggg

SEQ ID NO: 1958672 - RNA, 19 nt, Artificial Sequence
  Description of Artificial Sequence: Synthetic oligonucleotide
gauuuaugaugugugaaca

SEQ ID NO: 1958673 - RNA, 19 nt, Artificial Sequence
  Description of Artificial Sequence: Synthetic oligonucleotide
uuuguguuuaggucagugu

SEQ ID NO: 1958674 - RNA, 19 nt, Artificial Sequence
  Description of Artificial Sequence: Synthetic oligonucleotide
augaacacaucuaagaaau

SEQ ID NO: 1958675 - RNA, 19 nt, Artificial Sequence
  Description of Artificial Sequence: Synthetic oligonucleotide
auaugagcuucacagauuu

SEQ ID NO: 1958676 - RNA, 19 nt, Artificial Sequence
  Description of Artificial Sequence: Synthetic oligonucleotide
cugacuugaguaaagaaaa

SEQ ID NO: 1958677 - RNA, 19 nt, Artificial Sequence
  Description of Artificial Sequence: Synthetic oligonucleotide
uuucucgaaauaccucaag

SEQ ID NO: 1958678 - RNA, 19 nt, Artificial Sequence
  Description of Artificial Sequence: Synthetic oligonucleotide
ugaaugcugaucugcauaa

SEQ ID NO: 1958679 - RNA, 19 nt, Artificial Sequence
  Description of Artificial Sequence: Synthetic oligonucleotide
gauaugcacuuaucuuugg

SEQ ID NO: 1958680 - RNA, 19 nt, Artificial Sequence
  Description of Artificial Sequence: Synthetic oligonucleotide
ugauucuacuauagaaggu

SEQ ID NO: 1958681 - RNA, 19 nt, Artificial Sequence
  Description of Artificial Sequence: Synthetic oligonucleotide
uaccaucaaauaaauccca

SEQ ID NO: 1958682 - RNA, 19 nt, Artificial Sequence
  Description of Artificial Sequence: Synthetic oligonucleotide
uccuuagaaaagcaacgac

SEQ ID NO: 1958683 - RNA, 19 nt, Artificial Sequence
  Description of Artificial Sequence: Synthetic oligonucleotide
cauauguuacuggagcagg

SEQ ID NO: 1958684 - RNA, 19 nt, Artificial Sequence
  Description of Artificial Sequence: Synthetic oligonucleotide
uaacuuuguauuccacaug

SEQ ID NO: 1958685 - RNA, 19 nt, Artificial Sequence
  Description of Artificial Sequence: Synthetic oligonucleotide
gucacaauggcaugaaguc

SEQ ID NO: 1958686 - RNA, 19 nt, Artificial Sequence
  Description of Artificial Sequence: Synthetic oligonucleotide
acuccaaacguuagagucc

SEQ ID NO: 1958687 - RNA, 19 nt, Artificial Sequence
  Description of Artificial Sequence: Synthetic oligonucleotide
augcaaaugugaucaaaug

SEQ ID NO: 1958688 - RNA, 19 nt, Artificial Sequence
  Description of Artificial Sequence: Synthetic oligonucleotide
uaucaucauccaauaaccu

SEQ ID NO: 1958689 - RNA, 19 nt, Artificial Sequence
  Description of Artificial Sequence: Synthetic oligonucleotide
uucuacuauagaagguuac

SEQ ID NO: 1958690 - RNA, 19 nt, Artificial Sequence
  Description of Artificial Sequence: Synthetic oligonucleotide
guuagagucccagaaagac

SEQ ID NO: 1958691 - RNA, 19 nt, Artificial Sequence
  Description of Artificial Sequence: Synthetic oligonucleotide
ugcauauguuacuggagca

SEQ ID NO: 1958692 - RNA, 19 nt, Artificial Sequence
  Description of Artificial Sequence: Synthetic oligonucleotide
agccagugagcguauaauc

SEQ ID NO: 1958693 - RNA, 19 nt, Artificial Sequence
  Description of Artificial Sequence: Synthetic oligonucleotide
auugauuuggggaacuucu

SEQ ID NO: 1958694 - RNA, 19 nt, Artificial Sequence
  Description of Artificial Sequence: Synthetic oligonucleotide
cuuucacacuuaaucagac

SEQ ID NO: 1958695 - RNA, 19 nt, Artificial Sequence
  Description of Artificial Sequence: Synthetic oligonucleotide
uuuuguguuuaggucagug

SEQ ID NO: 1958696 - RNA, 19 nt, Artificial Sequence
  Description of Artificial Sequence: Synthetic oligonucleotide
auaucauuccuuagaaaag

SEQ ID NO: 1958697 - RNA, 19 nt, Artificial Sequence
  Description of Artificial Sequence: Synthetic oligonucleotide
augaugcauauguuacugg

SEQ ID NO: 1958698 - RNA, 19 nt, Artificial Sequence
  Description of Artificial Sequence: Synthetic oligonucleotide
aaucccauuugaauauaag

SEQ ID NO: 1958699 - RNA, 19 nt, Artificial Sequence
  Description of Artificial Sequence: Synthetic oligonucleotide
agacaaggcacacagggau

SEQ ID NO: 1958700 - RNA, 19 nt, Artificial Sequence
  Description of Artificial Sequence: Synthetic oligonucleotide
auaaucugagauccuaaaa

SEQ ID NO: 1958701 - RNA, 19 nt, Artificial Sequence
  Description of Artificial Sequence: Synthetic oligonucleotide
uaagaaaaucaugguaaca

SEQ ID NO: 1958702 - RNA, 19 nt, Artificial Sequence
  Description of Artificial Sequence: Synthetic oligonucleotide
uguuacuggagcaggugcu

SEQ ID NO: 1958703 - RNA, 19 nt, Artificial Sequence
  Description of Artificial Sequence: Synthetic oligonucleotide
ucucgaaauaccucaaguu

SEQ ID NO: 1958704 - RNA, 19 nt, Artificial Sequence
  Description of Artificial Sequence: Synthetic oligonucleotide
uugcauauaucauaucauu

SEQ ID NO: 1958705 - RNA, 19 nt, Artificial Sequence
  Description of Artificial Sequence: Synthetic oligonucleotide
uauuuccaaugcaaaugug

SEQ ID NO: 1958706 - RNA, 19 nt, Artificial Sequence
  Description of Artificial Sequence: Synthetic oligonucleotide
gaugcauauguuacuggag

SEQ ID NO: 1958707 - RNA, 19 nt, Artificial Sequence
  Description of Artificial Sequence: Synthetic oligonucleotide
aagguauaugagcuucaca

SEQ ID NO: 1958708 - RNA, 19 nt, Artificial Sequence
  Description of Artificial Sequence: Synthetic oligonucleotide
uccaauaaccuaaguuaga

SEQ ID NO: 1958709 - RNA, 19 nt, Artificial Sequence
  Description of Artificial Sequence: Synthetic oligonucleotide
ugcaaguuagcauccaaua

SEQ ID NO: 1958710 - RNA, 19 nt, Artificial Sequence
  Description of Artificial Sequence: Synthetic oligonucleotide
ucauuccuuagaaaagcaa

SEQ ID NO: 1958711 - RNA, 19 nt, Artificial Sequence
  Description of Artificial Sequence: Synthetic oligonucleotide
agaaaaucaugguaacaau

SEQ ID NO: 1958712 - RNA, 19 nt, Artificial Sequence
  Description of Artificial Sequence: Synthetic oligonucleotide
augagcuucacagauuuca

SEQ ID NO: 1958713 - RNA, 19 nt, Artificial Sequence
  Description of Artificial Sequence: Synthetic oligonucleotide
aaagcaacgacuggccaga

SEQ ID NO: 1958714 - RNA, 19 nt, Artificial Sequence
  Description of Artificial Sequence: Synthetic oligonucleotide
aacguuagagucccagaaa

SEQ ID NO: 1958715 - RNA, 19 nt, Artificial Sequence
  Description of Artificial Sequence: Synthetic oligonucleotide
ccaauaaaguacccaaugg

SEQ ID NO: 1958716 - RNA, 19 nt, Artificial Sequence
  Description of Artificial Sequence: Synthetic oligonucleotide
ucacacuuaaucagacuaa

SEQ ID NO: 1958717 - RNA, 19 nt, Artificial Sequence
  Description of Artificial Sequence: Synthetic oligonucleotide
uugauuuggggaacuucug

SEQ ID NO: 1958718 - RNA, 19 nt, Artificial Sequence
  Description of Artificial Sequence: Synthetic oligonucleotide
auagucagaagaaauuagu

SEQ ID NO: 1958719 - RNA, 19 nt, Artificial Sequence
  Description of Artificial Sequence: Synthetic oligonucleotide
aagucagaaggguaacaaa

SEQ ID NO: 1958720 - RNA, 19 nt, Artificial Sequence
  Description of Artificial Sequence: Synthetic oligonucleotide
uuucagucacggaucauau

SEQ ID NO: 1958721 - RNA, 19 nt, Artificial Sequence
  Description of Artificial Sequence: Synthetic oligonucleotide
aauuaguuuccgauaugca

SEQ ID NO: 1958722 - RNA, 19 nt, Artificial Sequence
  Description of Artificial Sequence: Synthetic oligonucleotide
uugugaaacuccacuaaua

SEQ ID NO: 1958723 - RNA, 19 nt, Artificial Sequence
  Description of Artificial Sequence: Synthetic oligonucleotide
aagucaggcagcugacuca

SEQ ID NO: 1958724 - RNA, 19 nt, Artificial Sequence
  Description of Artificial Sequence: Synthetic oligonucleotide
accucaaguugaccaaaac

SEQ ID NO: 1958725 - RNA, 19 nt, Artificial Sequence
  Description of Artificial Sequence: Synthetic oligonucleotide
gagcguauaaucugagauc

SEQ ID NO: 1958726 - RNA, 19 nt, Artificial Sequence
  Description of Artificial Sequence: Synthetic oligonucleotide
agucacaauggcaugaagu

SEQ ID NO: 1958727 - RNA, 19 nt, Artificial Sequence
  Description of Artificial Sequence: Synthetic oligonucleotide
ugaucaaauggcugcuugu

SEQ ID NO: 1958728 - RNA, 19 nt, Artificial Sequence
  Description of Artificial Sequence: Synthetic oligonucleotide
uuccuuagaaaagcaacga

SEQ ID NO: 1958729 - RNA, 19 nt, Artificial Sequence
  Description of Artificial Sequence: Synthetic oligonucleotide
gacuaauuuccauugauuu

SEQ ID NO: 1958730 - RNA, 19 nt, Artificial Sequence
  Description of Artificial Sequence: Synthetic oligonucleotide
aucugcauaacagccagug

SEQ ID NO: 1958731 - RNA, 19 nt, Artificial Sequence
  Description of Artificial Sequence: Synthetic oligonucleotide
cuauucaaugaauucugca

SEQ ID NO: 1958732 - RNA, 19 nt, Artificial Sequence
  Description of Artificial Sequence: Synthetic oligonucleotide
acuucuggccaauaaucca

SEQ ID NO: 1958733 - RNA, 19 nt, Artificial Sequence
  Description of Artificial Sequence: Synthetic oligonucleotide
accuaaguuagaaagagua

SEQ ID NO: 1958734 - RNA, 19 nt, Artificial Sequence
  Description of Artificial Sequence: Synthetic oligonucleotide
ugaacugaaugcugaucug

SEQ ID NO: 1958735 - RNA, 19 nt, Artificial Sequence
  Description of Artificial Sequence: Synthetic oligonucleotide
cauccaauaaaguacccaa

SEQ ID NO: 1958736 - RNA, 19 nt, Artificial Sequence
  Description of Artificial Sequence: Synthetic oligonucleotide
ccacuaauacuaauuaaag

SEQ ID NO: 1958737 - RNA, 19 nt, Artificial Sequence
  Description of Artificial Sequence: Synthetic oligonucleotide
uauagaagguuaccaucaa

SEQ ID NO: 1958738 - RNA, 19 nt, Artificial Sequence
  Description of Artificial Sequence: Synthetic oligonucleotide
caauaauccagaccaauaa

SEQ ID NO: 1958739 - RNA, 19 nt, Artificial Sequence
  Description of Artificial Sequence: Synthetic oligonucleotide
auaugcacuuaucuuuggu

SEQ ID NO: 1958740 - RNA, 19 nt, Artificial Sequence
  Description of Artificial Sequence: Synthetic oligonucleotide
agcuaucucgccucuccac

SEQ ID NO: 1958741 - RNA, 19 nt, Artificial Sequence
  Description of Artificial Sequence: Synthetic oligonucleotide
uuuucucgaaauaccucaa

SEQ ID NO: 1958742 - RNA, 19 nt, Artificial Sequence
  Description of Artificial Sequence: Synthetic oligonucleotide
ugaccaaaacuaacuuugu

SEQ ID NO: 1958743 - RNA, 19 nt, Artificial Sequence
  Description of Artificial Sequence: Synthetic oligonucleotide
uccgauaugcacuuaucuu

SEQ ID NO: 1958744 - RNA, 19 nt, Artificial Sequence
  Description of Artificial Sequence: Synthetic oligonucleotide
auaaccuaaguuagaaaga

SEQ ID NO: 1958745 - RNA, 19 nt, Artificial Sequence
  Description of Artificial Sequence: Synthetic oligonucleotide
agaguuuguucaaccaggg

SEQ ID NO: 1958746 - RNA, 19 nt, Artificial Sequence
  Description of Artificial Sequence: Synthetic oligonucleotide
aaaguacccaauggacaag

SEQ ID NO: 1958747 - RNA, 19 nt, Artificial Sequence
  Description of Artificial Sequence: Synthetic oligonucleotide
agccuugugaaacuccacu

SEQ ID NO: 1958748 - RNA, 19 nt, Artificial Sequence
  Description of Artificial Sequence: Synthetic oligonucleotide
cuggccaauaauccagacc

SEQ ID NO: 1958749 - RNA, 19 nt, Artificial Sequence
  Description of Artificial Sequence: Synthetic oligonucleotide
ucugagucacaauggcaug

SEQ ID NO: 1958750 - RNA, 19 nt, Artificial Sequence
  Description of Artificial Sequence: Synthetic oligonucleotide
augaugugugaacagcuau

SEQ ID NO: 1958751 - RNA, 19 nt, Artificial Sequence
  Description of Artificial Sequence: Synthetic oligonucleotide
agaagguuaccaucaaaua

SEQ ID NO: 1958752 - RNA, 19 nt, Artificial Sequence
  Description of Artificial Sequence: Synthetic oligonucleotide
uauaugagcuucacagauu

SEQ ID NO: 1958753 - RNA, 19 nt, Artificial Sequence
  Description of Artificial Sequence: Synthetic oligonucleotide
ucauaucauuccuuagaaa

SEQ ID NO: 1958754 - RNA, 19 nt, Artificial Sequence
  Description of Artificial Sequence: Synthetic oligonucleotide
agucagaaggguaacaaaa

SEQ ID NO: 1958755 - RNA, 19 nt, Artificial Sequence
  Description of Artificial Sequence: Synthetic oligonucleotide
cuuguuauggcccuugacu

SEQ ID NO: 1958756 - RNA, 19 nt, Artificial Sequence
  Description of Artificial Sequence: Synthetic oligonucleotide
agacauuagccuugaaaau

SEQ ID NO: 1958757 - RNA, 19 nt, Artificial Sequence
  Description of Artificial Sequence: Synthetic oligonucleotide
auguucugagucacaaugg

SEQ ID NO: 1958758 - RNA, 19 nt, Artificial Sequence
  Description of Artificial Sequence: Synthetic oligonucleotide
aaaagguauaugagcuuca

SEQ ID NO: 1958759 - RNA, 19 nt, Artificial Sequence
  Description of Artificial Sequence: Synthetic oligonucleotide
uaaaagcccauagauggau

SEQ ID NO: 1958760 - RNA, 19 nt, Artificial Sequence
  Description of Artificial Sequence: Synthetic oligonucleotide
aggggacagaguuuguuca

SEQ ID NO: 1958761 - RNA, 19 nt, Artificial Sequence
  Description of Artificial Sequence: Synthetic oligonucleotide
guuccaagccuugugaaac

SEQ ID NO: 1958762 - RNA, 19 nt, Artificial Sequence
  Description of Artificial Sequence: Synthetic oligonucleotide
ugagcuucacagauuucaa

SEQ ID NO: 1958763 - RNA, 19 nt, Artificial Sequence
  Description of Artificial Sequence: Synthetic oligonucleotide
auguuuugacaaaggaauc

SEQ ID NO: 1958764 - RNA, 19 nt, Artificial Sequence
  Description of Artificial Sequence: Synthetic oligonucleotide
auggcccuugacuccaaac

SEQ ID NO: 1958765 - RNA, 19 nt, Artificial Sequence
  Description of Artificial Sequence: Synthetic oligonucleotide
aacuccacuaauacuaauu

SEQ ID NO: 1958766 - RNA, 19 nt, Artificial Sequence
  Description of Artificial Sequence: Synthetic oligonucleotide
guauuuccaaugcaaaugu

SEQ ID NO: 1958767 - RNA, 19 nt, Artificial Sequence
  Description of Artificial Sequence: Synthetic oligonucleotide
aacgacuggccagaguucu

SEQ ID NO: 1958768 - RNA, 19 nt, Artificial Sequence
  Description of Artificial Sequence: Synthetic oligonucleotide
ucugcaaguuagcauccaa

SEQ ID NO: 1958769 - RNA, 19 nt, Artificial Sequence
  Description of Artificial Sequence: Synthetic oligonucleotide
aacugaaugcugaucugca

SEQ ID NO: 1958770 - RNA, 19 nt, Artificial Sequence
  Description of Artificial Sequence: Synthetic oligonucleotide
ggaucuauucaaugaauuc

SEQ ID NO: 1958771 - RNA, 19 nt, Artificial Sequence
  Description of Artificial Sequence: Synthetic oligonucleotide
uccacauggguaacuggac

SEQ ID NO: 1958772 - RNA, 19 nt, Artificial Sequence
  Description of Artificial Sequence: Synthetic oligonucleotide
uuuccgauaugcacuuauc

SEQ ID NO: 1958773 - RNA, 19 nt, Artificial Sequence
  Description of Artificial Sequence: Synthetic oligonucleotide
ggugcuuuagaauuccaga

SEQ ID NO: 1958774 - RNA, 19 nt, Artificial Sequence
  Description of Artificial Sequence: Synthetic oligonucleotide
caucauccaauaaccuaag

SEQ ID NO: 1958775 - RNA, 19 nt, Artificial Sequence
  Description of Artificial Sequence: Synthetic oligonucleotide
augauuuaugaugugugaa

SEQ ID NO: 1958776 - RNA, 19 nt, Artificial Sequence
  Description of Artificial Sequence: Synthetic oligonucleotide
agcaguuccaagccuugug

SEQ ID NO: 1958777 - RNA, 19 nt, Artificial Sequence
  Description of Artificial Sequence: Synthetic oligonucleotide
aaacuccacuaauacuaau

SEQ ID NO: 1958778 - RNA, 19 nt, Artificial Sequence
  Description of Artificial Sequence: Synthetic oligonucleotide
cuccaaacguuagaguccc

SEQ ID NO: 1958779 - RNA, 19 nt, Artificial Sequence
  Description of Artificial Sequence: Synthetic oligonucleotide
ugacuugaguaaagaaaau

SEQ ID NO: 1958780 - RNA, 19 nt, Artificial Sequence
  Description of Artificial Sequence: Synthetic oligonucleotide
uuccaaugcaaaugugauc

SEQ ID NO: 1958781 - RNA, 19 nt, Artificial Sequence
  Description of Artificial Sequence: Synthetic oligonucleotide
agauccuaaaaugaagcuu

SEQ ID NO: 1958782 - RNA, 19 nt, Artificial Sequence
  Description of Artificial Sequence: Synthetic oligonucleotide
auacuaugauucuacuaua

SEQ ID NO: 1958783 - RNA, 19 nt, Artificial Sequence
  Description of Artificial Sequence: Synthetic oligonucleotide
uaacaaugaugcauauguu

SEQ ID NO: 1958784 - RNA, 19 nt, Artificial Sequence
  Description of Artificial Sequence: Synthetic oligonucleotide
uggcugcuuguuauggccc

SEQ ID NO: 1958785 - RNA, 19 nt, Artificial Sequence
  Description of Artificial Sequence: Synthetic oligonucleotide
cuacuauagaagguuacca

SEQ ID NO: 1958786 - RNA, 19 nt, Artificial Sequence
  Description of Artificial Sequence: Synthetic oligonucleotide
ccuaaaaugaagcuuuaca

SEQ ID NO: 1958787 - RNA, 19 nt, Artificial Sequence
  Description of Artificial Sequence: Synthetic oligonucleotide
aacuggaccucuguuguaa

SEQ ID NO: 1958788 - RNA, 19 nt, Artificial Sequence
  Description of Artificial Sequence: Synthetic oligonucleotide
ugugaacagcuaucucgcc

SEQ ID NO: 1958789 - RNA, 19 nt, Artificial Sequence
  Description of Artificial Sequence: Synthetic oligonucleotide
ugacuccaaacguuagagu

SEQ ID NO: 1958790 - RNA, 19 nt, Artificial Sequence
  Description of Artificial Sequence: Synthetic oligonucleotide
gauucuacuauagaagguu

SEQ ID NO: 1958791 - RNA, 19 nt, Artificial Sequence
  Description of Artificial Sequence: Synthetic oligonucleotide
acauuagccuugaaaauau

SEQ ID NO: 1958792 - RNA, 19 nt, Artificial Sequence
  Description of Artificial Sequence: Synthetic oligonucleotide
agccuggagaagcaaguca

SEQ ID NO: 1958793 - RNA, 19 nt, Artificial Sequence
  Description of Artificial Sequence: Synthetic oligonucleotide
aucucgccucuccacaaag

SEQ ID NO: 1958794 - RNA, 19 nt, Artificial Sequence
  Description of Artificial Sequence: Synthetic oligonucleotide
auuccagauguaauaguca

SEQ ID NO: 1958795 - RNA, 19 nt, Artificial Sequence
  Description of Artificial Sequence: Synthetic oligonucleotide
guuuguucaaccaggggaa

SEQ ID NO: 1958796 - RNA, 19 nt, Artificial Sequence
  Description of Artificial Sequence: Synthetic oligonucleotide
uuacacuuucaugaaguuu

SEQ ID NO: 1958797 - RNA, 19 nt, Artificial Sequence
  Description of Artificial Sequence: Synthetic oligonucleotide
gagauccuaaaaugaagcu

SEQ ID NO: 1958798 - RNA, 19 nt, Artificial Sequence
  Description of Artificial Sequence: Synthetic oligonucleotide
cacacagggaucuauucaa

SEQ ID NO: 1958799 - RNA, 19 nt, Artificial Sequence
  Description of Artificial Sequence: Synthetic oligonucleotide
cagauguaauagucagaag

SEQ ID NO: 1958800 - RNA, 19 nt, Artificial Sequence
  Description of Artificial Sequence: Synthetic oligonucleotide
ugcacuuaucuuugguuuu

SEQ ID NO: 1958801 - RNA, 19 nt, Artificial Sequence
  Description of Artificial Sequence: Synthetic oligonucleotide
uccuaaaaugaagcuuuac

SEQ ID NO: 1958802 - RNA, 19 nt, Artificial Sequence
  Description of Artificial Sequence: Synthetic oligonucleotide
acacuugcauauaucauau

SEQ ID NO: 1958803 - RNA, 19 nt, Artificial Sequence
  Description of Artificial Sequence: Synthetic oligonucleotide
agaaaauccuguaucccaa

SEQ ID NO: 1958804 - RNA, 19 nt, Artificial Sequence
  Description of Artificial Sequence: Synthetic oligonucleotide
uuguucaaccaggggaaca

SEQ ID NO: 1958805 - RNA, 19 nt, Artificial Sequence
  Description of Artificial Sequence: Synthetic oligonucleotide
ggacagaguuuguucaacc

SEQ ID NO: 1958806 - RNA, 19 nt, Artificial Sequence
  Description of Artificial Sequence: Synthetic oligonucleotide
auggaagacauuagccuug

SEQ ID NO: 1958807 - RNA, 19 nt, Artificial Sequence
  Description of Artificial Sequence: Synthetic oligonucleotide
auccagaccaauaaacuuu

SEQ ID NO: 1958808 - RNA, 19 nt, Artificial Sequence
  Description of Artificial Sequence: Synthetic oligonucleotide
augguaacaaugaugcaua

SEQ ID NO: 1958809 - RNA, 19 nt, Artificial Sequence
  Description of Artificial Sequence: Synthetic oligonucleotide
acauggguaacuggaccuc

SEQ ID NO: 1958810 - RNA, 19 nt, Artificial Sequence
  Description of Artificial Sequence: Synthetic oligonucleotide
gcauaacagccagugagcg

SEQ ID NO: 1958811 - RNA, 19 nt, Artificial Sequence
  Description of Artificial Sequence: Synthetic oligonucleotide
ucuggccaauaauccagac

SEQ ID NO: 1958812 - RNA, 19 nt, Artificial Sequence
  Description of Artificial Sequence: Synthetic oligonucleotide
auguaauagucagaagaaa

SEQ ID NO: 1958813 - RNA, 19 nt, Artificial Sequence
  Description of Artificial Sequence: Synthetic oligonucleotide
uaguuuccgauaugcacuu

SEQ ID NO: 1958814 - RNA, 19 nt, Artificial Sequence
  Description of Artificial Sequence: Synthetic oligonucleotide
gaauuccagauguaauagu

SEQ ID NO: 1958815 - RNA, 19 nt, Artificial Sequence
  Description of Artificial Sequence: Synthetic oligonucleotide
aucauccaauaaccuaagu

SEQ ID NO: 1958816 - RNA, 19 nt, Artificial Sequence
  Description of Artificial Sequence: Synthetic oligonucleotide
aucauuccuuagaaaagca

SEQ ID NO: 1958817 - RNA, 19 nt, Artificial Sequence
  Description of Artificial Sequence: Synthetic oligonucleotide
auauguucugagucacaau

SEQ ID NO: 1958818 - RNA, 19 nt, Artificial Sequence
  Description of Artificial Sequence: Synthetic oligonucleotide
acacaucuaagaaauuaaa

SEQ ID NO: 1958819 - RNA, 19 nt, Artificial Sequence
  Description of Artificial Sequence: Synthetic oligonucleotide
cuugcauauaucauaucau

SEQ ID NO: 1958820 - RNA, 19 nt, Artificial Sequence
  Description of Artificial Sequence: Synthetic oligonucleotide
gaccaaaacuaacuuugua

SEQ ID NO: 1958821 - RNA, 19 nt, Artificial Sequence
  Description of Artificial Sequence: Synthetic oligonucleotide
ucucgccucuccacaaagu

SEQ ID NO: 1958822 - RNA, 19 nt, Artificial Sequence
  Description of Artificial Sequence: Synthetic oligonucleotide
caccuccuacuaaaagccc

SEQ ID NO: 1958823 - RNA, 19 nt, Artificial Sequence
  Description of Artificial Sequence: Synthetic oligonucleotide
caaacguuagagucccaga

SEQ ID NO: 1958824 - RNA, 19 nt, Artificial Sequence
  Description of Artificial Sequence: Synthetic oligonucleotide
caugguaacaaugaugcau

SEQ ID NO: 1958825 - RNA, 19 nt, Artificial Sequence
  Description of Artificial Sequence: Synthetic oligonucleotide
ugcuuguuauggcccuuga

SEQ ID NO: 1958826 - RNA, 19 nt, Artificial Sequence
  Description of Artificial Sequence: Synthetic oligonucleotide
auauaucauaucauuccuu

SEQ ID NO: 1958827 - RNA, 19 nt, Artificial Sequence
  Description of Artificial Sequence: Synthetic oligonucleotide
gaaacuccacuaauacuaa

SEQ ID NO: 1958828 - RNA, 19 nt, Artificial Sequence
  Description of Artificial Sequence: Synthetic oligonucleotide
ugagucacaauggcaugaa

SEQ ID NO: 1958829 - RNA, 19 nt, Artificial Sequence
  Description of Artificial Sequence: Synthetic oligonucleotide
uuuguucaaccaggggaac

SEQ ID NO: 1958830 - RNA, 19 nt, Artificial Sequence
  Description of Artificial Sequence: Synthetic oligonucleotide
uguauuccacauggguaac

SEQ ID NO: 1958831 - RNA, 19 nt, Artificial Sequence
  Description of Artificial Sequence: Synthetic oligonucleotide
aguuagcauccaauaaagu

SEQ ID NO: 1958832 - RNA, 19 nt, Artificial Sequence
  Description of Artificial Sequence: Synthetic oligonucleotide
auauguuacuggagcaggu

SEQ ID NO: 1958833 - RNA, 19 nt, Artificial Sequence
  Description of Artificial Sequence: Synthetic oligonucleotide
cugaaugcugaucugcaua

SEQ ID NO: 1958834 - RNA, 19 nt, Artificial Sequence
  Description of Artificial Sequence: Synthetic oligonucleotide
cagugagcguauaaucuga

SEQ ID NO: 1958835 - RNA, 19 nt, Artificial Sequence
  Description of Artificial Sequence: Synthetic oligonucleotide
ccagugagcguauaaucug

SEQ ID NO: 1958836 - RNA, 19 nt, Artificial Sequence
  Description of Artificial Sequence: Synthetic oligonucleotide
ugguaacaaugaugcauau

SEQ ID NO: 1958837 - RNA, 19 nt, Artificial Sequence
  Description of Artificial Sequence: Synthetic oligonucleotide
acagccagugagcguauaa

SEQ ID NO: 1958838 - RNA, 19 nt, Artificial Sequence
  Description of Artificial Sequence: Synthetic oligonucleotide
guaauagucagaagaaauu

SEQ ID NO: 1958839 - RNA, 19 nt, Artificial Sequence
  Description of Artificial Sequence: Synthetic oligonucleotide
guuauggcccuugacucca

SEQ ID NO: 1958840 - RNA, 19 nt, Artificial Sequence
  Description of Artificial Sequence: Synthetic oligonucleotide
accuccuacuaaaagccca

SEQ ID NO: 1958841 - RNA, 19 nt, Artificial Sequence
  Description of Artificial Sequence: Synthetic oligonucleotide
cccauuugaauauaagaaa

SEQ ID NO: 1958842 - RNA, 19 nt, Artificial Sequence
  Description of Artificial Sequence: Synthetic oligonucleotide
gugaaacuccacuaauacu

SEQ ID NO: 1958843 - RNA, 19 nt, Artificial Sequence
  Description of Artificial Sequence: Synthetic oligonucleotide
uaucucgccucuccacaaa

SEQ ID NO: 1958844 - RNA, 19 nt, Artificial Sequence
  Description of Artificial Sequence: Synthetic oligonucleotide
uuccauugauuuggggaac

SEQ ID NO: 1958845 - RNA, 19 nt, Artificial Sequence
  Description of Artificial Sequence: Synthetic oligonucleotide
gcaaguuagcauccaauaa

SEQ ID NO: 1958846 - RNA, 19 nt, Artificial Sequence
  Description of Artificial Sequence: Synthetic oligonucleotide
auggacaagccuggagaag

SEQ ID NO: 1958847 - RNA, 19 nt, Artificial Sequence
  Description of Artificial Sequence: Synthetic oligonucleotide
acggaucauaugaacacau

SEQ ID NO: 1958848 - RNA, 19 nt, Artificial Sequence
  Description of Artificial Sequence: Synthetic oligonucleotide
ccuuagaaaagcaacgacu

SEQ ID NO: 1958849 - RNA, 19 nt, Artificial Sequence
  Description of Artificial Sequence: Synthetic oligonucleotide
gugagcguauaaucugaga

SEQ ID NO: 1958850 - RNA, 19 nt, Artificial Sequence
  Description of Artificial Sequence: Synthetic oligonucleotide
gugaacagcuaucucgccu

SEQ ID NO: 1958851 - RNA, 19 nt, Artificial Sequence
  Description of Artificial Sequence: Synthetic oligonucleotide
aagcccauagauggaugau

SEQ ID NO: 1958852 - RNA, 19 nt, Artificial Sequence
  Description of Artificial Sequence: Synthetic oligonucleotide
gcaguuccaagccuuguga

SEQ ID NO: 1958853 - RNA, 19 nt, Artificial Sequence
  Description of Artificial Sequence: Synthetic oligonucleotide
guccuuaucaucauccaau

SEQ ID NO: 1958854 - RNA, 19 nt, Artificial Sequence
  Description of Artificial Sequence: Synthetic oligonucleotide
guuuccgauaugcacuuau

SEQ ID NO: 1958855 - RNA, 19 nt, Artificial Sequence
  Description of Artificial Sequence: Synthetic oligonucleotide
agggaucuauucaaugaau

SEQ ID NO: 1958856 - RNA, 19 nt, Artificial Sequence
  Description of Artificial Sequence: Synthetic oligonucleotide
cgauaugcacuuaucuuug

SEQ ID NO: 1958857 - RNA, 19 nt, Artificial Sequence
  Description of Artificial Sequence: Synthetic oligonucleotide
cugagucacaauggcauga

SEQ ID NO: 1958858 - RNA, 19 nt, Artificial Sequence
  Description of Artificial Sequence: Synthetic oligonucleotide
cacauggguaacuggaccu

SEQ ID NO: 1958859 - RNA, 19 nt, Artificial Sequence
  Description of Artificial Sequence: Synthetic oligonucleotide
auccaauaaaguacccaau

SEQ ID NO: 1958860 - RNA, 19 nt, Artificial Sequence
  Description of Artificial Sequence: Synthetic oligonucleotide
cuuuagaauuccagaugua

SEQ ID NO: 1958861 - RNA, 19 nt, Artificial Sequence
  Description of Artificial Sequence: Synthetic oligonucleotide
ccaagccuugugaaacucc

SEQ ID NO: 1958862 - RNA, 19 nt, Artificial Sequence
  Description of Artificial Sequence: Synthetic oligonucleotide
gucccagaaagacuaauuu

SEQ ID NO: 1958863 - RNA, 19 nt, Artificial Sequence
  Description of Artificial Sequence: Synthetic oligonucleotide
caacgacuggccagaguuc

SEQ ID NO: 1958864 - RNA, 19 nt, Artificial Sequence
  Description of Artificial Sequence: Synthetic oligonucleotide
ccaaacguuagagucccag

SEQ ID NO: 1958865 - RNA, 19 nt, Artificial Sequence
  Description of Artificial Sequence: Synthetic oligonucleotide
cuguauuuccaaugcaaau

SEQ ID NO: 1958866 - RNA, 19 nt, Artificial Sequence
  Description of Artificial Sequence: Synthetic oligonucleotide
caggggaacacuugcauau

SEQ ID NO: 1958867 - RNA, 19 nt, Artificial Sequence
  Description of Artificial Sequence: Synthetic oligonucleotide
agucccagaaagacuaauu

SEQ ID NO: 1958868 - RNA, 19 nt, Artificial Sequence
  Description of Artificial Sequence: Synthetic oligonucleotide
cacuugcauauaucauauc

SEQ ID NO: 1958869 - RNA, 19 nt, Artificial Sequence
  Description of Artificial Sequence: Synthetic oligonucleotide
gcuaucucgccucuccaca

SEQ ID NO: 1958870 - RNA, 19 nt, Artificial Sequence
  Description of Artificial Sequence: Synthetic oligonucleotide
acuggaccucuguuguaaa

SEQ ID NO: 1958871 - RNA, 19 nt, Artificial Sequence
  Description of Artificial Sequence: Synthetic oligonucleotide
aaggaaucacucggugauu

SEQ ID NO: 1958872 - RNA, 19 nt, Artificial Sequence
  Description of Artificial Sequence: Synthetic oligonucleotide
agcaacgacuggccagagu

SEQ ID NO: 1958873 - RNA, 19 nt, Artificial Sequence
  Description of Artificial Sequence: Synthetic oligonucleotide
ggcacacagggaucuauuc

SEQ ID NO: 1958874 - RNA, 19 nt, Artificial Sequence
  Description of Artificial Sequence: Synthetic oligonucleotide
gcaacgacuggccagaguu

SEQ ID NO: 1958875 - RNA, 19 nt, Artificial Sequence
  Description of Artificial Sequence: Synthetic oligonucleotide
gaacacuugcauauaucau

SEQ ID NO: 1958876 - RNA, 19 nt, Artificial Sequence
  Description of Artificial Sequence: Synthetic oligonucleotide
ccaauaaccuaaguuagaa

SEQ ID NO: 1958877 - RNA, 19 nt, Artificial Sequence
  Description of Artificial Sequence: Synthetic oligonucleotide
ccuugacuccaaacguuag

SEQ ID NO: 1958878 - RNA, 19 nt, Artificial Sequence
  Description of Artificial Sequence: Synthetic oligonucleotide
gcauccaauaaaguaccca

SEQ ID NO: 1958879 - RNA, 19 nt, Artificial Sequence
  Description of Artificial Sequence: Synthetic oligonucleotide
gaucaaauggcugcuuguu

SEQ ID NO: 1958880 - RNA, 19 nt, Artificial Sequence
  Description of Artificial Sequence: Synthetic oligonucleotide
aagcaacgacuggccagag

SEQ ID NO: 1958881 - RNA, 19 nt, Artificial Sequence
  Description of Artificial Sequence: Synthetic oligonucleotide
cacggaucauaugaacaca

SEQ ID NO: 1958882 - RNA, 19 nt, Artificial Sequence
  Description of Artificial Sequence: Synthetic oligonucleotide
cuaucucgccucuccacaa

SEQ ID NO: 1958883 - RNA, 19 nt, Artificial Sequence
  Description of Artificial Sequence: Synthetic oligonucleotide
uaacagccagugagcguau

SEQ ID NO: 1958884 - RNA, 19 nt, Artificial Sequence
  Description of Artificial Sequence: Synthetic oligonucleotide
gcuuguuauggcccuugac

SEQ ID NO: 1958885 - RNA, 19 nt, Artificial Sequence
  Description of Artificial Sequence: Synthetic oligonucleotide
gcuguauuuccaaugcaaa

SEQ ID NO: 1958886 - RNA, 19 nt, Artificial Sequence
  Description of Artificial Sequence: Synthetic oligonucleotide
ccaauaauccagaccaaua

SEQ ID NO: 1958887 - RNA, 19 nt, Artificial Sequence
  Description of Artificial Sequence: Synthetic oligonucleotide
uccaaacguuagaguccca

SEQ ID NO: 1958888 - RNA, 19 nt, Artificial Sequence
  Description of Artificial Sequence: Synthetic oligonucleotide
cugcuuguuauggcccuug

SEQ ID NO: 1958889 - RNA, 19 nt, Artificial Sequence
  Description of Artificial Sequence: Synthetic oligonucleotide
auggguaacuggaccucug

SEQ ID NO: 1958890 - RNA, 19 nt, Artificial Sequence
  Description of Artificial Sequence: Synthetic oligonucleotide
uuauggcccuugacuccaa

SEQ ID NO: 1958891 - RNA, 19 nt, Artificial Sequence
  Description of Artificial Sequence: Synthetic oligonucleotide
ccucaaguugaccaaaacu

SEQ ID NO: 1958892 - RNA, 19 nt, Artificial Sequence
  Description of Artificial Sequence: Synthetic oligonucleotide
cugcaaguuagcauccaau

SEQ ID NO: 1958893 - RNA, 19 nt, Artificial Sequence
  Description of Artificial Sequence: Synthetic oligonucleotide
gacaagccuggagaagcaa

SEQ ID NO: 1958894 - RNA, 19 nt, Artificial Sequence
  Description of Artificial Sequence: Synthetic oligonucleotide
cauaacagccagugagcgu

SEQ ID NO: 1958895 - RNA, 19 nt, Artificial Sequence
  Description of Artificial Sequence: Synthetic oligonucleotide
cuggaccucuguuguaaaa

SEQ ID NO: 1958896 - RNA, 19 nt, Artificial Sequence
  Description of Artificial Sequence: Synthetic oligonucleotide
gggacagaguuuguucaac

SEQ ID NO: 1958897 - RNA, 19 nt, Artificial Sequence
  Description of Artificial Sequence: Synthetic oligonucleotide
gccuugugaaacuccacua

SEQ ID NO: 1958898 - RNA, 19 nt, Artificial Sequence
  Description of Artificial Sequence: Synthetic oligonucleotide
caggugcuuuagaauucca

SEQ ID NO: 1958899 - RNA, 19 nt, Artificial Sequence
  Description of Artificial Sequence: Synthetic oligonucleotide
gaacagcuaucucgccucu

SEQ ID NO: 1958900 - RNA, 19 nt, Artificial Sequence
  Description of Artificial Sequence: Synthetic oligonucleotide
auccuaaaaugaagcuuua

SEQ ID NO: 1958901 - RNA, 19 nt, Artificial Sequence
  Description of Artificial Sequence: Synthetic oligonucleotide
gccagugagcguauaaucu

SEQ ID NO: 1958902 - RNA, 19 nt, Artificial Sequence
  Description of Artificial Sequence: Synthetic oligonucleotide
ggcccuugacuccaaacgu

SEQ ID NO: 1958903 - RNA, 19 nt, Artificial Sequence
  Description of Artificial Sequence: Synthetic oligonucleotide
cagcuaucucgccucucca

SEQ ID NO: 1958904 - RNA, 19 nt, Artificial Sequence
  Description of Artificial Sequence: Synthetic oligonucleotide
aacagccagugagcguaua

SEQ ID NO: 1958905 - RNA, 19 nt, Artificial Sequence
  Description of Artificial Sequence: Synthetic oligonucleotide
guauuccacauggguaacu

SEQ ID NO: 1958906 - RNA, 19 nt, Artificial Sequence
  Description of Artificial Sequence: Synthetic oligonucleotide
gggaucuauucaaugaauu

SEQ ID NO: 1958907 - RNA, 19 nt, Artificial Sequence
  Description of Artificial Sequence: Synthetic oligonucleotide
gagucccagaaagacuaau

SEQ ID NO: 1958908 - RNA, 19 nt, Artificial Sequence
  Description of Artificial Sequence: Synthetic oligonucleotide
aggggaacacuugcauaua

SEQ ID NO: 1958909 - RNA, 19 nt, Artificial Sequence
  Description of Artificial Sequence: Synthetic oligonucleotide
agagucccagaaagacuaa

SEQ ID NO: 1958910 - RNA, 19 nt, Artificial Sequence
  Description of Artificial Sequence: Synthetic oligonucleotide
aggcacacagggaucuauu

SEQ ID NO: 1958911 - RNA, 19 nt, Artificial Sequence
  Description of Artificial Sequence: Synthetic oligonucleotide
cggaucauaugaacacauc

SEQ ID NO: 1958912 - RNA, 19 nt, Artificial Sequence
  Description of Artificial Sequence: Synthetic oligonucleotide
cauggguaacuggaccucu

SEQ ID NO: 1958913 - RNA, 19 nt, Artificial Sequence
  Description of Artificial Sequence: Synthetic oligonucleotide
cguuagagucccagaaaga

SEQ ID NO: 1958914 - RNA, 19 nt, Artificial Sequence
  Description of Artificial Sequence: Synthetic oligonucleotide
ggggaacacuugcauauau

SEQ ID NO: 1958915 - RNA, 19 nt, Artificial Sequence
  Description of Artificial Sequence: Synthetic oligonucleotide
cccuugacuccaaacguua

SEQ ID NO: 1958916 - RNA, 19 nt, Artificial Sequence
  Description of Artificial Sequence: Synthetic oligonucleotide
cauuagccuugaaaauauu

SEQ ID NO: 1958917 - RNA, 19 nt, Artificial Sequence
  Description of Artificial Sequence: Synthetic oligonucleotide
aguuuccgauaugcacuua

SEQ ID NO: 1958918 - RNA, 19 nt, Artificial Sequence
  Description of Artificial Sequence: Synthetic oligonucleotide
gccaauaauccagaccaau

SEQ ID NO: 1958919 - RNA, 19 nt, Artificial Sequence
  Description of Artificial Sequence: Synthetic oligonucleotide
cagccagugagcguauaau

SEQ ID NO: 1958920 - RNA, 19 nt, Artificial Sequence
  Description of Artificial Sequence: Synthetic oligonucleotide
gcccauagauggaugauuu

SEQ ID NO: 1958921 - RNA, 19 nt, Artificial Sequence
  Description of Artificial Sequence: Synthetic oligonucleotide
cuccuacuaaaagcccaua

SEQ ID NO: 1958922 - RNA, 19 nt, Artificial Sequence
  Description of Artificial Sequence: Synthetic oligonucleotide
cccauagauggaugauuua

SEQ ID NO: 1958923 - RNA, 19 nt, Artificial Sequence
  Description of Artificial Sequence: Synthetic oligonucleotide
ccuccuacuaaaagcccau

SEQ ID NO: 1958924 - RNA, 19 nt, Artificial Sequence
  Description of Artificial Sequence: Synthetic oligonucleotide
caaggcacacagggaucua

SEQ ID NO: 1958925 - RNA, 19 nt, Artificial Sequence
  Description of Artificial Sequence: Synthetic oligonucleotide
gcguauaaucugagauccu

SEQ ID NO: 1958926 - RNA, 19 nt, Artificial Sequence
  Description of Artificial Sequence: Synthetic oligonucleotide
gcccuugacuccaaacguu

SEQ ID NO: 1958927 - RNA, 19 nt, Artificial Sequence
  Description of Artificial Sequence: Synthetic oligonucleotide
ggggaacuucuggccaaua

SEQ ID NO: 1958928 - RNA, 19 nt, Artificial Sequence
  Description of Artificial Sequence: Synthetic oligonucleotide
gcugcuuguuauggcccuu

SEQ ID NO: 1958929 - RNA, 19 nt, Artificial Sequence
  Description of Artificial Sequence: Synthetic oligonucleotide
auaaaugucacacagguga

SEQ ID NO: 1958930 - RNA, 19 nt, Artificial Sequence
  Description of Artificial Sequence: Synthetic oligonucleotide
aagagagagaacuucuccc

SEQ ID NO: 1958931 - RNA, 19 nt, Artificial Sequence
  Description of Artificial Sequence: Synthetic oligonucleotide
acacgguuaacauaggugg

SEQ ID NO: 1958932 - RNA, 19 nt, Artificial Sequence
  Description of Artificial Sequence: Synthetic oligonucleotide
uuuugaacagcauguagag

SEQ ID NO: 1958933 - RNA, 19 nt, Artificial Sequence
  Description of Artificial Sequence: Synthetic oligonucleotide
ucuuaguccucucagcccg

SEQ ID NO: 1958934 - RNA, 19 nt, Artificial Sequence
  Description of Artificial Sequence: Synthetic oligonucleotide
auaucugucccaccaagcc

SEQ ID NO: 1958935 - RNA, 19 nt, Artificial Sequence
  Description of Artificial Sequence: Synthetic oligonucleotide
aacugagccaaugagggac

SEQ ID NO: 1958936 - RNA, 19 nt, Artificial Sequence
  Description of Artificial Sequence: Synthetic oligonucleotide
aauuccuguugacuugggc

SEQ ID NO: 1958937 - RNA, 19 nt, Artificial Sequence
  Description of Artificial Sequence: Synthetic oligonucleotide
ugaaagggcaucuaugucu

SEQ ID NO: 1958938 - RNA, 19 nt, Artificial Sequence
  Description of Artificial Sequence: Synthetic oligonucleotide
aaggcuacgagccaccaug

SEQ ID NO: 1958939 - RNA, 19 nt, Artificial Sequence
  Description of Artificial Sequence: Synthetic oligonucleotide
uagagcacgggcaacgugg

SEQ ID NO: 1958940 - RNA, 19 nt, Artificial Sequence
  Description of Artificial Sequence: Synthetic oligonucleotide
uucauugagucccacaaac

SEQ ID NO: 1958941 - RNA, 19 nt, Artificial Sequence
  Description of Artificial Sequence: Synthetic oligonucleotide
ucguaaacccuccaggcag

SEQ ID NO: 1958942 - RNA, 19 nt, Artificial Sequence
  Description of Artificial Sequence: Synthetic oligonucleotide
ucgaacuucauugaguccc

SEQ ID NO: 1958943 - RNA, 19 nt, Artificial Sequence
  Description of Artificial Sequence: Synthetic oligonucleotide
agagagagaacuucucccg

SEQ ID NO: 1958944 - RNA, 19 nt, Artificial Sequence
  Description of Artificial Sequence: Synthetic oligonucleotide
caaacgaucccucaccucc

SEQ ID NO: 1958945 - RNA, 19 nt, Artificial Sequence
  Description of Artificial Sequence: Synthetic oligonucleotide
uuugcaagcugaaccaacc

SEQ ID NO: 1958946 - RNA, 19 nt, Artificial Sequence
  Description of Artificial Sequence: Synthetic oligonucleotide
aguucuuaguccucucagc

SEQ ID NO: 1958947 - RNA, 19 nt, Artificial Sequence
  Description of Artificial Sequence: Synthetic oligonucleotide
acgcauauaggcuacucgg

SEQ ID NO: 1958948 - RNA, 19 nt, Artificial Sequence
  Description of Artificial Sequence: Synthetic oligonucleotide
aagaaguaccuguugguga

SEQ ID NO: 1958949 - RNA, 19 nt, Artificial Sequence
  Description of Artificial Sequence: Synthetic oligonucleotide
guagauagaauuccuguug

SEQ ID NO: 1958950 - RNA, 19 nt, Artificial Sequence
  Description of Artificial Sequence: Synthetic oligonucleotide
ucggacaaggcuacgagcc

SEQ ID NO: 1958951 - RNA, 19 nt, Artificial Sequence
  Description of Artificial Sequence: Synthetic oligonucleotide
ucugguagaagaaguaccu

SEQ ID NO: 1958952 - RNA, 19 nt, Artificial Sequence
  Description of Artificial Sequence: Synthetic oligonucleotide
aagccgcucucguaaaccc

SEQ ID NO: 1958953 - RNA, 19 nt, Artificial Sequence
  Description of Artificial Sequence: Synthetic oligonucleotide
uuaacauagguggagccag

SEQ ID NO: 1958954 - RNA, 19 nt, Artificial Sequence
  Description of Artificial Sequence: Synthetic oligonucleotide
uagauagaauuccuguuga

SEQ ID NO: 1958955 - RNA, 19 nt, Artificial Sequence
  Description of Artificial Sequence: Synthetic oligonucleotide
cugagcugcucuuucaugg

SEQ ID NO: 1958956 - RNA, 19 nt, Artificial Sequence
  Description of Artificial Sequence: Synthetic oligonucleotide
auagaauuccuguugacuu

SEQ ID NO: 1958957 - RNA, 19 nt, Artificial Sequence
  Description of Artificial Sequence: Synthetic oligonucleotide
cucuaaauucucccgagcc

SEQ ID NO: 1958958 - RNA, 19 nt, Artificial Sequence
  Description of Artificial Sequence: Synthetic oligonucleotide
guagcuagaagccuguuca

SEQ ID NO: 1958959 - RNA, 19 nt, Artificial Sequence
  Description of Artificial Sequence: Synthetic oligonucleotide
ucuaugucuuuuccucugg

SEQ ID NO: 1958960 - RNA, 19 nt, Artificial Sequence
  Description of Artificial Sequence: Synthetic oligonucleotide
cucgguuacauuuccuugg

SEQ ID NO: 1958961 - RNA, 19 nt, Artificial Sequence
  Description of Artificial Sequence: Synthetic oligonucleotide
aacauagguggagccagcc

SEQ ID NO: 1958962 - RNA, 19 nt, Artificial Sequence
  Description of Artificial Sequence: Synthetic oligonucleotide
ugagccucuaaauucuccc

SEQ ID NO: 1958963 - RNA, 19 nt, Artificial Sequence
  Description of Artificial Sequence: Synthetic oligonucleotide
ucucgaacuucauugaguc

SEQ ID NO: 1958964 - RNA, 19 nt, Artificial Sequence
  Description of Artificial Sequence: Synthetic oligonucleotide
aaguaccuguuggugaccc

SEQ ID NO: 1958965 - RNA, 19 nt, Artificial Sequence
  Description of Artificial Sequence: Synthetic oligonucleotide
aguagcuagaagccuguuc

SEQ ID NO: 1958966 - RNA, 19 nt, Artificial Sequence
  Description of Artificial Sequence: Synthetic oligonucleotide
ugguagaagaaguaccugu

SEQ ID NO: 1958967 - RNA, 19 nt, Artificial Sequence
  Description of Artificial Sequence: Synthetic oligonucleotide
ggagggaguagcuagaagc

SEQ ID NO: 1958968 - RNA, 19 nt, Artificial Sequence
  Description of Artificial Sequence: Synthetic oligonucleotide
guucuuaguccucucagcc

SEQ ID NO: 1958969 - RNA, 19 nt, Artificial Sequence
  Description of Artificial Sequence: Synthetic oligonucleotide
gguuacauuuccuugggcc

SEQ ID NO: 1958970 - RNA, 19 nt, Artificial Sequence
  Description of Artificial Sequence: Synthetic oligonucleotide
ucucguaaacccuccaggc

SEQ ID NO: 1958971 - RNA, 19 nt, Artificial Sequence
  Description of Artificial Sequence: Synthetic oligonucleotide
gguggagccagccacaccg

SEQ ID NO: 1958972 - RNA, 19 nt, Artificial Sequence
  Description of Artificial Sequence: Synthetic oligonucleotide
aauucucccgagccucucg

SEQ ID NO: 1958973 - RNA, 19 nt, Artificial Sequence
  Description of Artificial Sequence: Synthetic oligonucleotide
aaacccuccaggcaggaau

SEQ ID NO: 1958974 - RNA, 19 nt, Artificial Sequence
  Description of Artificial Sequence: Synthetic oligonucleotide
cuguaagucuuuuccaggc

SEQ ID NO: 1958975 - RNA, 19 nt, Artificial Sequence
  Description of Artificial Sequence: Synthetic oligonucleotide
uggagacucgguccaaacg

SEQ ID NO: 1958976 - RNA, 19 nt, Artificial Sequence
  Description of Artificial Sequence: Synthetic oligonucleotide
agauagaauuccuguugac

SEQ ID NO: 1958977 - RNA, 19 nt, Artificial Sequence
  Description of Artificial Sequence: Synthetic oligonucleotide
aggaguaaggccuucaguu

SEQ ID NO: 1958978 - RNA, 19 nt, Artificial Sequence
  Description of Artificial Sequence: Synthetic oligonucleotide
ucgguuacauuuccuuggg

SEQ ID NO: 1958979 - RNA, 19 nt, Artificial Sequence
  Description of Artificial Sequence: Synthetic oligonucleotide
uguaagucuuuuccaggcc

SEQ ID NO: 1958980 - RNA, 19 nt, Artificial Sequence
  Description of Artificial Sequence: Synthetic oligonucleotide
cuucugcacgcauauaggc

SEQ ID NO: 1958981 - RNA, 19 nt, Artificial Sequence
  Description of Artificial Sequence: Synthetic oligonucleotide
cuacgagccaccaugaaca

SEQ ID NO: 1958982 - RNA, 19 nt, Artificial Sequence
  Description of Artificial Sequence: Synthetic oligonucleotide
uccagcaaagagcugggca

SEQ ID NO: 1958983 - RNA, 19 nt, Artificial Sequence
  Description of Artificial Sequence: Synthetic oligonucleotide
cauugagucccacaaacuc

SEQ ID NO: 1958984 - RNA, 19 nt, Artificial Sequence
  Description of Artificial Sequence: Synthetic oligonucleotide
cauagguggagccagccac

SEQ ID NO: 1958985 - RNA, 19 nt, Artificial Sequence
  Description of Artificial Sequence: Synthetic oligonucleotide
aacagcauguagagcacgg

SEQ ID NO: 1958986 - RNA, 19 nt, Artificial Sequence
  Description of Artificial Sequence: Synthetic oligonucleotide
uguagauagaauuccuguu

SEQ ID NO: 1958987 - RNA, 19 nt, Artificial Sequence
  Description of Artificial Sequence: Synthetic oligonucleotide
gacagggccaagaucaugc

SEQ ID NO: 1958988 - RNA, 19 nt, Artificial Sequence
  Description of Artificial Sequence: Synthetic oligonucleotide
uguagccuuugcaagcuga

SEQ ID NO: 1958989 - RNA, 19 nt, Artificial Sequence
  Description of Artificial Sequence: Synthetic oligonucleotide
aacccagccauuuggcugu

SEQ ID NO: 1958990 - RNA, 19 nt, Artificial Sequence
  Description of Artificial Sequence: Synthetic oligonucleotide
gacacgguuaacauaggug

SEQ ID NO: 1958991 - RNA, 19 nt, Artificial Sequence
  Description of Artificial Sequence: Synthetic oligonucleotide
uaaaugucacacaggugac

SEQ ID NO: 1958992 - RNA, 19 nt, Artificial Sequence
  Description of Artificial Sequence: Synthetic oligonucleotide
ucucggacaaggcuacgag

SEQ ID NO: 1958993 - RNA, 19 nt, Artificial Sequence
  Description of Artificial Sequence: Synthetic oligonucleotide
uucagcuuagccugcugag

SEQ ID NO: 1958994 - RNA, 19 nt, Artificial Sequence
  Description of Artificial Sequence: Synthetic oligonucleotide
cuucucgugacucucccgc

SEQ ID NO: 1958995 - RNA, 19 nt, Artificial Sequence
  Description of Artificial Sequence: Synthetic oligonucleotide
aaggcuaacugguuuugaa

SEQ ID NO: 1958996 - RNA, 19 nt, Artificial Sequence
  Description of Artificial Sequence: Synthetic oligonucleotide
cauaucugucccaccaagc

SEQ ID NO: 1958997 - RNA, 19 nt, Artificial Sequence
  Description of Artificial Sequence: Synthetic oligonucleotide
uucuuguagccggacacgg

SEQ ID NO: 1958998 - RNA, 19 nt, Artificial Sequence
  Description of Artificial Sequence: Synthetic oligonucleotide
ucauugagucccacaaacu

SEQ ID NO: 1958999 - RNA, 19 nt, Artificial Sequence
  Description of Artificial Sequence: Synthetic oligonucleotide
guggccauaaaugucacac

SEQ ID NO: 1959000 - RNA, 19 nt, Artificial Sequence
  Description of Artificial Sequence: Synthetic oligonucleotide
gacucucccgcacagcugc

SEQ ID NO: 1959001 - RNA, 19 nt, Artificial Sequence
  Description of Artificial Sequence: Synthetic oligonucleotide
caugaacaccuuuucugcc

SEQ ID NO: 1959002 - RNA, 19 nt, Artificial Sequence
  Description of Artificial Sequence: Synthetic oligonucleotide
ucugcacgcauauaggcua

SEQ ID NO: 1959003 - RNA, 19 nt, Artificial Sequence
  Description of Artificial Sequence: Synthetic oligonucleotide
uucuuaguccucucagccc

SEQ ID NO: 1959004 - RNA, 19 nt, Artificial Sequence
  Description of Artificial Sequence: Synthetic oligonucleotide
ggccauaaaugucacacag

SEQ ID NO: 1959005 - RNA, 19 nt, Artificial Sequence
  Description of Artificial Sequence: Synthetic oligonucleotide
guagaagaaguaccuguug

SEQ ID NO: 1959006 - RNA, 19 nt, Artificial Sequence
  Description of Artificial Sequence: Synthetic oligonucleotide
cacgcauauaggcuacucg

SEQ ID NO: 1959007 - RNA, 19 nt, Artificial Sequence
  Description of Artificial Sequence: Synthetic oligonucleotide
gaaugcuguggcccaaugc

SEQ ID NO: 1959008 - RNA, 19 nt, Artificial Sequence
  Description of Artificial Sequence: Synthetic oligonucleotide
aucuaugucuuuuccucug

SEQ ID NO: 1959009 - RNA, 19 nt, Artificial Sequence
  Description of Artificial Sequence: Synthetic oligonucleotide
ugcugggaaugacugagcu

SEQ ID NO: 1959010 - RNA, 19 nt, Artificial Sequence
  Description of Artificial Sequence: Synthetic oligonucleotide
uccaaacgaucccucaccu

SEQ ID NO: 1959011 - RNA, 19 nt, Artificial Sequence
  Description of Artificial Sequence: Synthetic oligonucleotide
cauaaaugucacacaggug

SEQ ID NO: 1959012 - RNA, 19 nt, Artificial Sequence
  Description of Artificial Sequence: Synthetic oligonucleotide
gguuuugaacagcauguag

SEQ ID NO: 1959013 - RNA, 19 nt, Artificial Sequence
  Description of Artificial Sequence: Synthetic oligonucleotide
guaagucuuuuccaggcca

SEQ ID NO: 1959014 - RNA, 19 nt, Artificial Sequence
  Description of Artificial Sequence: Synthetic oligonucleotide
agccacaccgaucagcgcu

SEQ ID NO: 1959015 - RNA, 19 nt, Artificial Sequence
  Description of Artificial Sequence: Synthetic oligonucleotide
gagggaguagcuagaagcc

SEQ ID NO: 1959016 - RNA, 19 nt, Artificial Sequence
  Description of Artificial Sequence: Synthetic oligonucleotide
caggaauggaccugcuggg

SEQ ID NO: 1959017 - RNA, 19 nt, Artificial Sequence
  Description of Artificial Sequence: Synthetic oligonucleotide
gagagagaacuucucccgc

SEQ ID NO: 1959018 - RNA, 19 nt, Artificial Sequence
  Description of Artificial Sequence: Synthetic oligonucleotide
gauacagcccuaaggcugc

SEQ ID NO: 1959019 - RNA, 19 nt, Artificial Sequence
  Description of Artificial Sequence: Synthetic oligonucleotide
uguggcccaaugcucuucc

SEQ ID NO: 1959020 - RNA, 19 nt, Artificial Sequence
  Description of Artificial Sequence: Synthetic oligonucleotide
uugagucccacaaacucuu

SEQ ID NO: 1959021 - RNA, 19 nt, Artificial Sequence
  Description of Artificial Sequence: Synthetic oligonucleotide
cugcugagccucuaaauuc

SEQ ID NO: 1959022 - RNA, 19 nt, Artificial Sequence
  Description of Artificial Sequence: Synthetic oligonucleotide
ugucccaccaagccuuggc

SEQ ID NO: 1959023 - RNA, 19 nt, Artificial Sequence
  Description of Artificial Sequence: Synthetic oligonucleotide
auguagagcacgggcaacg

SEQ ID NO: 1959024 - RNA, 19 nt, Artificial Sequence
  Description of Artificial Sequence: Synthetic oligonucleotide
aauggaccugcugggaaug

SEQ ID NO: 1959025 - RNA, 19 nt, Artificial Sequence
  Description of Artificial Sequence: Synthetic oligonucleotide
ugugcgcuccuucucguga

SEQ ID NO: 1959026 - RNA, 19 nt, Artificial Sequence
  Description of Artificial Sequence: Synthetic oligonucleotide
guugcugaaugcuguggcc

SEQ ID NO: 1959027 - RNA, 19 nt, Artificial Sequence
  Description of Artificial Sequence: Synthetic oligonucleotide
guccaaacgaucccucacc

SEQ ID NO: 1959028 - RNA, 19 nt, Artificial Sequence
  Description of Artificial Sequence: Synthetic oligonucleotide
ugaacaccuuuucugccuc

SEQ ID NO: 1959029 - RNA, 19 nt, Artificial Sequence
  Description of Artificial Sequence: Synthetic oligonucleotide
gauagaauuccuguugacu

SEQ ID NO: 1959030 - RNA, 19 nt, Artificial Sequence
  Description of Artificial Sequence: Synthetic oligonucleotide
uucauaucugucccaccaa

SEQ ID NO: 1959031 - RNA, 19 nt, Artificial Sequence
  Description of Artificial Sequence: Synthetic oligonucleotide
uaagucuuuuccaggccau

SEQ ID NO: 1959032 - RNA, 19 nt, Artificial Sequence
  Description of Artificial Sequence: Synthetic oligonucleotide
gguuaacauagguggagcc

SEQ ID NO: 1959033 - RNA, 19 nt, Artificial Sequence
  Description of Artificial Sequence: Synthetic oligonucleotide
aguccucucagcccgugug

SEQ ID NO: 1959034 - RNA, 19 nt, Artificial Sequence
  Description of Artificial Sequence: Synthetic oligonucleotide
acgguuaacauagguggag

SEQ ID NO: 1959035 - RNA, 19 nt, Artificial Sequence
  Description of Artificial Sequence: Synthetic oligonucleotide
uggagggaguagcuagaag

SEQ ID NO: 1959036 - RNA, 19 nt, Artificial Sequence
  Description of Artificial Sequence: Synthetic oligonucleotide
cugagccucuaaauucucc

SEQ ID NO: 1959037 - RNA, 19 nt, Artificial Sequence
  Description of Artificial Sequence: Synthetic oligonucleotide
uacucggagccucuucucu

SEQ ID NO: 1959038 - RNA, 19 nt, Artificial Sequence
  Description of Artificial Sequence: Synthetic oligonucleotide
cucggacaaggcuacgagc

SEQ ID NO: 1959039 - RNA, 19 nt, Artificial Sequence
  Description of Artificial Sequence: Synthetic oligonucleotide
cuuguugcugaaugcugug

SEQ ID NO: 1959040 - RNA, 19 nt, Artificial Sequence
  Description of Artificial Sequence: Synthetic oligonucleotide
ccaugaacaccuuuucugc

SEQ ID NO: 1959041 - RNA, 19 nt, Artificial Sequence
  Description of Artificial Sequence: Synthetic oligonucleotide
auaggcuacucggagccuc

SEQ ID NO: 1959042 - RNA, 19 nt, Artificial Sequence
  Description of Artificial Sequence: Synthetic oligonucleotide
gugcuguagccuuugcaag

SEQ ID NO: 1959043 - RNA, 19 nt, Artificial Sequence
  Description of Artificial Sequence: Synthetic oligonucleotide
gcauauaggcuacucggag

SEQ ID NO: 1959044 - RNA, 19 nt, Artificial Sequence
  Description of Artificial Sequence: Synthetic oligonucleotide
ucuuucauggcagcugaaa

SEQ ID NO: 1959045 - RNA, 19 nt, Artificial Sequence
  Description of Artificial Sequence: Synthetic oligonucleotide
uaacauagguggagccagc

SEQ ID NO: 1959046 - RNA, 19 nt, Artificial Sequence
  Description of Artificial Sequence: Synthetic oligonucleotide
aagucuuuuccaggccauc

SEQ ID NO: 1959047 - RNA, 19 nt, Artificial Sequence
  Description of Artificial Sequence: Synthetic oligonucleotide
ugcucuuucauggcagcug

SEQ ID NO: 1959048 - RNA, 19 nt, Artificial Sequence
  Description of Artificial Sequence: Synthetic oligonucleotide
ggagacucgguccaaacga

SEQ ID NO: 1959049 - RNA, 19 nt, Artificial Sequence
  Description of Artificial Sequence: Synthetic oligonucleotide
gcuaacugguuuugaacag

SEQ ID NO: 1959050 - RNA, 19 nt, Artificial Sequence
  Description of Artificial Sequence: Synthetic oligonucleotide
ggcaacguggccauaaaug

SEQ ID NO: 1959051 - RNA, 19 nt, Artificial Sequence
  Description of Artificial Sequence: Synthetic oligonucleotide
guuaacauagguggagcca

SEQ ID NO: 1959052 - RNA, 19 nt, Artificial Sequence
  Description of Artificial Sequence: Synthetic oligonucleotide
gugcuguagauagaauucc

SEQ ID NO: 1959053 - RNA, 19 nt, Artificial Sequence
  Description of Artificial Sequence: Synthetic oligonucleotide
accaacccagccauuuggc

SEQ ID NO: 1959054 - RNA, 19 nt, Artificial Sequence
  Description of Artificial Sequence: Synthetic oligonucleotide
guuacauuuccuugggccu

SEQ ID NO: 1959055 - RNA, 19 nt, Artificial Sequence
  Description of Artificial Sequence: Synthetic oligonucleotide
cucgaacuucauugagucc

SEQ ID NO: 1959056 - RNA, 19 nt, Artificial Sequence
  Description of Artificial Sequence: Synthetic oligonucleotide
uggccauaaaugucacaca

SEQ ID NO: 1959057 - RNA, 19 nt, Artificial Sequence
  Description of Artificial Sequence: Synthetic oligonucleotide
uguagccggacacgguuaa

SEQ ID NO: 1959058 - RNA, 19 nt, Artificial Sequence
  Description of Artificial Sequence: Synthetic oligonucleotide
ugaccagugugcuguagau

SEQ ID NO: 1959059 - RNA, 19 nt, Artificial Sequence
  Description of Artificial Sequence: Synthetic oligonucleotide
uccuugggccucucgaacu

SEQ ID NO: 1959060 - RNA, 19 nt, Artificial Sequence
  Description of Artificial Sequence: Synthetic oligonucleotide
ucgugacucucccgcacag

SEQ ID NO: 1959061 - RNA, 19 nt, Artificial Sequence
  Description of Artificial Sequence: Synthetic oligonucleotide
aaugccgggaggcggugau

SEQ ID NO: 1959062 - RNA, 19 nt, Artificial Sequence
  Description of Artificial Sequence: Synthetic oligonucleotide
uccucucagcccgugugcg

SEQ ID NO: 1959063 - RNA, 19 nt, Artificial Sequence
  Description of Artificial Sequence: Synthetic oligonucleotide
agcauguagagcacgggca

SEQ ID NO: 1959064 - RNA, 19 nt, Artificial Sequence
  Description of Artificial Sequence: Synthetic oligonucleotide
uagccggacacgguuaaca

SEQ ID NO: 1959065 - RNA, 19 nt, Artificial Sequence
  Description of Artificial Sequence: Synthetic oligonucleotide
gagucccacaaacucuuca

SEQ ID NO: 1959066 - RNA, 19 nt, Artificial Sequence
  Description of Artificial Sequence: Synthetic oligonucleotide
uuacauuuccuugggccuc

SEQ ID NO: 1959067 - RNA, 19 nt, Artificial Sequence
  Description of Artificial Sequence: Synthetic oligonucleotide
acggauggccuccuggaga

SEQ ID NO: 1959068 - RNA, 19 nt, Artificial Sequence
  Description of Artificial Sequence: Synthetic oligonucleotide
cucaccuccuucagcuuag

SEQ ID NO: 1959069 - RNA, 19 nt, Artificial Sequence
  Description of Artificial Sequence: Synthetic oligonucleotide
gagagaacuucucccgcuc

SEQ ID NO: 1959070 - RNA, 19 nt, Artificial Sequence
  Description of Artificial Sequence: Synthetic oligonucleotide
ucucgugacucucccgcac

SEQ ID NO: 1959071 - RNA, 19 nt, Artificial Sequence
  Description of Artificial Sequence: Synthetic oligonucleotide
caacguggccauaaauguc

SEQ ID NO: 1959072 - RNA, 19 nt, Artificial Sequence
  Description of Artificial Sequence: Synthetic oligonucleotide
acagcauguagagcacggg

SEQ ID NO: 1959073 - RNA, 19 nt, Artificial Sequence
  Description of Artificial Sequence: Synthetic oligonucleotide
ucgcuuguugcugaaugcu

SEQ ID NO: 1959074 - RNA, 19 nt, Artificial Sequence
  Description of Artificial Sequence: Synthetic oligonucleotide
ucuuguagccggacacggu

SEQ ID NO: 1959075 - RNA, 19 nt, Artificial Sequence
  Description of Artificial Sequence: Synthetic oligonucleotide
ggucgcuuguugcugaaug

SEQ ID NO: 1959076 - RNA, 19 nt, Artificial Sequence
  Description of Artificial Sequence: Synthetic oligonucleotide
uccaggcaggaauggaccu

SEQ ID NO: 1959077 - RNA, 19 nt, Artificial Sequence
  Description of Artificial Sequence: Synthetic oligonucleotide
uccugugcuccagaguagc

SEQ ID NO: 1959078 - RNA, 19 nt, Artificial Sequence
  Description of Artificial Sequence: Synthetic oligonucleotide
aaugacugagcugcucuuu

SEQ ID NO: 1959079 - RNA, 19 nt, Artificial Sequence
  Description of Artificial Sequence: Synthetic oligonucleotide
gcaagcugaaccaacccag

SEQ ID NO: 1959080 - RNA, 19 nt, Artificial Sequence
  Description of Artificial Sequence: Synthetic oligonucleotide
agcugaaagggcaucuaug

SEQ ID NO: 1959081 - RNA, 19 nt, Artificial Sequence
  Description of Artificial Sequence: Synthetic oligonucleotide
caagccgcucucguaaacc

SEQ ID NO: 1959082 - RNA, 19 nt, Artificial Sequence
  Description of Artificial Sequence: Synthetic oligonucleotide
uccgagaacugagccaaug

SEQ ID NO: 1959083 - RNA, 19 nt, Artificial Sequence
  Description of Artificial Sequence: Synthetic oligonucleotide
cugaaagggcaucuauguc

SEQ ID NO: 1959084 - RNA, 19 nt, Artificial Sequence
  Description of Artificial Sequence: Synthetic oligonucleotide
guacugguuguccucccug

SEQ ID NO: 1959085 - RNA, 19 nt, Artificial Sequence
  Description of Artificial Sequence: Synthetic oligonucleotide
cugguuguccucccuggag

SEQ ID NO: 1959086 - RNA, 19 nt, Artificial Sequence
  Description of Artificial Sequence: Synthetic oligonucleotide
ucuagccucugcuccacau

SEQ ID NO: 1959087 - RNA, 19 nt, Artificial Sequence
  Description of Artificial Sequence: Synthetic oligonucleotide
acauagguggagccagcca

SEQ ID NO: 1959088 - RNA, 19 nt, Artificial Sequence
  Description of Artificial Sequence: Synthetic oligonucleotide
uuguccucccuggagacuc

SEQ ID NO: 1959089 - RNA, 19 nt, Artificial Sequence
  Description of Artificial Sequence: Synthetic oligonucleotide
ucaagccgcucucguaaac

SEQ ID NO: 1959090 - RNA, 19 nt, Artificial Sequence
  Description of Artificial Sequence: Synthetic oligonucleotide
cagcccuaaggcugcagcc

SEQ ID NO: 1959091 - RNA, 19 nt, Artificial Sequence
  Description of Artificial Sequence: Synthetic oligonucleotide
agacucacgggcccuuucu

SEQ ID NO: 1959092 - RNA, 19 nt, Artificial Sequence
  Description of Artificial Sequence: Synthetic oligonucleotide
agagcacgggcaacguggc

SEQ ID NO: 1959093 - RNA, 19 nt, Artificial Sequence
  Description of Artificial Sequence: Synthetic oligonucleotide
aggccaucaagccgcucuc

SEQ ID NO: 1959094 - RNA, 19 nt, Artificial Sequence
  Description of Artificial Sequence: Synthetic oligonucleotide
gcuacgagccaccaugaac

SEQ ID NO: 1959095 - RNA, 19 nt, Artificial Sequence
  Description of Artificial Sequence: Synthetic oligonucleotide
ucucccgcacagcugcaga

SEQ ID NO: 1959096 - RNA, 19 nt, Artificial Sequence
  Description of Artificial Sequence: Synthetic oligonucleotide
caucaagccgcucucguaa

SEQ ID NO: 1959097 - RNA, 19 nt, Artificial Sequence
  Description of Artificial Sequence: Synthetic oligonucleotide
agcgcuccgagaacugagc

SEQ ID NO: 1959098 - RNA, 19 nt, Artificial Sequence
  Description of Artificial Sequence: Synthetic oligonucleotide
gagaagagagagaacuucu

SEQ ID NO: 1959099 - RNA, 19 nt, Artificial Sequence
  Description of Artificial Sequence: Synthetic oligonucleotide
agauccaccaugagguccu

SEQ ID NO: 1959100 - RNA, 19 nt, Artificial Sequence
  Description of Artificial Sequence: Synthetic oligonucleotide
acgagccaccaugaacacc

SEQ ID NO: 1959101 - RNA, 19 nt, Artificial Sequence
  Description of Artificial Sequence: Synthetic oligonucleotide
uguccucccuggagacucg

SEQ ID NO: 1959102 - RNA, 19 nt, Artificial Sequence
  Description of Artificial Sequence: Synthetic oligonucleotide
cuggagacucgguccaaac

SEQ ID NO: 1959103 - RNA, 19 nt, Artificial Sequence
  Description of Artificial Sequence: Synthetic oligonucleotide
gaacugagccaaugaggga

SEQ ID NO: 1959104 - RNA, 19 nt, Artificial Sequence
  Description of Artificial Sequence: Synthetic oligonucleotide
gacaaggcuacgagccacc

SEQ ID NO: 1959105 - RNA, 19 nt, Artificial Sequence
  Description of Artificial Sequence: Synthetic oligonucleotide
guagagcacgggcaacgug

SEQ ID NO: 1959106 - RNA, 19 nt, Artificial Sequence
  Description of Artificial Sequence: Synthetic oligonucleotide
ggaguaaggccuucaguuc

SEQ ID NO: 1959107 - RNA, 19 nt, Artificial Sequence
  Description of Artificial Sequence: Synthetic oligonucleotide
uggaggucgcuuguugcug

SEQ ID NO: 1959108 - RNA, 19 nt, Artificial Sequence
  Description of Artificial Sequence: Synthetic oligonucleotide
uuguagccggacacgguua

SEQ ID NO: 1959109 - RNA, 19 nt, Artificial Sequence
  Description of Artificial Sequence: Synthetic oligonucleotide
uucucgugacucucccgca

SEQ ID NO: 1959110 - RNA, 19 nt, Artificial Sequence
  Description of Artificial Sequence: Synthetic oligonucleotide
aaacgaucccucaccuccu

SEQ ID NO: 1959111 - RNA, 19 nt, Artificial Sequence
  Description of Artificial Sequence: Synthetic oligonucleotide
acgaucccucaccuccuuc

SEQ ID NO: 1959112 - RNA, 19 nt, Artificial Sequence
  Description of Artificial Sequence: Synthetic oligonucleotide
uguagagcacgggcaacgu

SEQ ID NO: 1959113 - RNA, 19 nt, Artificial Sequence
  Description of Artificial Sequence: Synthetic oligonucleotide
gugugcuguagauagaauu

SEQ ID NO: 1959114 - RNA, 19 nt, Artificial Sequence
  Description of Artificial Sequence: Synthetic oligonucleotide
cucguaaacccuccaggca

SEQ ID NO: 1959115 - RNA, 19 nt, Artificial Sequence
  Description of Artificial Sequence: Synthetic oligonucleotide
gcuguagauagaauuccug

SEQ ID NO: 1959116 - RNA, 19 nt, Artificial Sequence
  Description of Artificial Sequence: Synthetic oligonucleotide
cuguggaggucgcuuguug

SEQ ID NO: 1959117 - RNA, 19 nt, Artificial Sequence
  Description of Artificial Sequence: Synthetic oligonucleotide
ccauaaaugucacacaggu

SEQ ID NO: 1959118 - RNA, 19 nt, Artificial Sequence
  Description of Artificial Sequence: Synthetic oligonucleotide
uacgagccaccaugaacac

SEQ ID NO: 1959119 - RNA, 19 nt, Artificial Sequence
  Description of Artificial Sequence: Synthetic oligonucleotide
gcugaaagggcaucuaugu

SEQ ID NO: 1959120 - RNA, 19 nt, Artificial Sequence
  Description of Artificial Sequence: Synthetic oligonucleotide
gccucuaaauucucccgag

SEQ ID NO: 1959121 - RNA, 19 nt, Artificial Sequence
  Description of Artificial Sequence: Synthetic oligonucleotide
acugguuguccucccugga

SEQ ID NO: 1959122 - RNA, 19 nt, Artificial Sequence
  Description of Artificial Sequence: Synthetic oligonucleotide
agacucgguccaaacgauc

SEQ ID NO: 1959123 - RNA, 19 nt, Artificial Sequence
  Description of Artificial Sequence: Synthetic oligonucleotide
ugguuuugaacagcaugua

SEQ ID NO: 1959124 - RNA, 19 nt, Artificial Sequence
  Description of Artificial Sequence: Synthetic oligonucleotide
ucgguccaaacgaucccuc

SEQ ID NO: 1959125 - RNA, 19 nt, Artificial Sequence
  Description of Artificial Sequence: Synthetic oligonucleotide
cugccucgguuacauuucc

SEQ ID NO: 1959126 - RNA, 19 nt, Artificial Sequence
  Description of Artificial Sequence: Synthetic oligonucleotide
cucaggccccucugaagag

SEQ ID NO: 1959127 - RNA, 19 nt, Artificial Sequence
  Description of Artificial Sequence: Synthetic oligonucleotide
gggaguagcuagaagccug

SEQ ID NO: 1959128 - RNA, 19 nt, Artificial Sequence
  Description of Artificial Sequence: Synthetic oligonucleotide
gguccaaacgaucccucac

SEQ ID NO: 1959129 - RNA, 19 nt, Artificial Sequence
  Description of Artificial Sequence: Synthetic oligonucleotide
ucucucugcuggagggagu

SEQ ID NO: 1959130 - RNA, 19 nt, Artificial Sequence
  Description of Artificial Sequence: Synthetic oligonucleotide
cugcacgcauauaggcuac

SEQ ID NO: 1959131 - RNA, 19 nt, Artificial Sequence
  Description of Artificial Sequence: Synthetic oligonucleotide
agggaguagcuagaagccu

SEQ ID NO: 1959132 - RNA, 19 nt, Artificial Sequence
  Description of Artificial Sequence: Synthetic oligonucleotide
cacgguuaacauaggugga

SEQ ID NO: 1959133 - RNA, 19 nt, Artificial Sequence
  Description of Artificial Sequence: Synthetic oligonucleotide
ccaaugcucuucccaaugc

SEQ ID NO: 1959134 - RNA, 19 nt, Artificial Sequence
  Description of Artificial Sequence: Synthetic oligonucleotide
caccgaucagcgcuccgag

SEQ ID NO: 1959135 - RNA, 19 nt, Artificial Sequence
  Description of Artificial Sequence: Synthetic oligonucleotide
agccggacacgguuaacau

SEQ ID NO: 1959136 - RNA, 19 nt, Artificial Sequence
  Description of Artificial Sequence: Synthetic oligonucleotide
acaccgaucagcgcuccga

SEQ ID NO: 1959137 - RNA, 19 nt, Artificial Sequence
  Description of Artificial Sequence: Synthetic oligonucleotide
ugccucgguuacauuuccu

SEQ ID NO: 1959138 - RNA, 19 nt, Artificial Sequence
  Description of Artificial Sequence: Synthetic oligonucleotide
uagccuuugcaagcugaac

SEQ ID NO: 1959139 - RNA, 19 nt, Artificial Sequence
  Description of Artificial Sequence: Synthetic oligonucleotide
aacgaucccucaccuccuu

SEQ ID NO: 1959140 - RNA, 19 nt, Artificial Sequence
  Description of Artificial Sequence: Synthetic oligonucleotide
cauguagagcacgggcaac

SEQ ID NO: 1959141 - RNA, 19 nt, Artificial Sequence
  Description of Artificial Sequence: Synthetic oligonucleotide
cucucgaacuucauugagu

SEQ ID NO: 1959142 - RNA, 19 nt, Artificial Sequence
  Description of Artificial Sequence: Synthetic oligonucleotide
cacgggcccuuucugugcc

SEQ ID NO: 1959143 - RNA, 19 nt, Artificial Sequence
  Description of Artificial Sequence: Synthetic oligonucleotide
cacggauggccuccuggag

SEQ ID NO: 1959144 - RNA, 19 nt, Artificial Sequence
  Description of Artificial Sequence: Synthetic oligonucleotide
uucuagccucugcuccaca

SEQ ID NO: 1959145 - RNA, 19 nt, Artificial Sequence
  Description of Artificial Sequence: Synthetic oligonucleotide
gcucuuucauggcagcuga

SEQ ID NO: 1959146 - RNA, 19 nt, Artificial Sequence
  Description of Artificial Sequence: Synthetic oligonucleotide
aucaagccgcucucguaaa

SEQ ID NO: 1959147 - RNA, 19 nt, Artificial Sequence
  Description of Artificial Sequence: Synthetic oligonucleotide
ccucgguuacauuuccuug

SEQ ID NO: 1959148 - RNA, 19 nt, Artificial Sequence
  Description of Artificial Sequence: Synthetic oligonucleotide
ccagccauuuggcuguaag

SEQ ID NO: 1959149 - RNA, 19 nt, Artificial Sequence
  Description of Artificial Sequence: Synthetic oligonucleotide
aacugguuuugaacagcau

SEQ ID NO: 1959150 - RNA, 19 nt, Artificial Sequence
  Description of Artificial Sequence: Synthetic oligonucleotide
acguggccauaaaugucac

SEQ ID NO: 1959151 - RNA, 19 nt, Artificial Sequence
  Description of Artificial Sequence: Synthetic oligonucleotide
uucucccgagccucucgga

SEQ ID NO: 1959152 - RNA, 19 nt, Artificial Sequence
  Description of Artificial Sequence: Synthetic oligonucleotide
ccaagaucaugcucccuug

SEQ ID NO: 1959153 - RNA, 19 nt, Artificial Sequence
  Description of Artificial Sequence: Synthetic oligonucleotide
caucuaugucuuuuccucu

SEQ ID NO: 1959154 - RNA, 19 nt, Artificial Sequence
  Description of Artificial Sequence: Synthetic oligonucleotide
aggaauggaccugcuggga

SEQ ID NO: 1959155 - RNA, 19 nt, Artificial Sequence
  Description of Artificial Sequence: Synthetic oligonucleotide
uggagccagccacaccgau

SEQ ID NO: 1959156 - RNA, 19 nt, Artificial Sequence
  Description of Artificial Sequence: Synthetic oligonucleotide
gaucagcgcuccgagaacu

SEQ ID NO: 1959157 - RNA, 19 nt, Artificial Sequence
  Description of Artificial Sequence: Synthetic oligonucleotide
gagacucacgggcccuuuc

SEQ ID NO: 1959158 - RNA, 19 nt, Artificial Sequence
  Description of Artificial Sequence: Synthetic oligonucleotide
guaaggccuucaguucuug

SEQ ID NO: 1959159 - RNA, 19 nt, Artificial Sequence
  Description of Artificial Sequence: Synthetic oligonucleotide
uagccugcugagccucuaa

SEQ ID NO: 1959160 - RNA, 19 nt, Artificial Sequence
  Description of Artificial Sequence: Synthetic oligonucleotide
gaacuucauugagucccac

SEQ ID NO: 1959161 - RNA, 19 nt, Artificial Sequence
  Description of Artificial Sequence: Synthetic oligonucleotide
ucccgcacagcugcagaga

SEQ ID NO: 1959162 - RNA, 19 nt, Artificial Sequence
  Description of Artificial Sequence: Synthetic oligonucleotide
ccucugguagaagaaguac

SEQ ID NO: 1959163 - RNA, 19 nt, Artificial Sequence
  Description of Artificial Sequence: Synthetic oligonucleotide
agagucuucugcacgcaua

SEQ ID NO: 1959164 - RNA, 19 nt, Artificial Sequence
  Description of Artificial Sequence: Synthetic oligonucleotide
accaagccuuggcugugga

SEQ ID NO: 1959165 - RNA, 19 nt, Artificial Sequence
  Description of Artificial Sequence: Synthetic oligonucleotide
accgaucagcgcuccgaga

SEQ ID NO: 1959166 - RNA, 19 nt, Artificial Sequence
  Description of Artificial Sequence: Synthetic oligonucleotide
cuguagccuuugcaagcug

SEQ ID NO: 1959167 - RNA, 19 nt, Artificial Sequence
  Description of Artificial Sequence: Synthetic oligonucleotide
acaaggcuacgagccacca

SEQ ID NO: 1959168 - RNA, 19 nt, Artificial Sequence
  Description of Artificial Sequence: Synthetic oligonucleotide
ccucugcuccacaucagac

SEQ ID NO: 1959169 - RNA, 19 nt, Artificial Sequence
  Description of Artificial Sequence: Synthetic oligonucleotide
caggccaucaagccgcucu

SEQ ID NO: 1959170 - RNA, 19 nt, Artificial Sequence
  Description of Artificial Sequence: Synthetic oligonucleotide
cguaaacccuccaggcagg

SEQ ID NO: 1959171 - RNA, 19 nt, Artificial Sequence
  Description of Artificial Sequence: Synthetic oligonucleotide
ccuguuggugacccagagc

SEQ ID NO: 1959172 - RNA, 19 nt, Artificial Sequence
  Description of Artificial Sequence: Synthetic oligonucleotide
gagcacgggcaacguggcc

SEQ ID NO: 1959173 - RNA, 19 nt, Artificial Sequence
  Description of Artificial Sequence: Synthetic oligonucleotide
cugugccuccaggaguaag

SEQ ID NO: 1959174 - RNA, 19 nt, Artificial Sequence
  Description of Artificial Sequence: Synthetic oligonucleotide
cacaccgaucagcgcuccg

SEQ ID NO: 1959175 - RNA, 19 nt, Artificial Sequence
  Description of Artificial Sequence: Synthetic oligonucleotide
uaaacccuccaggcaggaa

SEQ ID NO: 1959176 - RNA, 19 nt, Artificial Sequence
  Description of Artificial Sequence: Synthetic oligonucleotide
ggacaaggcuacgagccac

SEQ ID NO: 1959177 - RNA, 19 nt, Artificial Sequence
  Description of Artificial Sequence: Synthetic oligonucleotide
caccaagccuuggcugugg

SEQ ID NO: 1959178 - RNA, 19 nt, Artificial Sequence
  Description of Artificial Sequence: Synthetic oligonucleotide
cucgugacucucccgcaca

SEQ ID NO: 1959179 - RNA, 19 nt, Artificial Sequence
  Description of Artificial Sequence: Synthetic oligonucleotide
ccgugugcgcuccuucucg

SEQ ID NO: 1959180 - RNA, 19 nt, Artificial Sequence
  Description of Artificial Sequence: Synthetic oligonucleotide
guagccuuugcaagcugaa

SEQ ID NO: 1959181 - RNA, 19 nt, Artificial Sequence
  Description of Artificial Sequence: Synthetic oligonucleotide
guggaggucgcuuguugcu

SEQ ID NO: 1959182 - RNA, 19 nt, Artificial Sequence
  Description of Artificial Sequence: Synthetic oligonucleotide
gcuccgagaacugagccaa

SEQ ID NO: 1959183 - RNA, 19 nt, Artificial Sequence
  Description of Artificial Sequence: Synthetic oligonucleotide
agugugcuguagauagaau

SEQ ID NO: 1959184 - RNA, 19 nt, Artificial Sequence
  Description of Artificial Sequence: Synthetic oligonucleotide
gccccucagauccaccaug

SEQ ID NO: 1959185 - RNA, 19 nt, Artificial Sequence
  Description of Artificial Sequence: Synthetic oligonucleotide
ugcacgcauauaggcuacu

SEQ ID NO: 1959186 - RNA, 19 nt, Artificial Sequence
  Description of Artificial Sequence: Synthetic oligonucleotide
gcgcuccgagaacugagcc

SEQ ID NO: 1959187 - RNA, 19 nt, Artificial Sequence
  Description of Artificial Sequence: Synthetic oligonucleotide
caaggcuaacugguuuuga

SEQ ID NO: 1959188 - RNA, 19 nt, Artificial Sequence
  Description of Artificial Sequence: Synthetic oligonucleotide
ggaggucgcuuguugcuga

SEQ ID NO: 1959189 - RNA, 19 nt, Artificial Sequence
  Description of Artificial Sequence: Synthetic oligonucleotide
cagccauuuggcuguaagu

SEQ ID NO: 1959190 - RNA, 19 nt, Artificial Sequence
  Description of Artificial Sequence: Synthetic oligonucleotide
guggcccaaugcucuuccc

SEQ ID NO: 1959191 - RNA, 19 nt, Artificial Sequence
  Description of Artificial Sequence: Synthetic oligonucleotide
aucagcgcuccgagaacug

SEQ ID NO: 1959192 - RNA, 19 nt, Artificial Sequence
  Description of Artificial Sequence: Synthetic oligonucleotide
aguaaggccuucaguucuu

SEQ ID NO: 1959193 - RNA, 19 nt, Artificial Sequence
  Description of Artificial Sequence: Synthetic oligonucleotide
cagccacaccgaucagcgc

SEQ ID NO: 1959194 - RNA, 19 nt, Artificial Sequence
  Description of Artificial Sequence: Synthetic oligonucleotide
cacaucagacagggccaag

SEQ ID NO: 1959195 - RNA, 19 nt, Artificial Sequence
  Description of Artificial Sequence: Synthetic oligonucleotide
ggacacgguuaacauaggu

SEQ ID NO: 1959196 - RNA, 19 nt, Artificial Sequence
  Description of Artificial Sequence: Synthetic oligonucleotide
gcggugauacagcccuaag

SEQ ID NO: 1959197 - RNA, 19 nt, Artificial Sequence
  Description of Artificial Sequence: Synthetic oligonucleotide
cucucccgcacagcugcag

SEQ ID NO: 1959198 - RNA, 19 nt, Artificial Sequence
  Description of Artificial Sequence: Synthetic oligonucleotide
cucagcccgugugcgcucc

SEQ ID NO: 1959199 - RNA, 19 nt, Artificial Sequence
  Description of Artificial Sequence: Synthetic oligonucleotide
caagaucaugcucccuugu

SEQ ID NO: 1959200 - RNA, 19 nt, Artificial Sequence
  Description of Artificial Sequence: Synthetic oligonucleotide
uuagccugcugagccucua

SEQ ID NO: 1959201 - RNA, 19 nt, Artificial Sequence
  Description of Artificial Sequence: Synthetic oligonucleotide
uucucccgcucagagucuu

SEQ ID NO: 1959202 - RNA, 19 nt, Artificial Sequence
  Description of Artificial Sequence: Synthetic oligonucleotide
gaggucgcuuguugcugaa

SEQ ID NO: 1959203 - RNA, 19 nt, Artificial Sequence
  Description of Artificial Sequence: Synthetic oligonucleotide
ccgaucagcgcuccgagaa

SEQ ID NO: 1959204 - RNA, 19 nt, Artificial Sequence
  Description of Artificial Sequence: Synthetic oligonucleotide
cgguuaacauagguggagc

SEQ ID NO: 1959205 - RNA, 19 nt, Artificial Sequence
  Description of Artificial Sequence: Synthetic oligonucleotide
ccucccuggagacucgguc

SEQ ID NO: 1959206 - RNA, 19 nt, Artificial Sequence
  Description of Artificial Sequence: Synthetic oligonucleotide
ccaaacgaucccucaccuc

SEQ ID NO: 1959207 - RNA, 19 nt, Artificial Sequence
  Description of Artificial Sequence: Synthetic oligonucleotide
ggugaccagugugcuguag

SEQ ID NO: 1959208 - RNA, 19 nt, Artificial Sequence
  Description of Artificial Sequence: Synthetic oligonucleotide
gguagaagaaguaccuguu

SEQ ID NO: 1959209 - RNA, 19 nt, Artificial Sequence
  Description of Artificial Sequence: Synthetic oligonucleotide
gagacucgguccaaacgau

SEQ ID NO: 1959210 - RNA, 19 nt, Artificial Sequence
  Description of Artificial Sequence: Synthetic oligonucleotide
agccgcucucguaaacccu

SEQ ID NO: 1959211 - RNA, 19 nt, Artificial Sequence
  Description of Artificial Sequence: Synthetic oligonucleotide
ccgagccucucggacaagg

SEQ ID NO: 1959212 - RNA, 19 nt, Artificial Sequence
  Description of Artificial Sequence: Synthetic oligonucleotide
cuggagggaguagcuagaa

SEQ ID NO: 1959213 - RNA, 19 nt, Artificial Sequence
  Description of Artificial Sequence: Synthetic oligonucleotide
guagccggacacgguuaac

SEQ ID NO: 1959214 - RNA, 19 nt, Artificial Sequence
  Description of Artificial Sequence: Synthetic oligonucleotide
gggaaugacugagcugcuc

SEQ ID NO: 1959215 - RNA, 19 nt, Artificial Sequence
  Description of Artificial Sequence: Synthetic oligonucleotide
cgcauauaggcuacucgga

SEQ ID NO: 1959216 - RNA, 19 nt, Artificial Sequence
  Description of Artificial Sequence: Synthetic oligonucleotide
gccgcucucguaaacccuc

SEQ ID NO: 1959217 - RNA, 19 nt, Artificial Sequence
  Description of Artificial Sequence: Synthetic oligonucleotide
cugagccaaugagggacca

SEQ ID NO: 1959218 - RNA, 19 nt, Artificial Sequence
  Description of Artificial Sequence: Synthetic oligonucleotide
ccucucagcccgugugcgc

SEQ ID NO: 1959219 - RNA, 19 nt, Artificial Sequence
  Description of Artificial Sequence: Synthetic oligonucleotide
cgagccucucggacaaggc

SEQ ID NO: 1959220 - RNA, 19 nt, Artificial Sequence
  Description of Artificial Sequence: Synthetic oligonucleotide
gcccugcccagcaugcacc

SEQ ID NO: 1959221 - RNA, 19 nt, Artificial Sequence
  Description of Artificial Sequence: Synthetic oligonucleotide
agcaugcaccaggccccuc

SEQ ID NO: 1959222 - RNA, 19 nt, Artificial Sequence
  Description of Artificial Sequence: Synthetic oligonucleotide
auacagcccuaaggcugca

SEQ ID NO: 1959223 - RNA, 19 nt, Artificial Sequence
  Description of Artificial Sequence: Synthetic oligonucleotide
ccgcucucguaaacccucc

SEQ ID NO: 1959224 - RNA, 19 nt, Artificial Sequence
  Description of Artificial Sequence: Synthetic oligonucleotide
gcuggagggaguagcuaga

SEQ ID NO: 1959225 - RNA, 19 nt, Artificial Sequence
  Description of Artificial Sequence: Synthetic oligonucleotide
cauuuggcuguaagucuuu

SEQ ID NO: 1959226 - RNA, 19 nt, Artificial Sequence
  Description of Artificial Sequence: Synthetic oligonucleotide
gccucucggacaaggcuac

SEQ ID NO: 1959227 - RNA, 19 nt, Artificial Sequence
  Description of Artificial Sequence: Synthetic oligonucleotide
ccccucagauccaccauga

SEQ ID NO: 1959228 - RNA, 19 nt, Artificial Sequence
  Description of Artificial Sequence: Synthetic oligonucleotide
gcacgcauauaggcuacuc

SEQ ID NO: 1959229 - RNA, 19 nt, Artificial Sequence
  Description of Artificial Sequence: Synthetic oligonucleotide
cucucagcccgugugcgcu

SEQ ID NO: 1959230 - RNA, 19 nt, Artificial Sequence
  Description of Artificial Sequence: Synthetic oligonucleotide
cagcauccugugcuccaga

SEQ ID NO: 1959231 - RNA, 19 nt, Artificial Sequence
  Description of Artificial Sequence: Synthetic oligonucleotide
gggcccuuucugugccucc

SEQ ID NO: 1959232 - RNA, 19 nt, Artificial Sequence
  Description of Artificial Sequence: Synthetic oligonucleotide
cgguuacauuuccuugggc

SEQ ID NO: 1959233 - RNA, 19 nt, Artificial Sequence
  Description of Artificial Sequence: Synthetic oligonucleotide
aggucgcuuguugcugaau

SEQ ID NO: 1959234 - RNA, 19 nt, Artificial Sequence
  Description of Artificial Sequence: Synthetic oligonucleotide
cuuagccugcugagccucu

SEQ ID NO: 1959235 - RNA, 19 nt, Artificial Sequence
  Description of Artificial Sequence: Synthetic oligonucleotide
ccuaaggcugcagccucug

SEQ ID NO: 1959236 - RNA, 19 nt, Artificial Sequence
  Description of Artificial Sequence: Synthetic oligonucleotide
cgggaggcggugauacagc

SEQ ID NO: 1959237 - RNA, 19 nt, Artificial Sequence
  Description of Artificial Sequence: Synthetic oligonucleotide
ccauuuggcuguaagucuu

SEQ ID NO: 1959238 - RNA, 19 nt, Artificial Sequence
  Description of Artificial Sequence: Synthetic oligonucleotide
gcugagccucuaaauucuc

SEQ ID NO: 1959239 - RNA, 19 nt, Artificial Sequence
  Description of Artificial Sequence: Synthetic oligonucleotide
gcucuucccaaugccggga

SEQ ID NO: 1959240 - RNA, 19 nt, Artificial Sequence
  Description of Artificial Sequence: Synthetic oligonucleotide
gccggacacgguuaacaua

SEQ ID NO: 1959241 - RNA, 19 nt, Artificial Sequence
  Description of Artificial Sequence: Synthetic oligonucleotide
gccucgguuacauuuccuu

SEQ ID NO: 1959242 - RNA, 19 nt, Artificial Sequence
  Description of Artificial Sequence: Synthetic oligonucleotide
cgaacuucauugaguccca

SEQ ID NO: 1959243 - RNA, 19 nt, Artificial Sequence
  Description of Artificial Sequence: Synthetic oligonucleotide
guggagccagccacaccga

SEQ ID NO: 1959244 - RNA, 19 nt, Artificial Sequence
  Description of Artificial Sequence: Synthetic oligonucleotide
ggcggugauacagcccuaa

SEQ ID NO: 1959245 - RNA, 19 nt, Artificial Sequence
  Description of Artificial Sequence: Synthetic oligonucleotide
gccccucugaagaggcccc

SEQ ID NO: 1959246 - RNA, 19 nt, Artificial Sequence
  Description of Artificial Sequence: Synthetic oligonucleotide
ccucaccuccuucagcuua

SEQ ID NO: 1959247 - RNA, 19 nt, Artificial Sequence
  Description of Artificial Sequence: Synthetic oligonucleotide
ggcuacgagccaccaugaa

SEQ ID NO: 1959248 - RNA, 19 nt, Artificial Sequence
  Description of Artificial Sequence: Synthetic oligonucleotide
cgaucagcgcuccgagaac

SEQ ID NO: 1959249 - RNA, 19 nt, Artificial Sequence
  Description of Artificial Sequence: Synthetic oligonucleotide
cuucucccgcucagagucu

SEQ ID NO: 1959250 - RNA, 19 nt, Artificial Sequence
  Description of Artificial Sequence: Synthetic oligonucleotide
aggcaggaauggaccugcu

SEQ ID NO: 1959251 - RNA, 19 nt, Artificial Sequence
  Description of Artificial Sequence: Synthetic oligonucleotide
gccacaccgaucagcgcuc

SEQ ID NO: 1959252 - RNA, 19 nt, Artificial Sequence
  Description of Artificial Sequence: Synthetic oligonucleotide
cccaccaagccuuggcugu

SEQ ID NO: 1959253 - RNA, 19 nt, Artificial Sequence
  Description of Artificial Sequence: Synthetic oligonucleotide
caaggcuacgagccaccau

SEQ ID NO: 1959254 - RNA, 19 nt, Artificial Sequence
  Description of Artificial Sequence: Synthetic oligonucleotide
agggccccgucugcuggcu

SEQ ID NO: 1959255 - RNA, 19 nt, Artificial Sequence
  Description of Artificial Sequence: Synthetic oligonucleotide
cccgcacagcugcagagaa

SEQ ID NO: 1959256 - RNA, 19 nt, Artificial Sequence
  Description of Artificial Sequence: Synthetic oligonucleotide
acucucccgcacagcugca

SEQ ID NO: 1959257 - RNA, 19 nt, Artificial Sequence
  Description of Artificial Sequence: Synthetic oligonucleotide
cccgugugcgcuccuucuc

SEQ ID NO: 1959258 - RNA, 19 nt, Artificial Sequence
  Description of Artificial Sequence: Synthetic oligonucleotide
ccaacccagccauuuggcu

SEQ ID NO: 1959259 - RNA, 19 nt, Artificial Sequence
  Description of Artificial Sequence: Synthetic oligonucleotide
ccuuugcaagcugaaccaa

SEQ ID NO: 1959260 - RNA, 19 nt, Artificial Sequence
  Description of Artificial Sequence: Synthetic oligonucleotide
gaguagcuagaagccuguu

SEQ ID NO: 1959261 - RNA, 19 nt, Artificial Sequence
  Description of Artificial Sequence: Synthetic oligonucleotide
cuggagacucacgggcccu

SEQ ID NO: 1959262 - RNA, 19 nt, Artificial Sequence
  Description of Artificial Sequence: Synthetic oligonucleotide
ccucucggacaaggcuacg

SEQ ID NO: 1959263 - RNA, 19 nt, Artificial Sequence
  Description of Artificial Sequence: Synthetic oligonucleotide
gcugaaugcuguggcccaa

SEQ ID NO: 1959264 - RNA, 19 nt, Artificial Sequence
  Description of Artificial Sequence: Synthetic oligonucleotide
ccacaccgaucagcgcucc

SEQ ID NO: 1959265 - RNA, 19 nt, Artificial Sequence
  Description of Artificial Sequence: Synthetic oligonucleotide
cguggccauaaaugucaca

SEQ ID NO: 1959266 - RNA, 19 nt, Artificial Sequence
  Description of Artificial Sequence: Synthetic oligonucleotide
augccgggaggcggugaua

SEQ ID NO: 1959267 - RNA, 19 nt, Artificial Sequence
  Description of Artificial Sequence: Synthetic oligonucleotide
cggacaaggcuacgagcca

SEQ ID NO: 1959268 - RNA, 19 nt, Artificial Sequence
  Description of Artificial Sequence: Synthetic oligonucleotide
ccaaugccgggaggcggug

SEQ ID NO: 1959269 - RNA, 19 nt, Artificial Sequence
  Description of Artificial Sequence: Synthetic oligonucleotide
cccaaugccgggaggcggu

SEQ ID NO: 1959270 - RNA, 19 nt, Artificial Sequence
  Description of Artificial Sequence: Synthetic oligonucleotide
gcacgggcaacguggccau

SEQ ID NO: 1959271 - RNA, 19 nt, Artificial Sequence
  Description of Artificial Sequence: Synthetic oligonucleotide
aggcggugauacagcccua

SEQ ID NO: 1959272 - RNA, 19 nt, Artificial Sequence
  Description of Artificial Sequence: Synthetic oligonucleotide
cuccgagaacugagccaau

SEQ ID NO: 1959273 - RNA, 19 nt, Artificial Sequence
  Description of Artificial Sequence: Synthetic oligonucleotide
acccagccauuuggcugua

SEQ ID NO: 1959274 - RNA, 19 nt, Artificial Sequence
  Description of Artificial Sequence: Synthetic oligonucleotide
cagcaugcaccaggccccu

SEQ ID NO: 1959275 - RNA, 19 nt, Artificial Sequence
  Description of Artificial Sequence: Synthetic oligonucleotide
cccuaaggcugcagccucu

SEQ ID NO: 1959276 - RNA, 19 nt, Artificial Sequence
  Description of Artificial Sequence: Synthetic oligonucleotide
ccuugggccucucgaacuu

SEQ ID NO: 1959277 - RNA, 19 nt, Artificial Sequence
  Description of Artificial Sequence: Synthetic oligonucleotide
ggccaagaucaugcucccu

SEQ ID NO: 1959278 - RNA, 19 nt, Artificial Sequence
  Description of Artificial Sequence: Synthetic oligonucleotide
cgugugcgcuccuucucgu

SEQ ID NO: 1959279 - RNA, 19 nt, Artificial Sequence
  Description of Artificial Sequence: Synthetic oligonucleotide
cgggcaacguggccauaaa

SEQ ID NO: 1959280 - RNA, 19 nt, Artificial Sequence
  Description of Artificial Sequence: Synthetic oligonucleotide
cccgagccucucggacaag

SEQ ID NO: 1959281 - RNA, 19 nt, Artificial Sequence
  Description of Artificial Sequence: Synthetic oligonucleotide
cacgggcaacguggccaua

SEQ ID NO: 1959282 - RNA, 19 nt, Artificial Sequence
  Description of Artificial Sequence: Synthetic oligonucleotide
cccuggagacucgguccaa

SEQ ID NO: 1959283 - RNA, 19 nt, Artificial Sequence
  Description of Artificial Sequence: Synthetic oligonucleotide
cagcccgugugcgcuccuu

SEQ ID NO: 1959284 - RNA, 19 nt, Artificial Sequence
  Description of Artificial Sequence: Synthetic oligonucleotide
cccucaccuccuucagcuu

SEQ ID NO: 1959285 - RNA, 19 nt, Artificial Sequence
  Description of Artificial Sequence: Synthetic oligonucleotide
cugcagccucuggucgcuu

SEQ ID NO: 1959286 - RNA, 19 nt, Artificial Sequence
  Description of Artificial Sequence: Synthetic oligonucleotide
uuacaguaaacuuugauug

SEQ ID NO: 1959287 - RNA, 19 nt, Artificial Sequence
  Description of Artificial Sequence: Synthetic oligonucleotide
ucuaugaugggcaaacggg

SEQ ID NO: 1959288 - RNA, 19 nt, Artificial Sequence
  Description of Artificial Sequence: Synthetic oligonucleotide
gaacuguguaucuaaaucg

SEQ ID NO: 1959289 - RNA, 19 nt, Artificial Sequence
  Description of Artificial Sequence: Synthetic oligonucleotide
agucaauugaacuugagga

SEQ ID NO: 1959290 - RNA, 19 nt, Artificial Sequence
  Description of Artificial Sequence: Synthetic oligonucleotide
auauucucaucauaguggc

SEQ ID NO: 1959291 - RNA, 19 nt, Artificial Sequence
  Description of Artificial Sequence: Synthetic oligonucleotide
aagucaauugaacuugagg

SEQ ID NO: 1959292 - RNA, 19 nt, Artificial Sequence
  Description of Artificial Sequence: Synthetic oligonucleotide
cauauucucaucauagugg

SEQ ID NO: 1959293 - RNA, 19 nt, Artificial Sequence
  Description of Artificial Sequence: Synthetic oligonucleotide
uuuaagucaucacaagucc

SEQ ID NO: 1959294 - RNA, 19 nt, Artificial Sequence
  Description of Artificial Sequence: Synthetic oligonucleotide
uuucuaagucauuagaccc

SEQ ID NO: 1959295 - RNA, 19 nt, Artificial Sequence
  Description of Artificial Sequence: Synthetic oligonucleotide
uuugauugcaucuucagaa

SEQ ID NO: 1959296 - RNA, 19 nt, Artificial Sequence
  Description of Artificial Sequence: Synthetic oligonucleotide
agaacuguguaucuaaauc

SEQ ID NO: 1959297 - RNA, 19 nt, Artificial Sequence
  Description of Artificial Sequence: Synthetic oligonucleotide
uaaacugccguauugaaaa

SEQ ID NO: 1959298 - RNA, 19 nt, Artificial Sequence
  Description of Artificial Sequence: Synthetic oligonucleotide
aaguggaucuggcauauuc

SEQ ID NO: 1959299 - RNA, 19 nt, Artificial Sequence
  Description of Artificial Sequence: Synthetic oligonucleotide
uguguaucuaaaucgaaug

SEQ ID NO: 1959300 - RNA, 19 nt, Artificial Sequence
  Description of Artificial Sequence: Synthetic oligonucleotide
agaacaagugucuugaaga

SEQ ID NO: 1959301 - RNA, 19 nt, Artificial Sequence
  Description of Artificial Sequence: Synthetic oligonucleotide
uuccauugcgcuuagaaca

SEQ ID NO: 1959302 - RNA, 19 nt, Artificial Sequence
  Description of Artificial Sequence: Synthetic oligonucleotide
uuuaagucaauugaacuug

SEQ ID NO: 1959303 - RNA, 19 nt, Artificial Sequence
  Description of Artificial Sequence: Synthetic oligonucleotide
ugaacuugaggauuguaag

SEQ ID NO: 1959304 - RNA, 19 nt, Artificial Sequence
  Description of Artificial Sequence: Synthetic oligonucleotide
uuuguuugugucaucagga

SEQ ID NO: 1959305 - RNA, 19 nt, Artificial Sequence
  Description of Artificial Sequence: Synthetic oligonucleotide
auuuuaagucaauugaacu

SEQ ID NO: 1959306 - RNA, 19 nt, Artificial Sequence
  Description of Artificial Sequence: Synthetic oligonucleotide
ucauuagacccuuugagca

SEQ ID NO: 1959307 - RNA, 19 nt, Artificial Sequence
  Description of Artificial Sequence: Synthetic oligonucleotide
aagagucucaggaucaacc

SEQ ID NO: 1959308 - RNA, 19 nt, Artificial Sequence
  Description of Artificial Sequence: Synthetic oligonucleotide
uuaagucaucacaaguccg

SEQ ID NO: 1959309 - RNA, 19 nt, Artificial Sequence
  Description of Artificial Sequence: Synthetic oligonucleotide
uuaaguggaacgcuggcug

SEQ ID NO: 1959310 - RNA, 19 nt, Artificial Sequence
  Description of Artificial Sequence: Synthetic oligonucleotide
cauucuguguucuauauuc

SEQ ID NO: 1959311 - RNA, 19 nt, Artificial Sequence
  Description of Artificial Sequence: Synthetic oligonucleotide
ucuauauucaaagaugguc

SEQ ID NO: 1959312 - RNA, 19 nt, Artificial Sequence
  Description of Artificial Sequence: Synthetic oligonucleotide
cuuuaagucaucacaaguc

SEQ ID NO: 1959313 - RNA, 19 nt, Artificial Sequence
  Description of Artificial Sequence: Synthetic oligonucleotide
uaaauauucugaaggauua

SEQ ID NO: 1959314 - RNA, 19 nt, Artificial Sequence
  Description of Artificial Sequence: Synthetic oligonucleotide
agucauuagacccuuugag

SEQ ID NO: 1959315 - RNA, 19 nt, Artificial Sequence
  Description of Artificial Sequence: Synthetic oligonucleotide
uuuuaagucaauugaacuu

SEQ ID NO: 1959316 - RNA, 19 nt, Artificial Sequence
  Description of Artificial Sequence: Synthetic oligonucleotide
agcaagaucuaugaugggc

SEQ ID NO: 1959317 - RNA, 19 nt, Artificial Sequence
  Description of Artificial Sequence: Synthetic oligonucleotide
aauccaauauucaccacuc

SEQ ID NO: 1959318 - RNA, 19 nt, Artificial Sequence
  Description of Artificial Sequence: Synthetic oligonucleotide
uauccacggagcaagaucu

SEQ ID NO: 1959319 - RNA, 19 nt, Artificial Sequence
  Description of Artificial Sequence: Synthetic oligonucleotide
aagaucccugguuaggauc

SEQ ID NO: 1959320 - RNA, 19 nt, Artificial Sequence
  Description of Artificial Sequence: Synthetic oligonucleotide
uagaacaagugucuugaag

SEQ ID NO: 1959321 - RNA, 19 nt, Artificial Sequence
  Description of Artificial Sequence: Synthetic oligonucleotide
uuccauauuacaguaaacu

SEQ ID NO: 1959322 - RNA, 19 nt, Artificial Sequence
  Description of Artificial Sequence: Synthetic oligonucleotide
aucuaugaugggcaaacgg

SEQ ID NO: 1959323 - RNA, 19 nt, Artificial Sequence
  Description of Artificial Sequence: Synthetic oligonucleotide
gaccucuugggccaaaagg

SEQ ID NO: 1959324 - RNA, 19 nt, Artificial Sequence
  Description of Artificial Sequence: Synthetic oligonucleotide
aaaucgaauguuuccuucu

SEQ ID NO: 1959325 - RNA, 19 nt, Artificial Sequence
  Description of Artificial Sequence: Synthetic oligonucleotide
ugcgcuuagaacaaguguc

SEQ ID NO: 1959326 - RNA, 19 nt, Artificial Sequence
  Description of Artificial Sequence: Synthetic oligonucleotide
uucaaagauggucuugccc

SEQ ID NO: 1959327 - RNA, 19 nt, Artificial Sequence
  Description of Artificial Sequence: Synthetic oligonucleotide
uacacuuccccgaacacca

SEQ ID NO: 1959328 - RNA, 19 nt, Artificial Sequence
  Description of Artificial Sequence: Synthetic oligonucleotide
aauaaauauucugaaggau

SEQ ID NO: 1959329 - RNA, 19 nt, Artificial Sequence
  Description of Artificial Sequence: Synthetic oligonucleotide
augguuucaaucugacuac

SEQ ID NO: 1959330 - RNA, 19 nt, Artificial Sequence
  Description of Artificial Sequence: Synthetic oligonucleotide
ugcagaaccagccaucacu

SEQ ID NO: 1959331 - RNA, 19 nt, Artificial Sequence
  Description of Artificial Sequence: Synthetic oligonucleotide
acuacugagggacuucagg

SEQ ID NO: 1959332 - RNA, 19 nt, Artificial Sequence
  Description of Artificial Sequence: Synthetic oligonucleotide
agaucuaugaugggcaaac

SEQ ID NO: 1959333 - RNA, 19 nt, Artificial Sequence
  Description of Artificial Sequence: Synthetic oligonucleotide
ucuaaaucgaauguuuccu

SEQ ID NO: 1959334 - RNA, 19 nt, Artificial Sequence
  Description of Artificial Sequence: Synthetic oligonucleotide
ugaaggauuaaggaggcca

SEQ ID NO: 1959335 - RNA, 19 nt, Artificial Sequence
  Description of Artificial Sequence: Synthetic oligonucleotide
auauccacggagcaagauc

SEQ ID NO: 1959336 - RNA, 19 nt, Artificial Sequence
  Description of Artificial Sequence: Synthetic oligonucleotide
uuugauuucuaagucauua

SEQ ID NO: 1959337 - RNA, 19 nt, Artificial Sequence
  Description of Artificial Sequence: Synthetic oligonucleotide
uguuugugucaucaggagc

SEQ ID NO: 1959338 - RNA, 19 nt, Artificial Sequence
  Description of Artificial Sequence: Synthetic oligonucleotide
uuuggcuuggucauccaug

SEQ ID NO: 1959339 - RNA, 19 nt, Artificial Sequence
  Description of Artificial Sequence: Synthetic oligonucleotide
uauuacaguaaacuuugau

SEQ ID NO: 1959340 - RNA, 19 nt, Artificial Sequence
  Description of Artificial Sequence: Synthetic oligonucleotide
auccauguaucccacagug

SEQ ID NO: 1959341 - RNA, 19 nt, Artificial Sequence
  Description of Artificial Sequence: Synthetic oligonucleotide
gcuucuuuggauaagaggc

SEQ ID NO: 1959342 - RNA, 19 nt, Artificial Sequence
  Description of Artificial Sequence: Synthetic oligonucleotide
uaggugacugguaaucucc

SEQ ID NO: 1959343 - RNA, 19 nt, Artificial Sequence
  Description of Artificial Sequence: Synthetic oligonucleotide
cuaugaugggcaaacgggc

SEQ ID NO: 1959344 - RNA, 19 nt, Artificial Sequence
  Description of Artificial Sequence: Synthetic oligonucleotide
uuuuaaguggaacgcuggc

SEQ ID NO: 1959345 - RNA, 19 nt, Artificial Sequence
  Description of Artificial Sequence: Synthetic oligonucleotide
aguucuugugaacgguggc

SEQ ID NO: 1959346 - RNA, 19 nt, Artificial Sequence
  Description of Artificial Sequence: Synthetic oligonucleotide
aaacgggccacauucugug

SEQ ID NO: 1959347 - RNA, 19 nt, Artificial Sequence
  Description of Artificial Sequence: Synthetic oligonucleotide
cugaaauacaugucucucc

SEQ ID NO: 1959348 - RNA, 19 nt, Artificial Sequence
  Description of Artificial Sequence: Synthetic oligonucleotide
aacaagugucuugaagaac

SEQ ID NO: 1959349 - RNA, 19 nt, Artificial Sequence
  Description of Artificial Sequence: Synthetic oligonucleotide
uuggauaagaggcgcagga

SEQ ID NO: 1959350 - RNA, 19 nt, Artificial Sequence
  Description of Artificial Sequence: Synthetic oligonucleotide
auuagacccuuugagcacc

SEQ ID NO: 1959351 - RNA, 19 nt, Artificial Sequence
  Description of Artificial Sequence: Synthetic oligonucleotide
agaccauauguacaaagcu

SEQ ID NO: 1959352 - RNA, 19 nt, Artificial Sequence
  Description of Artificial Sequence: Synthetic oligonucleotide
cuucuuuggauaagaggcg

SEQ ID NO: 1959353 - RNA, 19 nt, Artificial Sequence
  Description of Artificial Sequence: Synthetic oligonucleotide
uacaguaaacuuugauugc

SEQ ID NO: 1959354 - RNA, 19 nt, Artificial Sequence
  Description of Artificial Sequence: Synthetic oligonucleotide
cagaccauauguacaaagc

SEQ ID NO: 1959355 - RNA, 19 nt, Artificial Sequence
  Description of Artificial Sequence: Synthetic oligonucleotide
uucuaagucauuagacccu

SEQ ID NO: 1959356 - RNA, 19 nt, Artificial Sequence
  Description of Artificial Sequence: Synthetic oligonucleotide
uuaaacugccguauugaaa

SEQ ID NO: 1959357 - RNA, 19 nt, Artificial Sequence
  Description of Artificial Sequence: Synthetic oligonucleotide
cuucuuugccugaaggacc

SEQ ID NO: 1959358 - RNA, 19 nt, Artificial Sequence
  Description of Artificial Sequence: Synthetic oligonucleotide
uuaagucaauugaacuuga

SEQ ID NO: 1959359 - RNA, 19 nt, Artificial Sequence
  Description of Artificial Sequence: Synthetic oligonucleotide
aauggguccaaguggucca

SEQ ID NO: 1959360 - RNA, 19 nt, Artificial Sequence
  Description of Artificial Sequence: Synthetic oligonucleotide
acaaguccgggcugggugc

SEQ ID NO: 1959361 - RNA, 19 nt, Artificial Sequence
  Description of Artificial Sequence: Synthetic oligonucleotide
uuuccauugcgcuuagaac

SEQ ID NO: 1959362 - RNA, 19 nt, Artificial Sequence
  Description of Artificial Sequence: Synthetic oligonucleotide
gaccauauguacaaagcug

SEQ ID NO: 1959363 - RNA, 19 nt, Artificial Sequence
  Description of Artificial Sequence: Synthetic oligonucleotide
acguaggugauguucuggg

SEQ ID NO: 1959364 - RNA, 19 nt, Artificial Sequence
  Description of Artificial Sequence: Synthetic oligonucleotide
gguagcauggaccccaggg

SEQ ID NO: 1959365 - RNA, 19 nt, Artificial Sequence
  Description of Artificial Sequence: Synthetic oligonucleotide
uuccccgaacaccaggagg

SEQ ID NO: 1959366 - RNA, 19 nt, Artificial Sequence
  Description of Artificial Sequence: Synthetic oligonucleotide
cuauauucaaagauggucu

SEQ ID NO: 1959367 - RNA, 19 nt, Artificial Sequence
  Description of Artificial Sequence: Synthetic oligonucleotide
aucaaccucaaacaggcaa

SEQ ID NO: 1959368 - RNA, 19 nt, Artificial Sequence
  Description of Artificial Sequence: Synthetic oligonucleotide
ucaaugucggucuguguug

SEQ ID NO: 1959369 - RNA, 19 nt, Artificial Sequence
  Description of Artificial Sequence: Synthetic oligonucleotide
uggucuugcccacauuucc

SEQ ID NO: 1959370 - RNA, 19 nt, Artificial Sequence
  Description of Artificial Sequence: Synthetic oligonucleotide
acagacguaggugauguuc

SEQ ID NO: 1959371 - RNA, 19 nt, Artificial Sequence
  Description of Artificial Sequence: Synthetic oligonucleotide
uaagucaauugaacuugag

SEQ ID NO: 1959372 - RNA, 19 nt, Artificial Sequence
  Description of Artificial Sequence: Synthetic oligonucleotide
uuccuacagacguagguga

SEQ ID NO: 1959373 - RNA, 19 nt, Artificial Sequence
  Description of Artificial Sequence: Synthetic oligonucleotide
acuucaggguagcauggac

SEQ ID NO: 1959374 - RNA, 19 nt, Artificial Sequence
  Description of Artificial Sequence: Synthetic oligonucleotide
aaugucggucuguguugcc

SEQ ID NO: 1959375 - RNA, 19 nt, Artificial Sequence
  Description of Artificial Sequence: Synthetic oligonucleotide
auuuaaacugccguauuga

SEQ ID NO: 1959376 - RNA, 19 nt, Artificial Sequence
  Description of Artificial Sequence: Synthetic oligonucleotide
uaaguggaacgcuggcugg

SEQ ID NO: 1959377 - RNA, 19 nt, Artificial Sequence
  Description of Artificial Sequence: Synthetic oligonucleotide
uuuccauauuacaguaaac

SEQ ID NO: 1959378 - RNA, 19 nt, Artificial Sequence
  Description of Artificial Sequence: Synthetic oligonucleotide
guuuuaaguggaacgcugg

SEQ ID NO: 1959379 - RNA, 19 nt, Artificial Sequence
  Description of Artificial Sequence: Synthetic oligonucleotide
uccguaugugaacugagau

SEQ ID NO: 1959380 - RNA, 19 nt, Artificial Sequence
  Description of Artificial Sequence: Synthetic oligonucleotide
ugauggcuguguuagguga

SEQ ID NO: 1959381 - RNA, 19 nt, Artificial Sequence
  Description of Artificial Sequence: Synthetic oligonucleotide
ucaguaaacucuggaagug

SEQ ID NO: 1959382 - RNA, 19 nt, Artificial Sequence
  Description of Artificial Sequence: Synthetic oligonucleotide
cuugcccacauuuccauug

SEQ ID NO: 1959383 - RNA, 19 nt, Artificial Sequence
  Description of Artificial Sequence: Synthetic oligonucleotide
accucaaacaggcaaaguu

SEQ ID NO: 1959384 - RNA, 19 nt, Artificial Sequence
  Description of Artificial Sequence: Synthetic oligonucleotide
cugaaggaccuacuggucc

SEQ ID NO: 1959385 - RNA, 19 nt, Artificial Sequence
  Description of Artificial Sequence: Synthetic oligonucleotide
aucacuucaagagucucag

SEQ ID NO: 1959386 - RNA, 19 nt, Artificial Sequence
  Description of Artificial Sequence: Synthetic oligonucleotide
gaccuacugguccuggagg

SEQ ID NO: 1959387 - RNA, 19 nt, Artificial Sequence
  Description of Artificial Sequence: Synthetic oligonucleotide
uguaucuaaaucgaauguu

SEQ ID NO: 1959388 - RNA, 19 nt, Artificial Sequence
  Description of Artificial Sequence: Synthetic oligonucleotide
aacuguguaucuaaaucga

SEQ ID NO: 1959389 - RNA, 19 nt, Artificial Sequence
  Description of Artificial Sequence: Synthetic oligonucleotide
aaaguucuugugaacggug

SEQ ID NO: 1959390 - RNA, 19 nt, Artificial Sequence
  Description of Artificial Sequence: Synthetic oligonucleotide
uugcgcuuagaacaagugu

SEQ ID NO: 1959391 - RNA, 19 nt, Artificial Sequence
  Description of Artificial Sequence: Synthetic oligonucleotide
uccccgaacaccaggaggu

SEQ ID NO: 1959392 - RNA, 19 nt, Artificial Sequence
  Description of Artificial Sequence: Synthetic oligonucleotide
ccaauauucaccacucugc

SEQ ID NO: 1959393 - RNA, 19 nt, Artificial Sequence
  Description of Artificial Sequence: Synthetic oligonucleotide
agcuuuaagucaucacaag

SEQ ID NO: 1959394 - RNA, 19 nt, Artificial Sequence
  Description of Artificial Sequence: Synthetic oligonucleotide
aguggcccaugauaucacc

SEQ ID NO: 1959395 - RNA, 19 nt, Artificial Sequence
  Description of Artificial Sequence: Synthetic oligonucleotide
uacgcaugguuucaaucug

SEQ ID NO: 1959396 - RNA, 19 nt, Artificial Sequence
  Description of Artificial Sequence: Synthetic oligonucleotide
gaaggauuaaggaggccag

SEQ ID NO: 1959397 - RNA, 19 nt, Artificial Sequence
  Description of Artificial Sequence: Synthetic oligonucleotide
uggguuugcugaaauacau

SEQ ID NO: 1959398 - RNA, 19 nt, Artificial Sequence
  Description of Artificial Sequence: Synthetic oligonucleotide
ucaucauaguggcccauga

SEQ ID NO: 1959399 - RNA, 19 nt, Artificial Sequence
  Description of Artificial Sequence: Synthetic oligonucleotide
ggaucaaccucaaacaggc

SEQ ID NO: 1959400 - RNA, 19 nt, Artificial Sequence
  Description of Artificial Sequence: Synthetic oligonucleotide
ggcaaaguucuugugaacg

SEQ ID NO: 1959401 - RNA, 19 nt, Artificial Sequence
  Description of Artificial Sequence: Synthetic oligonucleotide
ucuccguaugugaacugag

SEQ ID NO: 1959402 - RNA, 19 nt, Artificial Sequence
  Description of Artificial Sequence: Synthetic oligonucleotide
ccagguuuuaaguggaacg

SEQ ID NO: 1959403 - RNA, 19 nt, Artificial Sequence
  Description of Artificial Sequence: Synthetic oligonucleotide
cuuagaacaagugucuuga

SEQ ID NO: 1959404 - RNA, 19 nt, Artificial Sequence
  Description of Artificial Sequence: Synthetic oligonucleotide
uaaucuccguaugugaacu

SEQ ID NO: 1959405 - RNA, 19 nt, Artificial Sequence
  Description of Artificial Sequence: Synthetic oligonucleotide
uuuaaguggaacgcuggcu

SEQ ID NO: 1959406 - RNA, 19 nt, Artificial Sequence
  Description of Artificial Sequence: Synthetic oligonucleotide
ggaucaauccaauauucac

SEQ ID NO: 1959407 - RNA, 19 nt, Artificial Sequence
  Description of Artificial Sequence: Synthetic oligonucleotide
cacuucagaccauauguac

SEQ ID NO: 1959408 - RNA, 19 nt, Artificial Sequence
  Description of Artificial Sequence: Synthetic oligonucleotide
uugccgauauccacggagc

SEQ ID NO: 1959409 - RNA, 19 nt, Artificial Sequence
  Description of Artificial Sequence: Synthetic oligonucleotide
aguguuccuacagacguag

SEQ ID NO: 1959410 - RNA, 19 nt, Artificial Sequence
  Description of Artificial Sequence: Synthetic oligonucleotide
uaaacucuggaaguggauc

SEQ ID NO: 1959411 - RNA, 19 nt, Artificial Sequence
  Description of Artificial Sequence: Synthetic oligonucleotide
ggauaagaggcgcaggaag

SEQ ID NO: 1959412 - RNA, 19 nt, Artificial Sequence
  Description of Artificial Sequence: Synthetic oligonucleotide
uucuuuggauaagaggcgc

SEQ ID NO: 1959413 - RNA, 19 nt, Artificial Sequence
  Description of Artificial Sequence: Synthetic oligonucleotide
ucaauugaacuugaggauu

SEQ ID NO: 1959414 - RNA, 19 nt, Artificial Sequence
  Description of Artificial Sequence: Synthetic oligonucleotide
cagguuuuaaguggaacgc

SEQ ID NO: 1959415 - RNA, 19 nt, Artificial Sequence
  Description of Artificial Sequence: Synthetic oligonucleotide
uauauucaaagauggucuu

SEQ ID NO: 1959416 - RNA, 19 nt, Artificial Sequence
  Description of Artificial Sequence: Synthetic oligonucleotide
aggaucaaccucaaacagg

SEQ ID NO: 1959417 - RNA, 19 nt, Artificial Sequence
  Description of Artificial Sequence: Synthetic oligonucleotide
caggaucaaccucaaacag

SEQ ID NO: 1959418 - RNA, 19 nt, Artificial Sequence
  Description of Artificial Sequence: Synthetic oligonucleotide
uucuccuacacuuccccga

SEQ ID NO: 1959419 - RNA, 19 nt, Artificial Sequence
  Description of Artificial Sequence: Synthetic oligonucleotide
acaguaaacuuugauugca

SEQ ID NO: 1959420 - RNA, 19 nt, Artificial Sequence
  Description of Artificial Sequence: Synthetic oligonucleotide
aaggauuaaggaggccagg

SEQ ID NO: 1959421 - RNA, 19 nt, Artificial Sequence
  Description of Artificial Sequence: Synthetic oligonucleotide
ucuucagaagaucccuggu

SEQ ID NO: 1959422 - RNA, 19 nt, Artificial Sequence
  Description of Artificial Sequence: Synthetic oligonucleotide
ggcuucuuuggauaagagg

SEQ ID NO: 1959423 - RNA, 19 nt, Artificial Sequence
  Description of Artificial Sequence: Synthetic oligonucleotide
uuggcuuggucauccaugu

SEQ ID NO: 1959424 - RNA, 19 nt, Artificial Sequence
  Description of Artificial Sequence: Synthetic oligonucleotide
uggcaaagcuuuaagucau

SEQ ID NO: 1959425 - RNA, 19 nt, Artificial Sequence
  Description of Artificial Sequence: Synthetic oligonucleotide
guucuugugaacgguggcg

SEQ ID NO: 1959426 - RNA, 19 nt, Artificial Sequence
  Description of Artificial Sequence: Synthetic oligonucleotide
ugauaucaccaagagcagc

SEQ ID NO: 1959427 - RNA, 19 nt, Artificial Sequence
  Description of Artificial Sequence: Synthetic oligonucleotide
uucuguguucuauauucaa

SEQ ID NO: 1959428 - RNA, 19 nt, Artificial Sequence
  Description of Artificial Sequence: Synthetic oligonucleotide
uccaggguuuccuucuuug

SEQ ID NO: 1959429 - RNA, 19 nt, Artificial Sequence
  Description of Artificial Sequence: Synthetic oligonucleotide
aacgguggcggucauugau

SEQ ID NO: 1959430 - RNA, 19 nt, Artificial Sequence
  Description of Artificial Sequence: Synthetic oligonucleotide
aauacaugucucuccuguu

SEQ ID NO: 1959431 - RNA, 19 nt, Artificial Sequence
  Description of Artificial Sequence: Synthetic oligonucleotide
gaacaagugucuugaagaa

SEQ ID NO: 1959432 - RNA, 19 nt, Artificial Sequence
  Description of Artificial Sequence: Synthetic oligonucleotide
ucuggaaguggaucuggca

SEQ ID NO: 1959433 - RNA, 19 nt, Artificial Sequence
  Description of Artificial Sequence: Synthetic oligonucleotide
uuaggugacugguaaucuc

SEQ ID NO: 1959434 - RNA, 19 nt, Artificial Sequence
  Description of Artificial Sequence: Synthetic oligonucleotide
uugccugaaggaccuacug

SEQ ID NO: 1959435 - RNA, 19 nt, Artificial Sequence
  Description of Artificial Sequence: Synthetic oligonucleotide
cauauguacaaagcuggug

SEQ ID NO: 1959436 - RNA, 19 nt, Artificial Sequence
  Description of Artificial Sequence: Synthetic oligonucleotide
guaaucuccguaugugaac

SEQ ID NO: 1959437 - RNA, 19 nt, Artificial Sequence
  Description of Artificial Sequence: Synthetic oligonucleotide
uguuuccauauuacaguaa

SEQ ID NO: 1959438 - RNA, 19 nt, Artificial Sequence
  Description of Artificial Sequence: Synthetic oligonucleotide
ugacugguaaucuccguau

SEQ ID NO: 1959439 - RNA, 19 nt, Artificial Sequence
  Description of Artificial Sequence: Synthetic oligonucleotide
cauuagacccuuugagcac

SEQ ID NO: 1959440 - RNA, 19 nt, Artificial Sequence
  Description of Artificial Sequence: Synthetic oligonucleotide
aaucuccguaugugaacug

SEQ ID NO: 1959441 - RNA, 19 nt, Artificial Sequence
  Description of Artificial Sequence: Synthetic oligonucleotide
guuccuacagacguaggug

SEQ ID NO: 1959442 - RNA, 19 nt, Artificial Sequence
  Description of Artificial Sequence: Synthetic oligonucleotide
aaccaucagggcuacgcau

SEQ ID NO: 1959443 - RNA, 19 nt, Artificial Sequence
  Description of Artificial Sequence: Synthetic oligonucleotide
uccauugcgcuuagaacaa

SEQ ID NO: 1959444 - RNA, 19 nt, Artificial Sequence
  Description of Artificial Sequence: Synthetic oligonucleotide
uuugccugaaggaccuacu

SEQ ID NO: 1959445 - RNA, 19 nt, Artificial Sequence
  Description of Artificial Sequence: Synthetic oligonucleotide
gaacugagauccucuccag

SEQ ID NO: 1959446 - RNA, 19 nt, Artificial Sequence
  Description of Artificial Sequence: Synthetic oligonucleotide
ggaauggcaaagcuuuaag

SEQ ID NO: 1959447 - RNA, 19 nt, Artificial Sequence
  Description of Artificial Sequence: Synthetic oligonucleotide
gacguaggugauguucugg

SEQ ID NO: 1959448 - RNA, 19 nt, Artificial Sequence
  Description of Artificial Sequence: Synthetic oligonucleotide
uacugagggacuucagggu

SEQ ID NO: 1959449 - RNA, 19 nt, Artificial Sequence
  Description of Artificial Sequence: Synthetic oligonucleotide
guguugccgauauccacgg

SEQ ID NO: 1959450 - RNA, 19 nt, Artificial Sequence
  Description of Artificial Sequence: Synthetic oligonucleotide
caauggguccaaguggucc

SEQ ID NO: 1959451 - RNA, 19 nt, Artificial Sequence
  Description of Artificial Sequence: Synthetic oligonucleotide
uaucaccaagagcagcagu

SEQ ID NO: 1959452 - RNA, 19 nt, Artificial Sequence
  Description of Artificial Sequence: Synthetic oligonucleotide
aaguggaacgcuggcuggg

SEQ ID NO: 1959453 - RNA, 19 nt, Artificial Sequence
  Description of Artificial Sequence: Synthetic oligonucleotide
ucaucacaaguccgggcug

SEQ ID NO: 1959454 - RNA, 19 nt, Artificial Sequence
  Description of Artificial Sequence: Synthetic oligonucleotide
cuucagaccauauguacaa

SEQ ID NO: 1959455 - RNA, 19 nt, Artificial Sequence
  Description of Artificial Sequence: Synthetic oligonucleotide
acccuuugagcaccacagc

SEQ ID NO: 1959456 - RNA, 19 nt, Artificial Sequence
  Description of Artificial Sequence: Synthetic oligonucleotide
gaauggcaaagcuuuaagu

SEQ ID NO: 1959457 - RNA, 19 nt, Artificial Sequence
  Description of Artificial Sequence: Synthetic oligonucleotide
uguucugggaggcuucuuu

SEQ ID NO: 1959458 - RNA, 19 nt, Artificial Sequence
  Description of Artificial Sequence: Synthetic oligonucleotide
gcagcaguaagauggccgg

SEQ ID NO: 1959459 - RNA, 19 nt, Artificial Sequence
  Description of Artificial Sequence: Synthetic oligonucleotide
agugauggcuguguuaggu

SEQ ID NO: 1959460 - RNA, 19 nt, Artificial Sequence
  Description of Artificial Sequence: Synthetic oligonucleotide
auauucaaagauggucuug

SEQ ID NO: 1959461 - RNA, 19 nt, Artificial Sequence
  Description of Artificial Sequence: Synthetic oligonucleotide
gguccaauggguccaagug

SEQ ID NO: 1959462 - RNA, 19 nt, Artificial Sequence
  Description of Artificial Sequence: Synthetic oligonucleotide
cuucuccuacacuuccccg

SEQ ID NO: 1959463 - RNA, 19 nt, Artificial Sequence
  Description of Artificial Sequence: Synthetic oligonucleotide
ucccugguuaggaucaauc

SEQ ID NO: 1959464 - RNA, 19 nt, Artificial Sequence
  Description of Artificial Sequence: Synthetic oligonucleotide
gugaacugagauccucucc

SEQ ID NO: 1959465 - RNA, 19 nt, Artificial Sequence
  Description of Artificial Sequence: Synthetic oligonucleotide
caggagguccaaugggucc

SEQ ID NO: 1959466 - RNA, 19 nt, Artificial Sequence
  Description of Artificial Sequence: Synthetic oligonucleotide
gggacuucaggguagcaug

SEQ ID NO: 1959467 - RNA, 19 nt, Artificial Sequence
  Description of Artificial Sequence: Synthetic oligonucleotide
uccauguaucccacagugu

SEQ ID NO: 1959468 - RNA, 19 nt, Artificial Sequence
  Description of Artificial Sequence: Synthetic oligonucleotide
aauugaacuugaggauugu

SEQ ID NO: 1959469 - RNA, 19 nt, Artificial Sequence
  Description of Artificial Sequence: Synthetic oligonucleotide
aguaaacucuggaagugga

SEQ ID NO: 1959470 - RNA, 19 nt, Artificial Sequence
  Description of Artificial Sequence: Synthetic oligonucleotide
gacugguaaucuccguaug

SEQ ID NO: 1959471 - RNA, 19 nt, Artificial Sequence
  Description of Artificial Sequence: Synthetic oligonucleotide
gaacuugaggauuguaagu

SEQ ID NO: 1959472 - RNA, 19 nt, Artificial Sequence
  Description of Artificial Sequence: Synthetic oligonucleotide
cuuggaaccaucagggcua

SEQ ID NO: 1959473 - RNA, 19 nt, Artificial Sequence
  Description of Artificial Sequence: Synthetic oligonucleotide
cacaaguccgggcugggug

SEQ ID NO: 1959474 - RNA, 19 nt, Artificial Sequence
  Description of Artificial Sequence: Synthetic oligonucleotide
gguuugcugaaauacaugu

SEQ ID NO: 1959475 - RNA, 19 nt, Artificial Sequence
  Description of Artificial Sequence: Synthetic oligonucleotide
ugggccaaaaggccaggga

SEQ ID NO: 1959476 - RNA, 19 nt, Artificial Sequence
  Description of Artificial Sequence: Synthetic oligonucleotide
cuugaggauuguaaguaaa

SEQ ID NO: 1959477 - RNA, 19 nt, Artificial Sequence
  Description of Artificial Sequence: Synthetic oligonucleotide
ucuccuacacuuccccgaa

SEQ ID NO: 1959478 - RNA, 19 nt, Artificial Sequence
  Description of Artificial Sequence: Synthetic oligonucleotide
uuuugauuucuaagucauu

SEQ ID NO: 1959479 - RNA, 19 nt, Artificial Sequence
  Description of Artificial Sequence: Synthetic oligonucleotide
ggaaccaucagggcuacgc

SEQ ID NO: 1959480 - RNA, 19 nt, Artificial Sequence
  Description of Artificial Sequence: Synthetic oligonucleotide
acugagggacuucagggua

SEQ ID NO: 1959481 - RNA, 19 nt, Artificial Sequence
  Description of Artificial Sequence: Synthetic oligonucleotide
ccucaaacaggcaaaguuc

SEQ ID NO: 1959482 - RNA, 19 nt, Artificial Sequence
  Description of Artificial Sequence: Synthetic oligonucleotide
ugccgauauccacggagca

SEQ ID NO: 1959483 - RNA, 19 nt, Artificial Sequence
  Description of Artificial Sequence: Synthetic oligonucleotide
accuacugguccuggagga

SEQ ID NO: 1959484 - RNA, 19 nt, Artificial Sequence
  Description of Artificial Sequence: Synthetic oligonucleotide
ucgguuuuguuugugucau

SEQ ID NO: 1959485 - RNA, 19 nt, Artificial Sequence
  Description of Artificial Sequence: Synthetic oligonucleotide
augucggucuguguugccg

SEQ ID NO: 1959486 - RNA, 19 nt, Artificial Sequence
  Description of Artificial Sequence: Synthetic oligonucleotide
gguuuuaaguggaacgcug

SEQ ID NO: 1959487 - RNA, 19 nt, Artificial Sequence
  Description of Artificial Sequence: Synthetic oligonucleotide
uggcggucauugauggcag

SEQ ID NO: 1959488 - RNA, 19 nt, Artificial Sequence
  Description of Artificial Sequence: Synthetic oligonucleotide
ggcacuucagaccauaugu

SEQ ID NO: 1959489 - RNA, 19 nt, Artificial Sequence
  Description of Artificial Sequence: Synthetic oligonucleotide
agacccuuugagcaccaca

SEQ ID NO: 1959490 - RNA, 19 nt, Artificial Sequence
  Description of Artificial Sequence: Synthetic oligonucleotide
ugucggucuguguugccga

SEQ ID NO: 1959491 - RNA, 19 nt, Artificial Sequence
  Description of Artificial Sequence: Synthetic oligonucleotide
gcuuagaacaagugucuug

SEQ ID NO: 1959492 - RNA, 19 nt, Artificial Sequence
  Description of Artificial Sequence: Synthetic oligonucleotide
auugcgcuuagaacaagug

SEQ ID NO: 1959493 - RNA, 19 nt, Artificial Sequence
  Description of Artificial Sequence: Synthetic oligonucleotide
ucaauccaauauucaccac

SEQ ID NO: 1959494 - RNA, 19 nt, Artificial Sequence
  Description of Artificial Sequence: Synthetic oligonucleotide
aguggaucuggcauauucu

SEQ ID NO: 1959495 - RNA, 19 nt, Artificial Sequence
  Description of Artificial Sequence: Synthetic oligonucleotide
uugugaacgguggcgguca

SEQ ID NO: 1959496 - RNA, 19 nt, Artificial Sequence
  Description of Artificial Sequence: Synthetic oligonucleotide
uuagaacaagugucuugaa

SEQ ID NO: 1959497 - RNA, 19 nt, Artificial Sequence
  Description of Artificial Sequence: Synthetic oligonucleotide
gaaccaucagggcuacgca

SEQ ID NO: 1959498 - RNA, 19 nt, Artificial Sequence
  Description of Artificial Sequence: Synthetic oligonucleotide
caucacaaguccgggcugg

SEQ ID NO: 1959499 - RNA, 19 nt, Artificial Sequence
  Description of Artificial Sequence: Synthetic oligonucleotide
uggaauggcaaagcuuuaa

SEQ ID NO: 1959500 - RNA, 19 nt, Artificial Sequence
  Description of Artificial Sequence: Synthetic oligonucleotide
aaggaccuacugguccugg

SEQ ID NO: 1959501 - RNA, 19 nt, Artificial Sequence
  Description of Artificial Sequence: Synthetic oligonucleotide
uggcccaugauaucaccaa

SEQ ID NO: 1959502 - RNA, 19 nt, Artificial Sequence
  Description of Artificial Sequence: Synthetic oligonucleotide
cuacgcaugguuucaaucu

SEQ ID NO: 1959503 - RNA, 19 nt, Artificial Sequence
  Description of Artificial Sequence: Synthetic oligonucleotide
aaaaggccagggaucccag

SEQ ID NO: 1959504 - RNA, 19 nt, Artificial Sequence
  Description of Artificial Sequence: Synthetic oligonucleotide
auaagaggcgcaggaaggu

SEQ ID NO: 1959505 - RNA, 19 nt, Artificial Sequence
  Description of Artificial Sequence: Synthetic oligonucleotide
ugccuggucuucaguaaac

SEQ ID NO: 1959506 - RNA, 19 nt, Artificial Sequence
  Description of Artificial Sequence: Synthetic oligonucleotide
guguaucuaaaucgaaugu

SEQ ID NO: 1959507 - RNA, 19 nt, Artificial Sequence
  Description of Artificial Sequence: Synthetic oligonucleotide
caggcaaaguucuugugaa

SEQ ID NO: 1959508 - RNA, 19 nt, Artificial Sequence
  Description of Artificial Sequence: Synthetic oligonucleotide
gggcaaacgggccacauuc

SEQ ID NO: 1959509 - RNA, 19 nt, Artificial Sequence
  Description of Artificial Sequence: Synthetic oligonucleotide
gcuggguuugcugaaauac

SEQ ID NO: 1959510 - RNA, 19 nt, Artificial Sequence
  Description of Artificial Sequence: Synthetic oligonucleotide
agcauggaccccagggucg

SEQ ID NO: 1959511 - RNA, 19 nt, Artificial Sequence
  Description of Artificial Sequence: Synthetic oligonucleotide
ucugagugauggcuguguu

SEQ ID NO: 1959512 - RNA, 19 nt, Artificial Sequence
  Description of Artificial Sequence: Synthetic oligonucleotide
agguuuuaaguggaacgcu

SEQ ID NO: 1959513 - RNA, 19 nt, Artificial Sequence
  Description of Artificial Sequence: Synthetic oligonucleotide
ucagggcuacgcaugguuu

SEQ ID NO: 1959514 - RNA, 19 nt, Artificial Sequence
  Description of Artificial Sequence: Synthetic oligonucleotide
ucuugugaacgguggcggu

SEQ ID NO: 1959515 - RNA, 19 nt, Artificial Sequence
  Description of Artificial Sequence: Synthetic oligonucleotide
caaugucggucuguguugc

SEQ ID NO: 1959516 - RNA, 19 nt, Artificial Sequence
  Description of Artificial Sequence: Synthetic oligonucleotide
ugucucuccuguuuccaua

SEQ ID NO: 1959517 - RNA, 19 nt, Artificial Sequence
  Description of Artificial Sequence: Synthetic oligonucleotide
uuagacccuuugagcacca

SEQ ID NO: 1959518 - RNA, 19 nt, Artificial Sequence
  Description of Artificial Sequence: Synthetic oligonucleotide
cuuugccugaaggaccuac

SEQ ID NO: 1959519 - RNA, 19 nt, Artificial Sequence
  Description of Artificial Sequence: Synthetic oligonucleotide
gucaauugaacuugaggau

SEQ ID NO: 1959520 - RNA, 19 nt, Artificial Sequence
  Description of Artificial Sequence: Synthetic oligonucleotide
cuggguuugcugaaauaca

SEQ ID NO: 1959521 - RNA, 19 nt, Artificial Sequence
  Description of Artificial Sequence: Synthetic oligonucleotide
uggugcagaaccagccauc

SEQ ID NO: 1959522 - RNA, 19 nt, Artificial Sequence
  Description of Artificial Sequence: Synthetic oligonucleotide
agcaguaagauggccgggu

SEQ ID NO: 1959523 - RNA, 19 nt, Artificial Sequence
  Description of Artificial Sequence: Synthetic oligonucleotide
agacguaggugauguucug

SEQ ID NO: 1959524 - RNA, 19 nt, Artificial Sequence
  Description of Artificial Sequence: Synthetic oligonucleotide
cacucugcuugguggaaug

SEQ ID NO: 1959525 - RNA, 19 nt, Artificial Sequence
  Description of Artificial Sequence: Synthetic oligonucleotide
aggugacugguaaucuccg

SEQ ID NO: 1959526 - RNA, 19 nt, Artificial Sequence
  Description of Artificial Sequence: Synthetic oligonucleotide
cggagcaagaucuaugaug

SEQ ID NO: 1959527 - RNA, 19 nt, Artificial Sequence
  Description of Artificial Sequence: Synthetic oligonucleotide
auugauggcagugcucaau

SEQ ID NO: 1959528 - RNA, 19 nt, Artificial Sequence
  Description of Artificial Sequence: Synthetic oligonucleotide
aacgggccacauucugugu

SEQ ID NO: 1959529 - RNA, 19 nt, Artificial Sequence
  Description of Artificial Sequence: Synthetic oligonucleotide
caaucugacuacugaggga

SEQ ID NO: 1959530 - RNA, 19 nt, Artificial Sequence
  Description of Artificial Sequence: Synthetic oligonucleotide
aucuccguaugugaacuga

SEQ ID NO: 1959531 - RNA, 19 nt, Artificial Sequence
  Description of Artificial Sequence: Synthetic oligonucleotide
ugguuucaaucugacuacu

SEQ ID NO: 1959532 - RNA, 19 nt, Artificial Sequence
  Description of Artificial Sequence: Synthetic oligonucleotide
uuugagcaccacagcuuuc

SEQ ID NO: 1959533 - RNA, 19 nt, Artificial Sequence
  Description of Artificial Sequence: Synthetic oligonucleotide
ccagggucgguuuuguuug

SEQ ID NO: 1959534 - RNA, 19 nt, Artificial Sequence
  Description of Artificial Sequence: Synthetic oligonucleotide
cccugguuaggaucaaucc

SEQ ID NO: 1959535 - RNA, 19 nt, Artificial Sequence
  Description of Artificial Sequence: Synthetic oligonucleotide
auucuguguucuauauuca

SEQ ID NO: 1959536 - RNA, 19 nt, Artificial Sequence
  Description of Artificial Sequence: Synthetic oligonucleotide
gcaagaucuaugaugggca

SEQ ID NO: 1959537 - RNA, 19 nt, Artificial Sequence
  Description of Artificial Sequence: Synthetic oligonucleotide
ggaccuacugguccuggag

SEQ ID NO: 1959538 - RNA, 19 nt, Artificial Sequence
  Description of Artificial Sequence: Synthetic oligonucleotide
uggauaagaggcgcaggaa

SEQ ID NO: 1959539 - RNA, 19 nt, Artificial Sequence
  Description of Artificial Sequence: Synthetic oligonucleotide
gugacugguaaucuccgua

SEQ ID NO: 1959540 - RNA, 19 nt, Artificial Sequence
  Description of Artificial Sequence: Synthetic oligonucleotide
ucugacuacugagggacuu

SEQ ID NO: 1959541 - RNA, 19 nt, Artificial Sequence
  Description of Artificial Sequence: Synthetic oligonucleotide
caaaaggccagggauccca

SEQ ID NO: 1959542 - RNA, 19 nt, Artificial Sequence
  Description of Artificial Sequence: Synthetic oligonucleotide
gauugcaucuucagaagau

SEQ ID NO: 1959543 - RNA, 19 nt, Artificial Sequence
  Description of Artificial Sequence: Synthetic oligonucleotide
aucugagugauggcugugu

SEQ ID NO: 1959544 - RNA, 19 nt, Artificial Sequence
  Description of Artificial Sequence: Synthetic oligonucleotide
cagggcuacgcaugguuuc

SEQ ID NO: 1959545 - RNA, 19 nt, Artificial Sequence
  Description of Artificial Sequence: Synthetic oligonucleotide
uggaacgcuggcuggguuu

SEQ ID NO: 1959546 - RNA, 19 nt, Artificial Sequence
  Description of Artificial Sequence: Synthetic oligonucleotide
aggcgcaggaaggucaucu

SEQ ID NO: 1959547 - RNA, 19 nt, Artificial Sequence
  Description of Artificial Sequence: Synthetic oligonucleotide
ggccggguggaccuggagg

SEQ ID NO: 1959548 - RNA, 19 nt, Artificial Sequence
  Description of Artificial Sequence: Synthetic oligonucleotide
ccgauauccacggagcaag

SEQ ID NO: 1959549 - RNA, 19 nt, Artificial Sequence
  Description of Artificial Sequence: Synthetic oligonucleotide
cucaucauaguggcccaug

SEQ ID NO: 1959550 - RNA, 19 nt, Artificial Sequence
  Description of Artificial Sequence: Synthetic oligonucleotide
cuguguaucuaaaucgaau

SEQ ID NO: 1959551 - RNA, 19 nt, Artificial Sequence
  Description of Artificial Sequence: Synthetic oligonucleotide
cacauuuccauugcgcuua

SEQ ID NO: 1959552 - RNA, 19 nt, Artificial Sequence
  Description of Artificial Sequence: Synthetic oligonucleotide
cuugugaacgguggcgguc

SEQ ID NO: 1959553 - RNA, 19 nt, Artificial Sequence
  Description of Artificial Sequence: Synthetic oligonucleotide
gcuacgcaugguuucaauc

SEQ ID NO: 1959554 - RNA, 19 nt, Artificial Sequence
  Description of Artificial Sequence: Synthetic oligonucleotide
cucaaugucggucuguguu

SEQ ID NO: 1959555 - RNA, 19 nt, Artificial Sequence
  Description of Artificial Sequence: Synthetic oligonucleotide
cuuccccgaacaccaggag

SEQ ID NO: 1959556 - RNA, 19 nt, Artificial Sequence
  Description of Artificial Sequence: Synthetic oligonucleotide
acuguguaucuaaaucgaa

SEQ ID NO: 1959557 - RNA, 19 nt, Artificial Sequence
  Description of Artificial Sequence: Synthetic oligonucleotide
ggucgguuuuguuuguguc

SEQ ID NO: 1959558 - RNA, 19 nt, Artificial Sequence
  Description of Artificial Sequence: Synthetic oligonucleotide
gcaaacgggccacauucug

SEQ ID NO: 1959559 - RNA, 19 nt, Artificial Sequence
  Description of Artificial Sequence: Synthetic oligonucleotide
gaaccagccaucacuucaa

SEQ ID NO: 1959560 - RNA, 19 nt, Artificial Sequence
  Description of Artificial Sequence: Synthetic oligonucleotide
cuccguaugugaacugaga

SEQ ID NO: 1959561 - RNA, 19 nt, Artificial Sequence
  Description of Artificial Sequence: Synthetic oligonucleotide
ggcccaugauaucaccaag

SEQ ID NO: 1959562 - RNA, 19 nt, Artificial Sequence
  Description of Artificial Sequence: Synthetic oligonucleotide
auugaacuugaggauugua

SEQ ID NO: 1959563 - RNA, 19 nt, Artificial Sequence
  Description of Artificial Sequence: Synthetic oligonucleotide
agggacuucaggguagcau

SEQ ID NO: 1959564 - RNA, 19 nt, Artificial Sequence
  Description of Artificial Sequence: Synthetic oligonucleotide
caagagucucaggaucaac

SEQ ID NO: 1959565 - RNA, 19 nt, Artificial Sequence
  Description of Artificial Sequence: Synthetic oligonucleotide
uccacggagcaagaucuau

SEQ ID NO: 1959566 - RNA, 19 nt, Artificial Sequence
  Description of Artificial Sequence: Synthetic oligonucleotide
gguaaucuccguaugugaa

SEQ ID NO: 1959567 - RNA, 19 nt, Artificial Sequence
  Description of Artificial Sequence: Synthetic oligonucleotide
uggcuguguuaggugacug

SEQ ID NO: 1959568 - RNA, 19 nt, Artificial Sequence
  Description of Artificial Sequence: Synthetic oligonucleotide
gguuucaaucugacuacug

SEQ ID NO: 1959569 - RNA, 19 nt, Artificial Sequence
  Description of Artificial Sequence: Synthetic oligonucleotide
ccguaugugaacugagauc

SEQ ID NO: 1959570 - RNA, 19 nt, Artificial Sequence
  Description of Artificial Sequence: Synthetic oligonucleotide
cuggaaguggaucuggcau

SEQ ID NO: 1959571 - RNA, 19 nt, Artificial Sequence
  Description of Artificial Sequence: Synthetic oligonucleotide
aucacaaguccgggcuggg

SEQ ID NO: 1959572 - RNA, 19 nt, Artificial Sequence
  Description of Artificial Sequence: Synthetic oligonucleotide
ccugguuaggaucaaucca

SEQ ID NO: 1959573 - RNA, 19 nt, Artificial Sequence
  Description of Artificial Sequence: Synthetic oligonucleotide
gguggaauggcaaagcuuu

SEQ ID NO: 1959574 - RNA, 19 nt, Artificial Sequence
  Description of Artificial Sequence: Synthetic oligonucleotide
acggagcaagaucuaugau

SEQ ID NO: 1959575 - RNA, 19 nt, Artificial Sequence
  Description of Artificial Sequence: Synthetic oligonucleotide
cugaaggauuaaggaggcc

SEQ ID NO: 1959576 - RNA, 19 nt, Artificial Sequence
  Description of Artificial Sequence: Synthetic oligonucleotide
acgggccacauucuguguu

SEQ ID NO: 1959577 - RNA, 19 nt, Artificial Sequence
  Description of Artificial Sequence: Synthetic oligonucleotide
ucaggguagcauggacccc

SEQ ID NO: 1959578 - RNA, 19 nt, Artificial Sequence
  Description of Artificial Sequence: Synthetic oligonucleotide
aggaccuacugguccugga

SEQ ID NO: 1959579 - RNA, 19 nt, Artificial Sequence
  Description of Artificial Sequence: Synthetic oligonucleotide
acgguggcggucauugaug

SEQ ID NO: 1959580 - RNA, 19 nt, Artificial Sequence
  Description of Artificial Sequence: Synthetic oligonucleotide
ugggcaaacgggccacauu

SEQ ID NO: 1959581 - RNA, 19 nt, Artificial Sequence
  Description of Artificial Sequence: Synthetic oligonucleotide
cauugcgcuuagaacaagu

SEQ ID NO: 1959582 - RNA, 19 nt, Artificial Sequence
  Description of Artificial Sequence: Synthetic oligonucleotide
ccauauuacaguaaacuuu

SEQ ID NO: 1959583 - RNA, 19 nt, Artificial Sequence
  Description of Artificial Sequence: Synthetic oligonucleotide
guuaggugacugguaaucu

SEQ ID NO: 1959584 - RNA, 19 nt, Artificial Sequence
  Description of Artificial Sequence: Synthetic oligonucleotide
cuacagacguaggugaugu

SEQ ID NO: 1959585 - RNA, 19 nt, Artificial Sequence
  Description of Artificial Sequence: Synthetic oligonucleotide
ccaucagggcuacgcaugg

SEQ ID NO: 1959586 - RNA, 19 nt, Artificial Sequence
  Description of Artificial Sequence: Synthetic oligonucleotide
caggguagcauggacccca

SEQ ID NO: 1959587 - RNA, 19 nt, Artificial Sequence
  Description of Artificial Sequence: Synthetic oligonucleotide
caagugguccaggguuucc

SEQ ID NO: 1959588 - RNA, 19 nt, Artificial Sequence
  Description of Artificial Sequence: Synthetic oligonucleotide
ccuguuuccauauuacagu

SEQ ID NO: 1959589 - RNA, 19 nt, Artificial Sequence
  Description of Artificial Sequence: Synthetic oligonucleotide
ggcuuggucauccauguau

SEQ ID NO: 1959590 - RNA, 19 nt, Artificial Sequence
  Description of Artificial Sequence: Synthetic oligonucleotide
ggguuugcugaaauacaug

SEQ ID NO: 1959591 - RNA, 19 nt, Artificial Sequence
  Description of Artificial Sequence: Synthetic oligonucleotide
agggcuacgcaugguuuca

SEQ ID NO: 1959592 - RNA, 19 nt, Artificial Sequence
  Description of Artificial Sequence: Synthetic oligonucleotide
cugacuacugagggacuuc

SEQ ID NO: 1959593 - RNA, 19 nt, Artificial Sequence
  Description of Artificial Sequence: Synthetic oligonucleotide
cacauucuguguucuauau

SEQ ID NO: 1959594 - RNA, 19 nt, Artificial Sequence
  Description of Artificial Sequence: Synthetic oligonucleotide
guguuccuacagacguagg

SEQ ID NO: 1959595 - RNA, 19 nt, Artificial Sequence
  Description of Artificial Sequence: Synthetic oligonucleotide
gccugaaggaccuacuggu

SEQ ID NO: 1959596 - RNA, 19 nt, Artificial Sequence
  Description of Artificial Sequence: Synthetic oligonucleotide
caaacgggccacauucugu

SEQ ID NO: 1959597 - RNA, 19 nt, Artificial Sequence
  Description of Artificial Sequence: Synthetic oligonucleotide
cagcaguaagauggccggg

SEQ ID NO: 1959598 - RNA, 19 nt, Artificial Sequence
  Description of Artificial Sequence: Synthetic oligonucleotide
aguggaacgcuggcugggu

SEQ ID NO: 1959599 - RNA, 19 nt, Artificial Sequence
  Description of Artificial Sequence: Synthetic oligonucleotide
acgcaugguuucaaucuga

SEQ ID NO: 1959600 - RNA, 19 nt, Artificial Sequence
  Description of Artificial Sequence: Synthetic oligonucleotide
gugucuugaagaacugugu

SEQ ID NO: 1959601 - RNA, 19 nt, Artificial Sequence
  Description of Artificial Sequence: Synthetic oligonucleotide
ccacggagcaagaucuaug

SEQ ID NO: 1959602 - RNA, 19 nt, Artificial Sequence
  Description of Artificial Sequence: Synthetic oligonucleotide
caaaguucuugugaacggu

SEQ ID NO: 1959603 - RNA, 19 nt, Artificial Sequence
  Description of Artificial Sequence: Synthetic oligonucleotide
ggugcagaaccagccauca

SEQ ID NO: 1959604 - RNA, 19 nt, Artificial Sequence
  Description of Artificial Sequence: Synthetic oligonucleotide
caccacucugcuuggugga

SEQ ID NO: 1959605 - RNA, 19 nt, Artificial Sequence
  Description of Artificial Sequence: Synthetic oligonucleotide
gaaggucaucugagugaug

SEQ ID NO: 1959606 - RNA, 19 nt, Artificial Sequence
  Description of Artificial Sequence: Synthetic oligonucleotide
ggcauauucucaucauagu

SEQ ID NO: 1959607 - RNA, 19 nt, Artificial Sequence
  Description of Artificial Sequence: Synthetic oligonucleotide
gucauccauguaucccaca

SEQ ID NO: 1959608 - RNA, 19 nt, Artificial Sequence
  Description of Artificial Sequence: Synthetic oligonucleotide
gaucaaccucaaacaggca

SEQ ID NO: 1959609 - RNA, 19 nt, Artificial Sequence
  Description of Artificial Sequence: Synthetic oligonucleotide
gauccucuccagguuuuaa

SEQ ID NO: 1959610 - RNA, 19 nt, Artificial Sequence
  Description of Artificial Sequence: Synthetic oligonucleotide
ugugaacgguggcggucau

SEQ ID NO: 1959611 - RNA, 19 nt, Artificial Sequence
  Description of Artificial Sequence: Synthetic oligonucleotide
guaagauggccggguggac

SEQ ID NO: 1959612 - RNA, 19 nt, Artificial Sequence
  Description of Artificial Sequence: Synthetic oligonucleotide
gauauccacggagcaagau

SEQ ID NO: 1959613 - RNA, 19 nt, Artificial Sequence
  Description of Artificial Sequence: Synthetic oligonucleotide
ccuacacuuccccgaacac

SEQ ID NO: 1959614 - RNA, 19 nt, Artificial Sequence
  Description of Artificial Sequence: Synthetic oligonucleotide
ggugcuucuuggaaccauc

SEQ ID NO: 1959615 - RNA, 19 nt, Artificial Sequence
  Description of Artificial Sequence: Synthetic oligonucleotide
gcggucauugauggcagug

SEQ ID NO: 1959616 - RNA, 19 nt, Artificial Sequence
  Description of Artificial Sequence: Synthetic oligonucleotide
agggucgguuuuguuugug

SEQ ID NO: 1959617 - RNA, 19 nt, Artificial Sequence
  Description of Artificial Sequence: Synthetic oligonucleotide
ccugaaggaccuacugguc

SEQ ID NO: 1959618 - RNA, 19 nt, Artificial Sequence
  Description of Artificial Sequence: Synthetic oligonucleotide
ggcgcaggaaggucaucug

SEQ ID NO: 1959619 - RNA, 19 nt, Artificial Sequence
  Description of Artificial Sequence: Synthetic oligonucleotide
ggccaaaaggccagggauc

SEQ ID NO: 1959620 - RNA, 19 nt, Artificial Sequence
  Description of Artificial Sequence: Synthetic oligonucleotide
uacagacguaggugauguu

SEQ ID NO: 1959621 - RNA, 19 nt, Artificial Sequence
  Description of Artificial Sequence: Synthetic oligonucleotide
caucaggagcugccugguc

SEQ ID NO: 1959622 - RNA, 19 nt, Artificial Sequence
  Description of Artificial Sequence: Synthetic oligonucleotide
cuccuacacuuccccgaac

SEQ ID NO: 1959623 - RNA, 19 nt, Artificial Sequence
  Description of Artificial Sequence: Synthetic oligonucleotide
gcccaugauaucaccaaga

SEQ ID NO: 1959624 - RNA, 19 nt, Artificial Sequence
  Description of Artificial Sequence: Synthetic oligonucleotide
uggaaccaucagggcuacg

SEQ ID NO: 1959625 - RNA, 19 nt, Artificial Sequence
  Description of Artificial Sequence: Synthetic oligonucleotide
uggcuuggucauccaugua

SEQ ID NO: 1959626 - RNA, 19 nt, Artificial Sequence
  Description of Artificial Sequence: Synthetic oligonucleotide
guaucccacaguguuccua

SEQ ID NO: 1959627 - RNA, 19 nt, Artificial Sequence
  Description of Artificial Sequence: Synthetic oligonucleotide
aucugacuacugagggacu

SEQ ID NO: 1959628 - RNA, 19 nt, Artificial Sequence
  Description of Artificial Sequence: Synthetic oligonucleotide
cgcaugguuucaaucugac

SEQ ID NO: 1959629 - RNA, 19 nt, Artificial Sequence
  Description of Artificial Sequence: Synthetic oligonucleotide
ccuacagacguaggugaug

SEQ ID NO: 1959630 - RNA, 19 nt, Artificial Sequence
  Description of Artificial Sequence: Synthetic oligonucleotide
ggucauccauguaucccac

SEQ ID NO: 1959631 - RNA, 19 nt, Artificial Sequence
  Description of Artificial Sequence: Synthetic oligonucleotide
gggaggcuucuuuggauaa

SEQ ID NO: 1959632 - RNA, 19 nt, Artificial Sequence
  Description of Artificial Sequence: Synthetic oligonucleotide
gguggcggucauugauggc

SEQ ID NO: 1959633 - RNA, 19 nt, Artificial Sequence
  Description of Artificial Sequence: Synthetic oligonucleotide
gaacgcuggcuggguuugc

SEQ ID NO: 1959634 - RNA, 19 nt, Artificial Sequence
  Description of Artificial Sequence: Synthetic oligonucleotide
ccauguaucccacaguguu

SEQ ID NO: 1959635 - RNA, 19 nt, Artificial Sequence
  Description of Artificial Sequence: Synthetic oligonucleotide
gcuguguuaggugacuggu

SEQ ID NO: 1959636 - RNA, 19 nt, Artificial Sequence
  Description of Artificial Sequence: Synthetic oligonucleotide
uagacccuuugagcaccac

SEQ ID NO: 1959637 - RNA, 19 nt, Artificial Sequence
  Description of Artificial Sequence: Synthetic oligonucleotide
caguguuccuacagacgua

SEQ ID NO: 1959638 - RNA, 19 nt, Artificial Sequence
  Description of Artificial Sequence: Synthetic oligonucleotide
ggcugggugcuucuuggaa

SEQ ID NO: 1959639 - RNA, 19 nt, Artificial Sequence
  Description of Artificial Sequence: Synthetic oligonucleotide
ucggucuguguugccgaua

SEQ ID NO: 1959640 - RNA, 19 nt, Artificial Sequence
  Description of Artificial Sequence: Synthetic oligonucleotide
cccgaacaccaggaggucc

SEQ ID NO: 1959641 - RNA, 19 nt, Artificial Sequence
  Description of Artificial Sequence: Synthetic oligonucleotide
ggguagcauggaccccagg

SEQ ID NO: 1959642 - RNA, 19 nt, Artificial Sequence
  Description of Artificial Sequence: Synthetic oligonucleotide
ccaucacuucaagagucuc

SEQ ID NO: 1959643 - RNA, 19 nt, Artificial Sequence
  Description of Artificial Sequence: Synthetic oligonucleotide
aucccugguuaggaucaau

SEQ ID NO: 1959644 - RNA, 19 nt, Artificial Sequence
  Description of Artificial Sequence: Synthetic oligonucleotide
auggaccccagggucgguu

SEQ ID NO: 1959645 - RNA, 19 nt, Artificial Sequence
  Description of Artificial Sequence: Synthetic oligonucleotide
accccagggucgguuuugu

SEQ ID NO: 1959646 - RNA, 19 nt, Artificial Sequence
  Description of Artificial Sequence: Synthetic oligonucleotide
gcaugguuucaaucugacu

SEQ ID NO: 1959647 - RNA, 19 nt, Artificial Sequence
  Description of Artificial Sequence: Synthetic oligonucleotide
ggugacugguaaucuccgu

SEQ ID NO: 1959648 - RNA, 19 nt, Artificial Sequence
  Description of Artificial Sequence: Synthetic oligonucleotide
gggucgguuuuguuugugu

SEQ ID NO: 1959649 - RNA, 19 nt, Artificial Sequence
  Description of Artificial Sequence: Synthetic oligonucleotide
guaugugaacugagauccu

SEQ ID NO: 1959650 - RNA, 19 nt, Artificial Sequence
  Description of Artificial Sequence: Synthetic oligonucleotide
guggaauggcaaagcuuua

SEQ ID NO: 1959651 - RNA, 19 nt, Artificial Sequence
  Description of Artificial Sequence: Synthetic oligonucleotide
gaucccugguuaggaucaa

SEQ ID NO: 1959652 - RNA, 19 nt, Artificial Sequence
  Description of Artificial Sequence: Synthetic oligonucleotide
ccacauucuguguucuaua

SEQ ID NO: 1959653 - RNA, 19 nt, Artificial Sequence
  Description of Artificial Sequence: Synthetic oligonucleotide
ggaaguggaucuggcauau

SEQ ID NO: 1959654 - RNA, 19 nt, Artificial Sequence
  Description of Artificial Sequence: Synthetic oligonucleotide
ccuacugguccuggaggac

SEQ ID NO: 1959655 - RNA, 19 nt, Artificial Sequence
  Description of Artificial Sequence: Synthetic oligonucleotide
gcgcuuagaacaagugucu

SEQ ID NO: 1959656 - RNA, 19 nt, Artificial Sequence
  Description of Artificial Sequence: Synthetic oligonucleotide
ccauugcgcuuagaacaag

SEQ ID NO: 1959657 - RNA, 19 nt, Artificial Sequence
  Description of Artificial Sequence: Synthetic oligonucleotide
gccgauauccacggagcaa

SEQ ID NO: 1959658 - RNA, 19 nt, Artificial Sequence
  Description of Artificial Sequence: Synthetic oligonucleotide
ccagggaucccagcacuuc

SEQ ID NO: 1959659 - RNA, 19 nt, Artificial Sequence
  Description of Artificial Sequence: Synthetic oligonucleotide
cuaagucauuagacccuuu

SEQ ID NO: 1959660 - RNA, 19 nt, Artificial Sequence
  Description of Artificial Sequence: Synthetic oligonucleotide
cauuuccauugcgcuuaga

SEQ ID NO: 1959661 - RNA, 19 nt, Artificial Sequence
  Description of Artificial Sequence: Synthetic oligonucleotide
cgggccacauucuguguuc

SEQ ID NO: 1959662 - RNA, 19 nt, Artificial Sequence
  Description of Artificial Sequence: Synthetic oligonucleotide
ggcagugcucaaugucggu

SEQ ID NO: 1959663 - RNA, 19 nt, Artificial Sequence
  Description of Artificial Sequence: Synthetic oligonucleotide
cggguggaccuggaggacc

SEQ ID NO: 1959664 - RNA, 19 nt, Artificial Sequence
  Description of Artificial Sequence: Synthetic oligonucleotide
cccagggucgguuuuguuu

SEQ ID NO: 1959665 - RNA, 19 nt, Artificial Sequence
  Description of Artificial Sequence: Synthetic oligonucleotide
gucggucuguguugccgau

SEQ ID NO: 1959666 - RNA, 19 nt, Artificial Sequence
  Description of Artificial Sequence: Synthetic oligonucleotide
guggaacgcuggcuggguu

SEQ ID NO: 1959667 - RNA, 19 nt, Artificial Sequence
  Description of Artificial Sequence: Synthetic oligonucleotide
ggcuacgcaugguuucaau

SEQ ID NO: 1959668 - RNA, 19 nt, Artificial Sequence
  Description of Artificial Sequence: Synthetic oligonucleotide
cagggucgguuuuguuugu

SEQ ID NO: 1959669 - RNA, 19 nt, Artificial Sequence
  Description of Artificial Sequence: Synthetic oligonucleotide
ggcaaacgggccacauucu

SEQ ID NO: 1959670 - RNA, 19 nt, Artificial Sequence
  Description of Artificial Sequence: Synthetic oligonucleotide
caaguccgggcugggugcu

SEQ ID NO: 1959671 - RNA, 19 nt, Artificial Sequence
  Description of Artificial Sequence: Synthetic oligonucleotide
guccgggcugggugcuucu

SEQ ID NO: 1959672 - RNA, 19 nt, Artificial Sequence
  Description of Artificial Sequence: Synthetic oligonucleotide
ggucccucugguccugcuu

SEQ ID NO: 1959673 - RNA, 19 nt, Artificial Sequence
  Description of Artificial Sequence: Synthetic oligonucleotide
gggcuacgcaugguuucaa

SEQ ID NO: 1959674 - RNA, 19 nt, Artificial Sequence
  Description of Artificial Sequence: Synthetic oligonucleotide
ccggguggaccuggaggac

SEQ ID NO: 1959675 - RNA, 19 nt, Artificial Sequence
  Description of Artificial Sequence: Synthetic oligonucleotide
ccccgaacaccaggagguc

SEQ ID NO: 1959676 - RNA, 19 nt, Artificial Sequence
  Description of Artificial Sequence: Synthetic oligonucleotide
cggucuguguugccgauau

SEQ ID NO: 1959677 - RNA, 19 nt, Artificial Sequence
  Description of Artificial Sequence: Synthetic oligonucleotide
gugaacgguggcggucauu

SEQ ID NO: 1959678 - RNA, 19 nt, Artificial Sequence
  Description of Artificial Sequence: Synthetic oligonucleotide
cauggaccccagggucggu

SEQ ID NO: 1959679 - RNA, 19 nt, Artificial Sequence
  Description of Artificial Sequence: Synthetic oligonucleotide
cgcuuagaacaagugucuu

SEQ ID NO: 1959680 - RNA, 19 nt, Artificial Sequence
  Description of Artificial Sequence: Synthetic oligonucleotide
ucuaccacgaaccugacca

SEQ ID NO: 1959681 - RNA, 19 nt, Artificial Sequence
  Description of Artificial Sequence: Synthetic oligonucleotide
ugaacgaagaguguggccg

SEQ ID NO: 1959682 - RNA, 19 nt, Artificial Sequence
  Description of Artificial Sequence: Synthetic oligonucleotide
aagucauugggagaggugg

SEQ ID NO: 1959683 - RNA, 19 nt, Artificial Sequence
  Description of Artificial Sequence: Synthetic oligonucleotide
aaacuuccuagccuugcgc

SEQ ID NO: 1959684 - RNA, 19 nt, Artificial Sequence
  Description of Artificial Sequence: Synthetic oligonucleotide
aaagguggugucgaguugc

SEQ ID NO: 1959685 - RNA, 19 nt, Artificial Sequence
  Description of Artificial Sequence: Synthetic oligonucleotide
aaccuuguaaggcugaggu

SEQ ID NO: 1959686 - RNA, 19 nt, Artificial Sequence
  Description of Artificial Sequence: Synthetic oligonucleotide
ugauccuaggguaagugag

SEQ ID NO: 1959687 - RNA, 19 nt, Artificial Sequence
  Description of Artificial Sequence: Synthetic oligonucleotide
ucaagaguucugaaugcgg

SEQ ID NO: 1959688 - RNA, 19 nt, Artificial Sequence
  Description of Artificial Sequence: Synthetic oligonucleotide
cugaaugcggaugugaacg

SEQ ID NO: 1959689 - RNA, 19 nt, Artificial Sequence
  Description of Artificial Sequence: Synthetic oligonucleotide
uccucuaccacgaaccuga

SEQ ID NO: 1959690 - RNA, 19 nt, Artificial Sequence
  Description of Artificial Sequence: Synthetic oligonucleotide
ugagacgccgauuauggcc

SEQ ID NO: 1959691 - RNA, 19 nt, Artificial Sequence
  Description of Artificial Sequence: Synthetic oligonucleotide
uuuaugaggaaucgcccug

SEQ ID NO: 1959692 - RNA, 19 nt, Artificial Sequence
  Description of Artificial Sequence: Synthetic oligonucleotide
guagccaggggucugaaag

SEQ ID NO: 1959693 - RNA, 19 nt, Artificial Sequence
  Description of Artificial Sequence: Synthetic oligonucleotide
uaaacuuccuagccuugcg

SEQ ID NO: 1959694 - RNA, 19 nt, Artificial Sequence
  Description of Artificial Sequence: Synthetic oligonucleotide
cauuuaugaggaaucgccc

SEQ ID NO: 1959695 - RNA, 19 nt, Artificial Sequence
  Description of Artificial Sequence: Synthetic oligonucleotide
gaugugaacgaagagugug

SEQ ID NO: 1959696 - RNA, 19 nt, Artificial Sequence
  Description of Artificial Sequence: Synthetic oligonucleotide
cacagcaauacacagccag

SEQ ID NO: 1959697 - RNA, 19 nt, Artificial Sequence
  Description of Artificial Sequence: Synthetic oligonucleotide
uccauccuuggaaagcagg

SEQ ID NO: 1959698 - RNA, 19 nt, Artificial Sequence
  Description of Artificial Sequence: Synthetic oligonucleotide
aucggguacacucugguca

SEQ ID NO: 1959699 - RNA, 19 nt, Artificial Sequence
  Description of Artificial Sequence: Synthetic oligonucleotide
ugaggaaucgcccuguguu

SEQ ID NO: 1959700 - RNA, 19 nt, Artificial Sequence
  Description of Artificial Sequence: Synthetic oligonucleotide
auuuaugaggaaucgcccu

SEQ ID NO: 1959701 - RNA, 19 nt, Artificial Sequence
  Description of Artificial Sequence: Synthetic oligonucleotide
cugaacagcucucagcacc

SEQ ID NO: 1959702 - RNA, 19 nt, Artificial Sequence
  Description of Artificial Sequence: Synthetic oligonucleotide
uaguuggaacuucagaguc

SEQ ID NO: 1959703 - RNA, 19 nt, Artificial Sequence
  Description of Artificial Sequence: Synthetic oligonucleotide
uggacugucagaguagugc

SEQ ID NO: 1959704 - RNA, 19 nt, Artificial Sequence
  Description of Artificial Sequence: Synthetic oligonucleotide
uguccauuuaugaggaauc

SEQ ID NO: 1959705 - RNA, 19 nt, Artificial Sequence
  Description of Artificial Sequence: Synthetic oligonucleotide
aacuuccuagccuugcgcu

SEQ ID NO: 1959706 - RNA, 19 nt, Artificial Sequence
  Description of Artificial Sequence: Synthetic oligonucleotide
cacacuguccauuuaugag

SEQ ID NO: 1959707 - RNA, 19 nt, Artificial Sequence
  Description of Artificial Sequence: Synthetic oligonucleotide
guugagguccaucucguag

SEQ ID NO: 1959708 - RNA, 19 nt, Artificial Sequence
  Description of Artificial Sequence: Synthetic oligonucleotide
aguugcugaguguuguguc

SEQ ID NO: 1959709 - RNA, 19 nt, Artificial Sequence
  Description of Artificial Sequence: Synthetic oligonucleotide
ccauuuaugaggaaucgcc

SEQ ID NO: 1959710 - RNA, 19 nt, Artificial Sequence
  Description of Artificial Sequence: Synthetic oligonucleotide
agguaagcagguuucagga

SEQ ID NO: 1959711 - RNA, 19 nt, Artificial Sequence
  Description of Artificial Sequence: Synthetic oligonucleotide
aggacauagccacacuguc

SEQ ID NO: 1959712 - RNA, 19 nt, Artificial Sequence
  Description of Artificial Sequence: Synthetic oligonucleotide
ugucuggcaaagcuguccc

SEQ ID NO: 1959713 - RNA, 19 nt, Artificial Sequence
  Description of Artificial Sequence: Synthetic oligonucleotide
agguccaucucguagccag

SEQ ID NO: 1959714 - RNA, 19 nt, Artificial Sequence
  Description of Artificial Sequence: Synthetic oligonucleotide
uaguuggcugaguucaucc

SEQ ID NO: 1959715 - RNA, 19 nt, Artificial Sequence
  Description of Artificial Sequence: Synthetic oligonucleotide
gugagugagacccucaaga

SEQ ID NO: 1959716 - RNA, 19 nt, Artificial Sequence
  Description of Artificial Sequence: Synthetic oligonucleotide
aucaggacgggucacgugu

SEQ ID NO: 1959717 - RNA, 19 nt, Artificial Sequence
  Description of Artificial Sequence: Synthetic oligonucleotide
ugcucugcggccuccaaag

SEQ ID NO: 1959718 - RNA, 19 nt, Artificial Sequence
  Description of Artificial Sequence: Synthetic oligonucleotide
guaagcagguuucaggaca

SEQ ID NO: 1959719 - RNA, 19 nt, Artificial Sequence
  Description of Artificial Sequence: Synthetic oligonucleotide
gaagccauuguugagcaca

SEQ ID NO: 1959720 - RNA, 19 nt, Artificial Sequence
  Description of Artificial Sequence: Synthetic oligonucleotide
caccuggugaucaggacgg

SEQ ID NO: 1959721 - RNA, 19 nt, Artificial Sequence
  Description of Artificial Sequence: Synthetic oligonucleotide
aaugcggaugugaacgaag

SEQ ID NO: 1959722 - RNA, 19 nt, Artificial Sequence
  Description of Artificial Sequence: Synthetic oligonucleotide
cacuagaggauccacgaug

SEQ ID NO: 1959723 - RNA, 19 nt, Artificial Sequence
  Description of Artificial Sequence: Synthetic oligonucleotide
uaggguaagugagugagac

SEQ ID NO: 1959724 - RNA, 19 nt, Artificial Sequence
  Description of Artificial Sequence: Synthetic oligonucleotide
uucugaaugcggaugugaa

SEQ ID NO: 1959725 - RNA, 19 nt, Artificial Sequence
  Description of Artificial Sequence: Synthetic oligonucleotide
cucacugagggacugaaca

SEQ ID NO: 1959726 - RNA, 19 nt, Artificial Sequence
  Description of Artificial Sequence: Synthetic oligonucleotide
gaacgaagaguguggccgg

SEQ ID NO: 1959727 - RNA, 19 nt, Artificial Sequence
  Description of Artificial Sequence: Synthetic oligonucleotide
cguaguuggaacuucagag

SEQ ID NO: 1959728 - RNA, 19 nt, Artificial Sequence
  Description of Artificial Sequence: Synthetic oligonucleotide
uccagcagggguugaagcc

SEQ ID NO: 1959729 - RNA, 19 nt, Artificial Sequence
  Description of Artificial Sequence: Synthetic oligonucleotide
aggguaagugagugagacc

SEQ ID NO: 1959730 - RNA, 19 nt, Artificial Sequence
  Description of Artificial Sequence: Synthetic oligonucleotide
ccuuguaaggcugaggugg

SEQ ID NO: 1959731 - RNA, 19 nt, Artificial Sequence
  Description of Artificial Sequence: Synthetic oligonucleotide
aaucgcccuguguugaggu

SEQ ID NO: 1959732 - RNA, 19 nt, Artificial Sequence
  Description of Artificial Sequence: Synthetic oligonucleotide
cuugcuucaggcuguugag

SEQ ID NO: 1959733 - RNA, 19 nt, Artificial Sequence
  Description of Artificial Sequence: Synthetic oligonucleotide
cuuguaaggcugagguggg

SEQ ID NO: 1959734 - RNA, 19 nt, Artificial Sequence
  Description of Artificial Sequence: Synthetic oligonucleotide
guuauaguuggcugaguuc

SEQ ID NO: 1959735 - RNA, 19 nt, Artificial Sequence
  Description of Artificial Sequence: Synthetic oligonucleotide
cucaagaguucugaaugcg

SEQ ID NO: 1959736 - RNA, 19 nt, Artificial Sequence
  Description of Artificial Sequence: Synthetic oligonucleotide
aagaguucugaaugcggau

SEQ ID NO: 1959737 - RNA, 19 nt, Artificial Sequence
  Description of Artificial Sequence: Synthetic oligonucleotide
gacgggucacgugugaggg

SEQ ID NO: 1959738 - RNA, 19 nt, Artificial Sequence
  Description of Artificial Sequence: Synthetic oligonucleotide
ugugaacgaagaguguggc

SEQ ID NO: 1959739 - RNA, 19 nt, Artificial Sequence
  Description of Artificial Sequence: Synthetic oligonucleotide
caauacacagccagugcug

SEQ ID NO: 1959740 - RNA, 19 nt, Artificial Sequence
  Description of Artificial Sequence: Synthetic oligonucleotide
aguguugugucuggcaaag

SEQ ID NO: 1959741 - RNA, 19 nt, Artificial Sequence
  Description of Artificial Sequence: Synthetic oligonucleotide
agugagacccucaagaguu

SEQ ID NO: 1959742 - RNA, 19 nt, Artificial Sequence
  Description of Artificial Sequence: Synthetic oligonucleotide
augagacgccgauuauggc

SEQ ID NO: 1959743 - RNA, 19 nt, Artificial Sequence
  Description of Artificial Sequence: Synthetic oligonucleotide
ggauccacgauggagcugg

SEQ ID NO: 1959744 - RNA, 19 nt, Artificial Sequence
  Description of Artificial Sequence: Synthetic oligonucleotide
gagucauaguccucuacca

SEQ ID NO: 1959745 - RNA, 19 nt, Artificial Sequence
  Description of Artificial Sequence: Synthetic oligonucleotide
augauaccagcgcucacug

SEQ ID NO: 1959746 - RNA, 19 nt, Artificial Sequence
  Description of Artificial Sequence: Synthetic oligonucleotide
ucugaaugcggaugugaac

SEQ ID NO: 1959747 - RNA, 19 nt, Artificial Sequence
  Description of Artificial Sequence: Synthetic oligonucleotide
agguaugcucagcaccugg

SEQ ID NO: 1959748 - RNA, 19 nt, Artificial Sequence
  Description of Artificial Sequence: Synthetic oligonucleotide
gagacgccgauuauggccc

SEQ ID NO: 1959749 - RNA, 19 nt, Artificial Sequence
  Description of Artificial Sequence: Synthetic oligonucleotide
acgugugaggggcuggcac

SEQ ID NO: 1959750 - RNA, 19 nt, Artificial Sequence
  Description of Artificial Sequence: Synthetic oligonucleotide
ucgaguugccucagguaag

SEQ ID NO: 1959751 - RNA, 19 nt, Artificial Sequence
  Description of Artificial Sequence: Synthetic oligonucleotide
uaccuggacugucagagua

SEQ ID NO: 1959752 - RNA, 19 nt, Artificial Sequence
  Description of Artificial Sequence: Synthetic oligonucleotide
cugugucucacugagggac

SEQ ID NO: 1959753 - RNA, 19 nt, Artificial Sequence
  Description of Artificial Sequence: Synthetic oligonucleotide
cuguugggccguuaguacc

SEQ ID NO: 1959754 - RNA, 19 nt, Artificial Sequence
  Description of Artificial Sequence: Synthetic oligonucleotide
guccauuuaugaggaaucg

SEQ ID NO: 1959755 - RNA, 19 nt, Artificial Sequence
  Description of Artificial Sequence: Synthetic oligonucleotide
agaggcagugugaacuggc

SEQ ID NO: 1959756 - RNA, 19 nt, Artificial Sequence
  Description of Artificial Sequence: Synthetic oligonucleotide
ucggguacacucuggucag

SEQ ID NO: 1959757 - RNA, 19 nt, Artificial Sequence
  Description of Artificial Sequence: Synthetic oligonucleotide
acuuccuagccuugcgcuc

SEQ ID NO: 1959758 - RNA, 19 nt, Artificial Sequence
  Description of Artificial Sequence: Synthetic oligonucleotide
agugagugagacccucaag

SEQ ID NO: 1959759 - RNA, 19 nt, Artificial Sequence
  Description of Artificial Sequence: Synthetic oligonucleotide
augugaacgaagagugugg

SEQ ID NO: 1959760 - RNA, 19 nt, Artificial Sequence
  Description of Artificial Sequence: Synthetic oligonucleotide
caagaguucugaaugcgga

SEQ ID NO: 1959761 - RNA, 19 nt, Artificial Sequence
  Description of Artificial Sequence: Synthetic oligonucleotide
aaagucauugggagaggug

SEQ ID NO: 1959762 - RNA, 19 nt, Artificial Sequence
  Description of Artificial Sequence: Synthetic oligonucleotide
agaguucugaaugcggaug

SEQ ID NO: 1959763 - RNA, 19 nt, Artificial Sequence
  Description of Artificial Sequence: Synthetic oligonucleotide
uucauccgcagcccaucgg

SEQ ID NO: 1959764 - RNA, 19 nt, Artificial Sequence
  Description of Artificial Sequence: Synthetic oligonucleotide
uaagcagguuucaggacau

SEQ ID NO: 1959765 - RNA, 19 nt, Artificial Sequence
  Description of Artificial Sequence: Synthetic oligonucleotide
gaaccugaccagcaccagc

SEQ ID NO: 1959766 - RNA, 19 nt, Artificial Sequence
  Description of Artificial Sequence: Synthetic oligonucleotide
uggugaucaggacggguca

SEQ ID NO: 1959767 - RNA, 19 nt, Artificial Sequence
  Description of Artificial Sequence: Synthetic oligonucleotide
cauugggagagguggaguc

SEQ ID NO: 1959768 - RNA, 19 nt, Artificial Sequence
  Description of Artificial Sequence: Synthetic oligonucleotide
gaggaaucgcccuguguug

SEQ ID NO: 1959769 - RNA, 19 nt, Artificial Sequence
  Description of Artificial Sequence: Synthetic oligonucleotide
ucgugccaugauaccagcg

SEQ ID NO: 1959770 - RNA, 19 nt, Artificial Sequence
  Description of Artificial Sequence: Synthetic oligonucleotide
cuugcgcucgcugagggag

SEQ ID NO: 1959771 - RNA, 19 nt, Artificial Sequence
  Description of Artificial Sequence: Synthetic oligonucleotide
cuggugaucaggacggguc

SEQ ID NO: 1959772 - RNA, 19 nt, Artificial Sequence
  Description of Artificial Sequence: Synthetic oligonucleotide
ugaaugcggaugugaacga

SEQ ID NO: 1959773 - RNA, 19 nt, Artificial Sequence
  Description of Artificial Sequence: Synthetic oligonucleotide
gauuauggcccugugucuc

SEQ ID NO: 1959774 - RNA, 19 nt, Artificial Sequence
  Description of Artificial Sequence: Synthetic oligonucleotide
gucgaguugccucagguaa

SEQ ID NO: 1959775 - RNA, 19 nt, Artificial Sequence
  Description of Artificial Sequence: Synthetic oligonucleotide
uugagcacauagucagucu

SEQ ID NO: 1959776 - RNA, 19 nt, Artificial Sequence
  Description of Artificial Sequence: Synthetic oligonucleotide
gcuguugagaggcagugug

SEQ ID NO: 1959777 - RNA, 19 nt, Artificial Sequence
  Description of Artificial Sequence: Synthetic oligonucleotide
gauaccagcgcucacugau

SEQ ID NO: 1959778 - RNA, 19 nt, Artificial Sequence
  Description of Artificial Sequence: Synthetic oligonucleotide
gagggagccaaccuuguaa

SEQ ID NO: 1959779 - RNA, 19 nt, Artificial Sequence
  Description of Artificial Sequence: Synthetic oligonucleotide
cuuccuagccuugcgcucg

SEQ ID NO: 1959780 - RNA, 19 nt, Artificial Sequence
  Description of Artificial Sequence: Synthetic oligonucleotide
cacgaaccugaccagcacc

SEQ ID NO: 1959781 - RNA, 19 nt, Artificial Sequence
  Description of Artificial Sequence: Synthetic oligonucleotide
aucugcuuggcucgccguc

SEQ ID NO: 1959782 - RNA, 19 nt, Artificial Sequence
  Description of Artificial Sequence: Synthetic oligonucleotide
ugugucucacugagggacu

SEQ ID NO: 1959783 - RNA, 19 nt, Artificial Sequence
  Description of Artificial Sequence: Synthetic oligonucleotide
aagguggugucgaguugcc

SEQ ID NO: 1959784 - RNA, 19 nt, Artificial Sequence
  Description of Artificial Sequence: Synthetic oligonucleotide
cugcguuccacaucucuug

SEQ ID NO: 1959785 - RNA, 19 nt, Artificial Sequence
  Description of Artificial Sequence: Synthetic oligonucleotide
cccugugucucacugaggg

SEQ ID NO: 1959786 - RNA, 19 nt, Artificial Sequence
  Description of Artificial Sequence: Synthetic oligonucleotide
acagccugcguuccacauc

SEQ ID NO: 1959787 - RNA, 19 nt, Artificial Sequence
  Description of Artificial Sequence: Synthetic oligonucleotide
aggcacgccauggaccucc

SEQ ID NO: 1959788 - RNA, 19 nt, Artificial Sequence
  Description of Artificial Sequence: Synthetic oligonucleotide
uuaugaggaaucgcccugu

SEQ ID NO: 1959789 - RNA, 19 nt, Artificial Sequence
  Description of Artificial Sequence: Synthetic oligonucleotide
guugagcacauagucaguc

SEQ ID NO: 1959790 - RNA, 19 nt, Artificial Sequence
  Description of Artificial Sequence: Synthetic oligonucleotide
cccucaagaguucugaaug

SEQ ID NO: 1959791 - RNA, 19 nt, Artificial Sequence
  Description of Artificial Sequence: Synthetic oligonucleotide
aacgaagaguguggccggg

SEQ ID NO: 1959792 - RNA, 19 nt, Artificial Sequence
  Description of Artificial Sequence: Synthetic oligonucleotide
ucggcuggcacagcaauac

SEQ ID NO: 1959793 - RNA, 19 nt, Artificial Sequence
  Description of Artificial Sequence: Synthetic oligonucleotide
uccgcagucggcuggcaca

SEQ ID NO: 1959794 - RNA, 19 nt, Artificial Sequence
  Description of Artificial Sequence: Synthetic oligonucleotide
guaugcucagcaccuggug

SEQ ID NO: 1959795 - RNA, 19 nt, Artificial Sequence
  Description of Artificial Sequence: Synthetic oligonucleotide
gaagaguguggccggggac

SEQ ID NO: 1959796 - RNA, 19 nt, Artificial Sequence
  Description of Artificial Sequence: Synthetic oligonucleotide
ucacugauccuaggguaag

SEQ ID NO: 1959797 - RNA, 19 nt, Artificial Sequence
  Description of Artificial Sequence: Synthetic oligonucleotide
uagccuugcgcucgcugag

SEQ ID NO: 1959798 - RNA, 19 nt, Artificial Sequence
  Description of Artificial Sequence: Synthetic oligonucleotide
ugggccguuaguaccugga

SEQ ID NO: 1959799 - RNA, 19 nt, Artificial Sequence
  Description of Artificial Sequence: Synthetic oligonucleotide
cacuguccauuuaugagga

SEQ ID NO: 1959800 - RNA, 19 nt, Artificial Sequence
  Description of Artificial Sequence: Synthetic oligonucleotide
gagaguucuggggagaucu

SEQ ID NO: 1959801 - RNA, 19 nt, Artificial Sequence
  Description of Artificial Sequence: Synthetic oligonucleotide
guaaggcugaggugggcug

SEQ ID NO: 1959802 - RNA, 19 nt, Artificial Sequence
  Description of Artificial Sequence: Synthetic oligonucleotide
ggagccaaccuuguaaggc

SEQ ID NO: 1959803 - RNA, 19 nt, Artificial Sequence
  Description of Artificial Sequence: Synthetic oligonucleotide
ccgauuauggcccuguguc

SEQ ID NO: 1959804 - RNA, 19 nt, Artificial Sequence
  Description of Artificial Sequence: Synthetic oligonucleotide
gugaacgaagaguguggcc

SEQ ID NO: 1959805 - RNA, 19 nt, Artificial Sequence
  Description of Artificial Sequence: Synthetic oligonucleotide
gaaucgcccuguguugagg

SEQ ID NO: 1959806 - RNA, 19 nt, Artificial Sequence
  Description of Artificial Sequence: Synthetic oligonucleotide
uucaggacauagccacacu

SEQ ID NO: 1959807 - RNA, 19 nt, Artificial Sequence
  Description of Artificial Sequence: Synthetic oligonucleotide
cuccacgcgcacuagagga

SEQ ID NO: 1959808 - RNA, 19 nt, Artificial Sequence
  Description of Artificial Sequence: Synthetic oligonucleotide
agcucucagcaccagguau

SEQ ID NO: 1959809 - RNA, 19 nt, Artificial Sequence
  Description of Artificial Sequence: Synthetic oligonucleotide
ucaggacgggucacgugug

SEQ ID NO: 1959810 - RNA, 19 nt, Artificial Sequence
  Description of Artificial Sequence: Synthetic oligonucleotide
auccuaggguaagugagug

SEQ ID NO: 1959811 - RNA, 19 nt, Artificial Sequence
  Description of Artificial Sequence: Synthetic oligonucleotide
accuuguaaggcugaggug

SEQ ID NO: 1959812 - RNA, 19 nt, Artificial Sequence
  Description of Artificial Sequence: Synthetic oligonucleotide
ggacugaacagcucucagc

SEQ ID NO: 1959813 - RNA, 19 nt, Artificial Sequence
  Description of Artificial Sequence: Synthetic oligonucleotide
cggaugugaacgaagagug

SEQ ID NO: 1959814 - RNA, 19 nt, Artificial Sequence
  Description of Artificial Sequence: Synthetic oligonucleotide
gagaggcagugugaacugg

SEQ ID NO: 1959815 - RNA, 19 nt, Artificial Sequence
  Description of Artificial Sequence: Synthetic oligonucleotide
uggucaguugcugaguguu

SEQ ID NO: 1959816 - RNA, 19 nt, Artificial Sequence
  Description of Artificial Sequence: Synthetic oligonucleotide
agcgaggcuccauccuugg

SEQ ID NO: 1959817 - RNA, 19 nt, Artificial Sequence
  Description of Artificial Sequence: Synthetic oligonucleotide
acccucaagaguucugaau

SEQ ID NO: 1959818 - RNA, 19 nt, Artificial Sequence
  Description of Artificial Sequence: Synthetic oligonucleotide
cuggaugagacgccgauua

SEQ ID NO: 1959819 - RNA, 19 nt, Artificial Sequence
  Description of Artificial Sequence: Synthetic oligonucleotide
aguccucuaccacgaaccu

SEQ ID NO: 1959820 - RNA, 19 nt, Artificial Sequence
  Description of Artificial Sequence: Synthetic oligonucleotide
gaucaggacgggucacgug

SEQ ID NO: 1959821 - RNA, 19 nt, Artificial Sequence
  Description of Artificial Sequence: Synthetic oligonucleotide
uccuaggguaagugaguga

SEQ ID NO: 1959822 - RNA, 19 nt, Artificial Sequence
  Description of Artificial Sequence: Synthetic oligonucleotide
gaguucugaaugcggaugu

SEQ ID NO: 1959823 - RNA, 19 nt, Artificial Sequence
  Description of Artificial Sequence: Synthetic oligonucleotide
ugucgaguugccucaggua

SEQ ID NO: 1959824 - RNA, 19 nt, Artificial Sequence
  Description of Artificial Sequence: Synthetic oligonucleotide
augaggaaucgcccugugu

SEQ ID NO: 1959825 - RNA, 19 nt, Artificial Sequence
  Description of Artificial Sequence: Synthetic oligonucleotide
cugauccuaggguaaguga

SEQ ID NO: 1959826 - RNA, 19 nt, Artificial Sequence
  Description of Artificial Sequence: Synthetic oligonucleotide
cuuggcucgccgucucugc

SEQ ID NO: 1959827 - RNA, 19 nt, Artificial Sequence
  Description of Artificial Sequence: Synthetic oligonucleotide
uagccaggggucugaaagu

SEQ ID NO: 1959828 - RNA, 19 nt, Artificial Sequence
  Description of Artificial Sequence: Synthetic oligonucleotide
gggucacuggaugagacgc

SEQ ID NO: 1959829 - RNA, 19 nt, Artificial Sequence
  Description of Artificial Sequence: Synthetic oligonucleotide
uccuccuccuccuccuccc

SEQ ID NO: 1959830 - RNA, 19 nt, Artificial Sequence
  Description of Artificial Sequence: Synthetic oligonucleotide
cucgcugagggagccaacc

SEQ ID NO: 1959831 - RNA, 19 nt, Artificial Sequence
  Description of Artificial Sequence: Synthetic oligonucleotide
caaccuuguaaggcugagg

SEQ ID NO: 1959832 - RNA, 19 nt, Artificial Sequence
  Description of Artificial Sequence: Synthetic oligonucleotide
gugaucaggacgggucacg

SEQ ID NO: 1959833 - RNA, 19 nt, Artificial Sequence
  Description of Artificial Sequence: Synthetic oligonucleotide
uugggccguuaguaccugg

SEQ ID NO: 1959834 - RNA, 19 nt, Artificial Sequence
  Description of Artificial Sequence: Synthetic oligonucleotide
uaccacgaaccugaccagc

SEQ ID NO: 1959835 - RNA, 19 nt, Artificial Sequence
  Description of Artificial Sequence: Synthetic oligonucleotide
guucugaaugcggauguga

SEQ ID NO: 1959836 - RNA, 19 nt, Artificial Sequence
  Description of Artificial Sequence: Synthetic oligonucleotide
guugagaggcagugugaac

SEQ ID NO: 1959837 - RNA, 19 nt, Artificial Sequence
  Description of Artificial Sequence: Synthetic oligonucleotide
ugaucaggacgggucacgu

SEQ ID NO: 1959838 - RNA, 19 nt, Artificial Sequence
  Description of Artificial Sequence: Synthetic oligonucleotide
aggguccgcagucggcugg

SEQ ID NO: 1959839 - RNA, 19 nt, Artificial Sequence
  Description of Artificial Sequence: Synthetic oligonucleotide
agcgcucacugauccuagg

SEQ ID NO: 1959840 - RNA, 19 nt, Artificial Sequence
  Description of Artificial Sequence: Synthetic oligonucleotide
caaagguggugucgaguug

SEQ ID NO: 1959841 - RNA, 19 nt, Artificial Sequence
  Description of Artificial Sequence: Synthetic oligonucleotide
ucacuggaugagacgccga

SEQ ID NO: 1959842 - RNA, 19 nt, Artificial Sequence
  Description of Artificial Sequence: Synthetic oligonucleotide
agucggcuggcacagcaau

SEQ ID NO: 1959843 - RNA, 19 nt, Artificial Sequence
  Description of Artificial Sequence: Synthetic oligonucleotide
ugauaccagcgcucacuga

SEQ ID NO: 1959844 - RNA, 19 nt, Artificial Sequence
  Description of Artificial Sequence: Synthetic oligonucleotide
acaguccgcaggcacgcca

SEQ ID NO: 1959845 - RNA, 19 nt, Artificial Sequence
  Description of Artificial Sequence: Synthetic oligonucleotide
ucugcuuggcucgccgucu

SEQ ID NO: 1959846 - RNA, 19 nt, Artificial Sequence
  Description of Artificial Sequence: Synthetic oligonucleotide
ucgcugagggagccaaccu

SEQ ID NO: 1959847 - RNA, 19 nt, Artificial Sequence
  Description of Artificial Sequence: Synthetic oligonucleotide
uggggagaucugcuuggcu

SEQ ID NO: 1959848 - RNA, 19 nt, Artificial Sequence
  Description of Artificial Sequence: Synthetic oligonucleotide
aucgcccuguguugagguc

SEQ ID NO: 1959849 - RNA, 19 nt, Artificial Sequence
  Description of Artificial Sequence: Synthetic oligonucleotide
uccugaaguccaguggguc

SEQ ID NO: 1959850 - RNA, 19 nt, Artificial Sequence
  Description of Artificial Sequence: Synthetic oligonucleotide
ggacgggucacgugugagg

SEQ ID NO: 1959851 - RNA, 19 nt, Artificial Sequence
  Description of Artificial Sequence: Synthetic oligonucleotide
cucacugauccuaggguaa

SEQ ID NO: 1959852 - RNA, 19 nt, Artificial Sequence
  Description of Artificial Sequence: Synthetic oligonucleotide
cacgcgcacuagaggaucc

SEQ ID NO: 1959853 - RNA, 19 nt, Artificial Sequence
  Description of Artificial Sequence: Synthetic oligonucleotide
ggaugagacgccgauuaug

SEQ ID NO: 1959854 - RNA, 19 nt, Artificial Sequence
  Description of Artificial Sequence: Synthetic oligonucleotide
cucuaccacgaaccugacc

SEQ ID NO: 1959855 - RNA, 19 nt, Artificial Sequence
  Description of Artificial Sequence: Synthetic oligonucleotide
guggugucgaguugccuca

SEQ ID NO: 1959856 - RNA, 19 nt, Artificial Sequence
  Description of Artificial Sequence: Synthetic oligonucleotide
cugaguguugugucuggca

SEQ ID NO: 1959857 - RNA, 19 nt, Artificial Sequence
  Description of Artificial Sequence: Synthetic oligonucleotide
acgaaccugaccagcacca

SEQ ID NO: 1959858 - RNA, 19 nt, Artificial Sequence
  Description of Artificial Sequence: Synthetic oligonucleotide
gguaagcagguuucaggac

SEQ ID NO: 1959859 - RNA, 19 nt, Artificial Sequence
  Description of Artificial Sequence: Synthetic oligonucleotide
acagcgaggcuccauccuu

SEQ ID NO: 1959860 - RNA, 19 nt, Artificial Sequence
  Description of Artificial Sequence: Synthetic oligonucleotide
uggaugagacgccgauuau

SEQ ID NO: 1959861 - RNA, 19 nt, Artificial Sequence
  Description of Artificial Sequence: Synthetic oligonucleotide
auaccagcgcucacugauc

SEQ ID NO: 1959862 - RNA, 19 nt, Artificial Sequence
  Description of Artificial Sequence: Synthetic oligonucleotide
gaaguccagugggucacug

SEQ ID NO: 1959863 - RNA, 19 nt, Artificial Sequence
  Description of Artificial Sequence: Synthetic oligonucleotide
aggaaucgcccuguguuga

SEQ ID NO: 1959864 - RNA, 19 nt, Artificial Sequence
  Description of Artificial Sequence: Synthetic oligonucleotide
ggacauagccacacugucc

SEQ ID NO: 1959865 - RNA, 19 nt, Artificial Sequence
  Description of Artificial Sequence: Synthetic oligonucleotide
augcggaugugaacgaaga

SEQ ID NO: 1959866 - RNA, 19 nt, Artificial Sequence
  Description of Artificial Sequence: Synthetic oligonucleotide
accuccacgcgcacuagag

SEQ ID NO: 1959867 - RNA, 19 nt, Artificial Sequence
  Description of Artificial Sequence: Synthetic oligonucleotide
uccuccuccuccuccuccu

SEQ ID NO: 1959868 - RNA, 19 nt, Artificial Sequence
  Description of Artificial Sequence: Synthetic oligonucleotide
ccggguaaacuuccuagcc

SEQ ID NO: 1959869 - RNA, 19 nt, Artificial Sequence
  Description of Artificial Sequence: Synthetic oligonucleotide
guugcugaguguugugucu

SEQ ID NO: 1959870 - RNA, 19 nt, Artificial Sequence
  Description of Artificial Sequence: Synthetic oligonucleotide
caucggguacacucugguc

SEQ ID NO: 1959871 - RNA, 19 nt, Artificial Sequence
  Description of Artificial Sequence: Synthetic oligonucleotide
aguucugaaugcggaugug

SEQ ID NO: 1959872 - RNA, 19 nt, Artificial Sequence
  Description of Artificial Sequence: Synthetic oligonucleotide
gcgcucacugauccuaggg

SEQ ID NO: 1959873 - RNA, 19 nt, Artificial Sequence
  Description of Artificial Sequence: Synthetic oligonucleotide
gggacugaacagcucucag

SEQ ID NO: 1959874 - RNA, 19 nt, Artificial Sequence
  Description of Artificial Sequence: Synthetic oligonucleotide
uccacgcgcacuagaggau

SEQ ID NO: 1959875 - RNA, 19 nt, Artificial Sequence
  Description of Artificial Sequence: Synthetic oligonucleotide
ggaaccaccucaaggcccc

SEQ ID NO: 1959876 - RNA, 19 nt, Artificial Sequence
  Description of Artificial Sequence: Synthetic oligonucleotide
ugagggagccaaccuugua

SEQ ID NO: 1959877 - RNA, 19 nt, Artificial Sequence
  Description of Artificial Sequence: Synthetic oligonucleotide
acgggucacgugugagggg

SEQ ID NO: 1959878 - RNA, 19 nt, Artificial Sequence
  Description of Artificial Sequence: Synthetic oligonucleotide
caccaacugacagccugcg

SEQ ID NO: 1959879 - RNA, 19 nt, Artificial Sequence
  Description of Artificial Sequence: Synthetic oligonucleotide
ucacgugugaggggcuggc

SEQ ID NO: 1959880 - RNA, 19 nt, Artificial Sequence
  Description of Artificial Sequence: Synthetic oligonucleotide
aggggucugaaaguucaga

SEQ ID NO: 1959881 - RNA, 19 nt, Artificial Sequence
  Description of Artificial Sequence: Synthetic oligonucleotide
ugccucccggguaaacuuc

SEQ ID NO: 1959882 - RNA, 19 nt, Artificial Sequence
  Description of Artificial Sequence: Synthetic oligonucleotide
cgugccaugauaccagcgc

SEQ ID NO: 1959883 - RNA, 19 nt, Artificial Sequence
  Description of Artificial Sequence: Synthetic oligonucleotide
gggagccaaccuuguaagg

SEQ ID NO: 1959884 - RNA, 19 nt, Artificial Sequence
  Description of Artificial Sequence: Synthetic oligonucleotide
cuugugggcacaguccgca

SEQ ID NO: 1959885 - RNA, 19 nt, Artificial Sequence
  Description of Artificial Sequence: Synthetic oligonucleotide
gggagagguggagucauag

SEQ ID NO: 1959886 - RNA, 19 nt, Artificial Sequence
  Description of Artificial Sequence: Synthetic oligonucleotide
acgaagaguguggccgggg

SEQ ID NO: 1959887 - RNA, 19 nt, Artificial Sequence
  Description of Artificial Sequence: Synthetic oligonucleotide
agugggucacuggaugaga

SEQ ID NO: 1959888 - RNA, 19 nt, Artificial Sequence
  Description of Artificial Sequence: Synthetic oligonucleotide
gcuguugggccguuaguac

SEQ ID NO: 1959889 - RNA, 19 nt, Artificial Sequence
  Description of Artificial Sequence: Synthetic oligonucleotide
cuggacugucagaguagug

SEQ ID NO: 1959890 - RNA, 19 nt, Artificial Sequence
  Description of Artificial Sequence: Synthetic oligonucleotide
gagacccucaagaguucug

SEQ ID NO: 1959891 - RNA, 19 nt, Artificial Sequence
  Description of Artificial Sequence: Synthetic oligonucleotide
accacgaaccugaccagca

SEQ ID NO: 1959892 - RNA, 19 nt, Artificial Sequence
  Description of Artificial Sequence: Synthetic oligonucleotide
caccagguaugcucagcac

SEQ ID NO: 1959893 - RNA, 19 nt, Artificial Sequence
  Description of Artificial Sequence: Synthetic oligonucleotide
cagugggucacuggaugag

SEQ ID NO: 1959894 - RNA, 19 nt, Artificial Sequence
  Description of Artificial Sequence: Synthetic oligonucleotide
agggacugaacagcucuca

SEQ ID NO: 1959895 - RNA, 19 nt, Artificial Sequence
  Description of Artificial Sequence: Synthetic oligonucleotide
uugcgcucgcugagggagc

SEQ ID NO: 1959896 - RNA, 19 nt, Artificial Sequence
  Description of Artificial Sequence: Synthetic oligonucleotide
gguuggaggcuccugaagu

SEQ ID NO: 1959897 - RNA, 19 nt, Artificial Sequence
  Description of Artificial Sequence: Synthetic oligonucleotide
cacucuggucaguugcuga

SEQ ID NO: 1959898 - RNA, 19 nt, Artificial Sequence
  Description of Artificial Sequence: Synthetic oligonucleotide
cagcgaggcuccauccuug

SEQ ID NO: 1959899 - RNA, 19 nt, Artificial Sequence
  Description of Artificial Sequence: Synthetic oligonucleotide
gaggauccacgauggagcu

SEQ ID NO: 1959900 - RNA, 19 nt, Artificial Sequence
  Description of Artificial Sequence: Synthetic oligonucleotide
cuccuccuccuccuccucc

SEQ ID NO: 1959901 - RNA, 19 nt, Artificial Sequence
  Description of Artificial Sequence: Synthetic oligonucleotide
uuccuagccuugcgcucgc

SEQ ID NO: 1959902 - RNA, 19 nt, Artificial Sequence
  Description of Artificial Sequence: Synthetic oligonucleotide
aggacgggucacgugugag

SEQ ID NO: 1959903 - RNA, 19 nt, Artificial Sequence
  Description of Artificial Sequence: Synthetic oligonucleotide
ggcacaguccgcaggcacg

SEQ ID NO: 1959904 - RNA, 19 nt, Artificial Sequence
  Description of Artificial Sequence: Synthetic oligonucleotide
caugauaccagcgcucacu

SEQ ID NO: 1959905 - RNA, 19 nt, Artificial Sequence
  Description of Artificial Sequence: Synthetic oligonucleotide
cagcgcucacugauccuag

SEQ ID NO: 1959906 - RNA, 19 nt, Artificial Sequence
  Description of Artificial Sequence: Synthetic oligonucleotide
caggacauagccacacugu

SEQ ID NO: 1959907 - RNA, 19 nt, Artificial Sequence
  Description of Artificial Sequence: Synthetic oligonucleotide
aggguuggaggcuccugaa

SEQ ID NO: 1959908 - RNA, 19 nt, Artificial Sequence
  Description of Artificial Sequence: Synthetic oligonucleotide
gccauggaccuccacgcgc

SEQ ID NO: 1959909 - RNA, 19 nt, Artificial Sequence
  Description of Artificial Sequence: Synthetic oligonucleotide
gguuauaguuggcugaguu

SEQ ID NO: 1959910 - RNA, 19 nt, Artificial Sequence
  Description of Artificial Sequence: Synthetic oligonucleotide
accaacugacagccugcgu

SEQ ID NO: 1959911 - RNA, 19 nt, Artificial Sequence
  Description of Artificial Sequence: Synthetic oligonucleotide
cccggguaaacuuccuagc

SEQ ID NO: 1959912 - RNA, 19 nt, Artificial Sequence
  Description of Artificial Sequence: Synthetic oligonucleotide
aucucguagccaggggucu

SEQ ID NO: 1959913 - RNA, 19 nt, Artificial Sequence
  Description of Artificial Sequence: Synthetic oligonucleotide
gauccuaggguaagugagu

SEQ ID NO: 1959914 - RNA, 19 nt, Artificial Sequence
  Description of Artificial Sequence: Synthetic oligonucleotide
gagggcucgugccaugaua

SEQ ID NO: 1959915 - RNA, 19 nt, Artificial Sequence
  Description of Artificial Sequence: Synthetic oligonucleotide
ugucucacugagggacuga

SEQ ID NO: 1959916 - RNA, 19 nt, Artificial Sequence
  Description of Artificial Sequence: Synthetic oligonucleotide
ggacagcgaggcuccaucc

SEQ ID NO: 1959917 - RNA, 19 nt, Artificial Sequence
  Description of Artificial Sequence: Synthetic oligonucleotide
gcguuccacaucucuuggg

SEQ ID NO: 1959918 - RNA, 19 nt, Artificial Sequence
  Description of Artificial Sequence: Synthetic oligonucleotide
agccaaccuuguaaggcug

SEQ ID NO: 1959919 - RNA, 19 nt, Artificial Sequence
  Description of Artificial Sequence: Synthetic oligonucleotide
ggaaucgcccuguguugag

SEQ ID NO: 1959920 - RNA, 19 nt, Artificial Sequence
  Description of Artificial Sequence: Synthetic oligonucleotide
uuauggcccugugucucac

SEQ ID NO: 1959921 - RNA, 19 nt, Artificial Sequence
  Description of Artificial Sequence: Synthetic oligonucleotide
gaaugcggaugugaacgaa

SEQ ID NO: 1959922 - RNA, 19 nt, Artificial Sequence
  Description of Artificial Sequence: Synthetic oligonucleotide
gaacagcucucagcaccag

SEQ ID NO: 1959923 - RNA, 19 nt, Artificial Sequence
  Description of Artificial Sequence: Synthetic oligonucleotide
uauggcccugugucucacu

SEQ ID NO: 1959924 - RNA, 19 nt, Artificial Sequence
  Description of Artificial Sequence: Synthetic oligonucleotide
ugagaguucuggggagauc

SEQ ID NO: 1959925 - RNA, 19 nt, Artificial Sequence
  Description of Artificial Sequence: Synthetic oligonucleotide
gacccucaagaguucugaa

SEQ ID NO: 1959926 - RNA, 19 nt, Artificial Sequence
  Description of Artificial Sequence: Synthetic oligonucleotide
ugcgcucgcugagggagcc

SEQ ID NO: 1959927 - RNA, 19 nt, Artificial Sequence
  Description of Artificial Sequence: Synthetic oligonucleotide
caaggccccaggguuggag

SEQ ID NO: 1959928 - RNA, 19 nt, Artificial Sequence
  Description of Artificial Sequence: Synthetic oligonucleotide
guccucuaccacgaaccug

SEQ ID NO: 1959929 - RNA, 19 nt, Artificial Sequence
  Description of Artificial Sequence: Synthetic oligonucleotide
gugucgaguugccucaggu

SEQ ID NO: 1959930 - RNA, 19 nt, Artificial Sequence
  Description of Artificial Sequence: Synthetic oligonucleotide
cagccugcguuccacaucu

SEQ ID NO: 1959931 - RNA, 19 nt, Artificial Sequence
  Description of Artificial Sequence: Synthetic oligonucleotide
gccuugcgcucgcugaggg

SEQ ID NO: 1959932 - RNA, 19 nt, Artificial Sequence
  Description of Artificial Sequence: Synthetic oligonucleotide
guuucaggacauagccaca

SEQ ID NO: 1959933 - RNA, 19 nt, Artificial Sequence
  Description of Artificial Sequence: Synthetic oligonucleotide
gugucucacugagggacug

SEQ ID NO: 1959934 - RNA, 19 nt, Artificial Sequence
  Description of Artificial Sequence: Synthetic oligonucleotide
uggcucgccgucucugcuc

SEQ ID NO: 1959935 - RNA, 19 nt, Artificial Sequence
  Description of Artificial Sequence: Synthetic oligonucleotide
gacagcgaggcuccauccu

SEQ ID NO: 1959936 - RNA, 19 nt, Artificial Sequence
  Description of Artificial Sequence: Synthetic oligonucleotide
gggacagcgaggcuccauc

SEQ ID NO: 1959937 - RNA, 19 nt, Artificial Sequence
  Description of Artificial Sequence: Synthetic oligonucleotide
gucaguugcugaguguugu

SEQ ID NO: 1959938 - RNA, 19 nt, Artificial Sequence
  Description of Artificial Sequence: Synthetic oligonucleotide
gcgcacuagaggauccacg

SEQ ID NO: 1959939 - RNA, 19 nt, Artificial Sequence
  Description of Artificial Sequence: Synthetic oligonucleotide
gacccguaguuggaacuuc

SEQ ID NO: 1959940 - RNA, 19 nt, Artificial Sequence
  Description of Artificial Sequence: Synthetic oligonucleotide
uggugucgaguugccucag

SEQ ID NO: 1959941 - RNA, 19 nt, Artificial Sequence
  Description of Artificial Sequence: Synthetic oligonucleotide
cacucccauggucccuugc

SEQ ID NO: 1959942 - RNA, 19 nt, Artificial Sequence
  Description of Artificial Sequence: Synthetic oligonucleotide
ccacacuguccauuuauga

SEQ ID NO: 1959943 - RNA, 19 nt, Artificial Sequence
  Description of Artificial Sequence: Synthetic oligonucleotide
ucuccuccuccuccuccuc

SEQ ID NO: 1959944 - RNA, 19 nt, Artificial Sequence
  Description of Artificial Sequence: Synthetic oligonucleotide
cuguccauuuaugaggaau

SEQ ID NO: 1959945 - RNA, 19 nt, Artificial Sequence
  Description of Artificial Sequence: Synthetic oligonucleotide
acccguaguuggaacuuca

SEQ ID NO: 1959946 - RNA, 19 nt, Artificial Sequence
  Description of Artificial Sequence: Synthetic oligonucleotide
caaagucauugggagaggu

SEQ ID NO: 1959947 - RNA, 19 nt, Artificial Sequence
  Description of Artificial Sequence: Synthetic oligonucleotide
ccugaaguccaguggguca

SEQ ID NO: 1959948 - RNA, 19 nt, Artificial Sequence
  Description of Artificial Sequence: Synthetic oligonucleotide
agccaggggucugaaaguu

SEQ ID NO: 1959949 - RNA, 19 nt, Artificial Sequence
  Description of Artificial Sequence: Synthetic oligonucleotide
agcccaucggguacacucu

SEQ ID NO: 1959950 - RNA, 19 nt, Artificial Sequence
  Description of Artificial Sequence: Synthetic oligonucleotide
ccaccucaaggccccaggg

SEQ ID NO: 1959951 - RNA, 19 nt, Artificial Sequence
  Description of Artificial Sequence: Synthetic oligonucleotide
acuggaugagacgccgauu

SEQ ID NO: 1959952 - RNA, 19 nt, Artificial Sequence
  Description of Artificial Sequence: Synthetic oligonucleotide
ugcucagcaccuggugauc

SEQ ID NO: 1959953 - RNA, 19 nt, Artificial Sequence
  Description of Artificial Sequence: Synthetic oligonucleotide
aguccgcaggcacgccaug

SEQ ID NO: 1959954 - RNA, 19 nt, Artificial Sequence
  Description of Artificial Sequence: Synthetic oligonucleotide
gcagucggcuggcacagca

SEQ ID NO: 1959955 - RNA, 19 nt, Artificial Sequence
  Description of Artificial Sequence: Synthetic oligonucleotide
ggcucgugccaugauacca

SEQ ID NO: 1959956 - RNA, 19 nt, Artificial Sequence
  Description of Artificial Sequence: Synthetic oligonucleotide
gucucacugagggacugaa

SEQ ID NO: 1959957 - RNA, 19 nt, Artificial Sequence
  Description of Artificial Sequence: Synthetic oligonucleotide
cccguaguuggaacuucag

SEQ ID NO: 1959958 - RNA, 19 nt, Artificial Sequence
  Description of Artificial Sequence: Synthetic oligonucleotide
gcggaugugaacgaagagu

SEQ ID NO: 1959959 - RNA, 19 nt, Artificial Sequence
  Description of Artificial Sequence: Synthetic oligonucleotide
cccaucggguacacucugg

SEQ ID NO: 1959960 - RNA, 19 nt, Artificial Sequence
  Description of Artificial Sequence: Synthetic oligonucleotide
gucaaagguggugucgagu

SEQ ID NO: 1959961 - RNA, 19 nt, Artificial Sequence
  Description of Artificial Sequence: Synthetic oligonucleotide
acgccgauuauggcccugu

SEQ ID NO: 1959962 - RNA, 19 nt, Artificial Sequence
  Description of Artificial Sequence: Synthetic oligonucleotide
gaguugccucagguaagca

SEQ ID NO: 1959963 - RNA, 19 nt, Artificial Sequence
  Description of Artificial Sequence: Synthetic oligonucleotide
gacagccugcguuccacau

SEQ ID NO: 1959964 - RNA, 19 nt, Artificial Sequence
  Description of Artificial Sequence: Synthetic oligonucleotide
guccgcagucggcuggcac

SEQ ID NO: 1959965 - RNA, 19 nt, Artificial Sequence
  Description of Artificial Sequence: Synthetic oligonucleotide
guugggccguuaguaccug

SEQ ID NO: 1959966 - RNA, 19 nt, Artificial Sequence
  Description of Artificial Sequence: Synthetic oligonucleotide
cagguaugcucagcaccug

SEQ ID NO: 1959967 - RNA, 19 nt, Artificial Sequence
  Description of Artificial Sequence: Synthetic oligonucleotide
cauggaccuccacgcgcac

SEQ ID NO: 1959968 - RNA, 19 nt, Artificial Sequence
  Description of Artificial Sequence: Synthetic oligonucleotide
gcugaguguugugucuggc

SEQ ID NO: 1959969 - RNA, 19 nt, Artificial Sequence
  Description of Artificial Sequence: Synthetic oligonucleotide
cgcacuagaggauccacga

SEQ ID NO: 1959970 - RNA, 19 nt, Artificial Sequence
  Description of Artificial Sequence: Synthetic oligonucleotide
agacgccgauuauggcccu

SEQ ID NO: 1959971 - RNA, 19 nt, Artificial Sequence
  Description of Artificial Sequence: Synthetic oligonucleotide
gugugaggggcuggcacuc

SEQ ID NO: 1959972 - RNA, 19 nt, Artificial Sequence
  Description of Artificial Sequence: Synthetic oligonucleotide
ggugaucaggacgggucac

SEQ ID NO: 1959973 - RNA, 19 nt, Artificial Sequence
  Description of Artificial Sequence: Synthetic oligonucleotide
auggaccuccacgcgcacu

SEQ ID NO: 1959974 - RNA, 19 nt, Artificial Sequence
  Description of Artificial Sequence: Synthetic oligonucleotide
gcacaguccgcaggcacgc

SEQ ID NO: 1959975 - RNA, 19 nt, Artificial Sequence
  Description of Artificial Sequence: Synthetic oligonucleotide
ggccguuaguaccuggacu

SEQ ID NO: 1959976 - RNA, 19 nt, Artificial Sequence
  Description of Artificial Sequence: Synthetic oligonucleotide
gacgccgauuauggcccug

SEQ ID NO: 1959977 - RNA, 19 nt, Artificial Sequence
  Description of Artificial Sequence: Synthetic oligonucleotide
ccagguaugcucagcaccu

SEQ ID NO: 1959978 - RNA, 19 nt, Artificial Sequence
  Description of Artificial Sequence: Synthetic oligonucleotide
guguugagguccaucucgu

SEQ ID NO: 1959979 - RNA, 19 nt, Artificial Sequence
  Description of Artificial Sequence: Synthetic oligonucleotide
ccauggaccuccacgcgca

SEQ ID NO: 1959980 - RNA, 19 nt, Artificial Sequence
  Description of Artificial Sequence: Synthetic oligonucleotide
gucuccuccuccuccuccu

SEQ ID NO: 1959981 - RNA, 19 nt, Artificial Sequence
  Description of Artificial Sequence: Synthetic oligonucleotide
cgaguugccucagguaagc

SEQ ID NO: 1959982 - RNA, 19 nt, Artificial Sequence
  Description of Artificial Sequence: Synthetic oligonucleotide
ccuagccuugcgcucgcug

SEQ ID NO: 1959983 - RNA, 19 nt, Artificial Sequence
  Description of Artificial Sequence: Synthetic oligonucleotide
caguugcugaguguugugu

SEQ ID NO: 1959984 - RNA, 19 nt, Artificial Sequence
  Description of Artificial Sequence: Synthetic oligonucleotide
gcccaucggguacacucug

SEQ ID NO: 1959985 - RNA, 19 nt, Artificial Sequence
  Description of Artificial Sequence: Synthetic oligonucleotide
cgggucacgugugaggggc

SEQ ID NO: 1959986 - RNA, 19 nt, Artificial Sequence
  Description of Artificial Sequence: Synthetic oligonucleotide
ggucacgugugaggggcug

SEQ ID NO: 1959987 - RNA, 19 nt, Artificial Sequence
  Description of Artificial Sequence: Synthetic oligonucleotide
guaccuggacugucagagu

SEQ ID NO: 1959988 - RNA, 19 nt, Artificial Sequence
  Description of Artificial Sequence: Synthetic oligonucleotide
gccggggacagcgaggcuc

SEQ ID NO: 1959989 - RNA, 19 nt, Artificial Sequence
  Description of Artificial Sequence: Synthetic oligonucleotide
cucguagccaggggucuga

SEQ ID NO: 1959990 - RNA, 19 nt, Artificial Sequence
  Description of Artificial Sequence: Synthetic oligonucleotide
caggcuguugagaggcagu

SEQ ID NO: 1959991 - RNA, 19 nt, Artificial Sequence
  Description of Artificial Sequence: Synthetic oligonucleotide
ccacgaaccugaccagcac

SEQ ID NO: 1959992 - RNA, 19 nt, Artificial Sequence
  Description of Artificial Sequence: Synthetic oligonucleotide
gggacccguaguuggaacu

SEQ ID NO: 1959993 - RNA, 19 nt, Artificial Sequence
  Description of Artificial Sequence: Synthetic oligonucleotide
ucguagccaggggucugaa

SEQ ID NO: 1959994 - RNA, 19 nt, Artificial Sequence
  Description of Artificial Sequence: Synthetic oligonucleotide
caggacgggucacguguga

SEQ ID NO: 1959995 - RNA, 19 nt, Artificial Sequence
  Description of Artificial Sequence: Synthetic oligonucleotide
acgcgcacuagaggaucca

SEQ ID NO: 1959996 - RNA, 19 nt, Artificial Sequence
  Description of Artificial Sequence: Synthetic oligonucleotide
cuggucaguugcugagugu

SEQ ID NO: 1959997 - RNA, 19 nt, Artificial Sequence
  Description of Artificial Sequence: Synthetic oligonucleotide
gccucccggguaaacuucc

SEQ ID NO: 1959998 - RNA, 19 nt, Artificial Sequence
  Description of Artificial Sequence: Synthetic oligonucleotide
cacuggaugagacgccgau

SEQ ID NO: 1959999 - RNA, 19 nt, Artificial Sequence
  Description of Artificial Sequence: Synthetic oligonucleotide
cucccggguaaacuuccua

SEQ ID NO: 1960000 - RNA, 19 nt, Artificial Sequence
  Description of Artificial Sequence: Synthetic oligonucleotide
gcucagcaccuggugauca

SEQ ID NO: 1960001 - RNA, 19 nt, Artificial Sequence
  Description of Artificial Sequence: Synthetic oligonucleotide
gcucuagagagggcucgug

SEQ ID NO: 1960002 - RNA, 19 nt, Artificial Sequence
  Description of Artificial Sequence: Synthetic oligonucleotide
cacaguccgcaggcacgcc

SEQ ID NO: 1960003 - RNA, 19 nt, Artificial Sequence
  Description of Artificial Sequence: Synthetic oligonucleotide
gguaugcucagcaccuggu

SEQ ID NO: 1960004 - RNA, 19 nt, Artificial Sequence
  Description of Artificial Sequence: Synthetic oligonucleotide
cagucggcuggcacagcaa

SEQ ID NO: 1960005 - RNA, 19 nt, Artificial Sequence
  Description of Artificial Sequence: Synthetic oligonucleotide
cauagccacacuguccauu

SEQ ID NO: 1960006 - RNA, 19 nt, Artificial Sequence
  Description of Artificial Sequence: Synthetic oligonucleotide
gaguucauccgcagcccau

SEQ ID NO: 1960007 - RNA, 19 nt, Artificial Sequence
  Description of Artificial Sequence: Synthetic oligonucleotide
gccgauuauggcccugugu

SEQ ID NO: 1960008 - RNA, 19 nt, Artificial Sequence
  Description of Artificial Sequence: Synthetic oligonucleotide
caccucaaggccccagggu

SEQ ID NO: 1960009 - RNA, 19 nt, Artificial Sequence
  Description of Artificial Sequence: Synthetic oligonucleotide
ccaugauaccagcgcucac

SEQ ID NO: 1960010 - RNA, 19 nt, Artificial Sequence
  Description of Artificial Sequence: Synthetic oligonucleotide
ccaucucguagccaggggu

SEQ ID NO: 1960011 - RNA, 19 nt, Artificial Sequence
  Description of Artificial Sequence: Synthetic oligonucleotide
cagcucucagcaccaggua

SEQ ID NO: 1960012 - RNA, 19 nt, Artificial Sequence
  Description of Artificial Sequence: Synthetic oligonucleotide
cugccucccggguaaacuu

SEQ ID NO: 1960013 - RNA, 19 nt, Artificial Sequence
  Description of Artificial Sequence: Synthetic oligonucleotide
gccaaccuuguaaggcuga

SEQ ID NO: 1960014 - RNA, 19 nt, Artificial Sequence
  Description of Artificial Sequence: Synthetic oligonucleotide
ccgcaggcacgccauggac

SEQ ID NO: 1960015 - RNA, 19 nt, Artificial Sequence
  Description of Artificial Sequence: Synthetic oligonucleotide
ggaugugaacgaagagugu

SEQ ID NO: 1960016 - RNA, 19 nt, Artificial Sequence
  Description of Artificial Sequence: Synthetic oligonucleotide
cguuaguaccuggacuguc

SEQ ID NO: 1960017 - RNA, 19 nt, Artificial Sequence
  Description of Artificial Sequence: Synthetic oligonucleotide
gccugcguuccacaucucu

SEQ ID NO: 1960018 - RNA, 19 nt, Artificial Sequence
  Description of Artificial Sequence: Synthetic oligonucleotide
gucggcuggcacagcaaua

SEQ ID NO: 1960019 - RNA, 19 nt, Artificial Sequence
  Description of Artificial Sequence: Synthetic oligonucleotide
gguaagugagugagacccu

SEQ ID NO: 1960020 - RNA, 19 nt, Artificial Sequence
  Description of Artificial Sequence: Synthetic oligonucleotide
ccacgcgcacuagaggauc

SEQ ID NO: 1960021 - RNA, 19 nt, Artificial Sequence
  Description of Artificial Sequence: Synthetic oligonucleotide
cucuggucaguugcugagu

SEQ ID NO: 1960022 - RNA, 19 nt, Artificial Sequence
  Description of Artificial Sequence: Synthetic oligonucleotide
ggaccuccacgcgcacuag

SEQ ID NO: 1960023 - RNA, 19 nt, Artificial Sequence
  Description of Artificial Sequence: Synthetic oligonucleotide
ccucuaccacgaaccugac

SEQ ID NO: 1960024 - RNA, 19 nt, Artificial Sequence
  Description of Artificial Sequence: Synthetic oligonucleotide
ccgcagucggcuggcacag

SEQ ID NO: 1960025 - RNA, 19 nt, Artificial Sequence
  Description of Artificial Sequence: Synthetic oligonucleotide
agccauuguugagcacaua

SEQ ID NO: 1960026 - RNA, 19 nt, Artificial Sequence
  Description of Artificial Sequence: Synthetic oligonucleotide
cacgugugaggggcuggca

SEQ ID NO: 1960027 - RNA, 19 nt, Artificial Sequence
  Description of Artificial Sequence: Synthetic oligonucleotide
gccaggggucugaaaguuc

SEQ ID NO: 1960028 - RNA, 19 nt, Artificial Sequence
  Description of Artificial Sequence: Synthetic oligonucleotide
cgccauggaccuccacgcg

SEQ ID NO: 1960029 - RNA, 19 nt, Artificial Sequence
  Description of Artificial Sequence: Synthetic oligonucleotide
agccugcguuccacaucuc

SEQ ID NO: 1960030 - RNA, 19 nt, Artificial Sequence
  Description of Artificial Sequence: Synthetic oligonucleotide
cacugauccuaggguaagu

SEQ ID NO: 1960031 - RNA, 19 nt, Artificial Sequence
  Description of Artificial Sequence: Synthetic oligonucleotide
caguccgcaggcacgccau

SEQ ID NO: 1960032 - RNA, 19 nt, Artificial Sequence
  Description of Artificial Sequence: Synthetic oligonucleotide
ccuccuccuccuccucccc

SEQ ID NO: 1960033 - RNA, 19 nt, Artificial Sequence
  Description of Artificial Sequence: Synthetic oligonucleotide
cagcuguugggccguuagu

SEQ ID NO: 1960034 - RNA, 19 nt, Artificial Sequence
  Description of Artificial Sequence: Synthetic oligonucleotide
ggguccgcagucggcuggc

SEQ ID NO: 1960035 - RNA, 19 nt, Artificial Sequence
  Description of Artificial Sequence: Synthetic oligonucleotide
ccaucggguacacucuggu

SEQ ID NO: 1960036 - RNA, 19 nt, Artificial Sequence
  Description of Artificial Sequence: Synthetic oligonucleotide
ccagcgcucacugauccua

SEQ ID NO: 1960037 - RNA, 19 nt, Artificial Sequence
  Description of Artificial Sequence: Synthetic oligonucleotide
gcacuagaggauccacgau

SEQ ID NO: 1960038 - RNA, 19 nt, Artificial Sequence
  Description of Artificial Sequence: Synthetic oligonucleotide
accagcucugggacccgua

SEQ ID NO: 1960039 - RNA, 19 nt, Artificial Sequence
  Description of Artificial Sequence: Synthetic oligonucleotide
gcacucccauggucccuug

SEQ ID NO: 1960040 - RNA, 19 nt, Artificial Sequence
  Description of Artificial Sequence: Synthetic oligonucleotide
cgaaccugaccagcaccag

SEQ ID NO: 1960041 - RNA, 19 nt, Artificial Sequence
  Description of Artificial Sequence: Synthetic oligonucleotide
cggguaaacuuccuagccu

SEQ ID NO: 1960042 - RNA, 19 nt, Artificial Sequence
  Description of Artificial Sequence: Synthetic oligonucleotide
cgauuauggcccugugucu

SEQ ID NO: 1960043 - RNA, 19 nt, Artificial Sequence
  Description of Artificial Sequence: Synthetic oligonucleotide
ucccugccucccggguaaa

SEQ ID NO: 1960044 - RNA, 19 nt, Artificial Sequence
  Description of Artificial Sequence: Synthetic oligonucleotide
ccuggacugucagaguagu

SEQ ID NO: 1960045 - RNA, 19 nt, Artificial Sequence
  Description of Artificial Sequence: Synthetic oligonucleotide
ccuugcgcucgcugaggga

SEQ ID NO: 1960046 - RNA, 19 nt, Artificial Sequence
  Description of Artificial Sequence: Synthetic oligonucleotide
ggguacacucuggucaguu

SEQ ID NO: 1960047 - RNA, 19 nt, Artificial Sequence
  Description of Artificial Sequence: Synthetic oligonucleotide
cgcucacugauccuagggu

SEQ ID NO: 1960048 - RNA, 19 nt, Artificial Sequence
  Description of Artificial Sequence: Synthetic oligonucleotide
caggcacgccauggaccuc

SEQ ID NO: 1960049 - RNA, 19 nt, Artificial Sequence
  Description of Artificial Sequence: Synthetic oligonucleotide
ggacccguaguuggaacuu

SEQ ID NO: 1960050 - RNA, 19 nt, Artificial Sequence
  Description of Artificial Sequence: Synthetic oligonucleotide
ccuccuccuccuccuccuc

SEQ ID NO: 1960051 - RNA, 19 nt, Artificial Sequence
  Description of Artificial Sequence: Synthetic oligonucleotide
gcucgcugagggagccaac

SEQ ID NO: 1960052 - RNA, 19 nt, Artificial Sequence
  Description of Artificial Sequence: Synthetic oligonucleotide
cgccgauuauggcccugug

SEQ ID NO: 1960053 - RNA, 19 nt, Artificial Sequence
  Description of Artificial Sequence: Synthetic oligonucleotide
gcucgccgucucugcucug

SEQ ID NO: 1960054 - RNA, 19 nt, Artificial Sequence
  Description of Artificial Sequence: Synthetic oligonucleotide
ccuggugaucaggacgggu

SEQ ID NO: 1960055 - RNA, 19 nt, Artificial Sequence
  Description of Artificial Sequence: Synthetic oligonucleotide
ggcacgccauggaccucca

SEQ ID NO: 1960056 - RNA, 19 nt, Artificial Sequence
  Description of Artificial Sequence: Synthetic oligonucleotide
cccugccucccggguaaac

SEQ ID NO: 1960057 - RNA, 19 nt, Artificial Sequence
  Description of Artificial Sequence: Synthetic oligonucleotide
gguccgcagucggcuggca

SEQ ID NO: 1960058 - RNA, 19 nt, Artificial Sequence
  Description of Artificial Sequence: Synthetic oligonucleotide
cggcuggcacagcaauaca

SEQ ID NO: 1960059 - RNA, 19 nt, Artificial Sequence
  Description of Artificial Sequence: Synthetic oligonucleotide
ccguuaguaccuggacugu

SEQ ID NO: 1960060 - RNA, 19 nt, Artificial Sequence
  Description of Artificial Sequence: Synthetic oligonucleotide
ggcagcuguugggccguua

SEQ ID NO: 1960061 - RNA, 19 nt, Artificial Sequence
  Description of Artificial Sequence: Synthetic oligonucleotide
gggucacgugugaggggcu

SEQ ID NO: 1960062 - RNA, 19 nt, Artificial Sequence
  Description of Artificial Sequence: Synthetic oligonucleotide
gcgcucgcugagggagcca

SEQ ID NO: 1960063 - RNA, 19 nt, Artificial Sequence
  Description of Artificial Sequence: Synthetic oligonucleotide
cggguacacucuggucagu

SEQ ID NO: 1960064 - RNA, 19 nt, Artificial Sequence
  Description of Artificial Sequence: Synthetic oligonucleotide
auugauaaaauuuauauag

SEQ ID NO: 1960065 - RNA, 19 nt, Artificial Sequence
  Description of Artificial Sequence: Synthetic oligonucleotide
auaaaauuuauauaguggc

SEQ ID NO: 1960066 - RNA, 19 nt, Artificial Sequence
  Description of Artificial Sequence: Synthetic oligonucleotide
gaagguaugguauaaaagg

SEQ ID NO: 1960067 - RNA, 19 nt, Artificial Sequence
  Description of Artificial Sequence: Synthetic oligonucleotide
aauagaauccacaugaguc

SEQ ID NO: 1960068 - RNA, 19 nt, Artificial Sequence
  Description of Artificial Sequence: Synthetic oligonucleotide
aguaggaucaaagaaaggc

SEQ ID NO: 1960069 - RNA, 19 nt, Artificial Sequence
  Description of Artificial Sequence: Synthetic oligonucleotide
uuaacaaauaccuacggga

SEQ ID NO: 1960070 - RNA, 19 nt, Artificial Sequence
  Description of Artificial Sequence: Synthetic oligonucleotide
uguagauugucccaguagg

SEQ ID NO: 1960071 - RNA, 19 nt, Artificial Sequence
  Description of Artificial Sequence: Synthetic oligonucleotide
aggguuaacaaauaccuac

SEQ ID NO: 1960072 - RNA, 19 nt, Artificial Sequence
  Description of Artificial Sequence: Synthetic oligonucleotide
ucuaccaucaauccaaaga

SEQ ID NO: 1960073 - RNA, 19 nt, Artificial Sequence
  Description of Artificial Sequence: Synthetic oligonucleotide
ugcuauuggagaaauacag

SEQ ID NO: 1960074 - RNA, 19 nt, Artificial Sequence
  Description of Artificial Sequence: Synthetic oligonucleotide
uuuccuauccaacaauagg

SEQ ID NO: 1960075 - RNA, 19 nt, Artificial Sequence
  Description of Artificial Sequence: Synthetic oligonucleotide
gaauaaguaagaaacacug

SEQ ID NO: 1960076 - RNA, 19 nt, Artificial Sequence
  Description of Artificial Sequence: Synthetic oligonucleotide
auagacuuucuccagcugc

SEQ ID NO: 1960077 - RNA, 19 nt, Artificial Sequence
  Description of Artificial Sequence: Synthetic oligonucleotide
uuauuguuaagacugugca

SEQ ID NO: 1960078 - RNA, 19 nt, Artificial Sequence
  Description of Artificial Sequence: Synthetic oligonucleotide
agguuaguaaagcacacac

SEQ ID NO: 1960079 - RNA, 19 nt, Artificial Sequence
  Description of Artificial Sequence: Synthetic oligonucleotide
aguacaaagauagacuuuc

SEQ ID NO: 1960080 - RNA, 19 nt, Artificial Sequence
  Description of Artificial Sequence: Synthetic oligonucleotide
uuccuauccaacaauagga

SEQ ID NO: 1960081 - RNA, 19 nt, Artificial Sequence
  Description of Artificial Sequence: Synthetic oligonucleotide
auccacaugagucaucuac

SEQ ID NO: 1960082 - RNA, 19 nt, Artificial Sequence
  Description of Artificial Sequence: Synthetic oligonucleotide
uaacaaauaccuacgggag

SEQ ID NO: 1960083 - RNA, 19 nt, Artificial Sequence
  Description of Artificial Sequence: Synthetic oligonucleotide
guuaagacugugcaaaugc

SEQ ID NO: 1960084 - RNA, 19 nt, Artificial Sequence
  Description of Artificial Sequence: Synthetic oligonucleotide
agggcgucuacuuugaggg

SEQ ID NO: 1960085 - RNA, 19 nt, Artificial Sequence
  Description of Artificial Sequence: Synthetic oligonucleotide
uauaaaagguuaguaaagc

SEQ ID NO: 1960086 - RNA, 19 nt, Artificial Sequence
  Description of Artificial Sequence: Synthetic oligonucleotide
aacaagucaacaucaguca

SEQ ID NO: 1960087 - RNA, 19 nt, Artificial Sequence
  Description of Artificial Sequence: Synthetic oligonucleotide
auuauuguuaagacugugc

SEQ ID NO: 1960088 - RNA, 19 nt, Artificial Sequence
  Description of Artificial Sequence: Synthetic oligonucleotide
aaauagaauccacaugagu

SEQ ID NO: 1960089 - RNA, 19 nt, Artificial Sequence
  Description of Artificial Sequence: Synthetic oligonucleotide
guuaacaaauaccuacggg

SEQ ID NO: 1960090 - RNA, 19 nt, Artificial Sequence
  Description of Artificial Sequence: Synthetic oligonucleotide
aaaagguuaguaaagcaca

SEQ ID NO: 1960091 - RNA, 19 nt, Artificial Sequence
  Description of Artificial Sequence: Synthetic oligonucleotide
agucaucuaccaucaaucc

SEQ ID NO: 1960092 - RNA, 19 nt, Artificial Sequence
  Description of Artificial Sequence: Synthetic oligonucleotide
acauagaucaccuggagau

SEQ ID NO: 1960093 - RNA, 19 nt, Artificial Sequence
  Description of Artificial Sequence: Synthetic oligonucleotide
auuccaaaggacucggccg

SEQ ID NO: 1960094 - RNA, 19 nt, Artificial Sequence
  Description of Artificial Sequence: Synthetic oligonucleotide
aaucauuugagggucaaga

SEQ ID NO: 1960095 - RNA, 19 nt, Artificial Sequence
  Description of Artificial Sequence: Synthetic oligonucleotide
ucuacuuugagggugaauc

SEQ ID NO: 1960096 - RNA, 19 nt, Artificial Sequence
  Description of Artificial Sequence: Synthetic oligonucleotide
uaaaggaucugcccuuugg

SEQ ID NO: 1960097 - RNA, 19 nt, Artificial Sequence
  Description of Artificial Sequence: Synthetic oligonucleotide
aaaucucagccucacaccu

SEQ ID NO: 1960098 - RNA, 19 nt, Artificial Sequence
  Description of Artificial Sequence: Synthetic oligonucleotide
uaagaagugggcaucccag

SEQ ID NO: 1960099 - RNA, 19 nt, Artificial Sequence
  Description of Artificial Sequence: Synthetic oligonucleotide
uuauauaguggcauaugcu

SEQ ID NO: 1960100 - RNA, 19 nt, Artificial Sequence
  Description of Artificial Sequence: Synthetic oligonucleotide
aagaagugggcaucccagc

SEQ ID NO: 1960101 - RNA, 19 nt, Artificial Sequence
  Description of Artificial Sequence: Synthetic oligonucleotide
aaccaggguuaacaaauac

SEQ ID NO: 1960102 - RNA, 19 nt, Artificial Sequence
  Description of Artificial Sequence: Synthetic oligonucleotide
acaaauaccuacgggagac

SEQ ID NO: 1960103 - RNA, 19 nt, Artificial Sequence
  Description of Artificial Sequence: Synthetic oligonucleotide
gaguaggugagaaauaacc

SEQ ID NO: 1960104 - RNA, 19 nt, Artificial Sequence
  Description of Artificial Sequence: Synthetic oligonucleotide
uugauaaaauuuauauagu

SEQ ID NO: 1960105 - RNA, 19 nt, Artificial Sequence
  Description of Artificial Sequence: Synthetic oligonucleotide
guaggugagaaauaaccag

SEQ ID NO: 1960106 - RNA, 19 nt, Artificial Sequence
  Description of Artificial Sequence: Synthetic oligonucleotide
uuagugaauaaguaagaaa

SEQ ID NO: 1960107 - RNA, 19 nt, Artificial Sequence
  Description of Artificial Sequence: Synthetic oligonucleotide
uugguggcgucucagagag

SEQ ID NO: 1960108 - RNA, 19 nt, Artificial Sequence
  Description of Artificial Sequence: Synthetic oligonucleotide
ugcaggagcuuucagaaga

SEQ ID NO: 1960109 - RNA, 19 nt, Artificial Sequence
  Description of Artificial Sequence: Synthetic oligonucleotide
gaugcauccguacuguggc

SEQ ID NO: 1960110 - RNA, 19 nt, Artificial Sequence
  Description of Artificial Sequence: Synthetic oligonucleotide
auaaaagguuaguaaagca

SEQ ID NO: 1960111 - RNA, 19 nt, Artificial Sequence
  Description of Artificial Sequence: Synthetic oligonucleotide
ucagguguuuguuugguug

SEQ ID NO: 1960112 - RNA, 19 nt, Artificial Sequence
  Description of Artificial Sequence: Synthetic oligonucleotide
aaagguuaguaaagcacac

SEQ ID NO: 1960113 - RNA, 19 nt, Artificial Sequence
  Description of Artificial Sequence: Synthetic oligonucleotide
uaaguaagaaacacugaaa

SEQ ID NO: 1960114 - RNA, 19 nt, Artificial Sequence
  Description of Artificial Sequence: Synthetic oligonucleotide
gcuuccaccuuauagaggg

SEQ ID NO: 1960115 - RNA, 19 nt, Artificial Sequence
  Description of Artificial Sequence: Synthetic oligonucleotide
aagucaggcaacucagaag

SEQ ID NO: 1960116 - RNA, 19 nt, Artificial Sequence
  Description of Artificial Sequence: Synthetic oligonucleotide
ugucccaguaggaucaaag

SEQ ID NO: 1960117 - RNA, 19 nt, Artificial Sequence
  Description of Artificial Sequence: Synthetic oligonucleotide
aauccauccacaccuggca

SEQ ID NO: 1960118 - RNA, 19 nt, Artificial Sequence
  Description of Artificial Sequence: Synthetic oligonucleotide
cagacaauuauuucuuuug

SEQ ID NO: 1960119 - RNA, 19 nt, Artificial Sequence
  Description of Artificial Sequence: Synthetic oligonucleotide
uuguagauugucccaguag

SEQ ID NO: 1960120 - RNA, 19 nt, Artificial Sequence
  Description of Artificial Sequence: Synthetic oligonucleotide
aagugggcaucccagccac

SEQ ID NO: 1960121 - RNA, 19 nt, Artificial Sequence
  Description of Artificial Sequence: Synthetic oligonucleotide
aauaaccaggguuaacaaa

SEQ ID NO: 1960122 - RNA, 19 nt, Artificial Sequence
  Description of Artificial Sequence: Synthetic oligonucleotide
agauugucccaguaggauc

SEQ ID NO: 1960123 - RNA, 19 nt, Artificial Sequence
  Description of Artificial Sequence: Synthetic oligonucleotide
gucaacaucagucaggcaa

SEQ ID NO: 1960124 - RNA, 19 nt, Artificial Sequence
  Description of Artificial Sequence: Synthetic oligonucleotide
auagaucaccuggagauac

SEQ ID NO: 1960125 - RNA, 19 nt, Artificial Sequence
  Description of Artificial Sequence: Synthetic oligonucleotide
cuacgggagacugagagcg

SEQ ID NO: 1960126 - RNA, 19 nt, Artificial Sequence
  Description of Artificial Sequence: Synthetic oligonucleotide
auuguuaagacugugcaaa

SEQ ID NO: 1960127 - RNA, 19 nt, Artificial Sequence
  Description of Artificial Sequence: Synthetic oligonucleotide
aaaggcacaucguggaagu

SEQ ID NO: 1960128 - RNA, 19 nt, Artificial Sequence
  Description of Artificial Sequence: Synthetic oligonucleotide
aaggcauuagugaauaagu

SEQ ID NO: 1960129 - RNA, 19 nt, Artificial Sequence
  Description of Artificial Sequence: Synthetic oligonucleotide
aauuuauauaguggcauau

SEQ ID NO: 1960130 - RNA, 19 nt, Artificial Sequence
  Description of Artificial Sequence: Synthetic oligonucleotide
uuugguuggaugcauccgu

SEQ ID NO: 1960131 - RNA, 19 nt, Artificial Sequence
  Description of Artificial Sequence: Synthetic oligonucleotide
uuugagggugaauccaucc

SEQ ID NO: 1960132 - RNA, 19 nt, Artificial Sequence
  Description of Artificial Sequence: Synthetic oligonucleotide
uauccaacaauaggaaacc

SEQ ID NO: 1960133 - RNA, 19 nt, Artificial Sequence
  Description of Artificial Sequence: Synthetic oligonucleotide
aaaggacucggccguaaag

SEQ ID NO: 1960134 - RNA, 19 nt, Artificial Sequence
  Description of Artificial Sequence: Synthetic oligonucleotide
aacaaauaccuacgggaga

SEQ ID NO: 1960135 - RNA, 19 nt, Artificial Sequence
  Description of Artificial Sequence: Synthetic oligonucleotide
uggcauaugcuauuggaga

SEQ ID NO: 1960136 - RNA, 19 nt, Artificial Sequence
  Description of Artificial Sequence: Synthetic oligonucleotide
uucacugaaauagaaucca

SEQ ID NO: 1960137 - RNA, 19 nt, Artificial Sequence
  Description of Artificial Sequence: Synthetic oligonucleotide
acaauaaaggggcaggcaa

SEQ ID NO: 1960138 - RNA, 19 nt, Artificial Sequence
  Description of Artificial Sequence: Synthetic oligonucleotide
uguuugguuggaugcaucc

SEQ ID NO: 1960139 - RNA, 19 nt, Artificial Sequence
  Description of Artificial Sequence: Synthetic oligonucleotide
agagcgauuauuguuaaga

SEQ ID NO: 1960140 - RNA, 19 nt, Artificial Sequence
  Description of Artificial Sequence: Synthetic oligonucleotide
uguuccggauuccaaagga

SEQ ID NO: 1960141 - RNA, 19 nt, Artificial Sequence
  Description of Artificial Sequence: Synthetic oligonucleotide
accuacgggagacugagag

SEQ ID NO: 1960142 - RNA, 19 nt, Artificial Sequence
  Description of Artificial Sequence: Synthetic oligonucleotide
aggagcuuucagaagaccc

SEQ ID NO: 1960143 - RNA, 19 nt, Artificial Sequence
  Description of Artificial Sequence: Synthetic oligonucleotide
accaggguuaacaaauacc

SEQ ID NO: 1960144 - RNA, 19 nt, Artificial Sequence
  Description of Artificial Sequence: Synthetic oligonucleotide
uuaagacugugcaaaugcu

SEQ ID NO: 1960145 - RNA, 19 nt, Artificial Sequence
  Description of Artificial Sequence: Synthetic oligonucleotide
acaagucaacaucagucag

SEQ ID NO: 1960146 - RNA, 19 nt, Artificial Sequence
  Description of Artificial Sequence: Synthetic oligonucleotide
cuauuggagaaauacagaa

SEQ ID NO: 1960147 - RNA, 19 nt, Artificial Sequence
  Description of Artificial Sequence: Synthetic oligonucleotide
gacccugguacaauaaagg

SEQ ID NO: 1960148 - RNA, 19 nt, Artificial Sequence
  Description of Artificial Sequence: Synthetic oligonucleotide
uaggaaaccugcaggagcu

SEQ ID NO: 1960149 - RNA, 19 nt, Artificial Sequence
  Description of Artificial Sequence: Synthetic oligonucleotide
aauaaguaagaaacacuga

SEQ ID NO: 1960150 - RNA, 19 nt, Artificial Sequence
  Description of Artificial Sequence: Synthetic oligonucleotide
auagagggcgucuacuuug

SEQ ID NO: 1960151 - RNA, 19 nt, Artificial Sequence
  Description of Artificial Sequence: Synthetic oligonucleotide
gugaauaaguaagaaacac

SEQ ID NO: 1960152 - RNA, 19 nt, Artificial Sequence
  Description of Artificial Sequence: Synthetic oligonucleotide
aagguaugguauaaaaggu

SEQ ID NO: 1960153 - RNA, 19 nt, Artificial Sequence
  Description of Artificial Sequence: Synthetic oligonucleotide
gcgauuauuguuaagacug

SEQ ID NO: 1960154 - RNA, 19 nt, Artificial Sequence
  Description of Artificial Sequence: Synthetic oligonucleotide
ccaacaauaggaaaccugc

SEQ ID NO: 1960155 - RNA, 19 nt, Artificial Sequence
  Description of Artificial Sequence: Synthetic oligonucleotide
acugugcaaaugcuuuccc

SEQ ID NO: 1960156 - RNA, 19 nt, Artificial Sequence
  Description of Artificial Sequence: Synthetic oligonucleotide
ugagucaucuaccaucaau

SEQ ID NO: 1960157 - RNA, 19 nt, Artificial Sequence
  Description of Artificial Sequence: Synthetic oligonucleotide
gggucaagaacucagguug

SEQ ID NO: 1960158 - RNA, 19 nt, Artificial Sequence
  Description of Artificial Sequence: Synthetic oligonucleotide
ugcccuuuggaaaaggcuc

SEQ ID NO: 1960159 - RNA, 19 nt, Artificial Sequence
  Description of Artificial Sequence: Synthetic oligonucleotide
acacacaaggcauuaguga

SEQ ID NO: 1960160 - RNA, 19 nt, Artificial Sequence
  Description of Artificial Sequence: Synthetic oligonucleotide
guaagcagaaugaagguuc

SEQ ID NO: 1960161 - RNA, 19 nt, Artificial Sequence
  Description of Artificial Sequence: Synthetic oligonucleotide
ucagucaggcaaaucucag

SEQ ID NO: 1960162 - RNA, 19 nt, Artificial Sequence
  Description of Artificial Sequence: Synthetic oligonucleotide
cauccuugccaguacaaag

SEQ ID NO: 1960163 - RNA, 19 nt, Artificial Sequence
  Description of Artificial Sequence: Synthetic oligonucleotide
ugagggugaauccauccac

SEQ ID NO: 1960164 - RNA, 19 nt, Artificial Sequence
  Description of Artificial Sequence: Synthetic oligonucleotide
aaauaccuacgggagacug

SEQ ID NO: 1960165 - RNA, 19 nt, Artificial Sequence
  Description of Artificial Sequence: Synthetic oligonucleotide
auaaccaggguuaacaaau

SEQ ID NO: 1960166 - RNA, 19 nt, Artificial Sequence
  Description of Artificial Sequence: Synthetic oligonucleotide
agcgauuauuguuaagacu

SEQ ID NO: 1960167 - RNA, 19 nt, Artificial Sequence
  Description of Artificial Sequence: Synthetic oligonucleotide
caaggcauuagugaauaag

SEQ ID NO: 1960168 - RNA, 19 nt, Artificial Sequence
  Description of Artificial Sequence: Synthetic oligonucleotide
ucaacaucagucaggcaaa

SEQ ID NO: 1960169 - RNA, 19 nt, Artificial Sequence
  Description of Artificial Sequence: Synthetic oligonucleotide
uuccggauuccaaaggacu

SEQ ID NO: 1960170 - RNA, 19 nt, Artificial Sequence
  Description of Artificial Sequence: Synthetic oligonucleotide
gguuaacaaauaccuacgg

SEQ ID NO: 1960171 - RNA, 19 nt, Artificial Sequence
  Description of Artificial Sequence: Synthetic oligonucleotide
agauagacuuucuccagcu

SEQ ID NO: 1960172 - RNA, 19 nt, Artificial Sequence
  Description of Artificial Sequence: Synthetic oligonucleotide
ugaguucuguuccugccca

SEQ ID NO: 1960173 - RNA, 19 nt, Artificial Sequence
  Description of Artificial Sequence: Synthetic oligonucleotide
accaucaauccaaagauga

SEQ ID NO: 1960174 - RNA, 19 nt, Artificial Sequence
  Description of Artificial Sequence: Synthetic oligonucleotide
gagaggcuaugagagagcg

SEQ ID NO: 1960175 - RNA, 19 nt, Artificial Sequence
  Description of Artificial Sequence: Synthetic oligonucleotide
uauuguuaagacugugcaa

SEQ ID NO: 1960176 - RNA, 19 nt, Artificial Sequence
  Description of Artificial Sequence: Synthetic oligonucleotide
caauaaaggggcaggcaag

SEQ ID NO: 1960177 - RNA, 19 nt, Artificial Sequence
  Description of Artificial Sequence: Synthetic oligonucleotide
gaaauagaauccacaugag

SEQ ID NO: 1960178 - RNA, 19 nt, Artificial Sequence
  Description of Artificial Sequence: Synthetic oligonucleotide
uuguaagcagaaugaaggu

SEQ ID NO: 1960179 - RNA, 19 nt, Artificial Sequence
  Description of Artificial Sequence: Synthetic oligonucleotide
uagacuuucuccagcugca

SEQ ID NO: 1960180 - RNA, 19 nt, Artificial Sequence
  Description of Artificial Sequence: Synthetic oligonucleotide
auucauacuggaaauacaa

SEQ ID NO: 1960181 - RNA, 19 nt, Artificial Sequence
  Description of Artificial Sequence: Synthetic oligonucleotide
guuggaugcauccguacug

SEQ ID NO: 1960182 - RNA, 19 nt, Artificial Sequence
  Description of Artificial Sequence: Synthetic oligonucleotide
uccuauccaacaauaggaa

SEQ ID NO: 1960183 - RNA, 19 nt, Artificial Sequence
  Description of Artificial Sequence: Synthetic oligonucleotide
ugccaguacaaagauagac

SEQ ID NO: 1960184 - RNA, 19 nt, Artificial Sequence
  Description of Artificial Sequence: Synthetic oligonucleotide
gaaaugaacaagucaacau

SEQ ID NO: 1960185 - RNA, 19 nt, Artificial Sequence
  Description of Artificial Sequence: Synthetic oligonucleotide
gagcgauuauuguuaagac

SEQ ID NO: 1960186 - RNA, 19 nt, Artificial Sequence
  Description of Artificial Sequence: Synthetic oligonucleotide
uucauacuggaaauacaaa

SEQ ID NO: 1960187 - RNA, 19 nt, Artificial Sequence
  Description of Artificial Sequence: Synthetic oligonucleotide
uaagcagaaugaagguucu

SEQ ID NO: 1960188 - RNA, 19 nt, Artificial Sequence
  Description of Artificial Sequence: Synthetic oligonucleotide
ucugcccuuuggaaaaggc

SEQ ID NO: 1960189 - RNA, 19 nt, Artificial Sequence
  Description of Artificial Sequence: Synthetic oligonucleotide
cucagaagcgaagugggcc

SEQ ID NO: 1960190 - RNA, 19 nt, Artificial Sequence
  Description of Artificial Sequence: Synthetic oligonucleotide
cagguguuuguuugguugg

SEQ ID NO: 1960191 - RNA, 19 nt, Artificial Sequence
  Description of Artificial Sequence: Synthetic oligonucleotide
uguuaagacugugcaaaug

SEQ ID NO: 1960192 - RNA, 19 nt, Artificial Sequence
  Description of Artificial Sequence: Synthetic oligonucleotide
ugaguaggugagaaauaac

SEQ ID NO: 1960193 - RNA, 19 nt, Artificial Sequence
  Description of Artificial Sequence: Synthetic oligonucleotide
uuccaaaggacucggccgu

SEQ ID NO: 1960194 - RNA, 19 nt, Artificial Sequence
  Description of Artificial Sequence: Synthetic oligonucleotide
aaagcggagcuuucacuga

SEQ ID NO: 1960195 - RNA, 19 nt, Artificial Sequence
  Description of Artificial Sequence: Synthetic oligonucleotide
gcaaaucucagccucacac

SEQ ID NO: 1960196 - RNA, 19 nt, Artificial Sequence
  Description of Artificial Sequence: Synthetic oligonucleotide
ugaaagcggagcuuucacu

SEQ ID NO: 1960197 - RNA, 19 nt, Artificial Sequence
  Description of Artificial Sequence: Synthetic oligonucleotide
agacugugcaaaugcuuuc

SEQ ID NO: 1960198 - RNA, 19 nt, Artificial Sequence
  Description of Artificial Sequence: Synthetic oligonucleotide
uucuuuugaccuucacagc

SEQ ID NO: 1960199 - RNA, 19 nt, Artificial Sequence
  Description of Artificial Sequence: Synthetic oligonucleotide
cauuagugaauaaguaaga

SEQ ID NO: 1960200 - RNA, 19 nt, Artificial Sequence
  Description of Artificial Sequence: Synthetic oligonucleotide
aggugagaaauaaccaggg

SEQ ID NO: 1960201 - RNA, 19 nt, Artificial Sequence
  Description of Artificial Sequence: Synthetic oligonucleotide
cucagucugaguaggugag

SEQ ID NO: 1960202 - RNA, 19 nt, Artificial Sequence
  Description of Artificial Sequence: Synthetic oligonucleotide
acacaauuuccuauccaac

SEQ ID NO: 1960203 - RNA, 19 nt, Artificial Sequence
  Description of Artificial Sequence: Synthetic oligonucleotide
agagcgcuggacccggggc

SEQ ID NO: 1960204 - RNA, 19 nt, Artificial Sequence
  Description of Artificial Sequence: Synthetic oligonucleotide
agugaauaaguaagaaaca

SEQ ID NO: 1960205 - RNA, 19 nt, Artificial Sequence
  Description of Artificial Sequence: Synthetic oligonucleotide
gucggggccaaugacauag

SEQ ID NO: 1960206 - RNA, 19 nt, Artificial Sequence
  Description of Artificial Sequence: Synthetic oligonucleotide
cuuugguggcgucucagag

SEQ ID NO: 1960207 - RNA, 19 nt, Artificial Sequence
  Description of Artificial Sequence: Synthetic oligonucleotide
aauggugcagacaauuauu

SEQ ID NO: 1960208 - RNA, 19 nt, Artificial Sequence
  Description of Artificial Sequence: Synthetic oligonucleotide
cagaaugaagguucuguuc

SEQ ID NO: 1960209 - RNA, 19 nt, Artificial Sequence
  Description of Artificial Sequence: Synthetic oligonucleotide
aagacccugguacaauaaa

SEQ ID NO: 1960210 - RNA, 19 nt, Artificial Sequence
  Description of Artificial Sequence: Synthetic oligonucleotide
aucaauccaaagaugaaau

SEQ ID NO: 1960211 - RNA, 19 nt, Artificial Sequence
  Description of Artificial Sequence: Synthetic oligonucleotide
gaagucaggcaacucagaa

SEQ ID NO: 1960212 - RNA, 19 nt, Artificial Sequence
  Description of Artificial Sequence: Synthetic oligonucleotide
ugguacaauaaaggggcag

SEQ ID NO: 1960213 - RNA, 19 nt, Artificial Sequence
  Description of Artificial Sequence: Synthetic oligonucleotide
aagacugugcaaaugcuuu

SEQ ID NO: 1960214 - RNA, 19 nt, Artificial Sequence
  Description of Artificial Sequence: Synthetic oligonucleotide
aggcacaucguggaaguac

SEQ ID NO: 1960215 - RNA, 19 nt, Artificial Sequence
  Description of Artificial Sequence: Synthetic oligonucleotide
uuauagagggcgucuacuu

SEQ ID NO: 1960216 - RNA, 19 nt, Artificial Sequence
  Description of Artificial Sequence: Synthetic oligonucleotide
guaugguauaaaagguuag

SEQ ID NO: 1960217 - RNA, 19 nt, Artificial Sequence
  Description of Artificial Sequence: Synthetic oligonucleotide
aagaaacacugaaagcgga

SEQ ID NO: 1960218 - RNA, 19 nt, Artificial Sequence
  Description of Artificial Sequence: Synthetic oligonucleotide
acagcaaggagcaacccug

SEQ ID NO: 1960219 - RNA, 19 nt, Artificial Sequence
  Description of Artificial Sequence: Synthetic oligonucleotide
aacaucagucaggcaaauc

SEQ ID NO: 1960220 - RNA, 19 nt, Artificial Sequence
  Description of Artificial Sequence: Synthetic oligonucleotide
guaggaucaaagaaaggca

SEQ ID NO: 1960221 - RNA, 19 nt, Artificial Sequence
  Description of Artificial Sequence: Synthetic oligonucleotide
gcaucugacagcaaggagc

SEQ ID NO: 1960222 - RNA, 19 nt, Artificial Sequence
  Description of Artificial Sequence: Synthetic oligonucleotide
aggaucaaagaaaggcacg

SEQ ID NO: 1960223 - RNA, 19 nt, Artificial Sequence
  Description of Artificial Sequence: Synthetic oligonucleotide
uauuucuuuugaccuucac

SEQ ID NO: 1960224 - RNA, 19 nt, Artificial Sequence
  Description of Artificial Sequence: Synthetic oligonucleotide
ugucggugaccucuggcug

SEQ ID NO: 1960225 - RNA, 19 nt, Artificial Sequence
  Description of Artificial Sequence: Synthetic oligonucleotide
auaaaggggcaggcaaggc

SEQ ID NO: 1960226 - RNA, 19 nt, Artificial Sequence
  Description of Artificial Sequence: Synthetic oligonucleotide
uccggauuccaaaggacuc

SEQ ID NO: 1960227 - RNA, 19 nt, Artificial Sequence
  Description of Artificial Sequence: Synthetic oligonucleotide
agccucacaccucuuaaca

SEQ ID NO: 1960228 - RNA, 19 nt, Artificial Sequence
  Description of Artificial Sequence: Synthetic oligonucleotide
uacaauaaaggggcaggca

SEQ ID NO: 1960229 - RNA, 19 nt, Artificial Sequence
  Description of Artificial Sequence: Synthetic oligonucleotide
uauaguggcauaugcuauu

SEQ ID NO: 1960230 - RNA, 19 nt, Artificial Sequence
  Description of Artificial Sequence: Synthetic oligonucleotide
gauagacuuucuccagcug

SEQ ID NO: 1960231 - RNA, 19 nt, Artificial Sequence
  Description of Artificial Sequence: Synthetic oligonucleotide
gaauccauccacaccuggc

SEQ ID NO: 1960232 - RNA, 19 nt, Artificial Sequence
  Description of Artificial Sequence: Synthetic oligonucleotide
caucugacagcaaggagca

SEQ ID NO: 1960233 - RNA, 19 nt, Artificial Sequence
  Description of Artificial Sequence: Synthetic oligonucleotide
gacugugcaaaugcuuucc

SEQ ID NO: 1960234 - RNA, 19 nt, Artificial Sequence
  Description of Artificial Sequence: Synthetic oligonucleotide
cucgagaugcugucggggc

SEQ ID NO: 1960235 - RNA, 19 nt, Artificial Sequence
  Description of Artificial Sequence: Synthetic oligonucleotide
acuggugcccugcuuccac

SEQ ID NO: 1960236 - RNA, 19 nt, Artificial Sequence
  Description of Artificial Sequence: Synthetic oligonucleotide
gucucagagaggcuaugag

SEQ ID NO: 1960237 - RNA, 19 nt, Artificial Sequence
  Description of Artificial Sequence: Synthetic oligonucleotide
guggcauaugcuauuggag

SEQ ID NO: 1960238 - RNA, 19 nt, Artificial Sequence
  Description of Artificial Sequence: Synthetic oligonucleotide
guacuguggccccucauug

SEQ ID NO: 1960239 - RNA, 19 nt, Artificial Sequence
  Description of Artificial Sequence: Synthetic oligonucleotide
agacugagagcgauuauug

SEQ ID NO: 1960240 - RNA, 19 nt, Artificial Sequence
  Description of Artificial Sequence: Synthetic oligonucleotide
ggccucgaaaggcacaucg

SEQ ID NO: 1960241 - RNA, 19 nt, Artificial Sequence
  Description of Artificial Sequence: Synthetic oligonucleotide
uauagagggcgucuacuuu

SEQ ID NO: 1960242 - RNA, 19 nt, Artificial Sequence
  Description of Artificial Sequence: Synthetic oligonucleotide
cacacaaggcauuagugaa

SEQ ID NO: 1960243 - RNA, 19 nt, Artificial Sequence
  Description of Artificial Sequence: Synthetic oligonucleotide
ggguuaacaaauaccuacg

SEQ ID NO: 1960244 - RNA, 19 nt, Artificial Sequence
  Description of Artificial Sequence: Synthetic oligonucleotide
aggaucugcccuuuggaaa

SEQ ID NO: 1960245 - RNA, 19 nt, Artificial Sequence
  Description of Artificial Sequence: Synthetic oligonucleotide
uaacacucccugccuaaga

SEQ ID NO: 1960246 - RNA, 19 nt, Artificial Sequence
  Description of Artificial Sequence: Synthetic oligonucleotide
ucgagaugcugucggggcc

SEQ ID NO: 1960247 - RNA, 19 nt, Artificial Sequence
  Description of Artificial Sequence: Synthetic oligonucleotide
agaugaaauagaaaacaua

SEQ ID NO: 1960248 - RNA, 19 nt, Artificial Sequence
  Description of Artificial Sequence: Synthetic oligonucleotide
cacaccucuuaacacuccc

SEQ ID NO: 1960249 - RNA, 19 nt, Artificial Sequence
  Description of Artificial Sequence: Synthetic oligonucleotide
ucggccguaaaggaucugc

SEQ ID NO: 1960250 - RNA, 19 nt, Artificial Sequence
  Description of Artificial Sequence: Synthetic oligonucleotide
caguaggaucaaagaaagg

SEQ ID NO: 1960251 - RNA, 19 nt, Artificial Sequence
  Description of Artificial Sequence: Synthetic oligonucleotide
uuaacacucccugccuaag

SEQ ID NO: 1960252 - RNA, 19 nt, Artificial Sequence
  Description of Artificial Sequence: Synthetic oligonucleotide
ggcauuagugaauaaguaa

SEQ ID NO: 1960253 - RNA, 19 nt, Artificial Sequence
  Description of Artificial Sequence: Synthetic oligonucleotide
agcugcaguuuguaagcag

SEQ ID NO: 1960254 - RNA, 19 nt, Artificial Sequence
  Description of Artificial Sequence: Synthetic oligonucleotide
gaaaggcacguagccaucc

SEQ ID NO: 1960255 - RNA, 19 nt, Artificial Sequence
  Description of Artificial Sequence: Synthetic oligonucleotide
caccucuuaacacucccug

SEQ ID NO: 1960256 - RNA, 19 nt, Artificial Sequence
  Description of Artificial Sequence: Synthetic oligonucleotide
gagaaauacagaaauucau

SEQ ID NO: 1960257 - RNA, 19 nt, Artificial Sequence
  Description of Artificial Sequence: Synthetic oligonucleotide
aauaccuacgggagacuga

SEQ ID NO: 1960258 - RNA, 19 nt, Artificial Sequence
  Description of Artificial Sequence: Synthetic oligonucleotide
guacaauaaaggggcaggc

SEQ ID NO: 1960259 - RNA, 19 nt, Artificial Sequence
  Description of Artificial Sequence: Synthetic oligonucleotide
aaucucagccucacaccuc

SEQ ID NO: 1960260 - RNA, 19 nt, Artificial Sequence
  Description of Artificial Sequence: Synthetic oligonucleotide
cuugucggugaccucuggc

SEQ ID NO: 1960261 - RNA, 19 nt, Artificial Sequence
  Description of Artificial Sequence: Synthetic oligonucleotide
ugagagcgauuauuguuaa

SEQ ID NO: 1960262 - RNA, 19 nt, Artificial Sequence
  Description of Artificial Sequence: Synthetic oligonucleotide
cugagagcgauuauuguua

SEQ ID NO: 1960263 - RNA, 19 nt, Artificial Sequence
  Description of Artificial Sequence: Synthetic oligonucleotide
auuguagauugucccagua

SEQ ID NO: 1960264 - RNA, 19 nt, Artificial Sequence
  Description of Artificial Sequence: Synthetic oligonucleotide
aguuuguaagcagaaugaa

SEQ ID NO: 1960265 - RNA, 19 nt, Artificial Sequence
  Description of Artificial Sequence: Synthetic oligonucleotide
uuuguuugguuggaugcau

SEQ ID NO: 1960266 - RNA, 19 nt, Artificial Sequence
  Description of Artificial Sequence: Synthetic oligonucleotide
cugaaagcggagcuuucac

SEQ ID NO: 1960267 - RNA, 19 nt, Artificial Sequence
  Description of Artificial Sequence: Synthetic oligonucleotide
ugcauccguacuguggccc

SEQ ID NO: 1960268 - RNA, 19 nt, Artificial Sequence
  Description of Artificial Sequence: Synthetic oligonucleotide
aagcggagcuuucacugaa

SEQ ID NO: 1960269 - RNA, 19 nt, Artificial Sequence
  Description of Artificial Sequence: Synthetic oligonucleotide
uguggccccucauuguaga

SEQ ID NO: 1960270 - RNA, 19 nt, Artificial Sequence
  Description of Artificial Sequence: Synthetic oligonucleotide
aucuaccaucaauccaaag

SEQ ID NO: 1960271 - RNA, 19 nt, Artificial Sequence
  Description of Artificial Sequence: Synthetic oligonucleotide
agcgaagugggccucgaaa

SEQ ID NO: 1960272 - RNA, 19 nt, Artificial Sequence
  Description of Artificial Sequence: Synthetic oligonucleotide
gguggcgucucagagaggc

SEQ ID NO: 1960273 - RNA, 19 nt, Artificial Sequence
  Description of Artificial Sequence: Synthetic oligonucleotide
gagagcgauuauuguuaag

SEQ ID NO: 1960274 - RNA, 19 nt, Artificial Sequence
  Description of Artificial Sequence: Synthetic oligonucleotide
aggacucggccguaaagga

SEQ ID NO: 1960275 - RNA, 19 nt, Artificial Sequence
  Description of Artificial Sequence: Synthetic oligonucleotide
gacucggccguaaaggauc

SEQ ID NO: 1960276 - RNA, 19 nt, Artificial Sequence
  Description of Artificial Sequence: Synthetic oligonucleotide
gcgaagugggccucgaaag

SEQ ID NO: 1960277 - RNA, 19 nt, Artificial Sequence
  Description of Artificial Sequence: Synthetic oligonucleotide
cuaagaagugggcauccca

SEQ ID NO: 1960278 - RNA, 19 nt, Artificial Sequence
  Description of Artificial Sequence: Synthetic oligonucleotide
auauaguggcauaugcuau

SEQ ID NO: 1960279 - RNA, 19 nt, Artificial Sequence
  Description of Artificial Sequence: Synthetic oligonucleotide
ccucuuaacacucccugcc

SEQ ID NO: 1960280 - RNA, 19 nt, Artificial Sequence
  Description of Artificial Sequence: Synthetic oligonucleotide
uaaccaggguuaacaaaua

SEQ ID NO: 1960281 - RNA, 19 nt, Artificial Sequence
  Description of Artificial Sequence: Synthetic oligonucleotide
acucagaagcgaagugggc

SEQ ID NO: 1960282 - RNA, 19 nt, Artificial Sequence
  Description of Artificial Sequence: Synthetic oligonucleotide
uuguuugguuggaugcauc

SEQ ID NO: 1960283 - RNA, 19 nt, Artificial Sequence
  Description of Artificial Sequence: Synthetic oligonucleotide
aaggagcaacccugcugag

SEQ ID NO: 1960284 - RNA, 19 nt, Artificial Sequence
  Description of Artificial Sequence: Synthetic oligonucleotide
cuuugagggugaauccauc

SEQ ID NO: 1960285 - RNA, 19 nt, Artificial Sequence
  Description of Artificial Sequence: Synthetic oligonucleotide
cacguagccauccuugcca

SEQ ID NO: 1960286 - RNA, 19 nt, Artificial Sequence
  Description of Artificial Sequence: Synthetic oligonucleotide
uacuugucggugaccucug

SEQ ID NO: 1960287 - RNA, 19 nt, Artificial Sequence
  Description of Artificial Sequence: Synthetic oligonucleotide
ggccccucauuguagauug

SEQ ID NO: 1960288 - RNA, 19 nt, Artificial Sequence
  Description of Artificial Sequence: Synthetic oligonucleotide
ggaugcauccguacugugg

SEQ ID NO: 1960289 - RNA, 19 nt, Artificial Sequence
  Description of Artificial Sequence: Synthetic oligonucleotide
guggaaguacuugucggug

SEQ ID NO: 1960290 - RNA, 19 nt, Artificial Sequence
  Description of Artificial Sequence: Synthetic oligonucleotide
uugguuggaugcauccgua

SEQ ID NO: 1960291 - RNA, 19 nt, Artificial Sequence
  Description of Artificial Sequence: Synthetic oligonucleotide
aaagcacacacaaggcauu

SEQ ID NO: 1960292 - RNA, 19 nt, Artificial Sequence
  Description of Artificial Sequence: Synthetic oligonucleotide
gagagcgcuggacccgggg

SEQ ID NO: 1960293 - RNA, 19 nt, Artificial Sequence
  Description of Artificial Sequence: Synthetic oligonucleotide
cugaguaggugagaaauaa

SEQ ID NO: 1960294 - RNA, 19 nt, Artificial Sequence
  Description of Artificial Sequence: Synthetic oligonucleotide
aaggcacguagccauccuu

SEQ ID NO: 1960295 - RNA, 19 nt, Artificial Sequence
  Description of Artificial Sequence: Synthetic oligonucleotide
ggcuaugagagagcgcugg

SEQ ID NO: 1960296 - RNA, 19 nt, Artificial Sequence
  Description of Artificial Sequence: Synthetic oligonucleotide
gguaugguauaaaagguua

SEQ ID NO: 1960297 - RNA, 19 nt, Artificial Sequence
  Description of Artificial Sequence: Synthetic oligonucleotide
gugggcaucccagccacgg

SEQ ID NO: 1960298 - RNA, 19 nt, Artificial Sequence
  Description of Artificial Sequence: Synthetic oligonucleotide
acuugucggugaccucugg

SEQ ID NO: 1960299 - RNA, 19 nt, Artificial Sequence
  Description of Artificial Sequence: Synthetic oligonucleotide
cuuaacacucccugccuaa

SEQ ID NO: 1960300 - RNA, 19 nt, Artificial Sequence
  Description of Artificial Sequence: Synthetic oligonucleotide
agaggcuaugagagagcgc

SEQ ID NO: 1960301 - RNA, 19 nt, Artificial Sequence
  Description of Artificial Sequence: Synthetic oligonucleotide
acuguggccccucauugua

SEQ ID NO: 1960302 - RNA, 19 nt, Artificial Sequence
  Description of Artificial Sequence: Synthetic oligonucleotide
guuuguuugguuggaugca

SEQ ID NO: 1960303 - RNA, 19 nt, Artificial Sequence
  Description of Artificial Sequence: Synthetic oligonucleotide
gaaaccugcaggagcuuuc

SEQ ID NO: 1960304 - RNA, 19 nt, Artificial Sequence
  Description of Artificial Sequence: Synthetic oligonucleotide
cccucauuguagauugucc

SEQ ID NO: 1960305 - RNA, 19 nt, Artificial Sequence
  Description of Artificial Sequence: Synthetic oligonucleotide
guaaaggaucugcccuuug

SEQ ID NO: 1960306 - RNA, 19 nt, Artificial Sequence
  Description of Artificial Sequence: Synthetic oligonucleotide
agguaugguauaaaagguu

SEQ ID NO: 1960307 - RNA, 19 nt, Artificial Sequence
  Description of Artificial Sequence: Synthetic oligonucleotide
guagauugucccaguagga

SEQ ID NO: 1960308 - RNA, 19 nt, Artificial Sequence
  Description of Artificial Sequence: Synthetic oligonucleotide
aagugggccucgaaaggca

SEQ ID NO: 1960309 - RNA, 19 nt, Artificial Sequence
  Description of Artificial Sequence: Synthetic oligonucleotide
cagcaaggagcaacccugc

SEQ ID NO: 1960310 - RNA, 19 nt, Artificial Sequence
  Description of Artificial Sequence: Synthetic oligonucleotide
gcaacucagaagcgaagug

SEQ ID NO: 1960311 - RNA, 19 nt, Artificial Sequence
  Description of Artificial Sequence: Synthetic oligonucleotide
acauggaagucaggcaacu

SEQ ID NO: 1960312 - RNA, 19 nt, Artificial Sequence
  Description of Artificial Sequence: Synthetic oligonucleotide
agugggccucgaaaggcac

SEQ ID NO: 1960313 - RNA, 19 nt, Artificial Sequence
  Description of Artificial Sequence: Synthetic oligonucleotide
ccaggguuaacaaauaccu

SEQ ID NO: 1960314 - RNA, 19 nt, Artificial Sequence
  Description of Artificial Sequence: Synthetic oligonucleotide
agaaaggcacguagccauc

SEQ ID NO: 1960315 - RNA, 19 nt, Artificial Sequence
  Description of Artificial Sequence: Synthetic oligonucleotide
gagggugaauccauccaca

SEQ ID NO: 1960316 - RNA, 19 nt, Artificial Sequence
  Description of Artificial Sequence: Synthetic oligonucleotide
uguuuuccucagucugagu

SEQ ID NO: 1960317 - RNA, 19 nt, Artificial Sequence
  Description of Artificial Sequence: Synthetic oligonucleotide
uuccucagucugaguaggu

SEQ ID NO: 1960318 - RNA, 19 nt, Artificial Sequence
  Description of Artificial Sequence: Synthetic oligonucleotide
ggaucugcccuuuggaaaa

SEQ ID NO: 1960319 - RNA, 19 nt, Artificial Sequence
  Description of Artificial Sequence: Synthetic oligonucleotide
cuguggccccucauuguag

SEQ ID NO: 1960320 - RNA, 19 nt, Artificial Sequence
  Description of Artificial Sequence: Synthetic oligonucleotide
gggugaauccauccacacc

SEQ ID NO: 1960321 - RNA, 19 nt, Artificial Sequence
  Description of Artificial Sequence: Synthetic oligonucleotide
aucugcccuuuggaaaagg

SEQ ID NO: 1960322 - RNA, 19 nt, Artificial Sequence
  Description of Artificial Sequence: Synthetic oligonucleotide
gagcuuucacugaaauaga

SEQ ID NO: 1960323 - RNA, 19 nt, Artificial Sequence
  Description of Artificial Sequence: Synthetic oligonucleotide
ugccuaagaagugggcauc

SEQ ID NO: 1960324 - RNA, 19 nt, Artificial Sequence
  Description of Artificial Sequence: Synthetic oligonucleotide
ccucgaaaggcacaucgug

SEQ ID NO: 1960325 - RNA, 19 nt, Artificial Sequence
  Description of Artificial Sequence: Synthetic oligonucleotide
ggccguaaaggaucugccc

SEQ ID NO: 1960326 - RNA, 19 nt, Artificial Sequence
  Description of Artificial Sequence: Synthetic oligonucleotide
aagcacacacaaggcauua

SEQ ID NO: 1960327 - RNA, 19 nt, Artificial Sequence
  Description of Artificial Sequence: Synthetic oligonucleotide
gaagguucuguuccggauu

SEQ ID NO: 1960328 - RNA, 19 nt, Artificial Sequence
  Description of Artificial Sequence: Synthetic oligonucleotide
ugcccaccugaagguaugg

SEQ ID NO: 1960329 - RNA, 19 nt, Artificial Sequence
  Description of Artificial Sequence: Synthetic oligonucleotide
guacuugucggugaccucu

SEQ ID NO: 1960330 - RNA, 19 nt, Artificial Sequence
  Description of Artificial Sequence: Synthetic oligonucleotide
gguuaguaaagcacacaca

SEQ ID NO: 1960331 - RNA, 19 nt, Artificial Sequence
  Description of Artificial Sequence: Synthetic oligonucleotide
caggagcuuucagaagacc

SEQ ID NO: 1960332 - RNA, 19 nt, Artificial Sequence
  Description of Artificial Sequence: Synthetic oligonucleotide
uacgggagacugagagcga

SEQ ID NO: 1960333 - RNA, 19 nt, Artificial Sequence
  Description of Artificial Sequence: Synthetic oligonucleotide
accucuggcuggcugcggu

SEQ ID NO: 1960334 - RNA, 19 nt, Artificial Sequence
  Description of Artificial Sequence: Synthetic oligonucleotide
auccacaccuggcaugcua

SEQ ID NO: 1960335 - RNA, 19 nt, Artificial Sequence
  Description of Artificial Sequence: Synthetic oligonucleotide
agagggcgucuacuuugag

SEQ ID NO: 1960336 - RNA, 19 nt, Artificial Sequence
  Description of Artificial Sequence: Synthetic oligonucleotide
ugggccucgaaaggcacau

SEQ ID NO: 1960337 - RNA, 19 nt, Artificial Sequence
  Description of Artificial Sequence: Synthetic oligonucleotide
cugcccaccugaagguaug

SEQ ID NO: 1960338 - RNA, 19 nt, Artificial Sequence
  Description of Artificial Sequence: Synthetic oligonucleotide
acacaaggcauuagugaau

SEQ ID NO: 1960339 - RNA, 19 nt, Artificial Sequence
  Description of Artificial Sequence: Synthetic oligonucleotide
agucaacaucagucaggca

SEQ ID NO: 1960340 - RNA, 19 nt, Artificial Sequence
  Description of Artificial Sequence: Synthetic oligonucleotide
cugcaguuuguaagcagaa

SEQ ID NO: 1960341 - RNA, 19 nt, Artificial Sequence
  Description of Artificial Sequence: Synthetic oligonucleotide
ccuacgggagacugagagc

SEQ ID NO: 1960342 - RNA, 19 nt, Artificial Sequence
  Description of Artificial Sequence: Synthetic oligonucleotide
uccguacuguggccccuca

SEQ ID NO: 1960343 - RNA, 19 nt, Artificial Sequence
  Description of Artificial Sequence: Synthetic oligonucleotide
cuuuggaaaaggcuccuuu

SEQ ID NO: 1960344 - RNA, 19 nt, Artificial Sequence
  Description of Artificial Sequence: Synthetic oligonucleotide
acaccucuuaacacucccu

SEQ ID NO: 1960345 - RNA, 19 nt, Artificial Sequence
  Description of Artificial Sequence: Synthetic oligonucleotide
gccucacaccucuuaacac

SEQ ID NO: 1960346 - RNA, 19 nt, Artificial Sequence
  Description of Artificial Sequence: Synthetic oligonucleotide
agguguuuguuugguugga

SEQ ID NO: 1960347 - RNA, 19 nt, Artificial Sequence
  Description of Artificial Sequence: Synthetic oligonucleotide
ccacauggaagucaggcaa

SEQ ID NO: 1960348 - RNA, 19 nt, Artificial Sequence
  Description of Artificial Sequence: Synthetic oligonucleotide
cugguacaauaaaggggca

SEQ ID NO: 1960349 - RNA, 19 nt, Artificial Sequence
  Description of Artificial Sequence: Synthetic oligonucleotide
ucggggccaaugacauaga

SEQ ID NO: 1960350 - RNA, 19 nt, Artificial Sequence
  Description of Artificial Sequence: Synthetic oligonucleotide
caggguuaacaaauaccua

SEQ ID NO: 1960351 - RNA, 19 nt, Artificial Sequence
  Description of Artificial Sequence: Synthetic oligonucleotide
uaccuacgggagacugaga

SEQ ID NO: 1960352 - RNA, 19 nt, Artificial Sequence
  Description of Artificial Sequence: Synthetic oligonucleotide
ccggauuccaaaggacucg

SEQ ID NO: 1960353 - RNA, 19 nt, Artificial Sequence
  Description of Artificial Sequence: Synthetic oligonucleotide
cgaagugggccucgaaagg

SEQ ID NO: 1960354 - RNA, 19 nt, Artificial Sequence
  Description of Artificial Sequence: Synthetic oligonucleotide
ccuuauagagggcgucuac

SEQ ID NO: 1960355 - RNA, 19 nt, Artificial Sequence
  Description of Artificial Sequence: Synthetic oligonucleotide
gccguaaaggaucugcccu

SEQ ID NO: 1960356 - RNA, 19 nt, Artificial Sequence
  Description of Artificial Sequence: Synthetic oligonucleotide
cauaugcuauuggagaaau

SEQ ID NO: 1960357 - RNA, 19 nt, Artificial Sequence
  Description of Artificial Sequence: Synthetic oligonucleotide
cugcccuuuggaaaaggcu

SEQ ID NO: 1960358 - RNA, 19 nt, Artificial Sequence
  Description of Artificial Sequence: Synthetic oligonucleotide
gcccuuuggaaaaggcucc

SEQ ID NO: 1960359 - RNA, 19 nt, Artificial Sequence
  Description of Artificial Sequence: Synthetic oligonucleotide
gcacguagccauccuugcc

SEQ ID NO: 1960360 - RNA, 19 nt, Artificial Sequence
  Description of Artificial Sequence: Synthetic oligonucleotide
aggucccuuugguggcguc

SEQ ID NO: 1960361 - RNA, 19 nt, Artificial Sequence
  Description of Artificial Sequence: Synthetic oligonucleotide
ggagcaacccugcugaguu

SEQ ID NO: 1960362 - RNA, 19 nt, Artificial Sequence
  Description of Artificial Sequence: Synthetic oligonucleotide
auccguacuguggccccuc

SEQ ID NO: 1960363 - RNA, 19 nt, Artificial Sequence
  Description of Artificial Sequence: Synthetic oligonucleotide
gagcaacccugcugaguuc

SEQ ID NO: 1960364 - RNA, 19 nt, Artificial Sequence
  Description of Artificial Sequence: Synthetic oligonucleotide
ccuauccaacaauaggaaa

SEQ ID NO: 1960365 - RNA, 19 nt, Artificial Sequence
  Description of Artificial Sequence: Synthetic oligonucleotide
gguuggaugcauccguacu

SEQ ID NO: 1960366 - RNA, 19 nt, Artificial Sequence
  Description of Artificial Sequence: Synthetic oligonucleotide
gguucuguuccggauucca

SEQ ID NO: 1960367 - RNA, 19 nt, Artificial Sequence
  Description of Artificial Sequence: Synthetic oligonucleotide
acgggagacugagagcgau

SEQ ID NO: 1960368 - RNA, 19 nt, Artificial Sequence
  Description of Artificial Sequence: Synthetic oligonucleotide
gcauccguacuguggcccc

SEQ ID NO: 1960369 - RNA, 19 nt, Artificial Sequence
  Description of Artificial Sequence: Synthetic oligonucleotide
accuuauagagggcgucua

SEQ ID NO: 1960370 - RNA, 19 nt, Artificial Sequence
  Description of Artificial Sequence: Synthetic oligonucleotide
ggggccaaugacauagauc

SEQ ID NO: 1960371 - RNA, 19 nt, Artificial Sequence
  Description of Artificial Sequence: Synthetic oligonucleotide
gccuaagaagugggcaucc

SEQ ID NO: 1960372 - RNA, 19 nt, Artificial Sequence
  Description of Artificial Sequence: Synthetic oligonucleotide
cugccuaagaagugggcau

SEQ ID NO: 1960373 - RNA, 19 nt, Artificial Sequence
  Description of Artificial Sequence: Synthetic oligonucleotide
cucuuaacacucccugccu

SEQ ID NO: 1960374 - RNA, 19 nt, Artificial Sequence
  Description of Artificial Sequence: Synthetic oligonucleotide
gcugucggggccaaugaca

SEQ ID NO: 1960375 - RNA, 19 nt, Artificial Sequence
  Description of Artificial Sequence: Synthetic oligonucleotide
ccucgagaugcugucgggg

SEQ ID NO: 1960376 - RNA, 19 nt, Artificial Sequence
  Description of Artificial Sequence: Synthetic oligonucleotide
gccucgagaugcugucggg

SEQ ID NO: 1960377 - RNA, 19 nt, Artificial Sequence
  Description of Artificial Sequence: Synthetic oligonucleotide
gaagcgaagugggccucga

SEQ ID NO: 1960378 - RNA, 19 nt, Artificial Sequence
  Description of Artificial Sequence: Synthetic oligonucleotide
caccugaagguaugguaua

SEQ ID NO: 1960379 - RNA, 19 nt, Artificial Sequence
  Description of Artificial Sequence: Synthetic oligonucleotide
guucuguuccggauuccaa

SEQ ID NO: 1960380 - RNA, 19 nt, Artificial Sequence
  Description of Artificial Sequence: Synthetic oligonucleotide
cauagaucaccuggagaua

SEQ ID NO: 1960381 - RNA, 19 nt, Artificial Sequence
  Description of Artificial Sequence: Synthetic oligonucleotide
cugucggggccaaugacau

SEQ ID NO: 1960382 - RNA, 19 nt, Artificial Sequence
  Description of Artificial Sequence: Synthetic oligonucleotide
gacccggggccucgagaug

SEQ ID NO: 1960383 - RNA, 19 nt, Artificial Sequence
  Description of Artificial Sequence: Synthetic oligonucleotide
gcaugcuacugaccacaug

SEQ ID NO: 1960384 - RNA, 19 nt, Artificial Sequence
  Description of Artificial Sequence: Synthetic oligonucleotide
ccugccuaagaagugggca

SEQ ID NO: 1960385 - RNA, 19 nt, Artificial Sequence
  Description of Artificial Sequence: Synthetic oligonucleotide
gucccuuugguggcgucuc

SEQ ID NO: 1960386 - RNA, 19 nt, Artificial Sequence
  Description of Artificial Sequence: Synthetic oligonucleotide
gguugacagcaccacagau

SEQ ID NO: 1960387 - RNA, 19 nt, Artificial Sequence
  Description of Artificial Sequence: Synthetic oligonucleotide
gaccucuggcuggcugcgg

SEQ ID NO: 1960388 - RNA, 19 nt, Artificial Sequence
  Description of Artificial Sequence: Synthetic oligonucleotide
ggcaacucagaagcgaagu

SEQ ID NO: 1960389 - RNA, 19 nt, Artificial Sequence
  Description of Artificial Sequence: Synthetic oligonucleotide
ccuaagaagugggcauccc

SEQ ID NO: 1960390 - RNA, 19 nt, Artificial Sequence
  Description of Artificial Sequence: Synthetic oligonucleotide
ccaucaauccaaagaugaa

SEQ ID NO: 1960391 - RNA, 19 nt, Artificial Sequence
  Description of Artificial Sequence: Synthetic oligonucleotide
agugggcaucccagccacg

SEQ ID NO: 1960392 - RNA, 19 nt, Artificial Sequence
  Description of Artificial Sequence: Synthetic oligonucleotide
ggauuccaaaggacucggc

SEQ ID NO: 1960393 - RNA, 19 nt, Artificial Sequence
  Description of Artificial Sequence: Synthetic oligonucleotide
gcauaugcuauuggagaaa

SEQ ID NO: 1960394 - RNA, 19 nt, Artificial Sequence
  Description of Artificial Sequence: Synthetic oligonucleotide
uggcuggcugcgguccagc

SEQ ID NO: 1960395 - RNA, 19 nt, Artificial Sequence
  Description of Artificial Sequence: Synthetic oligonucleotide
cagaagcgaagugggccuc

SEQ ID NO: 1960396 - RNA, 19 nt, Artificial Sequence
  Description of Artificial Sequence: Synthetic oligonucleotide
uccaaaggacucggccgua

SEQ ID NO: 1960397 - RNA, 19 nt, Artificial Sequence
  Description of Artificial Sequence: Synthetic oligonucleotide
ugucggggccaaugacaua

SEQ ID NO: 1960398 - RNA, 19 nt, Artificial Sequence
  Description of Artificial Sequence: Synthetic oligonucleotide
uccugcccaccugaaggua

SEQ ID NO: 1960399 - RNA, 19 nt, Artificial Sequence
  Description of Artificial Sequence: Synthetic oligonucleotide
cggauuccaaaggacucgg

SEQ ID NO: 1960400 - RNA, 19 nt, Artificial Sequence
  Description of Artificial Sequence: Synthetic oligonucleotide
cccugccuaagaagugggc

SEQ ID NO: 1960401 - RNA, 19 nt, Artificial Sequence
  Description of Artificial Sequence: Synthetic oligonucleotide
ggggccucgagaugcuguc

SEQ ID NO: 1960402 - RNA, 19 nt, Artificial Sequence
  Description of Artificial Sequence: Synthetic oligonucleotide
ggcacaucguggaaguacu

SEQ ID NO: 1960403 - RNA, 19 nt, Artificial Sequence
  Description of Artificial Sequence: Synthetic oligonucleotide
cggccguaaaggaucugcc

SEQ ID NO: 1960404 - RNA, 19 nt, Artificial Sequence
  Description of Artificial Sequence: Synthetic oligonucleotide
agagagcgcuggacccggg

SEQ ID NO: 1960405 - RNA, 19 nt, Artificial Sequence
  Description of Artificial Sequence: Synthetic oligonucleotide
cuggacccggggccucgag

SEQ ID NO: 1960406 - RNA, 19 nt, Artificial Sequence
  Description of Artificial Sequence: Synthetic oligonucleotide
gggccucgagaugcugucg

SEQ ID NO: 1960407 - RNA, 19 nt, Artificial Sequence
  Description of Artificial Sequence: Synthetic oligonucleotide
ccuuugguggcgucucaga

SEQ ID NO: 1960408 - RNA, 19 nt, Artificial Sequence
  Description of Artificial Sequence: Synthetic oligonucleotide
gugggccucgaaaggcaca

SEQ ID NO: 1960409 - RNA, 19 nt, Artificial Sequence
  Description of Artificial Sequence: Synthetic oligonucleotide
ccaccuuauagagggcguc

SEQ ID NO: 1960410 - RNA, 19 nt, Artificial Sequence
  Description of Artificial Sequence: Synthetic oligonucleotide
gcgucuacuuugaggguga

SEQ ID NO: 1960411 - RNA, 19 nt, Artificial Sequence
  Description of Artificial Sequence: Synthetic oligonucleotide
caaauaccuacgggagacu

SEQ ID NO: 1960412 - RNA, 19 nt, Artificial Sequence
  Description of Artificial Sequence: Synthetic oligonucleotide
ggacccggggccucgagau

SEQ ID NO: 1960413 - RNA, 19 nt, Artificial Sequence
  Description of Artificial Sequence: Synthetic oligonucleotide
cccuuugguggcgucucag

SEQ ID NO: 1960414 - RNA, 19 nt, Artificial Sequence
  Description of Artificial Sequence: Synthetic oligonucleotide
ccaggucccuuugguggcg

SEQ ID NO: 1960415 - RNA, 19 nt, Artificial Sequence
  Description of Artificial Sequence: Synthetic oligonucleotide
ccugaagguaugguauaaa

SEQ ID NO: 1960416 - RNA, 19 nt, Artificial Sequence
  Description of Artificial Sequence: Synthetic oligonucleotide
cagaagacccugguacaau

SEQ ID NO: 1960417 - RNA, 19 nt, Artificial Sequence
  Description of Artificial Sequence: Synthetic oligonucleotide
gguguuuguuugguuggau

SEQ ID NO: 1960418 - RNA, 19 nt, Artificial Sequence
  Description of Artificial Sequence: Synthetic oligonucleotide
cguggaaguacuugucggu

SEQ ID NO: 1960419 - RNA, 19 nt, Artificial Sequence
  Description of Artificial Sequence: Synthetic oligonucleotide
ggagacugagagcgauuau

SEQ ID NO: 1960420 - RNA, 19 nt, Artificial Sequence
  Description of Artificial Sequence: Synthetic oligonucleotide
ccucuggcuggcugcgguc

SEQ ID NO: 1960421 - RNA, 19 nt, Artificial Sequence
  Description of Artificial Sequence: Synthetic oligonucleotide
gcgucucagagaggcuaug

SEQ ID NO: 1960422 - RNA, 19 nt, Artificial Sequence
  Description of Artificial Sequence: Synthetic oligonucleotide
gcaacccugcugaguucug

SEQ ID NO: 1960423 - RNA, 19 nt, Artificial Sequence
  Description of Artificial Sequence: Synthetic oligonucleotide
ggacucggccguaaaggau

SEQ ID NO: 1960424 - RNA, 19 nt, Artificial Sequence
  Description of Artificial Sequence: Synthetic oligonucleotide
gccucgaaaggcacaucgu

SEQ ID NO: 1960425 - RNA, 19 nt, Artificial Sequence
  Description of Artificial Sequence: Synthetic oligonucleotide
ccugcccaccugaagguau

SEQ ID NO: 1960426 - RNA, 19 nt, Artificial Sequence
  Description of Artificial Sequence: Synthetic oligonucleotide
ccguaaaggaucugcccuu

SEQ ID NO: 1960427 - RNA, 19 nt, Artificial Sequence
  Description of Artificial Sequence: Synthetic oligonucleotide
gggcgucuacuuugagggu

SEQ ID NO: 1960428 - RNA, 19 nt, Artificial Sequence
  Description of Artificial Sequence: Synthetic oligonucleotide
cauccguacuguggccccu

SEQ ID NO: 1960429 - RNA, 19 nt, Artificial Sequence
  Description of Artificial Sequence: Synthetic oligonucleotide
cguacuguggccccucauu

SEQ ID NO: 1960430 - RNA, 19 nt, Artificial Sequence
  Description of Artificial Sequence: Synthetic oligonucleotide
ggcaugcuacugaccacau

SEQ ID NO: 1960431 - RNA, 19 nt, Artificial Sequence
  Description of Artificial Sequence: Synthetic oligonucleotide
gcgguccagcagcaggaau

SEQ ID NO: 1960432 - RNA, 19 nt, Artificial Sequence
  Description of Artificial Sequence: Synthetic oligonucleotide
ccacaccuggcaugcuacu

SEQ ID NO: 1960433 - RNA, 19 nt, Artificial Sequence
  Description of Artificial Sequence: Synthetic oligonucleotide
ggugcccugcuuccaccuu

SEQ ID NO: 1960434 - RNA, 19 nt, Artificial Sequence
  Description of Artificial Sequence: Synthetic oligonucleotide
cgcuggacccggggccucg

SEQ ID NO: 1960435 - RNA, 19 nt, Artificial Sequence
  Description of Artificial Sequence: Synthetic oligonucleotide
gcuggacccggggccucga

SEQ ID NO: 1960436 - RNA, 19 nt, Artificial Sequence
  Description of Artificial Sequence: Synthetic oligonucleotide
gcacaucguggaaguacuu

SEQ ID NO: 1960437 - RNA, 19 nt, Artificial Sequence
  Description of Artificial Sequence: Synthetic oligonucleotide
cguaaaggaucugcccuuu

SEQ ID NO: 1960438 - RNA, 19 nt, Artificial Sequence
  Description of Artificial Sequence: Synthetic oligonucleotide
cggggccaaugacauagau

SEQ ID NO: 1960439 - RNA, 19 nt, Artificial Sequence
  Description of Artificial Sequence: Synthetic oligonucleotide
gcgcuggacccggggccuc

SEQ ID NO: 1960440 - RNA, 19 nt, Artificial Sequence
  Description of Artificial Sequence: Synthetic oligonucleotide
cgucuacuuugagggugaa

SEQ ID NO: 1960441 - RNA, 19 nt, Artificial Sequence
  Description of Artificial Sequence: Synthetic oligonucleotide
ccguacuguggccccucau

SEQ ID NO: 1960442 - RNA, 19 nt, Artificial Sequence
  Description of Artificial Sequence: Synthetic oligonucleotide
agcauuaugaaacaguagg

SEQ ID NO: 1960443 - RNA, 19 nt, Artificial Sequence
  Description of Artificial Sequence: Synthetic oligonucleotide
agaguuuacacacacacac

SEQ ID NO: 1960444 - RNA, 19 nt, Artificial Sequence
  Description of Artificial Sequence: Synthetic oligonucleotide
aacaggagaguuuacacac

SEQ ID NO: 1960445 - RNA, 19 nt, Artificial Sequence
  Description of Artificial Sequence: Synthetic oligonucleotide
uuuucacucauuuaugccg

SEQ ID NO: 1960446 - RNA, 19 nt, Artificial Sequence
  Description of Artificial Sequence: Synthetic oligonucleotide
aauccaagaacugaaugcc

SEQ ID NO: 1960447 - RNA, 19 nt, Artificial Sequence
  Description of Artificial Sequence: Synthetic oligonucleotide
uuuacaauccuuaauucug

SEQ ID NO: 1960448 - RNA, 19 nt, Artificial Sequence
  Description of Artificial Sequence: Synthetic oligonucleotide
aacauaaaagaauugaguu

SEQ ID NO: 1960449 - RNA, 19 nt, Artificial Sequence
  Description of Artificial Sequence: Synthetic oligonucleotide
agugcuguuuauuaaaggg

SEQ ID NO: 1960450 - RNA, 19 nt, Artificial Sequence
  Description of Artificial Sequence: Synthetic oligonucleotide
aguaacaugccccuagagc

SEQ ID NO: 1960451 - RNA, 19 nt, Artificial Sequence
  Description of Artificial Sequence: Synthetic oligonucleotide
uuccuaaucuaauaaauag

SEQ ID NO: 1960452 - RNA, 19 nt, Artificial Sequence
  Description of Artificial Sequence: Synthetic oligonucleotide
aauuuagcgacacgugugg

SEQ ID NO: 1960453 - RNA, 19 nt, Artificial Sequence
  Description of Artificial Sequence: Synthetic oligonucleotide
aaaauacuaauuucaucag

SEQ ID NO: 1960454 - RNA, 19 nt, Artificial Sequence
  Description of Artificial Sequence: Synthetic oligonucleotide
uuuauuaaaggguaccuga

SEQ ID NO: 1960455 - RNA, 19 nt, Artificial Sequence
  Description of Artificial Sequence: Synthetic oligonucleotide
aguuuacacacacacacac

SEQ ID NO: 1960456 - RNA, 19 nt, Artificial Sequence
  Description of Artificial Sequence: Synthetic oligonucleotide
auauacaacacuaagagga

SEQ ID NO: 1960457 - RNA, 19 nt, Artificial Sequence
  Description of Artificial Sequence: Synthetic oligonucleotide
aaaccuauuugaaagacag

SEQ ID NO: 1960458 - RNA, 19 nt, Artificial Sequence
  Description of Artificial Sequence: Synthetic oligonucleotide
uuuacacacacacacacac

SEQ ID NO: 1960459 - RNA, 19 nt, Artificial Sequence
  Description of Artificial Sequence: Synthetic oligonucleotide
ugaaagacagucaaguacu

SEQ ID NO: 1960460 - RNA, 19 nt, Artificial Sequence
  Description of Artificial Sequence: Synthetic oligonucleotide
aacuuaagacauuaaauaa

SEQ ID NO: 1960461 - RNA, 19 nt, Artificial Sequence
  Description of Artificial Sequence: Synthetic oligonucleotide
agaaccuagacaugaaaac

SEQ ID NO: 1960462 - RNA, 19 nt, Artificial Sequence
  Description of Artificial Sequence: Synthetic oligonucleotide
auuaaaggguaccugacag

SEQ ID NO: 1960463 - RNA, 19 nt, Artificial Sequence
  Description of Artificial Sequence: Synthetic oligonucleotide
gaauccaagaacugaaugc

SEQ ID NO: 1960464 - RNA, 19 nt, Artificial Sequence
  Description of Artificial Sequence: Synthetic oligonucleotide
uacauuaaguaacaugccc

SEQ ID NO: 1960465 - RNA, 19 nt, Artificial Sequence
  Description of Artificial Sequence: Synthetic oligonucleotide
aacacuaagaggaaacagg

SEQ ID NO: 1960466 - RNA, 19 nt, Artificial Sequence
  Description of Artificial Sequence: Synthetic oligonucleotide
aguaguccaaucuuucagc

SEQ ID NO: 1960467 - RNA, 19 nt, Artificial Sequence
  Description of Artificial Sequence: Synthetic oligonucleotide
caguugaugaauaaaacac

SEQ ID NO: 1960468 - RNA, 19 nt, Artificial Sequence
  Description of Artificial Sequence: Synthetic oligonucleotide
acauuaaauaagcagaaaa

SEQ ID NO: 1960469 - RNA, 19 nt, Artificial Sequence
  Description of Artificial Sequence: Synthetic oligonucleotide
caauacaaaugcuacauac

SEQ ID NO: 1960470 - RNA, 19 nt, Artificial Sequence
  Description of Artificial Sequence: Synthetic oligonucleotide
auugcacaaguacaguggc

SEQ ID NO: 1960471 - RNA, 19 nt, Artificial Sequence
  Description of Artificial Sequence: Synthetic oligonucleotide
uuuggauacaguaaccagu

SEQ ID NO: 1960472 - RNA, 19 nt, Artificial Sequence
  Description of Artificial Sequence: Synthetic oligonucleotide
guaaaggaaacacaauugc

SEQ ID NO: 1960473 - RNA, 19 nt, Artificial Sequence
  Description of Artificial Sequence: Synthetic oligonucleotide
accuacgauauuuacaauc

SEQ ID NO: 1960474 - RNA, 19 nt, Artificial Sequence
  Description of Artificial Sequence: Synthetic oligonucleotide
aagaaccuacgauauuuac

SEQ ID NO: 1960475 - RNA, 19 nt, Artificial Sequence
  Description of Artificial Sequence: Synthetic oligonucleotide
uagggcacuauacacagag

SEQ ID NO: 1960476 - RNA, 19 nt, Artificial Sequence
  Description of Artificial Sequence: Synthetic oligonucleotide
accuauuugaaagacaguc

SEQ ID NO: 1960477 - RNA, 19 nt, Artificial Sequence
  Description of Artificial Sequence: Synthetic oligonucleotide
aaguacuuugcugggaggc

SEQ ID NO: 1960478 - RNA, 19 nt, Artificial Sequence
  Description of Artificial Sequence: Synthetic oligonucleotide
aaauacuaauuucaucaga

SEQ ID NO: 1960479 - RNA, 19 nt, Artificial Sequence
  Description of Artificial Sequence: Synthetic oligonucleotide
aaccaguggucaaagaacc

SEQ ID NO: 1960480 - RNA, 19 nt, Artificial Sequence
  Description of Artificial Sequence: Synthetic oligonucleotide
gauagggcacuauacacag

SEQ ID NO: 1960481 - RNA, 19 nt, Artificial Sequence
  Description of Artificial Sequence: Synthetic oligonucleotide
uuucaagaacuuaagacau

SEQ ID NO: 1960482 - RNA, 19 nt, Artificial Sequence
  Description of Artificial Sequence: Synthetic oligonucleotide
cuaagaggaaacaggagag

SEQ ID NO: 1960483 - RNA, 19 nt, Artificial Sequence
  Description of Artificial Sequence: Synthetic oligonucleotide
uaauuuagcgacacgugug

SEQ ID NO: 1960484 - RNA, 19 nt, Artificial Sequence
  Description of Artificial Sequence: Synthetic oligonucleotide
ucagcuuaccacaucuagg

SEQ ID NO: 1960485 - RNA, 19 nt, Artificial Sequence
  Description of Artificial Sequence: Synthetic oligonucleotide
uuggauacaguaaccagug

SEQ ID NO: 1960486 - RNA, 19 nt, Artificial Sequence
  Description of Artificial Sequence: Synthetic oligonucleotide
gaaguaauucacgggaugg

SEQ ID NO: 1960487 - RNA, 19 nt, Artificial Sequence
  Description of Artificial Sequence: Synthetic oligonucleotide
aauuacccugucaaaauuc

SEQ ID NO: 1960488 - RNA, 19 nt, Artificial Sequence
  Description of Artificial Sequence: Synthetic oligonucleotide
ucuaggguaucucaugggc

SEQ ID NO: 1960489 - RNA, 19 nt, Artificial Sequence
  Description of Artificial Sequence: Synthetic oligonucleotide
gaaccuacgauauuuacaa

SEQ ID NO: 1960490 - RNA, 19 nt, Artificial Sequence
  Description of Artificial Sequence: Synthetic oligonucleotide
aaacacgacuuccuaaucu

SEQ ID NO: 1960491 - RNA, 19 nt, Artificial Sequence
  Description of Artificial Sequence: Synthetic oligonucleotide
uacacacacacacacacac

SEQ ID NO: 1960492 - RNA, 19 nt, Artificial Sequence
  Description of Artificial Sequence: Synthetic oligonucleotide
ugcaaaugcuguuugggag

SEQ ID NO: 1960493 - RNA, 19 nt, Artificial Sequence
  Description of Artificial Sequence: Synthetic oligonucleotide
uucagcuuaccacaucuag

SEQ ID NO: 1960494 - RNA, 19 nt, Artificial Sequence
  Description of Artificial Sequence: Synthetic oligonucleotide
aaguacaguggcaauuacc

SEQ ID NO: 1960495 - RNA, 19 nt, Artificial Sequence
  Description of Artificial Sequence: Synthetic oligonucleotide
uccuaaucuaauaaauagu

SEQ ID NO: 1960496 - RNA, 19 nt, Artificial Sequence
  Description of Artificial Sequence: Synthetic oligonucleotide
aaaacacgacuuccuaauc

SEQ ID NO: 1960497 - RNA, 19 nt, Artificial Sequence
  Description of Artificial Sequence: Synthetic oligonucleotide
cagcuuaccacaucuaggg

SEQ ID NO: 1960498 - RNA, 19 nt, Artificial Sequence
  Description of Artificial Sequence: Synthetic oligonucleotide
aauaaaacacgacuuccua

SEQ ID NO: 1960499 - RNA, 19 nt, Artificial Sequence
  Description of Artificial Sequence: Synthetic oligonucleotide
aaguaauucacgggauggc

SEQ ID NO: 1960500 - RNA, 19 nt, Artificial Sequence
  Description of Artificial Sequence: Synthetic oligonucleotide
uauuugaaagacagucaag

SEQ ID NO: 1960501 - RNA, 19 nt, Artificial Sequence
  Description of Artificial Sequence: Synthetic oligonucleotide
acuuaagacauuaaauaag

SEQ ID NO: 1960502 - RNA, 19 nt, Artificial Sequence
  Description of Artificial Sequence: Synthetic oligonucleotide
uuaaaggguaccugacagg

SEQ ID NO: 1960503 - RNA, 19 nt, Artificial Sequence
  Description of Artificial Sequence: Synthetic oligonucleotide
aguugaugaauaaaacacg

SEQ ID NO: 1960504 - RNA, 19 nt, Artificial Sequence
  Description of Artificial Sequence: Synthetic oligonucleotide
uaauucacgggauggcagg

SEQ ID NO: 1960505 - RNA, 19 nt, Artificial Sequence
  Description of Artificial Sequence: Synthetic oligonucleotide
uauuaaaggguaccugaca

SEQ ID NO: 1960506 - RNA, 19 nt, Artificial Sequence
  Description of Artificial Sequence: Synthetic oligonucleotide
ugauagggcacuauacaca

SEQ ID NO: 1960507 - RNA, 19 nt, Artificial Sequence
  Description of Artificial Sequence: Synthetic oligonucleotide
uuauuaaaggguaccugac

SEQ ID NO: 1960508 - RNA, 19 nt, Artificial Sequence
  Description of Artificial Sequence: Synthetic oligonucleotide
ugaaguaauucacgggaug

SEQ ID NO: 1960509 - RNA, 19 nt, Artificial Sequence
  Description of Artificial Sequence: Synthetic oligonucleotide
ugaaaaccuauuugaaaga

SEQ ID NO: 1960510 - RNA, 19 nt, Artificial Sequence
  Description of Artificial Sequence: Synthetic oligonucleotide
gaaccuagacaugaaaacc

SEQ ID NO: 1960511 - RNA, 19 nt, Artificial Sequence
  Description of Artificial Sequence: Synthetic oligonucleotide
aagaacugaaugccaggag

SEQ ID NO: 1960512 - RNA, 19 nt, Artificial Sequence
  Description of Artificial Sequence: Synthetic oligonucleotide
uuacaauccuuaauucuga

SEQ ID NO: 1960513 - RNA, 19 nt, Artificial Sequence
  Description of Artificial Sequence: Synthetic oligonucleotide
caauccuuaauucugagaa

SEQ ID NO: 1960514 - RNA, 19 nt, Artificial Sequence
  Description of Artificial Sequence: Synthetic oligonucleotide
aaagaaccuagacaugaaa

SEQ ID NO: 1960515 - RNA, 19 nt, Artificial Sequence
  Description of Artificial Sequence: Synthetic oligonucleotide
gaaacaguagggcacauua

SEQ ID NO: 1960516 - RNA, 19 nt, Artificial Sequence
  Description of Artificial Sequence: Synthetic oligonucleotide
aagaauugaguuucuuaaa

SEQ ID NO: 1960517 - RNA, 19 nt, Artificial Sequence
  Description of Artificial Sequence: Synthetic oligonucleotide
ugccguacaaaauuuuaca

SEQ ID NO: 1960518 - RNA, 19 nt, Artificial Sequence
  Description of Artificial Sequence: Synthetic oligonucleotide
aaggguaccugacagguuu

SEQ ID NO: 1960519 - RNA, 19 nt, Artificial Sequence
  Description of Artificial Sequence: Synthetic oligonucleotide
auuaggaacauaaaagaau

SEQ ID NO: 1960520 - RNA, 19 nt, Artificial Sequence
  Description of Artificial Sequence: Synthetic oligonucleotide
caucuaggguaucucaugg

SEQ ID NO: 1960521 - RNA, 19 nt, Artificial Sequence
  Description of Artificial Sequence: Synthetic oligonucleotide
uuucacucauuuaugccgu

SEQ ID NO: 1960522 - RNA, 19 nt, Artificial Sequence
  Description of Artificial Sequence: Synthetic oligonucleotide
cacacacacacacacgacg

SEQ ID NO: 1960523 - RNA, 19 nt, Artificial Sequence
  Description of Artificial Sequence: Synthetic oligonucleotide
ugcaauacaaaugcuacau

SEQ ID NO: 1960524 - RNA, 19 nt, Artificial Sequence
  Description of Artificial Sequence: Synthetic oligonucleotide
aaccuagacaugaaaaccu

SEQ ID NO: 1960525 - RNA, 19 nt, Artificial Sequence
  Description of Artificial Sequence: Synthetic oligonucleotide
acacgacccgcacacacgc

SEQ ID NO: 1960526 - RNA, 19 nt, Artificial Sequence
  Description of Artificial Sequence: Synthetic oligonucleotide
cucaguugaugaauaaaac

SEQ ID NO: 1960527 - RNA, 19 nt, Artificial Sequence
  Description of Artificial Sequence: Synthetic oligonucleotide
cuacauuaaguaacaugcc

SEQ ID NO: 1960528 - RNA, 19 nt, Artificial Sequence
  Description of Artificial Sequence: Synthetic oligonucleotide
uguuuauuaaaggguaccu

SEQ ID NO: 1960529 - RNA, 19 nt, Artificial Sequence
  Description of Artificial Sequence: Synthetic oligonucleotide
agcugaaguaauucacggg

SEQ ID NO: 1960530 - RNA, 19 nt, Artificial Sequence
  Description of Artificial Sequence: Synthetic oligonucleotide
uacgauauuuacaauccuu

SEQ ID NO: 1960531 - RNA, 19 nt, Artificial Sequence
  Description of Artificial Sequence: Synthetic oligonucleotide
aguugcaaguuuuauuuaa

SEQ ID NO: 1960532 - RNA, 19 nt, Artificial Sequence
  Description of Artificial Sequence: Synthetic oligonucleotide
cacacacacacacacacac

SEQ ID NO: 1960533 - RNA, 19 nt, Artificial Sequence
  Description of Artificial Sequence: Synthetic oligonucleotide
uagugauagggcacuauac

SEQ ID NO: 1960534 - RNA, 19 nt, Artificial Sequence
  Description of Artificial Sequence: Synthetic oligonucleotide
uuagugauagggcacuaua

SEQ ID NO: 1960535 - RNA, 19 nt, Artificial Sequence
  Description of Artificial Sequence: Synthetic oligonucleotide
acagcaguauugcacaagu

SEQ ID NO: 1960536 - RNA, 19 nt, Artificial Sequence
  Description of Artificial Sequence: Synthetic oligonucleotide
cuaaucuaauaaauaguca

SEQ ID NO: 1960537 - RNA, 19 nt, Artificial Sequence
  Description of Artificial Sequence: Synthetic oligonucleotide
gauacaguaaccagugguc

SEQ ID NO: 1960538 - RNA, 19 nt, Artificial Sequence
  Description of Artificial Sequence: Synthetic oligonucleotide
aagaaccuagacaugaaaa

SEQ ID NO: 1960539 - RNA, 19 nt, Artificial Sequence
  Description of Artificial Sequence: Synthetic oligonucleotide
cauaaaggaagccagggaa

SEQ ID NO: 1960540 - RNA, 19 nt, Artificial Sequence
  Description of Artificial Sequence: Synthetic oligonucleotide
ccuacgauauuuacaaucc

SEQ ID NO: 1960541 - RNA, 19 nt, Artificial Sequence
  Description of Artificial Sequence: Synthetic oligonucleotide
aacacgacuuccuaaucua

SEQ ID NO: 1960542 - RNA, 19 nt, Artificial Sequence
  Description of Artificial Sequence: Synthetic oligonucleotide
cuuaauucugagaaguuua

SEQ ID NO: 1960543 - RNA, 19 nt, Artificial Sequence
  Description of Artificial Sequence: Synthetic oligonucleotide
uacccugucaaaauucauc

SEQ ID NO: 1960544 - RNA, 19 nt, Artificial Sequence
  Description of Artificial Sequence: Synthetic oligonucleotide
aaacaguagggcacauuac

SEQ ID NO: 1960545 - RNA, 19 nt, Artificial Sequence
  Description of Artificial Sequence: Synthetic oligonucleotide
uaugccguacaaaauuuua

SEQ ID NO: 1960546 - RNA, 19 nt, Artificial Sequence
  Description of Artificial Sequence: Synthetic oligonucleotide
uaauuucaucagaaaggug

SEQ ID NO: 1960547 - RNA, 19 nt, Artificial Sequence
  Description of Artificial Sequence: Synthetic oligonucleotide
acacguuagugauagggca

SEQ ID NO: 1960548 - RNA, 19 nt, Artificial Sequence
  Description of Artificial Sequence: Synthetic oligonucleotide
aaaaccuauuugaaagaca

SEQ ID NO: 1960549 - RNA, 19 nt, Artificial Sequence
  Description of Artificial Sequence: Synthetic oligonucleotide
caaaugcuacauacgcugg

SEQ ID NO: 1960550 - RNA, 19 nt, Artificial Sequence
  Description of Artificial Sequence: Synthetic oligonucleotide
cuauuugaaagacagucaa

SEQ ID NO: 1960551 - RNA, 19 nt, Artificial Sequence
  Description of Artificial Sequence: Synthetic oligonucleotide
agucaaguacuuugcuggg

SEQ ID NO: 1960552 - RNA, 19 nt, Artificial Sequence
  Description of Artificial Sequence: Synthetic oligonucleotide
uacaauccuuaauucugag

SEQ ID NO: 1960553 - RNA, 19 nt, Artificial Sequence
  Description of Artificial Sequence: Synthetic oligonucleotide
auuccccgcuaauuuagcg

SEQ ID NO: 1960554 - RNA, 19 nt, Artificial Sequence
  Description of Artificial Sequence: Synthetic oligonucleotide
uaaguaacaugccccuaga

SEQ ID NO: 1960555 - RNA, 19 nt, Artificial Sequence
  Description of Artificial Sequence: Synthetic oligonucleotide
gugauagggcacuauacac

SEQ ID NO: 1960556 - RNA, 19 nt, Artificial Sequence
  Description of Artificial Sequence: Synthetic oligonucleotide
agacagucaaguacuuugc

SEQ ID NO: 1960557 - RNA, 19 nt, Artificial Sequence
  Description of Artificial Sequence: Synthetic oligonucleotide
guaaccaguggucaaagaa

SEQ ID NO: 1960558 - RNA, 19 nt, Artificial Sequence
  Description of Artificial Sequence: Synthetic oligonucleotide
uuuagcgacacguguggac

SEQ ID NO: 1960559 - RNA, 19 nt, Artificial Sequence
  Description of Artificial Sequence: Synthetic oligonucleotide
auacgcuggguccuuggac

SEQ ID NO: 1960560 - RNA, 19 nt, Artificial Sequence
  Description of Artificial Sequence: Synthetic oligonucleotide
aauucacgggauggcaggg

SEQ ID NO: 1960561 - RNA, 19 nt, Artificial Sequence
  Description of Artificial Sequence: Synthetic oligonucleotide
guuugggagggauuccccg

SEQ ID NO: 1960562 - RNA, 19 nt, Artificial Sequence
  Description of Artificial Sequence: Synthetic oligonucleotide
acacacacgacggagggag

SEQ ID NO: 1960563 - RNA, 19 nt, Artificial Sequence
  Description of Artificial Sequence: Synthetic oligonucleotide
acaguagggcacauuacac

SEQ ID NO: 1960564 - RNA, 19 nt, Artificial Sequence
  Description of Artificial Sequence: Synthetic oligonucleotide
agaucagugcuguuuauua

SEQ ID NO: 1960565 - RNA, 19 nt, Artificial Sequence
  Description of Artificial Sequence: Synthetic oligonucleotide
uuagcgacacguguggaca

SEQ ID NO: 1960566 - RNA, 19 nt, Artificial Sequence
  Description of Artificial Sequence: Synthetic oligonucleotide
ugucaacacuuucaagaac

SEQ ID NO: 1960567 - RNA, 19 nt, Artificial Sequence
  Description of Artificial Sequence: Synthetic oligonucleotide
gacacguuagugauagggc

SEQ ID NO: 1960568 - RNA, 19 nt, Artificial Sequence
  Description of Artificial Sequence: Synthetic oligonucleotide
aucuaggguaucucauggg

SEQ ID NO: 1960569 - RNA, 19 nt, Artificial Sequence
  Description of Artificial Sequence: Synthetic oligonucleotide
cagaaagguggcagaaucc

SEQ ID NO: 1960570 - RNA, 19 nt, Artificial Sequence
  Description of Artificial Sequence: Synthetic oligonucleotide
ggacacguuagugauaggg

SEQ ID NO: 1960571 - RNA, 19 nt, Artificial Sequence
  Description of Artificial Sequence: Synthetic oligonucleotide
gacacguguggacacgacc

SEQ ID NO: 1960572 - RNA, 19 nt, Artificial Sequence
  Description of Artificial Sequence: Synthetic oligonucleotide
ugggcagcaaaauacuaau

SEQ ID NO: 1960573 - RNA, 19 nt, Artificial Sequence
  Description of Artificial Sequence: Synthetic oligonucleotide
acaauccuuaauucugaga

SEQ ID NO: 1960574 - RNA, 19 nt, Artificial Sequence
  Description of Artificial Sequence: Synthetic oligonucleotide
gcugaaguaauucacggga

SEQ ID NO: 1960575 - RNA, 19 nt, Artificial Sequence
  Description of Artificial Sequence: Synthetic oligonucleotide
augucaacacuuucaagaa

SEQ ID NO: 1960576 - RNA, 19 nt, Artificial Sequence
  Description of Artificial Sequence: Synthetic oligonucleotide
accaggcuaaauccgcagg

SEQ ID NO: 1960577 - RNA, 19 nt, Artificial Sequence
  Description of Artificial Sequence: Synthetic oligonucleotide
uuacacacacacacacaca

SEQ ID NO: 1960578 - RNA, 19 nt, Artificial Sequence
  Description of Artificial Sequence: Synthetic oligonucleotide
aggcuaaauccgcagggag

SEQ ID NO: 1960579 - RNA, 19 nt, Artificial Sequence
  Description of Artificial Sequence: Synthetic oligonucleotide
acacuaagaggaaacagga

SEQ ID NO: 1960580 - RNA, 19 nt, Artificial Sequence
  Description of Artificial Sequence: Synthetic oligonucleotide
auuggugugugugugugug

SEQ ID NO: 1960581 - RNA, 19 nt, Artificial Sequence
  Description of Artificial Sequence: Synthetic oligonucleotide
cacgccaccguaccgagcc

SEQ ID NO: 1960582 - RNA, 19 nt, Artificial Sequence
  Description of Artificial Sequence: Synthetic oligonucleotide
acacacacacacacgacgg

SEQ ID NO: 1960583 - RNA, 19 nt, Artificial Sequence
  Description of Artificial Sequence: Synthetic oligonucleotide
guaauucacgggauggcag

SEQ ID NO: 1960584 - RNA, 19 nt, Artificial Sequence
  Description of Artificial Sequence: Synthetic oligonucleotide
caacacuaagaggaaacag

SEQ ID NO: 1960585 - RNA, 19 nt, Artificial Sequence
  Description of Artificial Sequence: Synthetic oligonucleotide
auacuaauuucaucagaaa

SEQ ID NO: 1960586 - RNA, 19 nt, Artificial Sequence
  Description of Artificial Sequence: Synthetic oligonucleotide
uguuugggagggauucccc

SEQ ID NO: 1960587 - RNA, 19 nt, Artificial Sequence
  Description of Artificial Sequence: Synthetic oligonucleotide
acuuccuaaucuaauaaau

SEQ ID NO: 1960588 - RNA, 19 nt, Artificial Sequence
  Description of Artificial Sequence: Synthetic oligonucleotide
uccccgcuaauuuagcgac

SEQ ID NO: 1960589 - RNA, 19 nt, Artificial Sequence
  Description of Artificial Sequence: Synthetic oligonucleotide
aguaauucacgggauggca

SEQ ID NO: 1960590 - RNA, 19 nt, Artificial Sequence
  Description of Artificial Sequence: Synthetic oligonucleotide
gcauuaugaaacaguaggg

SEQ ID NO: 1960591 - RNA, 19 nt, Artificial Sequence
  Description of Artificial Sequence: Synthetic oligonucleotide
agaaccuacgauauuuaca

SEQ ID NO: 1960592 - RNA, 19 nt, Artificial Sequence
  Description of Artificial Sequence: Synthetic oligonucleotide
uuccccgcuaauuuagcga

SEQ ID NO: 1960593 - RNA, 19 nt, Artificial Sequence
  Description of Artificial Sequence: Synthetic oligonucleotide
agguuuggauacaguaacc

SEQ ID NO: 1960594 - RNA, 19 nt, Artificial Sequence
  Description of Artificial Sequence: Synthetic oligonucleotide
gguggcagaauccaagaac

SEQ ID NO: 1960595 - RNA, 19 nt, Artificial Sequence
  Description of Artificial Sequence: Synthetic oligonucleotide
cacacacacacacacacga

SEQ ID NO: 1960596 - RNA, 19 nt, Artificial Sequence
  Description of Artificial Sequence: Synthetic oligonucleotide
uuuggcucaguugaugaau

SEQ ID NO: 1960597 - RNA, 19 nt, Artificial Sequence
  Description of Artificial Sequence: Synthetic oligonucleotide
ggagaguggacccagucac

SEQ ID NO: 1960598 - RNA, 19 nt, Artificial Sequence
  Description of Artificial Sequence: Synthetic oligonucleotide
cacguuagugauagggcac

SEQ ID NO: 1960599 - RNA, 19 nt, Artificial Sequence
  Description of Artificial Sequence: Synthetic oligonucleotide
cauuuggcucaguugauga

SEQ ID NO: 1960600 - RNA, 19 nt, Artificial Sequence
  Description of Artificial Sequence: Synthetic oligonucleotide
uuaugccguacaaaauuuu

SEQ ID NO: 1960601 - RNA, 19 nt, Artificial Sequence
  Description of Artificial Sequence: Synthetic oligonucleotide
cuuccuaaucuaauaaaua

SEQ ID NO: 1960602 - RNA, 19 nt, Artificial Sequence
  Description of Artificial Sequence: Synthetic oligonucleotide
auacaguaaccagugguca

SEQ ID NO: 1960603 - RNA, 19 nt, Artificial Sequence
  Description of Artificial Sequence: Synthetic oligonucleotide
auuacccugucaaaauuca

SEQ ID NO: 1960604 - RNA, 19 nt, Artificial Sequence
  Description of Artificial Sequence: Synthetic oligonucleotide
acaccucaggagcugaagu

SEQ ID NO: 1960605 - RNA, 19 nt, Artificial Sequence
  Description of Artificial Sequence: Synthetic oligonucleotide
acauacgcuggguccuugg

SEQ ID NO: 1960606 - RNA, 19 nt, Artificial Sequence
  Description of Artificial Sequence: Synthetic oligonucleotide
uggcagaauccaagaacug

SEQ ID NO: 1960607 - RNA, 19 nt, Artificial Sequence
  Description of Artificial Sequence: Synthetic oligonucleotide
acacuuucaagaacuuaag

SEQ ID NO: 1960608 - RNA, 19 nt, Artificial Sequence
  Description of Artificial Sequence: Synthetic oligonucleotide
guaccgagccgacacacac

SEQ ID NO: 1960609 - RNA, 19 nt, Artificial Sequence
  Description of Artificial Sequence: Synthetic oligonucleotide
cuaauuuagcgacacgugu

SEQ ID NO: 1960610 - RNA, 19 nt, Artificial Sequence
  Description of Artificial Sequence: Synthetic oligonucleotide
acgacuuccuaaucuaaua

SEQ ID NO: 1960611 - RNA, 19 nt, Artificial Sequence
  Description of Artificial Sequence: Synthetic oligonucleotide
acacacacacacgacggag

SEQ ID NO: 1960612 - RNA, 19 nt, Artificial Sequence
  Description of Artificial Sequence: Synthetic oligonucleotide
uguggacacgacccgcaca

SEQ ID NO: 1960613 - RNA, 19 nt, Artificial Sequence
  Description of Artificial Sequence: Synthetic oligonucleotide
acgauauuuacaauccuua

SEQ ID NO: 1960614 - RNA, 19 nt, Artificial Sequence
  Description of Artificial Sequence: Synthetic oligonucleotide
agggauuccccgcuaauuu

SEQ ID NO: 1960615 - RNA, 19 nt, Artificial Sequence
  Description of Artificial Sequence: Synthetic oligonucleotide
uggugugugugugugugug

SEQ ID NO: 1960616 - RNA, 19 nt, Artificial Sequence
  Description of Artificial Sequence: Synthetic oligonucleotide
aaagaaccuacgauauuua

SEQ ID NO: 1960617 - RNA, 19 nt, Artificial Sequence
  Description of Artificial Sequence: Synthetic oligonucleotide
uucaagaacuuaagacauu

SEQ ID NO: 1960618 - RNA, 19 nt, Artificial Sequence
  Description of Artificial Sequence: Synthetic oligonucleotide
gacacgacccgcacacacg

SEQ ID NO: 1960619 - RNA, 19 nt, Artificial Sequence
  Description of Artificial Sequence: Synthetic oligonucleotide
uccuuaauucugagaaguu

SEQ ID NO: 1960620 - RNA, 19 nt, Artificial Sequence
  Description of Artificial Sequence: Synthetic oligonucleotide
cuaggguaucucaugggca

SEQ ID NO: 1960621 - RNA, 19 nt, Artificial Sequence
  Description of Artificial Sequence: Synthetic oligonucleotide
cuuucagcuuaccacaucu

SEQ ID NO: 1960622 - RNA, 19 nt, Artificial Sequence
  Description of Artificial Sequence: Synthetic oligonucleotide
acagagaucagugcuguuu

SEQ ID NO: 1960623 - RNA, 19 nt, Artificial Sequence
  Description of Artificial Sequence: Synthetic oligonucleotide
uugggagggauuccccgcu

SEQ ID NO: 1960624 - RNA, 19 nt, Artificial Sequence
  Description of Artificial Sequence: Synthetic oligonucleotide
uuacccugucaaaauucau

SEQ ID NO: 1960625 - RNA, 19 nt, Artificial Sequence
  Description of Artificial Sequence: Synthetic oligonucleotide
uuucagcuuaccacaucua

SEQ ID NO: 1960626 - RNA, 19 nt, Artificial Sequence
  Description of Artificial Sequence: Synthetic oligonucleotide
cauuaaguaacaugccccu

SEQ ID NO: 1960627 - RNA, 19 nt, Artificial Sequence
  Description of Artificial Sequence: Synthetic oligonucleotide
ggcuaaauccgcagggagg

SEQ ID NO: 1960628 - RNA, 19 nt, Artificial Sequence
  Description of Artificial Sequence: Synthetic oligonucleotide
ugugugugugugugugugu

SEQ ID NO: 1960629 - RNA, 19 nt, Artificial Sequence
  Description of Artificial Sequence: Synthetic oligonucleotide
caccguaccgagccgacac

SEQ ID NO: 1960630 - RNA, 19 nt, Artificial Sequence
  Description of Artificial Sequence: Synthetic oligonucleotide
aaacacaauugcacacaga

SEQ ID NO: 1960631 - RNA, 19 nt, Artificial Sequence
  Description of Artificial Sequence: Synthetic oligonucleotide
agaguggacccagucacca

SEQ ID NO: 1960632 - RNA, 19 nt, Artificial Sequence
  Description of Artificial Sequence: Synthetic oligonucleotide
ccaggcuaaauccgcaggg

SEQ ID NO: 1960633 - RNA, 19 nt, Artificial Sequence
  Description of Artificial Sequence: Synthetic oligonucleotide
aggguaucucaugggcagc

SEQ ID NO: 1960634 - RNA, 19 nt, Artificial Sequence
  Description of Artificial Sequence: Synthetic oligonucleotide
cuugggagaguggacccag

SEQ ID NO: 1960635 - RNA, 19 nt, Artificial Sequence
  Description of Artificial Sequence: Synthetic oligonucleotide
acgacccgcacacacgcca

SEQ ID NO: 1960636 - RNA, 19 nt, Artificial Sequence
  Description of Artificial Sequence: Synthetic oligonucleotide
cacguguggacacgacccg

SEQ ID NO: 1960637 - RNA, 19 nt, Artificial Sequence
  Description of Artificial Sequence: Synthetic oligonucleotide
uuacagcaguauugcacaa

SEQ ID NO: 1960638 - RNA, 19 nt, Artificial Sequence
  Description of Artificial Sequence: Synthetic oligonucleotide
acacacacacacacacacg

SEQ ID NO: 1960639 - RNA, 19 nt, Artificial Sequence
  Description of Artificial Sequence: Synthetic oligonucleotide
acacacacacacacacgac

SEQ ID NO: 1960640 - RNA, 19 nt, Artificial Sequence
  Description of Artificial Sequence: Synthetic oligonucleotide
uaacaugccccuagagcuu

SEQ ID NO: 1960641 - RNA, 19 nt, Artificial Sequence
  Description of Artificial Sequence: Synthetic oligonucleotide
gcuaauuuagcgacacgug

SEQ ID NO: 1960642 - RNA, 19 nt, Artificial Sequence
  Description of Artificial Sequence: Synthetic oligonucleotide
cugcaauacaaaugcuaca

SEQ ID NO: 1960643 - RNA, 19 nt, Artificial Sequence
  Description of Artificial Sequence: Synthetic oligonucleotide
gaguuuacacacacacaca

SEQ ID NO: 1960644 - RNA, 19 nt, Artificial Sequence
  Description of Artificial Sequence: Synthetic oligonucleotide
gugugugugugugugugug

SEQ ID NO: 1960645 - RNA, 19 nt, Artificial Sequence
  Description of Artificial Sequence: Synthetic oligonucleotide
guggcagaauccaagaacu

SEQ ID NO: 1960646 - RNA, 19 nt, Artificial Sequence
  Description of Artificial Sequence: Synthetic oligonucleotide
gauuccccgcuaauuuagc

SEQ ID NO: 1960647 - RNA, 19 nt, Artificial Sequence
  Description of Artificial Sequence: Synthetic oligonucleotide
agcuuaccacaucuagggu

SEQ ID NO: 1960648 - RNA, 19 nt, Artificial Sequence
  Description of Artificial Sequence: Synthetic oligonucleotide
auucacgggauggcagggg

SEQ ID NO: 1960649 - RNA, 19 nt, Artificial Sequence
  Description of Artificial Sequence: Synthetic oligonucleotide
uaccgagccgacacacaca

SEQ ID NO: 1960650 - RNA, 19 nt, Artificial Sequence
  Description of Artificial Sequence: Synthetic oligonucleotide
cuuaccacaucuaggguau

SEQ ID NO: 1960651 - RNA, 19 nt, Artificial Sequence
  Description of Artificial Sequence: Synthetic oligonucleotide
augggcagcaaaauacuaa

SEQ ID NO: 1960652 - RNA, 19 nt, Artificial Sequence
  Description of Artificial Sequence: Synthetic oligonucleotide
auacaacacuaagaggaaa

SEQ ID NO: 1960653 - RNA, 19 nt, Artificial Sequence
  Description of Artificial Sequence: Synthetic oligonucleotide
aagcgggaggccaccuugg

SEQ ID NO: 1960654 - RNA, 19 nt, Artificial Sequence
  Description of Artificial Sequence: Synthetic oligonucleotide
acguuagugauagggcacu

SEQ ID NO: 1960655 - RNA, 19 nt, Artificial Sequence
  Description of Artificial Sequence: Synthetic oligonucleotide
uggcaauuacccugucaaa

SEQ ID NO: 1960656 - RNA, 19 nt, Artificial Sequence
  Description of Artificial Sequence: Synthetic oligonucleotide
ggagggauuggugugugug

SEQ ID NO: 1960657 - RNA, 19 nt, Artificial Sequence
  Description of Artificial Sequence: Synthetic oligonucleotide
guuuacacacacacacaca

SEQ ID NO: 1960658 - RNA, 19 nt, Artificial Sequence
  Description of Artificial Sequence: Synthetic oligonucleotide
cacacacgccaccguaccg

SEQ ID NO: 1960659 - RNA, 19 nt, Artificial Sequence
  Description of Artificial Sequence: Synthetic oligonucleotide
gcucaguugaugaauaaaa

SEQ ID NO: 1960660 - RNA, 19 nt, Artificial Sequence
  Description of Artificial Sequence: Synthetic oligonucleotide
gcuaaauccgcagggagga

SEQ ID NO: 1960661 - RNA, 19 nt, Artificial Sequence
  Description of Artificial Sequence: Synthetic oligonucleotide
gcuuaccacaucuagggua

SEQ ID NO: 1960662 - RNA, 19 nt, Artificial Sequence
  Description of Artificial Sequence: Synthetic oligonucleotide
aacaugccccuagagcuuu

SEQ ID NO: 1960663 - RNA, 19 nt, Artificial Sequence
  Description of Artificial Sequence: Synthetic oligonucleotide
cuagacaugaaaaccuauu

SEQ ID NO: 1960664 - RNA, 19 nt, Artificial Sequence
  Description of Artificial Sequence: Synthetic oligonucleotide
agcgggaggccaccuuggg

SEQ ID NO: 1960665 - RNA, 19 nt, Artificial Sequence
  Description of Artificial Sequence: Synthetic oligonucleotide
agagaucagugcuguuuau

SEQ ID NO: 1960666 - RNA, 19 nt, Artificial Sequence
  Description of Artificial Sequence: Synthetic oligonucleotide
ggcaauuacccugucaaaa

SEQ ID NO: 1960667 - RNA, 19 nt, Artificial Sequence
  Description of Artificial Sequence: Synthetic oligonucleotide
uuggugugugugugugugu

SEQ ID NO: 1960668 - RNA, 19 nt, Artificial Sequence
  Description of Artificial Sequence: Synthetic oligonucleotide
acacacgccaccguaccga

SEQ ID NO: 1960669 - RNA, 19 nt, Artificial Sequence
  Description of Artificial Sequence: Synthetic oligonucleotide
ggcagaauccaagaacuga

SEQ ID NO: 1960670 - RNA, 19 nt, Artificial Sequence
  Description of Artificial Sequence: Synthetic oligonucleotide
cagggaugucaacacuuuc

SEQ ID NO: 1960671 - RNA, 19 nt, Artificial Sequence
  Description of Artificial Sequence: Synthetic oligonucleotide
gagaguggacccagucacc

SEQ ID NO: 1960672 - RNA, 19 nt, Artificial Sequence
  Description of Artificial Sequence: Synthetic oligonucleotide
uagcgacacguguggacac

SEQ ID NO: 1960673 - RNA, 19 nt, Artificial Sequence
  Description of Artificial Sequence: Synthetic oligonucleotide
agccagggaaacugcaaua

SEQ ID NO: 1960674 - RNA, 19 nt, Artificial Sequence
  Description of Artificial Sequence: Synthetic oligonucleotide
cucauuuaugccguacaaa

SEQ ID NO: 1960675 - RNA, 19 nt, Artificial Sequence
  Description of Artificial Sequence: Synthetic oligonucleotide
aucucaugggcagcaaaau

SEQ ID NO: 1960676 - RNA, 19 nt, Artificial Sequence
  Description of Artificial Sequence: Synthetic oligonucleotide
ggauuggugugugugugug

SEQ ID NO: 1960677 - RNA, 19 nt, Artificial Sequence
  Description of Artificial Sequence: Synthetic oligonucleotide
cacacgccaccguaccgag

SEQ ID NO: 1960678 - RNA, 19 nt, Artificial Sequence
  Description of Artificial Sequence: Synthetic oligonucleotide
auuuagcgacacgugugga

SEQ ID NO: 1960679 - RNA, 19 nt, Artificial Sequence
  Description of Artificial Sequence: Synthetic oligonucleotide
agcgacacguguggacacg

SEQ ID NO: 1960680 - RNA, 19 nt, Artificial Sequence
  Description of Artificial Sequence: Synthetic oligonucleotide
aguggucaaagaaccuaga

SEQ ID NO: 1960681 - RNA, 19 nt, Artificial Sequence
  Description of Artificial Sequence: Synthetic oligonucleotide
ggacacgacccgcacacac

SEQ ID NO: 1960682 - RNA, 19 nt, Artificial Sequence
  Description of Artificial Sequence: Synthetic oligonucleotide
gaguggacccagucaccac

SEQ ID NO: 1960683 - RNA, 19 nt, Artificial Sequence
  Description of Artificial Sequence: Synthetic oligonucleotide
gagggauuggugugugugu

SEQ ID NO: 1960684 - RNA, 19 nt, Artificial Sequence
  Description of Artificial Sequence: Synthetic oligonucleotide
agccaaagcgggaggccac

SEQ ID NO: 1960685 - RNA, 19 nt, Artificial Sequence
  Description of Artificial Sequence: Synthetic oligonucleotide
gggcacuauacacagagau

SEQ ID NO: 1960686 - RNA, 19 nt, Artificial Sequence
  Description of Artificial Sequence: Synthetic oligonucleotide
cugaaugccaggagccaaa

SEQ ID NO: 1960687 - RNA, 19 nt, Artificial Sequence
  Description of Artificial Sequence: Synthetic oligonucleotide
uacauacgcuggguccuug

SEQ ID NO: 1960688 - RNA, 19 nt, Artificial Sequence
  Description of Artificial Sequence: Synthetic oligonucleotide
ggcacuauacacagagauc

SEQ ID NO: 1960689 - RNA, 19 nt, Artificial Sequence
  Description of Artificial Sequence: Synthetic oligonucleotide
uucacucauuuaugccgua

SEQ ID NO: 1960690 - RNA, 19 nt, Artificial Sequence
  Description of Artificial Sequence: Synthetic oligonucleotide
gggagaguggacccaguca

SEQ ID NO: 1960691 - RNA, 19 nt, Artificial Sequence
  Description of Artificial Sequence: Synthetic oligonucleotide
ccaaucuuucagcuuacca

SEQ ID NO: 1960692 - RNA, 19 nt, Artificial Sequence
  Description of Artificial Sequence: Synthetic oligonucleotide
gucaaguacuuugcuggga

SEQ ID NO: 1960693 - RNA, 19 nt, Artificial Sequence
  Description of Artificial Sequence: Synthetic oligonucleotide
aaaugcuguuugggaggga

SEQ ID NO: 1960694 - RNA, 19 nt, Artificial Sequence
  Description of Artificial Sequence: Synthetic oligonucleotide
ucacgggauggcaggggua

SEQ ID NO: 1960695 - RNA, 19 nt, Artificial Sequence
  Description of Artificial Sequence: Synthetic oligonucleotide
caucagaaagguggcagaa

SEQ ID NO: 1960696 - RNA, 19 nt, Artificial Sequence
  Description of Artificial Sequence: Synthetic oligonucleotide
aaaggguaccugacagguu

SEQ ID NO: 1960697 - RNA, 19 nt, Artificial Sequence
  Description of Artificial Sequence: Synthetic oligonucleotide
accuagacaugaaaaccua

SEQ ID NO: 1960698 - RNA, 19 nt, Artificial Sequence
  Description of Artificial Sequence: Synthetic oligonucleotide
gacccgcacacacgccacc

SEQ ID NO: 1960699 - RNA, 19 nt, Artificial Sequence
  Description of Artificial Sequence: Synthetic oligonucleotide
acacacacacacacacaca

SEQ ID NO: 1960700 - RNA, 19 nt, Artificial Sequence
  Description of Artificial Sequence: Synthetic oligonucleotide
gauuggugugugugugugu

SEQ ID NO: 1960701 - RNA, 19 nt, Artificial Sequence
  Description of Artificial Sequence: Synthetic oligonucleotide
cauacgcuggguccuugga

SEQ ID NO: 1960702 - RNA, 19 nt, Artificial Sequence
  Description of Artificial Sequence: Synthetic oligonucleotide
gcacacacgccaccguacc

SEQ ID NO: 1960703 - RNA, 19 nt, Artificial Sequence
  Description of Artificial Sequence: Synthetic oligonucleotide
guugcaaguuuuauuuaau

SEQ ID NO: 1960704 - RNA, 19 nt, Artificial Sequence
  Description of Artificial Sequence: Synthetic oligonucleotide
cuacgauauuuacaauccu

SEQ ID NO: 1960705 - RNA, 19 nt, Artificial Sequence
  Description of Artificial Sequence: Synthetic oligonucleotide
caccucaggagcugaagua

SEQ ID NO: 1960706 - RNA, 19 nt, Artificial Sequence
  Description of Artificial Sequence: Synthetic oligonucleotide
accguaccgagccgacaca

SEQ ID NO: 1960707 - RNA, 19 nt, Artificial Sequence
  Description of Artificial Sequence: Synthetic oligonucleotide
guacaguggcaauuacccu

SEQ ID NO: 1960708 - RNA, 19 nt, Artificial Sequence
  Description of Artificial Sequence: Synthetic oligonucleotide
cacacacacacacgacgga

SEQ ID NO: 1960709 - RNA, 19 nt, Artificial Sequence
  Description of Artificial Sequence: Synthetic oligonucleotide
cacaucuaggguaucucau

SEQ ID NO: 1960710 - RNA, 19 nt, Artificial Sequence
  Description of Artificial Sequence: Synthetic oligonucleotide
cuaaauccgcagggaggac

SEQ ID NO: 1960711 - RNA, 19 nt, Artificial Sequence
  Description of Artificial Sequence: Synthetic oligonucleotide
guguggacacgacccgcac

SEQ ID NO: 1960712 - RNA, 19 nt, Artificial Sequence
  Description of Artificial Sequence: Synthetic oligonucleotide
gcaauacaaaugcuacaua

SEQ ID NO: 1960713 - RNA, 19 nt, Artificial Sequence
  Description of Artificial Sequence: Synthetic oligonucleotide
caggcuaaauccgcaggga

SEQ ID NO: 1960714 - RNA, 19 nt, Artificial Sequence
  Description of Artificial Sequence: Synthetic oligonucleotide
cacgacccgcacacacgcc

SEQ ID NO: 1960715 - RNA, 19 nt, Artificial Sequence
  Description of Artificial Sequence: Synthetic oligonucleotide
acggagggagggauuggug

SEQ ID NO: 1960716 - RNA, 19 nt, Artificial Sequence
  Description of Artificial Sequence: Synthetic oligonucleotide
acgccaccguaccgagccg

SEQ ID NO: 1960717 - RNA, 19 nt, Artificial Sequence
  Description of Artificial Sequence: Synthetic oligonucleotide
acacgccaccguaccgagc

SEQ ID NO: 1960718 - RNA, 19 nt, Artificial Sequence
  Description of Artificial Sequence: Synthetic oligonucleotide
cacgacuuccuaaucuaau

SEQ ID NO: 1960719 - RNA, 19 nt, Artificial Sequence
  Description of Artificial Sequence: Synthetic oligonucleotide
cccgcuaauuuagcgacac

SEQ ID NO: 1960720 - RNA, 19 nt, Artificial Sequence
  Description of Artificial Sequence: Synthetic oligonucleotide
gagaucagugcuguuuauu

SEQ ID NO: 1960721 - RNA, 19 nt, Artificial Sequence
  Description of Artificial Sequence: Synthetic oligonucleotide
acacgacggagggagggau

SEQ ID NO: 1960722 - RNA, 19 nt, Artificial Sequence
  Description of Artificial Sequence: Synthetic oligonucleotide
ggcucaguugaugaauaaa

SEQ ID NO: 1960723 - RNA, 19 nt, Artificial Sequence
  Description of Artificial Sequence: Synthetic oligonucleotide
gggauuccccgcuaauuua

SEQ ID NO: 1960724 - RNA, 19 nt, Artificial Sequence
  Description of Artificial Sequence: Synthetic oligonucleotide
augaaacaguagggcacau

SEQ ID NO: 1960725 - RNA, 19 nt, Artificial Sequence
  Description of Artificial Sequence: Synthetic oligonucleotide
agggcacuauacacagaga

SEQ ID NO: 1960726 - RNA, 19 nt, Artificial Sequence
  Description of Artificial Sequence: Synthetic oligonucleotide
auagggcacuauacacaga

SEQ ID NO: 1960727 - RNA, 19 nt, Artificial Sequence
  Description of Artificial Sequence: Synthetic oligonucleotide
uuaccacaucuaggguauc

SEQ ID NO: 1960728 - RNA, 19 nt, Artificial Sequence
  Description of Artificial Sequence: Synthetic oligonucleotide
guuagugauagggcacuau

SEQ ID NO: 1960729 - RNA, 19 nt, Artificial Sequence
  Description of Artificial Sequence: Synthetic oligonucleotide
cagcaguauugcacaagua

SEQ ID NO: 1960730 - RNA, 19 nt, Artificial Sequence
  Description of Artificial Sequence: Synthetic oligonucleotide
gagggauuccccgcuaauu

SEQ ID NO: 1960731 - RNA, 19 nt, Artificial Sequence
  Description of Artificial Sequence: Synthetic oligonucleotide
cgacuuccuaaucuaauaa

SEQ ID NO: 1960732 - RNA, 19 nt, Artificial Sequence
  Description of Artificial Sequence: Synthetic oligonucleotide
gcuacauacgcuggguccu

SEQ ID NO: 1960733 - RNA, 19 nt, Artificial Sequence
  Description of Artificial Sequence: Synthetic oligonucleotide
ccgcuaauuuagcgacacg

SEQ ID NO: 1960734 - RNA, 19 nt, Artificial Sequence
  Description of Artificial Sequence: Synthetic oligonucleotide
cacacgacggagggaggga

SEQ ID NO: 1960735 - RNA, 19 nt, Artificial Sequence
  Description of Artificial Sequence: Synthetic oligonucleotide
ccaguggucaaagaaccua

SEQ ID NO: 1960736 - RNA, 19 nt, Artificial Sequence
  Description of Artificial Sequence: Synthetic oligonucleotide
acgggauggcagggguaug

SEQ ID NO: 1960737 - RNA, 19 nt, Artificial Sequence
  Description of Artificial Sequence: Synthetic oligonucleotide
caguggcaauuacccuguc

SEQ ID NO: 1960738 - RNA, 19 nt, Artificial Sequence
  Description of Artificial Sequence: Synthetic oligonucleotide
cgcacacacgccaccguac

SEQ ID NO: 1960739 - RNA, 19 nt, Artificial Sequence
  Description of Artificial Sequence: Synthetic oligonucleotide
gccaaagcgggaggccacc

SEQ ID NO: 1960740 - RNA, 19 nt, Artificial Sequence
  Description of Artificial Sequence: Synthetic oligonucleotide
ggugugugugugugugugu

SEQ ID NO: 1960741 - RNA, 19 nt, Artificial Sequence
  Description of Artificial Sequence: Synthetic oligonucleotide
ccguaccgagccgacacac

SEQ ID NO: 1960742 - RNA, 19 nt, Artificial Sequence
  Description of Artificial Sequence: Synthetic oligonucleotide
gggauuggugugugugugu

SEQ ID NO: 1960743 - RNA, 19 nt, Artificial Sequence
  Description of Artificial Sequence: Synthetic oligonucleotide
caucuacauuaaguaacau

SEQ ID NO: 1960744 - RNA, 19 nt, Artificial Sequence
  Description of Artificial Sequence: Synthetic oligonucleotide
ccuuaauucugagaaguuu

SEQ ID NO: 1960745 - RNA, 19 nt, Artificial Sequence
  Description of Artificial Sequence: Synthetic oligonucleotide
ccuagacaugaaaaccuau

SEQ ID NO: 1960746 - RNA, 19 nt, Artificial Sequence
  Description of Artificial Sequence: Synthetic oligonucleotide
agggcacauuacacagaaa

SEQ ID NO: 1960747 - RNA, 19 nt, Artificial Sequence
  Description of Artificial Sequence: Synthetic oligonucleotide
cacgggauggcagggguau

SEQ ID NO: 1960748 - RNA, 19 nt, Artificial Sequence
  Description of Artificial Sequence: Synthetic oligonucleotide
gguaucucaugggcagcaa

SEQ ID NO: 1960749 - RNA, 19 nt, Artificial Sequence
  Description of Artificial Sequence: Synthetic oligonucleotide
cguguggacacgacccgca

SEQ ID NO: 1960750 - RNA, 19 nt, Artificial Sequence
  Description of Artificial Sequence: Synthetic oligonucleotide
gcgacacguguggacacga

SEQ ID NO: 1960751 - RNA, 19 nt, Artificial Sequence
  Description of Artificial Sequence: Synthetic oligonucleotide
caaagcgggaggccaccuu

SEQ ID NO: 1960752 - RNA, 19 nt, Artificial Sequence
  Description of Artificial Sequence: Synthetic oligonucleotide
cgacacguguggacacgac

SEQ ID NO: 1960753 - RNA, 19 nt, Artificial Sequence
  Description of Artificial Sequence: Synthetic oligonucleotide
gccaccguaccgagccgac

SEQ ID NO: 1960754 - RNA, 19 nt, Artificial Sequence
  Description of Artificial Sequence: Synthetic oligonucleotide
ccucaggagcugaaguaau

SEQ ID NO: 1960755 - RNA, 19 nt, Artificial Sequence
  Description of Artificial Sequence: Synthetic oligonucleotide
cguaccgagccgacacaca

SEQ ID NO: 1960756 - RNA, 19 nt, Artificial Sequence
  Description of Artificial Sequence: Synthetic oligonucleotide
ccccgcuaauuuagcgaca

SEQ ID NO: 1960757 - RNA, 19 nt, Artificial Sequence
  Description of Artificial Sequence: Synthetic oligonucleotide
cacgacggagggagggauu

SEQ ID NO: 1960758 - RNA, 19 nt, Artificial Sequence
  Description of Artificial Sequence: Synthetic oligonucleotide
cgcuggguccuuggacacg

SEQ ID NO: 1960759 - RNA, 19 nt, Artificial Sequence
  Description of Artificial Sequence: Synthetic oligonucleotide
cuacauacgcuggguccuu

SEQ ID NO: 1960760 - RNA, 19 nt, Artificial Sequence
  Description of Artificial Sequence: Synthetic oligonucleotide
cccacaccucaggagcuga

SEQ ID NO: 1960761 - RNA, 19 nt, Artificial Sequence
  Description of Artificial Sequence: Synthetic oligonucleotide
ccgcacacacgccaccgua

SEQ ID NO: 1960762 - RNA, 19 nt, Artificial Sequence
  Description of Artificial Sequence: Synthetic oligonucleotide
ccaccguaccgagccgaca

SEQ ID NO: 1960763 - RNA, 19 nt, Artificial Sequence
  Description of Artificial Sequence: Synthetic oligonucleotide
cguuagugauagggcacua

SEQ ID NO: 1960764 - RNA, 19 nt, Artificial Sequence
  Description of Artificial Sequence: Synthetic oligonucleotide
cgccaccguaccgagccga

SEQ ID NO: 1960765 - RNA, 19 nt, Artificial Sequence
  Description of Artificial Sequence: Synthetic oligonucleotide
aaagaagagacuuacaugg

SEQ ID NO: 1960766 - RNA, 19 nt, Artificial Sequence
  Description of Artificial Sequence: Synthetic oligonucleotide
aaagguaggucccagaggc

SEQ ID NO: 1960767 - RNA, 19 nt, Artificial Sequence
  Description of Artificial Sequence: Synthetic oligonucleotide
aaauuugggauccucacuc

SEQ ID NO: 1960768 - RNA, 19 nt, Artificial Sequence
  Description of Artificial Sequence: Synthetic oligonucleotide
uuauugaacuauuauaucc

SEQ ID NO: 1960769 - RNA, 19 nt, Artificial Sequence
  Description of Artificial Sequence: Synthetic oligonucleotide
aaagcuucuugacugacgg

SEQ ID NO: 1960770 - RNA, 19 nt, Artificial Sequence
  Description of Artificial Sequence: Synthetic oligonucleotide
uuaauugcaauacaucuca

SEQ ID NO: 1960771 - RNA, 19 nt, Artificial Sequence
  Description of Artificial Sequence: Synthetic oligonucleotide
agaaagauuccagaaaucc

SEQ ID NO: 1960772 - RNA, 19 nt, Artificial Sequence
  Description of Artificial Sequence: Synthetic oligonucleotide
aaauuauugaacuauuaua

SEQ ID NO: 1960773 - RNA, 19 nt, Artificial Sequence
  Description of Artificial Sequence: Synthetic oligonucleotide
aauuauugaacuauuauau

SEQ ID NO: 1960774 - RNA, 19 nt, Artificial Sequence
  Description of Artificial Sequence: Synthetic oligonucleotide
auggguagaggccugaacc

SEQ ID NO: 1960775 - RNA, 19 nt, Artificial Sequence
  Description of Artificial Sequence: Synthetic oligonucleotide
acuuacauggccuaaaggu

SEQ ID NO: 1960776 - RNA, 19 nt, Artificial Sequence
  Description of Artificial Sequence: Synthetic oligonucleotide
auggccuaaagguaggucc

SEQ ID NO: 1960777 - RNA, 19 nt, Artificial Sequence
  Description of Artificial Sequence: Synthetic oligonucleotide
uugacuagguccaggaugg

SEQ ID NO: 1960778 - RNA, 19 nt, Artificial Sequence
  Description of Artificial Sequence: Synthetic oligonucleotide
uauugaacuauuauaucca

SEQ ID NO: 1960779 - RNA, 19 nt, Artificial Sequence
  Description of Artificial Sequence: Synthetic oligonucleotide
aucucauaauacuucagac

SEQ ID NO: 1960780 - RNA, 19 nt, Artificial Sequence
  Description of Artificial Sequence: Synthetic oligonucleotide
uccaggauggcauuguacg

SEQ ID NO: 1960781 - RNA, 19 nt, Artificial Sequence
  Description of Artificial Sequence: Synthetic oligonucleotide
guauguaucuaccagguug

SEQ ID NO: 1960782 - RNA, 19 nt, Artificial Sequence
  Description of Artificial Sequence: Synthetic oligonucleotide
uuguguuuccuccaaagcc

SEQ ID NO: 1960783 - RNA, 19 nt, Artificial Sequence
  Description of Artificial Sequence: Synthetic oligonucleotide
uuuaaaagaagagacuuac

SEQ ID NO: 1960784 - RNA, 19 nt, Artificial Sequence
  Description of Artificial Sequence: Synthetic oligonucleotide
cuaacugcagaacugacag

SEQ ID NO: 1960785 - RNA, 19 nt, Artificial Sequence
  Description of Artificial Sequence: Synthetic oligonucleotide
auuauugaacuauuauauc

SEQ ID NO: 1960786 - RNA, 19 nt, Artificial Sequence
  Description of Artificial Sequence: Synthetic oligonucleotide
agaguauguaucuaccagg

SEQ ID NO: 1960787 - RNA, 19 nt, Artificial Sequence
  Description of Artificial Sequence: Synthetic oligonucleotide
auacuucagacuuuaaaag

SEQ ID NO: 1960788 - RNA, 19 nt, Artificial Sequence
  Description of Artificial Sequence: Synthetic oligonucleotide
gaacugacaguccaaacag

SEQ ID NO: 1960789 - RNA, 19 nt, Artificial Sequence
  Description of Artificial Sequence: Synthetic oligonucleotide
uuacauggccuaaagguag

SEQ ID NO: 1960790 - RNA, 19 nt, Artificial Sequence
  Description of Artificial Sequence: Synthetic oligonucleotide
ugcaauacaucucauaaua

SEQ ID NO: 1960791 - RNA, 19 nt, Artificial Sequence
  Description of Artificial Sequence: Synthetic oligonucleotide
cuuauggucugcaacacag

SEQ ID NO: 1960792 - RNA, 19 nt, Artificial Sequence
  Description of Artificial Sequence: Synthetic oligonucleotide
aacuauuauauccauuaau

SEQ ID NO: 1960793 - RNA, 19 nt, Artificial Sequence
  Description of Artificial Sequence: Synthetic oligonucleotide
augacagucaugaaguccc

SEQ ID NO: 1960794 - RNA, 19 nt, Artificial Sequence
  Description of Artificial Sequence: Synthetic oligonucleotide
guaucuaccagguuguccc

SEQ ID NO: 1960795 - RNA, 19 nt, Artificial Sequence
  Description of Artificial Sequence: Synthetic oligonucleotide
aagaauguaugaauguauc

SEQ ID NO: 1960796 - RNA, 19 nt, Artificial Sequence
  Description of Artificial Sequence: Synthetic oligonucleotide
cuauuauauccauuaauug

SEQ ID NO: 1960797 - RNA, 19 nt, Artificial Sequence
  Description of Artificial Sequence: Synthetic oligonucleotide
uauguggcaagcuuguccc

SEQ ID NO: 1960798 - RNA, 19 nt, Artificial Sequence
  Description of Artificial Sequence: Synthetic oligonucleotide
auuauauccauuaauugca

SEQ ID NO: 1960799 - RNA, 19 nt, Artificial Sequence
  Description of Artificial Sequence: Synthetic oligonucleotide
uaauacuucagacuuuaaa

SEQ ID NO: 1960800 - RNA, 19 nt, Artificial Sequence
  Description of Artificial Sequence: Synthetic oligonucleotide
aaaccauaaccucugaauu

SEQ ID NO: 1960801 - RNA, 19 nt, Artificial Sequence
  Description of Artificial Sequence: Synthetic oligonucleotide
gaaagauuccagaaauccg

SEQ ID NO: 1960802 - RNA, 19 nt, Artificial Sequence
  Description of Artificial Sequence: Synthetic oligonucleotide
agcuucuugacugacggcc

SEQ ID NO: 1960803 - RNA, 19 nt, Artificial Sequence
  Description of Artificial Sequence: Synthetic oligonucleotide
agaacugacaguccaaaca

SEQ ID NO: 1960804 - RNA, 19 nt, Artificial Sequence
  Description of Artificial Sequence: Synthetic oligonucleotide
auuuaaauuauugaacuau

SEQ ID NO: 1960805 - RNA, 19 nt, Artificial Sequence
  Description of Artificial Sequence: Synthetic oligonucleotide
uccauuaauugcaauacau

SEQ ID NO: 1960806 - RNA, 19 nt, Artificial Sequence
  Description of Artificial Sequence: Synthetic oligonucleotide
aaccuuuggaaauuuggga

SEQ ID NO: 1960807 - RNA, 19 nt, Artificial Sequence
  Description of Artificial Sequence: Synthetic oligonucleotide
uauguaucuaccagguugu

SEQ ID NO: 1960808 - RNA, 19 nt, Artificial Sequence
  Description of Artificial Sequence: Synthetic oligonucleotide
uuaaauuauugaacuauua

SEQ ID NO: 1960809 - RNA, 19 nt, Artificial Sequence
  Description of Artificial Sequence: Synthetic oligonucleotide
uuuaaauuauugaacuauu

SEQ ID NO: 1960810 - RNA, 19 nt, Artificial Sequence
  Description of Artificial Sequence: Synthetic oligonucleotide
aaccagugcuucuggaugg

SEQ ID NO: 1960811 - RNA, 19 nt, Artificial Sequence
  Description of Artificial Sequence: Synthetic oligonucleotide
aaccgucaaagugugaaac

SEQ ID NO: 1960812 - RNA, 19 nt, Artificial Sequence
  Description of Artificial Sequence: Synthetic oligonucleotide
gggauccucacucagaugg

SEQ ID NO: 1960813 - RNA, 19 nt, Artificial Sequence
  Description of Artificial Sequence: Synthetic oligonucleotide
uacggaaucuugucuaggg

SEQ ID NO: 1960814 - RNA, 19 nt, Artificial Sequence
  Description of Artificial Sequence: Synthetic oligonucleotide
uggcugguaagaaagauuc

SEQ ID NO: 1960815 - RNA, 19 nt, Artificial Sequence
  Description of Artificial Sequence: Synthetic oligonucleotide
uaaagguaggucccagagg

SEQ ID NO: 1960816 - RNA, 19 nt, Artificial Sequence
  Description of Artificial Sequence: Synthetic oligonucleotide
ucugaaaguaggcucugcc

SEQ ID NO: 1960817 - RNA, 19 nt, Artificial Sequence
  Description of Artificial Sequence: Synthetic oligonucleotide
auuaauugcaauacaucuc

SEQ ID NO: 1960818 - RNA, 19 nt, Artificial Sequence
  Description of Artificial Sequence: Synthetic oligonucleotide
uguuguguuuccuccaaag

SEQ ID NO: 1960819 - RNA, 19 nt, Artificial Sequence
  Description of Artificial Sequence: Synthetic oligonucleotide
aucggcuuccuugacaucc

SEQ ID NO: 1960820 - RNA, 19 nt, Artificial Sequence
  Description of Artificial Sequence: Synthetic oligonucleotide
aguccaaacagauguaugu

SEQ ID NO: 1960821 - RNA, 19 nt, Artificial Sequence
  Description of Artificial Sequence: Synthetic oligonucleotide
aguaccugguccucauucc

SEQ ID NO: 1960822 - RNA, 19 nt, Artificial Sequence
  Description of Artificial Sequence: Synthetic oligonucleotide
aaccucugaauuuucuucu

SEQ ID NO: 1960823 - RNA, 19 nt, Artificial Sequence
  Description of Artificial Sequence: Synthetic oligonucleotide
aaacaguuuccagagggag

SEQ ID NO: 1960824 - RNA, 19 nt, Artificial Sequence
  Description of Artificial Sequence: Synthetic oligonucleotide
gaauguaugaauguaucuc

SEQ ID NO: 1960825 - RNA, 19 nt, Artificial Sequence
  Description of Artificial Sequence: Synthetic oligonucleotide
cugaguuccagccagggac

SEQ ID NO: 1960826 - RNA, 19 nt, Artificial Sequence
  Description of Artificial Sequence: Synthetic oligonucleotide
uaggcaagccuucuaacug

SEQ ID NO: 1960827 - RNA, 19 nt, Artificial Sequence
  Description of Artificial Sequence: Synthetic oligonucleotide
acuccaaucggcuuccuug

SEQ ID NO: 1960828 - RNA, 19 nt, Artificial Sequence
  Description of Artificial Sequence: Synthetic oligonucleotide
auauccauuaauugcaaua

SEQ ID NO: 1960829 - RNA, 19 nt, Artificial Sequence
  Description of Artificial Sequence: Synthetic oligonucleotide
acuauuauauccauuaauu

SEQ ID NO: 1960830 - RNA, 19 nt, Artificial Sequence
  Description of Artificial Sequence: Synthetic oligonucleotide
gcuucuacaaacaucagcc

SEQ ID NO: 1960831 - RNA, 19 nt, Artificial Sequence
  Description of Artificial Sequence: Synthetic oligonucleotide
aggcaagccuucuaacugc

SEQ ID NO: 1960832 - RNA, 19 nt, Artificial Sequence
  Description of Artificial Sequence: Synthetic oligonucleotide
ucccuaaaugucuucagcu

SEQ ID NO: 1960833 - RNA, 19 nt, Artificial Sequence
  Description of Artificial Sequence: Synthetic oligonucleotide
cuucuggauggguagaggc

SEQ ID NO: 1960834 - RNA, 19 nt, Artificial Sequence
  Description of Artificial Sequence: Synthetic oligonucleotide
uuaggcaagccuucuaacu

SEQ ID NO: 1960835 - RNA, 19 nt, Artificial Sequence
  Description of Artificial Sequence: Synthetic oligonucleotide
gacuuacauggccuaaagg

SEQ ID NO: 1960836 - RNA, 19 nt, Artificial Sequence
  Description of Artificial Sequence: Synthetic oligonucleotide
agccccucaacuccaaucg

SEQ ID NO: 1960837 - RNA, 19 nt, Artificial Sequence
  Description of Artificial Sequence: Synthetic oligonucleotide
cauuaauugcaauacaucu

SEQ ID NO: 1960838 - RNA, 19 nt, Artificial Sequence
  Description of Artificial Sequence: Synthetic oligonucleotide
auuguacggaaucuugucu

SEQ ID NO: 1960839 - RNA, 19 nt, Artificial Sequence
  Description of Artificial Sequence: Synthetic oligonucleotide
uggguagaggccugaaccg

SEQ ID NO: 1960840 - RNA, 19 nt, Artificial Sequence
  Description of Artificial Sequence: Synthetic oligonucleotide
acagauguauguggcaagc

SEQ ID NO: 1960841 - RNA, 19 nt, Artificial Sequence
  Description of Artificial Sequence: Synthetic oligonucleotide
ugguaagaaagauuccaga

SEQ ID NO: 1960842 - RNA, 19 nt, Artificial Sequence
  Description of Artificial Sequence: Synthetic oligonucleotide
uuccaaaccauaaccucug

SEQ ID NO: 1960843 - RNA, 19 nt, Artificial Sequence
  Description of Artificial Sequence: Synthetic oligonucleotide
cauguuaggccuugugggg

SEQ ID NO: 1960844 - RNA, 19 nt, Artificial Sequence
  Description of Artificial Sequence: Synthetic oligonucleotide
guauguggcaagcuugucc

SEQ ID NO: 1960845 - RNA, 19 nt, Artificial Sequence
  Description of Artificial Sequence: Synthetic oligonucleotide
agugcaucugaaaguaggc

SEQ ID NO: 1960846 - RNA, 19 nt, Artificial Sequence
  Description of Artificial Sequence: Synthetic oligonucleotide
ucuccuuauggucugcaac

SEQ ID NO: 1960847 - RNA, 19 nt, Artificial Sequence
  Description of Artificial Sequence: Synthetic oligonucleotide
cuuuaauuuccucauggca

SEQ ID NO: 1960848 - RNA, 19 nt, Artificial Sequence
  Description of Artificial Sequence: Synthetic oligonucleotide
accuuuggaaauuugggau

SEQ ID NO: 1960849 - RNA, 19 nt, Artificial Sequence
  Description of Artificial Sequence: Synthetic oligonucleotide
aaccauaaccucugaauuu

SEQ ID NO: 1960850 - RNA, 19 nt, Artificial Sequence
  Description of Artificial Sequence: Synthetic oligonucleotide
agaaauccgcaucuuguug

SEQ ID NO: 1960851 - RNA, 19 nt, Artificial Sequence
  Description of Artificial Sequence: Synthetic oligonucleotide
uugacugacggccggccgg

SEQ ID NO: 1960852 - RNA, 19 nt, Artificial Sequence
  Description of Artificial Sequence: Synthetic oligonucleotide
cugguaagaaagauuccag

SEQ ID NO: 1960853 - RNA, 19 nt, Artificial Sequence
  Description of Artificial Sequence: Synthetic oligonucleotide
ucuggagugggccauggaa

SEQ ID NO: 1960854 - RNA, 19 nt, Artificial Sequence
  Description of Artificial Sequence: Synthetic oligonucleotide
uaugaauguaucuccuuau

SEQ ID NO: 1960855 - RNA, 19 nt, Artificial Sequence
  Description of Artificial Sequence: Synthetic oligonucleotide
aaacagauguauguggcaa

SEQ ID NO: 1960856 - RNA, 19 nt, Artificial Sequence
  Description of Artificial Sequence: Synthetic oligonucleotide
cuucagcugaguuccagcc

SEQ ID NO: 1960857 - RNA, 19 nt, Artificial Sequence
  Description of Artificial Sequence: Synthetic oligonucleotide
uccagaaauccgcaucuug

SEQ ID NO: 1960858 - RNA, 19 nt, Artificial Sequence
  Description of Artificial Sequence: Synthetic oligonucleotide
uguacggaaucuugucuag

SEQ ID NO: 1960859 - RNA, 19 nt, Artificial Sequence
  Description of Artificial Sequence: Synthetic oligonucleotide
aaacaucagccauguuagg

SEQ ID NO: 1960860 - RNA, 19 nt, Artificial Sequence
  Description of Artificial Sequence: Synthetic oligonucleotide
aagcuucuugacugacggc

SEQ ID NO: 1960861 - RNA, 19 nt, Artificial Sequence
  Description of Artificial Sequence: Synthetic oligonucleotide
uacagcuuggcccugucaa

SEQ ID NO: 1960862 - RNA, 19 nt, Artificial Sequence
  Description of Artificial Sequence: Synthetic oligonucleotide
aagccuucuaacugcagaa

SEQ ID NO: 1960863 - RNA, 19 nt, Artificial Sequence
  Description of Artificial Sequence: Synthetic oligonucleotide
cacagaguauguaucuacc

SEQ ID NO: 1960864 - RNA, 19 nt, Artificial Sequence
  Description of Artificial Sequence: Synthetic oligonucleotide
aauuugggauccucacuca

SEQ ID NO: 1960865 - RNA, 19 nt, Artificial Sequence
  Description of Artificial Sequence: Synthetic oligonucleotide
uacauggccuaaagguagg

SEQ ID NO: 1960866 - RNA, 19 nt, Artificial Sequence
  Description of Artificial Sequence: Synthetic oligonucleotide
aaaugucuucagcugaguu

SEQ ID NO: 1960867 - RNA, 19 nt, Artificial Sequence
  Description of Artificial Sequence: Synthetic oligonucleotide
acucagauggccugccagg

SEQ ID NO: 1960868 - RNA, 19 nt, Artificial Sequence
  Description of Artificial Sequence: Synthetic oligonucleotide
auuuccucauggcaggcug

SEQ ID NO: 1960869 - RNA, 19 nt, Artificial Sequence
  Description of Artificial Sequence: Synthetic oligonucleotide
augaauguaucuccuuaug

SEQ ID NO: 1960870 - RNA, 19 nt, Artificial Sequence
  Description of Artificial Sequence: Synthetic oligonucleotide
uauagugcugcuucaggaa

SEQ ID NO: 1960871 - RNA, 19 nt, Artificial Sequence
  Description of Artificial Sequence: Synthetic oligonucleotide
guuguguuuccuccaaagc

SEQ ID NO: 1960872 - RNA, 19 nt, Artificial Sequence
  Description of Artificial Sequence: Synthetic oligonucleotide
ucugcgguguacagcuugg

SEQ ID NO: 1960873 - RNA, 19 nt, Artificial Sequence
  Description of Artificial Sequence: Synthetic oligonucleotide
ucagcacauucuuugcacc

SEQ ID NO: 1960874 - RNA, 19 nt, Artificial Sequence
  Description of Artificial Sequence: Synthetic oligonucleotide
uggguagccccucaacucc

SEQ ID NO: 1960875 - RNA, 19 nt, Artificial Sequence
  Description of Artificial Sequence: Synthetic oligonucleotide
agacuuacauggccuaaag

SEQ ID NO: 1960876 - RNA, 19 nt, Artificial Sequence
  Description of Artificial Sequence: Synthetic oligonucleotide
uuuaggcaagccuucuaac

SEQ ID NO: 1960877 - RNA, 19 nt, Artificial Sequence
  Description of Artificial Sequence: Synthetic oligonucleotide
acggaaucuugucuagggg

SEQ ID NO: 1960878 - RNA, 19 nt, Artificial Sequence
  Description of Artificial Sequence: Synthetic oligonucleotide
uguaucuaccagguugucc

SEQ ID NO: 1960879 - RNA, 19 nt, Artificial Sequence
  Description of Artificial Sequence: Synthetic oligonucleotide
auugaacuauuauauccau

SEQ ID NO: 1960880 - RNA, 19 nt, Artificial Sequence
  Description of Artificial Sequence: Synthetic oligonucleotide
acuuuauguggcugguaag

SEQ ID NO: 1960881 - RNA, 19 nt, Artificial Sequence
  Description of Artificial Sequence: Synthetic oligonucleotide
ucauggacuccuuagccau

SEQ ID NO: 1960882 - RNA, 19 nt, Artificial Sequence
  Description of Artificial Sequence: Synthetic oligonucleotide
uuguacggaaucuugucua

SEQ ID NO: 1960883 - RNA, 19 nt, Artificial Sequence
  Description of Artificial Sequence: Synthetic oligonucleotide
ugacaucccacccacuuua

SEQ ID NO: 1960884 - RNA, 19 nt, Artificial Sequence
  Description of Artificial Sequence: Synthetic oligonucleotide
uggagugggccauggaacc

SEQ ID NO: 1960885 - RNA, 19 nt, Artificial Sequence
  Description of Artificial Sequence: Synthetic oligonucleotide
ccauguuaggccuuguggg

SEQ ID NO: 1960886 - RNA, 19 nt, Artificial Sequence
  Description of Artificial Sequence: Synthetic oligonucleotide
ugguccucauuccagcugu

SEQ ID NO: 1960887 - RNA, 19 nt, Artificial Sequence
  Description of Artificial Sequence: Synthetic oligonucleotide
cauuguacggaaucuuguc

SEQ ID NO: 1960888 - RNA, 19 nt, Artificial Sequence
  Description of Artificial Sequence: Synthetic oligonucleotide
ucacagaauucauggacuc

SEQ ID NO: 1960889 - RNA, 19 nt, Artificial Sequence
  Description of Artificial Sequence: Synthetic oligonucleotide
acucucagcagguagugaa

SEQ ID NO: 1960890 - RNA, 19 nt, Artificial Sequence
  Description of Artificial Sequence: Synthetic oligonucleotide
caucucauaauacuucaga

SEQ ID NO: 1960891 - RNA, 19 nt, Artificial Sequence
  Description of Artificial Sequence: Synthetic oligonucleotide
ucagauggccugccaggcg

SEQ ID NO: 1960892 - RNA, 19 nt, Artificial Sequence
  Description of Artificial Sequence: Synthetic oligonucleotide
aaaguaggcucugcccagg

SEQ ID NO: 1960893 - RNA, 19 nt, Artificial Sequence
  Description of Artificial Sequence: Synthetic oligonucleotide
cuuccuugacaucccaccc

SEQ ID NO: 1960894 - RNA, 19 nt, Artificial Sequence
  Description of Artificial Sequence: Synthetic oligonucleotide
agucaugaagucccuaaau

SEQ ID NO: 1960895 - RNA, 19 nt, Artificial Sequence
  Description of Artificial Sequence: Synthetic oligonucleotide
uuauguggcugguaagaaa

SEQ ID NO: 1960896 - RNA, 19 nt, Artificial Sequence
  Description of Artificial Sequence: Synthetic oligonucleotide
ugguccacagaguauguau

SEQ ID NO: 1960897 - RNA, 19 nt, Artificial Sequence
  Description of Artificial Sequence: Synthetic oligonucleotide
aagccagagaacagcuugg

SEQ ID NO: 1960898 - RNA, 19 nt, Artificial Sequence
  Description of Artificial Sequence: Synthetic oligonucleotide
gaaauccgcaucuuguugu

SEQ ID NO: 1960899 - RNA, 19 nt, Artificial Sequence
  Description of Artificial Sequence: Synthetic oligonucleotide
aagucccuaaaugucuuca

SEQ ID NO: 1960900 - RNA, 19 nt, Artificial Sequence
  Description of Artificial Sequence: Synthetic oligonucleotide
cagauggccugccaggcgg

SEQ ID NO: 1960901 - RNA, 19 nt, Artificial Sequence
  Description of Artificial Sequence: Synthetic oligonucleotide
agucccuaaaugucuucag

SEQ ID NO: 1960902 - RNA, 19 nt, Artificial Sequence
  Description of Artificial Sequence: Synthetic oligonucleotide
uauauccauuaauugcaau

SEQ ID NO: 1960903 - RNA, 19 nt, Artificial Sequence
  Description of Artificial Sequence: Synthetic oligonucleotide
cuggagugggccauggaac

SEQ ID NO: 1960904 - RNA, 19 nt, Artificial Sequence
  Description of Artificial Sequence: Synthetic oligonucleotide
ucccacccacuuuaugugg

SEQ ID NO: 1960905 - RNA, 19 nt, Artificial Sequence
  Description of Artificial Sequence: Synthetic oligonucleotide
caaccagugcuucuggaug

SEQ ID NO: 1960906 - RNA, 19 nt, Artificial Sequence
  Description of Artificial Sequence: Synthetic oligonucleotide
gccauguuaggccuugugg

SEQ ID NO: 1960907 - RNA, 19 nt, Artificial Sequence
  Description of Artificial Sequence: Synthetic oligonucleotide
ucuaccagguugucccugc

SEQ ID NO: 1960908 - RNA, 19 nt, Artificial Sequence
  Description of Artificial Sequence: Synthetic oligonucleotide
cucauaauacuucagacuu

SEQ ID NO: 1960909 - RNA, 19 nt, Artificial Sequence
  Description of Artificial Sequence: Synthetic oligonucleotide
gacucuacaagugcaucug

SEQ ID NO: 1960910 - RNA, 19 nt, Artificial Sequence
  Description of Artificial Sequence: Synthetic oligonucleotide
agggagcauggguagcccc

SEQ ID NO: 1960911 - RNA, 19 nt, Artificial Sequence
  Description of Artificial Sequence: Synthetic oligonucleotide
uugcaauacaucucauaau

SEQ ID NO: 1960912 - RNA, 19 nt, Artificial Sequence
  Description of Artificial Sequence: Synthetic oligonucleotide
auccauuaauugcaauaca

SEQ ID NO: 1960913 - RNA, 19 nt, Artificial Sequence
  Description of Artificial Sequence: Synthetic oligonucleotide
ccaaacagauguauguggc

SEQ ID NO: 1960914 - RNA, 19 nt, Artificial Sequence
  Description of Artificial Sequence: Synthetic oligonucleotide
uaccugguccucauuccag

SEQ ID NO: 1960915 - RNA, 19 nt, Artificial Sequence
  Description of Artificial Sequence: Synthetic oligonucleotide
aagagacuuacauggccua

SEQ ID NO: 1960916 - RNA, 19 nt, Artificial Sequence
  Description of Artificial Sequence: Synthetic oligonucleotide
gaagucccgacuccaaguc

SEQ ID NO: 1960917 - RNA, 19 nt, Artificial Sequence
  Description of Artificial Sequence: Synthetic oligonucleotide
uguaugaauguaucuccuu

SEQ ID NO: 1960918 - RNA, 19 nt, Artificial Sequence
  Description of Artificial Sequence: Synthetic oligonucleotide
uuuauguggcugguaagaa

SEQ ID NO: 1960919 - RNA, 19 nt, Artificial Sequence
  Description of Artificial Sequence: Synthetic oligonucleotide
uugugggguacuguggcag

SEQ ID NO: 1960920 - RNA, 19 nt, Artificial Sequence
  Description of Artificial Sequence: Synthetic oligonucleotide
guaugaauguaucuccuua

SEQ ID NO: 1960921 - RNA, 19 nt, Artificial Sequence
  Description of Artificial Sequence: Synthetic oligonucleotide
aagauuccagaaauccgca

SEQ ID NO: 1960922 - RNA, 19 nt, Artificial Sequence
  Description of Artificial Sequence: Synthetic oligonucleotide
cagcacauucuuugcaccc

SEQ ID NO: 1960923 - RNA, 19 nt, Artificial Sequence
  Description of Artificial Sequence: Synthetic oligonucleotide
auccgcaucuuguuguuga

SEQ ID NO: 1960924 - RNA, 19 nt, Artificial Sequence
  Description of Artificial Sequence: Synthetic oligonucleotide
cuuacauggccuaaaggua

SEQ ID NO: 1960925 - RNA, 19 nt, Artificial Sequence
  Description of Artificial Sequence: Synthetic oligonucleotide
uuccagagggagcaugggu

SEQ ID NO: 1960926 - RNA, 19 nt, Artificial Sequence
  Description of Artificial Sequence: Synthetic oligonucleotide
aucccacccacuuuaugug

SEQ ID NO: 1960927 - RNA, 19 nt, Artificial Sequence
  Description of Artificial Sequence: Synthetic oligonucleotide
gucccuaaaugucuucagc

SEQ ID NO: 1960928 - RNA, 19 nt, Artificial Sequence
  Description of Artificial Sequence: Synthetic oligonucleotide
uccuuagccauuucuucaa

SEQ ID NO: 1960929 - RNA, 19 nt, Artificial Sequence
  Description of Artificial Sequence: Synthetic oligonucleotide
augaagucccuaaaugucu

SEQ ID NO: 1960930 - RNA, 19 nt, Artificial Sequence
  Description of Artificial Sequence: Synthetic oligonucleotide
uugucccugcuauagugcu

SEQ ID NO: 1960931 - RNA, 19 nt, Artificial Sequence
  Description of Artificial Sequence: Synthetic oligonucleotide
guagugaagucccgacucc

SEQ ID NO: 1960932 - RNA, 19 nt, Artificial Sequence
  Description of Artificial Sequence: Synthetic oligonucleotide
gaacuauuauauccauuaa

SEQ ID NO: 1960933 - RNA, 19 nt, Artificial Sequence
  Description of Artificial Sequence: Synthetic oligonucleotide
accgucaaagugugaaaca

SEQ ID NO: 1960934 - RNA, 19 nt, Artificial Sequence
  Description of Artificial Sequence: Synthetic oligonucleotide
cuuuauguggcugguaaga

SEQ ID NO: 1960935 - RNA, 19 nt, Artificial Sequence
  Description of Artificial Sequence: Synthetic oligonucleotide
ugccaaccagugcuucugg

SEQ ID NO: 1960936 - RNA, 19 nt, Artificial Sequence
  Description of Artificial Sequence: Synthetic oligonucleotide
gguugucccugcuauagug

SEQ ID NO: 1960937 - RNA, 19 nt, Artificial Sequence
  Description of Artificial Sequence: Synthetic oligonucleotide
caguccaaacagauguaug

SEQ ID NO: 1960938 - RNA, 19 nt, Artificial Sequence
  Description of Artificial Sequence: Synthetic oligonucleotide
ugcuauagugcugcuucag

SEQ ID NO: 1960939 - RNA, 19 nt, Artificial Sequence
  Description of Artificial Sequence: Synthetic oligonucleotide
aauuuccucauggcaggcu

SEQ ID NO: 1960940 - RNA, 19 nt, Artificial Sequence
  Description of Artificial Sequence: Synthetic oligonucleotide
aagucccgacuccaagucu

SEQ ID NO: 1960941 - RNA, 19 nt, Artificial Sequence
  Description of Artificial Sequence: Synthetic oligonucleotide
aaucggcuuccuugacauc

SEQ ID NO: 1960942 - RNA, 19 nt, Artificial Sequence
  Description of Artificial Sequence: Synthetic oligonucleotide
uccucacucagauggccug

SEQ ID NO: 1960943 - RNA, 19 nt, Artificial Sequence
  Description of Artificial Sequence: Synthetic oligonucleotide
aacccugugccaaccagug

SEQ ID NO: 1960944 - RNA, 19 nt, Artificial Sequence
  Description of Artificial Sequence: Synthetic oligonucleotide
aggccuuuaauuuccucau

SEQ ID NO: 1960945 - RNA, 19 nt, Artificial Sequence
  Description of Artificial Sequence: Synthetic oligonucleotide
uuugcacccaaagaaugua

SEQ ID NO: 1960946 - RNA, 19 nt, Artificial Sequence
  Description of Artificial Sequence: Synthetic oligonucleotide
agguuggccagccacuccu

SEQ ID NO: 1960947 - RNA, 19 nt, Artificial Sequence
  Description of Artificial Sequence: Synthetic oligonucleotide
uuuccagagggagcauggg

SEQ ID NO: 1960948 - RNA, 19 nt, Artificial Sequence
  Description of Artificial Sequence: Synthetic oligonucleotide
aaauccgcaucuuguuguu

SEQ ID NO: 1960949 - RNA, 19 nt, Artificial Sequence
  Description of Artificial Sequence: Synthetic oligonucleotide
agguaggucccagaggcag

SEQ ID NO: 1960950 - RNA, 19 nt, Artificial Sequence
  Description of Artificial Sequence: Synthetic oligonucleotide
caaaccauaaccucugaau

SEQ ID NO: 1960951 - RNA, 19 nt, Artificial Sequence
  Description of Artificial Sequence: Synthetic oligonucleotide
gauccucacucagauggcc

SEQ ID NO: 1960952 - RNA, 19 nt, Artificial Sequence
  Description of Artificial Sequence: Synthetic oligonucleotide
cuucuugacugacggccgg

SEQ ID NO: 1960953 - RNA, 19 nt, Artificial Sequence
  Description of Artificial Sequence: Synthetic oligonucleotide
uccugcacugucuccaaaa

SEQ ID NO: 1960954 - RNA, 19 nt, Artificial Sequence
  Description of Artificial Sequence: Synthetic oligonucleotide
gugaagucccgacuccaag

SEQ ID NO: 1960955 - RNA, 19 nt, Artificial Sequence
  Description of Artificial Sequence: Synthetic oligonucleotide
cagcuuggcaaugacaguc

SEQ ID NO: 1960956 - RNA, 19 nt, Artificial Sequence
  Description of Artificial Sequence: Synthetic oligonucleotide
ugcagaacugacaguccaa

SEQ ID NO: 1960957 - RNA, 19 nt, Artificial Sequence
  Description of Artificial Sequence: Synthetic oligonucleotide
uugcacccaaagaauguau

SEQ ID NO: 1960958 - RNA, 19 nt, Artificial Sequence
  Description of Artificial Sequence: Synthetic oligonucleotide
ugcccugguccacagagua

SEQ ID NO: 1960959 - RNA, 19 nt, Artificial Sequence
  Description of Artificial Sequence: Synthetic oligonucleotide
gcgguguacagcuuggccc

SEQ ID NO: 1960960 - RNA, 19 nt, Artificial Sequence
  Description of Artificial Sequence: Synthetic oligonucleotide
cauaauacuucagacuuua

SEQ ID NO: 1960961 - RNA, 19 nt, Artificial Sequence
  Description of Artificial Sequence: Synthetic oligonucleotide
caagccuucuaacugcaga

SEQ ID NO: 1960962 - RNA, 19 nt, Artificial Sequence
  Description of Artificial Sequence: Synthetic oligonucleotide
gaaacaguuuccagaggga

SEQ ID NO: 1960963 - RNA, 19 nt, Artificial Sequence
  Description of Artificial Sequence: Synthetic oligonucleotide
cuugacugacggccggccg

SEQ ID NO: 1960964 - RNA, 19 nt, Artificial Sequence
  Description of Artificial Sequence: Synthetic oligonucleotide
caaacagauguauguggca

SEQ ID NO: 1960965 - RNA, 19 nt, Artificial Sequence
  Description of Artificial Sequence: Synthetic oligonucleotide
cagguagugaagucccgac

SEQ ID NO: 1960966 - RNA, 19 nt, Artificial Sequence
  Description of Artificial Sequence: Synthetic oligonucleotide
agccuucuaacugcagaac

SEQ ID NO: 1960967 - RNA, 19 nt, Artificial Sequence
  Description of Artificial Sequence: Synthetic oligonucleotide
uccaagucugcgguguaca

SEQ ID NO: 1960968 - RNA, 19 nt, Artificial Sequence
  Description of Artificial Sequence: Synthetic oligonucleotide
gucugcaacacagccuggg

SEQ ID NO: 1960969 - RNA, 19 nt, Artificial Sequence
  Description of Artificial Sequence: Synthetic oligonucleotide
ccugcuauagugcugcuuc

SEQ ID NO: 1960970 - RNA, 19 nt, Artificial Sequence
  Description of Artificial Sequence: Synthetic oligonucleotide
accauaaccucugaauuuu

SEQ ID NO: 1960971 - RNA, 19 nt, Artificial Sequence
  Description of Artificial Sequence: Synthetic oligonucleotide
agaauucauggacuccuua

SEQ ID NO: 1960972 - RNA, 19 nt, Artificial Sequence
  Description of Artificial Sequence: Synthetic oligonucleotide
cagaacugacaguccaaac

SEQ ID NO: 1960973 - RNA, 19 nt, Artificial Sequence
  Description of Artificial Sequence: Synthetic oligonucleotide
gggguuuucacagaauuca

SEQ ID NO: 1960974 - RNA, 19 nt, Artificial Sequence
  Description of Artificial Sequence: Synthetic oligonucleotide
acuagguccaggauggcau

SEQ ID NO: 1960975 - RNA, 19 nt, Artificial Sequence
  Description of Artificial Sequence: Synthetic oligonucleotide
uccaaaccauaaccucuga

SEQ ID NO: 1960976 - RNA, 19 nt, Artificial Sequence
  Description of Artificial Sequence: Synthetic oligonucleotide
uuggaaauuugggauccuc

SEQ ID NO: 1960977 - RNA, 19 nt, Artificial Sequence
  Description of Artificial Sequence: Synthetic oligonucleotide
gucugcgguguacagcuug

SEQ ID NO: 1960978 - RNA, 19 nt, Artificial Sequence
  Description of Artificial Sequence: Synthetic oligonucleotide
acaucucauaauacuucag

SEQ ID NO: 1960979 - RNA, 19 nt, Artificial Sequence
  Description of Artificial Sequence: Synthetic oligonucleotide
ucggcuuccuugacauccc

SEQ ID NO: 1960980 - RNA, 19 nt, Artificial Sequence
  Description of Artificial Sequence: Synthetic oligonucleotide
auguaugaauguaucuccu

SEQ ID NO: 1960981 - RNA, 19 nt, Artificial Sequence
  Description of Artificial Sequence: Synthetic oligonucleotide
guacggaaucuugucuagg

SEQ ID NO: 1960982 - RNA, 19 nt, Artificial Sequence
  Description of Artificial Sequence: Synthetic oligonucleotide
caagucugcgguguacagc

SEQ ID NO: 1960983 - RNA, 19 nt, Artificial Sequence
  Description of Artificial Sequence: Synthetic oligonucleotide
uugacaucccacccacuuu

SEQ ID NO: 1960984 - RNA, 19 nt, Artificial Sequence
  Description of Artificial Sequence: Synthetic oligonucleotide
acaaguaccugguccucau

SEQ ID NO: 1960985 - RNA, 19 nt, Artificial Sequence
  Description of Artificial Sequence: Synthetic oligonucleotide
ggccugaaccgucaaagug

SEQ ID NO: 1960986 - RNA, 19 nt, Artificial Sequence
  Description of Artificial Sequence: Synthetic oligonucleotide
ccuucuaacugcagaacug

SEQ ID NO: 1960987 - RNA, 19 nt, Artificial Sequence
  Description of Artificial Sequence: Synthetic oligonucleotide
gcugguaagaaagauucca

SEQ ID NO: 1960988 - RNA, 19 nt, Artificial Sequence
  Description of Artificial Sequence: Synthetic oligonucleotide
uagugaagucccgacucca

SEQ ID NO: 1960989 - RNA, 19 nt, Artificial Sequence
  Description of Artificial Sequence: Synthetic oligonucleotide
acaguccaaacagauguau

SEQ ID NO: 1960990 - RNA, 19 nt, Artificial Sequence
  Description of Artificial Sequence: Synthetic oligonucleotide
aacugacaguccaaacaga

SEQ ID NO: 1960991 - RNA, 19 nt, Artificial Sequence
  Description of Artificial Sequence: Synthetic oligonucleotide
gguuuucacagaauucaug

SEQ ID NO: 1960992 - RNA, 19 nt, Artificial Sequence
  Description of Artificial Sequence: Synthetic oligonucleotide
aauccgcaucuuguuguug

SEQ ID NO: 1960993 - RNA, 19 nt, Artificial Sequence
  Description of Artificial Sequence: Synthetic oligonucleotide
gaguauguaucuaccaggu

SEQ ID NO: 1960994 - RNA, 19 nt, Artificial Sequence
  Description of Artificial Sequence: Synthetic oligonucleotide
agauuccagaaauccgcau

SEQ ID NO: 1960995 - RNA, 19 nt, Artificial Sequence
  Description of Artificial Sequence: Synthetic oligonucleotide
aggauggcauuguacggaa

SEQ ID NO: 1960996 - RNA, 19 nt, Artificial Sequence
  Description of Artificial Sequence: Synthetic oligonucleotide
agaggucuggagugggcca

SEQ ID NO: 1960997 - RNA, 19 nt, Artificial Sequence
  Description of Artificial Sequence: Synthetic oligonucleotide
agcugaguuccagccaggg

SEQ ID NO: 1960998 - RNA, 19 nt, Artificial Sequence
  Description of Artificial Sequence: Synthetic oligonucleotide
caucccacccacuuuaugu

SEQ ID NO: 1960999 - RNA, 19 nt, Artificial Sequence
  Description of Artificial Sequence: Synthetic oligonucleotide
uccuuauggucugcaacac

SEQ ID NO: 1961000 - RNA, 19 nt, Artificial Sequence
  Description of Artificial Sequence: Synthetic oligonucleotide
agccauguuaggccuugug

SEQ ID NO: 1961001 - RNA, 19 nt, Artificial Sequence
  Description of Artificial Sequence: Synthetic oligonucleotide
cagaggucuggagugggcc

SEQ ID NO: 1961002 - RNA, 19 nt, Artificial Sequence
  Description of Artificial Sequence: Synthetic oligonucleotide
agucccgacuccaagucug

SEQ ID NO: 1961003 - RNA, 19 nt, Artificial Sequence
  Description of Artificial Sequence: Synthetic oligonucleotide
auggccugggacucuacaa

SEQ ID NO: 1961004 - RNA, 19 nt, Artificial Sequence
  Description of Artificial Sequence: Synthetic oligonucleotide
caccauguuguguuuccuc

SEQ ID NO: 1961005 - RNA, 19 nt, Artificial Sequence
  Description of Artificial Sequence: Synthetic oligonucleotide
aguauguaucuaccagguu

SEQ ID NO: 1961006 - RNA, 19 nt, Artificial Sequence
  Description of Artificial Sequence: Synthetic oligonucleotide
cugggacucuacaagugca

SEQ ID NO: 1961007 - RNA, 19 nt, Artificial Sequence
  Description of Artificial Sequence: Synthetic oligonucleotide
cucagcagguagugaaguc

SEQ ID NO: 1961008 - RNA, 19 nt, Artificial Sequence
  Description of Artificial Sequence: Synthetic oligonucleotide
acaucccacccacuuuaug

SEQ ID NO: 1961009 - RNA, 19 nt, Artificial Sequence
  Description of Artificial Sequence: Synthetic oligonucleotide
auguauguggcaagcuugu

SEQ ID NO: 1961010 - RNA, 19 nt, Artificial Sequence
  Description of Artificial Sequence: Synthetic oligonucleotide
ugacugacggccggccggg

SEQ ID NO: 1961011 - RNA, 19 nt, Artificial Sequence
  Description of Artificial Sequence: Synthetic oligonucleotide
aacuccaaucggcuuccuu

SEQ ID NO: 1961012 - RNA, 19 nt, Artificial Sequence
  Description of Artificial Sequence: Synthetic oligonucleotide
ugacagucaugaagucccu

SEQ ID NO: 1961013 - RNA, 19 nt, Artificial Sequence
  Description of Artificial Sequence: Synthetic oligonucleotide
uaucuaccagguugucccu

SEQ ID NO: 1961014 - RNA, 19 nt, Artificial Sequence
  Description of Artificial Sequence: Synthetic oligonucleotide
cccaggacugcccuggucc

SEQ ID NO: 1961015 - RNA, 19 nt, Artificial Sequence
  Description of Artificial Sequence: Synthetic oligonucleotide
uguuaggccuuguggggua

SEQ ID NO: 1961016 - RNA, 19 nt, Artificial Sequence
  Description of Artificial Sequence: Synthetic oligonucleotide
auguuaggccuuguggggu

SEQ ID NO: 1961017 - RNA, 19 nt, Artificial Sequence
  Description of Artificial Sequence: Synthetic oligonucleotide
ggcauuguacggaaucuug

SEQ ID NO: 1961018 - RNA, 19 nt, Artificial Sequence
  Description of Artificial Sequence: Synthetic oligonucleotide
guaccugguccucauucca

SEQ ID NO: 1961019 - RNA, 19 nt, Artificial Sequence
  Description of Artificial Sequence: Synthetic oligonucleotide
uccaaucggcuuccuugac

SEQ ID NO: 1961020 - RNA, 19 nt, Artificial Sequence
  Description of Artificial Sequence: Synthetic oligonucleotide
uguacagcuuggcccuguc

SEQ ID NO: 1961021 - RNA, 19 nt, Artificial Sequence
  Description of Artificial Sequence: Synthetic oligonucleotide
cccuaaaugucuucagcug

SEQ ID NO: 1961022 - RNA, 19 nt, Artificial Sequence
  Description of Artificial Sequence: Synthetic oligonucleotide
ccaggauggcauuguacgg

SEQ ID NO: 1961023 - RNA, 19 nt, Artificial Sequence
  Description of Artificial Sequence: Synthetic oligonucleotide
cuuugcacccaaagaaugu

SEQ ID NO: 1961024 - RNA, 19 nt, Artificial Sequence
  Description of Artificial Sequence: Synthetic oligonucleotide
acacaaguaccugguccuc

SEQ ID NO: 1961025 - RNA, 19 nt, Artificial Sequence
  Description of Artificial Sequence: Synthetic oligonucleotide
cuccaaucggcuuccuuga

SEQ ID NO: 1961026 - RNA, 19 nt, Artificial Sequence
  Description of Artificial Sequence: Synthetic oligonucleotide
agagaacagcuuggucugg

SEQ ID NO: 1961027 - RNA, 19 nt, Artificial Sequence
  Description of Artificial Sequence: Synthetic oligonucleotide
uucuugacugacggccggc

SEQ ID NO: 1961028 - RNA, 19 nt, Artificial Sequence
  Description of Artificial Sequence: Synthetic oligonucleotide
gacuagguccaggauggca

SEQ ID NO: 1961029 - RNA, 19 nt, Artificial Sequence
  Description of Artificial Sequence: Synthetic oligonucleotide
cauaaccucugaauuuucu

SEQ ID NO: 1961030 - RNA, 19 nt, Artificial Sequence
  Description of Artificial Sequence: Synthetic oligonucleotide
gcacccaaagaauguauga

SEQ ID NO: 1961031 - RNA, 19 nt, Artificial Sequence
  Description of Artificial Sequence: Synthetic oligonucleotide
gucaaagugugaaacaguu

SEQ ID NO: 1961032 - RNA, 19 nt, Artificial Sequence
  Description of Artificial Sequence: Synthetic oligonucleotide
ccgucaaagugugaaacag

SEQ ID NO: 1961033 - RNA, 19 nt, Artificial Sequence
  Description of Artificial Sequence: Synthetic oligonucleotide
gagacuuacauggccuaaa

SEQ ID NO: 1961034 - RNA, 19 nt, Artificial Sequence
  Description of Artificial Sequence: Synthetic oligonucleotide
ccugaaccgucaaagugug

SEQ ID NO: 1961035 - RNA, 19 nt, Artificial Sequence
  Description of Artificial Sequence: Synthetic oligonucleotide
gcggcuguucaccauguug

SEQ ID NO: 1961036 - RNA, 19 nt, Artificial Sequence
  Description of Artificial Sequence: Synthetic oligonucleotide
gcccugucaaauucuuucc

SEQ ID NO: 1961037 - RNA, 19 nt, Artificial Sequence
  Description of Artificial Sequence: Synthetic oligonucleotide
ugccaggcggcuguucacc

SEQ ID NO: 1961038 - RNA, 19 nt, Artificial Sequence
  Description of Artificial Sequence: Synthetic oligonucleotide
agguugucccugcuauagu

SEQ ID NO: 1961039 - RNA, 19 nt, Artificial Sequence
  Description of Artificial Sequence: Synthetic oligonucleotide
ggccuugugggguacugug

SEQ ID NO: 1961040 - RNA, 19 nt, Artificial Sequence
  Description of Artificial Sequence: Synthetic oligonucleotide
auguaucuaccagguuguc

SEQ ID NO: 1961041 - RNA, 19 nt, Artificial Sequence
  Description of Artificial Sequence: Synthetic oligonucleotide
gugggcuucuacaaacauc

SEQ ID NO: 1961042 - RNA, 19 nt, Artificial Sequence
  Description of Artificial Sequence: Synthetic oligonucleotide
cauggccuaaagguagguc

SEQ ID NO: 1961043 - RNA, 19 nt, Artificial Sequence
  Description of Artificial Sequence: Synthetic oligonucleotide
caggauggcauuguacgga

SEQ ID NO: 1961044 - RNA, 19 nt, Artificial Sequence
  Description of Artificial Sequence: Synthetic oligonucleotide
ucccgacuccaagucugcg

SEQ ID NO: 1961045 - RNA, 19 nt, Artificial Sequence
  Description of Artificial Sequence: Synthetic oligonucleotide
uguauguggcaagcuuguc

SEQ ID NO: 1961046 - RNA, 19 nt, Artificial Sequence
  Description of Artificial Sequence: Synthetic oligonucleotide
ugggguacuguggcagccc

SEQ ID NO: 1961047 - RNA, 19 nt, Artificial Sequence
  Description of Artificial Sequence: Synthetic oligonucleotide
cucacucagauggccugcc

SEQ ID NO: 1961048 - RNA, 19 nt, Artificial Sequence
  Description of Artificial Sequence: Synthetic oligonucleotide
gcuucuugacugacggccg

SEQ ID NO: 1961049 - RNA, 19 nt, Artificial Sequence
  Description of Artificial Sequence: Synthetic oligonucleotide
cauggguagccccucaacu

SEQ ID NO: 1961050 - RNA, 19 nt, Artificial Sequence
  Description of Artificial Sequence: Synthetic oligonucleotide
uaccagguugucccugcua

SEQ ID NO: 1961051 - RNA, 19 nt, Artificial Sequence
  Description of Artificial Sequence: Synthetic oligonucleotide
cacccaaagaauguaugaa

SEQ ID NO: 1961052 - RNA, 19 nt, Artificial Sequence
  Description of Artificial Sequence: Synthetic oligonucleotide
ggggagguuggccagccac

SEQ ID NO: 1961053 - RNA, 19 nt, Artificial Sequence
  Description of Artificial Sequence: Synthetic oligonucleotide
agagacuuacauggccuaa

SEQ ID NO: 1961054 - RNA, 19 nt, Artificial Sequence
  Description of Artificial Sequence: Synthetic oligonucleotide
agaggccugaaccgucaaa

SEQ ID NO: 1961055 - RNA, 19 nt, Artificial Sequence
  Description of Artificial Sequence: Synthetic oligonucleotide
cagcugaguuccagccagg

SEQ ID NO: 1961056 - RNA, 19 nt, Artificial Sequence
  Description of Artificial Sequence: Synthetic oligonucleotide
aucuaccagguugucccug

SEQ ID NO: 1961057 - RNA, 19 nt, Artificial Sequence
  Description of Artificial Sequence: Synthetic oligonucleotide
agggcccuuuaggcaagcc

SEQ ID NO: 1961058 - RNA, 19 nt, Artificial Sequence
  Description of Artificial Sequence: Synthetic oligonucleotide
cuugugggguacuguggca

SEQ ID NO: 1961059 - RNA, 19 nt, Artificial Sequence
  Description of Artificial Sequence: Synthetic oligonucleotide
auccucacucagauggccu

SEQ ID NO: 1961060 - RNA, 19 nt, Artificial Sequence
  Description of Artificial Sequence: Synthetic oligonucleotide
ggacucuacaagugcaucu

SEQ ID NO: 1961061 - RNA, 19 nt, Artificial Sequence
  Description of Artificial Sequence: Synthetic oligonucleotide
ccaaagaauguaugaaugu

SEQ ID NO: 1961062 - RNA, 19 nt, Artificial Sequence
  Description of Artificial Sequence: Synthetic oligonucleotide
gacuccaagucugcggugu

SEQ ID NO: 1961063 - RNA, 19 nt, Artificial Sequence
  Description of Artificial Sequence: Synthetic oligonucleotide
guagaggccugaaccguca

SEQ ID NO: 1961064 - RNA, 19 nt, Artificial Sequence
  Description of Artificial Sequence: Synthetic oligonucleotide
ggcuguucaccauguugug

SEQ ID NO: 1961065 - RNA, 19 nt, Artificial Sequence
  Description of Artificial Sequence: Synthetic oligonucleotide
ggccuuuaauuuccucaug

SEQ ID NO: 1961066 - RNA, 19 nt, Artificial Sequence
  Description of Artificial Sequence: Synthetic oligonucleotide
acauggccuaaagguaggu

SEQ ID NO: 1961067 - RNA, 19 nt, Artificial Sequence
  Description of Artificial Sequence: Synthetic oligonucleotide
cccacccacuuuauguggc

SEQ ID NO: 1961068 - RNA, 19 nt, Artificial Sequence
  Description of Artificial Sequence: Synthetic oligonucleotide
gggucaucuucaaacccug

SEQ ID NO: 1961069 - RNA, 19 nt, Artificial Sequence
  Description of Artificial Sequence: Synthetic oligonucleotide
cugcuauagugcugcuuca

SEQ ID NO: 1961070 - RNA, 19 nt, Artificial Sequence
  Description of Artificial Sequence: Synthetic oligonucleotide
agugaagucccgacuccaa

SEQ ID NO: 1961071 - RNA, 19 nt, Artificial Sequence
  Description of Artificial Sequence: Synthetic oligonucleotide
gggccauggaaccuuugga

SEQ ID NO: 1961072 - RNA, 19 nt, Artificial Sequence
  Description of Artificial Sequence: Synthetic oligonucleotide
cuccaagucugcgguguac

SEQ ID NO: 1961073 - RNA, 19 nt, Artificial Sequence
  Description of Artificial Sequence: Synthetic oligonucleotide
cacccacuuuauguggcug

SEQ ID NO: 1961074 - RNA, 19 nt, Artificial Sequence
  Description of Artificial Sequence: Synthetic oligonucleotide
aggacugcccugguccaca

SEQ ID NO: 1961075 - RNA, 19 nt, Artificial Sequence
  Description of Artificial Sequence: Synthetic oligonucleotide
ccaagucugcgguguacag

SEQ ID NO: 1961076 - RNA, 19 nt, Artificial Sequence
  Description of Artificial Sequence: Synthetic oligonucleotide
auguggcugguaagaaaga

SEQ ID NO: 1961077 - RNA, 19 nt, Artificial Sequence
  Description of Artificial Sequence: Synthetic oligonucleotide
ccugucaaauucuuuccaa

SEQ ID NO: 1961078 - RNA, 19 nt, Artificial Sequence
  Description of Artificial Sequence: Synthetic oligonucleotide
ugacuagguccaggauggc

SEQ ID NO: 1961079 - RNA, 19 nt, Artificial Sequence
  Description of Artificial Sequence: Synthetic oligonucleotide
ggcugguaagaaagauucc

SEQ ID NO: 1961080 - RNA, 19 nt, Artificial Sequence
  Description of Artificial Sequence: Synthetic oligonucleotide
gccuugugggguacugugg

SEQ ID NO: 1961081 - RNA, 19 nt, Artificial Sequence
  Description of Artificial Sequence: Synthetic oligonucleotide
cugccaggcggcuguucac

SEQ ID NO: 1961082 - RNA, 19 nt, Artificial Sequence
  Description of Artificial Sequence: Synthetic oligonucleotide
gcauggguagccccucaac

SEQ ID NO: 1961083 - RNA, 19 nt, Artificial Sequence
  Description of Artificial Sequence: Synthetic oligonucleotide
gagcauggguagccccuca

SEQ ID NO: 1961084 - RNA, 19 nt, Artificial Sequence
  Description of Artificial Sequence: Synthetic oligonucleotide
ccggggaacagcuuggcaa

SEQ ID NO: 1961085 - RNA, 19 nt, Artificial Sequence
  Description of Artificial Sequence: Synthetic oligonucleotide
acuccaagucugcggugua

SEQ ID NO: 1961086 - RNA, 19 nt, Artificial Sequence
  Description of Artificial Sequence: Synthetic oligonucleotide
guuaggccuugugggguac

SEQ ID NO: 1961087 - RNA, 19 nt, Artificial Sequence
  Description of Artificial Sequence: Synthetic oligonucleotide
gguagaggccugaaccguc

SEQ ID NO: 1961088 - RNA, 19 nt, Artificial Sequence
  Description of Artificial Sequence: Synthetic oligonucleotide
ccauaaccucugaauuuuc

SEQ ID NO: 1961089 - RNA, 19 nt, Artificial Sequence
  Description of Artificial Sequence: Synthetic oligonucleotide
ggauccucacucagauggc

SEQ ID NO: 1961090 - RNA, 19 nt, Artificial Sequence
  Description of Artificial Sequence: Synthetic oligonucleotide
cugcgguguacagcuuggc

SEQ ID NO: 1961091 - RNA, 19 nt, Artificial Sequence
  Description of Artificial Sequence: Synthetic oligonucleotide
gccugaaccgucaaagugu

SEQ ID NO: 1961092 - RNA, 19 nt, Artificial Sequence
  Description of Artificial Sequence: Synthetic oligonucleotide
agccacuccugcacugucu

SEQ ID NO: 1961093 - RNA, 19 nt, Artificial Sequence
  Description of Artificial Sequence: Synthetic oligonucleotide
gcugaguuccagccaggga

SEQ ID NO: 1961094 - RNA, 19 nt, Artificial Sequence
  Description of Artificial Sequence: Synthetic oligonucleotide
ccaaucggcuuccuugaca

SEQ ID NO: 1961095 - RNA, 19 nt, Artificial Sequence
  Description of Artificial Sequence: Synthetic oligonucleotide
gcagguagugaagucccga

SEQ ID NO: 1961096 - RNA, 19 nt, Artificial Sequence
  Description of Artificial Sequence: Synthetic oligonucleotide
ccggccggggaacagcuug

SEQ ID NO: 1961097 - RNA, 19 nt, Artificial Sequence
  Description of Artificial Sequence: Synthetic oligonucleotide
cgcaucuuguuguugacua

SEQ ID NO: 1961098 - RNA, 19 nt, Artificial Sequence
  Description of Artificial Sequence: Synthetic oligonucleotide
ggacugcccugguccacag

SEQ ID NO: 1961099 - RNA, 19 nt, Artificial Sequence
  Description of Artificial Sequence: Synthetic oligonucleotide
cugacggccggccggggaa

SEQ ID NO: 1961100 - RNA, 19 nt, Artificial Sequence
  Description of Artificial Sequence: Synthetic oligonucleotide
cccugucaaauucuuucca

SEQ ID NO: 1961101 - RNA, 19 nt, Artificial Sequence
  Description of Artificial Sequence: Synthetic oligonucleotide
gcauuguacggaaucuugu

SEQ ID NO: 1961102 - RNA, 19 nt, Artificial Sequence
  Description of Artificial Sequence: Synthetic oligonucleotide
ggcaagccuucuaacugca

SEQ ID NO: 1961103 - RNA, 19 nt, Artificial Sequence
  Description of Artificial Sequence: Synthetic oligonucleotide
gucuggagugggccaugga

SEQ ID NO: 1961104 - RNA, 19 nt, Artificial Sequence
  Description of Artificial Sequence: Synthetic oligonucleotide
gacugacggccggccgggg

SEQ ID NO: 1961105 - RNA, 19 nt, Artificial Sequence
  Description of Artificial Sequence: Synthetic oligonucleotide
gccaaccagugcuucugga

SEQ ID NO: 1961106 - RNA, 19 nt, Artificial Sequence
  Description of Artificial Sequence: Synthetic oligonucleotide
ggccugggacucuacaagu

SEQ ID NO: 1961107 - RNA, 19 nt, Artificial Sequence
  Description of Artificial Sequence: Synthetic oligonucleotide
ggucugcaacacagccugg

SEQ ID NO: 1961108 - RNA, 19 nt, Artificial Sequence
  Description of Artificial Sequence: Synthetic oligonucleotide
ugacggccggccggggaac

SEQ ID NO: 1961109 - RNA, 19 nt, Artificial Sequence
  Description of Artificial Sequence: Synthetic oligonucleotide
ccucacucagauggccugc

SEQ ID NO: 1961110 - RNA, 19 nt, Artificial Sequence
  Description of Artificial Sequence: Synthetic oligonucleotide
ccacucucagcagguagug

SEQ ID NO: 1961111 - RNA, 19 nt, Artificial Sequence
  Description of Artificial Sequence: Synthetic oligonucleotide
cagauguauguggcaagcu

SEQ ID NO: 1961112 - RNA, 19 nt, Artificial Sequence
  Description of Artificial Sequence: Synthetic oligonucleotide
gggcccuuuaggcaagccu

SEQ ID NO: 1961113 - RNA, 19 nt, Artificial Sequence
  Description of Artificial Sequence: Synthetic oligonucleotide
ccauggaaccuuuggaaau

SEQ ID NO: 1961114 - RNA, 19 nt, Artificial Sequence
  Description of Artificial Sequence: Synthetic oligonucleotide
gcagccagcuccacucuca

SEQ ID NO: 1961115 - RNA, 19 nt, Artificial Sequence
  Description of Artificial Sequence: Synthetic oligonucleotide
ggggaacagcuuggcaaug

SEQ ID NO: 1961116 - RNA, 19 nt, Artificial Sequence
  Description of Artificial Sequence: Synthetic oligonucleotide
aucagccauguuaggccuu

SEQ ID NO: 1961117 - RNA, 19 nt, Artificial Sequence
  Description of Artificial Sequence: Synthetic oligonucleotide
ggagcauggguagccccuc

SEQ ID NO: 1961118 - RNA, 19 nt, Artificial Sequence
  Description of Artificial Sequence: Synthetic oligonucleotide
cggcuguucaccauguugu

SEQ ID NO: 1961119 - RNA, 19 nt, Artificial Sequence
  Description of Artificial Sequence: Synthetic oligonucleotide
ggcccuuuaggcaagccuu

SEQ ID NO: 1961120 - RNA, 19 nt, Artificial Sequence
  Description of Artificial Sequence: Synthetic oligonucleotide
gagugggccauggaaccuu

SEQ ID NO: 1961121 - RNA, 19 nt, Artificial Sequence
  Description of Artificial Sequence: Synthetic oligonucleotide
cuagguccaggauggcauu

SEQ ID NO: 1961122 - RNA, 19 nt, Artificial Sequence
  Description of Artificial Sequence: Synthetic oligonucleotide
gcuguucaccauguugugu

SEQ ID NO: 1961123 - RNA, 19 nt, Artificial Sequence
  Description of Artificial Sequence: Synthetic oligonucleotide
ggccuaaagguagguccca

SEQ ID NO: 1961124 - RNA, 19 nt, Artificial Sequence
  Description of Artificial Sequence: Synthetic oligonucleotide
gcccuuuaggcaagccuuc

SEQ ID NO: 1961125 - RNA, 19 nt, Artificial Sequence
  Description of Artificial Sequence: Synthetic oligonucleotide
gacaucccacccacuuuau

SEQ ID NO: 1961126 - RNA, 19 nt, Artificial Sequence
  Description of Artificial Sequence: Synthetic oligonucleotide
ggguuuucacagaauucau

SEQ ID NO: 1961127 - RNA, 19 nt, Artificial Sequence
  Description of Artificial Sequence: Synthetic oligonucleotide
gccggggaacagcuuggca

SEQ ID NO: 1961128 - RNA, 19 nt, Artificial Sequence
  Description of Artificial Sequence: Synthetic oligonucleotide
cagcuuggcccugucaaau

SEQ ID NO: 1961129 - RNA, 19 nt, Artificial Sequence
  Description of Artificial Sequence: Synthetic oligonucleotide
ccuuagccauuucuucaaa

SEQ ID NO: 1961130 - RNA, 19 nt, Artificial Sequence
  Description of Artificial Sequence: Synthetic oligonucleotide
ccaggacugcccuggucca

SEQ ID NO: 1961131 - RNA, 19 nt, Artificial Sequence
  Description of Artificial Sequence: Synthetic oligonucleotide
cuaccagguugucccugcu

SEQ ID NO: 1961132 - RNA, 19 nt, Artificial Sequence
  Description of Artificial Sequence: Synthetic oligonucleotide
ggguagaggccugaaccgu

SEQ ID NO: 1961133 - RNA, 19 nt, Artificial Sequence
  Description of Artificial Sequence: Synthetic oligonucleotide
cggccggggaacagcuugg

SEQ ID NO: 1961134 - RNA, 19 nt, Artificial Sequence
  Description of Artificial Sequence: Synthetic oligonucleotide
ccuuuaggcaagccuucua

SEQ ID NO: 1961135 - RNA, 19 nt, Artificial Sequence
  Description of Artificial Sequence: Synthetic oligonucleotide
cauggacuccuuagccauu

SEQ ID NO: 1961136 - RNA, 19 nt, Artificial Sequence
  Description of Artificial Sequence: Synthetic oligonucleotide
ggccggggaacagcuuggc

SEQ ID NO: 1961137 - RNA, 19 nt, Artificial Sequence
  Description of Artificial Sequence: Synthetic oligonucleotide
gacggccggccggggaaca

SEQ ID NO: 1961138 - RNA, 19 nt, Artificial Sequence
  Description of Artificial Sequence: Synthetic oligonucleotide
gcccagggugggcuucuac

SEQ ID NO: 1961139 - RNA, 19 nt, Artificial Sequence
  Description of Artificial Sequence: Synthetic oligonucleotide
gggagguuggccagccacu

SEQ ID NO: 1961140 - RNA, 19 nt, Artificial Sequence
  Description of Artificial Sequence: Synthetic oligonucleotide
gaguuccagccagggacuu

SEQ ID NO: 1961141 - RNA, 19 nt, Artificial Sequence
  Description of Artificial Sequence: Synthetic oligonucleotide
gguccucauuccagcuguc

SEQ ID NO: 1961142 - RNA, 19 nt, Artificial Sequence
  Description of Artificial Sequence: Synthetic oligonucleotide
caaguaccugguccucauu

SEQ ID NO: 1961143 - RNA, 19 nt, Artificial Sequence
  Description of Artificial Sequence: Synthetic oligonucleotide
gguagccccucaacuccaa

SEQ ID NO: 1961144 - RNA, 19 nt, Artificial Sequence
  Description of Artificial Sequence: Synthetic oligonucleotide
agucugcgguguacagcuu

SEQ ID NO: 1961145 - RNA, 19 nt, Artificial Sequence
  Description of Artificial Sequence: Synthetic oligonucleotide
ccucaacuccaaucggcuu

SEQ ID NO: 1961146 - RNA, 19 nt, Artificial Sequence
  Description of Artificial Sequence: Synthetic oligonucleotide
gcuccacucucagcaggua

SEQ ID NO: 1961147 - RNA, 19 nt, Artificial Sequence
  Description of Artificial Sequence: Synthetic oligonucleotide
ggauggcauuguacggaau

SEQ ID NO: 1961148 - RNA, 19 nt, Artificial Sequence
  Description of Artificial Sequence: Synthetic oligonucleotide
ccagcuguccaggccuuua

SEQ ID NO: 1961149 - RNA, 19 nt, Artificial Sequence
  Description of Artificial Sequence: Synthetic oligonucleotide
cucugcccagggugggcuu

SEQ ID NO: 1961150 - RNA, 19 nt, Artificial Sequence
  Description of Artificial Sequence: Synthetic oligonucleotide
ccgcaucuuguuguugacu

SEQ ID NO: 1961151 - RNA, 19 nt, Artificial Sequence
  Description of Artificial Sequence: Synthetic oligonucleotide
caacuccaaucggcuuccu

SEQ ID NO: 1961152 - RNA, 19 nt, Artificial Sequence
  Description of Artificial Sequence: Synthetic oligonucleotide
cagccauguuaggccuugu

SEQ ID NO: 1961153 - RNA, 19 nt, Artificial Sequence
  Description of Artificial Sequence: Synthetic oligonucleotide
cggccggccggggaacagc

SEQ ID NO: 1961154 - RNA, 19 nt, Artificial Sequence
  Description of Artificial Sequence: Synthetic oligonucleotide
cccugcuauagugcugcuu

SEQ ID NO: 1961155 - RNA, 19 nt, Artificial Sequence
  Description of Artificial Sequence: Synthetic oligonucleotide
gccggccggggaacagcuu

SEQ ID NO: 1961156 - RNA, 19 nt, Artificial Sequence
  Description of Artificial Sequence: Synthetic oligonucleotide
auagcaaacaaagacaccc

SEQ ID NO: 1961157 - RNA, 19 nt, Artificial Sequence
  Description of Artificial Sequence: Synthetic oligonucleotide
aaauagcaaacaaagacac

SEQ ID NO: 1961158 - RNA, 19 nt, Artificial Sequence
  Description of Artificial Sequence: Synthetic oligonucleotide
uguuauagaugauagucgg

SEQ ID NO: 1961159 - RNA, 19 nt, Artificial Sequence
  Description of Artificial Sequence: Synthetic oligonucleotide
auuagcaacacacacaggu

SEQ ID NO: 1961160 - RNA, 19 nt, Artificial Sequence
  Description of Artificial Sequence: Synthetic oligonucleotide
acuuaaguguuucuggagc

SEQ ID NO: 1961161 - RNA, 19 nt, Artificial Sequence
  Description of Artificial Sequence: Synthetic oligonucleotide
aaugucuccuguuuggguc

SEQ ID NO: 1961162 - RNA, 19 nt, Artificial Sequence
  Description of Artificial Sequence: Synthetic oligonucleotide
augaagauaaagcucugac

SEQ ID NO: 1961163 - RNA, 19 nt, Artificial Sequence
  Description of Artificial Sequence: Synthetic oligonucleotide
agaagaagcucuccaaagc

SEQ ID NO: 1961164 - RNA, 19 nt, Artificial Sequence
  Description of Artificial Sequence: Synthetic oligonucleotide
gagauaauaacuuaagugu

SEQ ID NO: 1961165 - RNA, 19 nt, Artificial Sequence
  Description of Artificial Sequence: Synthetic oligonucleotide
auagaugauagucggguac

SEQ ID NO: 1961166 - RNA, 19 nt, Artificial Sequence
  Description of Artificial Sequence: Synthetic oligonucleotide
aguuggauaguugacaaac

SEQ ID NO: 1961167 - RNA, 19 nt, Artificial Sequence
  Description of Artificial Sequence: Synthetic oligonucleotide
uuuaccgagaaccugaguu

SEQ ID NO: 1961168 - RNA, 19 nt, Artificial Sequence
  Description of Artificial Sequence: Synthetic oligonucleotide
ggagauaauaacuuaagug

SEQ ID NO: 1961169 - RNA, 19 nt, Artificial Sequence
  Description of Artificial Sequence: Synthetic oligonucleotide
uguaggaucccauaguaga

SEQ ID NO: 1961170 - RNA, 19 nt, Artificial Sequence
  Description of Artificial Sequence: Synthetic oligonucleotide
aaugagcccgcauaugguc

SEQ ID NO: 1961171 - RNA, 19 nt, Artificial Sequence
  Description of Artificial Sequence: Synthetic oligonucleotide
ugucaguccauccagaguc

SEQ ID NO: 1961172 - RNA, 19 nt, Artificial Sequence
  Description of Artificial Sequence: Synthetic oligonucleotide
acaucaugugguuggaacc

SEQ ID NO: 1961173 - RNA, 19 nt, Artificial Sequence
  Description of Artificial Sequence: Synthetic oligonucleotide
aaguacacaacugucauga

SEQ ID NO: 1961174 - RNA, 19 nt, Artificial Sequence
  Description of Artificial Sequence: Synthetic oligonucleotide
accuguuugguaaugagcc

SEQ ID NO: 1961175 - RNA, 19 nt, Artificial Sequence
  Description of Artificial Sequence: Synthetic oligonucleotide
uguagugcugaguugcugg

SEQ ID NO: 1961176 - RNA, 19 nt, Artificial Sequence
  Description of Artificial Sequence: Synthetic oligonucleotide
acacccaagaagcacagcg

SEQ ID NO: 1961177 - RNA, 19 nt, Artificial Sequence
  Description of Artificial Sequence: Synthetic oligonucleotide
guaaugagcccgcauaugg

SEQ ID NO: 1961178 - RNA, 19 nt, Artificial Sequence
  Description of Artificial Sequence: Synthetic oligonucleotide
ugaagauaaagcucugacc

SEQ ID NO: 1961179 - RNA, 19 nt, Artificial Sequence
  Description of Artificial Sequence: Synthetic oligonucleotide
auugaucacacacuggaug

SEQ ID NO: 1961180 - RNA, 19 nt, Artificial Sequence
  Description of Artificial Sequence: Synthetic oligonucleotide
uguucuucuaccccaacca

SEQ ID NO: 1961181 - RNA, 19 nt, Artificial Sequence
  Description of Artificial Sequence: Synthetic oligonucleotide
auaguugacaaacuguagu

SEQ ID NO: 1961182 - RNA, 19 nt, Artificial Sequence
  Description of Artificial Sequence: Synthetic oligonucleotide
gagaaccugaguuggauag

SEQ ID NO: 1961183 - RNA, 19 nt, Artificial Sequence
  Description of Artificial Sequence: Synthetic oligonucleotide
guaaaugucuccuguuugg

SEQ ID NO: 1961184 - RNA, 19 nt, Artificial Sequence
  Description of Artificial Sequence: Synthetic oligonucleotide
uuggauaguugacaaacug

SEQ ID NO: 1961185 - RNA, 19 nt, Artificial Sequence
  Description of Artificial Sequence: Synthetic oligonucleotide
aagaccgagacccaggaau

SEQ ID NO: 1961186 - RNA, 19 nt, Artificial Sequence
  Description of Artificial Sequence: Synthetic oligonucleotide
ugaacaggaucccagcacc

SEQ ID NO: 1961187 - RNA, 19 nt, Artificial Sequence
  Description of Artificial Sequence: Synthetic oligonucleotide
acugggauuggcuugcagg

SEQ ID NO: 1961188 - RNA, 19 nt, Artificial Sequence
  Description of Artificial Sequence: Synthetic oligonucleotide
agcuuaagaacucccagag

SEQ ID NO: 1961189 - RNA, 19 nt, Artificial Sequence
  Description of Artificial Sequence: Synthetic oligonucleotide
uggaucaagaucuuggcaa

SEQ ID NO: 1961190 - RNA, 19 nt, Artificial Sequence
  Description of Artificial Sequence: Synthetic oligonucleotide
aauagcaaacaaagacacc

SEQ ID NO: 1961191 - RNA, 19 nt, Artificial Sequence
  Description of Artificial Sequence: Synthetic oligonucleotide
aaggcgaaagcuccaggcg

SEQ ID NO: 1961192 - RNA, 19 nt, Artificial Sequence
  Description of Artificial Sequence: Synthetic oligonucleotide
uuauagaugauagucgggu

SEQ ID NO: 1961193 - RNA, 19 nt, Artificial Sequence
  Description of Artificial Sequence: Synthetic oligonucleotide
uaguugacaaacuguagug

SEQ ID NO: 1961194 - RNA, 19 nt, Artificial Sequence
  Description of Artificial Sequence: Synthetic oligonucleotide
ucugcuagcggccaugaga

SEQ ID NO: 1961195 - RNA, 19 nt, Artificial Sequence
  Description of Artificial Sequence: Synthetic oligonucleotide
guacgauccacccuggcgg

SEQ ID NO: 1961196 - RNA, 19 nt, Artificial Sequence
  Description of Artificial Sequence: Synthetic oligonucleotide
cucagcaaagcuuaagaac

SEQ ID NO: 1961197 - RNA, 19 nt, Artificial Sequence
  Description of Artificial Sequence: Synthetic oligonucleotide
aguacgauccacccuggcg

SEQ ID NO: 1961198 - RNA, 19 nt, Artificial Sequence
  Description of Artificial Sequence: Synthetic oligonucleotide
uuggcaucaagaccgagac

SEQ ID NO: 1961199 - RNA, 19 nt, Artificial Sequence
  Description of Artificial Sequence: Synthetic oligonucleotide
acccaagaagcacagcggc

SEQ ID NO: 1961200 - RNA, 19 nt, Artificial Sequence
  Description of Artificial Sequence: Synthetic oligonucleotide
uggauaguugacaaacugu

SEQ ID NO: 1961201 - RNA, 19 nt, Artificial Sequence
  Description of Artificial Sequence: Synthetic oligonucleotide
cacaauuagcaacacacac

SEQ ID NO: 1961202 - RNA, 19 nt, Artificial Sequence
  Description of Artificial Sequence: Synthetic oligonucleotide
aauaccagcacggugccca

SEQ ID NO: 1961203 - RNA, 19 nt, Artificial Sequence
  Description of Artificial Sequence: Synthetic oligonucleotide
uggagauaauaacuuaagu

SEQ ID NO: 1961204 - RNA, 19 nt, Artificial Sequence
  Description of Artificial Sequence: Synthetic oligonucleotide
uaggcuuguacaugaagag

SEQ ID NO: 1961205 - RNA, 19 nt, Artificial Sequence
  Description of Artificial Sequence: Synthetic oligonucleotide
agaacuuccguguuguggu

SEQ ID NO: 1961206 - RNA, 19 nt, Artificial Sequence
  Description of Artificial Sequence: Synthetic oligonucleotide
uaacuuaaguguuucugga

SEQ ID NO: 1961207 - RNA, 19 nt, Artificial Sequence
  Description of Artificial Sequence: Synthetic oligonucleotide
aagcuuaagaacucccaga

SEQ ID NO: 1961208 - RNA, 19 nt, Artificial Sequence
  Description of Artificial Sequence: Synthetic oligonucleotide
caaagguugauguucaaca

SEQ ID NO: 1961209 - RNA, 19 nt, Artificial Sequence
  Description of Artificial Sequence: Synthetic oligonucleotide
aaaguacacaacugucaug

SEQ ID NO: 1961210 - RNA, 19 nt, Artificial Sequence
  Description of Artificial Sequence: Synthetic oligonucleotide
ucuaguuaucuucuccugu

SEQ ID NO: 1961211 - RNA, 19 nt, Artificial Sequence
  Description of Artificial Sequence: Synthetic oligonucleotide
ugucaggggaccaaaguac

SEQ ID NO: 1961212 - RNA, 19 nt, Artificial Sequence
  Description of Artificial Sequence: Synthetic oligonucleotide
uguguguucuucuacccca

SEQ ID NO: 1961213 - RNA, 19 nt, Artificial Sequence
  Description of Artificial Sequence: Synthetic oligonucleotide
uuuucccaagaugucaccg

SEQ ID NO: 1961214 - RNA, 19 nt, Artificial Sequence
  Description of Artificial Sequence: Synthetic oligonucleotide
gaaggcgaaagcuccaggc

SEQ ID NO: 1961215 - RNA, 19 nt, Artificial Sequence
  Description of Artificial Sequence: Synthetic oligonucleotide
auaacugggauuggcuugc

SEQ ID NO: 1961216 - RNA, 19 nt, Artificial Sequence
  Description of Artificial Sequence: Synthetic oligonucleotide
auggugaagaacuuccgug

SEQ ID NO: 1961217 - RNA, 19 nt, Artificial Sequence
  Description of Artificial Sequence: Synthetic oligonucleotide
ucuaccccaaccauuuucu

SEQ ID NO: 1961218 - RNA, 19 nt, Artificial Sequence
  Description of Artificial Sequence: Synthetic oligonucleotide
aaagguugauguucaacau

SEQ ID NO: 1961219 - RNA, 19 nt, Artificial Sequence
  Description of Artificial Sequence: Synthetic oligonucleotide
uucuuaggcuuguacauga

SEQ ID NO: 1961220 - RNA, 19 nt, Artificial Sequence
  Description of Artificial Sequence: Synthetic oligonucleotide
auaaagcucugacccaggg

SEQ ID NO: 1961221 - RNA, 19 nt, Artificial Sequence
  Description of Artificial Sequence: Synthetic oligonucleotide
cuuaagaacucccagagcu

SEQ ID NO: 1961222 - RNA, 19 nt, Artificial Sequence
  Description of Artificial Sequence: Synthetic oligonucleotide
aggagcauaacugggauug

SEQ ID NO: 1961223 - RNA, 19 nt, Artificial Sequence
  Description of Artificial Sequence: Synthetic oligonucleotide
caauguggaccaaagguug

SEQ ID NO: 1961224 - RNA, 19 nt, Artificial Sequence
  Description of Artificial Sequence: Synthetic oligonucleotide
uaaaugucuccuguuuggg

SEQ ID NO: 1961225 - RNA, 19 nt, Artificial Sequence
  Description of Artificial Sequence: Synthetic oligonucleotide
ugaguuggauaguugacaa

SEQ ID NO: 1961226 - RNA, 19 nt, Artificial Sequence
  Description of Artificial Sequence: Synthetic oligonucleotide
uuaccgagaaccugaguug

SEQ ID NO: 1961227 - RNA, 19 nt, Artificial Sequence
  Description of Artificial Sequence: Synthetic oligonucleotide
ugacccagggcacugguca

SEQ ID NO: 1961228 - RNA, 19 nt, Artificial Sequence
  Description of Artificial Sequence: Synthetic oligonucleotide
ucuucuaccccaaccauuu

SEQ ID NO: 1961229 - RNA, 19 nt, Artificial Sequence
  Description of Artificial Sequence: Synthetic oligonucleotide
ucaccguuggagauaauaa

SEQ ID NO: 1961230 - RNA, 19 nt, Artificial Sequence
  Description of Artificial Sequence: Synthetic oligonucleotide
agcuacaccagccacaauu

SEQ ID NO: 1961231 - RNA, 19 nt, Artificial Sequence
  Description of Artificial Sequence: Synthetic oligonucleotide
gauaguugacaaacuguag

SEQ ID NO: 1961232 - RNA, 19 nt, Artificial Sequence
  Description of Artificial Sequence: Synthetic oligonucleotide
gcaggauuuaccgagaacc

SEQ ID NO: 1961233 - RNA, 19 nt, Artificial Sequence
  Description of Artificial Sequence: Synthetic oligonucleotide
uugguaaugagcccgcaua

SEQ ID NO: 1961234 - RNA, 19 nt, Artificial Sequence
  Description of Artificial Sequence: Synthetic oligonucleotide
aagagagcuacaccagcca

SEQ ID NO: 1961235 - RNA, 19 nt, Artificial Sequence
  Description of Artificial Sequence: Synthetic oligonucleotide
guuaucuucuccuguagga

SEQ ID NO: 1961236 - RNA, 19 nt, Artificial Sequence
  Description of Artificial Sequence: Synthetic oligonucleotide
aggcgaaagcuccaggcgg

SEQ ID NO: 1961237 - RNA, 19 nt, Artificial Sequence
  Description of Artificial Sequence: Synthetic oligonucleotide
uuuggguccuuccccauac

SEQ ID NO: 1961238 - RNA, 19 nt, Artificial Sequence
  Description of Artificial Sequence: Synthetic oligonucleotide
guuggaaccuguuugguaa

SEQ ID NO: 1961239 - RNA, 19 nt, Artificial Sequence
  Description of Artificial Sequence: Synthetic oligonucleotide
ucucagcaaagcuuaagaa

SEQ ID NO: 1961240 - RNA, 19 nt, Artificial Sequence
  Description of Artificial Sequence: Synthetic oligonucleotide
ucggguaccucucagcaaa

SEQ ID NO: 1961241 - RNA, 19 nt, Artificial Sequence
  Description of Artificial Sequence: Synthetic oligonucleotide
gaagagagcuacaccagcc

SEQ ID NO: 1961242 - RNA, 19 nt, Artificial Sequence
  Description of Artificial Sequence: Synthetic oligonucleotide
ucaagaccgagacccagga

SEQ ID NO: 1961243 - RNA, 19 nt, Artificial Sequence
  Description of Artificial Sequence: Synthetic oligonucleotide
uguuugguaaugagcccgc

SEQ ID NO: 1961244 - RNA, 19 nt, Artificial Sequence
  Description of Artificial Sequence: Synthetic oligonucleotide
accugaguuggauaguuga

SEQ ID NO: 1961245 - RNA, 19 nt, Artificial Sequence
  Description of Artificial Sequence: Synthetic oligonucleotide
cauggcacccacauaggag

SEQ ID NO: 1961246 - RNA, 19 nt, Artificial Sequence
  Description of Artificial Sequence: Synthetic oligonucleotide
ugacaaacuguagugcuga

SEQ ID NO: 1961247 - RNA, 19 nt, Artificial Sequence
  Description of Artificial Sequence: Synthetic oligonucleotide
agguugauguucaacauca

SEQ ID NO: 1961248 - RNA, 19 nt, Artificial Sequence
  Description of Artificial Sequence: Synthetic oligonucleotide
gugguuggaaccuguuugg

SEQ ID NO: 1961249 - RNA, 19 nt, Artificial Sequence
  Description of Artificial Sequence: Synthetic oligonucleotide
cugcuagcggccaugagac

SEQ ID NO: 1961250 - RNA, 19 nt, Artificial Sequence
  Description of Artificial Sequence: Synthetic oligonucleotide
cuuaggcuuguacaugaag

SEQ ID NO: 1961251 - RNA, 19 nt, Artificial Sequence
  Description of Artificial Sequence: Synthetic oligonucleotide
accaaaguacacaacuguc

SEQ ID NO: 1961252 - RNA, 19 nt, Artificial Sequence
  Description of Artificial Sequence: Synthetic oligonucleotide
uagaugauagucggguacc

SEQ ID NO: 1961253 - RNA, 19 nt, Artificial Sequence
  Description of Artificial Sequence: Synthetic oligonucleotide
guuauagaugauagucggg

SEQ ID NO: 1961254 - RNA, 19 nt, Artificial Sequence
  Description of Artificial Sequence: Synthetic oligonucleotide
uucuaccccaaccauuuuc

SEQ ID NO: 1961255 - RNA, 19 nt, Artificial Sequence
  Description of Artificial Sequence: Synthetic oligonucleotide
ggcuuguacaugaagagag

SEQ ID NO: 1961256 - RNA, 19 nt, Artificial Sequence
  Description of Artificial Sequence: Synthetic oligonucleotide
uaccgagaaccugaguugg

SEQ ID NO: 1961257 - RNA, 19 nt, Artificial Sequence
  Description of Artificial Sequence: Synthetic oligonucleotide
uuaagaacucccagagcuc

SEQ ID NO: 1961258 - RNA, 19 nt, Artificial Sequence
  Description of Artificial Sequence: Synthetic oligonucleotide
uuaaguguuucuggagcag

SEQ ID NO: 1961259 - RNA, 19 nt, Artificial Sequence
  Description of Artificial Sequence: Synthetic oligonucleotide
acaauuagcaacacacaca

SEQ ID NO: 1961260 - RNA, 19 nt, Artificial Sequence
  Description of Artificial Sequence: Synthetic oligonucleotide
ucucucuuccuagugggag

SEQ ID NO: 1961261 - RNA, 19 nt, Artificial Sequence
  Description of Artificial Sequence: Synthetic oligonucleotide
uagcaaacaaagacaccca

SEQ ID NO: 1961262 - RNA, 19 nt, Artificial Sequence
  Description of Artificial Sequence: Synthetic oligonucleotide
agagcaggcggcauagagc

SEQ ID NO: 1961263 - RNA, 19 nt, Artificial Sequence
  Description of Artificial Sequence: Synthetic oligonucleotide
uccuguuuggguccuuccc

SEQ ID NO: 1961264 - RNA, 19 nt, Artificial Sequence
  Description of Artificial Sequence: Synthetic oligonucleotide
uaaugagcccgcauauggu

SEQ ID NO: 1961265 - RNA, 19 nt, Artificial Sequence
  Description of Artificial Sequence: Synthetic oligonucleotide
gccacaauuagcaacacac

SEQ ID NO: 1961266 - RNA, 19 nt, Artificial Sequence
  Description of Artificial Sequence: Synthetic oligonucleotide
aggagggucaccccaagga

SEQ ID NO: 1961267 - RNA, 19 nt, Artificial Sequence
  Description of Artificial Sequence: Synthetic oligonucleotide
uaugguccugggaaacacc

SEQ ID NO: 1961268 - RNA, 19 nt, Artificial Sequence
  Description of Artificial Sequence: Synthetic oligonucleotide
ucuuggcaaacauagcauu

SEQ ID NO: 1961269 - RNA, 19 nt, Artificial Sequence
  Description of Artificial Sequence: Synthetic oligonucleotide
uaccucucagcaaagcuua

SEQ ID NO: 1961270 - RNA, 19 nt, Artificial Sequence
  Description of Artificial Sequence: Synthetic oligonucleotide
uuggcaaacauagcauuga

SEQ ID NO: 1961271 - RNA, 19 nt, Artificial Sequence
  Description of Artificial Sequence: Synthetic oligonucleotide
caaacauagcauugaucac

SEQ ID NO: 1961272 - RNA, 19 nt, Artificial Sequence
  Description of Artificial Sequence: Synthetic oligonucleotide
acaccagccacaauuagca

SEQ ID NO: 1961273 - RNA, 19 nt, Artificial Sequence
  Description of Artificial Sequence: Synthetic oligonucleotide
agucggguaccucucagca

SEQ ID NO: 1961274 - RNA, 19 nt, Artificial Sequence
  Description of Artificial Sequence: Synthetic oligonucleotide
uccuguaggaucccauagu

SEQ ID NO: 1961275 - RNA, 19 nt, Artificial Sequence
  Description of Artificial Sequence: Synthetic oligonucleotide
uuguacaugaagagagcua

SEQ ID NO: 1961276 - RNA, 19 nt, Artificial Sequence
  Description of Artificial Sequence: Synthetic oligonucleotide
ugacugaguccauuuuccc

SEQ ID NO: 1961277 - RNA, 19 nt, Artificial Sequence
  Description of Artificial Sequence: Synthetic oligonucleotide
uuucccaagaugucaccgu

SEQ ID NO: 1961278 - RNA, 19 nt, Artificial Sequence
  Description of Artificial Sequence: Synthetic oligonucleotide
ucccaaacuuggcaucaag

SEQ ID NO: 1961279 - RNA, 19 nt, Artificial Sequence
  Description of Artificial Sequence: Synthetic oligonucleotide
uauagaugauagucgggua

SEQ ID NO: 1961280 - RNA, 19 nt, Artificial Sequence
  Description of Artificial Sequence: Synthetic oligonucleotide
ugguaaugagcccgcauau

SEQ ID NO: 1961281 - RNA, 19 nt, Artificial Sequence
  Description of Artificial Sequence: Synthetic oligonucleotide
guguucuucuaccccaacc

SEQ ID NO: 1961282 - RNA, 19 nt, Artificial Sequence
  Description of Artificial Sequence: Synthetic oligonucleotide
uuccguguuguggugauga

SEQ ID NO: 1961283 - RNA, 19 nt, Artificial Sequence
  Description of Artificial Sequence: Synthetic oligonucleotide
agacgcacggacgagucgg

SEQ ID NO: 1961284 - RNA, 19 nt, Artificial Sequence
  Description of Artificial Sequence: Synthetic oligonucleotide
uuugguaaugagcccgcau

SEQ ID NO: 1961285 - RNA, 19 nt, Artificial Sequence
  Description of Artificial Sequence: Synthetic oligonucleotide
caccguuggagauaauaac

SEQ ID NO: 1961286 - RNA, 19 nt, Artificial Sequence
  Description of Artificial Sequence: Synthetic oligonucleotide
uucuggagcagccucucuc

SEQ ID NO: 1961287 - RNA, 19 nt, Artificial Sequence
  Description of Artificial Sequence: Synthetic oligonucleotide
gcauugaucacacacugga

SEQ ID NO: 1961288 - RNA, 19 nt, Artificial Sequence
  Description of Artificial Sequence: Synthetic oligonucleotide
cuguaggaucccauaguag

SEQ ID NO: 1961289 - RNA, 19 nt, Artificial Sequence
  Description of Artificial Sequence: Synthetic oligonucleotide
ggaaacaccugucagucca

SEQ ID NO: 1961290 - RNA, 19 nt, Artificial Sequence
  Description of Artificial Sequence: Synthetic oligonucleotide
ugggaggucuucuuuguuc

SEQ ID NO: 1961291 - RNA, 19 nt, Artificial Sequence
  Description of Artificial Sequence: Synthetic oligonucleotide
aauuagcaacacacacagg

SEQ ID NO: 1961292 - RNA, 19 nt, Artificial Sequence
  Description of Artificial Sequence: Synthetic oligonucleotide
agaucuuggcaaacauagc

SEQ ID NO: 1961293 - RNA, 19 nt, Artificial Sequence
  Description of Artificial Sequence: Synthetic oligonucleotide
caaagcuuaagaacuccca

SEQ ID NO: 1961294 - RNA, 19 nt, Artificial Sequence
  Description of Artificial Sequence: Synthetic oligonucleotide
augagcccgcauauggucc

SEQ ID NO: 1961295 - RNA, 19 nt, Artificial Sequence
  Description of Artificial Sequence: Synthetic oligonucleotide
auagucggguaccucucag

SEQ ID NO: 1961296 - RNA, 19 nt, Artificial Sequence
  Description of Artificial Sequence: Synthetic oligonucleotide
gaagaucacagaagccaag

SEQ ID NO: 1961297 - RNA, 19 nt, Artificial Sequence
  Description of Artificial Sequence: Synthetic oligonucleotide
agcaaacaaagacacccaa

SEQ ID NO: 1961298 - RNA, 19 nt, Artificial Sequence
  Description of Artificial Sequence: Synthetic oligonucleotide
guuggagauaauaacuuaa

SEQ ID NO: 1961299 - RNA, 19 nt, Artificial Sequence
  Description of Artificial Sequence: Synthetic oligonucleotide
gauuuaccgagaaccugag

SEQ ID NO: 1961300 - RNA, 19 nt, Artificial Sequence
  Description of Artificial Sequence: Synthetic oligonucleotide
ucuuccuagugggaggucu

SEQ ID NO: 1961301 - RNA, 19 nt, Artificial Sequence
  Description of Artificial Sequence: Synthetic oligonucleotide
acaccugucaguccaucca

SEQ ID NO: 1961302 - RNA, 19 nt, Artificial Sequence
  Description of Artificial Sequence: Synthetic oligonucleotide
aacugggauuggcuugcag

SEQ ID NO: 1961303 - RNA, 19 nt, Artificial Sequence
  Description of Artificial Sequence: Synthetic oligonucleotide
cucucagcaaagcuuaaga

SEQ ID NO: 1961304 - RNA, 19 nt, Artificial Sequence
  Description of Artificial Sequence: Synthetic oligonucleotide
cuuggcaucaagaccgaga

SEQ ID NO: 1961305 - RNA, 19 nt, Artificial Sequence
  Description of Artificial Sequence: Synthetic oligonucleotide
cucuaguuaucuucuccug

SEQ ID NO: 1961306 - RNA, 19 nt, Artificial Sequence
  Description of Artificial Sequence: Synthetic oligonucleotide
cuccuguaggaucccauag

SEQ ID NO: 1961307 - RNA, 19 nt, Artificial Sequence
  Description of Artificial Sequence: Synthetic oligonucleotide
accgagacccaggaauacc

SEQ ID NO: 1961308 - RNA, 19 nt, Artificial Sequence
  Description of Artificial Sequence: Synthetic oligonucleotide
agguaaaugucuccuguuu

SEQ ID NO: 1961309 - RNA, 19 nt, Artificial Sequence
  Description of Artificial Sequence: Synthetic oligonucleotide
ucaugugguuggaaccugu

SEQ ID NO: 1961310 - RNA, 19 nt, Artificial Sequence
  Description of Artificial Sequence: Synthetic oligonucleotide
acccgcucagagcagguag

SEQ ID NO: 1961311 - RNA, 19 nt, Artificial Sequence
  Description of Artificial Sequence: Synthetic oligonucleotide
caagguuaaggcaaaggua

SEQ ID NO: 1961312 - RNA, 19 nt, Artificial Sequence
  Description of Artificial Sequence: Synthetic oligonucleotide
ugcaggauuuaccgagaac

SEQ ID NO: 1961313 - RNA, 19 nt, Artificial Sequence
  Description of Artificial Sequence: Synthetic oligonucleotide
agaagcacagcggcaggcg

SEQ ID NO: 1961314 - RNA, 19 nt, Artificial Sequence
  Description of Artificial Sequence: Synthetic oligonucleotide
gaacaggaucccagcaccg

SEQ ID NO: 1961315 - RNA, 19 nt, Artificial Sequence
  Description of Artificial Sequence: Synthetic oligonucleotide
gugcccacccacugcaugg

SEQ ID NO: 1961316 - RNA, 19 nt, Artificial Sequence
  Description of Artificial Sequence: Synthetic oligonucleotide
ucccaagaugucaccguug

SEQ ID NO: 1961317 - RNA, 19 nt, Artificial Sequence
  Description of Artificial Sequence: Synthetic oligonucleotide
ugagacgcacggacgaguc

SEQ ID NO: 1961318 - RNA, 19 nt, Artificial Sequence
  Description of Artificial Sequence: Synthetic oligonucleotide
gacaaacuguagugcugag

SEQ ID NO: 1961319 - RNA, 19 nt, Artificial Sequence
  Description of Artificial Sequence: Synthetic oligonucleotide
ccagggaucugcuagcggc

SEQ ID NO: 1961320 - RNA, 19 nt, Artificial Sequence
  Description of Artificial Sequence: Synthetic oligonucleotide
gagcauaacugggauuggc

SEQ ID NO: 1961321 - RNA, 19 nt, Artificial Sequence
  Description of Artificial Sequence: Synthetic oligonucleotide
aggcaaagguaaaugucuc

SEQ ID NO: 1961322 - RNA, 19 nt, Artificial Sequence
  Description of Artificial Sequence: Synthetic oligonucleotide
gcaccgagcagcaaugugg

SEQ ID NO: 1961323 - RNA, 19 nt, Artificial Sequence
  Description of Artificial Sequence: Synthetic oligonucleotide
gggaggucuucuuuguucc

SEQ ID NO: 1961324 - RNA, 19 nt, Artificial Sequence
  Description of Artificial Sequence: Synthetic oligonucleotide
aggauuuaccgagaaccug

SEQ ID NO: 1961325 - RNA, 19 nt, Artificial Sequence
  Description of Artificial Sequence: Synthetic oligonucleotide
uguggaccaaagguugaug

SEQ ID NO: 1961326 - RNA, 19 nt, Artificial Sequence
  Description of Artificial Sequence: Synthetic oligonucleotide
aucaagaccgagacccagg

SEQ ID NO: 1961327 - RNA, 19 nt, Artificial Sequence
  Description of Artificial Sequence: Synthetic oligonucleotide
uggagcaugucaggggacc

SEQ ID NO: 1961328 - RNA, 19 nt, Artificial Sequence
  Description of Artificial Sequence: Synthetic oligonucleotide
ccagguccgaguacgaucc

SEQ ID NO: 1961329 - RNA, 19 nt, Artificial Sequence
  Description of Artificial Sequence: Synthetic oligonucleotide
uagucggguaccucucagc

SEQ ID NO: 1961330 - RNA, 19 nt, Artificial Sequence
  Description of Artificial Sequence: Synthetic oligonucleotide
cuaguuaucuucuccugua

SEQ ID NO: 1961331 - RNA, 19 nt, Artificial Sequence
  Description of Artificial Sequence: Synthetic oligonucleotide
uccgaguacgauccacccu

SEQ ID NO: 1961332 - RNA, 19 nt, Artificial Sequence
  Description of Artificial Sequence: Synthetic oligonucleotide
gagacgcacggacgagucg

SEQ ID NO: 1961333 - RNA, 19 nt, Artificial Sequence
  Description of Artificial Sequence: Synthetic oligonucleotide
ucgggcaccagggaucugc

SEQ ID NO: 1961334 - RNA, 19 nt, Artificial Sequence
  Description of Artificial Sequence: Synthetic oligonucleotide
caacuguguguucuucuac

SEQ ID NO: 1961335 - RNA, 19 nt, Artificial Sequence
  Description of Artificial Sequence: Synthetic oligonucleotide
ggcaaagguaaaugucucc

SEQ ID NO: 1961336 - RNA, 19 nt, Artificial Sequence
  Description of Artificial Sequence: Synthetic oligonucleotide
cagagacaagagcagaaga

SEQ ID NO: 1961337 - RNA, 19 nt, Artificial Sequence
  Description of Artificial Sequence: Synthetic oligonucleotide
aaagcuccaggcggacauc

SEQ ID NO: 1961338 - RNA, 19 nt, Artificial Sequence
  Description of Artificial Sequence: Synthetic oligonucleotide
agcauaacugggauuggcu

SEQ ID NO: 1961339 - RNA, 19 nt, Artificial Sequence
  Description of Artificial Sequence: Synthetic oligonucleotide
ucaacaucaugugguugga

SEQ ID NO: 1961340 - RNA, 19 nt, Artificial Sequence
  Description of Artificial Sequence: Synthetic oligonucleotide
aacaggaucccagcaccga

SEQ ID NO: 1961341 - RNA, 19 nt, Artificial Sequence
  Description of Artificial Sequence: Synthetic oligonucleotide
caccugucaguccauccag

SEQ ID NO: 1961342 - RNA, 19 nt, Artificial Sequence
  Description of Artificial Sequence: Synthetic oligonucleotide
gauagucggguaccucuca

SEQ ID NO: 1961343 - RNA, 19 nt, Artificial Sequence
  Description of Artificial Sequence: Synthetic oligonucleotide
aucgugacugaguccauuu

SEQ ID NO: 1961344 - RNA, 19 nt, Artificial Sequence
  Description of Artificial Sequence: Synthetic oligonucleotide
ggauuuaccgagaaccuga

SEQ ID NO: 1961345 - RNA, 19 nt, Artificial Sequence
  Description of Artificial Sequence: Synthetic oligonucleotide
ucuuaggcuuguacaugaa

SEQ ID NO: 1961346 - RNA, 19 nt, Artificial Sequence
  Description of Artificial Sequence: Synthetic oligonucleotide
ucugacccagggcacuggu

SEQ ID NO: 1961347 - RNA, 19 nt, Artificial Sequence
  Description of Artificial Sequence: Synthetic oligonucleotide
acaaacuguagugcugagu

SEQ ID NO: 1961348 - RNA, 19 nt, Artificial Sequence
  Description of Artificial Sequence: Synthetic oligonucleotide
cagggaucugcuagcggcc

SEQ ID NO: 1961349 - RNA, 19 nt, Artificial Sequence
  Description of Artificial Sequence: Synthetic oligonucleotide
cugaguuggauaguugaca

SEQ ID NO: 1961350 - RNA, 19 nt, Artificial Sequence
  Description of Artificial Sequence: Synthetic oligonucleotide
guccgaguacgauccaccc

SEQ ID NO: 1961351 - RNA, 19 nt, Artificial Sequence
  Description of Artificial Sequence: Synthetic oligonucleotide
cuccccagugaacaggauc

SEQ ID NO: 1961352 - RNA, 19 nt, Artificial Sequence
  Description of Artificial Sequence: Synthetic oligonucleotide
ucuccuguaggaucccaua

SEQ ID NO: 1961353 - RNA, 19 nt, Artificial Sequence
  Description of Artificial Sequence: Synthetic oligonucleotide
uucuccuguaggaucccau

SEQ ID NO: 1961354 - RNA, 19 nt, Artificial Sequence
  Description of Artificial Sequence: Synthetic oligonucleotide
auuuaccgagaaccugagu

SEQ ID NO: 1961355 - RNA, 19 nt, Artificial Sequence
  Description of Artificial Sequence: Synthetic oligonucleotide
ggguuggcgaagaagauca

SEQ ID NO: 1961356 - RNA, 19 nt, Artificial Sequence
  Description of Artificial Sequence: Synthetic oligonucleotide
ugagcccgcauaugguccu

SEQ ID NO: 1961357 - RNA, 19 nt, Artificial Sequence
  Description of Artificial Sequence: Synthetic oligonucleotide
agagcuacaccagccacaa

SEQ ID NO: 1961358 - RNA, 19 nt, Artificial Sequence
  Description of Artificial Sequence: Synthetic oligonucleotide
gaacuuccguguuguggug

SEQ ID NO: 1961359 - RNA, 19 nt, Artificial Sequence
  Description of Artificial Sequence: Synthetic oligonucleotide
ccgaguacgauccacccug

SEQ ID NO: 1961360 - RNA, 19 nt, Artificial Sequence
  Description of Artificial Sequence: Synthetic oligonucleotide
gggaccaaaguacacaacu

SEQ ID NO: 1961361 - RNA, 19 nt, Artificial Sequence
  Description of Artificial Sequence: Synthetic oligonucleotide
agccacaauuagcaacaca

SEQ ID NO: 1961362 - RNA, 19 nt, Artificial Sequence
  Description of Artificial Sequence: Synthetic oligonucleotide
uggcaucaagaccgagacc

SEQ ID NO: 1961363 - RNA, 19 nt, Artificial Sequence
  Description of Artificial Sequence: Synthetic oligonucleotide
ggauaguugacaaacugua

SEQ ID NO: 1961364 - RNA, 19 nt, Artificial Sequence
  Description of Artificial Sequence: Synthetic oligonucleotide
cccaaggagcauaacuggg

SEQ ID NO: 1961365 - RNA, 19 nt, Artificial Sequence
  Description of Artificial Sequence: Synthetic oligonucleotide
caucaagaccgagacccag

SEQ ID NO: 1961366 - RNA, 19 nt, Artificial Sequence
  Description of Artificial Sequence: Synthetic oligonucleotide
agguccgaguacgauccac

SEQ ID NO: 1961367 - RNA, 19 nt, Artificial Sequence
  Description of Artificial Sequence: Synthetic oligonucleotide
aggcuuguacaugaagaga

SEQ ID NO: 1961368 - RNA, 19 nt, Artificial Sequence
  Description of Artificial Sequence: Synthetic oligonucleotide
uggaaccuguuugguaaug

SEQ ID NO: 1961369 - RNA, 19 nt, Artificial Sequence
  Description of Artificial Sequence: Synthetic oligonucleotide
gccucucucuuccuagugg

SEQ ID NO: 1961370 - RNA, 19 nt, Artificial Sequence
  Description of Artificial Sequence: Synthetic oligonucleotide
cuccuguuuggguccuucc

SEQ ID NO: 1961371 - RNA, 19 nt, Artificial Sequence
  Description of Artificial Sequence: Synthetic oligonucleotide
gagagcuacaccagccaca

SEQ ID NO: 1961372 - RNA, 19 nt, Artificial Sequence
  Description of Artificial Sequence: Synthetic oligonucleotide
uggguccuuccccauacuu

SEQ ID NO: 1961373 - RNA, 19 nt, Artificial Sequence
  Description of Artificial Sequence: Synthetic oligonucleotide
ucggccggagacccgcuca

SEQ ID NO: 1961374 - RNA, 19 nt, Artificial Sequence
  Description of Artificial Sequence: Synthetic oligonucleotide
cuucaggagggucacccca

SEQ ID NO: 1961375 - RNA, 19 nt, Artificial Sequence
  Description of Artificial Sequence: Synthetic oligonucleotide
gcuagcggccaugagacgc

SEQ ID NO: 1961376 - RNA, 19 nt, Artificial Sequence
  Description of Artificial Sequence: Synthetic oligonucleotide
cuugcaggauuuaccgaga

SEQ ID NO: 1961377 - RNA, 19 nt, Artificial Sequence
  Description of Artificial Sequence: Synthetic oligonucleotide
cauggagcugaugggguug

SEQ ID NO: 1961378 - RNA, 19 nt, Artificial Sequence
  Description of Artificial Sequence: Synthetic oligonucleotide
gcaaagcuuaagaacuccc

SEQ ID NO: 1961379 - RNA, 19 nt, Artificial Sequence
  Description of Artificial Sequence: Synthetic oligonucleotide
ccccaaggagcauaacugg

SEQ ID NO: 1961380 - RNA, 19 nt, Artificial Sequence
  Description of Artificial Sequence: Synthetic oligonucleotide
uacgauccacccuggcggu

SEQ ID NO: 1961381 - RNA, 19 nt, Artificial Sequence
  Description of Artificial Sequence: Synthetic oligonucleotide
agcaacacacacagguacu

SEQ ID NO: 1961382 - RNA, 19 nt, Artificial Sequence
  Description of Artificial Sequence: Synthetic oligonucleotide
cuuguacaugaagagagcu

SEQ ID NO: 1961383 - RNA, 19 nt, Artificial Sequence
  Description of Artificial Sequence: Synthetic oligonucleotide
uuccccauacuuuccucua

SEQ ID NO: 1961384 - RNA, 19 nt, Artificial Sequence
  Description of Artificial Sequence: Synthetic oligonucleotide
gaguacgauccacccuggc

SEQ ID NO: 1961385 - RNA, 19 nt, Artificial Sequence
  Description of Artificial Sequence: Synthetic oligonucleotide
ggccaugagacgcacggac

SEQ ID NO: 1961386 - RNA, 19 nt, Artificial Sequence
  Description of Artificial Sequence: Synthetic oligonucleotide
caguggguacuucuucuuc

SEQ ID NO: 1961387 - RNA, 19 nt, Artificial Sequence
  Description of Artificial Sequence: Synthetic oligonucleotide
ugcuagcggccaugagacg

SEQ ID NO: 1961388 - RNA, 19 nt, Artificial Sequence
  Description of Artificial Sequence: Synthetic oligonucleotide
caggauguuauagaugaua

SEQ ID NO: 1961389 - RNA, 19 nt, Artificial Sequence
  Description of Artificial Sequence: Synthetic oligonucleotide
agaugauagucggguaccu

SEQ ID NO: 1961390 - RNA, 19 nt, Artificial Sequence
  Description of Artificial Sequence: Synthetic oligonucleotide
ucgugacugaguccauuuu

SEQ ID NO: 1961391 - RNA, 19 nt, Artificial Sequence
  Description of Artificial Sequence: Synthetic oligonucleotide
gaguuggauaguugacaaa

SEQ ID NO: 1961392 - RNA, 19 nt, Artificial Sequence
  Description of Artificial Sequence: Synthetic oligonucleotide
cagguagcgguagcggcgg

SEQ ID NO: 1961393 - RNA, 19 nt, Artificial Sequence
  Description of Artificial Sequence: Synthetic oligonucleotide
aagccaacuguguguucuu

SEQ ID NO: 1961394 - RNA, 19 nt, Artificial Sequence
  Description of Artificial Sequence: Synthetic oligonucleotide
aucaugugguuggaaccug

SEQ ID NO: 1961395 - RNA, 19 nt, Artificial Sequence
  Description of Artificial Sequence: Synthetic oligonucleotide
gacgagucggccggagacc

SEQ ID NO: 1961396 - RNA, 19 nt, Artificial Sequence
  Description of Artificial Sequence: Synthetic oligonucleotide
guagcggcggcgaaggcga

SEQ ID NO: 1961397 - RNA, 19 nt, Artificial Sequence
  Description of Artificial Sequence: Synthetic oligonucleotide
ggacgagucggccggagac

SEQ ID NO: 1961398 - RNA, 19 nt, Artificial Sequence
  Description of Artificial Sequence: Synthetic oligonucleotide
caccgagcagcaaugugga

SEQ ID NO: 1961399 - RNA, 19 nt, Artificial Sequence
  Description of Artificial Sequence: Synthetic oligonucleotide
aguacacaacugucaugaa

SEQ ID NO: 1961400 - RNA, 19 nt, Artificial Sequence
  Description of Artificial Sequence: Synthetic oligonucleotide
augucaccguuggagauaa

SEQ ID NO: 1961401 - RNA, 19 nt, Artificial Sequence
  Description of Artificial Sequence: Synthetic oligonucleotide
guaggaucccauaguagaa

SEQ ID NO: 1961402 - RNA, 19 nt, Artificial Sequence
  Description of Artificial Sequence: Synthetic oligonucleotide
uccuagugggaggucuucu

SEQ ID NO: 1961403 - RNA, 19 nt, Artificial Sequence
  Description of Artificial Sequence: Synthetic oligonucleotide
gucaccguuggagauaaua

SEQ ID NO: 1961404 - RNA, 19 nt, Artificial Sequence
  Description of Artificial Sequence: Synthetic oligonucleotide
ccugaguuggauaguugac

SEQ ID NO: 1961405 - RNA, 19 nt, Artificial Sequence
  Description of Artificial Sequence: Synthetic oligonucleotide
ugguuggaaccuguuuggu

SEQ ID NO: 1961406 - RNA, 19 nt, Artificial Sequence
  Description of Artificial Sequence: Synthetic oligonucleotide
caugagacgcacggacgag

SEQ ID NO: 1961407 - RNA, 19 nt, Artificial Sequence
  Description of Artificial Sequence: Synthetic oligonucleotide
agaaccugaguuggauagu

SEQ ID NO: 1961408 - RNA, 19 nt, Artificial Sequence
  Description of Artificial Sequence: Synthetic oligonucleotide
augagacgcacggacgagu

SEQ ID NO: 1961409 - RNA, 19 nt, Artificial Sequence
  Description of Artificial Sequence: Synthetic oligonucleotide
ggaucaagaucuuggcaaa

SEQ ID NO: 1961410 - RNA, 19 nt, Artificial Sequence
  Description of Artificial Sequence: Synthetic oligonucleotide
gagucggccggagacccgc

SEQ ID NO: 1961411 - RNA, 19 nt, Artificial Sequence
  Description of Artificial Sequence: Synthetic oligonucleotide
gucaggggaccaaaguaca

SEQ ID NO: 1961412 - RNA, 19 nt, Artificial Sequence
  Description of Artificial Sequence: Synthetic oligonucleotide
gcacggacgagucggccgg

SEQ ID NO: 1961413 - RNA, 19 nt, Artificial Sequence
  Description of Artificial Sequence: Synthetic oligonucleotide
gaugucaccguuggagaua

SEQ ID NO: 1961414 - RNA, 19 nt, Artificial Sequence
  Description of Artificial Sequence: Synthetic oligonucleotide
acagcggcaggcgcagccg

SEQ ID NO: 1961415 - RNA, 19 nt, Artificial Sequence
  Description of Artificial Sequence: Synthetic oligonucleotide
caccagggaucugcuagcg

SEQ ID NO: 1961416 - RNA, 19 nt, Artificial Sequence
  Description of Artificial Sequence: Synthetic oligonucleotide
gguaaugagcccgcauaug

SEQ ID NO: 1961417 - RNA, 19 nt, Artificial Sequence
  Description of Artificial Sequence: Synthetic oligonucleotide
cacggugcccacccacugc

SEQ ID NO: 1961418 - RNA, 19 nt, Artificial Sequence
  Description of Artificial Sequence: Synthetic oligonucleotide
agacagagcaggcggcaua

SEQ ID NO: 1961419 - RNA, 19 nt, Artificial Sequence
  Description of Artificial Sequence: Synthetic oligonucleotide
gguaccucucagcaaagcu

SEQ ID NO: 1961420 - RNA, 19 nt, Artificial Sequence
  Description of Artificial Sequence: Synthetic oligonucleotide
aacuuggcaucaagaccga

SEQ ID NO: 1961421 - RNA, 19 nt, Artificial Sequence
  Description of Artificial Sequence: Synthetic oligonucleotide
cugggaaacaccugucagu

SEQ ID NO: 1961422 - RNA, 19 nt, Artificial Sequence
  Description of Artificial Sequence: Synthetic oligonucleotide
gguccgaguacgauccacc

SEQ ID NO: 1961423 - RNA, 19 nt, Artificial Sequence
  Description of Artificial Sequence: Synthetic oligonucleotide
cccaaccauuuucuuaggc

SEQ ID NO: 1961424 - RNA, 19 nt, Artificial Sequence
  Description of Artificial Sequence: Synthetic oligonucleotide
cauaugguccugggaaaca

SEQ ID NO: 1961425 - RNA, 19 nt, Artificial Sequence
  Description of Artificial Sequence: Synthetic oligonucleotide
cuguagugcugaguugcug

SEQ ID NO: 1961426 - RNA, 19 nt, Artificial Sequence
  Description of Artificial Sequence: Synthetic oligonucleotide
gaauaccagcacggugccc

SEQ ID NO: 1961427 - RNA, 19 nt, Artificial Sequence
  Description of Artificial Sequence: Synthetic oligonucleotide
gccaugagacgcacggacg

SEQ ID NO: 1961428 - RNA, 19 nt, Artificial Sequence
  Description of Artificial Sequence: Synthetic oligonucleotide
acgcacggacgagucggcc

SEQ ID NO: 1961429 - RNA, 19 nt, Artificial Sequence
  Description of Artificial Sequence: Synthetic oligonucleotide
gaccgagacccaggaauac

SEQ ID NO: 1961430 - RNA, 19 nt, Artificial Sequence
  Description of Artificial Sequence: Synthetic oligonucleotide
uaucgugacugaguccauu

SEQ ID NO: 1961431 - RNA, 19 nt, Artificial Sequence
  Description of Artificial Sequence: Synthetic oligonucleotide
uggccaguggguacuucuu

SEQ ID NO: 1961432 - RNA, 19 nt, Artificial Sequence
  Description of Artificial Sequence: Synthetic oligonucleotide
gacacccaagaagcacagc

SEQ ID NO: 1961433 - RNA, 19 nt, Artificial Sequence
  Description of Artificial Sequence: Synthetic oligonucleotide
cccauaguagaaauagcaa

SEQ ID NO: 1961434 - RNA, 19 nt, Artificial Sequence
  Description of Artificial Sequence: Synthetic oligonucleotide
caccccaaggagcauaacu

SEQ ID NO: 1961435 - RNA, 19 nt, Artificial Sequence
  Description of Artificial Sequence: Synthetic oligonucleotide
cacagguacuuggccagug

SEQ ID NO: 1961436 - RNA, 19 nt, Artificial Sequence
  Description of Artificial Sequence: Synthetic oligonucleotide
gccggagacccgcucagag

SEQ ID NO: 1961437 - RNA, 19 nt, Artificial Sequence
  Description of Artificial Sequence: Synthetic oligonucleotide
cccaaacuuggcaucaaga

SEQ ID NO: 1961438 - RNA, 19 nt, Artificial Sequence
  Description of Artificial Sequence: Synthetic oligonucleotide
auguggaccaaagguugau

SEQ ID NO: 1961439 - RNA, 19 nt, Artificial Sequence
  Description of Artificial Sequence: Synthetic oligonucleotide
cuggaugaagaccaagguu

SEQ ID NO: 1961440 - RNA, 19 nt, Artificial Sequence
  Description of Artificial Sequence: Synthetic oligonucleotide
ggagcauaacugggauugg

SEQ ID NO: 1961441 - RNA, 19 nt, Artificial Sequence
  Description of Artificial Sequence: Synthetic oligonucleotide
ggaaccuguuugguaauga

SEQ ID NO: 1961442 - RNA, 19 nt, Artificial Sequence
  Description of Artificial Sequence: Synthetic oligonucleotide
uccacccuggcggugucaa

SEQ ID NO: 1961443 - RNA, 19 nt, Artificial Sequence
  Description of Artificial Sequence: Synthetic oligonucleotide
gguuggaaccuguuuggua

SEQ ID NO: 1961444 - RNA, 19 nt, Artificial Sequence
  Description of Artificial Sequence: Synthetic oligonucleotide
uccguguuguggugaugau

SEQ ID NO: 1961445 - RNA, 19 nt, Artificial Sequence
  Description of Artificial Sequence: Synthetic oligonucleotide
uuccuagugggaggucuuc

SEQ ID NO: 1961446 - RNA, 19 nt, Artificial Sequence
  Description of Artificial Sequence: Synthetic oligonucleotide
cgugacugaguccauuuuc

SEQ ID NO: 1961447 - RNA, 19 nt, Artificial Sequence
  Description of Artificial Sequence: Synthetic oligonucleotide
gccagguccgaguacgauc

SEQ ID NO: 1961448 - RNA, 19 nt, Artificial Sequence
  Description of Artificial Sequence: Synthetic oligonucleotide
gaaccugaguuggauaguu

SEQ ID NO: 1961449 - RNA, 19 nt, Artificial Sequence
  Description of Artificial Sequence: Synthetic oligonucleotide
agaccgagacccaggaaua

SEQ ID NO: 1961450 - RNA, 19 nt, Artificial Sequence
  Description of Artificial Sequence: Synthetic oligonucleotide
gcauaugguccugggaaac

SEQ ID NO: 1961451 - RNA, 19 nt, Artificial Sequence
  Description of Artificial Sequence: Synthetic oligonucleotide
guagcgguagcggcggcga

SEQ ID NO: 1961452 - RNA, 19 nt, Artificial Sequence
  Description of Artificial Sequence: Synthetic oligonucleotide
cggcauagagccagguccg

SEQ ID NO: 1961453 - RNA, 19 nt, Artificial Sequence
  Description of Artificial Sequence: Synthetic oligonucleotide
cucagagcagguagcggua

SEQ ID NO: 1961454 - RNA, 19 nt, Artificial Sequence
  Description of Artificial Sequence: Synthetic oligonucleotide
ccgagacccaggaauacca

SEQ ID NO: 1961455 - RNA, 19 nt, Artificial Sequence
  Description of Artificial Sequence: Synthetic oligonucleotide
ugcccacccacugcaugga

SEQ ID NO: 1961456 - RNA, 19 nt, Artificial Sequence
  Description of Artificial Sequence: Synthetic oligonucleotide
agaccauggcacccacaua

SEQ ID NO: 1961457 - RNA, 19 nt, Artificial Sequence
  Description of Artificial Sequence: Synthetic oligonucleotide
ccaugagacgcacggacga

SEQ ID NO: 1961458 - RNA, 19 nt, Artificial Sequence
  Description of Artificial Sequence: Synthetic oligonucleotide
guuugguaaugagcccgca

SEQ ID NO: 1961459 - RNA, 19 nt, Artificial Sequence
  Description of Artificial Sequence: Synthetic oligonucleotide
gcauagagccagguccgag

SEQ ID NO: 1961460 - RNA, 19 nt, Artificial Sequence
  Description of Artificial Sequence: Synthetic oligonucleotide
agcacggugcccacccacu

SEQ ID NO: 1961461 - RNA, 19 nt, Artificial Sequence
  Description of Artificial Sequence: Synthetic oligonucleotide
gggguuggcgaagaagauc

SEQ ID NO: 1961462 - RNA, 19 nt, Artificial Sequence
  Description of Artificial Sequence: Synthetic oligonucleotide
gucggguaccucucagcaa

SEQ ID NO: 1961463 - RNA, 19 nt, Artificial Sequence
  Description of Artificial Sequence: Synthetic oligonucleotide
cccgcucagagcagguagc

SEQ ID NO: 1961464 - RNA, 19 nt, Artificial Sequence
  Description of Artificial Sequence: Synthetic oligonucleotide
ggcuugcaggauuuaccga

SEQ ID NO: 1961465 - RNA, 19 nt, Artificial Sequence
  Description of Artificial Sequence: Synthetic oligonucleotide
gcaauguggaccaaagguu

SEQ ID NO: 1961466 - RNA, 19 nt, Artificial Sequence
  Description of Artificial Sequence: Synthetic oligonucleotide
ccauacuuuccucuaguua

SEQ ID NO: 1961467 - RNA, 19 nt, Artificial Sequence
  Description of Artificial Sequence: Synthetic oligonucleotide
gauccacccuggcgguguc

SEQ ID NO: 1961468 - RNA, 19 nt, Artificial Sequence
  Description of Artificial Sequence: Synthetic oligonucleotide
gucaccccaaggagcauaa

SEQ ID NO: 1961469 - RNA, 19 nt, Artificial Sequence
  Description of Artificial Sequence: Synthetic oligonucleotide
gagcaugucaggggaccaa

SEQ ID NO: 1961470 - RNA, 19 nt, Artificial Sequence
  Description of Artificial Sequence: Synthetic oligonucleotide
gcgaaggcgaaagcuccag

SEQ ID NO: 1961471 - RNA, 19 nt, Artificial Sequence
  Description of Artificial Sequence: Synthetic oligonucleotide
cgcacggacgagucggccg

SEQ ID NO: 1961472 - RNA, 19 nt, Artificial Sequence
  Description of Artificial Sequence: Synthetic oligonucleotide
gcuacaccagccacaauua

SEQ ID NO: 1961473 - RNA, 19 nt, Artificial Sequence
  Description of Artificial Sequence: Synthetic oligonucleotide
gcccgcauaugguccuggg

SEQ ID NO: 1961474 - RNA, 19 nt, Artificial Sequence
  Description of Artificial Sequence: Synthetic oligonucleotide
gguuaaggcaaagguaaau

SEQ ID NO: 1961475 - RNA, 19 nt, Artificial Sequence
  Description of Artificial Sequence: Synthetic oligonucleotide
cacccuggcggugucaaaa

SEQ ID NO: 1961476 - RNA, 19 nt, Artificial Sequence
  Description of Artificial Sequence: Synthetic oligonucleotide
ggguaccucucagcaaagc

SEQ ID NO: 1961477 - RNA, 19 nt, Artificial Sequence
  Description of Artificial Sequence: Synthetic oligonucleotide
cggagacccgcucagagca

SEQ ID NO: 1961478 - RNA, 19 nt, Artificial Sequence
  Description of Artificial Sequence: Synthetic oligonucleotide
accgagaaccugaguugga

SEQ ID NO: 1961479 - RNA, 19 nt, Artificial Sequence
  Description of Artificial Sequence: Synthetic oligonucleotide
cuuccguguuguggugaug

SEQ ID NO: 1961480 - RNA, 19 nt, Artificial Sequence
  Description of Artificial Sequence: Synthetic oligonucleotide
acggacgagucggccggag

SEQ ID NO: 1961481 - RNA, 19 nt, Artificial Sequence
  Description of Artificial Sequence: Synthetic oligonucleotide
caagaccgagacccaggaa

SEQ ID NO: 1961482 - RNA, 19 nt, Artificial Sequence
  Description of Artificial Sequence: Synthetic oligonucleotide
ccguguuguggugaugaug

SEQ ID NO: 1961483 - RNA, 19 nt, Artificial Sequence
  Description of Artificial Sequence: Synthetic oligonucleotide
gccaguggguacuucuucu

SEQ ID NO: 1961484 - RNA, 19 nt, Artificial Sequence
  Description of Artificial Sequence: Synthetic oligonucleotide
gcggcgaaggcgaaagcuc

SEQ ID NO: 1961485 - RNA, 19 nt, Artificial Sequence
  Description of Artificial Sequence: Synthetic oligonucleotide
ccccaaccauuuucuuagg

SEQ ID NO: 1961486 - RNA, 19 nt, Artificial Sequence
  Description of Artificial Sequence: Synthetic oligonucleotide
uagcggccaugagacgcac

SEQ ID NO: 1961487 - RNA, 19 nt, Artificial Sequence
  Description of Artificial Sequence: Synthetic oligonucleotide
cccaagaagcacagcggca

SEQ ID NO: 1961488 - RNA, 19 nt, Artificial Sequence
  Description of Artificial Sequence: Synthetic oligonucleotide
ccgcucagagcagguagcg

SEQ ID NO: 1961489 - RNA, 19 nt, Artificial Sequence
  Description of Artificial Sequence: Synthetic oligonucleotide
gcucuccaaagccaacugu

SEQ ID NO: 1961490 - RNA, 19 nt, Artificial Sequence
  Description of Artificial Sequence: Synthetic oligonucleotide
cgaguacgauccacccugg

SEQ ID NO: 1961491 - RNA, 19 nt, Artificial Sequence
  Description of Artificial Sequence: Synthetic oligonucleotide
caacaucaugugguuggaa

SEQ ID NO: 1961492 - RNA, 19 nt, Artificial Sequence
  Description of Artificial Sequence: Synthetic oligonucleotide
gagcccgcauaugguccug

SEQ ID NO: 1961493 - RNA, 19 nt, Artificial Sequence
  Description of Artificial Sequence: Synthetic oligonucleotide
ggagcaugucaggggacca

SEQ ID NO: 1961494 - RNA, 19 nt, Artificial Sequence
  Description of Artificial Sequence: Synthetic oligonucleotide
cguuggagauaauaacuua

SEQ ID NO: 1961495 - RNA, 19 nt, Artificial Sequence
  Description of Artificial Sequence: Synthetic oligonucleotide
acgauccacccuggcggug

SEQ ID NO: 1961496 - RNA, 19 nt, Artificial Sequence
  Description of Artificial Sequence: Synthetic oligonucleotide
gggauuggcuugcaggauu

SEQ ID NO: 1961497 - RNA, 19 nt, Artificial Sequence
  Description of Artificial Sequence: Synthetic oligonucleotide
ggggaccaaaguacacaac

SEQ ID NO: 1961498 - RNA, 19 nt, Artificial Sequence
  Description of Artificial Sequence: Synthetic oligonucleotide
agacccgcucagagcaggu

SEQ ID NO: 1961499 - RNA, 19 nt, Artificial Sequence
  Description of Artificial Sequence: Synthetic oligonucleotide
caugugguuggaaccuguu

SEQ ID NO: 1961500 - RNA, 19 nt, Artificial Sequence
  Description of Artificial Sequence: Synthetic oligonucleotide
ggaucccauaguagaaaua

SEQ ID NO: 1961501 - RNA, 19 nt, Artificial Sequence
  Description of Artificial Sequence: Synthetic oligonucleotide
cucuuccuagugggagguc

SEQ ID NO: 1961502 - RNA, 19 nt, Artificial Sequence
  Description of Artificial Sequence: Synthetic oligonucleotide
ggagacccgcucagagcag

SEQ ID NO: 1961503 - RNA, 19 nt, Artificial Sequence
  Description of Artificial Sequence: Synthetic oligonucleotide
ggcggcgaaggcgaaagcu

SEQ ID NO: 1961504 - RNA, 19 nt, Artificial Sequence
  Description of Artificial Sequence: Synthetic oligonucleotide
gcucugacccagggcacug

SEQ ID NO: 1961505 - RNA, 19 nt, Artificial Sequence
  Description of Artificial Sequence: Synthetic oligonucleotide
gucggccggagacccgcuc

SEQ ID NO: 1961506 - RNA, 19 nt, Artificial Sequence
  Description of Artificial Sequence: Synthetic oligonucleotide
gcccacccacugcauggag

SEQ ID NO: 1961507 - RNA, 19 nt, Artificial Sequence
  Description of Artificial Sequence: Synthetic oligonucleotide
accucucagcaaagcuuaa

SEQ ID NO: 1961508 - RNA, 19 nt, Artificial Sequence
  Description of Artificial Sequence: Synthetic oligonucleotide
cacccacauaggagacaga

SEQ ID NO: 1961509 - RNA, 19 nt, Artificial Sequence
  Description of Artificial Sequence: Synthetic oligonucleotide
acuuggccaguggguacuu

SEQ ID NO: 1961510 - RNA, 19 nt, Artificial Sequence
  Description of Artificial Sequence: Synthetic oligonucleotide
ggucaccccaaggagcaua

SEQ ID NO: 1961511 - RNA, 19 nt, Artificial Sequence
  Description of Artificial Sequence: Synthetic oligonucleotide
gcaucaagaccgagaccca

SEQ ID NO: 1961512 - RNA, 19 nt, Artificial Sequence
  Description of Artificial Sequence: Synthetic oligonucleotide
ggcgaaggcgaaagcucca

SEQ ID NO: 1961513 - RNA, 19 nt, Artificial Sequence
  Description of Artificial Sequence: Synthetic oligonucleotide
gacccgcucagagcaggua

SEQ ID NO: 1961514 - RNA, 19 nt, Artificial Sequence
  Description of Artificial Sequence: Synthetic oligonucleotide
ggaggucuucuuuguuccu

SEQ ID NO: 1961515 - RNA, 19 nt, Artificial Sequence
  Description of Artificial Sequence: Synthetic oligonucleotide
auccacccuggcgguguca

SEQ ID NO: 1961516 - RNA, 19 nt, Artificial Sequence
  Description of Artificial Sequence: Synthetic oligonucleotide
cggucgggcaccagggauc

SEQ ID NO: 1961517 - RNA, 19 nt, Artificial Sequence
  Description of Artificial Sequence: Synthetic oligonucleotide
ccaagaugucaccguugga

SEQ ID NO: 1961518 - RNA, 19 nt, Artificial Sequence
  Description of Artificial Sequence: Synthetic oligonucleotide
ggcauagagccagguccga

SEQ ID NO: 1961519 - RNA, 19 nt, Artificial Sequence
  Description of Artificial Sequence: Synthetic oligonucleotide
cuaccccaaccauuuucuu

SEQ ID NO: 1961520 - RNA, 19 nt, Artificial Sequence
  Description of Artificial Sequence: Synthetic oligonucleotide
cagguccgaguacgaucca

SEQ ID NO: 1961521 - RNA, 19 nt, Artificial Sequence
  Description of Artificial Sequence: Synthetic oligonucleotide
agucggccggagacccgcu

SEQ ID NO: 1961522 - RNA, 19 nt, Artificial Sequence
  Description of Artificial Sequence: Synthetic oligonucleotide
ggucgggcaccagggaucu

SEQ ID NO: 1961523 - RNA, 19 nt, Artificial Sequence
  Description of Artificial Sequence: Synthetic oligonucleotide
ccaagauggugaagaacuu

SEQ ID NO: 1961524 - RNA, 19 nt, Artificial Sequence
  Description of Artificial Sequence: Synthetic oligonucleotide
cuucuaccccaaccauuuu

SEQ ID NO: 1961525 - RNA, 19 nt, Artificial Sequence
  Description of Artificial Sequence: Synthetic oligonucleotide
gguugauguucaacaucau

SEQ ID NO: 1961526 - RNA, 19 nt, Artificial Sequence
  Description of Artificial Sequence: Synthetic oligonucleotide
cgagucggccggagacccg

SEQ ID NO: 1961527 - RNA, 19 nt, Artificial Sequence
  Description of Artificial Sequence: Synthetic oligonucleotide
cccauacuuuccucuaguu

SEQ ID NO: 1961528 - RNA, 19 nt, Artificial Sequence
  Description of Artificial Sequence: Synthetic oligonucleotide
gagcagcaauguggaccaa

SEQ ID NO: 1961529 - RNA, 19 nt, Artificial Sequence
  Description of Artificial Sequence: Synthetic oligonucleotide
gccggucgggcaccaggga

SEQ ID NO: 1961530 - RNA, 19 nt, Artificial Sequence
  Description of Artificial Sequence: Synthetic oligonucleotide
gagcuacaccagccacaau

SEQ ID NO: 1961531 - RNA, 19 nt, Artificial Sequence
  Description of Artificial Sequence: Synthetic oligonucleotide
ccuagugggaggucuucuu

SEQ ID NO: 1961532 - RNA, 19 nt, Artificial Sequence
  Description of Artificial Sequence: Synthetic oligonucleotide
cagcaccgagcagcaaugu

SEQ ID NO: 1961533 - RNA, 19 nt, Artificial Sequence
  Description of Artificial Sequence: Synthetic oligonucleotide
cggccggagacccgcucag

SEQ ID NO: 1961534 - RNA, 19 nt, Artificial Sequence
  Description of Artificial Sequence: Synthetic oligonucleotide
gucgggcaccagggaucug

SEQ ID NO: 1961535 - RNA, 19 nt, Artificial Sequence
  Description of Artificial Sequence: Synthetic oligonucleotide
cacggacgagucggccgga

SEQ ID NO: 1961536 - RNA, 19 nt, Artificial Sequence
  Description of Artificial Sequence: Synthetic oligonucleotide
gcggcaggcgcagccgguc

SEQ ID NO: 1961537 - RNA, 19 nt, Artificial Sequence
  Description of Artificial Sequence: Synthetic oligonucleotide
gggcaccagggaucugcua

SEQ ID NO: 1961538 - RNA, 19 nt, Artificial Sequence
  Description of Artificial Sequence: Synthetic oligonucleotide
ccgagaaccugaguuggau

SEQ ID NO: 1961539 - RNA, 19 nt, Artificial Sequence
  Description of Artificial Sequence: Synthetic oligonucleotide
ggccggagacccgcucaga

SEQ ID NO: 1961540 - RNA, 19 nt, Artificial Sequence
  Description of Artificial Sequence: Synthetic oligonucleotide
ccggucgggcaccagggau

SEQ ID NO: 1961541 - RNA, 19 nt, Artificial Sequence
  Description of Artificial Sequence: Synthetic oligonucleotide
cggacgagucggccggaga

SEQ ID NO: 1961542 - RNA, 19 nt, Artificial Sequence
  Description of Artificial Sequence: Synthetic oligonucleotide
cgauccacccuggcggugu

SEQ ID NO: 1961543 - RNA, 19 nt, Artificial Sequence
  Description of Artificial Sequence: Synthetic oligonucleotide
ccacccuggcggugucaaa

SEQ ID NO: 1961544 - RNA, 19 nt, Artificial Sequence
  Description of Artificial Sequence: Synthetic oligonucleotide
cggccaugagacgcacgga

SEQ ID NO: 1961545 - RNA, 19 nt, Artificial Sequence
  Description of Artificial Sequence: Synthetic oligonucleotide
gcuccccagugaacaggau

SEQ ID NO: 1961546 - RNA, 19 nt, Artificial Sequence
  Description of Artificial Sequence: Synthetic oligonucleotide
aauguuauaaauuggaugg

SEQ ID NO: 1961547 - RNA, 19 nt, Artificial Sequence
  Description of Artificial Sequence: Synthetic oligonucleotide
agagucacccuuuagagcc

SEQ ID NO: 1961548 - RNA, 19 nt, Artificial Sequence
  Description of Artificial Sequence: Synthetic oligonucleotide
augccuucaauguagaucc

SEQ ID NO: 1961549 - RNA, 19 nt, Artificial Sequence
  Description of Artificial Sequence: Synthetic oligonucleotide
aaccguauuccccugaacc

SEQ ID NO: 1961550 - RNA, 19 nt, Artificial Sequence
  Description of Artificial Sequence: Synthetic oligonucleotide
uuuaauguuauaaauugga

SEQ ID NO: 1961551 - RNA, 19 nt, Artificial Sequence
  Description of Artificial Sequence: Synthetic oligonucleotide
uuaaccuuuuccuugauag

SEQ ID NO: 1961552 - RNA, 19 nt, Artificial Sequence
  Description of Artificial Sequence: Synthetic oligonucleotide
aauguagauccuuugggac

SEQ ID NO: 1961553 - RNA, 19 nt, Artificial Sequence
  Description of Artificial Sequence: Synthetic oligonucleotide
uuuuaauguuauaaauugg

SEQ ID NO: 1961554 - RNA, 19 nt, Artificial Sequence
  Description of Artificial Sequence: Synthetic oligonucleotide
uaauguuauaaauuggaug

SEQ ID NO: 1961555 - RNA, 19 nt, Artificial Sequence
  Description of Artificial Sequence: Synthetic oligonucleotide
ugacguaacaguuuguuag

SEQ ID NO: 1961556 - RNA, 19 nt, Artificial Sequence
  Description of Artificial Sequence: Synthetic oligonucleotide
ucccguuuaaucaucaagg

SEQ ID NO: 1961557 - RNA, 19 nt, Artificial Sequence
  Description of Artificial Sequence: Synthetic oligonucleotide
aacaagguugcaaagcugc

SEQ ID NO: 1961558 - RNA, 19 nt, Artificial Sequence
  Description of Artificial Sequence: Synthetic oligonucleotide
uauuucgggaacaagguug

SEQ ID NO: 1961559 - RNA, 19 nt, Artificial Sequence
  Description of Artificial Sequence: Synthetic oligonucleotide
uucaauguagauccuuugg

SEQ ID NO: 1961560 - RNA, 19 nt, Artificial Sequence
  Description of Artificial Sequence: Synthetic oligonucleotide
aaucaucaagguuuuaaug

SEQ ID NO: 1961561 - RNA, 19 nt, Artificial Sequence
  Description of Artificial Sequence: Synthetic oligonucleotide
ucuuuauuucucacuaggg

SEQ ID NO: 1961562 - RNA, 19 nt, Artificial Sequence
  Description of Artificial Sequence: Synthetic oligonucleotide
uccaucuuaaguuuaaccu

SEQ ID NO: 1961563 - RNA, 19 nt, Artificial Sequence
  Description of Artificial Sequence: Synthetic oligonucleotide
aaagcugguuccuuccagc

SEQ ID NO: 1961564 - RNA, 19 nt, Artificial Sequence
  Description of Artificial Sequence: Synthetic oligonucleotide
uuucccaacucugugaucg

SEQ ID NO: 1961565 - RNA, 19 nt, Artificial Sequence
  Description of Artificial Sequence: Synthetic oligonucleotide
uccuuugggaccaauaagc

SEQ ID NO: 1961566 - RNA, 19 nt, Artificial Sequence
  Description of Artificial Sequence: Synthetic oligonucleotide
aaggacuacuuuucguacc

SEQ ID NO: 1961567 - RNA, 19 nt, Artificial Sequence
  Description of Artificial Sequence: Synthetic oligonucleotide
aaucugacuuucugguugc

SEQ ID NO: 1961568 - RNA, 19 nt, Artificial Sequence
  Description of Artificial Sequence: Synthetic oligonucleotide
cuguauuucgggaacaagg

SEQ ID NO: 1961569 - RNA, 19 nt, Artificial Sequence
  Description of Artificial Sequence: Synthetic oligonucleotide
gaaaguauucaccacuagc

SEQ ID NO: 1961570 - RNA, 19 nt, Artificial Sequence
  Description of Artificial Sequence: Synthetic oligonucleotide
aauuggauggauguucuuc

SEQ ID NO: 1961571 - RNA, 19 nt, Artificial Sequence
  Description of Artificial Sequence: Synthetic oligonucleotide
uuucguaccuccuucaggc

SEQ ID NO: 1961572 - RNA, 19 nt, Artificial Sequence
  Description of Artificial Sequence: Synthetic oligonucleotide
ucuuuuaacaaaucucucu

SEQ ID NO: 1961573 - RNA, 19 nt, Artificial Sequence
  Description of Artificial Sequence: Synthetic oligonucleotide
agaguuauccaccugccuc

SEQ ID NO: 1961574 - RNA, 19 nt, Artificial Sequence
  Description of Artificial Sequence: Synthetic oligonucleotide
ugaaccaugacguaacagu

SEQ ID NO: 1961575 - RNA, 19 nt, Artificial Sequence
  Description of Artificial Sequence: Synthetic oligonucleotide
auaaauuggauggauguuc

SEQ ID NO: 1961576 - RNA, 19 nt, Artificial Sequence
  Description of Artificial Sequence: Synthetic oligonucleotide
uguaagagcgcccaguuuc

SEQ ID NO: 1961577 - RNA, 19 nt, Artificial Sequence
  Description of Artificial Sequence: Synthetic oligonucleotide
uucaccacuagccaacucc

SEQ ID NO: 1961578 - RNA, 19 nt, Artificial Sequence
  Description of Artificial Sequence: Synthetic oligonucleotide
uccaaugccuucaauguag

SEQ ID NO: 1961579 - RNA, 19 nt, Artificial Sequence
  Description of Artificial Sequence: Synthetic oligonucleotide
aaagccucucuguauuucg

SEQ ID NO: 1961580 - RNA, 19 nt, Artificial Sequence
  Description of Artificial Sequence: Synthetic oligonucleotide
ucuuuagguggaaugaaug

SEQ ID NO: 1961581 - RNA, 19 nt, Artificial Sequence
  Description of Artificial Sequence: Synthetic oligonucleotide
uagggaaccgauuuuaaug

SEQ ID NO: 1961582 - RNA, 19 nt, Artificial Sequence
  Description of Artificial Sequence: Synthetic oligonucleotide
uuaucaaucugacuuucug

SEQ ID NO: 1961583 - RNA, 19 nt, Artificial Sequence
  Description of Artificial Sequence: Synthetic oligonucleotide
auagccaccacaucaaucu

SEQ ID NO: 1961584 - RNA, 19 nt, Artificial Sequence
  Description of Artificial Sequence: Synthetic oligonucleotide
aguuccaaugccuucaaug

SEQ ID NO: 1961585 - RNA, 19 nt, Artificial Sequence
  Description of Artificial Sequence: Synthetic oligonucleotide
caucuuaaguuuaaccucc

SEQ ID NO: 1961586 - RNA, 19 nt, Artificial Sequence
  Description of Artificial Sequence: Synthetic oligonucleotide
uguauuucgggaacaaggu

SEQ ID NO: 1961587 - RNA, 19 nt, Artificial Sequence
  Description of Artificial Sequence: Synthetic oligonucleotide
uuuggagaaaagcugguuc

SEQ ID NO: 1961588 - RNA, 19 nt, Artificial Sequence
  Description of Artificial Sequence: Synthetic oligonucleotide
cucuuuauuucucacuagg

SEQ ID NO: 1961589 - RNA, 19 nt, Artificial Sequence
  Description of Artificial Sequence: Synthetic oligonucleotide
aacucugugaucgcaacuc

SEQ ID NO: 1961590 - RNA, 19 nt, Artificial Sequence
  Description of Artificial Sequence: Synthetic oligonucleotide
uuuucguaccuccuucagg

SEQ ID NO: 1961591 - RNA, 19 nt, Artificial Sequence
  Description of Artificial Sequence: Synthetic oligonucleotide
aagcuuucugcaccaaagg

SEQ ID NO: 1961592 - RNA, 19 nt, Artificial Sequence
  Description of Artificial Sequence: Synthetic oligonucleotide
uuaauguuauaaauuggau

SEQ ID NO: 1961593 - RNA, 19 nt, Artificial Sequence
  Description of Artificial Sequence: Synthetic oligonucleotide
cuuuagguggaaugaaugc

SEQ ID NO: 1961594 - RNA, 19 nt, Artificial Sequence
  Description of Artificial Sequence: Synthetic oligonucleotide
cugcuuuccuccaagagcc

SEQ ID NO: 1961595 - RNA, 19 nt, Artificial Sequence
  Description of Artificial Sequence: Synthetic oligonucleotide
aaagcuuucugcaccaaag

SEQ ID NO: 1961596 - RNA, 19 nt, Artificial Sequence
  Description of Artificial Sequence: Synthetic oligonucleotide
gaaguauccguacugcaug

SEQ ID NO: 1961597 - RNA, 19 nt, Artificial Sequence
  Description of Artificial Sequence: Synthetic oligonucleotide
uaucaaggacuacuuuucg

SEQ ID NO: 1961598 - RNA, 19 nt, Artificial Sequence
  Description of Artificial Sequence: Synthetic oligonucleotide
uuggagaaaagcugguucc

SEQ ID NO: 1961599 - RNA, 19 nt, Artificial Sequence
  Description of Artificial Sequence: Synthetic oligonucleotide
uuuagguggaaugaaugcc

SEQ ID NO: 1961600 - RNA, 19 nt, Artificial Sequence
  Description of Artificial Sequence: Synthetic oligonucleotide
uguguacuccuucuuaaug

SEQ ID NO: 1961601 - RNA, 19 nt, Artificial Sequence
  Description of Artificial Sequence: Synthetic oligonucleotide
aaguuuaaccuccucugcu

SEQ ID NO: 1961602 - RNA, 19 nt, Artificial Sequence
  Description of Artificial Sequence: Synthetic oligonucleotide
uuagguggaaugaaugccu

SEQ ID NO: 1961603 - RNA, 19 nt, Artificial Sequence
  Description of Artificial Sequence: Synthetic oligonucleotide
cugauuggccuucagaaag

SEQ ID NO: 1961604 - RNA, 19 nt, Artificial Sequence
  Description of Artificial Sequence: Synthetic oligonucleotide
uuuguuucaguagaagcug

SEQ ID NO: 1961605 - RNA, 19 nt, Artificial Sequence
  Description of Artificial Sequence: Synthetic oligonucleotide
uuuucgucggcuuccaucu

SEQ ID NO: 1961606 - RNA, 19 nt, Artificial Sequence
  Description of Artificial Sequence: Synthetic oligonucleotide
aaucuuucccaacucugug

SEQ ID NO: 1961607 - RNA, 19 nt, Artificial Sequence
  Description of Artificial Sequence: Synthetic oligonucleotide
aaguauucaccacuagcca

SEQ ID NO: 1961608 - RNA, 19 nt, Artificial Sequence
  Description of Artificial Sequence: Synthetic oligonucleotide
aaugguguguacuccuucu

SEQ ID NO: 1961609 - RNA, 19 nt, Artificial Sequence
  Description of Artificial Sequence: Synthetic oligonucleotide
uaaguuuaaccuccucugc

SEQ ID NO: 1961610 - RNA, 19 nt, Artificial Sequence
  Description of Artificial Sequence: Synthetic oligonucleotide
aaaaucuuucccaacucug

SEQ ID NO: 1961611 - RNA, 19 nt, Artificial Sequence
  Description of Artificial Sequence: Synthetic oligonucleotide
ucugggauuguccucuuug

SEQ ID NO: 1961612 - RNA, 19 nt, Artificial Sequence
  Description of Artificial Sequence: Synthetic oligonucleotide
gacguaacaguuuguuagg

SEQ ID NO: 1961613 - RNA, 19 nt, Artificial Sequence
  Description of Artificial Sequence: Synthetic oligonucleotide
uuuugugcuugaacugugg

SEQ ID NO: 1961614 - RNA, 19 nt, Artificial Sequence
  Description of Artificial Sequence: Synthetic oligonucleotide
auggcagaaaccguauucc

SEQ ID NO: 1961615 - RNA, 19 nt, Artificial Sequence
  Description of Artificial Sequence: Synthetic oligonucleotide
uguuaggaguuccaaugcc

SEQ ID NO: 1961616 - RNA, 19 nt, Artificial Sequence
  Description of Artificial Sequence: Synthetic oligonucleotide
aaggcccaauggcagaaac

SEQ ID NO: 1961617 - RNA, 19 nt, Artificial Sequence
  Description of Artificial Sequence: Synthetic oligonucleotide
uuccccugaaccaugacgu

SEQ ID NO: 1961618 - RNA, 19 nt, Artificial Sequence
  Description of Artificial Sequence: Synthetic oligonucleotide
uucagguaaagccucucug

SEQ ID NO: 1961619 - RNA, 19 nt, Artificial Sequence
  Description of Artificial Sequence: Synthetic oligonucleotide
gaugucacaugcaacauca

SEQ ID NO: 1961620 - RNA, 19 nt, Artificial Sequence
  Description of Artificial Sequence: Synthetic oligonucleotide
aacuccuuaucaaucugac

SEQ ID NO: 1961621 - RNA, 19 nt, Artificial Sequence
  Description of Artificial Sequence: Synthetic oligonucleotide
cuuugggaccaauaagccg

SEQ ID NO: 1961622 - RNA, 19 nt, Artificial Sequence
  Description of Artificial Sequence: Synthetic oligonucleotide
ugcauguucauguucguuc

SEQ ID NO: 1961623 - RNA, 19 nt, Artificial Sequence
  Description of Artificial Sequence: Synthetic oligonucleotide
uuugugcuugaacuguggc

SEQ ID NO: 1961624 - RNA, 19 nt, Artificial Sequence
  Description of Artificial Sequence: Synthetic oligonucleotide
accaugacguaacaguuug

SEQ ID NO: 1961625 - RNA, 19 nt, Artificial Sequence
  Description of Artificial Sequence: Synthetic oligonucleotide
ucaaggacuacuuuucgua

SEQ ID NO: 1961626 - RNA, 19 nt, Artificial Sequence
  Description of Artificial Sequence: Synthetic oligonucleotide
caaucugacuuucugguug

SEQ ID NO: 1961627 - RNA, 19 nt, Artificial Sequence
  Description of Artificial Sequence: Synthetic oligonucleotide
guguacuccuucuuaaugc

SEQ ID NO: 1961628 - RNA, 19 nt, Artificial Sequence
  Description of Artificial Sequence: Synthetic oligonucleotide
agggaaccgauuuuaauga

SEQ ID NO: 1961629 - RNA, 19 nt, Artificial Sequence
  Description of Artificial Sequence: Synthetic oligonucleotide
aaucuuuugccaacucccg

SEQ ID NO: 1961630 - RNA, 19 nt, Artificial Sequence
  Description of Artificial Sequence: Synthetic oligonucleotide
acaguuuguuaggaguucc

SEQ ID NO: 1961631 - RNA, 19 nt, Artificial Sequence
  Description of Artificial Sequence: Synthetic oligonucleotide
uauccguacugcauguuca

SEQ ID NO: 1961632 - RNA, 19 nt, Artificial Sequence
  Description of Artificial Sequence: Synthetic oligonucleotide
accgauuuuaaugauguca

SEQ ID NO: 1961633 - RNA, 19 nt, Artificial Sequence
  Description of Artificial Sequence: Synthetic oligonucleotide
aaaccguauuccccugaac

SEQ ID NO: 1961634 - RNA, 19 nt, Artificial Sequence
  Description of Artificial Sequence: Synthetic oligonucleotide
uuggccuucagaaaguauu

SEQ ID NO: 1961635 - RNA, 19 nt, Artificial Sequence
  Description of Artificial Sequence: Synthetic oligonucleotide
auuucgggaacaagguugc

SEQ ID NO: 1961636 - RNA, 19 nt, Artificial Sequence
  Description of Artificial Sequence: Synthetic oligonucleotide
aacaguuuguuaggaguuc

SEQ ID NO: 1961637 - RNA, 19 nt, Artificial Sequence
  Description of Artificial Sequence: Synthetic oligonucleotide
ucguaagagcuucugcuug

SEQ ID NO: 1961638 - RNA, 19 nt, Artificial Sequence
  Description of Artificial Sequence: Synthetic oligonucleotide
ugaaguauccguacugcau

SEQ ID NO: 1961639 - RNA, 19 nt, Artificial Sequence
  Description of Artificial Sequence: Synthetic oligonucleotide
guuauaaauuggauggaug

SEQ ID NO: 1961640 - RNA, 19 nt, Artificial Sequence
  Description of Artificial Sequence: Synthetic oligonucleotide
agagcgcccaguuucuugg

SEQ ID NO: 1961641 - RNA, 19 nt, Artificial Sequence
  Description of Artificial Sequence: Synthetic oligonucleotide
cuuuauuucucacuaggga

SEQ ID NO: 1961642 - RNA, 19 nt, Artificial Sequence
  Description of Artificial Sequence: Synthetic oligonucleotide
uuccuugauagccaccaca

SEQ ID NO: 1961643 - RNA, 19 nt, Artificial Sequence
  Description of Artificial Sequence: Synthetic oligonucleotide
uccugaaguauccguacug

SEQ ID NO: 1961644 - RNA, 19 nt, Artificial Sequence
  Description of Artificial Sequence: Synthetic oligonucleotide
aacaccacugccuggcagu

SEQ ID NO: 1961645 - RNA, 19 nt, Artificial Sequence
  Description of Artificial Sequence: Synthetic oligonucleotide
caaucuuuguuucaguaga

SEQ ID NO: 1961646 - RNA, 19 nt, Artificial Sequence
  Description of Artificial Sequence: Synthetic oligonucleotide
cacugaaaggcccaauggc

SEQ ID NO: 1961647 - RNA, 19 nt, Artificial Sequence
  Description of Artificial Sequence: Synthetic oligonucleotide
uguuucaguagaagcuggc

SEQ ID NO: 1961648 - RNA, 19 nt, Artificial Sequence
  Description of Artificial Sequence: Synthetic oligonucleotide
guucauguucguucaaagc

SEQ ID NO: 1961649 - RNA, 19 nt, Artificial Sequence
  Description of Artificial Sequence: Synthetic oligonucleotide
ucucuuuauuucucacuag

SEQ ID NO: 1961650 - RNA, 19 nt, Artificial Sequence
  Description of Artificial Sequence: Synthetic oligonucleotide
cucaucuugggucucgcgc

SEQ ID NO: 1961651 - RNA, 19 nt, Artificial Sequence
  Description of Artificial Sequence: Synthetic oligonucleotide
uguagauccuuugggacca

SEQ ID NO: 1961652 - RNA, 19 nt, Artificial Sequence
  Description of Artificial Sequence: Synthetic oligonucleotide
agaaaguauucaccacuag

SEQ ID NO: 1961653 - RNA, 19 nt, Artificial Sequence
  Description of Artificial Sequence: Synthetic oligonucleotide
uguuauaaauuggauggau

SEQ ID NO: 1961654 - RNA, 19 nt, Artificial Sequence
  Description of Artificial Sequence: Synthetic oligonucleotide
ucaucaagguuuuaauguu

SEQ ID NO: 1961655 - RNA, 19 nt, Artificial Sequence
  Description of Artificial Sequence: Synthetic oligonucleotide
uucaguagaagcuggcuuu

SEQ ID NO: 1961656 - RNA, 19 nt, Artificial Sequence
  Description of Artificial Sequence: Synthetic oligonucleotide
aaccgauuuuaaugauguc

SEQ ID NO: 1961657 - RNA, 19 nt, Artificial Sequence
  Description of Artificial Sequence: Synthetic oligonucleotide
uugauagccaccacaucaa

SEQ ID NO: 1961658 - RNA, 19 nt, Artificial Sequence
  Description of Artificial Sequence: Synthetic oligonucleotide
ggaaugaaugccuuguuuc

SEQ ID NO: 1961659 - RNA, 19 nt, Artificial Sequence
  Description of Artificial Sequence: Synthetic oligonucleotide
aaguauccguacugcaugu

SEQ ID NO: 1961660 - RNA, 19 nt, Artificial Sequence
  Description of Artificial Sequence: Synthetic oligonucleotide
uucaugguaucaaggacua

SEQ ID NO: 1961661 - RNA, 19 nt, Artificial Sequence
  Description of Artificial Sequence: Synthetic oligonucleotide
caagguuuuaauguuauaa

SEQ ID NO: 1961662 - RNA, 19 nt, Artificial Sequence
  Description of Artificial Sequence: Synthetic oligonucleotide
ucaucuugggucucgcgcu

SEQ ID NO: 1961663 - RNA, 19 nt, Artificial Sequence
  Description of Artificial Sequence: Synthetic oligonucleotide
gagagucacccuuuagagc

SEQ ID NO: 1961664 - RNA, 19 nt, Artificial Sequence
  Description of Artificial Sequence: Synthetic oligonucleotide
uacuuuucguaccuccuuc

SEQ ID NO: 1961665 - RNA, 19 nt, Artificial Sequence
  Description of Artificial Sequence: Synthetic oligonucleotide
cucccguuuaaucaucaag

SEQ ID NO: 1961666 - RNA, 19 nt, Artificial Sequence
  Description of Artificial Sequence: Synthetic oligonucleotide
ucgggaacaagguugcaaa

SEQ ID NO: 1961667 - RNA, 19 nt, Artificial Sequence
  Description of Artificial Sequence: Synthetic oligonucleotide
ucauccugaaguauccgua

SEQ ID NO: 1961668 - RNA, 19 nt, Artificial Sequence
  Description of Artificial Sequence: Synthetic oligonucleotide
cugggauuguccucuuugg

SEQ ID NO: 1961669 - RNA, 19 nt, Artificial Sequence
  Description of Artificial Sequence: Synthetic oligonucleotide
aagagcgcccaguuucuug

SEQ ID NO: 1961670 - RNA, 19 nt, Artificial Sequence
  Description of Artificial Sequence: Synthetic oligonucleotide
ugacuuucugguugcggag

SEQ ID NO: 1961671 - RNA, 19 nt, Artificial Sequence
  Description of Artificial Sequence: Synthetic oligonucleotide
cuuuucgucggcuuccauc

SEQ ID NO: 1961672 - RNA, 19 nt, Artificial Sequence
  Description of Artificial Sequence: Synthetic oligonucleotide
ggaaucuuuugccaacucc

SEQ ID NO: 1961673 - RNA, 19 nt, Artificial Sequence
  Description of Artificial Sequence: Synthetic oligonucleotide
acuagccaacuccuuauca

SEQ ID NO: 1961674 - RNA, 19 nt, Artificial Sequence
  Description of Artificial Sequence: Synthetic oligonucleotide
ugaugucacaugcaacauc

SEQ ID NO: 1961675 - RNA, 19 nt, Artificial Sequence
  Description of Artificial Sequence: Synthetic oligonucleotide
ucugacuuucugguugcgg

SEQ ID NO: 1961676 - RNA, 19 nt, Artificial Sequence
  Description of Artificial Sequence: Synthetic oligonucleotide
aggacuacuuuucguaccu

SEQ ID NO: 1961677 - RNA, 19 nt, Artificial Sequence
  Description of Artificial Sequence: Synthetic oligonucleotide
ugugaucgcaacucggaau

SEQ ID NO: 1961678 - RNA, 19 nt, Artificial Sequence
  Description of Artificial Sequence: Synthetic oligonucleotide
caauguagauccuuuggga

SEQ ID NO: 1961679 - RNA, 19 nt, Artificial Sequence
  Description of Artificial Sequence: Synthetic oligonucleotide
aucaaggacuacuuuucgu

SEQ ID NO: 1961680 - RNA, 19 nt, Artificial Sequence
  Description of Artificial Sequence: Synthetic oligonucleotide
uuccuugcguuuauucaca

SEQ ID NO: 1961681 - RNA, 19 nt, Artificial Sequence
  Description of Artificial Sequence: Synthetic oligonucleotide
uuugccaacucccguuuaa

SEQ ID NO: 1961682 - RNA, 19 nt, Artificial Sequence
  Description of Artificial Sequence: Synthetic oligonucleotide
acaugcaacaucauccuga

SEQ ID NO: 1961683 - RNA, 19 nt, Artificial Sequence
  Description of Artificial Sequence: Synthetic oligonucleotide
cuuccugccucuucguaag

SEQ ID NO: 1961684 - RNA, 19 nt, Artificial Sequence
  Description of Artificial Sequence: Synthetic oligonucleotide
gugaucgcaacucggaauc

SEQ ID NO: 1961685 - RNA, 19 nt, Artificial Sequence
  Description of Artificial Sequence: Synthetic oligonucleotide
ucguaccuccuucaggcca

SEQ ID NO: 1961686 - RNA, 19 nt, Artificial Sequence
  Description of Artificial Sequence: Synthetic oligonucleotide
ugauuggccuucagaaagu

SEQ ID NO: 1961687 - RNA, 19 nt, Artificial Sequence
  Description of Artificial Sequence: Synthetic oligonucleotide
agggaaugguguguacucc

SEQ ID NO: 1961688 - RNA, 19 nt, Artificial Sequence
  Description of Artificial Sequence: Synthetic oligonucleotide
acugaaaggcccaauggca

SEQ ID NO: 1961689 - RNA, 19 nt, Artificial Sequence
  Description of Artificial Sequence: Synthetic oligonucleotide
ggcccaauggcagaaaccg

SEQ ID NO: 1961690 - RNA, 19 nt, Artificial Sequence
  Description of Artificial Sequence: Synthetic oligonucleotide
aucuuucccaacucuguga

SEQ ID NO: 1961691 - RNA, 19 nt, Artificial Sequence
  Description of Artificial Sequence: Synthetic oligonucleotide
cucugugaucgcaacucgg

SEQ ID NO: 1961692 - RNA, 19 nt, Artificial Sequence
  Description of Artificial Sequence: Synthetic oligonucleotide
uuagagccgcuuuggcagg

SEQ ID NO: 1961693 - RNA, 19 nt, Artificial Sequence
  Description of Artificial Sequence: Synthetic oligonucleotide
ccgauuuuaaugaugucac

SEQ ID NO: 1961694 - RNA, 19 nt, Artificial Sequence
  Description of Artificial Sequence: Synthetic oligonucleotide
gagggaaugguguguacuc

SEQ ID NO: 1961695 - RNA, 19 nt, Artificial Sequence
  Description of Artificial Sequence: Synthetic oligonucleotide
accguauuccccugaacca

SEQ ID NO: 1961696 - RNA, 19 nt, Artificial Sequence
  Description of Artificial Sequence: Synthetic oligonucleotide
uggcagaaaccguauuccc

SEQ ID NO: 1961697 - RNA, 19 nt, Artificial Sequence
  Description of Artificial Sequence: Synthetic oligonucleotide
ugggauuguccucuuugga

SEQ ID NO: 1961698 - RNA, 19 nt, Artificial Sequence
  Description of Artificial Sequence: Synthetic oligonucleotide
guaucaaggacuacuuuuc

SEQ ID NO: 1961699 - RNA, 19 nt, Artificial Sequence
  Description of Artificial Sequence: Synthetic oligonucleotide
gaaccgauuuuaaugaugu

SEQ ID NO: 1961700 - RNA, 19 nt, Artificial Sequence
  Description of Artificial Sequence: Synthetic oligonucleotide
cuucaugguaucaaggacu

SEQ ID NO: 1961701 - RNA, 19 nt, Artificial Sequence
  Description of Artificial Sequence: Synthetic oligonucleotide
ucuuaaguuuaaccuccuc

SEQ ID NO: 1961702 - RNA, 19 nt, Artificial Sequence
  Description of Artificial Sequence: Synthetic oligonucleotide
uugggucucgcgcuucugc

SEQ ID NO: 1961703 - RNA, 19 nt, Artificial Sequence
  Description of Artificial Sequence: Synthetic oligonucleotide
uuucuuuagguggaaugaa

SEQ ID NO: 1961704 - RNA, 19 nt, Artificial Sequence
  Description of Artificial Sequence: Synthetic oligonucleotide
gaaugaaugccuuguuucu

SEQ ID NO: 1961705 - RNA, 19 nt, Artificial Sequence
  Description of Artificial Sequence: Synthetic oligonucleotide
uuucucacuagggaaccga

SEQ ID NO: 1961706 - RNA, 19 nt, Artificial Sequence
  Description of Artificial Sequence: Synthetic oligonucleotide
cuuuucguaccuccuucag

SEQ ID NO: 1961707 - RNA, 19 nt, Artificial Sequence
  Description of Artificial Sequence: Synthetic oligonucleotide
aaugaaugccuuguuucuu

SEQ ID NO: 1961708 - RNA, 19 nt, Artificial Sequence
  Description of Artificial Sequence: Synthetic oligonucleotide
cugacuuucugguugcgga

SEQ ID NO: 1961709 - RNA, 19 nt, Artificial Sequence
  Description of Artificial Sequence: Synthetic oligonucleotide
accaauaagccgcugucuu

SEQ ID NO: 1961710 - RNA, 19 nt, Artificial Sequence
  Description of Artificial Sequence: Synthetic oligonucleotide
aagccucucuguauuucgg

SEQ ID NO: 1961711 - RNA, 19 nt, Artificial Sequence
  Description of Artificial Sequence: Synthetic oligonucleotide
cucucuguauuucgggaac

SEQ ID NO: 1961712 - RNA, 19 nt, Artificial Sequence
  Description of Artificial Sequence: Synthetic oligonucleotide
gaggaguucugccucaucu

SEQ ID NO: 1961713 - RNA, 19 nt, Artificial Sequence
  Description of Artificial Sequence: Synthetic oligonucleotide
guauucaccacuagccaac

SEQ ID NO: 1961714 - RNA, 19 nt, Artificial Sequence
  Description of Artificial Sequence: Synthetic oligonucleotide
cucggaaucuuuugccaac

SEQ ID NO: 1961715 - RNA, 19 nt, Artificial Sequence
  Description of Artificial Sequence: Synthetic oligonucleotide
uguccucuuuggagaaaag

SEQ ID NO: 1961716 - RNA, 19 nt, Artificial Sequence
  Description of Artificial Sequence: Synthetic oligonucleotide
guauccguacugcauguuc

SEQ ID NO: 1961717 - RNA, 19 nt, Artificial Sequence
  Description of Artificial Sequence: Synthetic oligonucleotide
gaacaagguugcaaagcug

SEQ ID NO: 1961718 - RNA, 19 nt, Artificial Sequence
  Description of Artificial Sequence: Synthetic oligonucleotide
cuucguaagagcuucugcu

SEQ ID NO: 1961719 - RNA, 19 nt, Artificial Sequence
  Description of Artificial Sequence: Synthetic oligonucleotide
gcaacucggaaucuuuugc

SEQ ID NO: 1961720 - RNA, 19 nt, Artificial Sequence
  Description of Artificial Sequence: Synthetic oligonucleotide
augaaugccuuguuucuuu

SEQ ID NO: 1961721 - RNA, 19 nt, Artificial Sequence
  Description of Artificial Sequence: Synthetic oligonucleotide
ucaguagaagcuggcuuug

SEQ ID NO: 1961722 - RNA, 19 nt, Artificial Sequence
  Description of Artificial Sequence: Synthetic oligonucleotide
aucuuuugccaacucccgu

SEQ ID NO: 1961723 - RNA, 19 nt, Artificial Sequence
  Description of Artificial Sequence: Synthetic oligonucleotide
ccaucuuaaguuuaaccuc

SEQ ID NO: 1961724 - RNA, 19 nt, Artificial Sequence
  Description of Artificial Sequence: Synthetic oligonucleotide
ugguguguacuccuucuua

SEQ ID NO: 1961725 - RNA, 19 nt, Artificial Sequence
  Description of Artificial Sequence: Synthetic oligonucleotide
uuaaccuccucugcuguaa

SEQ ID NO: 1961726 - RNA, 19 nt, Artificial Sequence
  Description of Artificial Sequence: Synthetic oligonucleotide
aaucuuuguuucaguagaa

SEQ ID NO: 1961727 - RNA, 19 nt, Artificial Sequence
  Description of Artificial Sequence: Synthetic oligonucleotide
uaagccgcugucuucuuuu

SEQ ID NO: 1961728 - RNA, 19 nt, Artificial Sequence
  Description of Artificial Sequence: Synthetic oligonucleotide
acuccuuaucaaucugacu

SEQ ID NO: 1961729 - RNA, 19 nt, Artificial Sequence
  Description of Artificial Sequence: Synthetic oligonucleotide
ugaaugccuuguuucuuuc

SEQ ID NO: 1961730 - RNA, 19 nt, Artificial Sequence
  Description of Artificial Sequence: Synthetic oligonucleotide
auuucucacuagggaaccg

SEQ ID NO: 1961731 - RNA, 19 nt, Artificial Sequence
  Description of Artificial Sequence: Synthetic oligonucleotide
agccaacuccuuaucaauc

SEQ ID NO: 1961732 - RNA, 19 nt, Artificial Sequence
  Description of Artificial Sequence: Synthetic oligonucleotide
uuugguuccuugcguuuau

SEQ ID NO: 1961733 - RNA, 19 nt, Artificial Sequence
  Description of Artificial Sequence: Synthetic oligonucleotide
cuuuuaacaaaucucucuu

SEQ ID NO: 1961734 - RNA, 19 nt, Artificial Sequence
  Description of Artificial Sequence: Synthetic oligonucleotide
acccuuuagagccgcuuug

SEQ ID NO: 1961735 - RNA, 19 nt, Artificial Sequence
  Description of Artificial Sequence: Synthetic oligonucleotide
ggaguucugccucaucuug

SEQ ID NO: 1961736 - RNA, 19 nt, Artificial Sequence
  Description of Artificial Sequence: Synthetic oligonucleotide
uucucacuagggaaccgau

SEQ ID NO: 1961737 - RNA, 19 nt, Artificial Sequence
  Description of Artificial Sequence: Synthetic oligonucleotide
augacguaacaguuuguua

SEQ ID NO: 1961738 - RNA, 19 nt, Artificial Sequence
  Description of Artificial Sequence: Synthetic oligonucleotide
agguaaagccucucuguau

SEQ ID NO: 1961739 - RNA, 19 nt, Artificial Sequence
  Description of Artificial Sequence: Synthetic oligonucleotide
agguugcaaagcugcuuuc

SEQ ID NO: 1961740 - RNA, 19 nt, Artificial Sequence
  Description of Artificial Sequence: Synthetic oligonucleotide
caacuccuuaucaaucuga

SEQ ID NO: 1961741 - RNA, 19 nt, Artificial Sequence
  Description of Artificial Sequence: Synthetic oligonucleotide
uucgggaacaagguugcaa

SEQ ID NO: 1961742 - RNA, 19 nt, Artificial Sequence
  Description of Artificial Sequence: Synthetic oligonucleotide
agaaaccguauuccccuga

SEQ ID NO: 1961743 - RNA, 19 nt, Artificial Sequence
  Description of Artificial Sequence: Synthetic oligonucleotide
aggcccaauggcagaaacc

SEQ ID NO: 1961744 - RNA, 19 nt, Artificial Sequence
  Description of Artificial Sequence: Synthetic oligonucleotide
auguuauaaauuggaugga

SEQ ID NO: 1961745 - RNA, 19 nt, Artificial Sequence
  Description of Artificial Sequence: Synthetic oligonucleotide
aggagggaaugguguguac

SEQ ID NO: 1961746 - RNA, 19 nt, Artificial Sequence
  Description of Artificial Sequence: Synthetic oligonucleotide
agugaggaguucugccuca

SEQ ID NO: 1961747 - RNA, 19 nt, Artificial Sequence
  Description of Artificial Sequence: Synthetic oligonucleotide
auccugaaguauccguacu

SEQ ID NO: 1961748 - RNA, 19 nt, Artificial Sequence
  Description of Artificial Sequence: Synthetic oligonucleotide
accacuagccaacuccuua

SEQ ID NO: 1961749 - RNA, 19 nt, Artificial Sequence
  Description of Artificial Sequence: Synthetic oligonucleotide
gguuccuugcguuuauuca

SEQ ID NO: 1961750 - RNA, 19 nt, Artificial Sequence
  Description of Artificial Sequence: Synthetic oligonucleotide
ccuuugggaccaauaagcc

SEQ ID NO: 1961751 - RNA, 19 nt, Artificial Sequence
  Description of Artificial Sequence: Synthetic oligonucleotide
uuuugguuccuugcguuua

SEQ ID NO: 1961752 - RNA, 19 nt, Artificial Sequence
  Description of Artificial Sequence: Synthetic oligonucleotide
uggagaaaagcugguuccu

SEQ ID NO: 1961753 - RNA, 19 nt, Artificial Sequence
  Description of Artificial Sequence: Synthetic oligonucleotide
uuuccuugauagccaccac

SEQ ID NO: 1961754 - RNA, 19 nt, Artificial Sequence
  Description of Artificial Sequence: Synthetic oligonucleotide
ucaagguuuuaauguuaua

SEQ ID NO: 1961755 - RNA, 19 nt, Artificial Sequence
  Description of Artificial Sequence: Synthetic oligonucleotide
ugccaacucccguuuaauc

SEQ ID NO: 1961756 - RNA, 19 nt, Artificial Sequence
  Description of Artificial Sequence: Synthetic oligonucleotide
gccaacucccguuuaauca

SEQ ID NO: 1961757 - RNA, 19 nt, Artificial Sequence
  Description of Artificial Sequence: Synthetic oligonucleotide
gaaaccguauuccccugaa

SEQ ID NO: 1961758 - RNA, 19 nt, Artificial Sequence
  Description of Artificial Sequence: Synthetic oligonucleotide
uucgucggcuuccaucuua

SEQ ID NO: 1961759 - RNA, 19 nt, Artificial Sequence
  Description of Artificial Sequence: Synthetic oligonucleotide
acuacuuuucguaccuccu

SEQ ID NO: 1961760 - RNA, 19 nt, Artificial Sequence
  Description of Artificial Sequence: Synthetic oligonucleotide
uucguaccuccuucaggcc

SEQ ID NO: 1961761 - RNA, 19 nt, Artificial Sequence
  Description of Artificial Sequence: Synthetic oligonucleotide
aguuuguuaggaguuccaa

SEQ ID NO: 1961762 - RNA, 19 nt, Artificial Sequence
  Description of Artificial Sequence: Synthetic oligonucleotide
accaaaggccagcacuccu

SEQ ID NO: 1961763 - RNA, 19 nt, Artificial Sequence
  Description of Artificial Sequence: Synthetic oligonucleotide
guagaagcuggcuuuggcu

SEQ ID NO: 1961764 - RNA, 19 nt, Artificial Sequence
  Description of Artificial Sequence: Synthetic oligonucleotide
uuuaaccuccucugcugua

SEQ ID NO: 1961765 - RNA, 19 nt, Artificial Sequence
  Description of Artificial Sequence: Synthetic oligonucleotide
caugguaucaaggacuacu

SEQ ID NO: 1961766 - RNA, 19 nt, Artificial Sequence
  Description of Artificial Sequence: Synthetic oligonucleotide
gcuuucuuaaccuuuuccu

SEQ ID NO: 1961767 - RNA, 19 nt, Artificial Sequence
  Description of Artificial Sequence: Synthetic oligonucleotide
ugcuguaagagcgcccagu

SEQ ID NO: 1961768 - RNA, 19 nt, Artificial Sequence
  Description of Artificial Sequence: Synthetic oligonucleotide
uccuucagguaaagccucu

SEQ ID NO: 1961769 - RNA, 19 nt, Artificial Sequence
  Description of Artificial Sequence: Synthetic oligonucleotide
cugaaguauccguacugca

SEQ ID NO: 1961770 - RNA, 19 nt, Artificial Sequence
  Description of Artificial Sequence: Synthetic oligonucleotide
ggaaccgauuuuaaugaug

SEQ ID NO: 1961771 - RNA, 19 nt, Artificial Sequence
  Description of Artificial Sequence: Synthetic oligonucleotide
ucggaaucuuuugccaacu

SEQ ID NO: 1961772 - RNA, 19 nt, Artificial Sequence
  Description of Artificial Sequence: Synthetic oligonucleotide
aacucccguuuaaucauca

SEQ ID NO: 1961773 - RNA, 19 nt, Artificial Sequence
  Description of Artificial Sequence: Synthetic oligonucleotide
cugcuggcgagagucaccc

SEQ ID NO: 1961774 - RNA, 19 nt, Artificial Sequence
  Description of Artificial Sequence: Synthetic oligonucleotide
uauucaccacuagccaacu

SEQ ID NO: 1961775 - RNA, 19 nt, Artificial Sequence
  Description of Artificial Sequence: Synthetic oligonucleotide
cgagagucacccuuuagag

SEQ ID NO: 1961776 - RNA, 19 nt, Artificial Sequence
  Description of Artificial Sequence: Synthetic oligonucleotide
cugccgcuucuucugauug

SEQ ID NO: 1961777 - RNA, 19 nt, Artificial Sequence
  Description of Artificial Sequence: Synthetic oligonucleotide
ugggucucgcgcuucugcu

SEQ ID NO: 1961778 - RNA, 19 nt, Artificial Sequence
  Description of Artificial Sequence: Synthetic oligonucleotide
acugcauguucauguucgu

SEQ ID NO: 1961779 - RNA, 19 nt, Artificial Sequence
  Description of Artificial Sequence: Synthetic oligonucleotide
gguaucaaggacuacuuuu

SEQ ID NO: 1961780 - RNA, 19 nt, Artificial Sequence
  Description of Artificial Sequence: Synthetic oligonucleotide
uauuccccugaaccaugac

SEQ ID NO: 1961781 - RNA, 19 nt, Artificial Sequence
  Description of Artificial Sequence: Synthetic oligonucleotide
caacaccacugccuggcag

SEQ ID NO: 1961782 - RNA, 19 nt, Artificial Sequence
  Description of Artificial Sequence: Synthetic oligonucleotide
cagugaggaguucugccuc

SEQ ID NO: 1961783 - RNA, 19 nt, Artificial Sequence
  Description of Artificial Sequence: Synthetic oligonucleotide
ucgucggcuuccaucuuaa

SEQ ID NO: 1961784 - RNA, 19 nt, Artificial Sequence
  Description of Artificial Sequence: Synthetic oligonucleotide
caucaagguuuuaauguua

SEQ ID NO: 1961785 - RNA, 19 nt, Artificial Sequence
  Description of Artificial Sequence: Synthetic oligonucleotide
cacaugcaacaucauccug

SEQ ID NO: 1961786 - RNA, 19 nt, Artificial Sequence
  Description of Artificial Sequence: Synthetic oligonucleotide
aauaagccgcugucuucuu

SEQ ID NO: 1961787 - RNA, 19 nt, Artificial Sequence
  Description of Artificial Sequence: Synthetic oligonucleotide
ggcagaaaccguauucccc

SEQ ID NO: 1961788 - RNA, 19 nt, Artificial Sequence
  Description of Artificial Sequence: Synthetic oligonucleotide
ccuccaagagcccucuggg

SEQ ID NO: 1961789 - RNA, 19 nt, Artificial Sequence
  Description of Artificial Sequence: Synthetic oligonucleotide
gguugcaaagcugcuuucc

SEQ ID NO: 1961790 - RNA, 19 nt, Artificial Sequence
  Description of Artificial Sequence: Synthetic oligonucleotide
acugccuggcaguuccaga

SEQ ID NO: 1961791 - RNA, 19 nt, Artificial Sequence
  Description of Artificial Sequence: Synthetic oligonucleotide
gcuuuggcaggcucauccg

SEQ ID NO: 1961792 - RNA, 19 nt, Artificial Sequence
  Description of Artificial Sequence: Synthetic oligonucleotide
gcgagagucacccuuuaga

SEQ ID NO: 1961793 - RNA, 19 nt, Artificial Sequence
  Description of Artificial Sequence: Synthetic oligonucleotide
acguaacaguuuguuagga

SEQ ID NO: 1961794 - RNA, 19 nt, Artificial Sequence
  Description of Artificial Sequence: Synthetic oligonucleotide
uuuccuccaagagcccucu

SEQ ID NO: 1961795 - RNA, 19 nt, Artificial Sequence
  Description of Artificial Sequence: Synthetic oligonucleotide
guuuguuaggaguuccaau

SEQ ID NO: 1961796 - RNA, 19 nt, Artificial Sequence
  Description of Artificial Sequence: Synthetic oligonucleotide
gguguguacuccuucuuaa

SEQ ID NO: 1961797 - RNA, 19 nt, Artificial Sequence
  Description of Artificial Sequence: Synthetic oligonucleotide
ugcuuggccuugauggcuu

SEQ ID NO: 1961798 - RNA, 19 nt, Artificial Sequence
  Description of Artificial Sequence: Synthetic oligonucleotide
uucccaacucugugaucgc

SEQ ID NO: 1961799 - RNA, 19 nt, Artificial Sequence
  Description of Artificial Sequence: Synthetic oligonucleotide
ucgcaacucggaaucuuuu

SEQ ID NO: 1961800 - RNA, 19 nt, Artificial Sequence
  Description of Artificial Sequence: Synthetic oligonucleotide
gcauguucauguucguuca

SEQ ID NO: 1961801 - RNA, 19 nt, Artificial Sequence
  Description of Artificial Sequence: Synthetic oligonucleotide
ucugguugcggaggaggga

SEQ ID NO: 1961802 - RNA, 19 nt, Artificial Sequence
  Description of Artificial Sequence: Synthetic oligonucleotide
guugcaaagcugcuuuccu

SEQ ID NO: 1961803 - RNA, 19 nt, Artificial Sequence
  Description of Artificial Sequence: Synthetic oligonucleotide
uucugcuggcgagagucac

SEQ ID NO: 1961804 - RNA, 19 nt, Artificial Sequence
  Description of Artificial Sequence: Synthetic oligonucleotide
gaaaggcccaauggcagaa

SEQ ID NO: 1961805 - RNA, 19 nt, Artificial Sequence
  Description of Artificial Sequence: Synthetic oligonucleotide
caagagcccucugggauug

SEQ ID NO: 1961806 - RNA, 19 nt, Artificial Sequence
  Description of Artificial Sequence: Synthetic oligonucleotide
uucuuuucgucggcuucca

SEQ ID NO: 1961807 - RNA, 19 nt, Artificial Sequence
  Description of Artificial Sequence: Synthetic oligonucleotide
caacucccguuuaaucauc

SEQ ID NO: 1961808 - RNA, 19 nt, Artificial Sequence
  Description of Artificial Sequence: Synthetic oligonucleotide
cagaaaccguauuccccug

SEQ ID NO: 1961809 - RNA, 19 nt, Artificial Sequence
  Description of Artificial Sequence: Synthetic oligonucleotide
auccguacugcauguucau

SEQ ID NO: 1961810 - RNA, 19 nt, Artificial Sequence
  Description of Artificial Sequence: Synthetic oligonucleotide
cguaacaguuuguuaggag

SEQ ID NO: 1961811 - RNA, 19 nt, Artificial Sequence
  Description of Artificial Sequence: Synthetic oligonucleotide
ucccaacucugugaucgca

SEQ ID NO: 1961812 - RNA, 19 nt, Artificial Sequence
  Description of Artificial Sequence: Synthetic oligonucleotide
cuuaaccuuuuccuugaua

SEQ ID NO: 1961813 - RNA, 19 nt, Artificial Sequence
  Description of Artificial Sequence: Synthetic oligonucleotide
gccgcugucuucuuuuaac

SEQ ID NO: 1961814 - RNA, 19 nt, Artificial Sequence
  Description of Artificial Sequence: Synthetic oligonucleotide
caguuuguuaggaguucca

SEQ ID NO: 1961815 - RNA, 19 nt, Artificial Sequence
  Description of Artificial Sequence: Synthetic oligonucleotide
uugcggaggagggaauggu

SEQ ID NO: 1961816 - RNA, 19 nt, Artificial Sequence
  Description of Artificial Sequence: Synthetic oligonucleotide
ugaucgcaacucggaaucu

SEQ ID NO: 1961817 - RNA, 19 nt, Artificial Sequence
  Description of Artificial Sequence: Synthetic oligonucleotide
auaagccgcugucuucuuu

SEQ ID NO: 1961818 - RNA, 19 nt, Artificial Sequence
  Description of Artificial Sequence: Synthetic oligonucleotide
augguguguacuccuucuu

SEQ ID NO: 1961819 - RNA, 19 nt, Artificial Sequence
  Description of Artificial Sequence: Synthetic oligonucleotide
agcacuccuucagguaaag

SEQ ID NO: 1961820 - RNA, 19 nt, Artificial Sequence
  Description of Artificial Sequence: Synthetic oligonucleotide
cuuucccaacucugugauc

SEQ ID NO: 1961821 - RNA, 19 nt, Artificial Sequence
  Description of Artificial Sequence: Synthetic oligonucleotide
cacuagccaacuccuuauc

SEQ ID NO: 1961822 - RNA, 19 nt, Artificial Sequence
  Description of Artificial Sequence: Synthetic oligonucleotide
cccugaaccaugacguaac

SEQ ID NO: 1961823 - RNA, 19 nt, Artificial Sequence
  Description of Artificial Sequence: Synthetic oligonucleotide
acuagggaaccgauuuuaa

SEQ ID NO: 1961824 - RNA, 19 nt, Artificial Sequence
  Description of Artificial Sequence: Synthetic oligonucleotide
cguaagagcuucugcuugc

SEQ ID NO: 1961825 - RNA, 19 nt, Artificial Sequence
  Description of Artificial Sequence: Synthetic oligonucleotide
cuuucugguugcggaggag

SEQ ID NO: 1961826 - RNA, 19 nt, Artificial Sequence
  Description of Artificial Sequence: Synthetic oligonucleotide
cagguaaagccucucugua

SEQ ID NO: 1961827 - RNA, 19 nt, Artificial Sequence
  Description of Artificial Sequence: Synthetic oligonucleotide
aagccgcugucuucuuuua

SEQ ID NO: 1961828 - RNA, 19 nt, Artificial Sequence
  Description of Artificial Sequence: Synthetic oligonucleotide
uugccaacucccguuuaau

SEQ ID NO: 1961829 - RNA, 19 nt, Artificial Sequence
  Description of Artificial Sequence: Synthetic oligonucleotide
ucuuuucgucggcuuccau

SEQ ID NO: 1961830 - RNA, 19 nt, Artificial Sequence
  Description of Artificial Sequence: Synthetic oligonucleotide
gguaaagccucucuguauu

SEQ ID NO: 1961831 - RNA, 19 nt, Artificial Sequence
  Description of Artificial Sequence: Synthetic oligonucleotide
acucccguuuaaucaucaa

SEQ ID NO: 1961832 - RNA, 19 nt, Artificial Sequence
  Description of Artificial Sequence: Synthetic oligonucleotide
caccaaaggccagcacucc

SEQ ID NO: 1961833 - RNA, 19 nt, Artificial Sequence
  Description of Artificial Sequence: Synthetic oligonucleotide
ugccuucaauguagauccu

SEQ ID NO: 1961834 - RNA, 19 nt, Artificial Sequence
  Description of Artificial Sequence: Synthetic oligonucleotide
agauccuuugggaccaaua

SEQ ID NO: 1961835 - RNA, 19 nt, Artificial Sequence
  Description of Artificial Sequence: Synthetic oligonucleotide
aucuugggucucgcgcuuc

SEQ ID NO: 1961836 - RNA, 19 nt, Artificial Sequence
  Description of Artificial Sequence: Synthetic oligonucleotide
guacuccuucuuaaugcuc

SEQ ID NO: 1961837 - RNA, 19 nt, Artificial Sequence
  Description of Artificial Sequence: Synthetic oligonucleotide
ccuccucugcuguaagagc

SEQ ID NO: 1961838 - RNA, 19 nt, Artificial Sequence
  Description of Artificial Sequence: Synthetic oligonucleotide
caccacaucaaucuuuguu

SEQ ID NO: 1961839 - RNA, 19 nt, Artificial Sequence
  Description of Artificial Sequence: Synthetic oligonucleotide
ccaacuccuuaucaaucug

SEQ ID NO: 1961840 - RNA, 19 nt, Artificial Sequence
  Description of Artificial Sequence: Synthetic oligonucleotide
cuagggaaccgauuuuaau

SEQ ID NO: 1961841 - RNA, 19 nt, Artificial Sequence
  Description of Artificial Sequence: Synthetic oligonucleotide
cucgcgcuucugcuucugc

SEQ ID NO: 1961842 - RNA, 19 nt, Artificial Sequence
  Description of Artificial Sequence: Synthetic oligonucleotide
cugugaucgcaacucggaa

SEQ ID NO: 1961843 - RNA, 19 nt, Artificial Sequence
  Description of Artificial Sequence: Synthetic oligonucleotide
guauuccccugaaccauga

SEQ ID NO: 1961844 - RNA, 19 nt, Artificial Sequence
  Description of Artificial Sequence: Synthetic oligonucleotide
ggucucgcgcuucugcuuc

SEQ ID NO: 1961845 - RNA, 19 nt, Artificial Sequence
  Description of Artificial Sequence: Synthetic oligonucleotide
cacagcuggcuuuucuuua

SEQ ID NO: 1961846 - RNA, 19 nt, Artificial Sequence
  Description of Artificial Sequence: Synthetic oligonucleotide
uuucgggaacaagguugca

SEQ ID NO: 1961847 - RNA, 19 nt, Artificial Sequence
  Description of Artificial Sequence: Synthetic oligonucleotide
ucacccuuuagagccgcuu

SEQ ID NO: 1961848 - RNA, 19 nt, Artificial Sequence
  Description of Artificial Sequence: Synthetic oligonucleotide
guauuucgggaacaagguu

SEQ ID NO: 1961849 - RNA, 19 nt, Artificial Sequence
  Description of Artificial Sequence: Synthetic oligonucleotide
cacuagggaaccgauuuua

SEQ ID NO: 1961850 - RNA, 19 nt, Artificial Sequence
  Description of Artificial Sequence: Synthetic oligonucleotide
gaccaauaagccgcugucu

SEQ ID NO: 1961851 - RNA, 19 nt, Artificial Sequence
  Description of Artificial Sequence: Synthetic oligonucleotide
aucgcaacucggaaucuuu

SEQ ID NO: 1961852 - RNA, 19 nt, Artificial Sequence
  Description of Artificial Sequence: Synthetic oligonucleotide
uagagccgcuuuggcaggc

SEQ ID NO: 1961853 - RNA, 19 nt, Artificial Sequence
  Description of Artificial Sequence: Synthetic oligonucleotide
guuuaaucaucaagguuuu

SEQ ID NO: 1961854 - RNA, 19 nt, Artificial Sequence
  Description of Artificial Sequence: Synthetic oligonucleotide
caucaaucuuuguuucagu

SEQ ID NO: 1961855 - RNA, 19 nt, Artificial Sequence
  Description of Artificial Sequence: Synthetic oligonucleotide
cccuuuagagccgcuuugg

SEQ ID NO: 1961856 - RNA, 19 nt, Artificial Sequence
  Description of Artificial Sequence: Synthetic oligonucleotide
ggcgagagucacccuuuag

SEQ ID NO: 1961857 - RNA, 19 nt, Artificial Sequence
  Description of Artificial Sequence: Synthetic oligonucleotide
ugccuggcaguuccagauu

SEQ ID NO: 1961858 - RNA, 19 nt, Artificial Sequence
  Description of Artificial Sequence: Synthetic oligonucleotide
cugguugcggaggagggaa

SEQ ID NO: 1961859 - RNA, 19 nt, Artificial Sequence
  Description of Artificial Sequence: Synthetic oligonucleotide
caugacguaacaguuuguu

SEQ ID NO: 1961860 - RNA, 19 nt, Artificial Sequence
  Description of Artificial Sequence: Synthetic oligonucleotide
gugugcaacaccacugccu

SEQ ID NO: 1961861 - RNA, 19 nt, Artificial Sequence
  Description of Artificial Sequence: Synthetic oligonucleotide
ccuuaucaaucugacuuuc

SEQ ID NO: 1961862 - RNA, 19 nt, Artificial Sequence
  Description of Artificial Sequence: Synthetic oligonucleotide
gccucuucguaagagcuuc

SEQ ID NO: 1961863 - RNA, 19 nt, Artificial Sequence
  Description of Artificial Sequence: Synthetic oligonucleotide
ugguugcggaggagggaau

SEQ ID NO: 1961864 - RNA, 19 nt, Artificial Sequence
  Description of Artificial Sequence: Synthetic oligonucleotide
uccccugaaccaugacgua

SEQ ID NO: 1961865 - RNA, 19 nt, Artificial Sequence
  Description of Artificial Sequence: Synthetic oligonucleotide
uggcgagagucacccuuua

SEQ ID NO: 1961866 - RNA, 19 nt, Artificial Sequence
  Description of Artificial Sequence: Synthetic oligonucleotide
agccgcugucuucuuuuaa

SEQ ID NO: 1961867 - RNA, 19 nt, Artificial Sequence
  Description of Artificial Sequence: Synthetic oligonucleotide
gguugcggaggagggaaug

SEQ ID NO: 1961868 - RNA, 19 nt, Artificial Sequence
  Description of Artificial Sequence: Synthetic oligonucleotide
ggccuugauggcuuccauc

SEQ ID NO: 1961869 - RNA, 19 nt, Artificial Sequence
  Description of Artificial Sequence: Synthetic oligonucleotide
cuucacagcuggcuuuucu

SEQ ID NO: 1961870 - RNA, 19 nt, Artificial Sequence
  Description of Artificial Sequence: Synthetic oligonucleotide
uuucgucggcuuccaucuu

SEQ ID NO: 1961871 - RNA, 19 nt, Artificial Sequence
  Description of Artificial Sequence: Synthetic oligonucleotide
cagccaucagggacaguga

SEQ ID NO: 1961872 - RNA, 19 nt, Artificial Sequence
  Description of Artificial Sequence: Synthetic oligonucleotide
aguauccguacugcauguu

SEQ ID NO: 1961873 - RNA, 19 nt, Artificial Sequence
  Description of Artificial Sequence: Synthetic oligonucleotide
cauguucauguucguucaa

SEQ ID NO: 1961874 - RNA, 19 nt, Artificial Sequence
  Description of Artificial Sequence: Synthetic oligonucleotide
uagauccuuugggaccaau

SEQ ID NO: 1961875 - RNA, 19 nt, Artificial Sequence
  Description of Artificial Sequence: Synthetic oligonucleotide
gggaaugguguguacuccu

SEQ ID NO: 1961876 - RNA, 19 nt, Artificial Sequence
  Description of Artificial Sequence: Synthetic oligonucleotide
cgcaacucggaaucuuuug

SEQ ID NO: 1961877 - RNA, 19 nt, Artificial Sequence
  Description of Artificial Sequence: Synthetic oligonucleotide
cugccuggcaguuccagau

SEQ ID NO: 1961878 - RNA, 19 nt, Artificial Sequence
  Description of Artificial Sequence: Synthetic oligonucleotide
guguguacuccuucuuaau

SEQ ID NO: 1961879 - RNA, 19 nt, Artificial Sequence
  Description of Artificial Sequence: Synthetic oligonucleotide
gggaccaauaagccgcugu

SEQ ID NO: 1961880 - RNA, 19 nt, Artificial Sequence
  Description of Artificial Sequence: Synthetic oligonucleotide
guaaagccucucuguauuu

SEQ ID NO: 1961881 - RNA, 19 nt, Artificial Sequence
  Description of Artificial Sequence: Synthetic oligonucleotide
guaagagcgcccaguuucu

SEQ ID NO: 1961882 - RNA, 19 nt, Artificial Sequence
  Description of Artificial Sequence: Synthetic oligonucleotide
uaagagcgcccaguuucuu

SEQ ID NO: 1961883 - RNA, 19 nt, Artificial Sequence
  Description of Artificial Sequence: Synthetic oligonucleotide
ggcaggcucauccgcagaa

SEQ ID NO: 1961884 - RNA, 19 nt, Artificial Sequence
  Description of Artificial Sequence: Synthetic oligonucleotide
ugggaccaauaagccgcug

SEQ ID NO: 1961885 - RNA, 19 nt, Artificial Sequence
  Description of Artificial Sequence: Synthetic oligonucleotide
cuacuuuucguaccuccuu

SEQ ID NO: 1961886 - RNA, 19 nt, Artificial Sequence
  Description of Artificial Sequence: Synthetic oligonucleotide
agccgcuuuggcaggcuca

SEQ ID NO: 1961887 - RNA, 19 nt, Artificial Sequence
  Description of Artificial Sequence: Synthetic oligonucleotide
ccgcugucuucuuuuaaca

SEQ ID NO: 1961888 - RNA, 19 nt, Artificial Sequence
  Description of Artificial Sequence: Synthetic oligonucleotide
ggagggaaugguguguacu

SEQ ID NO: 1961889 - RNA, 19 nt, Artificial Sequence
  Description of Artificial Sequence: Synthetic oligonucleotide
ccucucuguauuucgggaa

SEQ ID NO: 1961890 - RNA, 19 nt, Artificial Sequence
  Description of Artificial Sequence: Synthetic oligonucleotide
cagaguuauccaccugccu

SEQ ID NO: 1961891 - RNA, 19 nt, Artificial Sequence
  Description of Artificial Sequence: Synthetic oligonucleotide
ccuugauagccaccacauc

SEQ ID NO: 1961892 - RNA, 19 nt, Artificial Sequence
  Description of Artificial Sequence: Synthetic oligonucleotide
ugcuggcgagagucacccu

SEQ ID NO: 1961893 - RNA, 19 nt, Artificial Sequence
  Description of Artificial Sequence: Synthetic oligonucleotide
gaucgcaacucggaaucuu

SEQ ID NO: 1961894 - RNA, 19 nt, Artificial Sequence
  Description of Artificial Sequence: Synthetic oligonucleotide
cccguuuaaucaucaaggu

SEQ ID NO: 1961895 - RNA, 19 nt, Artificial Sequence
  Description of Artificial Sequence: Synthetic oligonucleotide
cgauuuuaaugaugucaca

SEQ ID NO: 1961896 - RNA, 19 nt, Artificial Sequence
  Description of Artificial Sequence: Synthetic oligonucleotide
gaguuccaaugccuucaau

SEQ ID NO: 1961897 - RNA, 19 nt, Artificial Sequence
  Description of Artificial Sequence: Synthetic oligonucleotide
gcuguaagagcgcccaguu

SEQ ID NO: 1961898 - RNA, 19 nt, Artificial Sequence
  Description of Artificial Sequence: Synthetic oligonucleotide
ccaacucccguuuaaucau

SEQ ID NO: 1961899 - RNA, 19 nt, Artificial Sequence
  Description of Artificial Sequence: Synthetic oligonucleotide
caaugccuucaauguagau

SEQ ID NO: 1961900 - RNA, 19 nt, Artificial Sequence
  Description of Artificial Sequence: Synthetic oligonucleotide
ccuucaauguagauccuuu

SEQ ID NO: 1961901 - RNA, 19 nt, Artificial Sequence
  Description of Artificial Sequence: Synthetic oligonucleotide
gcacuccuucagguaaagc

SEQ ID NO: 1961902 - RNA, 19 nt, Artificial Sequence
  Description of Artificial Sequence: Synthetic oligonucleotide
caagguugcaaagcugcuu

SEQ ID NO: 1961903 - RNA, 19 nt, Artificial Sequence
  Description of Artificial Sequence: Synthetic oligonucleotide
gcgcccaguuucuuggucu

SEQ ID NO: 1961904 - RNA, 19 nt, Artificial Sequence
  Description of Artificial Sequence: Synthetic oligonucleotide
cacccuuuagagccgcuuu

SEQ ID NO: 1961905 - RNA, 19 nt, Artificial Sequence
  Description of Artificial Sequence: Synthetic oligonucleotide
gggaaccgauuuuaaugau

SEQ ID NO: 1961906 - RNA, 19 nt, Artificial Sequence
  Description of Artificial Sequence: Synthetic oligonucleotide
gcuggcgagagucacccuu

SEQ ID NO: 1961907 - RNA, 19 nt, Artificial Sequence
  Description of Artificial Sequence: Synthetic oligonucleotide
ggacuacuuuucguaccuc

SEQ ID NO: 1961908 - RNA, 19 nt, Artificial Sequence
  Description of Artificial Sequence: Synthetic oligonucleotide
caauggcagaaaccguauu

SEQ ID NO: 1961909 - RNA, 19 nt, Artificial Sequence
  Description of Artificial Sequence: Synthetic oligonucleotide
gccagcacuccuucaggua

SEQ ID NO: 1961910 - RNA, 19 nt, Artificial Sequence
  Description of Artificial Sequence: Synthetic oligonucleotide
cuggcgagagucacccuuu

SEQ ID NO: 1961911 - RNA, 19 nt, Artificial Sequence
  Description of Artificial Sequence: Synthetic oligonucleotide
gcggaggagggaauggugu

SEQ ID NO: 1961912 - RNA, 19 nt, Artificial Sequence
  Description of Artificial Sequence: Synthetic oligonucleotide
gagcgcccaguuucuuggu

SEQ ID NO: 1961913 - RNA, 19 nt, Artificial Sequence
  Description of Artificial Sequence: Synthetic oligonucleotide
cuguaagagcgcccaguuu

SEQ ID NO: 1961914 - RNA, 19 nt, Artificial Sequence
  Description of Artificial Sequence: Synthetic oligonucleotide
cggaaucuuuugccaacuc

SEQ ID NO: 1961915 - RNA, 19 nt, Artificial Sequence
  Description of Artificial Sequence: Synthetic oligonucleotide
ccguuuaaucaucaagguu

SEQ ID NO: 1961916 - RNA, 19 nt, Artificial Sequence
  Description of Artificial Sequence: Synthetic oligonucleotide
ccaauggcagaaaccguau

SEQ ID NO: 1961917 - RNA, 19 nt, Artificial Sequence
  Description of Artificial Sequence: Synthetic oligonucleotide
ggagaaaagcugguuccuu

SEQ ID NO: 1961918 - RNA, 19 nt, Artificial Sequence
  Description of Artificial Sequence: Synthetic oligonucleotide
ccacuagccaacuccuuau

SEQ ID NO: 1961919 - RNA, 19 nt, Artificial Sequence
  Description of Artificial Sequence: Synthetic oligonucleotide
gccuggcaguuccagauuu

SEQ ID NO: 1961920 - RNA, 19 nt, Artificial Sequence
  Description of Artificial Sequence: Synthetic oligonucleotide
guagauccuuugggaccaa

SEQ ID NO: 1961921 - RNA, 19 nt, Artificial Sequence
  Description of Artificial Sequence: Synthetic oligonucleotide
cugcauguucauguucguu

SEQ ID NO: 1961922 - RNA, 19 nt, Artificial Sequence
  Description of Artificial Sequence: Synthetic oligonucleotide
gucucgcgcuucugcuucu

SEQ ID NO: 1961923 - RNA, 19 nt, Artificial Sequence
  Description of Artificial Sequence: Synthetic oligonucleotide
ccccugaaccaugacguaa

SEQ ID NO: 1961924 - RNA, 19 nt, Artificial Sequence
  Description of Artificial Sequence: Synthetic oligonucleotide
caucuugggucucgcgcuu

SEQ ID NO: 1961925 - RNA, 19 nt, Artificial Sequence
  Description of Artificial Sequence: Synthetic oligonucleotide
cgucggcuuccaucuuaag

SEQ ID NO: 1961926 - RNA, 19 nt, Artificial Sequence
  Description of Artificial Sequence: Synthetic oligonucleotide
gccuucaauguagauccuu

SEQ ID NO: 1961927 - RNA, 19 nt, Artificial Sequence
  Description of Artificial Sequence: Synthetic oligonucleotide
caccacuagccaacuccuu

SEQ ID NO: 1961928 - RNA, 19 nt, Artificial Sequence
  Description of Artificial Sequence: Synthetic oligonucleotide
ccaugacguaacaguuugu

SEQ ID NO: 1961929 - RNA, 19 nt, Artificial Sequence
  Description of Artificial Sequence: Synthetic oligonucleotide
cucugggauuguccucuuu

SEQ ID NO: 1961930 - RNA, 19 nt, Artificial Sequence
  Description of Artificial Sequence: Synthetic oligonucleotide
ccguauuccccugaaccau

SEQ ID NO: 1961931 - RNA, 19 nt, Artificial Sequence
  Description of Artificial Sequence: Synthetic oligonucleotide
gggucucgcgcuucugcuu

SEQ ID NO: 1961932 - RNA, 19 nt, Artificial Sequence
  Description of Artificial Sequence: Synthetic oligonucleotide
gccgcuuuggcaggcucau

SEQ ID NO: 1961933 - RNA, 19 nt, Artificial Sequence
  Description of Artificial Sequence: Synthetic oligonucleotide
ccgcuuuggcaggcucauc

SEQ ID NO: 1961934 - RNA, 19 nt, Artificial Sequence
  Description of Artificial Sequence: Synthetic oligonucleotide
cgcccaguuucuuggucuu

SEQ ID NO: 1961935 - RNA, 19 nt, Artificial Sequence
  Description of Artificial Sequence: Synthetic oligonucleotide
ugaaaaguauuccacacgg

SEQ ID NO: 1961936 - RNA, 19 nt, Artificial Sequence
  Description of Artificial Sequence: Synthetic oligonucleotide
uuuauuuauauauauauau

SEQ ID NO: 1961937 - RNA, 19 nt, Artificial Sequence
  Description of Artificial Sequence: Synthetic oligonucleotide
uuuauauauauauauauau

SEQ ID NO: 1961938 - RNA, 19 nt, Artificial Sequence
  Description of Artificial Sequence: Synthetic oligonucleotide
aauauccccaguuucacuc

SEQ ID NO: 1961939 - RNA, 19 nt, Artificial Sequence
  Description of Artificial Sequence: Synthetic oligonucleotide
uauauauauauauauuucu

SEQ ID NO: 1961940 - RNA, 19 nt, Artificial Sequence
  Description of Artificial Sequence: Synthetic oligonucleotide
uauauauauauauauauuu

SEQ ID NO: 1961941 - RNA, 19 nt, Artificial Sequence
  Description of Artificial Sequence: Synthetic oligonucleotide
auauauauauauuucucuc

SEQ ID NO: 1961942 - RNA, 19 nt, Artificial Sequence
  Description of Artificial Sequence: Synthetic oligonucleotide
uauuuauauauauauauau

SEQ ID NO: 1961943 - RNA, 19 nt, Artificial Sequence
  Description of Artificial Sequence: Synthetic oligonucleotide
uucuguugcauacacauag

SEQ ID NO: 1961944 - RNA, 19 nt, Artificial Sequence
  Description of Artificial Sequence: Synthetic oligonucleotide
aaaaguauuccacacggca

SEQ ID NO: 1961945 - RNA, 19 nt, Artificial Sequence
  Description of Artificial Sequence: Synthetic oligonucleotide
aaugucaucacuggcacac

SEQ ID NO: 1961946 - RNA, 19 nt, Artificial Sequence
  Description of Artificial Sequence: Synthetic oligonucleotide
uauagaguucuccuguucg

SEQ ID NO: 1961947 - RNA, 19 nt, Artificial Sequence
  Description of Artificial Sequence: Synthetic oligonucleotide
uauauauauauauuucucu

SEQ ID NO: 1961948 - RNA, 19 nt, Artificial Sequence
  Description of Artificial Sequence: Synthetic oligonucleotide
uggauggcuaugaagaggg

SEQ ID NO: 1961949 - RNA, 19 nt, Artificial Sequence
  Description of Artificial Sequence: Synthetic oligonucleotide
auauauauauauauauuuc

SEQ ID NO: 1961950 - RNA, 19 nt, Artificial Sequence
  Description of Artificial Sequence: Synthetic oligonucleotide
uccaacaucagccauggcu

SEQ ID NO: 1961951 - RNA, 19 nt, Artificial Sequence
  Description of Artificial Sequence: Synthetic oligonucleotide
uuuucugaaaaguauucca

SEQ ID NO: 1961952 - RNA, 19 nt, Artificial Sequence
  Description of Artificial Sequence: Synthetic oligonucleotide
aguaaccagguucuggacc

SEQ ID NO: 1961953 - RNA, 19 nt, Artificial Sequence
  Description of Artificial Sequence: Synthetic oligonucleotide
cuucauucaauucuguggc

SEQ ID NO: 1961954 - RNA, 19 nt, Artificial Sequence
  Description of Artificial Sequence: Synthetic oligonucleotide
uacacauagguauuccagg

SEQ ID NO: 1961955 - RNA, 19 nt, Artificial Sequence
  Description of Artificial Sequence: Synthetic oligonucleotide
uuauuuauauauauauaua

SEQ ID NO: 1961956 - RNA, 19 nt, Artificial Sequence
  Description of Artificial Sequence: Synthetic oligonucleotide
uuauauauauauauauauu

SEQ ID NO: 1961957 - RNA, 19 nt, Artificial Sequence
  Description of Artificial Sequence: Synthetic oligonucleotide
auauauauauauauuucuc

SEQ ID NO: 1961958 - RNA, 19 nt, Artificial Sequence
  Description of Artificial Sequence: Synthetic oligonucleotide
uuuuauuuauauauauaua

SEQ ID NO: 1961959 - RNA, 19 nt, Artificial Sequence
  Description of Artificial Sequence: Synthetic oligonucleotide
acauagguauuccaggguc

SEQ ID NO: 1961960 - RNA, 19 nt, Artificial Sequence
  Description of Artificial Sequence: Synthetic oligonucleotide
uccauauuuaccccagccc

SEQ ID NO: 1961961 - RNA, 19 nt, Artificial Sequence
  Description of Artificial Sequence: Synthetic oligonucleotide
ugcagugcuuccaacagcc

SEQ ID NO: 1961962 - RNA, 19 nt, Artificial Sequence
  Description of Artificial Sequence: Synthetic oligonucleotide
ucggcaaaugucaucacug

SEQ ID NO: 1961963 - RNA, 19 nt, Artificial Sequence
  Description of Artificial Sequence: Synthetic oligonucleotide
uccacagguuaccagggcg

SEQ ID NO: 1961964 - RNA, 19 nt, Artificial Sequence
  Description of Artificial Sequence: Synthetic oligonucleotide
aucacuggcacacaguggu

SEQ ID NO: 1961965 - RNA, 19 nt, Artificial Sequence
  Description of Artificial Sequence: Synthetic oligonucleotide
ugucccaguaaccagguuc

SEQ ID NO: 1961966 - RNA, 19 nt, Artificial Sequence
  Description of Artificial Sequence: Synthetic oligonucleotide
ugcccaaagccacagaaac

SEQ ID NO: 1961967 - RNA, 19 nt, Artificial Sequence
  Description of Artificial Sequence: Synthetic oligonucleotide
uucacagaaccugagagcu

SEQ ID NO: 1961968 - RNA, 19 nt, Artificial Sequence
  Description of Artificial Sequence: Synthetic oligonucleotide
caagcuguccauauuuacc

SEQ ID NO: 1961969 - RNA, 19 nt, Artificial Sequence
  Description of Artificial Sequence: Synthetic oligonucleotide
cugaaaaguauuccacacg

SEQ ID NO: 1961970 - RNA, 19 nt, Artificial Sequence
  Description of Artificial Sequence: Synthetic oligonucleotide
cuaugaagagggcaggagc

SEQ ID NO: 1961971 - RNA, 19 nt, Artificial Sequence
  Description of Artificial Sequence: Synthetic oligonucleotide
accagggcgguguagcucc

SEQ ID NO: 1961972 - RNA, 19 nt, Artificial Sequence
  Description of Artificial Sequence: Synthetic oligonucleotide
ucgcaaagcagcaacacau

SEQ ID NO: 1961973 - RNA, 19 nt, Artificial Sequence
  Description of Artificial Sequence: Synthetic oligonucleotide
ucuuuaugggcagagccag

SEQ ID NO: 1961974 - RNA, 19 nt, Artificial Sequence
  Description of Artificial Sequence: Synthetic oligonucleotide
guaaccagguucuggaccc

SEQ ID NO: 1961975 - RNA, 19 nt, Artificial Sequence
  Description of Artificial Sequence: Synthetic oligonucleotide
agaacaccuggccagcuuc

SEQ ID NO: 1961976 - RNA, 19 nt, Artificial Sequence
  Description of Artificial Sequence: Synthetic oligonucleotide
uuguaugugcagcaccacc

SEQ ID NO: 1961977 - RNA, 19 nt, Artificial Sequence
  Description of Artificial Sequence: Synthetic oligonucleotide
uguucgugucaccacagcu

SEQ ID NO: 1961978 - RNA, 19 nt, Artificial Sequence
  Description of Artificial Sequence: Synthetic oligonucleotide
ugcgggguuacauaggcac

SEQ ID NO: 1961979 - RNA, 19 nt, Artificial Sequence
  Description of Artificial Sequence: Synthetic oligonucleotide
uguugcauacacauaggua

SEQ ID NO: 1961980 - RNA, 19 nt, Artificial Sequence
  Description of Artificial Sequence: Synthetic oligonucleotide
aaauauccccaguuucacu

SEQ ID NO: 1961981 - RNA, 19 nt, Artificial Sequence
  Description of Artificial Sequence: Synthetic oligonucleotide
auaaauauccccaguuuca

SEQ ID NO: 1961982 - RNA, 19 nt, Artificial Sequence
  Description of Artificial Sequence: Synthetic oligonucleotide
cauagguauuccagggucc

SEQ ID NO: 1961983 - RNA, 19 nt, Artificial Sequence
  Description of Artificial Sequence: Synthetic oligonucleotide
caagaguccuucugaagcc

SEQ ID NO: 1961984 - RNA, 19 nt, Artificial Sequence
  Description of Artificial Sequence: Synthetic oligonucleotide
ugcagagcucuuuaugggc

SEQ ID NO: 1961985 - RNA, 19 nt, Artificial Sequence
  Description of Artificial Sequence: Synthetic oligonucleotide
uucgugucaccacagcugu

SEQ ID NO: 1961986 - RNA, 19 nt, Artificial Sequence
  Description of Artificial Sequence: Synthetic oligonucleotide
uucgcaaagcagcaacaca

SEQ ID NO: 1961987 - RNA, 19 nt, Artificial Sequence
  Description of Artificial Sequence: Synthetic oligonucleotide
auacacauagguauuccag

SEQ ID NO: 1961988 - RNA, 19 nt, Artificial Sequence
  Description of Artificial Sequence: Synthetic oligonucleotide
auuuauauauauauauaua

SEQ ID NO: 1961989 - RNA, 19 nt, Artificial Sequence
  Description of Artificial Sequence: Synthetic oligonucleotide
guucacagaaccugagagc

SEQ ID NO: 1961990 - RNA, 19 nt, Artificial Sequence
  Description of Artificial Sequence: Synthetic oligonucleotide
uugacugcaucugagccug

SEQ ID NO: 1961991 - RNA, 19 nt, Artificial Sequence
  Description of Artificial Sequence: Synthetic oligonucleotide
uuacauaggcacuggcaca

SEQ ID NO: 1961992 - RNA, 19 nt, Artificial Sequence
  Description of Artificial Sequence: Synthetic oligonucleotide
ugguucaggacugugcacc

SEQ ID NO: 1961993 - RNA, 19 nt, Artificial Sequence
  Description of Artificial Sequence: Synthetic oligonucleotide
caucuuguccucugcagag

SEQ ID NO: 1961994 - RNA, 19 nt, Artificial Sequence
  Description of Artificial Sequence: Synthetic oligonucleotide
guccauauuuaccccagcc

SEQ ID NO: 1961995 - RNA, 19 nt, Artificial Sequence
  Description of Artificial Sequence: Synthetic oligonucleotide
auccaguagagcugggaag

SEQ ID NO: 1961996 - RNA, 19 nt, Artificial Sequence
  Description of Artificial Sequence: Synthetic oligonucleotide
cugcaucugagccuguggg

SEQ ID NO: 1961997 - RNA, 19 nt, Artificial Sequence
  Description of Artificial Sequence: Synthetic oligonucleotide
uuuaugggcagagccagcu

SEQ ID NO: 1961998 - RNA, 19 nt, Artificial Sequence
  Description of Artificial Sequence: Synthetic oligonucleotide
ugugucgggauccgcagcu

SEQ ID NO: 1961999 - RNA, 19 nt, Artificial Sequence
  Description of Artificial Sequence: Synthetic oligonucleotide
ugucgggauccgcagcugg

SEQ ID NO: 1962000 - RNA, 19 nt, Artificial Sequence
  Description of Artificial Sequence: Synthetic oligonucleotide
ccauauuuaccccagcccc

SEQ ID NO: 1962001 - RNA, 19 nt, Artificial Sequence
  Description of Artificial Sequence: Synthetic oligonucleotide
accgaauggcacccauucc

SEQ ID NO: 1962002 - RNA, 19 nt, Artificial Sequence
  Description of Artificial Sequence: Synthetic oligonucleotide
auggcuaugaagagggcag

SEQ ID NO: 1962003 - RNA, 19 nt, Artificial Sequence
  Description of Artificial Sequence: Synthetic oligonucleotide
ugugugucgggauccgcag

SEQ ID NO: 1962004 - RNA, 19 nt, Artificial Sequence
  Description of Artificial Sequence: Synthetic oligonucleotide
agcagcaacacaugcucug

SEQ ID NO: 1962005 - RNA, 19 nt, Artificial Sequence
  Description of Artificial Sequence: Synthetic oligonucleotide
uccuguucgugucaccaca

SEQ ID NO: 1962006 - RNA, 19 nt, Artificial Sequence
  Description of Artificial Sequence: Synthetic oligonucleotide
cugcagagcucuuuauggg

SEQ ID NO: 1962007 - RNA, 19 nt, Artificial Sequence
  Description of Artificial Sequence: Synthetic oligonucleotide
gaggcuggcagaagggugg

SEQ ID NO: 1962008 - RNA, 19 nt, Artificial Sequence
  Description of Artificial Sequence: Synthetic oligonucleotide
cacacggcagggucgaucc

SEQ ID NO: 1962009 - RNA, 19 nt, Artificial Sequence
  Description of Artificial Sequence: Synthetic oligonucleotide
auggcacccauucccagag

SEQ ID NO: 1962010 - RNA, 19 nt, Artificial Sequence
  Description of Artificial Sequence: Synthetic oligonucleotide
uccagccccagauauaaau

SEQ ID NO: 1962011 - RNA, 19 nt, Artificial Sequence
  Description of Artificial Sequence: Synthetic oligonucleotide
cauaggcacuggcacaagg

SEQ ID NO: 1962012 - RNA, 19 nt, Artificial Sequence
  Description of Artificial Sequence: Synthetic oligonucleotide
gcucuuuaugggcagagcc

SEQ ID NO: 1962013 - RNA, 19 nt, Artificial Sequence
  Description of Artificial Sequence: Synthetic oligonucleotide
gaaaaguauuccacacggc

SEQ ID NO: 1962014 - RNA, 19 nt, Artificial Sequence
  Description of Artificial Sequence: Synthetic oligonucleotide
auuuaccccagccccaggu

SEQ ID NO: 1962015 - RNA, 19 nt, Artificial Sequence
  Description of Artificial Sequence: Synthetic oligonucleotide
uucugaagcccacgcgucc

SEQ ID NO: 1962016 - RNA, 19 nt, Artificial Sequence
  Description of Artificial Sequence: Synthetic oligonucleotide
gauggcuaugaagagggca

SEQ ID NO: 1962017 - RNA, 19 nt, Artificial Sequence
  Description of Artificial Sequence: Synthetic oligonucleotide
ucaauucuguggcuucccu

SEQ ID NO: 1962018 - RNA, 19 nt, Artificial Sequence
  Description of Artificial Sequence: Synthetic oligonucleotide
gauccaguagagcugggaa

SEQ ID NO: 1962019 - RNA, 19 nt, Artificial Sequence
  Description of Artificial Sequence: Synthetic oligonucleotide
cccagauauaaauaucccc

SEQ ID NO: 1962020 - RNA, 19 nt, Artificial Sequence
  Description of Artificial Sequence: Synthetic oligonucleotide
uugagggaaucuucauuca

SEQ ID NO: 1962021 - RNA, 19 nt, Artificial Sequence
  Description of Artificial Sequence: Synthetic oligonucleotide
ccaacaucagccauggcug

SEQ ID NO: 1962022 - RNA, 19 nt, Artificial Sequence
  Description of Artificial Sequence: Synthetic oligonucleotide
accccaggagaacaccugg

SEQ ID NO: 1962023 - RNA, 19 nt, Artificial Sequence
  Description of Artificial Sequence: Synthetic oligonucleotide
agaguucuccuguucgugu

SEQ ID NO: 1962024 - RNA, 19 nt, Artificial Sequence
  Description of Artificial Sequence: Synthetic oligonucleotide
gagcuguucacagaaccug

SEQ ID NO: 1962025 - RNA, 19 nt, Artificial Sequence
  Description of Artificial Sequence: Synthetic oligonucleotide
agggaaucuucauucaauu

SEQ ID NO: 1962026 - RNA, 19 nt, Artificial Sequence
  Description of Artificial Sequence: Synthetic oligonucleotide
aacaccuggccagcuucgc

SEQ ID NO: 1962027 - RNA, 19 nt, Artificial Sequence
  Description of Artificial Sequence: Synthetic oligonucleotide
uggcugcgggguuacauag

SEQ ID NO: 1962028 - RNA, 19 nt, Artificial Sequence
  Description of Artificial Sequence: Synthetic oligonucleotide
guuaccagggcgguguagc

SEQ ID NO: 1962029 - RNA, 19 nt, Artificial Sequence
  Description of Artificial Sequence: Synthetic oligonucleotide
uguggcuucccuucucacu

SEQ ID NO: 1962030 - RNA, 19 nt, Artificial Sequence
  Description of Artificial Sequence: Synthetic oligonucleotide
acaggugacagcccuuacu

SEQ ID NO: 1962031 - RNA, 19 nt, Artificial Sequence
  Description of Artificial Sequence: Synthetic oligonucleotide
cauacacauagguauucca

SEQ ID NO: 1962032 - RNA, 19 nt, Artificial Sequence
  Description of Artificial Sequence: Synthetic oligonucleotide
uguccaggccugcagcucu

SEQ ID NO: 1962033 - RNA, 19 nt, Artificial Sequence
  Description of Artificial Sequence: Synthetic oligonucleotide
agaaccugagagcuccacu

SEQ ID NO: 1962034 - RNA, 19 nt, Artificial Sequence
  Description of Artificial Sequence: Synthetic oligonucleotide
aguauuccacacggcaggg

SEQ ID NO: 1962035 - RNA, 19 nt, Artificial Sequence
  Description of Artificial Sequence: Synthetic oligonucleotide
caucacuggcacacagugg

SEQ ID NO: 1962036 - RNA, 19 nt, Artificial Sequence
  Description of Artificial Sequence: Synthetic oligonucleotide
ugugcaccgaauggcaccc

SEQ ID NO: 1962037 - RNA, 19 nt, Artificial Sequence
  Description of Artificial Sequence: Synthetic oligonucleotide
cugugcaccgaauggcacc

SEQ ID NO: 1962038 - RNA, 19 nt, Artificial Sequence
  Description of Artificial Sequence: Synthetic oligonucleotide
ggucgauccaagcugcugc

SEQ ID NO: 1962039 - RNA, 19 nt, Artificial Sequence
  Description of Artificial Sequence: Synthetic oligonucleotide
uguccauauuuaccccagc

SEQ ID NO: 1962040 - RNA, 19 nt, Artificial Sequence
  Description of Artificial Sequence: Synthetic oligonucleotide
gaauggcacccauucccag

SEQ ID NO: 1962041 - RNA, 19 nt, Artificial Sequence
  Description of Artificial Sequence: Synthetic oligonucleotide
guucgugucaccacagcug

SEQ ID NO: 1962042 - RNA, 19 nt, Artificial Sequence
  Description of Artificial Sequence: Synthetic oligonucleotide
auccaagcugcugcugucc

SEQ ID NO: 1962043 - RNA, 19 nt, Artificial Sequence
  Description of Artificial Sequence: Synthetic oligonucleotide
aguagagcugggaagggcu

SEQ ID NO: 1962044 - RNA, 19 nt, Artificial Sequence
  Description of Artificial Sequence: Synthetic oligonucleotide
acucacucggcaaauguca

SEQ ID NO: 1962045 - RNA, 19 nt, Artificial Sequence
  Description of Artificial Sequence: Synthetic oligonucleotide
agggcgguguagcuccagc

SEQ ID NO: 1962046 - RNA, 19 nt, Artificial Sequence
  Description of Artificial Sequence: Synthetic oligonucleotide
cuccacucggccuccacag

SEQ ID NO: 1962047 - RNA, 19 nt, Artificial Sequence
  Description of Artificial Sequence: Synthetic oligonucleotide
ucauucaauucuguggcuu

SEQ ID NO: 1962048 - RNA, 19 nt, Artificial Sequence
  Description of Artificial Sequence: Synthetic oligonucleotide
caccgaauggcacccauuc

SEQ ID NO: 1962049 - RNA, 19 nt, Artificial Sequence
  Description of Artificial Sequence: Synthetic oligonucleotide
cucuuuaugggcagagcca

SEQ ID NO: 1962050 - RNA, 19 nt, Artificial Sequence
  Description of Artificial Sequence: Synthetic oligonucleotide
uucaauucuguggcuuccc

SEQ ID NO: 1962051 - RNA, 19 nt, Artificial Sequence
  Description of Artificial Sequence: Synthetic oligonucleotide
caggccugcagcucugugc

SEQ ID NO: 1962052 - RNA, 19 nt, Artificial Sequence
  Description of Artificial Sequence: Synthetic oligonucleotide
gggaagauccaguagagcu

SEQ ID NO: 1962053 - RNA, 19 nt, Artificial Sequence
  Description of Artificial Sequence: Synthetic oligonucleotide
ugccaucuuguccucugca

SEQ ID NO: 1962054 - RNA, 19 nt, Artificial Sequence
  Description of Artificial Sequence: Synthetic oligonucleotide
uuaccccagccccagguau

SEQ ID NO: 1962055 - RNA, 19 nt, Artificial Sequence
  Description of Artificial Sequence: Synthetic oligonucleotide
cauauuuaccccagcccca

SEQ ID NO: 1962056 - RNA, 19 nt, Artificial Sequence
  Description of Artificial Sequence: Synthetic oligonucleotide
ugcauacacauagguauuc

SEQ ID NO: 1962057 - RNA, 19 nt, Artificial Sequence
  Description of Artificial Sequence: Synthetic oligonucleotide
uccgcagcuggccuugacu

SEQ ID NO: 1962058 - RNA, 19 nt, Artificial Sequence
  Description of Artificial Sequence: Synthetic oligonucleotide
uugcccaaagccacagaaa

SEQ ID NO: 1962059 - RNA, 19 nt, Artificial Sequence
  Description of Artificial Sequence: Synthetic oligonucleotide
ugagagcuccacucggccu

SEQ ID NO: 1962060 - RNA, 19 nt, Artificial Sequence
  Description of Artificial Sequence: Synthetic oligonucleotide
ccgaauggcacccauuccc

SEQ ID NO: 1962061 - RNA, 19 nt, Artificial Sequence
  Description of Artificial Sequence: Synthetic oligonucleotide
gguauuccaggguccacag

SEQ ID NO: 1962062 - RNA, 19 nt, Artificial Sequence
  Description of Artificial Sequence: Synthetic oligonucleotide
ccuugacugcaucugagcc

SEQ ID NO: 1962063 - RNA, 19 nt, Artificial Sequence
  Description of Artificial Sequence: Synthetic oligonucleotide
ggguucauuuucuccuugg

SEQ ID NO: 1962064 - RNA, 19 nt, Artificial Sequence
  Description of Artificial Sequence: Synthetic oligonucleotide
auauccccaguuucacuca

SEQ ID NO: 1962065 - RNA, 19 nt, Artificial Sequence
  Description of Artificial Sequence: Synthetic oligonucleotide
ggcaaaugucaucacuggc

SEQ ID NO: 1962066 - RNA, 19 nt, Artificial Sequence
  Description of Artificial Sequence: Synthetic oligonucleotide
gccccagauauaaauaucc

SEQ ID NO: 1962067 - RNA, 19 nt, Artificial Sequence
  Description of Artificial Sequence: Synthetic oligonucleotide
cuccuuugagggaaucuuc

SEQ ID NO: 1962068 - RNA, 19 nt, Artificial Sequence
  Description of Artificial Sequence: Synthetic oligonucleotide
cuucugaagcccacgcguc

SEQ ID NO: 1962069 - RNA, 19 nt, Artificial Sequence
  Description of Artificial Sequence: Synthetic oligonucleotide
aagggcuggauggcuauga

SEQ ID NO: 1962070 - RNA, 19 nt, Artificial Sequence
  Description of Artificial Sequence: Synthetic oligonucleotide
agcugcccugacucauucc

SEQ ID NO: 1962071 - RNA, 19 nt, Artificial Sequence
  Description of Artificial Sequence: Synthetic oligonucleotide
ugucaccacagcugugugu

SEQ ID NO: 1962072 - RNA, 19 nt, Artificial Sequence
  Description of Artificial Sequence: Synthetic oligonucleotide
uggcuaugaagagggcagg

SEQ ID NO: 1962073 - RNA, 19 nt, Artificial Sequence
  Description of Artificial Sequence: Synthetic oligonucleotide
gaacaccuggccagcuucg

SEQ ID NO: 1962074 - RNA, 19 nt, Artificial Sequence
  Description of Artificial Sequence: Synthetic oligonucleotide
ucucucuuucuguugcaua

SEQ ID NO: 1962075 - RNA, 19 nt, Artificial Sequence
  Description of Artificial Sequence: Synthetic oligonucleotide
cuucgcaaagcagcaacac

SEQ ID NO: 1962076 - RNA, 19 nt, Artificial Sequence
  Description of Artificial Sequence: Synthetic oligonucleotide
gcaaaugucaucacuggca

SEQ ID NO: 1962077 - RNA, 19 nt, Artificial Sequence
  Description of Artificial Sequence: Synthetic oligonucleotide
cuuuaugggcagagccagc

SEQ ID NO: 1962078 - RNA, 19 nt, Artificial Sequence
  Description of Artificial Sequence: Synthetic oligonucleotide
aguucuccuguucguguca

SEQ ID NO: 1962079 - RNA, 19 nt, Artificial Sequence
  Description of Artificial Sequence: Synthetic oligonucleotide
gcagggucgauccaagcug

SEQ ID NO: 1962080 - RNA, 19 nt, Artificial Sequence
  Description of Artificial Sequence: Synthetic oligonucleotide
guucuggacccagaggggc

SEQ ID NO: 1962081 - RNA, 19 nt, Artificial Sequence
  Description of Artificial Sequence: Synthetic oligonucleotide
gcaacacaugcucugcacc

SEQ ID NO: 1962082 - RNA, 19 nt, Artificial Sequence
  Description of Artificial Sequence: Synthetic oligonucleotide
auuccacacggcagggucg

SEQ ID NO: 1962083 - RNA, 19 nt, Artificial Sequence
  Description of Artificial Sequence: Synthetic oligonucleotide
acugugcaccgaauggcac

SEQ ID NO: 1962084 - RNA, 19 nt, Artificial Sequence
  Description of Artificial Sequence: Synthetic oligonucleotide
gaguucuccuguucguguc

SEQ ID NO: 1962085 - RNA, 19 nt, Artificial Sequence
  Description of Artificial Sequence: Synthetic oligonucleotide
uucuggacccagaggggcu

SEQ ID NO: 1962086 - RNA, 19 nt, Artificial Sequence
  Description of Artificial Sequence: Synthetic oligonucleotide
ugggaagauccaguagagc

SEQ ID NO: 1962087 - RNA, 19 nt, Artificial Sequence
  Description of Artificial Sequence: Synthetic oligonucleotide
uuuaccccagccccaggua

SEQ ID NO: 1962088 - RNA, 19 nt, Artificial Sequence
  Description of Artificial Sequence: Synthetic oligonucleotide
cugugggaagauccaguag

SEQ ID NO: 1962089 - RNA, 19 nt, Artificial Sequence
  Description of Artificial Sequence: Synthetic oligonucleotide
ccugacucauuccagcccc

SEQ ID NO: 1962090 - RNA, 19 nt, Artificial Sequence
  Description of Artificial Sequence: Synthetic oligonucleotide
agcccuuacuucgaguugu

SEQ ID NO: 1962091 - RNA, 19 nt, Artificial Sequence
  Description of Artificial Sequence: Synthetic oligonucleotide
gguucaggacugugcaccg

SEQ ID NO: 1962092 - RNA, 19 nt, Artificial Sequence
  Description of Artificial Sequence: Synthetic oligonucleotide
ggcacccauucccagagcc

SEQ ID NO: 1962093 - RNA, 19 nt, Artificial Sequence
  Description of Artificial Sequence: Synthetic oligonucleotide
cagagcucuuuaugggcag

SEQ ID NO: 1962094 - RNA, 19 nt, Artificial Sequence
  Description of Artificial Sequence: Synthetic oligonucleotide
caucugagccugugggaag

SEQ ID NO: 1962095 - RNA, 19 nt, Artificial Sequence
  Description of Artificial Sequence: Synthetic oligonucleotide
aguccuucugaagcccacg

SEQ ID NO: 1962096 - RNA, 19 nt, Artificial Sequence
  Description of Artificial Sequence: Synthetic oligonucleotide
agccccagauauaaauauc

SEQ ID NO: 1962097 - RNA, 19 nt, Artificial Sequence
  Description of Artificial Sequence: Synthetic oligonucleotide
agcggcagggugcccgccc

SEQ ID NO: 1962098 - RNA, 19 nt, Artificial Sequence
  Description of Artificial Sequence: Synthetic oligonucleotide
aggguccacaggugacagc

SEQ ID NO: 1962099 - RNA, 19 nt, Artificial Sequence
  Description of Artificial Sequence: Synthetic oligonucleotide
ucagccauccgcaggccuu

SEQ ID NO: 1962100 - RNA, 19 nt, Artificial Sequence
  Description of Artificial Sequence: Synthetic oligonucleotide
gauccaagcugcugcuguc

SEQ ID NO: 1962101 - RNA, 19 nt, Artificial Sequence
  Description of Artificial Sequence: Synthetic oligonucleotide
uggcccaacuguccaugcc

SEQ ID NO: 1962102 - RNA, 19 nt, Artificial Sequence
  Description of Artificial Sequence: Synthetic oligonucleotide
auccgcaggccuugcagug

SEQ ID NO: 1962103 - RNA, 19 nt, Artificial Sequence
  Description of Artificial Sequence: Synthetic oligonucleotide
gcugcgggguuacauaggc

SEQ ID NO: 1962104 - RNA, 19 nt, Artificial Sequence
  Description of Artificial Sequence: Synthetic oligonucleotide
agagccagcugcccugacu

SEQ ID NO: 1962105 - RNA, 19 nt, Artificial Sequence
  Description of Artificial Sequence: Synthetic oligonucleotide
cucugugcaggacccgccc

SEQ ID NO: 1962106 - RNA, 19 nt, Artificial Sequence
  Description of Artificial Sequence: Synthetic oligonucleotide
gaagcccacgcgucccugc

SEQ ID NO: 1962107 - RNA, 19 nt, Artificial Sequence
  Description of Artificial Sequence: Synthetic oligonucleotide
ccacagguuaccagggcgg

SEQ ID NO: 1962108 - RNA, 19 nt, Artificial Sequence
  Description of Artificial Sequence: Synthetic oligonucleotide
gacugugcaccgaauggca

SEQ ID NO: 1962109 - RNA, 19 nt, Artificial Sequence
  Description of Artificial Sequence: Synthetic oligonucleotide
ucccguggcccaacugucc

SEQ ID NO: 1962110 - RNA, 19 nt, Artificial Sequence
  Description of Artificial Sequence: Synthetic oligonucleotide
ugacucauuccagccccag

SEQ ID NO: 1962111 - RNA, 19 nt, Artificial Sequence
  Description of Artificial Sequence: Synthetic oligonucleotide
gcuggauggcuaugaagag

SEQ ID NO: 1962112 - RNA, 19 nt, Artificial Sequence
  Description of Artificial Sequence: Synthetic oligonucleotide
ucacucggcaaaugucauc

SEQ ID NO: 1962113 - RNA, 19 nt, Artificial Sequence
  Description of Artificial Sequence: Synthetic oligonucleotide
cuugcacucacucggcaaa

SEQ ID NO: 1962114 - RNA, 19 nt, Artificial Sequence
  Description of Artificial Sequence: Synthetic oligonucleotide
cuguucgugucaccacagc

SEQ ID NO: 1962115 - RNA, 19 nt, Artificial Sequence
  Description of Artificial Sequence: Synthetic oligonucleotide
aagcccacgcgucccugca

SEQ ID NO: 1962116 - RNA, 19 nt, Artificial Sequence
  Description of Artificial Sequence: Synthetic oligonucleotide
gguccucugucccaguaac

SEQ ID NO: 1962117 - RNA, 19 nt, Artificial Sequence
  Description of Artificial Sequence: Synthetic oligonucleotide
agauccaguagagcuggga

SEQ ID NO: 1962118 - RNA, 19 nt, Artificial Sequence
  Description of Artificial Sequence: Synthetic oligonucleotide
gacccgcccuuguaugugc

SEQ ID NO: 1962119 - RNA, 19 nt, Artificial Sequence
  Description of Artificial Sequence: Synthetic oligonucleotide
cauucccagagcccagcac

SEQ ID NO: 1962120 - RNA, 19 nt, Artificial Sequence
  Description of Artificial Sequence: Synthetic oligonucleotide
ugcaccgaauggcacccau

SEQ ID NO: 1962121 - RNA, 19 nt, Artificial Sequence
  Description of Artificial Sequence: Synthetic oligonucleotide
ccccagauauaaauauccc

SEQ ID NO: 1962122 - RNA, 19 nt, Artificial Sequence
  Description of Artificial Sequence: Synthetic oligonucleotide
gcacccgaagcucuggggc

SEQ ID NO: 1962123 - RNA, 19 nt, Artificial Sequence
  Description of Artificial Sequence: Synthetic oligonucleotide
caguagagcugggaagggc

SEQ ID NO: 1962124 - RNA, 19 nt, Artificial Sequence
  Description of Artificial Sequence: Synthetic oligonucleotide
cuggccuugacugcaucug

SEQ ID NO: 1962125 - RNA, 19 nt, Artificial Sequence
  Description of Artificial Sequence: Synthetic oligonucleotide
ugaccaagcuguccauauu

SEQ ID NO: 1962126 - RNA, 19 nt, Artificial Sequence
  Description of Artificial Sequence: Synthetic oligonucleotide
gcuaugaagagggcaggag

SEQ ID NO: 1962127 - RNA, 19 nt, Artificial Sequence
  Description of Artificial Sequence: Synthetic oligonucleotide
cugugugucgggauccgca

SEQ ID NO: 1962128 - RNA, 19 nt, Artificial Sequence
  Description of Artificial Sequence: Synthetic oligonucleotide
ucggccuccacagguuacc

SEQ ID NO: 1962129 - RNA, 19 nt, Artificial Sequence
  Description of Artificial Sequence: Synthetic oligonucleotide
acacagugguucaggacug

SEQ ID NO: 1962130 - RNA, 19 nt, Artificial Sequence
  Description of Artificial Sequence: Synthetic oligonucleotide
cuuguaugugcagcaccac

SEQ ID NO: 1962131 - RNA, 19 nt, Artificial Sequence
  Description of Artificial Sequence: Synthetic oligonucleotide
ccaagcuguccauauuuac

SEQ ID NO: 1962132 - RNA, 19 nt, Artificial Sequence
  Description of Artificial Sequence: Synthetic oligonucleotide
ucaggacugugcaccgaau

SEQ ID NO: 1962133 - RNA, 19 nt, Artificial Sequence
  Description of Artificial Sequence: Synthetic oligonucleotide
uucuccuguucgugucacc

SEQ ID NO: 1962134 - RNA, 19 nt, Artificial Sequence
  Description of Artificial Sequence: Synthetic oligonucleotide
gacucauuccagccccaga

SEQ ID NO: 1962135 - RNA, 19 nt, Artificial Sequence
  Description of Artificial Sequence: Synthetic oligonucleotide
caggacccgcccuuguaug

SEQ ID NO: 1962136 - RNA, 19 nt, Artificial Sequence
  Description of Artificial Sequence: Synthetic oligonucleotide
aguuucacucacacacaca

SEQ ID NO: 1962137 - RNA, 19 nt, Artificial Sequence
  Description of Artificial Sequence: Synthetic oligonucleotide
uuccacacggcagggucga

SEQ ID NO: 1962138 - RNA, 19 nt, Artificial Sequence
  Description of Artificial Sequence: Synthetic oligonucleotide
cagcuugcacucacucggc

SEQ ID NO: 1962139 - RNA, 19 nt, Artificial Sequence
  Description of Artificial Sequence: Synthetic oligonucleotide
aggacccgcccuuguaugu

SEQ ID NO: 1962140 - RNA, 19 nt, Artificial Sequence
  Description of Artificial Sequence: Synthetic oligonucleotide
gacugcaucugagccugug

SEQ ID NO: 1962141 - RNA, 19 nt, Artificial Sequence
  Description of Artificial Sequence: Synthetic oligonucleotide
cagcuggcgcacccgaagc

SEQ ID NO: 1962142 - RNA, 19 nt, Artificial Sequence
  Description of Artificial Sequence: Synthetic oligonucleotide
gcauacacauagguauucc

SEQ ID NO: 1962143 - RNA, 19 nt, Artificial Sequence
  Description of Artificial Sequence: Synthetic oligonucleotide
cuccuguucgugucaccac

SEQ ID NO: 1962144 - RNA, 19 nt, Artificial Sequence
  Description of Artificial Sequence: Synthetic oligonucleotide
gggcuggauggcuaugaag

SEQ ID NO: 1962145 - RNA, 19 nt, Artificial Sequence
  Description of Artificial Sequence: Synthetic oligonucleotide
cacgcgucccugcagccac

SEQ ID NO: 1962146 - RNA, 19 nt, Artificial Sequence
  Description of Artificial Sequence: Synthetic oligonucleotide
ugugaccaagcuguccaua

SEQ ID NO: 1962147 - RNA, 19 nt, Artificial Sequence
  Description of Artificial Sequence: Synthetic oligonucleotide
cuguugcauacacauaggu

SEQ ID NO: 1962148 - RNA, 19 nt, Artificial Sequence
  Description of Artificial Sequence: Synthetic oligonucleotide
cagcugugugucgggaucc

SEQ ID NO: 1962149 - RNA, 19 nt, Artificial Sequence
  Description of Artificial Sequence: Synthetic oligonucleotide
agcuggcgcacccgaagcu

SEQ ID NO: 1962150 - RNA, 19 nt, Artificial Sequence
  Description of Artificial Sequence: Synthetic oligonucleotide
gugucaccacagcugugug

SEQ ID NO: 1962151 - RNA, 19 nt, Artificial Sequence
  Description of Artificial Sequence: Synthetic oligonucleotide
ucgugucaccacagcugug

SEQ ID NO: 1962152 - RNA, 19 nt, Artificial Sequence
  Description of Artificial Sequence: Synthetic oligonucleotide
gagggaaucuucauucaau

SEQ ID NO: 1962153 - RNA, 19 nt, Artificial Sequence
  Description of Artificial Sequence: Synthetic oligonucleotide
gccuugacugcaucugagc

SEQ ID NO: 1962154 - RNA, 19 nt, Artificial Sequence
  Description of Artificial Sequence: Synthetic oligonucleotide
gugugucgggauccgcagc

SEQ ID NO: 1962155 - RNA, 19 nt, Artificial Sequence
  Description of Artificial Sequence: Synthetic oligonucleotide
cagcccuuacuucgaguug

SEQ ID NO: 1962156 - RNA, 19 nt, Artificial Sequence
  Description of Artificial Sequence: Synthetic oligonucleotide
guggcccaacuguccaugc

SEQ ID NO: 1962157 - RNA, 19 nt, Artificial Sequence
  Description of Artificial Sequence: Synthetic oligonucleotide
ugccuccaccccaggagaa

SEQ ID NO: 1962158 - RNA, 19 nt, Artificial Sequence
  Description of Artificial Sequence: Synthetic oligonucleotide
uaccccagccccagguaua

SEQ ID NO: 1962159 - RNA, 19 nt, Artificial Sequence
  Description of Artificial Sequence: Synthetic oligonucleotide
cccaguaaccagguucugg

SEQ ID NO: 1962160 - RNA, 19 nt, Artificial Sequence
  Description of Artificial Sequence: Synthetic oligonucleotide
cucggccuccacagguuac

SEQ ID NO: 1962161 - RNA, 19 nt, Artificial Sequence
  Description of Artificial Sequence: Synthetic oligonucleotide
ccuguucgugucaccacag

SEQ ID NO: 1962162 - RNA, 19 nt, Artificial Sequence
  Description of Artificial Sequence: Synthetic oligonucleotide
gaagggcuggauggcuaug

SEQ ID NO: 1962163 - RNA, 19 nt, Artificial Sequence
  Description of Artificial Sequence: Synthetic oligonucleotide
uagguauuccaggguccac

SEQ ID NO: 1962164 - RNA, 19 nt, Artificial Sequence
  Description of Artificial Sequence: Synthetic oligonucleotide
gcccugacucauuccagcc

SEQ ID NO: 1962165 - RNA, 19 nt, Artificial Sequence
  Description of Artificial Sequence: Synthetic oligonucleotide
gggguuacauaggcacugg

SEQ ID NO: 1962166 - RNA, 19 nt, Artificial Sequence
  Description of Artificial Sequence: Synthetic oligonucleotide
agagcucuuuaugggcaga

SEQ ID NO: 1962167 - RNA, 19 nt, Artificial Sequence
  Description of Artificial Sequence: Synthetic oligonucleotide
ucacuggcacacagugguu

SEQ ID NO: 1962168 - RNA, 19 nt, Artificial Sequence
  Description of Artificial Sequence: Synthetic oligonucleotide
accccagccccagguauag

SEQ ID NO: 1962169 - RNA, 19 nt, Artificial Sequence
  Description of Artificial Sequence: Synthetic oligonucleotide
ccauccgcaggccuugcag

SEQ ID NO: 1962170 - RNA, 19 nt, Artificial Sequence
  Description of Artificial Sequence: Synthetic oligonucleotide
cucggcaaaugucaucacu

SEQ ID NO: 1962171 - RNA, 19 nt, Artificial Sequence
  Description of Artificial Sequence: Synthetic oligonucleotide
ccgcagcuggccuugacug

SEQ ID NO: 1962172 - RNA, 19 nt, Artificial Sequence
  Description of Artificial Sequence: Synthetic oligonucleotide
acagguuaccagggcggug

SEQ ID NO: 1962173 - RNA, 19 nt, Artificial Sequence
  Description of Artificial Sequence: Synthetic oligonucleotide
cagccccagauauaaauau

SEQ ID NO: 1962174 - RNA, 19 nt, Artificial Sequence
  Description of Artificial Sequence: Synthetic oligonucleotide
ccaacuguccaugccugcc
